United States Patent Application Publication US 2011/0014706 A2 - sequence listing, part 33

SEQ ID NO: 81248 - DNA, 455 bp, Arabidopsis thaliana landsberg
  unsure (1)..(455): unsure at all n locations
ggccaagtgcccggtacccgtcaacacggtgttgcccgcgcagctgccgttgttaccctattagctccagatcagcgtgccgtgcaggtgtgtactgtccggaaccttcaggctgaggctctcggtcgtttctccttcgtcgtccgggccgtccggatagctgccgctcagggcgccggacagtccgccggcgtcatccgccgaggacatcttcaggttgatcgtctcgccaaggtaggtcgcctggtagagcgtgtcgctgaccttcgagattgcatgcgtttccgtggtgtccggctcgtcctcgcagagacccgacggactgttggatgtcaacgtgcgattcatctggatgctgcacaggccgtcgaatttgcgcttgatgctgatggcgacngtggcgacgcgcgagtgaccgttctcgttgcgcgcgcggtaggtgaactggtccgtgc

SEQ ID NO: 81249 - DNA, 424 bp, Arabidopsis thaliana landsberg
  unsure (1)..(424): unsure at all n locations
tcaccggagacttacagctcgatttatctctattctaaggctgccggtcagaccaagtcggggcggagcggcctgtcgaatgcacttttgatacgcgcgaaanggaaccgcgcaatgaattggaagagctctcatcctttgcgcattgtggattgcgctgctattgccagcttgggcttgaccgctgtcattgctattttgagttttggaccgcagatggctttgtataacattctcagttcgctagagtcccgtggtaccgactcgttcaacccgttgcaaacctcgctctgggttcttgcactgggaggcttgatgttgcttcactctagctttgaagcgtggctgttctgggtcgtttgctcgaagctctttgtccccatctacgcagagctgtctgccgttgtttttgccaaatctatgc

SEQ ID NO: 81250 - DNA, 588 bp, Arabidopsis thaliana landsberg
ttattatgagtttcataaagattaaatagaatccaaatgattgattattatccttgagataacacacattatcgatttggtatgaggtgttccgtatggggaaaatgttttcacaagtctaataattacaaaattattgaaatacatgcaacataaaggtattaacaagacaaatattaattaagaatcacatgcatttcaaaattttcaatatgctttcttaactagtagatgcattttcaaacccgagttagtaccaagggactaaaggtatgattgcctaatagttacttcataataataactcacggctgtcacctttttatgccttctaattctagtttttttttttttaggtcatagatattctttttaaatcatcaatatggaacttcaaaaattaaaccgacagagaagaagccgagtaaatcatgttggatttgaatgtgcatcattgaatgctgtgtttgaaaagatttttttatttatttaaaaaacacagttttggtcttcacataaaaagtcaataatgggtggaataaatttaaaataaactgcaaaatgaaaaacttaaaatttacaaattag

SEQ ID NO: 81251 - DNA, 718 bp, Arabidopsis thaliana landsberg
cctggtatttatgtctgattaggcaagaaagtaaaagtgaaaggtcgtataacggcggctcgattgtgcatctgtaacttactttgagatcaaagatgatcgagttagagatccctgaaaagattcaactggcgaaatattagaagaggattacttgaggcgagatctgaagaaaccggtacgccacgagccgggggaaacggaccagaagcaaaaactagtggtttaagtaccgagataagaagaagagaaagattcattcaattcatattagaaaactctagcattgtacgctcattgagatttaaaaataccgcaccgagattaaccctttttgttcatataaaagtcccgttcaattcttaagtcttaatcatgtttgatttattcggagaacctacccctaatttccccttcacaaaatcattacaaatttttagttatgggatacggtattcacggctagtttggcggatactaagctaaatagtatcaaaaactaaaaaatatgttaaaacatagtatacatgtttaacaatgattagccactctttatttattttatgaagataagaattttaaaattggaattagaaaaacatttttgacttttttcccccataatattttagggcttttcagatttgggctttttaacccaaatttaatgaagaacccattccttggcttttagattgagcattttttttgggaaggg

SEQ ID NO: 81252 - DNA, 482 bp, Arabidopsis thaliana landsberg
  unsure (1)..(482): unsure at all n locations
gccagttcttggcnnnnnnnnnnnnnnnnnnnnnnnnnnnnnnnnnnnnnnnnnnnnnnnnnncggactgtgacgggcaacgttattgcggatgaacgtgaaacggtggccgggcgatcagcgcgcggcagggccagcggaggggctcgcgtcggcgagggcgccgggagccggcggggcgatgaggtgctcgcgcagaaagagcgccatcgcactttgcacgaaattgcgattcgggcggcgggtgaacccatggccttcgtcacgtgcgagaatgaaccagggctccgcgccgcggcggttgagcgcggcgacgagctgctccgcctcggtgaccgggacgcgcggatcgttggcgccgtgcgcgagcagcatgggttgcgtgagctgcggcacgtgggcgaggggggagatgcgcgcgaagaaggcgttgatcgccggatcgcgctcgtcgccgtattctttgcgccgcaggtcacggc

SEQ ID NO: 81253 - DNA, 229 bp, Arabidopsis thaliana landsberg
ggaacaaaagattccctttttatgaggaaaaggccccttttattttttctgatccaacgaccacgcacgggggatgggtgactattttgatcattcacaacacaacactttgttcgcgcggtggccaaaaacaacatgctctactggagagagaaaccatctgaccttggtcacacaagacacagggatcgaacatattcatatttaacgagcttccacaaaatggaga

SEQ ID NO: 81254 - DNA, 532 bp, Arabidopsis thaliana landsberg
aaattttctcgatccatgtttacctctactatttaaataaaccttggcgagccttctaagacagttcgctttactaactttgacccatctacaacacactaagatgatatatcaaaaggtatacgatctgattaagtaataatacatctctacaattttttttccaaaaatacttttaccattgctaatattgttttcgctttggcagcaaaatcgtacataatcacatctttgtggaaaatattcatcaaactacaaaaagtattatgaaatacaaactgacccactcgtgatgatcattgcatgtattatatgatattatatacaaagaggttttctcattgtttattttgtattatagatcaaatgtcatttatactacattgaattaaatcaacttatttgttttatttaagaactctttaacaatatctattgaaacttgaatggcaatattttaaatactctttctcttttcatataaaacattatagtaacttaatatgctatttctataggtcataattattaa

SEQ ID NO: 81255 - DNA, 576 bp, Arabidopsis thaliana landsberg
cagtagtccgtggctggcctcaaaccgccggtcttactgcctcagcttctcaagtgctggtaccacaggtgtggtagtgcacccacttccaaatctcatattgtcaaacacattttttttgtgtgtatggtccccaattttaatgtacaaagatattgcaatacaatgctttgctttaaaataacatttcccccctctctttcaaagctgctttaaggacagtgaagtgggttcaattagtgaaggcacttgctgcctaccctgacagtctgagttcagcccccagggcctccgtggtagaaggcaataatcttagaggttgtcctctgacctccacatgtggaccatggcatctgtgcacctatgcacatgcttacacacatggtaaataaattgtgttaaaaagaacccacttggggtgttttaggcacttgacacacacagtgtaagatgatgtatgtgctgcttcatggtcacggtaaacttgtgttgggattctggaaaagagactgcatttcccaatgagcacaggtgaaatgttaagtacaattcacgtttggttttggattactgaat

SEQ ID NO: 81256 - DNA, 448 bp, Arabidopsis thaliana landsberg
attataacgacaaattaatgcaaactaactatttacataaggataaatacattaaatggtgtgatgtatcttttatgagtactgctagcatcatattcttgttaataacacgtgaaaataacgcttatttttagaatgtttctttattagatatactcacaaattaaatatatatacaatacatttccttttctttcttatcatatacagtacatacgcgttaggacacatatatcacgtggcattcacctctaggttggtgtcactgacatatctcacatactgtaatcactgtggatatgctattattttaataaacggttcctagaaaaacacactttcaacttcatgatcattatgagggttccgtaattattttttcctaaagaacattatgatattgagacgctcttatttatctttatctttaaaaccaaaaggcacaatc

SEQ ID NO: 81257 - DNA, 585 bp, Arabidopsis thaliana landsberg
gaacttgttcctaatcaacatagacatcaagagatttgttgtcttttcactcacaaattattaaagtttttctcaaaattattatttatagaaaacgaccactgatcaacattaatatcatttttttattgcattattctaatgcctagcttattttacacacccaacaacaaatctatcaagtttctaattcccaaccttaaatgatgcgtattagtagaaaccaaaagaatgtgattaaatagtatgttttaatacctttgtctcctatgtttggttataaccacttgcaaatatatcttcctaaaacatttagtcacatgaactaagataaataataatgctgcttatgcttatggatgctttgtatatatctatatttaaatccccataatatatatttttacaaaaaataaaagagaaactagtcccattaaaagataaaaaagaaaaatttattgttgcaaaatatcacaattgaaaacagttatcggcgtgttttttttttaacaaaattcatttttggccctttctttcttttatctaatttgggtccccattttcctacggactttcaattacttt

SEQ ID NO: 81258 - DNA, 512 bp, Arabidopsis thaliana landsberg
aattgggctctccccaaacctcatctggcgaaagggtcgtgatttagcaatcacctttaaagagggccagtagatgacgaaacctgaagtggggacaagccttcccgttagaggcggcatctataatgggttagaaagtgaatttacaggagtataaaaatatttggcaattgtaggtgaccggggatgcgactctgataccgtgggtgacctttatcaactcacgaggacgcctctgggatgggaatgggttgcctcaggaatgcagaccgtaagagagtataaggcctggtgggaggagcagagactctaacgttgcgagttaactcttaactcaagaggtaccatacatgccgcttcctgaacagtacatgaaagtaatcgcctacgatttcggcactcctaaagtggtacactatagcaggtccgtgctttctggagtgtgtctcgaggttgtgctggatgatgggtcgacagtgcaacttgctgtgggtccgaatgggaatgttgat

SEQ ID NO: 81259 - DNA, 527 bp, Arabidopsis thaliana landsberg
agttctggacaatgggaagggcatgaatgcggaggccatcaacgcagcgctgaccatcggttaccagcgcaactacgaggacggcgacctcggccatttcggaatgggtctcaaggctgcgtcgttcggccactgcaacgtgctaaccgtttggtcgaacagccacgaagcgacacctgtcgggcgcagaatccgccgcgctgacttctccaaggatttcacctgtgaggtgctttccgcggatgcagccgccgatgtggaatcagagcgtcggaccatcctcggtgctgactgcggtaccacgatcgtctggactcacattcgcaatgtgtaccgcggcaagaacgctctcgaagctcgaacctggctatcgatcagagaggcagcgctgcgatctcatcttggcgtgacctttcatcgactgctcggcagcgggcggctacacctcgatgtccttgtcgacgaactcggtcaggctcttgcatcttcgggcgtgccggtattgccgatcgatccgttcgggtatg

SEQ ID NO: 81260 - DNA, 435 bp, Arabidopsis thaliana landsberg
ccctcttcgagatgtatgaaaacatcaccggagagaatgcctacgcgcgcccgatgcgcatctacccggcggtccactacacgatgggcgggctctgggtggactataatctcagcagcaacatccccggtctgcacgtcctcggcgaggccaacttctccgaccacggcgcgaaccgcctcggcgcctcggcgttgatgcagggtctcgcggacggctatttcgtcattccctacaccctcggcgaatacctcagcacgcagttcaacaaaaaggtcaacgccagccatccggcattcgaagacaccaagaagcaagtcgtcgatcgcgtgacgaagttcctgtcgatccagggcaaccgaagcgtggattccttccaccgcgagctcggtctcctgctttgggacaagtgcggcatggcgcgcgacaaggccc

SEQ ID NO: 81261 - DNA, 426 bp, Arabidopsis thaliana landsberg
agtggagagggacctctgtgcccaaacactcccgtgatgtccttctaccacgcaagaaagctggtcatgcgggcgaggatagcctccaatacacggcaggtgctcgtcaacacctgtcaggcagcacaccggcaaccgcacgtctcataacttttcatgtgctgagaccacgaactctgcgtagccagccccgactacgggcaccttgcaggcgacaggctccagatttagcagctaggagctaactccgaccattggcagacgcgtgactcacctcacctgttacatagccctacgaactacctttgatgcactagggctgcgtgagggcatgcatcagagccgctgaagtctgacctctgatataacccagtgaccgtccctgtgataggcgcggatacgcatatgaccaagactagggacccg

SEQ ID NO: 81262 - DNA, 408 bp, Arabidopsis thaliana landsberg
caaacaacacatagagaatttgctacacccagaaacagaaaccaaaccccacagggccagacacactcacagcggaacacgcaacaccacccaacaaccaaaggtagcacaacgaaccacacacaaacacacacacatgcaatgtccacgaccatacataaaacaaacaaaagaccctaataagacacaccatcactcacccacaccaaacacacacccacacaacacaataacccacaccaaccacacaccacagaactcccaagatacaacagcacagacatagaaacagagcaccagcaccaaacgcaacacctacgagcagacagcatcacctaggaaaacgaacccaatcaatccgaaccctaaacactacgcgatgaacgagtcaccaaacttaaacaatac

SEQ ID NO: 81263 - DNA, 492 bp, Arabidopsis thaliana landsberg
tgctaaggaatgtgacactacatgaacacacaagaagtgaaaattttttatactgctaattcctgacaaactcccagggagtctttcataaatctgataaaataattttgactagttagccattcttaacatctcgaggaaaggattgacatattgaaaatgatcaattgactgaacaacacccacaatcgtacaatatagctttatatatggtgtgcatcacactattatggattatccattcggaatctgtaatttaaaaacatttactctatagtaaattggttataaatatacagaaccctttatatactacaacatacaaaacgaaactttattgtgcacatgacaaaagttaactataacgttacacgttacatacttgagcattatcaacacctttgatccaaaagatgcttgcattttgaccatatagatggaccaatgaattattttaaatctcaccgtatgcaccaccatctatctgaaatc

SEQ ID NO: 81264 - DNA, 467 bp, Arabidopsis thaliana landsberg
tacgtttgtagaaatgcccccgcatggcctgtatcaggcctgccgtatcctgctggctgggcctgctaatctgtatagcagaacacctttaatctgtggctgcaaaggcctcagggcctgtaaataacctggcagcgaaggagtcgtcacgatttcctggcaaacacgccgacgcaatatcgcagtctgtacccaggtccggcataagctgcaacaggttttcaggcgttgcagatgcaaggcgagcggcaggtggctgtcattgatagccagcatttccgcatcgctgcctgcgtccagtttgaaccagacttcgccgcccagttcctgtaactgccggatggcgtgctgtacatgtgcatgctggcactggctgccattggtgatcagccgtacatgccgtggcttatcctccggctggtgatgagatagtacttcgggtaccgacagcatggcttcggcaaact

SEQ ID NO: 81265 - DNA, 551 bp, Arabidopsis thaliana landsberg
cttacataattagtttaactacagacaaatttatgattatgttatttggttcattgtgaccaaaaaggagcaaaggttgtaaacacttttttttttttaagtttttgaatttaatagaaaaatattttaacatttaagatgaatgagtcatacgctaaatatatgccaaaatatttacacgaataaccaatttaaaatgaaatacaatattggtatctcaatcgatacaccaaactaattaaccaccgaaaaggatttttctttaaaatcacgagttaatacaaatgccggtggaagattaaagaatccctataacgtacgagacaaaatcttaaaattccttatgaacccaaaagattcaacaaattgttatttaatgatcttaccatttatcagatcaatctacgttttatttcagtgaaatataagaaaactagaaagaaagaatagataagacaaaaaaaaggtagccaataaaatcaacgtaaaagaagttgacctttttttttttttttttttttgagcaaatacagaagttgacctaaaaatgc

SEQ ID NO: 81266 - DNA, 568 bp, Arabidopsis thaliana landsberg
gcgaaaacttccaaataaacggcacgatgaccacacagtcaaatggtatgacaaacacctttgatatatcagcccaggccaatcaggcaagggcgcagattgacctcgactataaaggaaaagctggcacaactccactcacagtcagcggtagcgtgattgtcaaaaacaaaggtaatacatatttcaagattgacaacgttcgcaaactcatcaatcaattctcgagtggtatggtattgccgccaagtatcgatacaatcgtgaacgagatcgatggcaaatgggttgtaatctcaaacgacgagctgaacagcacgagcgccgagacaaaacaagcaaaagaatgcttcacgaaccttgagtcaaaaatggccaaagacagctcttacggtgatgagcttgccgacgcttacaaagacaatacattcatcgtcgtcagtaaaaagcttggcacaaaagacggcaacattggttatcaggtgacagcaaacaaagatacgtttattggcgtccttgacgctgtcgagaaaacgaaactctacaaagaatcttagatgtgagaaaa

SEQ ID NO: 81267 - DNA, 571 bp, Arabidopsis thaliana landsberg
  unsure (1)..(571): unsure at all n locations
caaatatgttcctacacttgcaattgattctcctaagttatagtttcaagaaaagatacgatagaaaaataaaggcatattactgtcagaacgcaaaagcagaaaacaagtattccaactatttctcagctctctcttctgatgccaaagtgaattatctggtattaaaactcatcagtatttgcatatcccaccactctccttgtcccattataccaatatatatcctctatagctaaaagttccagaaaattgatacatttgcaatttggtttaaacgggtgatcaattaccttgaggttctatagtattgttttatatattaatatatttatttacgggtatatcaaatacagtatatatagatacacataatagaatatcaatattttatttatctttatatgaatacaaatttacacaatgttttatttaccaagttaaattttcattcttatccatctacgaaaattntactttctgtaacatttgaaatatacccgagatcattacactctttttcgatgaactgactaattgacacgtttagtcgaaaaacgatcattttgat

SEQ ID NO: 81268 - DNA, 357 bp, Arabidopsis thaliana landsberg
ccggataatttggtcgctaaaatctttgttttttagtgaattgcatgtgcttagtttatcttgagaatttggaggatgtctgaaaatgtagaatggtaataagaaaatagtaagcatgtgatctcgatcggaatagaacatcacatatttgattatattattaactatagaagaagagctgatgaagaccatcactgcgtgcgtaccctaacaaacgtatttttaattctttttccgatacgactaaccaacgtatcttcttctctctattaaataatattatcaaaatatctttttttaaattaatttgctcaatcttcaagactgcaataattttttaactttacaacaaaggcc

SEQ ID NO: 81269 - DNA, 514 bp, Arabidopsis thaliana landsberg
  unsure (1)..(514): unsure at all n locations
cgccgacctttcaggacgtctaccagaacgcgatgcagccgtttactgtaggacagatcaccaccgaggaagggctgacgcgggccgaaagcccggtgaagaaattcatggcggcccatgtgcgcgccgaggatctcggactgttcgnnnnnnnnnnnnnnnnnnnnnnnnnnnnnaccgtcgatggcgcgccgcttcaggcgctggttcccgccttcatgctgtcggagctgaagcgcgccttcgagatcggcttcctgatcttcgtgcctttcctcgtcatcgacatggcgatcgcctcgatcctgatgtcgatgggcatgatgatgctgccccctgtcgtgatctcgctgcccttcaagctgatcttcttcgtgctggtggacggctggcggctcgtcgcgggctcgctcgtcgcgagctacggggccgggataacgcagtagcgattaacaggtgggggcgcgatagcccgcgcctacctctatttgttttcgcgttttggccccctccc

SEQ ID NO: 81270 - DNA, 607 bp, Arabidopsis thaliana landsberg
acacagtcacaaagcattttccaattgaaaaattgatgatcgaatttcataaatttatataccctttgagattccggagttagttgtatgagcctcttaacaacgcgaaaggcaatgctcctcaatggtaatagaatcaggacctggaattacaatacacgtaagaccgactgtcaaactcaaatgcgagcaacaacatatttaaacacataaaatatttgcagaagaaaagcagaaggggtcacctttggacgagtaaatccttggtccagaaatccatcatcagaaagaatttcttcttcggaggtctctcgatgcttggcgattttactttcattcttcttcactagatctctagttttaaagatgtgattcaactgcataagacaaacggacttcaataaatcctgaagatatgcggagtctaatgaaaaactcataaattgtcttagaaaaaggaatacaagtgtgtacacacagaatgcataaggtacgcatccatggcacttgagtcttcgtcagagccacaatggtaaaagggtttctgttagaatgcaatatattcagatagctgttgcctgcagtatcaaaatacaatgatcaacac

SEQ ID NO: 81271 - DNA, 603 bp, Arabidopsis thaliana landsberg
cggacgccgctgaccacgcgcgtcccgcgccgccacacgcagtcgatcaggctgcggtttccggcgaagatccaggcatcgaggatcgcgtggtcgcggtgcacggcgagcgccgcgtccatggcgtcgagactgacgaggtcgagcggcgcgccgatgcgcagcgcggcgctgccgacgccgagcgcatgggcgccgccggccagtgcggcgtcgaacaggctgcggccggtcgaagtgccgggtgcggcgagacggttgcgcgcccgctgctgcaaacgctggccgtattcgagcgtgcgcagctcctcggcggcgtcgatgcgcacgttcgagtcagagccgatgccccagcgaccgccgagcgcgcgatggcgcaccgccggaaagatgccgtcgccgagattggcttcggtgatcggacacaggccgatgacggcgccgctggcggcgatgcgcgccagctcgtgttcgtcgacatgcgtggcgtgcaccaggcaccagcgcgcatcgacgtcggcatgatcgtgcagccaggccaccggtcgctgaccgctccacgccaggcaggcgtcgacttcgcgttgctgctcgggatgtgca

SEQ ID NO: 81272 - DNA, 505 bp, Arabidopsis thaliana landsberg
cggcgacgttgcagatcggcttgatgcgatacagctgccgcactagcattgtgtacggcacgtggtcttccaggcgcgggttgtatctgttgcgcggcaggccgatgcgctggccggcgatgtcgccgacggtggcattgcgcgtgtcatcgatgtccttgagctggaagaacggcaggatgtccttgaggcgcgagttccacgacaggcgcccccgctgcaccagcaggccggtcatggcggtggcgaaagccttggacagggaagccaggcgaaacaccgtgtagggttcgacgtgcgcgccggtggcggcatcggcgtagcccatggtgcgttcgtagcgaacatgcccgtcaaccacgacagccgtggccagacccacgacgtcgttgcgtcgtttgacctggttgagccaaccgttgtaggcgtggatggccgccttgatgcgctggttcgaagccggttgcgaggtgtcggcaagggtggtctggcgggaagcggatcg

SEQ ID NO: 81273 - DNA, 526 bp, Arabidopsis thaliana landsberg
  unsure (1)..(526): unsure at all n locations
gtgggccttagctgnnnnnnnnnnnnnnnnnnnnnnnnnnctgtggtgttggatgcggccgtgagctcttaggcaggggacatgcgctcgtccgaggttgctgccgaggggagcaatttcctggcgaagtttttgggcaaaatgattacaccccgcctttcaacacaactaacgcaggctacccaggcagcgctgggctaccaaagcaaatggggctctgtcaagttacagtacaagcgcatcgaccctaattttcagacgatgggtgcgtactatttccagagtgatattcagagctacaccgtggctcccacactcaaccttttgaaagggaaagcacgaattgcgggaagctatggaattcagtatgataatctggccaaaaacaaaaacgtccgcaccgggcgtacgattggctcgctgatggtatcgctcaaccctcagccggagttcggtgttgacatatcgctgtccacctacggttagaatcaaaaggcgggtatcaggccgttgatagacacattgc

SEQ ID NO: 81274 - DNA, 499 bp, Arabidopsis thaliana landsberg
  unsure (1)..(499): unsure at all n locations
ttgcgtaaggaatcaactcaatcttttcattttataaggagacgacnggctaanggagagacacatgaaccgttttatacctaacatacacactcccgattaggaataacagaaattcatacaatttagtcacagtgatataaaacaaattaaaaaattaacttcgtgagaacgaaataaaaatatattaaccctgaaaccaaataatctcagttaatgacaaatgtcatatttgcaactcacttccactaagtttaatagatatgctaaacccacaaaataaactcaaagtcctcaaaatagacggcatatactctacttagctaacctcgactcacgggcaaagctttctgaattctctttatttaaagcattcaatttttatgctcaggaatgctagtgaagaaaacatatgtgaaccatgtcatatcataatatcttaataaaatcacaaacactaaacaaggacaatgtaactttcttatattaaaacaaaaca

SEQ ID NO: 81275 - DNA, 528 bp, Arabidopsis thaliana landsberg
cggctgatgagcaaaggccgtagcgccaaggcagaacaggtgatcattgtggaatatggcaatgacttttccctgcgcaacgtgcacctttcagggcaccgagcaccccacccagcacaaagtgaacatctggagcctgctgtatgccggttacggcaagcgcatgctgttcgtcatcgtgttctggacctgctgcatcatcccgctgttctcggtctatgcgtctgcgcccaaggtgctggcggcgctgaatgtgaaaggtgacagcgcctcgatcggttcggtactgatcactctgtttttcgtggtcggctgcatggtcgccacccgcctgaatcaacgtcatcggccgccgcaacctgttgctctacagcttcctggtgttggggctggccttgctgtgcctgggcgcgtttcatagcaacgcgggtatctggatcctggtgttcttcgccctgtatgcgttgttcattggtggtgcgcaagtgctgactctggtctacccaaacgatatctttcccacggaaa

SEQ ID NO: 81276 - DNA, 446 bp, Arabidopsis thaliana landsberg
  unsure (1)..(446): unsure at all n locations
gagccggattgtgcggcttcccctgaataagttgggacttatcaaccgcatcagcaaancataccgacagctggtagcattttatatgagcgtgagcccaccccccaagaactggccgatatgctggagataggtattgaagagatcaccgccaccatgagtgtggggttcaggcatgtgagcatggatacccctatctcggaaggagaagacggcaccctgctcgatatgatggaaaaccccaatgccgacagnnnnnnnnnnnnnnnnnnnnnnnnngaatcgttacggatngaaataaaacgcagtctaaaaacgcttaccgagcggcagaaagaagtgatctgttatctcttcggcatcggagtagaccatccccttagccttgaagatatcggcgagcgttttcaccttacccgtgaacgcgtgcgccagataaaaaacaa

SEQ ID NO: 81277 - DNA, 297 bp, Arabidopsis thaliana landsberg
aacgagaacaacaaagaagccccgatactaccgaagccaccgcgccaacgaaacagggagagacaggaccaagaagcgagaaggaccccacgaagggcccgcccacgaccgagaagcccagggaaggagcccggagaagaaacggccacccagagaaacggacgcaacacagacggcccagcagaaaaggaacaaagcggagcacagaacgagcaagcaaggacccgggaaaagccacgaacacagaaggcggcaaaagaacacggagaggacccccaacaagaccggcaaaaaaac

SEQ ID NO: 81278 - DNA, 546 bp, Arabidopsis thaliana landsberg
ggtggccggcagtcaggacgaataggtcacgcgcggtttacattttcgtgatgtttgtgtcggatcgcctgagtgagtgggcgatggaaccaggcacgacctttccatccaaccaatttccggctgcctgggccggctttgaaacccatcatggatactgttgtgaacattgaaggcaagcgcgtcatcatcacgggcggatcgagcggcatcggcctcgcacttgcgagagccttcctcgccaagggtgcgaaagttgtcatcagtggccggcggcccgatgcccttgcgaaagctgtcgaagcacttcgtcgcaccagcccgtccgtctggagcgttgccgctgacgtggcaacgcatgatggccgcacagccacgctcgagcaggccctgcatgcgctcggtggactcgacatcctggtgaacaacgccggaggcgtcagagccgggcgccttgagaacacgcccgaagccgaactgcaggccatgatcgacaccaaccttgtcgcaccgatcatgttgatccgtgccactttgcctgttcta

SEQ ID NO: 81279 - DNA, 322 bp, Arabidopsis thaliana landsberg
  unsure (1)..(322): unsure at all n locations
aaaactaaccaaggaccacctcaaggcaaccaaatttaaattttataaaccgaacaagcacgcacgggcccnaggaggatgtactataaaaccaaagaccgcgccaacnnnnnnnnnnnnnnnnnnnnnnnnnnnnnnnnnnnnnnnnnnnnnnnnnnnnnnnnnnnnnnnnnnnnnnnnnnnnnnnnnnnnnnnnnnnnnnnnnnnnnnnnnnnnnnnnnnnnnnnnnnnnnnnnnnnnnnnnnnnnnnnnnnnnnnnnnnnnnnnnnnnnnnnnnnnnnnnnnnnnnnnnnnnnnnnnnnnnnnnnnnnnnnnnnnnnnn

SEQ ID NO: 81280 - DNA, 553 bp, Arabidopsis thaliana landsberg
ttatatggccgcgatggtgcagtcgcggtggaggcgtggaggacgatgcgctgctgttctcgctctcactcgcggtggacgagctcggagaggcctcgcgcttgatgtgcgtgtgcgcgtgcgtggacgtgtgcgcacgtggtgggtgtgtgtgatgcgtatgttcgggcacgggaacgggctctgacttgacctcgacctcatgcgtgtgtgcgtacttgtgctcgggtgtgcgcgggcgtttgtgcgtgggctcgctctcgggctcgctctcgggctccgcggtgcgctcccgcttgggcgccttcgctggcttctggctcttggtctccttcttgggcgcggacttcttcttcttcttcttgggcgcggcgttcgctttggctttggcctgtggcttggtcggcgttgcgcgctgcgttatcgcgcggctgcgcggaggcgggctgtggcgcgcggcagcgttggctcgggcagacatacgcctgggcggctcggtgtcgctcggtttgtctctgccctttggtgctgcatgggtcttcacaaagtcgtc

SEQ ID NO: 81281 - DNA, 511 bp, Arabidopsis thaliana landsberg
taatgaaagtctatcagagaatcgatgggcctagcccagtccaataggtgattcacgtctcactttttttgcagcttcacaaaaatggtaagttggtaacttactatttcgagcgaaaataactcagtaataacttccagattcgtcagatttctcttaccttgtaatgaagcttagatgttttagctttatgtataaaaatttaagaatatggtctaattttatataattttcttattatcattttgtatttgatatcatattgacaaaatttaacaaatagatattagttgtacttctatgtgaccgccactttattcaatactaccttttaagttttaacagatccgtgtagcaactgatcatctcaaaatatgtgacacatagtatactatacaatgtgaggctggcttgtttttgattttatatcgaaagatattttactttatctgacagctgcgagagatcctaaaaaaaatgaattaaatttaaagaaattgcatgcgtctac

SEQ ID NO: 81282 - DNA, 549 bp, Arabidopsis thaliana landsberg
  unsure (1)..(549): unsure at all n locations
aggcggtctgtaccgccaccttggtgttttccatgtcgtacggtttcatgtagttttccagggtggccaggaactcgtcgatggcaggcgggttttccgccaggctgatgaagatgtagccgccggcgaccttcacgttcacaggcttcaggccatactggttcatgtcgaagtcggcacccatttcggtaccggcgaacagcaggcggccgtccagctcgtaggtccactggtggtacgggcagaccagcttggccaccttgcccttgtcgctgacgcacaggcgcgaaccgcggtggcggcagacgttgtggaaggcgtgcaccttaccttcggcgccacgcaccacgatgatcgggttcttgccgatctgcaaggtgatgtanttgcccttggccgggatctcgcaggtcatgccggcgatcagccattccttgtggaagatctcctgcatgtcgatctggaacagacgctcgtcggtgtagaaaggctggggcagcgagtangtgcgctcgcgggtctgcagcatcttcgcggtggccttgcgtg

SEQ ID NO: 81283 - DNA, 594 bp, Arabidopsis thaliana landsberg
taagagatctttgattaaacgggttttagacactatgatgaatttaagccctttgattaagtcatgatccttggggtttagtcttttagactaatcagtaatcactgttattactctattactgttattgaatctttcttatgatttatcttgtagataatgtatatattattgcatttgactatacaaaatggatacagaatttaatccctctttaatcgtttttctcccgctaaaagagatatataacatttttagattacaagcgaaagcacaagtgaaggaaagattttaaaattacaagtgaattatgaaacacattctaagcaaccaagtgaattaaggggtgatgaacctattaattgaaatggggtatctaactaaatatatgtatataccatatggtcttaaaaactatatcaacgtatagtttataaatatatattcttttgagtggcgaggtcccagacatctcatatgagagtgttacaatagaaatgtacattgttaattatataactatattatgctttttgacttttaatattattataactaatgaatatatattcatgattttgattatttttcccc

SEQ ID NO: 81284 - DNA, 464 bp, Arabidopsis thaliana landsberg
acctgcaattccaggctgcgcggcggcaggttttaggcctgtatttaggttgtgaccacccgggcagtttggtgtggtgcatttgcacggtcgacaggttgaccgccatactcagttcgcagaagcccaggtcgtgccattcacgcagttgtcggcacgcctggtcgagtacccattcgccgatggcgatgatgctgccgttctgttcggccaggggaatgaactggttcggcggaaccatgcccagctccgggtgctgccagcgcaacagggccttgacaccgaccacgcgctggtcccgatagctgacttggggctgatagaccaaataaagctgcttgcgtggcagcgcttcgcgcaagtctttctccatctcgcggcgtcaacgcatttcgctgtcgacgcttgcgatataaaactgatagcggatactcgagcgggccttggccagggtcatggtctgc

SEQ ID NO: 81285 - DNA, 472 bp, Arabidopsis thaliana landsberg
ccgggcgaccgtggtcctggcacttcagtgcaggacgccagtggacgcctgtgtcgccagccttcatcgcggacaacgccgacatggaaatgggcgccgcattggccggaattgcgtttgctcaattggcggactacatggcggccccgtatatcgccaatggaaaactggtgcgggttctgcataaggaagagccgccggcttggggcttgtatgtctatcggcctcagcgcgcccctgtgtcatcgagagtccgggccgtgttcgatgaattgcagacagcgattgggtccgtgccggctttgccttagcaggctgttgagaaactccctgcgagatccgttgtcatagacgacctctattgaccgcgcaccgaaagcgaatgcgcagccccgatcagcagcagcttggcatgttctcctacgtttcgggggaacagcggtgttcctgccgaccatccaatccgcaagct

SEQ ID NO: 81286 - DNA, 455 bp, Arabidopsis thaliana landsberg
gtggacgagtatcttggtcagcacgtttccgagtctttccggcgtcaccgcgatccggtatgctgtcagaatgagcccggccacaaacagggcgacacccgcggtcgccgagccgatgagatcgaacatgctctggatctccgttggcacgcgcacatccaacagcacgagaatcgtcgccagcaacggtgcccacacgaacggccgcttgaagctgtacaaaatgctccggccgagcagcgtccagacgcgcagcgtcgctgcaccggcagcgcgctgacgatcgtattcgagcatcgttaccgtcagcggaacgatcatgatattgaacatcagcgctgcgaccgcaatcgtgaggagcgcggactctcaaaaagcggcgtaaggatcgggatgccaacgaacgatgcatttgaatatgtcacgctgccggattgaatcgctgcagcgccgag

SEQ ID NO: 81287 - DNA, 286 bp, Arabidopsis thaliana landsberg
gccggctgacgcatcggtatgccggtattggaccgaagccccacgcgtgggtggaattgggagcgtgtgaccggtcaggaagacccggcccttgccgcatcgacggaatgcgaccggcaaatccacatacggggtgaacactaaaaatatgtcattgccaggccctgcgcctgcctgtagaactgagctcgtaggtcacaatcgtcgagaacagagtgcccagcgcccttgttgttcgaggaggaacgcgctgaacctgctgttaataagaaactggtgcacgcca

SEQ ID NO: 81288 - DNA, 381 bp, Arabidopsis thaliana landsberg
gactatgatttacttctcaactgtgatccttctttcattcttttgaagcgttttacagaggcgaaggacattaaatgtgtgggtgaggatgatgtcccaaatacatcggaggattacatccataggatagctcgaacccgtcggtcaggagctaaaggaatgggctttacattctttacacatgacaacgttaaccatgcgagagagcttgggaatactccttaagaaactgtgcaaggcgcacctcctactctcttcggactagtccgattatctggttctggttatggaggtgaaaactcattcctcttttctcataagatgaggtcaatcaatcttgctaaatgttggagccaggatcagatttaactttgtcgattt

SEQ ID NO: 81289 - DNA, 451 bp, Arabidopsis thaliana landsberg
gtaggacaatacccggggcgcggcagatcttttcaaaaccgttacaatgacacgaaccatactgacactcatcgcggcaggactgctgtgggccggatgccaggctccagggacacgcccggcctcgacatcaccggtcgccggacccgcggaactcccatcctttcccgacgacaccttcaatatcgcggcctacggcgccactggtgacggcgtgacactcaatacatcccagatcaataaagcaatccaggcatgccatgatcatggcggcggtgtcgtgctgatccccgacgggttatggcttaccggtccgatcgtgctggagagcaacgtgaacctccacgtcacccggggcgcactgctccagtttaccagcgacttcagtcaatacccgctggtcgcaagcaattacgaaggacgcaaggcctttcgctggcagagtcccatc

SEQ ID NO: 81290 - DNA, 426 bp, Arabidopsis thaliana landsberg
aaccgtcgtataaccggcttccgccagcagcgccttggccttttccggatcgtaggccggcggcggcagttcctcgacatagccgcccattccttgcgggacttcctggccagccgcctcgcccgagccgcgcaggatgcggtcgatgatgaggtcgcggtcgatcatcatcgacatggcggtgcgcacgcgcgcgtccttcaaaggattcttgtccatcggcttgccgttgacgtcggtgacgaacgggctgttgtcgcggtcggaatcgatggcgaggtagatgaggcgcgacgaggcgatggagaagaccttgagcccgtcggttcccttgatggtctcgaggtcgctcggcggcaccgcatcgatgagatcgacagcgcccgaacgcagcgccgcaacgcgggcggaccattggcgatgaac

SEQ ID NO: 81291 - DNA, 522 bp, Arabidopsis thaliana landsberg
  unsure (1)..(522): unsure at all n locations
ctcgtagctcactggaccgggcaccgaaccggcactttccgggccgacctgcagcaaaccgccgcgatcgacccatgcgatggagccgccgccggcgccgatggtggtgatctcgatcatcggcgtacggatgaccatgccaaagtcgatcgtagtctgcgccgccaacgacggcttgccgccggcgaccagagacacgtcgaacgaggtgccgccgagatcgccggtgatgatgttgtcgtggccggcggcgcgggcaatcgccgccgcggcgatgacgcccgccgcgggacccgacaacgcggtgcgcaccggcaggcggcgcgctgtcttggtcgacatcacgccgccattcgactgcacgatgtggaaaggcgcccttgaaggccgttgcgtcgagcgcctgctccagccgcgccagataagcggcgacgccgggctgcagataggcgttgagtnnnnnnnnnnnnnnnnnnnnnnnnnnnnnaatctccggcagcacctggtgcgaggcctagacat

SEQ ID NO: 81292 - DNA, 359 bp, Arabidopsis thaliana landsberg
gtttatgatgtagcatggggtactctttcctgcaattttgagattgcttctggaatttctctgtttcgaaaattttgctattaggctgcttgattttgatctactaattggttagaagcagtcatcaaactgttttttggcttggaattaattaggaacaagggatcgaaagaagaagttgagaaaaaatgtcctgtatgccgtgggtcatgtaggtgcaaagtttgctcagtcactaattctggagtcactgaatgtaaggtctgactatcttaagaattcattggcattaaacttttacatggtttttccattcttcagatattctggaacatgaacttgtttacttttataatatg

SEQ ID NO: 81293 - DNA, 347 bp, Arabidopsis thaliana landsberg
  unsure (1)..(347): unsure at all n locations
cgtgtatttgaaaaagttaacaaccgtgtttatttttgtaaaccgtcatttgacatcttcgcaatgatacctctattgttttttgcaataccaagaaaaccaaaccgctttggagagcgagagcaatactttgtaaggacccacaatctcttgaacctccccttccttctcttatccagtggcccctctttatcgggatggtttgcccacgttcgatgccatgcttggcacttatggattgatacctttgcagtgacccatggatagagtcttacattggccacagtcaactgttctttactttggacccttaggcagtannnnnnnnnnnnnnnnntccctagtat

SEQ ID NO: 81294 - DNA, 388 bp, Arabidopsis thaliana landsberg
acttgggtagccatcacctgactgacatcttttttttttttttgacaattgtggtctattgtaacttttacagtgatagtaatggaggagagcgtgcaattagggtttggaggctggtctctacaaatgagcatcttaattcatggcaactctcatggaacgtcaatacaaagggtgaggttgattatttccaagtggtcatgcatcctataaactttgatgaattatttacctgtgaagttggaacaagaacgccctcgtcttgtttaatttgaggacacaagaagagcaagtctatggatggttgcatcttgacattcaacaattgtaaagagtacatggatgcgatttaccatgtatgacttttcttaccatgtcttttttacac

SEQ ID NO: 81295 - DNA, 428 bp, Arabidopsis thaliana landsberg
agaggatgctgaatatagaaagcagagaaagaatctcgacaatgatagtaactattcgaatgtgaatctgaaagagactgattcagcggagacagacgaagatctcattttgtttctattctcaggtatggtctgatccgagcaggacttcacttgaatttcaatggcgctttgtttccttattggatttgggattttactttatgtcttgaatttgaattcgaatcatgggtcttcgaggattcgtccttattgggcgtgaatcagttttcttagtgattgggttttcaaatttccatgatcggaatcagatctagcaatgtgtttgattctgtgatttgtgttgggtttctattattgtgatgttgggttaagtgggttaaattgaatccgggtatggacactgcttttatgtttttactgatgat

SEQ ID NO: 81296 - DNA, 404 bp, Arabidopsis thaliana landsberg
tgctgctcgacacccagtacgtgaccgagcatctgcgcagcttcggtgccgtggaggtgtcgcgtgagcgctatcgcgtcctgctcgacaatgcgattggcgtcgaggcggatttcctgacattgccgccctcgatcagcggcgcggatgcgctcgcgatcctcgcctgcgcgtgatcgcactactcagatcgtcattgaccttatcgaaaaccgggaggtggcgctggcgcacgcggccgtggcggctgctgcgctgactgcctctgctggggctggcgcttctggtgctggggagccggtgccggtttcgccggctgctcggtcgttgcgatggtcgattgcggtttctttgcagccgtcagccagatgtcatacatcgggtgctcgacgccatgaaggccg

SEQ ID NO: 81297 - DNA, 429 bp, Arabidopsis thaliana landsberg
  unsure (1)..(429): unsure at all n locations
actactttttgnnnnnnnnnnnnnnnnnntactcaaaggtcgatactaatgttcgggcctcttctcctttggtggtcattctttgtttgacctgtttaggtgtgataggtagttgctgctcaatcacccagtgatacgcttttaaggcggctgctttgagtatatcgagccgcctgttcatttctttagcctcattggttgcgccccgtattgagccggattttgcgttccatgacttggctaatagttgtagccctgtagctacctctgtttttgcgccgcctatagtgatacgcatataaagcggtgcaagtcctttttgattggctttcgacctgtaaagccagaatagtaaacggatattcgtttccatgacaaaaacatttcttggttattattggtggttagcgagtgaaagtggaatgatat

SEQ ID NO: 81298 - DNA, 372 bp, Arabidopsis thaliana landsberg
ggcgggcgaacgcttcacctccatgccccatttcccgggcgagacccccgccgacggacgctggttcgaactcgcctttagtccgctgcacgacgccgaaggacgggtcgtcggcgcctaccagttcgcccatgacgtcaccgtccgcgtgcgcgagcaggagcggctggccgaggccgaggcccagctccgccaggtccagaagatggaggccatgggtcagctcacgggcggggtggcgcacgacttcaacaacctgctcacacccatcatcggcgccctcgacctgctgcggcggtcgggcgccggcggcgagcgggagcagcggctggtggcgggcgcccttgcagtcggcgaccgcgcccgcaccct

SEQ ID NO: 81299 - DNA, 461 bp, Arabidopsis thaliana landsberg
ccctcaccgacctgcgggtgcttgcgctcggccgccaacgccatggcccgctcggcgacaagattgatcaggcgcggcacgccgtggctggcgcgctgcagatcacgcaatgccaaacgactgaagggaacctgcgtggcaccagccacctgcaggcgatgacgcacgtaggcttcgctttcgtcggcgtcgagatgcgccagttcgtggcgcgccgtgatgcgttgcgccaacggttgcaagaccggcgcgcgcaaccgcgttcccagccttggcgtggccagcagcaacacctgcatcagttgatgcaccggcgtttccaggttggtcaaaaggcgcaagtggtccagcgactcgtccggcagattctgcgcctcgtgcacgaacagcagcacgcgctggccctgggcgtatatgtccatcaggaacgcgctcaacgcgttgaccatatcacgcccgct

SEQ ID NO: 81300 - DNA, 485 bp, Arabidopsis thaliana landsberg
aggtgaaaccaactctgatgagggacatggatcttggatactctaatgcataccctgcagcagaagcaatgaacatgcagattggaggaagagtggataatatgatggtgaatgagagaggttttcatggtcagatgatgaatgagagaggcttccatggtcagatgatgaatggtccatctcttgttcctcagtctatgaatcatgaacagttcagctcaaggccagttcagtctatgaatcaacagttcagctcaagaccagctcatggcttttactactgattgaagaagttagtggttgaagttagctttaactagatatgtgtcttttcaccacttgggcttatttcaagcatagtagtatggcctttttcaaatgttggcttagagtgttaaagaactctgttactacattagttaaaatctattccctttgcataactcccttattgcaatccccactgttttggcccatgagtttca

SEQ ID NO: 81301 - DNA, 458 bp, Arabidopsis thaliana landsberg
  unsure (1)..(458): unsure at all n locations
ccaaaagctggccttttcttgcacatggcatgagctggaccccggcaacgggcgatgcggcaagtgtcaatctgagcgataccgcagaagaggtgaatttactggtcgttgaacccggtgaaaacgccgcgctctgtttgttagcgcagcccggcgtgaccattgccgggcgagttatgcagttaggtgatgcgatcaaagtcatgannnnnnnnnnnnnnnnnnnnnnnnnnnnnnnnnnnnnnnnnnnnnnnnnnnnngtttaagcttccagctggacggacgttttcggcacacagctgcagcataaaatcgtaccgtcatcacctaccgccgatttcttcagcgctgtgacttcaccctcgaccagtttgattcgacagcatccgcaaatacctgcacgacaggagtaaggtacgcggatccctgcctgttccagttgctcaagtaatacctgc

SEQ ID NO: 81302 - DNA, 492 bp, Arabidopsis thaliana landsberg
  unsure (1)..(492): unsure at all n locations
gggcagatgagtgatgtcaccactattgtacatgaaggcggtcatgcgattcattcatttttagcgcaccctttggcgctcagtgcttttaaggagtatccaatggaaattgccgaagtagcttctatgtcaatggagttactcagtatggaccactgggatgtattttttaaagataaagaagagctacgccgggctaaaatccatcagttagaaagagtcataacgatttttccatggattgccattattgataaatttcagcattgggtttatgaannnnnnnnnnnnnnnnnnnnnnnnnnnnaagcaagctggctgagcatcttaaatgagttatcttcttcagttgtcaatcaggaaggtctggagcagtttcgggcctgcagctggcagcgtcagcttcatctttttgaggtcccgttctattatatagaatatgggattgcacagttaggggccataggcatgtggatgcaataccaacaaaat

SEQ ID NO: 81303 - DNA, 559 bp, Arabidopsis thaliana landsberg
  unsure (1)..(559): unsure at all n locations
attggactgtagtttcgataataataatttaaaaagggtaaaattaacgtttaaatagttggcacaacatcactctttgcgtatgtaaaaatttgagaggacctaatctttttcttgacaacctaacttatcctcttatacagttcataatgtaataattgtatattaatattcttaaaagttaaaactaaaggttatccacaccaaaaaagaagaagaattgtgtcttttgggattaggaaaagtcttaaggctgctactaatgaatagattaataatgattattcctaacaaatcaaatcttccaccacttgttatcactgaaatttcctctaaactctccctttaataaaacaaattcacaagagaagaacaaattaaaaacaagtattaaaagaaacaatgttacttgattgatcattcatcttcatcatcatcaccatcaccatcatcttcctcttgcaaactacttagacagaaacaacttcgagtctgagccatcaactctattttatttttcatcatcatcataatcttnctatgatcatcaccatcacca

SEQ ID NO: 81304 - DNA, 487 bp, Arabidopsis thaliana landsberg
cctcgatggcccgccagtcgagcttgtcgagcccttcggacagcggccccgcgcgagcatcgtcgcgcgccacgatcaggattcgggcgttcaccgccaactcaagcctccgccccggataccggtgtcgctcacgacgcgtcgccgcgagattcgacgctgcaacatagcagaggccgcacggcctcataggtccgcaacgccgcaggcctgtgaacggataaacgcgcttgcctgaccgaagggcagggtcgttctagtgacgggagagacgaagcgccgcgagagtcggcggggaggaagatcgatggccaagggacccctgtccggtcttaaagtgctggaattcgccgggatcggtccgggaccgttctgcggcatgctgctgtcggacctcggggccgacgtggtgcgcatcgaccgcagggttcggggcgcagcttcctcgccgacgtcacgggtcgcggccgccgctcggtggcgctgg

SEQ ID NO: 81305 - DNA, 553 bp, Arabidopsis thaliana landsberg
cgtctgcccggcctgctccttgaagaagctgctgacgtatttaagcgacaaagacaagtgctcggccagcgaggaaacagaaaaatcgggggtttggtactgtgcggaaatataggccacaatctgttgaatcaagttctccttggcctcttgctcactctcgcggatgtcgctgcataatttgaggcatacatcggaagcgactgcggccaactcctggatcgaggtgaattcggtcaaacgcacgacgtccggatagtcgtgggcgacagtgcctcctttgcgggcatacatcgacttaataatcgtattgatcatgtcgaaacaaatgcagcgaacgagatgcagcgacggattggagctttcgattcgccgcagaatgccggacacgatcgtattgatgctgccggtgtccccttgccgaataagcatctcaagactttccatttcattcctcggataccaggtgaacggattcgtattcacctccagttccttgaagaaaagcaccttgctctcgcctttgatcaatttgtaatccatcgctgtaaca

SEQ ID NO: 81306 - DNA, 663 bp, Arabidopsis thaliana landsberg
aatgttttcagtctttgtaaattagactggacaaaagaatactacgagaacgtaaaaagattaaaatatcattttgtttactattttttatcagtaaaagcaggttacatatatatagtgtgccccagtaaaagagatggtggatacatggagcagcaaaatatgagtatagaccagaaaagataatcaaagctaggctctaactttggcacgttgaaaataggagcgtgtgttcgagaagttagccgttgctgtggagcactggagcgcatagactatctaacatcattaccaaactacgcaatccacatgtattacgcaataacatgatctcacttggtctttgcgtttattttttcttttttctttctctattgcagctttctttaatattttcgaaacatcatgtttattaatcttggtttccatggatgcaaattttacctaaatagtgcaacgttgtcaaaaccaattgtttggatcgatgatataacactcatgcttagaaactatttacttttttaatatataaaactttgaatctgaagagtcctaaactaagactaacaaaataaagggactcatgatccaaaagttcttgaaataatcttacttatcatatacgggtaataaatttttcaatctgtagaatattatatcgat

SEQ ID NO: 81307 - DNA, 524 bp, Arabidopsis thaliana columbia
  unsure (1)..(524): unsure at all n locations
ggctttggctccaagtagtatgaagattaaggtcgtggctccaccggagaggaagtacagtgtatggatcggtggctctatattggcttcactcagcactttccagcagatgtggattgcgaaagcagagtacgatgaatctggaccctcaatagtgcataggaaatgcttctaatcacagttcctaagatcaccaaacgaagacggaagtaaaagtaaaagacagaaggttaaaaacattgagattactaccaaatgccacatttttccattatattttctaatctctcttttatcctttttttttttgaatagcctctctatgttaatttttcaactaagcatacttttctttaaacaatttccactcccaatgtactatatataagcgactaatttcaattattatattttctattttaaacttaaaaaaaaaaaaaaagnnnnnnnnnnnnnnnnnnnnnnnnnnnnnnnnnnnnnnnnnnnnnnnnnnnnnnnnnnnnnnnnnnnnnnnnnntacaatc

SEQ ID NO: 81308 - DNA, 470 bp, Arabidopsis thaliana columbia
accacgcgtccggcctcgtcgtcttcagcttcatcggccgttgcatttcccggcgataagagagagaaagaggcggacgcgtggggcacgattccacaacctctttcttttcttctagatctacgtaaattcatcagctagagattgaaaaatggcggacggtgaagatattcagccgctcgtttgcgataacgggactggaatggtcaaggctggttttgcaggtgatgatgctcctagagctgtattcccaagtatcgttggccgtccacgtcacacgggagtgatggttggaatgggacaaaaggatgcatacgtcggagacgaggcacagtcgaaacgtggtatcttgactctcaagtatccaattgagcatggtattgtcaacaactgggatgatatggagaagatttggcatcacactttctacaatgagctgcgtgttgccccggaagagcatccggttttgc

SEQ ID NO: 81309 - DNA, 497 bp, Arabidopsis thaliana columbia
cccacgcgtccgcgtttttatatttactcctcccattcccttctccttcaatccttccttcctcctcctcccttcttcttcttcccctctttcattttccagccactacaaacttttctatctctactttttttcctctcgatttcaggtagaagaaaatggctgatggtgaagacattcaacctcttgtttgcgacaatggaactggaatggttaaggctggttttgctggggatgatgcacctagagctgtgtttcctagtattgtgggtcgtcctcgtcacaccggtgtgatggttgggatggggcaaaaggatgcttatgttggcgatgaagctcaatccaaacgaggtattttaactctcaagtaccctattgagcatggaattgtcaacaattgggatgacatggagaagatttggcatcacactttctacaatgagctccgtgttgctcctgaggaacatcctattctacttaccgaggcaccgcttaac

SEQ ID NO: 81310 - DNA, 620 bp, Arabidopsis thaliana columbia
cgggtttctctctcaaaaactacacacccgtaccacaccaccaccctcctcgtttcctcagagatcccctctctaacttctaaggatatagaaaatggcagatggtgaagacattcagcctctcgtctgtgacaatggaaccgggatggttaaggctggatttgctggagatgatgcaccaagagctgtattccctagcatcgttggtcgtcctcgacacactggtgtcatggttggtatgggacaaaaagatgcttacgttggtgatgaggctcagtctaagagaggtattttgacattgaaatatcctattgagcatggtattgttagcaactgggatgatatggagaagatatggcatcacactttctacaatgagctccgtgttgcacctgaagaacaccctgttcttttcactgaggctccttttaaccccaagggcaattgtgagaagatgactcaaatcatgtttgtgtcttttaactctcccgctatgtatgtcggcatgcaagctgttctctgctggtacgccagttattatacaacctgtattgtgctggattctggttaatggtgcgattttacattatgtcaaattttctttctaacttttatatttt

SEQ ID NO: 81311 - DNA, 532 bp, Arabidopsis thaliana columbia
  unsure (1)..(532): unsure at all n locations
cnnnnnnnnnnnnnnnnnnnnnnnnnnnacccacgcgtgcgactgtataacttgccattcgtttgggttgtgcatcgccctcatttgattacttgtttctttgatttctccttccatagaaccgaattgttttcagtctgagatttctcctgccgagagaacgattttaatctattttcctcgagagtagaaaatggctgatggtgaagatattcaaccccttgtctgtgacaatggaactggaatggttaaggctggttttgctggggatgatgcaccgagggctgtgtttccaagtattgttggccgtcctcgccacactggagtgatggttggaatgggacagaaggatgcatatgttggcgatgaagctcaatccaagcgtggtattcttacccttaaataccctattgagcacggtattgtcaacaattgggatgatatggaaaaaatctggcatcatactttctacaatgagctccgtgttgctccccaggagcatcctattctgctcactgaagcgcctcttaac

SEQ ID NO: 81312 - DNA, 618 bp, Arabidopsis thaliana columbia
  unsure (1)..(618): unsure at all n locations
aaaaccgcctatataaatagttcaacactcggtttatttcttctcccctcttcggattgcctcgtcgtcttcagcttcatcggccgttgcatttcccggcgataagagagagaaagaggagaaagagtgagccagatcttcatcgtcgtggttcttgtttcttcctcgatctctcgatcttctgcttttgcttttccgattaagatcgtagaccatggccgatgctgatgacattcaacctattgtctgtgacaatggtactggaatggttaaggctggattcgctggagatgatgctcccagagcggttttccccagtgttgttggtcgacctagacatcatggtgtcatggttgggatgaatcagaaagatgcgtatgttggtgatgaagcacaatccaaaagaggtatcctcacattgaaataccctattgagcatggtgttgttagcaactgggatgacatggagaagatttggcatcacactttctacaatgagtcccgtttgtcctgagcgaggaccccggttcttcttaccgaggttctcctttaaacccaaagccacagggggaggtgcttagtcatgtttanccctnatncncagcatgatgtccattc

SEQ ID NO: 81313 - DNA, 752 bp, Arabidopsis thaliana columbia
  unsure (1)..(752): unsure at all n locations
atggaaaaccttcggtttcttcaggtggggggtttcccaccattgtttccccaggaattttgcttgcccgccgtttggccaaagggatcccccgctcttgcacctagcagcatgaagatcaaggtggttgcaccgccagagagaaaatacagtgtctggatcggaggatcaatccttgcatccctcagcaccttccaacagatgtggatttcaaagagtgagtacgatgagtcaggtccatcgattgttcacaggaaatgcttctaagtgtgtcttgtcttatctggttcgtggtggtgagtttgttacaaaaaatctattttccctagttgagatgggaattgaactatctgttgttatgtggattttattttcttttttctctttagaaccttatggttgtgtcaagaagtcttgtgtactttagttttatatctctgttttatctcttctattttctttaggatgcttgtgatgatgctgtttttttttgtccctaagcaaaaaaatatcatattaaaaaaaaaaaaaaaagcatgtttttggtttttttttgtcttcacatataaatattgtttgaatgtcttcaatcttttatttgtatgagacaattatttaagtatcgggtgacaatgcagctattatgtattgtcgattgttaaaaaaaaaaaaaaaaaaaagnnnnnnnnnnnnnnnnnnnnnnnnnnnnnnnnnnnnnnnnnnnnnnnnnnnnnnnnnnnnnnnnnnnnnnn

SEQ ID NO: 81314 - DNA, 933 bp, Arabidopsis thaliana columbia
  unsure (1)..(933): unsure at all n locations
ctaccgacccagaggcattcgctgagttgaaggtgccaccggggtaaagcaagatcttgggctacttcaatgggacattttctgtgactgtggaggcctacacggatgagatggaaatatcttgggcgggctatttcgtcgagaagcactaagaattacccggtgggcaagttatcactgattggtgctgacagattcagatgcccagaagtcttgttccatccctcgcttgtgggaatggaagctgctggaatccaacgaacaccctacaactcgttcatgaagtgtgatgttgatatcaggaaggacctttacggtaacattgtgctcagtggtggtacaactatgttctcaggtattgcagaccgtatgagcaaagagatcacagctcttgccccgagcagcatgaagattaaggtcgtggcaccacccgagaggaagtacagtgtctggattggtggttctatccttgcttccctcagcactttccagcagatgtggatctctaaggcagagtatgatgaagcaggtccaggcattgtccacagaaaatgcttctaaactaaagagacatcgtttccatgacgggatcacatttctttctatttctccaatttgtttgtttcaaatttttttcccctttgtcatttgtgcactatgtgagaaactttccggttacagcgtttggagagatgtctaaggaggagcaggtttgaaaacccgctctcgctcttacctgaggcactaatccgcgtttcaaactcagcttcattctctattcttgtccatttgtttgtttgtttgtagcctcttcaaactcggataaaaacaaaagtttttggactattgatatttgtactttatttgagggcgaaccgggtattccgtnnnnnnnnnnnnnnnnnnnnnnnnnnnnnnnnnnnnnnnnnnnnn

SEQ ID NO: 81315 - DNA, 1034 bp, Arabidopsis thaliana columbia
  unsure (1)..(1034): unsure at all n locations
nnnnnnnnnnnnnnnnnnnnnnnnnnnnnnnnnnnnnnnnnnnnnnnnnnnnnnnnnnnnnnnnnnnnnnnnnnnnnnnnnnnccacgcgtccgcggacgcgtgggcggacgcgtgggcgtggatactccttcaccacaactgctgaacgtgaaattgttagagccatgaaggagaagctctcctttgttgctgttgactacgagcaggagatggaaacctcaaagaccagctcttccatcgagaagaactatgaattacccgatgggcaagtcatcacgattggtgctgagagattcagatgcccagaagtcttgttccagccctcgtttgtgggaatggaagctgctggaatccacgagacaacctataactcaatcatgaagtgtgatgtggatatcaggaaggatctgtacggtaacattgtgctcagtggtggaaccactatgttctcaggtatcgctgaccgtatgagcaaagaaatcacagcacttgcaccaagcagcatgaagattaaggtcgttgcaccacctgaaaggaagtacagtgtctggatcggtggttccattcttgcttccctcagcacattccagcagatgtggatctccaaggccgagtatgatgaggcaggtccaggaatcgttcacagaaaatgtttctaagctctcaagatcaaaggcttaaaaagctggggttttatgaatgggatcaaagtttctttttttcttttatatttgcttctccatttgtttgtttcatttccctttttgttttcgtttctatgatgcacttgtgtgtgacaaactctctgggtttttacttacgtttgcgtttcaaaaaaaaaaaccgccttcgtttttgcgttttaagtccccattgggtttgttaggcccctcgagtggatcggaatttgatgccccctttttccccctggtccctataaattctttgcggccgcgaattaaaacagcccgggggatccactagttctagagcggccgcccccgcggtggagctccacaatttgttaccgta

SEQ ID NO: 81316 - DNA, 829 bp, Arabidopsis thaliana columbia
ccggcactatacgactcacttagggaaagctcgtacgcctgcaggtaccggtccggaattcccgggtcgacccacgcgtccgtcctcactttcatcagccgttttgaatctccggcgacttgacagagaagaacaaggaagaagactaagagagaaagtaagagataatccaggagattcattctccgttttgaatcttcctcaatctcatcttcttccgctctttctttccaagctcataaaaaatggctgaggctgatgatattcaaccaatcgtgtgtgacaatggtaccggtatggtgaaggctggatttgcaggagatgatgctcccagggctgtttttcccagtgttgttggtaggccaagacatcatggtgtcatggttgggatgaaccagaaggatgcatatgttggtgatgaagcacaatccaagagaggtattcttaccttgaagtatcctattgagcatggtgttgttagcaactgggatgatatggaaaagatctggcatcacactttctacaatgagcttcgtattgctcctgaagagcaccctgttcttcttaccgaggctcctcttaacccaaaggccaacagagagaagatgactcaaatcatgtttgagacctttaactccccccgctatgtatgtcgccatccaagctgttctctccttgtacgccagtggtcgtacaaccggtattgtgctggattctggtgatggtgtgtctcacactgtgcccatctacgagggggttcttctcttcctcatgccatcctccggcttgaccttgctggacgtgaccttactgattacctcatgaagat

SEQ ID NO: 81317 - DNA, 1467 bp, Arabidopsis thaliana columbia
  unsure (1)..(1467): unsure at all n locations
ccccccccccccccattgaattgcaatgngcatttgggccccccctcgaggtcgacggtatcgataagcttgatatcgaattcgcggccgcaggagatgatgctcccagggctgtttttcccagtgttgttggtaggccaagacatcatggtgtcatggttgggatgaaccagaaggatgcatatgttggtgatgaagcacaatccaagagaggtattcttaccttgaagtatcctattgagcatggtgttgttagcaactgggatgatatggaaaagatctggcatcacactttctacaatgagcttcgtattgctcctgaagagcaccctgttcttcttaccgaggctcctcttaacccaaaggccaacagagagaagatgactcaaatcatgtttgagacctttaactctcccgctatgtatgtcgccatccaagctgttctctccttgtacgccagtggtcgtacaaccggtattgtgctggattctggtgatggtgtgtctcacactgtgccaatctacgagggtttctctcttcctcatgccatcctccgtcttgaccttgctggacgtgaccttactgattacctcatgaagatccttacagagagaggttacatgttcaccacaacagcagagcgggaaattgtaagagacatcaaggagaagctctcctttgttgctgttgactacgagcaggagatggaaacctcaaagaccagctcttccatcgagaagaactatgaattacccgatgggcaagtcatcacgattggtgctgagagattcagatgcccagaagtcttgttccagccctcgtttgtgggaatggaagctgctgggatccgcgagacaacctataactcaatcatgaagtgtgatgtggatatcaggaaggatctgtacggtaacattgtgctcagtggtgggaccctattgttctctggtatcgctgacccggattgagcaaaggagatcactagctctggccacccaaagcaggcatgaaggattaaggtgcggtggctccaccctgagaggaagtaccaagtggcttggattccgggggcttccatttcttgcttccctcaggaccttccagcagatcgtggattcccaaaggccgggtttgatgagtcagggcccggcgttagttccacaggaagtgcttctaaggaagaggcaaagcgttcaaatctagagtggtgtttgattcggctatctgttttggtaaagccttttgttcatcgactttgttgcaaaaaattcttttgttttctatgtttcttcaccactacattacatttctttcttgttgttatcctctttgggtgtttctgctattaacgaaaaaagaaattttcttttcttnnnnnnnnnnnnnnnnnnnnnnnnnnnnnnnnnnnnnnnnnnnnnnnnnnnnnnnnnnnnnnnnnnnnnnnnnnnnnnnnnnnnnnnnnnnnnn

SEQ ID NO: 81318 - DNA, 1690 bp, Arabidopsis thaliana columbia
  unsure (1)..(1690): unsure at all n locations
tagagctatatattcgcacatgtactcgtttcgctttccttagtgctaccggctgccgctgttgtttctcctccatttctctatctttctctctcgctgcttctcgaatcttctgtatcatcttcttcttcttcaagtgaaaaatggccgatggtgaggatattcagccacttgtctgtgacaatggaactggaatggtgaaggctggttttgctggtgatgatgccccgagagcagtgttcccaagtattgttggtcgtcctaggcacactggtgtcatggttggtatgggtcagaaagatgcttacgttggtgatgaagctcagtccaagagaggtatcctcactctgaagtatccaatcgaacatggtattgtaagtaactgggatgacatggaaaagatatggcatcacactttctacaatgagcttcgtgttgctcctgaagagcaccctgttctactcaccgaggctcctcttaacccaaaggctaacagagagaagatgactcagatcatgtttgagacctttaactctcccgctatgtatgttgccattcaagctgttctttctctttacgccagtggtcgtacaaccggtattgtgctggactctggtgatggtgtgtctcacactgtgccaatctacgagggtttctcacttccacatgctatcctccgtcttgaccttgctggtcgtgaccttactgattacctcatgaagatccttacagagagaggttacatgttcaccacaacagcagaacgggaaattgtcagagacatcaaggagaagctttcctttgtcgctgttgactacgagcaagagatggagacctcaaaaccagctcttccatcgagaagaactatgaattacccgatggacaagtgatcacgatcggtgctgagagattcaggtgcccagaagtcttttccagccatcgtttgttggaatggaagctgctggaatccacgagacaacttacaactccatcatgaagtgtgatgtggatatcaggaaggatctttacggtaacattgtgctcagtggtggtaccactatgttctcaggtattgctgaccgtatgagcaaagaaatcacagctcttgcaccaagcagcatgaagattaaggtcgttgcaccaccagagaggaagtacagtgtctggatcggtggatccatccttgcttccctcagcaccttccagcagatgtggattccaaagagccgagtatgatgagtcaggtccatcgattgttcacaggaaatgtttctaagtgtgtcttgtcttatctggttcgtggtggtgagtttgttacaaaaaaatctattttccctagttgagatgggaattgaactatctgttgttatgtggattttattttcttttttctctttagaaccttatggttgtgtcaagaagtcttgtgtactttagttttatatctctgttttatctcttctattttctttaggatgcttgtgatgatgctgtttttttttgtccctaagcaaaaaaatatcatattatatttggtccttggttcatttttttggtttttttttgtcttcacatataaatattgtttgaatgtcttcaatcttttatttgtatgagacaattatttaagtatcgggtgacaatgcagctattatgtattgtcgattgttnnnnnnnnnnnnnnnnnnnn

SEQ ID NO: 81319 - DNA, 7418 bp, Arabidopsis thaliana columbia
  unsure (1)..(7418): unsure at all n locations
tccccaaatctctcgaagcagagactcgcatagtctctgaagtcatctataatctgctcgcttagaaaaccgccgtattcatcttcaagatcctgtggtatgtcccaatgaaagatagtaacaagaggagtgatttcattggctaagagttcatcaataacatcattgtaaaacttaattccttcttcactaactcctctatcccttttgccataaggtagaactcgtggccaagcaatggaaagccgaaacgaatccatgtttatatccttcattctcttaatatcttcctctctgttattctttagctaaacacccacaattctggccttctctgatgcctctttaagccaatttgtatctctgcttccttacaagatatatctgaagcttaaagggcagtgacaatggctggctcggttaacgggaatcatagtgctgtaggacctggtataaattatgagacggtgtctcaagtggatgagttctgtaaagcacttagagggaaaaggccgatccatagtattttgatagctaacaatggaatggcggctgtgaagtttatacgtagtgtcagaacatgggcttatgaaacatttggtacggaaaaagccatattgttggtggggatggcaacccctgaagacatgcggatcaatgcggagcatatcagaatcgctgatcagtttgttgaggttcccggaggaaccaacaataacaattatgctaacgttcagctgattgtggagatggctgaagtaacacgcgtggatgcagtttggcctggttggggtcatgcatctgaaaaccccgaattacctgatgccctagatgcaaaaggaatcatatttcttggtcctccagcatcttcaatggcagcactgggagataagattggttcttcgttgattgcacaagctgctgatgtacccactctgccatggagtggttcccatgttaaaatacctcctaatagcaacttggtaaccatcccagaggagatctaccggcaagcatgtgtctacacaactgaagaagcgattgctagctgtcaagttgtcggttacccagcaatgatcaaagcatcgtggggtggtggtggtaaaggaatcaggaaggttcataatgatgatgaggttagggctctattcaagcaagttcagggtgaggtcccaggctcaccaatattcataatgaaggttgcgtcacagagtcggcatctagaggtccagctgctctgtgacaagcatggaaatgtttcagctctgcatagccgtgattgtagcgtccagagaagacatcaaaagatcatagaggagggtccaattactgtggctccgccagaaactgtcaagaaacttgaacaagcagctagaaggttggctaagagtgttaactatgttggagctgctactgttgagtatctctacagtatggacactggggagtactacttcttagagcttaaccctcgcttacaggttgagcatcctgtcactgagtggattgccgagataaatcttcctgctgcccaagttgctgtggggatgggaattcctctctggcaaatccctgagataagacggttctatggaatagaacatggtggaggttatgattcttggcgaaaaacatctgttgtagccttcccttttgattttgataaagctcaatctataaggccaaaaggtcattgtgtggctgtacgtgtgacaagtgaggatcctgatgacgggttcaaaccaaccagcggtagagttcaggagttgagttttaagagcaagccaaatgtgtgggcgtacttctctgtcaagtctggtggaggcatccacgagttctcggattcccagtttggacatgtttttgcatttggggaatccagagccctggcgatagcgaatatggttcttgggctaaaagaaattcagatccgtggagaaattaggactaacgttgactacacgatcgaccttttacatgcttctgattaccgtgataacaaaattcacactggttggttggatagtaggattgctatgcgggtcagagctgagaggcctccatggtatctctctgttgtcggcggagctctctataaagcatcagcgaccagtgctgctgtggtttcagattacgttggttatctggagaaggggcaaatccctccaaagcatatatctcttgtacattctcaagtgtctctgaatattgaaggaagtaaatatacgattgatgtagtccggggtggatcaggaacctacaggctaagaatgaacaagtcagaagtggtagcagaaatacacactctacgtgatggaggtctgttgatgcagttggatggcaaaagccatgtgatatatgcagaggaagaagctgcaggaactcgtcttctcattgatggaagaacttgtttgctacagaatgaccacgatccatcaaagttaatggctgagacaccgtgcaagttgatgaggtatttgatttccgacaacagcaatattgacgctgatacgccttatgccgaagttgaggtcatgaagatgtgcatgccacttctttcacctgcttcaggagttatccattttaaaatgtctgaaggacaagccatgcaggctggtgaacttatagccaatcttgatcttgatgatccttctgctgtaagaaaggccgaacccttccatggaagtttcccaagattagggcttccaactgcaatatccggtagagttcatcagagatgtgccgcaacattaaatgctgcacgcatgattcttgctggctatgagcataaagtagatgaggttgttcaagacttacttaattgccttgatagccctgaactcccatttcttcagtggcaagagtgctttgcagttctggcgacacgactacctaaaaatctcaggaacatgctagaatcaaagtatagggaatttgagagtatttccagaaactctttgaccaccgatttccctgccaaacttttaaaaggcattcttgaggcacatttatcttcttgtgatgagaaagagagaggtgcccttgaaaggctcattgaaccattgatgagccttgcaaaatcttatgaaggtggtagagaaagtcatgcccgtgttattgttcattctctctttgaagaatatctatcagtagaagaattattcaatgataacatgctggctgatgttatagaacgcatgcgtcagctatacaagaaagatctgttgaaaattgtggatatagtgctctcacaccagggcataaaaaacaaaaacaaactcgttctccggctcatggagcagcttgtttaccctaatcctgctgcttacagagataaacttattcgattctcaacacttaaccatactaactactctgagttggcgctcaaggcgagtcaattacttgaacagaccaaactaagtgagcttcgttcaaacattgctagaagcctttcagagttagaaatgtttacagaggacggagaaaatatggatactcccaagaggaaaagtgccattaatgaaagaatagaagatcttgtaagcgcatctttagctgttgaagacgctctcgtgggactatttgaccatagcgatcacacacttcaaagacgggttgttgagacttatattcgcagattataccagccctacgtcgttaaagatagcgtgaggatgcagtggcaccgttctggtcttcttgcttcctgggagttcctagaggagcatatggaaagaaaaaacattggcttagacgatcccgacacatctgaaaaaggattggttgagaagcgtagtaagagaaaatggggggctatggttataatcaaatctttgcagtttcttccaagtataataagtgcagcattgagagaaacaaagcacaacgactatgaaactgccggagctcctttatctggcaatatgatgcacattgctattgtgggcatcaacaaccagatgagtctgcttcaggacagtggggatgaagaccaagctcaggaaagagtaaacaagttggccaaaattcttaaagaggaagaagtgagttcaagcctctgttctgccggtgttggtgtaatcagctgtataattcagcgagatgaaggacgaacacccatgagacattctttccattggtcgttggagaaacagtattatgtagaagagccgttgctgcgtcatcttgaacctcctctgtccatttaccttgagttggataagctgaaaggatactcaaatatacaatatacgccttctcgagatcgtcaatggcatctgtatactgttacagacaagccagtgccaatcaagaggatgttcctgagatctcttgttcgacaggctacaatgaacgatggatttatattgcagcaagggcaggataagcagcttagccaaacactgatctccatggcgtttacgtcgaaatgtgttctgaggtctttgatggatgccatggaggaactggaactgaatgcccataatgctgcaatgaaaccagatcacgcacatatgtttctttgcatattgcgtgagcagcagatagatgatcttgtgcctttccccaggagagttgaagtgaatgcggaggatgaagaaactacagttgaaatgatcttagaagaagcagcacgagagatacatagatctgttggagtgagaatgcataggttgggcgtgtgcgagtgggaagtgcggctgtggttggtgtcctctggactggcatgtggtgcttggagggttgtggttgcaaacgtgacaggccgtacatgcactgtccacatataccgagaagttgaaactcctggaagaaacagtttaatctaccactcaataaccaagaagggacctttgcatgaaacaccaatcagtgatcaatataagcccctgggatatctcgacaggcaacgtttagcagcaaggaggagtaacactacttattgctatgacttcccgttggcatttgggacagccttggaactgttgtgggcatcacaacacccaggagttaagaaaccatataaggatactctgatcaatgttaaagagcttgtattctcaaaaccagaaggttcttcgggtacatctctagatctggttgaaagaccacccggtctcaacgactttggaatggttgcctggtgcctagatatgtcgaccccagagtttcctatggggcggaaacttctcgtgattgcgaatgatgtcaccttcaaagctggttcttttggtcctagagaggacgcgtttttccttgctgttactgaactcgcttgtgccaagaagcttcccttgatttacttggcagcaaattctggtgcccgacttggggttgctgaagaagtcaaagcctgcttcaaagttggatggtcggatgaaatttcccctgagaatggttttcagtatatatacctaagccctgaagaccacgaaaggattggatcatctgtcattgcccatgaagtaaagctctctagtggggaaactaggtgggtgattgatacgatcgttggcaaagaagatggtattggtgtagagaacttaacaggaagtggggccatagcgggtgcttactcaaaggcatacaatgaaacttttactttaacctttgttagtggaagaacggttggaattggtgcttatcttgcccgcctaggtatgcggtgcatacagagacttgatcagccgatcatcttgactggcttctctacactcaacaagttacttgggcgtgaggtctatagctctcacatgcaactgggtggcccgaaaatcatgggcacaaatggtgttgttcatcttacagtctcagatgatcttgaaggcgtatcagcaattctcaactggctcagctacattcctgcttacgtgggtggtcctcttcctgttcttgcccctttagatccaccggagagaattgtggagtatgtcccagagaactcttgcgacccacgagcggctatagctggggtcaaagacaataccggtaaatggcttggaggtatctttgataaaaatagtttcattgagactcttgaaggctgggcaaggacggtagtgactggtagagccaagctcgggggaatacccgttggagttgttgcagttgagacacagactgtcatgcagatcatcccagccgatcctggacagcttgactctcatgaaagagtggttccgcaagcagggcaagtctggtttcctgattcagcggccaagactgctcaagcgcttatggatttcaaccgggaagagcttccattgtttatcctagcgaactggagagggttttcaggtgggcagagagatcttttcgaaggaatacttcaggcaggttcaactatagtagaaaatctgagaacctatcgtcagccagtgtttgtgtacatcccaatgatgggagagctgcgcggtggagcgtgggttgttgttgacagccagataaattcggattatgttgaaatgtatgctgatgaaacagctcgtggaaatgtgcttgagccagaagggacaatagagataaaatttagaacaaaagagctattagagtgcatgggaaggttggaccagaagctaatcagtctgaaagcaaaactgcaagatgccaagcaaagcgaggcctatgcaaacatcgagcttctccagcaacagattaaagcccgagagaaacagcttttaccagtttatatccaaatcgccaccaaatttgcagaacttcatgacacttccatgagaatggctgcaaagggagtgatcaaaagtgttgtggaatggagcggctcgcggtccttcttctacaaaaagctcaataggagaatcgctgagagctctcttgtgaaaaacgtaagagaagcatctggagacaacttagcatataaatcttcaatgcgtctgattcaggattggttctgcaactctgatattgcaaaggggaaagaagaagcttggacagacgaccaagtgttctttacatggaaggacaatgttagtaactacgagttgaagctgagcgagttgagagcgcagaaactactgaaccaacttgcagagattgggaattcctcagatttgcaagctctgccacaaggacttgctaatcttctaaacaaggtggagccgtcgaaaagagaagagctggtggctgctattcgaaaggtcttgggttgactgatatcgaagactttagcttctaatccaagaaagatggacatttaaagtttgcttgtgtccgtttggattgataattatatatttgttggtcacagttgtaaatgttgttgtagctttgtcatttccgtataaacaaatacgcaataattcattcaacaaaaaaaaaagnnnnnnnnnnnnnnnnnnnnnnnnnnnnnnnnnnnnnnnnnnnnnnnnnnnnnnnnnnnnnnnnnncgtcctaaa

SEQ ID NO: 81320 - DNA, 1061 bp, Arabidopsis thaliana columbia
  unsure (1)..(1061): unsure at all n locations
atgatacttcagctctctacgactcactattgggaaagctggtcacgcctgcaggtaccggtccggaattcccgggtcgacccacgcgtgcgggataagcagataatggatctcatgaacgacaacagcaacaattcacaagacggcgatcatcagaactaccgtgtcggcgataatggattggaatcgaagaaggaagctatcttccctagctatgatttccaacctatgcgccctaatgcctccgccggattgtctcaccacgctttagatctcgccggatctgttaattccacggctgctagggtttgggatgcgtctgatcctaaaccggtttcagcttcttccgcaagaagttatggctctatggactctctcgaaccttcaaagttgtttgctgagaaggatcgaaattcccccgagtcagcgattatatctgcgatcgatcggacaatgaaggcccatgctgataaattgttacatgttatggaaggtgtcagtgcacgtctaacgcagctggagaccagaacccgagatctcgagaatttggttgatgatgtaaaagtgtctgttgggaacagtcatggaaaaactgatggtaaattgagacagcttgaaaacatcatgttagaggtgcaaaacggtgtacagttgttgaaggacaaacaagaaatagttgaggcgcagttcaactttcaaagctccagttatcaaaggtaaaccagcagccggagacacactctacacatgttgaacccactgctcagccgcctgcatctctgcctcagccaccagcttctgctgcagctcccccgtctcttactcagcagggcctcccaccacaacaatttatccaaccgcctgcctcacagcacggtctctcaccaccttcattacaactgcctcagcttcctaaccagcttctctccccaacaaggggccttatttccctccgtctggtcaagtcccagccacctccaacaattccagcctccttatcaacctcctccaccaacccagtcatttggatcaaacccccttttccaggcaacttnnttaaa

SEQ ID NO: 81321 - DNA, 576 bp, Arabidopsis thaliana columbia
  unsure (1)..(576): unsure at all n locations
nnnnnnnntctctacgactcactattgggaaagctggcacgcctgcaggtaccggtccggaattcccgggtcgtcccacgcgtccgctttctctatctccatcaatggctgcttctgtcgaaactccttcacctaatcatacgaacaacgaaggaacacgcttgaacatggtttctgcaacttcttttgattcttcttctccatcggttagtccatcttcagacaaacgtctctggagcaatgtacgtaacagggttgatgttcttctcgaagaacatagcaaaaatcacaaacccgttaccaatacgattgctatagaatcagagagatcaaagagatttaagaatgattcgatgcttttgcttaaagggtttgattctgtttctcatactctgtctctcctttctagtaatctcgacaatgcccttcagggagttagagaattagctaaaccaccttcatattctgagatactccattcgaatctcaaagctgatcagattcaacgacaacagaaagaagaagatgaagaggaagaagagagtaaagggaagaagaggaaacacgaatctgatg

SEQ ID NO: 81322 - DNA, 509 bp, Arabidopsis thaliana columbia
  unsure (1)..(509): unsure at all n locations
nnnnnnnnnnnnnnnnnnnnnnnnnnnnnnnnnnnnnnnnnnnnnnnnnnnnnnnnnnnnnnnnnnnnnnnnnnnnnnnnnnnnnnnnnnnnnnnnnnnnnnnnccaaattatactcaatatcacattttcctttctttcataaaaaaaagttgggtgcaatcttaatcaaaacaatcacccgtaataacccatctctaaaacagtctcaaagtacaacaaaaacttaaagctctcgttattcttaaaattccaaatgtggagactcaagaaaagctctctctcgtggtatctccaccgagaagaagaagcaccactggctgcaccgggagggattctgatcccaaacccgaatccagtcctctttgcatcagatgaatcagtagaatctcctccatcttcgccaccggaagctgaccctttggaaacaaagccgcttttctcgggggccggagcaggaccaccgctggatccaaacttggttaatggcagcaaatctggatcaacctg

SEQ ID NO: 81323 - DNA, 524 bp, Arabidopsis thaliana columbia
  unsure (1)..(524): unsure at all n locations
ggnnnnnnnnnnnnnnnnnnnnnnnnnnnnnnnnnnnnnnnnnnnnnnnnnnnnnnnnnnnnnnnnnnnnnnnnnnnnnnnnnctttttttttttttttttttggcaaaaggcagggtggatttatatttgaaccttggtacggcaggacaaccggctgcgaggcaaataaaaaactctacgactcagtcagggtggtttcggagagaaacagcaaattataagaaattagttaaaggcagctaatgtaattgtaaccagaaggaggggaagccccgacaaagttacaaaaaattacgaggagggacactggaacggaacggtcaagagggagggagagggagggggaggccatcgaacggattagacaagagggggggaacttaaacaatgttgtgccatcgggaagattcaacccacaacttaccacaaaagtgtgagccggctagatccgtccgtcggcacaaaccttcaagtgagaaccggcattgggggggcatcaaggggggctctagaacaatagac

SEQ ID NO: 81324 - DNA, 503 bp, Arabidopsis thaliana columbia
aggggacctataaagaagcttgacgtcgcatgcacgcgtccgtaagctgggatcctctagagcggccgccctttttttttttttttcctgcgccaggttttataaatttcaaacttatgtcttaccacaccgcaaataacacgaaataaaacttccaaatgacagatttgaaaaaaacaaacaaaccacactccaaagtaaaagtaaatgtctcacatttgttccacaagatataagaagagttttcttgtttcaatcaagagttaatcttcctgcaattcttcctgatttcgccactagaacctgtcaagggagagatatttcccatcttgatcatcgattccgcaaattgctcaaaaaactctccttgatcttctgcatacttcttcacaagctctctcgatttctcgttactgctgaacagaacttggtccgagttcaacaaccccttgttctctatcaagttcttgaagtagctgttgtcgaagctcgcggcgctgatg

SEQ ID NO: 81325 - DNA, 567 bp, Arabidopsis thaliana columbia
  unsure (1)..(567): unsure at all n locations
tcgcatgccccccttccttagcctggattcctttaaaccggccgcccttttttttttttttttttttttaaagggaaaccattaaaccctcggttttattggtaaaaatggtttcaaattataagttgggttggtccggatcacagataaattagctacacaatccataatccttgccaaaaacgctattaagtagtaccccattctctacactaatcttctttcaacatttcctcagaagcttccttatgttcttccaacaaccaattcttcatgcatgaactggcctagcaccagaagaaagctgcacattcgcggcatattcacgtgcccacaagtcatagtgaacaatctcttcaagagacggtgatgttaccaactcgtttcgatgtttatcgcatggttaattccacaaccttggaagatatcccaaatagcttatcttttcatcaatggacatttcaacagctttctcattggcggcgtgagaacncagtcattgggccncagtcgncagagataagcagntccaggntggattccatggccgggtctgaagcatgaccg

SEQ ID NO: 81326 - DNA, 1070 bp, Arabidopsis thaliana columbia
  unsure (1)..(1070): unsure at all n locations
tgcaagaagagaatctgcttacaaaagaaagaaggcagtgttaagtctctgatttcttcttgataacattactactatgtacagattcagcaacacagttattggggtcttaaaccttctcaccttactagcctcgattccaatcatcggaaccgctttatacaaggcaagaagcagcacgacatgtgaaaacttcctccagacgccgctacttgttataggattcatcatactcatagtttcccttgcgggattcataggagcctgcttcaacgtggcatgggctctttgggtgtacttagtggtcatgatcttcctcatcgctaccctaatgggtctaacgctatttggtctggtggtgacgagccaaggaggtggagtggaagtgccagggaggatttataaagagtataggcttggagactatcatccatggttgagagagagagttagggatcctgagtattggaactccattagaagctgtatcttgagttccaagacttgtactaagattgagtcttggactacacttgattatttccaaagagacatgacttctgttcagtcgggatgttgtaagccaccgacggcgtgtacgtacgaagctggagtagtggacggaggaggagattgcttcagatggaacaatggagtggagatgttatgctacgagtgcgatgcttgcaaggctggtgttctcgaagagatccgtctcgactggagaaagttatcggttgtcaacattctcgtcctcgtcctcctcatcgcggtctacgccgctggttgctgcgccttccacaacactcgccacgcagctcatccttaccatccatctgatgataaccgcatgaccagagtccgtcctcgttgggactattactggtggagatggtggcacgnaaagaaagagcagctttactaaaagccgcatcgtttttttggtcttaatcattttctttttagnaaactgggttanggaaacacaagntagtttaaaatgttgtgtagcttgtncngnaatcatcaagggttggaantttcncnggtcatggtnntgcttatttcgg

SEQ ID NO: 81327 - DNA, 508 bp, Arabidopsis thaliana columbia
  unsure (1)..(508): unsure at all n locations
attgannnnnnnnnnnnnnnnnnnnnnnnnnnnnnnnnnnnnnnnnnnnnnnnnnnnnnnnnnnnnnnnnnnnnnnnnctttttttttttttttttttttttttaggaaaaatcctaagattattaagaagaaagcaaaccaaaatccaaactaaatcgaacacaaagcaataattctaatggagagggagaattcagcaaatgcagctatctagtgtagaggccattgcagtagccgttattatatcttacatcagccaagccattgggagatttcttggaagttccattgatgaaaatgtttgttggaccgttactaatcgaatgttgatgagcagaagctggattcaggactgtgtctaactcgccacacgatgctgcaatgagccctaaaaacagaggagaagctttcccgggtctggatttgaactcggggtggaattgagcaccgataaagaaaggatggtttggaagttcaatgatctccatgcgtttgccagtttcatct

SEQ ID NO: 81328 - DNA, 600 bp, Arabidopsis thaliana columbia
  unsure (1)..(600): unsure at all n locations
tgtaagtcgcttgagagagttgatattggaggcataggagagaagcattgtcaaacaaggacaaaccgatatcaacatttatagttccaatgggattcttttgatcaatttgaaactttgcttctttttttgataaacgagattttatttcacaaacaaacacggttacaattaaagggccgtcatatttgggccttcaataagccatattttacattattggcccagttacattaccggtaagcccagttacgttaccactgataacagtcctttagtttcctccttctgctctgcacaaagtaacgagattaccgaactgaatcagaggagcagcttcttgccagatgtttcacatcttccaacagtttcaccgcatctctcatcgttggtctcattgccggatcttgctgtgtacaactcagtgccagttccgtcacttgcatcacctgctccctaagactcgaatccagaagctcgtccacgagaatcggattcgacgattgttgttaccataatccctccacattgttgttgctggctggctcaaggcagatttcacccagcttaacnaaacngggactttccgggaagatttgt

SEQ ID NO: 81329 - DNA, 475 bp, Arabidopsis thaliana columbia
aaacaagattattagattaaggaggagaacacatatcatatttcaggaaagggtgaaaaaacagatcctaaattagatgtaaacaaaaactattttgtctagttgtcattttttcttgtcttgtcctaatttacaacttgtcatttcaatacaaaatattgaaaaaggagaaacaaattgaagaaaaaaaaccaaaaaaaaagaatttgtcacaagatgttgataatcgcctgcttcttggaacaccctaacgaaaacaaatcatcttcccgagatctcttcttgccaacacactctactgcgacgtcgtttggtttctcgttactcacattgaaaatgttgactccgaatagcctaaccacagtctgaaccggactagaccggactttccagtggatatacaattgccggtctggtccggttgatctctcgaaacaaacccacgcgtccgcggacgcgtgggcggacgcgtggg

SEQ ID NO: 81330 - DNA, 691 bp, Arabidopsis thaliana columbia
  unsure (1)..(691): unsure at all n locations
nnnnnnnnnnnnnnnnnnnnnnnnnnnnnnnnnnnnnnnnnnnnnnnnnnnnnnnnnnnnnnnnnnnnnnnnnnnnnnnnnnnnnnnnnnnnnnnnnnnnnnnnnnnnnnggattcatttcatttcttataaaaacgaatatcaaacagcaatcatttacattttctttcaattgaagtaaccacaatgtacaacatattaagagcgacaccatctgttttggtcatatcgatcagctctctaagtaaatcgcgtctctctttccccagccgaggccattagaagccccacagcaacagtaaacatcaccagcattccaacaagcaaagcatatgttcgcgtagatgatctcctatactccccaaacagatatatcccccaaaaagtcgatactaaaggaagtgcctgaacagcatctgaggctgcatatcctgcagcttgtccacccatgaactgaagaccgttaccaaacccacataacaatccagctgcaagtgcccaacctcttccgttccagtcactcaggtattctctaaaggaagatcttggtgagtctagcacaggtttgtacaggaaactaatgttgagagcgaccgcgattacaaagcaagatagtgagaagtagaagaacgcagtgtagacaatcagcttgggaacgccttgttttagagtgtgccattgatcgtttgtt

SEQ ID NO: 81331 - DNA, 768 bp, Arabidopsis thaliana columbia
cacacaaaaaacacaagatctaaaaaaaaaagcttttatcatttagaaaaatttggtttcgaatttcttcgaagagtgaaaatggcgtctcatcaagaacagagttacaaagctggtgaaaccagaggcaaggctcaggagaaaactggggaagctatgggaacgatgggggacaaaacacaagcagctaaggacaaaactcaagagacagcccagtcagcccaacaaaaggctcatgaaacagctcagtcagctaaagacaagacgtctcaagctgcacaaacgactcaagagagagctcaagagtccaaagacaagacaggaagctacatgtcggaaactggagaagcaatcaagaacaaggcacacgatgcagctgaatataccaaagagactgcagaagcaggtaaggagaagaccagtgggatcttgggccagaccggtgagcaggtgaaacagatggctatgggagctactgatgcggtgaagcacactttagggcttcgcactgatgaaggaaacaaagaacatgtttcttcagctccaagtactactactacgaccactactcgtgagacacagaggaagtgaagaggataaatatttgtttcgtgttcgtggttttcatgtttgtttgctttgattagtgtttgttgcgttcgtgaggttatgccgatccttgttgttgtttattgggtttgaatgtacttctacgtattatcatgtaatggttttcttttataaattggacactagttatttcgggtg

SEQ ID NO: 81332 - DNA, 534 bp, Arabidopsis thaliana columbia
gctctccacgactcatattggaaagctgtcgcctgcaggtaccgtccggattccgggtcgacccaccgggcgggacgcgtgggcgaagccaaacacacaagctctctctttctctcaacaacttcaaaagccggcaggtatgaccgagacctccgaagaaaaacagaacatttctagggtttaactctgatccaccacattaccaaaactttcttcaactaggtgatcaaaaaggagtcctttttcattttgagcttctgggtctttggcttctgatttcgctataaggaagagaaaagtcaacggccatggcgggtcgtagagatagaagccaacaactccgtggatctcgaattgcgatcgccatcctcatcggtatctttatcggttgcgtgtgcgccgttctgttcccttacgggttcttcaactcaagctcatctctcaaagcaagcgaacatctttcgaagtcaagcaaccaggttggatcatcagcttgtgaatcgccagaacgagggaaaatgctaaaatcagact

SEQ ID NO: 81333 - DNA, 446 bp, Arabidopsis thaliana columbia
  unsure (1)..(446): unsure at all n locations
nnnnnnnnnnnnnnnnnnnnnnnnnnnnnnnnnnnnnnnnnnnnnnnnnnnnnnnnnnnnnnnnnnnnnnnnnnnctttttttttttttttgtatcaaatacattggtcataattgacgtcttgctacctgtgcaattacagacaaaatgagatgattttatagtgtaaacaactacgtgacatataaacgtccagctggaaaattgttgctctactataagaaatctgagtccttaatgccgtgtcccaaactcttgggtgatgaaaaggttactgatttaagcatggaaatgatcgatgatatgctctatgacatctgcttcctctatatgcatatctttcatttgtaacccggattaacactatggggcagcaaacctgtgcctgctactgggaaagctaacatcaactttttcccatgagacagaggagaggcctttgatca

SEQ ID NO: 81334 - DNA, 616 bp, Arabidopsis thaliana columbia
  unsure (1)..(616): unsure at all n locations
gnnnnnnnnnnnnnnnnnnnnnnnnnnnnnnnnnnnnnnncaaaaacatggtttagatttatttatttttaaattagggagaccttttgtgtcttttttcaagtggtaaaaagatataattttgacgaacacaccaaaattcaacttagtgattaaaaaaaaaaaaaacaaatgcaccaaaaataatttatcaagtatctccacatggagaaactcactcttttgcctacagcaacattcctatgagcagtcttcaaaacattttgccttacatggaagcaaaaaactaggccatgaaacttcactcaaaacccaaaacattggtttttcttttactggttttcgtttagacttttcgattttgtttactgttgtttgcattcaggaggcctctctccttgttgatcatcggtaacctgaggtctccctcctttcttgcgtaagactgatggcttctttttgggtcttgcttacttcttcctcctcatcttcgncgncttcttcctcatcttcggcctcatcctcttcaccctcatctcaccccacgtcacacctcacggcatggcaattnaacccncccnaaggcnccgggaacncgggangntgggggnggctc

SEQ ID NO: 81335 - DNA, 454 bp, Arabidopsis thaliana columbia
gtgttgattcgttcgacgttttgtctcctacgattcgtagagcgtttcagttttcgatttctccgtcgtctaactcgccgccggtgagtccacgaggtgactcggactcgtcgtgttcgttactgagtcgttcactcgggtctaatctgggaaacgacgtcgttgcgtctcccaggaatccgcaacttaataaagtgaagtcctccccttcctcgtcatacaacaatcaaatccgaaggatacggttccggatccgggcccccccgtggtatcggttttgggtcctggttcccgtaccttaccatctacaccgacccgacctggttttatgaacatttgggagaatggcttggaggaagaaccggcgatggaacgggtcgagtcgggtcgtgaactgcgagcgcagctgttcgagaagctgagcaaagagaattgcatgggtcggattgaaccg

SEQ ID NO: 81336 - DNA, 675 bp, Arabidopsis thaliana columbia
  unsure (1)..(675): unsure at all n locations
gnnnnnnnnnnnnnnnnnnnnnnnnnnnnnnnnnnnnnnnnnnnnnnnnnnnnnnnnnnnnnnnnnnnnnnnnnnnnnnnnnctttttttttttttttatatcattattctctattactttggataatttctcataattaaagagagaaataaatcacgtaatttgctacatttcacaaaatattaagggctattaatccaaaaaaggccacaacaaaaagttactcgaaattacatttttaaccctcataacaaaaacgacgccgttcaagcgaagagattgagcaactttgtcgttgctcctcctcctgcctccgccgcagcgtacgtaccgatcaccggcgttgttgttttgaaacgaaaccgtggtaacagactcctccgagtacatcgacggtgtatcttccttaaacggcaaggttttaatcggataaataggaataagagagagatcaagctccgacgaaggttgttgttccgacgataatcgtttccgtttcggcggagaagctgttgatcttgatctagatctagagcttgagaatcggcagtgatgataaatgttccgatcaccggaatcatcagcttttcgtagattcaacatttccgtacagatctccgaagcttcgtcggaagtaggagacggaaacccggcgaatccaccgncgttnagaa

SEQ ID NO: 81337 - DNA, 536 bp, Arabidopsis thaliana columbia
  unsure (1)..(536): unsure at all n locations
ggnnnnnnnnnnnnnnnnnnnnnnnnnnnnnnnnnnnnnnnnnnnnnnnnnnnnnnnnnnnnnnnnaagggtttagagactctcttttgttgttttgttacttgaaaagattggccagttttctttggaaaaaaaaatgagacttgaagaaggagacttaaagaagtataatcagattaatgcagcttcaatagttcttcgaccctgttgatagtacttgtagtggagatccacatacttggtaactgttttatacaatcttggtcttgcctcagtcacaagcccatctgcagggtgaatctctttgtctagacccggtacacaaaacgttgccacagatatcctttccttctctctgtgggccaccactcgatgaaccgggctcttatatatcccattactcattatctccatttgatcacctaaagtgataagaattgtatcaggaactattggagctttataccacttcccatctttaagaaactgaagcccttcgacatctttgtcgggtaagagaagagtgatagctgaac

SEQ ID NO: 81338 - DNA, 521 bp, Arabidopsis thaliana columbia
ccagctctaattcgacacacatctatggaaagctcggcacgcctgcagtgtgccggtccgcaatacacgggtcgacccacgcgtccgcccacgcgtccggttccaacagctgctatagcacctgcttcagcttgtgctagagctgtacatagtgctcttgttggcatcagaaatagtcttgatcctgaacataaaaaggaatccatggaaaaatacttaggccccgacaaacaaaggaagcaggaccaacaccgataaactcagattatccatgttggtgtgacttcccttttacatatagcatgtgtataggtttgaatagagtaaaagtgcagaaccattcttttaaccatcgaaaagccaaagagatgggaaaatctttggtatagaatataaatcttttaaacattatagaatcattcagtttgtttgtttctgtacataaacattttcgatcttgctccattggaaatgtaccccaccaagtttgccaaatgagtgaaagtgtacagtttttttct

SEQ ID NO: 81339 - DNA, 571 bp, Arabidopsis thaliana columbia
  unsure (1)..(571): unsure at all n locations
gannnnnnnnnnnnnnnnnnnnnnnnnnnnnnnnnnnnnnnnnnnnnnnnnnnnnnnnnnnnnnnagaagcgacatctttttttttgttggggggtttcacagtttgggttggacaagaaaaaaaagcaaccaatggagaataacaagcaaaactcaagtcaagaaaataaaaatctaaaaagaaagaggttgataaacagttctttaagttgatgttattgcttctactcactccattaagagttgcctatggcggcggagttcgttgaggtatgaggaagaggtgtgatcttgtagatcacaagcgttcacgctcattgttctttcacctgccttctgctggagctcagctggtccgtcttctccacttaacagcttgtccaaccgatttatgtcaaagttccatttgcggctattttgatgtacacatcatagaagcttgttagcactcactcatttccatctttgttgggattaaacatattttccttagccagagaatccaccatggcctttcctgctttattttttaaaaacaacgtttttgtccattgcacaattgctctttct

SEQ ID NO: 81340 - DNA, 530 bp, Arabidopsis thaliana columbia
ctcaggtaccactctacacacattatgaggagctggcacgcctgcagtgtgccgggcacgctatacaggggtcgacccacgcgtccgaaaacctctcctgatcccgtaatgaagaaaacgaagacgatggtggcttccatctccacccttattagacggacctatccttcaactaaccagtgtaattcactcgcgacgattcaatcacaaacccaattgcctcgcgaatctctgcaacatcattcttcagctgagggacgactccgattctccgggagagttttctgctcggaatctggcgccggatgctggaactgtggcgagaaagctgcctttttgttctgtaactcatgccgtagcattcaacctgttgatgactccgtcgactattttcagatttttggcctggagaagaagtatgagatagatcctggaagccttgaaggcaagtacaaagattggcaaaagaagctacatcctgattgagttcataacagatctaagaaagaacgagactacgcagccgagcg

SEQ ID NO: 81341 - DNA, 555 bp, Arabidopsis thaliana columbia
  unsure (1)..(555): unsure at all n locations
nnnnnnnnnnnnnnnnnnnnnnnnnnnnnnnnnnnnnnnnnnnnnnnnnnnnnnnnnnnnnnnnnnnnnnnnnnnnnnnnnnnnnnnnnnnnnnnnnnnnnnnnnnnnnnnnnnnnnnnnnnnnnnnacaacaaagggctctgtttttttctctgttttaatatcacacaaaacattcaatgggttttgacaataaaaacattccaaacccaatgggggaaaatttcctttttattaaaaacaattaaaaatacttgccattttcattttcacatgttaaaaactgaacccgtcgctaaatcgcaaaattacaattagcgacgttttaatattccgaactagaaccctaaaaattaaatttacccactcatttttatttaactttttccccctttccctttttttatttaatggttgaaacgtctcaaagctagatatgccaatactctatacccaaaaaacatcaaaaacaaaacaccaacgctggtccacatcccaacatttccgatcacttcctcctccacaaatcgacatccagccgatgtcgccgcactc

SEQ ID NO: 81342 - DNA, 413 bp, Arabidopsis thaliana columbia
acgactctccgccatggctgctaaacctcttcttcttcctcttctcctccttcttcatctctcaatcaccttagctcaaaacgacacaaatgctctcacactcttccgtctccaaaccgacacacacggcaacctcgccggaaactggaccggctccgacgcttgtacctcctcatggcaaggcgtttcttgctcaccatcttcacaccgcgtcactgaactatctctcccttccctctccttacgaggaccattaacctctctctcctccttagaccaacttcgtcttcttgacctccacgataacagactcaacggcaccgtttcaccactcacaaactgtaaaaacctcagactcgtttatctcgccggtaacgatctctccggtgagattcctaaagagatatcctttc

SEQ ID NO: 81343 - DNA, 556 bp, Arabidopsis thaliana columbia
  unsure (1)..(556): unsure at all n locations
cgnnnnnnnnnnnnnnnnnnnnnnnnnnnnnnnnnnnnnnnnnnnnnnnnnnnnnnnnnnnnnnnnnnnnnnnnnnnnnnnnnctttttttttttttttgaatatattatccattcatcaaaacattacaaaggtttggtaaaatatttgtttcaactacaactaaaccacccaacaaaacctcaagaggcatcaaaagttatgtcaatttaactaatctcagtcaatcttcactgaggagtagatctttctaacgaaccacaaacatgcgtagaaaccgattgagccggttagcacgaaaaacgagtaagagataatgatcatgtacccgaagtagagcactcctgataccagttttgagatctcaagctttgtgaagaagtagaagacggagtagaggaagaggtaaagtgaagatgagcctgatgtgaggtatgctctccaacaccaattgtagtcttcactgcagagctgaaagtagcagaggacaattgtgatctctgcgcaggtcacaatcaagatcaagaacacgatgaagaggaatccgaagatgtag

SEQ ID NO: 81344 - DNA, 540 bp, Arabidopsis thaliana columbia
actatagaagagcttgacgttcccttggcccccttccttagcctggattcctttaaaccggccgcctttttttttttttttttattctaacaaagataaagatctgagttaacatagaaaaagataaagtctttcctcacaaagacaacatgagtttgcggttttctccaagagcccaaatggggaatatgtttctataagctgagtaactgatcatacaattccgattaaagactcctagtatctctggttgggggtaatctccatcttccatctgcgaggtgatcagcgattttgccccgcgatgcaatggcatcggatctctactagcttgtcccgcttcaatgagagccaagagtgcccatgatgtgttcacaatatgcgatttattcccaggaagatgggtgtatactttgttttggcaagaaaggtagctctctccccatccaccacaacaaagttgtttggagagcaagaaaccacaagcttttctaatacaaagactgctctcatatgttttgcctgaagccaacatgcctt

SEQ ID NO: 81345 - DNA, 843 bp, Arabidopsis thaliana columbia
  unsure (1)..(843): unsure at all n locations
tgnnnnnnnnnnnnnnnnnnnnnnnnnnnnnnnnnnnnnnnnnnnnnnnnnnnnnnnnnncgataattcttgttttcatcaacttttgcaaaatatgaagaagcaagcaagtgtaataatctctgaatggagaagtagtatttacaatcacgaccaccttgtaactacagacaaaactagagacaacccaaccatgtgtacacagttccagatctgagattcatcttgagaatgcagcccagatcaagaaaaaaaaacagtatagtgaatgtttcactgaaaaataatctctcaccctttacaaacaatctcactctatatctacaaaactattgtgatccaatgacttcttttgcacattctttaggtaatataagaacagagtctatgcatagcccacctttcgtgtgagtgcaatcgatttgagtcatggagaatttgattcctgttgatacatctggatttgtcactttgaaatctccaacgtgatagtgactccagctcccagggttgttgttcagataacacaatgatacagcttgttggttgtccgaaagtggcgagctgggaacttacaggttttatgtcccatccatgaatgtgttcagagttgcagatcctccttcacaagcctctttgatgttttaccgagctggatacggaagaagagactatatgttccagatggaaactggatctcaaactctcctcctacttcaaaccaccatatctgttgaacataagcagctgactggaacctggattcatcagttgggatatgactccagtatctccgatcatcaattccagtaatccttagtgcctttgaanaaatctcgtacc

SEQ ID NO: 81346 - DNA, 481 bp, Arabidopsis thaliana columbia
cccacgcgtccgtttctctttcgccattaaaactctgtttcctttttcagagattctcagagaagattcattttaccctaagaaaaaaaatgtcgaacattcttcagaatcggcgatcttcgttttcctcttcgacgaaatcttcattagcgaagcgtcaagcaccatcttcatcggagaattctgttaaacttatgccggcgatgacgaagaaacgagcaccgttaagtaacattaccaatcaaaagatcgcctcacgattacaaaattctgattcggtacattgttcaaacaagtcagcgaaattgaagatagcaccaagtgtttgcgttaatgccagtttctctagcaatctgcaacaaagcatagttcctcacaaagttgcttcttcacctagcaaatctgatgatggctcagtatcaatggacgagactaggtcttcaagtgattcctacaagagttctcatgttgagtatatcga

SEQ ID NO: 81347 - DNA, 957 bp, Arabidopsis thaliana columbia
ctacaacaacaaatacttttacgaaaaaagcttttaaaacttatctagtttcgtttgatacacatttgaagaaagaaatggcatccaaccaacagagctacaaagctggtgagaccagaggcaaggcccaggagaagactggacaagctatgggaacgatgagggacaaggctgaggagggccgggacaagacttctcaaacggcccaaacagcccaacagaaggcccatgagacagcccagtcagctaaagataagacatctcaaactgcccaagcggctcagcagaaggcccatgaaacggcccagtcagcaaaagagaagacatctcaaactgcccaaacggcacagcaaaaggcccatgagacgacgcaagcagcaaaagaaaagacatctcaagctggcgacaaagctcgcgaggccaaggacaaggccgggagctacttatcggagacaggcgaagccataaagaacaaggctcaagacgctgctcagtatacaaaggagacggctcaaggtgcggcacagtacacaaaggaggcggctgaagccggtagagacaagacgggtggattcttgagccagactggtgagcatgttaagcaaatggcaatgggtgcagctgatgcagtgaagcatacttttgggatggctactgaggaagaagacaaagagcattatccaggaagtactactaccactactgcaactactcgaaccactgatccgactcatcagacttatcagaggaagtgatgagaaaacaaaattgagaacgatatgaaagtatctttgtgttagttggtcttttgagttttgtgtttgtgtttttgtaatttccgttgtgtctttctttatggttgtggttcagctgtgtttcttgttgtgacggtgatcctggagacttctaatttccagccaataagtttagatttgatcctgttacaacttatgtgtt

SEQ ID NO: 81348 - DNA, 576 bp, Arabidopsis thaliana columbia
ttgggaaactctgtgtgtaggcggaactacagaaccaagagcctctttctaatcggagttactttaatccccttgaaccatgtcaaagagaaagactaaagagccaaaggtcgatgttgtgactcttggaccatctgttcgtgagggagagcaagttttcggtgttgtccacatctttgcttcattcaacgacactttcattcatgttactgatttgtctggtcgtgaaactcttgtccgtatcaccggtggaatgaaggtgaaagctgatagagatgagtcctcaccttacgcagctatgcttgcagcacaggatgttgctcagcgatgcaaggaacttggtatcactgccatgcatgtgaagctccgtgccacaggtggatacaagaccatgacaccttgtcctggagcacagtctgcccttaaagcccttgctcgttccggcattgaaaatatgacgtattgaggatgtttctttcatcccaacagacagtactctcatattggttggtagaagaggaagatagctcttgagtttcccgctttgtgtgatgtttctattaagctctatgtgtt

SEQ ID NO: 81349 - DNA, 515 bp, Arabidopsis thaliana columbia
ccagctctattctactcacattatggaaagctgtgccgcctgcaggtaccggtccggtattcccgggtcgacccacgcgttcggagactgatagcacaagagatacgattagaacagctaagatatggttggcggctgctagaaagatgaaggaagcggccacagaggctgaggcggttgcaatcgcagagattgaggctgttactggaagtatgaatgttggtaaggccgaggctgtgactatctctgctgaagagtattctgtgcttgctcgtagtgctagagacgcagaggaagaggcgagaaagcgagtggaagatgcattgtcgagagttgaagaagctaactgtttcaaagaaggatgttctgaagagagttgacgaagcggctcaagatattgaatccagcatgagagtattgcaggaagctgtgcagagagttgacgctgctaatgcttcgaagatcgaaccataagatgcgctgcgaacatgactgtcacagaatggacagatgat

SEQ ID NO: 81350 - DNA, 843 bp, Arabidopsis thaliana columbia
  unsure (1)..(843): unsure at all n locations
atcagaagatatctttgtaacatctttgaatttcgctaaaggaaaagagagagatttggtaaaaatgcagtcgatgaaagaaacagcttcgaatattgcagcttctgcaaaatctggcatggacaaaaccaaagctaccttggaggaaaaggcggagaagatgaagacacgagaccctgttcagaaacagatggctacacaggttaaagaagataagatcaatcaagctgagatgcagaagagagaaacgcgtcagcacaacgcggccatgaaagaagcggctggagccggaaccggtttaggtttggggacggccactcactcgaccactggacaagtcggacacggcactgggacacatcagatgtcggctctgcctggtcacggaacgggacaactgaccgaccgcgttgtggagggcacggctgtgaccgacccgattggaaggaaccctggaactggtcggacaaccgctcataacactcacgttggtggtggtggtgccaccgggtacggaaccggcgggggatatactggataaacggtgttgttcacttgttctgttatttgctctgtttttgttgaatcgaaatttcgtggttttctgtcttaccttcgtgttctggtttttttttttctttttcttgtgcttctgaataattgtaggacttcgatctcatctaggtttttgttgttggatgatagtcttactttatgagtagaatgttcatgcaatgtaacagtagtaaaattatccgttaacaatnnnnnnnnnnnnnnnnnnnnnnnnnnnnnnnnnnnnnnnnnnnnnnnnnnnnnnnnnnnnnnnnnnnnnnnnnnnnn

SEQ ID NO: 81351 - DNA, 511 bp, Arabidopsis thaliana columbia
  unsure (1)..(511): unsure at all n locations
nnnnnnnnnnnnnnnnnnnnnnnnnnnnnnnnnnnnnnnnnnnnnnnnnnnnnnnnnnnnnnnnnnnnnnnccacgcgtccgcaaaatccttcacttgtagcccacaagaggtcatctcaggaggtgatttcggtcagtgcacgtattgtcatctcctacttggtctccattactccagccaagtagagtttgtcgcctctgctttttcttacaccattgtccaagctttctcctttttcgaagaaatctggagagagatatgtgctgacatcaaggaaggtaatcttagctcaagaatcactctgcccaagatgagaaaagctgtattggctctgatcagaccaaacccgtctcttgcttctcatatcgaggagatctgcttagagctggaaacaaatctcggatgggtcggtttgatttcaaagctttggccaaatgcaaaatttatctcctcaatcatgacgggttctatgctgccgtacctgaataagctgaggcattacgctggcg

SEQ ID NO: 81352 - DNA, 1349 bp, Arabidopsis thaliana columbia
  unsure (1)..(1349): unsure at all n locations
nnnnnnnnnnnnnnnnnnnnnnnnnnnnnnnnnnnnnnnnnnnnnnnnnnnnnnnnnnnnnnnnnnnnnnnnnnnncggccgccaaaaaagttgaattgcatttcaaggaaaagtgattttgaatcatatgaaaattcttgagggaatcattgaaaattcaaatcccgggttcgatcacagactctcttttaaggttactgacgaattacaagatcgatatcggccccaacttctgcaatcttggcttcctttgacgccttcgctgattttgcgatgctctctacatcaaaatctatcgctatcttcttcacgagaccttcaagcatcagtgagccaattgctaccagactccggaacttggaatcaacatctgcagcttcttcttctgctacctgcaaagctgctgaaaggacttgagcttgaccttcttgatccttcttttctattaatagcactgcataattgagaagcaacgtcgaataagccaactgcagattcttatttggggatgaataacagtttgagaaggcatcaagaatttgactatgatgcgtctgtagccagtaatgaaatgaagaattcttgaatagattaaaggacacgaacagtcgttaaaagatttgcaggaagagcagaatcttctgtaactttctttatcaaatccaaaagcaggtcattgttgttttccacatgcttgataagtagacttgctccatgatgatgcaaaacgagcatccttactatatcagtagcaggaaacatcattgccggtggccatgcttgtagcactttcaaaagcaaagcaatatccatgtcagcaaaattggtagagtggtagtgtgatgtgtccttcagtatattaacgattgcgcctactctggatacttcgagttcggtcagggacttgtcattgtttactgcgtcagatcgtaaagtagtattgaactctgtcatctttttcagaatcccgtcatattgagcagcatcgaaaactagcacacctctttttggaatgtgcttgtataaaggttttgccggagttgcagctgtacgagatgcttgcccaggcacataagcatttgcgccggtgaagggatcacgaaaagatggattaaagttgaagtctttctgcccagaattttgtaatataaattcaacaatttgctgccgatatgcaaaggggagattctcttttagaagccacttgtcagctgcatcataaggattgtctgatcgattgtaaggtagcttccggataggttccgcggccgcgaattcgatatctagcttatctatacctcggnccttggccagtggccaatgcatttcaaagggggggggggggggg

SEQ ID NO: 81353 - DNA, 793 bp, Arabidopsis thaliana columbia
  unsure (1)..(793): unsure at all n locations
gccccccggcccaaattgaaatgcactcgcaatggccctactcnnnngttacgttcgctagccgcccgcgggtggcggccgctctagaactagtggatcccccgggctgcttgaatttgcggccgcttctggtttccactaccaagggatagcctggggggaaaaaagaatcgcattcttcatggaatcatatatcacatgatagcaacaatacgcactaatgaacctttggtcaacttccgtagttagctacacggattggaatttagctttcaaacttcaactaattttacccacgccatgctgctaactcaataatctttttatagcttagtggttggctaatcaataatcactctacccataatctttacaggaacaatctccattcttaaagtggtgcaagcatcttgtgtcctccaacaatatgtcacagccgtatctcttagagacgtactttgcagtatcatggcagtctcggcacatcctaagattgttcacgatccttatcgtcgtcttagatgcacccggatgacgaaatgagaccaaacgccatggcaaatttttcactgtggattccacaagtttcttcccttccttcttcctcaatccaaagttctccattatattggtcacttctattatccagccctactcattttttccacccaagggatacagcacatcaagtacataattttcgacctgatcacccggccctgaatgtgtgaaataaatttcctgacttcaatccagctctgcccgagaggttttttaacaagttatctctcct

SEQ ID NO: 81354 - DNA, 428 bp, Arabidopsis thaliana columbia
  unsure (1)..(428): unsure at all n locations
nnnnnnnnnnnnnnnnnnnnnnnnnnnnnnnnnnnnnnnnnnnnnnnnnnnnnnnnnnnnnnnnnnnnnnnnnnccacgcgtccgatggcattgggttcctaaatgtccttcgttgccggagaaatggagttgtgggtttcggtggttctcttttgtcccaagcttgtctgcttctgtttagttgttatatgatgatggattgatgtctgtattcatctttgttatagagtatttggtattgtttgcgttcaaatcttcattttttggggtcttctatcaattgtttctttggtatctctttgtgaaataaaagattggtaatattgggtattgtttgttttcattttccatgtgtacgtacttttaaaatgaaaccatagtaattagcaaaaaaaaattgtttttgtttaaaacaaaanaataacaa

SEQ ID NO: 81355 - DNA, 598 bp, Arabidopsis thaliana columbia
gaacagccggtgagttcatggcttcaagctatgactatgacgctcctctcgatgaatacggcttaccaagagaaccaaagtatagtcacttgaaagcattgcataaagccatcaaacttagtgagccagctttgctttctgctgatgctaccgttacatcgcttggagctaagcaagaagcttatgtgttctggtctaaatcatcttgtgctgcgtttttatcgaacaaagatgagaactctgcagcgagagttctgttccgtggattcccatatgatttgcctccttggtcagtcagtattttacctgattgcaaaacagaggtttacaacactgcaaaggtcaatgcaccaagcgtacacaggaatatggttcctactggtactaaattctcttggggatcattcaacgaagcgactcctacagcgaatgaagctggtacgtttgcaagaaacgggcttgtggaacaaataagcatgacttgggacaaatctgactatttttggtatataacagacattacaatcggttccggtgagacatttttgtaaaggcctggtgattcacctcttcttacagttatgtcagctggacatgc

SEQ ID NO: 81356 - DNA, 932 bp, Arabidopsis thaliana columbia
  unsure (1)..(932): unsure at all n locations
atacgactcatttagggaaagctggtacgcctgcaggtaccggtccggaattcccgggtcgacccccgcgcccgcagcgaatgaagctggtacgtttgcaagaaacgggcttgtggaacaaataagcatgacttgggacaaatctgactatttttggtatataacagacattacaatcggttccggtgagacatttttgaagactggtgattcacctcttcttacagttatgtcagctggacatgctcttcatgtgtttgtcaatggtcagctttcaggaactgcttatggaggacttgaccacccaaaactaacctttagccagaagatcaaactacatgcaggtgtcaacaagattgctcttctgagtgttgcagtgggtctcccgaacgttggtacacattttgaacagtggaataaaggagttcttggtccggtcacattgaagggagtaaactcaggaacatgggacatgtcgaaatggaaatggtcctataagattggtgtaaagggtgaggctttgagtcttcataccaacacagagagttccggtgtgagatggactcaaggatcatttgtggcgaagaagcaaccattaacctggtaccaggctacgtttgctacaccagccaggaaatgaaccattggctttagacatgaacacaatgggaaaaggtcaagtttggataaacggtagaaatattggacgtcattggcctgcatataaagctcaaggatcttgtggncgttgtaactacgctggacctttcgncgcaaagaaatgcttaagtaattttggtgaagctcccaaagnntggtcccatgtnccccggttccatgggtttaggctnnaaaccntttaggtnttttcnaagggttnaggnggggnccctacggaattntttgggtaaaaggcnttaaaggttnnntta

SEQ ID NO: 81357 - DNA, 1036 bp, Arabidopsis thaliana columbia
acgactcactatagggtaaagctggtacgcctgcaggtaccggtccggaattcccgggtcgacccacgcgtccggtaacggttcttgagatggaggattcagtttcttgaaaagagtatcaggaatcttgattttgtagctggtggtgtttccacgatatgtcaagtaaatgatcttaagaattctccaggacctggtaagactgagcttaggttagctactaagcaagctcttcatcttcttcaagacaattaccctgagtttgtctctaaacagatattcatcaatgttccatggtggtaccttgcgttctatagaattattagtccttttatgtcacaaaggtcaaagagcaaactagttttcgcaggtccttcaagatctgcagaaacccttctcaagtacatatcacccgaacatgtcccggttcagtatggtggactaagtgtggataattgcgagtgtaactcggatttcacacacgatgatatcgctaccgagattactgttaaaccaactactaaacaaaccgtcgagattattgtttacgagaaatgtacaatcgtgtgggagataagagtagtgggatgggaggtttcgtatggagcggagtttgtgccggagaacaaagaagggtatacagtgatcattcagaaaccgaggaagatgactgcgaaaaatgaactggtggtgtctcatagcttcaaagttggagaagttggcaggattttgctaactgttgataacccgacttcgaccaagaaaatgcttatctacaggttcaaggttaagcctttagcttgtgagtaacaaaagccgcatctttcgtctgagtgtttcttagtttagaacttgatcatatgattgttgattgtgttttgtttttctctcttttaccgacttatatgcggccgcggttctgtttgctaaattcttttgttttatattgtattttgctctcttattttttatttttcagtttgcttccaaatttcactgaggaatgtttttgacttttgagtgttgaatggctttt

SEQ ID NO: 81358 - DNA, 806 bp, Arabidopsis thaliana columbia
  unsure (1)..(806): unsure at all n locations
nnnnnnnnnnnnnnnnnnnnnnnnnnnnnnnnnnnnnnnngtaccggttcggaattcccgggtccacccacgcgtccgtgtgaaccaacggccaaaaaatggcggctctactcggtatcgtctctcctgtgactttcaccggaaagcacccggtaaattcccgatcgcgacggagaacggtagtaaaatgctcgaacgaacgccggattctcttcaaccgcattgctccagtttacgataatttgaatgatctcttaagcttaggccagcatcgaatttggaaaaacatggctgtctcatggagtggagcaaaaaaaggagattacgttcttgatttgtgttgtggaagtggtgatttagcgtttctcttatctgagaaagttggttcaactggcaaggtttatgttcttagaaatgtgtagcttggcttgattgtaaaattgttgttctgataacttggtaatattattataggtgatgggcttggatttctcatctgaacaactagctgttgcagcaactagacagagtcttaaagcaaggtcttgttacaagtgtatagagtgagctcactggtggattgaaggtgatgctattgatttgccatttgatgattgtgaattcgatgcgggtacgatgggttatggtcttcgaaacgttgttgatagacttagagctatgagcgagatgtatcgggttttgaaaccaggttcaagagtatctatacttgatttcaataagagcaaccaatccgttactacgtttatgcaaggctggatgattgacaatgtagttgcccctgtggc

SEQ ID NO: 81359 - DNA, 376 bp, Arabidopsis thaliana columbia
cttctcttcctctcttttccgtttatctctttcgcagcttctcaggccgcgaagactttcattttccgtatcgatggtggatctatgccttctattttcccgacgcactaccattggtatagcaccgagttcgccgaagaatctcgaatcgtccatgtttaccacacagtcttccatggtttctccgccgttgttactccagatgaagcagataatctccgtaaccacccagcagttcttgctgttttcgaagaccgacgtcgagagcttcacaccacacgttctcctcaatttcttggtttacaaaaccaaaaaggactatggtcagaatctgattacggatcagacgtaatcattggcgtttttgacaccggaa

SEQ ID NO: 81360 - DNA, 773 bp, Arabidopsis thaliana columbia
gcagtaccggtccggaattcccgggtcgacccacgcgtccagaaacaaatctgaaacaaactcagtagtcgagctttactatcaaatcgagcctgaagaagctcaatcaacgagaacgaaagctgtgctggatctctttcatgaaatcatagaagagccattgttcaatcagttgaggacaaaggagcagcttggttatgttgtcgagtgtggccctcgcttaacgtatcgtgtgcacggtttctgtttctgtgttcaatcttctaagtacggtccagttcatttgctggggagagttgacaatttcataaaagatatcgaagggcttctggaacaactggatgatgaatcctatgaagattaccgaagtggtatgattgctagattgctggaaaaggatccctctctcttgtccgagacaaatggacttatgggagtcagattgttgccaaaagggacatgtttgatttctcccccaaaggagcaggaggcctaaggagtttccagatgaaagatgtggccagttggtacaaaacctatttcagggaatcctcacccaattgccgtaggcttgccgtcagggtttggggatgccataccaatatgaaagaaactcaaacagatcaaaaggcggtgcaggtcataggacacgcagtggctttcaagtcaacttctaagttttccccctcccttggttatgagaagaacttactaaagagttttgcttcgccttcccttttttttatcttttatattttgaatcactcaatttt

SEQ ID NO: 81361 - DNA, 1184 bp, Arabidopsis thaliana columbia
ccccgcccccccccctttgaatttgcccgggcccccccccggtaccggtccggaattcccgggtcgacccacgcgtccgtgcacaagcacttgagtattgtagcagcaaaggtcgcgccttgtaccacgatcttaatgcttacaggatcttgtttgaccaggatggtaacccgagattatcttgctttggtcttatgaagaatagtagggatgggaagagttacagtacaaatttggctttcacacctcctgaatacctaagaacagggagagtgattccggagagtgtggtctacagcttcggaacgctgttgctagatcttctcagcggcaaacacataccaccaagccatgcgcttgatctgattcgtgggaagaatttcctgatgctgatggactcgtgtctagatggccatttctcaaacgatgatggaaccgatttggttcgtttagcttcccgttgtttgcagtatgaagctcgtgaaaggccaaatgtgaaatctctcgtgtcctcactcgctcctcttcagaaagaaactgatattccgtctcatgttttaatggggattctacatggagctgcttctccaaaggaaacaacttcgcttacccctcttggtgacgcttgttcacgacttgatctcacagcaatacatgaaattctcgaaaaggttggatacaaagatgacgagggtgtagcaaatgagctctcgttccaagtgtggaccgaccagattcaggagactctaaactccaagaaacaaggagatgctgcgttcaaaggcaaagactttgtcactgctgttgaatgttacacgcagttcatcgaagatggcacaatggtatcgccaacagtttttgcaaggaggtgtttgtgttatctgatgagcaatatgcctcaagaggctcttggtgatgcaatgcaggcgcaagtagtgtctcctgaatggcccaacggctttcttttcttcaggccgctgctctcttcagccttggaatggataaagacgcctgtgaaaccctaaaagatggaacttccttggagcccaagaaacataacaacagaaactgaaaacttcaagtgtataggtttcttctctcttccgccttcttcgttttgtgattggattctgagaaagcctcattgtctctgtcttctttaagcattatcttaaatttgtggt

SEQ ID NO: 81362 - DNA, 1076 bp, Arabidopsis thaliana columbia
  unsure (1)..(1076): unsure at all n locations
ttgacttcactcccgtcttcaacgactcactatgggaaagctggtacgcctgcaggtaccggtccggaattcccgggtcgacccacgcgtagactctcagaatctgaagaagaagaagagattgttgtttttgccttttatcatcggtttctttgaatctctggttttaaatcggatttaatggtggagtctctgttcccgagcatcgaaaacacaggtgaatcgtctcgaagaaagaagccgaggatatcagagacggcggaggcggagatagaggcacgacgtgtcaacgaagaaagcttgaagagatggaaaacgaatcgtgtgcaacaagatctacgcttgtaagctcgtcgaagctttacgccgagttcgtcagagatcttccaccaccagcaacaacgagaccgataaactcgtctccggcgcggcgagggagatacgtgatacggcggatcgagttctagctgcgtccgctcgtggtacgactcggtggagcagagcgattttagcgagtcgcgtccgagcgaagctgaagaaacatagaaaggcgaaaaagtcaacgggaaattgtaaatcgagaaaaggtctcacggagacgaatcggattaagttaccggcggttgagagaaaactgaagattcttggccgtttggttcctggttgccggaaagtctctgtaccgaatcttttagatgaagcgaccgattacatcgcagcgttagagatgcaggttcgagccatggaggctctcgccgaacttttaaccgcagccgcaccacggacgacgttgaccggaacttaacggcggcagttagtttgtcagttgttaattagcttttcttttacctttttacccctttattttggcttcaagtgttttttttttctcgtcgacgcgattttaatttattaaattcatgtattttatttgtatacatcatcacttctttttttttgcggccgnnnnnnnnnnnnnnnnnnnnnnnnnnnnnnnnnnnnnnnnnnnnnnnnnnnnnnnnnnnnnnnnnnnnnnnnnnnnnnnnnnnnnnnnnnnnnnnnnnnggaagaatcat

SEQ ID NO: 81363 - DNA, 880 bp, Arabidopsis thaliana columbia
  unsure (1)..(880): unsure at all n locations
aatacgacccactatagggtaaagctggtacgcctgcaggtaccggtccggaattcccgggtcgacccacgcgtccgggtttgagatctgatatttgtgtaatgaaaggtgatgttcgaacaaactctgcttcttcctcaatcttcctcttcacctcctccaccaataacaacacaaaaccggaaaagatcaaaccttacactagaaaatgggagactagtgtgatggacaccgttcaagaactcaacctcatcaccaaagattccaacaaatcttcagatcgtgtatgcgatgtgtaccatgatgttcctgctgtgttcttctccactggtggatacaccggtaacgtataccacgagtttaacgacgggattatccctttgtttataacttcacagcattacaacaaaaaagttgtgtttgtgatcgtcgagtatcatgactggtgggagatgaagtatggagatgtcgtttcgcagctctcggattatcctctggttgatttcaatggagatacgagaacacattgtttcaaagaagcaaccgttggattacgtattcacgacgagttaactgtgaattcttctttggtcattgggaatcaaaccattgttgacttcagaaacgttttggataggggttactcgcatcgtatccaaagcttgactcaggaggaaacagaggcgaacgtgaccgcactcgatttcaagaagaagccaaaactggtgattctttcaagaaacgggtcatcaagggcgatattaaacgagaatcttctcgtggagctagcagaggaaacagggttcaattgtngaggtctaaggccccaaaangcaacggaaatngncaagntttttcngtnngttgacncgggcgnttt

SEQ ID NO: 81364 - DNA, 778 bp, Arabidopsis thaliana columbia
  unsure (1)..(778): unsure at all n locations
gaaacaatnnnnnnnnnnnnnnnnnnnnnnnnnnnnnnnnnnnnnnnnnnnnnnnnnnnnnnnnnnnnnnnnnnnnnnnnnnnnnnnnnnnnnncggccgcgcggtttctatgtttatccctccaaaacctcctttcttctaccctctctagaccttcctctctcttgattcctttcttcgtatctctttcagtcgaagccaaaccccttgaatttccccgatttcaaatggcaattgtgacaggagatcgctatgttgagaagctacaaaagtttttagaagacgaagctgagtctcttctagaagaaaccatgattctcaagcttaatcctgctggtcttcactatcttcatctccgtcttgactctctccgtgaactcgaacgcatgctctccaatgctcctgttgattaccttcgcgcctacgtttccgacctcggcgattaccgcgcactcgaacagctccgtcgtattcttccgaatcctcacttctcttaaggtcgtttccactcttccttctccgggctcggtgaatcccacggcctcttctctctttttccctttggtagccttaaagggttttggaacctccgtcgctgtgaatttggcttacttctccggctaaaggcttgatcgagctccgtcacactttggaaaagatcatctgccataattccactgatgctctgaggcatgtcttcgctagtaggattgctgagataacgaattcgcccgagtggaataagttggcggtcatatcttgtgcttgtaaccgtct

SEQ ID NO: 81365 - DNA, 473 bp, Arabidopsis thaliana columbia
gaagaagaaagaagatgcagtcggcgaaggaaaagatcagtgacatggccagtacggccaaggagaaactcaacatcggtggcgcaaaggcacaaggtcatgcggagaagacgatggcaaggaccaaaaaagagaagaagttggcccaagagcgagagaagtctaaggaggcgcaggccaaagctgacctccatcaatccaaggctgagcatgctgcggacgctcaggttcacggccaccatcttcccggtcactccacctaccctacccgagccaccggagctaattacccgccgggacagatctaaaactagctctatagctatattaagattagccgccttgtttaacaatatgatatgtacgttttttctaatataagatcagcagtcatgaaattttcttggttagtttcttttgatagtttatgcataaacaataatgtaatcttgcagaaataaacgtacctaaat

SEQ ID NO: 81366 - DNA, 279 bp, Arabidopsis thaliana columbia
tctatcttcttactttcagacttgtgtccctgatttacttaaggttgctctgacctgtttggataacgtagctgacactgatggatcaatcaggggcatgagatctaagattgctgggtttcttgcaagcaacacacagcggaactggcctcgagatttgtacgagaagatagctcgaagcttttgaatctaagaaattcgaatacttgtctaaaaaagatcttgtaagaagctgttaaacccatttttgttacttaacctcgaggatcactttttgtt

SEQ ID NO: 81367 - DNA, 769 bp, Arabidopsis thaliana columbia
  unsure (1)..(769): unsure at all n locations
gaaacaatnnatttccgttnnnnnnnnnnnnnnnnnnnnnnnnnnnnnnnnnnnnnnnnnnnnnnnnnnnnnnnnnnnnnnnnnnnctttttttttttttttttttttatctaagaactagaacagtttcaccttcatatttcacatagggccaaaaggccataaacatagagagagagaggttctacctctttagttctacatacttatatatagataactttagggtaagctaaaaactaaaaagtcttttatatataaggcgttatatgcgttatattcgcttgcttatctaaaggtcaatgcttttaatgagcttcatgttggcgagtctctcgagaaagacattgaaaacgtcttcacgactaagcatgctgactcggacatgcttcttgtcagatccacaacgctctccagctctgctcattaccttgtgtctcctcaattcacttaccagatccgtctcttccttcgtccctagccacgcaaacgcagggtaagattcgagtgattttccaaagtagttgcaaaatgcttcagggtacttgggaagagtgaaagcatcgctctctttcacaacttcacgtagcttctcccaccgattcttcatcatctcacgaccatacttgaagaaattctcagactcggactcgctcttacaagtctcctttagaacgttgagtatcttagctgttcgaacctgtgactccttagacacaccaatcgagttcacaataatatactcaaccatcttcttagctacctccta

SEQ ID NO: 81368 - DNA, 757 bp, Arabidopsis thaliana columbia
  unsure (1)..(757): unsure at all n locations
tnnnnnnnnnnnnnnnnnncagaattaactttgattaccaaatttatctcatatttgaatcatcctctacactacgtatagcccacaaattgatgcttttgacaagacaaacaaacatggcgcagcaagttttgcgttatcgttcaaacattagataggattgtataatttacattcaataagaatattaaagaggtattgagaatttcgcaccaaagtatcattctcaggcttctttgtgagttgagcatcatgatgatgacgatgatgatgaattgatgatgatctctctttcaaagtattggattcacataagctgacaggacagcttaaagagatcatgatattcacagcttcaggtcaatacgctccgaccattcaaatatgccagagtggacctggtcatgtcctatatcagacccgttacctccggcggcaaccctcatgatatcttcgatcaaagcaaagtttcccatgatatcaacatgggcaccactctgcgtcccgcgcccttccaacaggttagccggcggagagtgattgtattctcttatataagtcttgattccggaagggttgaatcttgtcttgccacgccacgcttttgcacacatgtacccggcacttaggacgggtactgtttcatccccatccacattgtaaactcctgctttcagacagctatcttcgtcctcctcgtgagcagaagtgaatatctgaaaggggatgcaactgtcgggagactggttaaacttgt

SEQ ID NO: 81369 - DNA, 826 bp, Arabidopsis thaliana columbia
  unsure (1)..(826): unsure at all n locations
gaaacaattnnnnnnnnnnnnnnnataaggcaacaaagctggagctcaccgggtggcggccgctctagaactagtggacccccgggctgcatgttttccggttccctcgagtatcatcaaataaaaggaccatacagaaattctacttgttgaatcacatatctaagactgtagaatcagttcttaagaatgctactgtctaaatgagttatcatcaatcaagcatattagaagtctcctgcttcataaaacacacacatccacagatccactgaatctaactgtacacttccttttatacactattcgccatcttcatcatcatcatcaagctctacaatttgtgctcgcctctcagcagctttcctcctgatgaagaacccccatctcattgcggcttttatcttaagccatccaacaacagctctgcctgatcgaccacggtcttcatcataaccttgcataggcgtgtgtagaaacgatgggaaagtatatccatcttctggcaagtgtgttgcagagccattgcctcctcctcccatgctgaataggcggaggaactgttgcatgtcttcactctctagcatttcatggcttctgagtcggatctcttcctctgaaaagaaatcatctggtcctctctcacgggggtttgaccagtcttctaaatggttgagatctgcctggtgaacaaaaaaagggttgatgttttgggatcccgtttggggatgaatggtgaaggacccgagaacccaggccatttcatgtggttgaattggtttatgggtgccttttgagtttggatgtaagaatttccccatgaaac

SEQ ID NO: 81370 - DNA, 592 bp, Arabidopsis thaliana columbia
  unsure (1)..(592): unsure at all n locations
nnnnnnnnnnnnnnnnnnnnnnnnnnnnnnnnnnnnnnnnnnnnnnnnnnnnnnnnnnnnnnnnnnnnccacgcgtccgggctgagcttgatatcaagaaagctctcgaaatcgatccagacaacaaggaggtgaagatagaatataagaagttgaaggagaaggtgaaagagtataacaagaaagatgctaagttttacagcaacatgttgtcgaaaatgcttgagccacacaaaggaactcagaaggaagcacaagcgatgagtattgacaccaaggcatgagtctttgaatcactttagagagtcgcattgattccaaaaactaaatgtgaaaagtctacaaatttctgtttttactctttgtaatcaatcttggtgtgtgttactgtttcagagttgttataaaacagacttgtaataaacgaggatctactccaagttaatgacccccttcttatgaaccaagaagtggcaaatgtcataaattctaataagcagaaagctaagcgttatttccaaatgggggggggccgttttaaaggacccaagtttcggtccgcggcattggaagggtttagtttttttttggg

SEQ ID NO: 81371 - DNA, 717 bp, Arabidopsis thaliana columbia
  unsure (1)..(717): unsure at all n locations
atacgactccctataaggatagctggtacgcctgcaggtaccggtccggaattcccgggtcgacccacgcgtccgcttgtcaaagagaagtgtgtttgcgtcatcttcgattagtgtggggaaaaacttggaggatatgtcagcgtatattcatttcttggcgtctggatttgaagcttccagaacagcttttggtgctatacctggaagcttgcagcccgatgaagagttatgtagagatcttggtttgtctctcaacactccttccccaaatactcgcaagcaagattgacctgttttttaatttatctttgtctgcatatcattgggatatttttgtgtataaatcaatgtatactatctgaatcattctatagcagctttggtgtaatattgatgatgaaagttagatttttcatctaanaaaaaaaaaaaaaaaaaaaaaaaaaaaaaaaaaaaaaaaaaaaaaaaaaaaaaaaaaaaaaataaaaaaaaaaataagggggggccccttttaaaggacccaactttccttcccctgccttgcaaggttttagtttttttttagggccccctaattcaatttcccggcccgccttttacaaccgccggaacgggaaaacccttgggtttcccaactttattcccttttaagaaattccccttttccccagttgggttatttcaaaaaaggccccccccgtttgcccttttccc

SEQ ID NO: 81372 - DNA, 492 bp, Arabidopsis thaliana columbia
cccacgcgtccgccagaaaccaaatcacacttacatcataaatcctctgtacataacccaaaaaaaaccctagaaacgaagaaagatcaagatgggtttgattagcaaagaagagataagcaaaacaagaagatattcatcttctctttggagaggtatcaaaacgatctttgttctcttcactatgtttctctctttcatcatcttttctgctccgatcttcctcgccgtcgccgacgccgtcctcccctccgcaatcctctcatcctcctcaccctccctcaaccgcctatctccttctagttttccggcgacgatttattcttacctcagtaactacgatttccgttactctctcatcgacatacctctcatctccataattagatctgccattatactatgcgtttacgggctttgtgacggaccaaagttatcaaggggaccatatctgacaataacgatgatatgctcgatatcttcactgatata

SEQ ID NO: 81373 - DNA, 946 bp, Arabidopsis thaliana columbia
  unsure (1)..(946): unsure at all n locations
acgcctnnnnnnnnnnnnnnnnnnnnnnnnnnnnnnnnnnnnnnnnnnnnnnnnnnnnnnnnnnnnnnnnnnnnnccacgcgtccggagacatcgagactcggtttcaggagaagggatgagagaagaggaggtgagtctgtggaattcgatggtggaagaagcagatcaaatgcaagattcctctgttgatcgtgacatgagattgagacttgtttcaccgatcactgcaaggattgaattggatgattatgccaattacactagaactgagcttttatataagataggtttggctcaagagcctgacaatcatctgctcctagctaactacgctcagttcctttacctcgttactcaagaccatgagagagcggagaactgcttcaagaaagcaatagagtcagaagatgtagacgcagaaacgtacagcaaatacgccatcttcctgtggaaagttcggaatgatctctgggctgctgaggagaactttctagaagctatatctgcagaccctaccaactccttctacgccgccaactacgccaatttcctctggaataccggtggtgaagagacgtgtttccctttagaagattctactcaggaaatggtttgagaaggagcgaatggcagtgaatggatgttggtttgtttggagtgaagagacagcgacacggaacttaggtacacgatagaagcaagaggaaaagtgtaagtagtgtttttgagtgaaccattgcggctgatgaaacattgcttctctttggttcttttttctttttgcttttgcctaatttttcactcagtagtatatacggtcgcagattccatcgaataagaacatgtgtagatccaacactattacacgaataataaacactgagcattgcttttcgtgaaataataagtgcgcatatttgaatagataaaaaaaaaaaaagaaa

SEQ ID NO: 81374 - DNA, 746 bp, Arabidopsis thaliana columbia
  unsure (1)..(746): unsure at all n locations
gtnnnnnnnnnnnnnnnnnnnnnnnnnnnnnnnnnnnnnnnnnnnnnnnnnnnnnnnnnnnnnnnnnnnnccacgcgtccttaagatccaattggaaagggttatcctaattcccagtcattgatcggagaagatgagtgctgttgcgattaaccacttttttggcttaccggaggcgatcgagaagctaattctcccgatttctcgttccggcgaaagtaataacgagagtcgtggaagaggaagtagcaataatatcccaatagacattttggaatctcccaaagaatacatattttatctcgatatccccggaatttcaaaatcagatatccaggttacagtggaggaagagaggactttagtgataaagagtaatgggaagaggaagagagatgatgatgagagtgaagaagggtctaagtatattagactcgagaggagacttgctcagaatttggttaagaagttccggttaccagaagatgctgatatggcttctgtaacggctaaatatcaagaaggtgttttgacagttgttatcaagaagctaccgccacagccgccgaaacctaagactgttcaaatcgctgtttcttgagtagtttctgagttttggttttgtgtgtgtttgttttctagtttgtaatttttctgtgtttggataaaaagactctgtttcttttatgtgttctcttgtcgaaaatttgaaattgaagaaataaatagggttagcctcccaaacc

SEQ ID NO: 81375 - DNA, 781 bp, Arabidopsis thaliana columbia
  unsure (1)..(781): unsure at all n locations
acgcccgtnnnnnnnnnnnnnnnnnnnnnnnnnnnnnnnnnnnnnnnnnnnnnnnnnnnnnnnnnnnnnnnnnnnnnccacgcgtccgctcaattgctactcggcagtctcaagaagctatcatttttcatgtgtagtttcggtgaggttttctacgacacagaagatatagatgtctctaaagctctatcgaatttacaagagattgacatagactactgctatgatcttgatgagttaccatattggatccccgaagttgtttcattgaagacacttagcatcacaaactgtaacaagctctctcaacttccagaagctatagggaacttgagtagactagaagtgttgaggatgtgttcttgtatgaatctctctgagctgcctgaagcaactgagagactcagcaacttgcggtctctggatatttctcattgcttaggattgagaaagttgcctcaagagattggcaaactacagaaactggagaatatctcgatgaggaagtgttcgggatgcgagttgccggattcagtgaggtatctagagaatctggaggtcaaatgcgatgaagtaactggattgttgtgggaaaggttgatgccagaaatgagaaatttgagagttcacacggaggaaacagagcataacctgaaggtgcttctaacgttttaagttttgagtgaaaaaaaaaacattttcgtagcttgtgtattcttattgactctttaatgatcacaatctagactaaacgagtaataatattacaagagtcaacatg

SEQ ID NO: 81376 - DNA, 770 bp, Arabidopsis thaliana columbia
  unsure (1)..(770): unsure at all n locations
ctctnnnnnnnnnnnnnnnnnnnnnnnnnnnnnnnnnnnnnnnnnnnnnnnnnnnnnnnnnnnnnnnnccacgcgtccgccggtgtctgcggaagttgacgcgatcgacctgaatacgccgttgccgtttgattcggacagtgacgatgacaacgtcattgacgacgctgctgcactgccactcgacagcgagctgtcgagcctgcaggatgaaatggctgtgccgggttttgcagaaccggtcacgctggcagccgcgctcgaggccggcctgcacgtgatcgaggaggagcagaccctggacgacgacgggcaatggcccgtgatcggcctccaggccagcgaactcgcgccgggtgaggcagatgcctttgccgaggatgcggacgtcggcggggaggcggcggtcggtgaaggagagagcgccgatcagccgtccccggcgacggtgattgaggagatcaccgcagaggcgccgcagggcggcactgctgcggtgcgcttcttcgaaatggaagacgcaccgggccagggcacggtcgataccgatgcacaggttgcagcgaccgacatcgtgccgcgtgcgccgcaccacgagcaggcatcctgtgcggcggatgccgaagacggcgccgatgcactcgacttcagcgtgtacgaccgcgagctggtcgatatctttgtcgaggaaggcaaggacctgctcgaccactgcgatggcctgatcagcgaactgcgcgatgcaccgcatgaccgcgaggtgctggccg

SEQ ID NO: 81377 - DNA, 776 bp, Arabidopsis thaliana columbia
  unsure (1)..(776): unsure at all n locations
nnnnnnnnnnnnnnnnnnnnnnnnnnnnnnnnnnnnnnnnnnnnnnnnnnnnnnnnnnnnnnnnnnnnnnnnnnnnnnccacgcgtccgatcggcttgattcagggcaatgggaacacattccagctaaattcccgagatctttgttggatggttacttagttgctggaactcagaagagattgtttctcgtgggaaggattggcctctacagtactctccaaagcatgagaatatgggagcttgatcacacaaaggtctcttgggtagagataagtagaatgccaccaaagtacttccgagcacttctgagactttcggctgagaggttcgagtgttttggacaagataatttgatctgctttacgtcttggaattaaggaaaaggtcttctatacaatgtggataagaaaatttggtcttggatttccggttgtgctcttcagtcatgcaacagccaagtgtgcttttatgagccaagatttgatgcatctgtcctctgaacaataagttatcgtctgtctcacatcattcttgaaaacttacaagttcgccagcaaaacatgtcagaaatatgaaatcaaagagggtttgatgggtcccttcagtgttaatgaagacctggtcagcaatgatatgcttcaccaatggttaacaatatcgaggagaaaaactgtaagataaacttgtttctagctttctgtaaattagcattcactcgatatgaaaactttctcaatatcccctgtctcgttcgcgtgaaatatatatacactt

SEQ ID NO: 81378 - DNA, 777 bp, Arabidopsis thaliana columbia
  unsure (1)..(777): unsure at all n locations
nnnnnnnnnnnnnnnnnnnnnnnnnnnnnnnnnnnnnnnnnnnnnnnnnnnnnnnnnnnnnnnnnnnnnnnnnnnnnnnnnnnccacgcgtccggtcaggaccttgtggcagctaccagcaattccggcccttgtggaggtaacaatggtgttgtaaagacaccttgtgagtacgttgtcagctatggagatggatcatacactcgaggagacttggcaagtgaaagcatcctattgggcgacacaaaacttgaaaactttgtctttggttgtggccgaaacaacaaaggtctgtttgggggatcctctggtttaatgggtttgggaagaagttcagtctctttagtctcccaaactttgaaaactttcaacggagttttctcatactgtttaccttctcttgaggatggagcttctggctcattgtcctttggtaacgattcctctgtttacacgaattcaacttcagtttcctacacgccgttagtacaaaaccctcagcttcgttccttttacattcctgaatctcactggtgctagcattggtggcgtgggaactgaaatctttcaaagctttggcagagggggattctaatcggttcaggaacgggtntccacaagattgccaccttcccatttacaaagctgttaaggnaggggttcttaaaacagttttccgggttnccaanngcnccggggtatttaattttngggcattgnttttnaccccnnaaagttttgnggcanaagggttccccttttcaaaatgttntnctc

SEQ ID NO: 81379 - DNA, 1004 bp, Arabidopsis thaliana columbia
ctccattaatgttgctctcacactcatgcacctctcttatctttataggagtgtgttccctttgtatgttacccaaaacgggacattaccataacaaaacagagagatgagtcaagaagaacaaccaaagcggccacaagagccagtcacttacggtgacgtttttgaagtctccggtgaactcgctgataagcctatagcgccggaggatgcaaacatgatgcaagcagcggagacacgtgtgtttggccacactcagaaaggcggtgcagcggcagtcatgcagtctgcagccactgctaataaacgcggtggctttgtccatccaggtgacacaactgatctcgccgctgaacgaggcgtcacagtggcgcaaactgacgtccctggtgcacgtgtcacaacagaattcgtcggtggacaggtcgttggacaatacgtcgagcctaggccagtggcgactgcggcagtttatggtaagcagaagttggtgggtttgagtttacaaagtgcaataacgattggagaagcattggaagcgactgtgcaaaccgctggaaacaaaccggtggatcaaagcgacgcagcagcgattcaagcggcagaggttagagcttgtggcactaatgtgattgctcctggtggaatcgccgcttctgctcaatcagcagcaaatcacaacgctaccatagaccgtgatgaggataaaatcaagctcattgatgttttggcggggtgcgaccgggaagttagccgcagataaatctgtgaccaggcaggacgcagagggagtggtgagcgctgagctgaggaacaatcctaatttgtctactcaccctggtggtgtagcggcttctattactgccgccgctaggcttaacgagagagctgatatatgaaaaatcctgcgagagggagatgttttggttctgttgttcaaaaaagttcagtcataatgtaaaaaaatggtcactttccggttataaagttgaaatctttctctc

SEQ ID NO: 81380 - DNA, 591 bp, Arabidopsis thaliana columbia
  unsure (1)..(591): unsure at all n locations
taaaaaagctttcattttctcactctctatcatctctgtcaaattcaaaattcgagtattcgaaaaatccagctccaaaatcgttgattagcagcgactaaaacccaaagtttcctccaattttaacgaattacttcgtgggtcaatctcataatctgggaacactctttcggttttgattttgttggcagcatctattctaagcgaaatgatgggaagtaaaagagaagaagagaggaacgagaagattattcgtgggcttatgaagcttccaccgaatcgtcgttgtatcaactgcaatagccttggccctcaatatgtttgcacaactttctggaccttcgtatgcatggcttgtagcgggatacaccgcgaattcactcatcgtgtgaaatctgtgtcaatgtcaaagtttacttcctaaagaagttgaagtacttcaaaatggtgggaatcagcgcgcccgagaaatatatttgaaaaactgggggcaccaacggcagaggcttccaggaaacagtaatgctgggagagtccccgaattttccaaaatgggatgtgcaaaagaaattccgggggaatgctcngggc

SEQ ID NO: 81381 - DNA, 790 bp, Arabidopsis thaliana columbia
cgcagggccggttcggaattccgcgtcgactcccacgcgcggccgcacatcttctgctagtaccccaaaaacatcttttgatttcatgaagaataacaacagtcacagcagtgctctatggttcttcttcttcttacttgagcagcaaggaagatgctcttgtcacgaccaagaagctcatggaaccaagcaaaacactaaacatgagcattaatccaaaacaagaggagtttggtgatgagaagaaaatggtgaaggaagctcctgaagatccagagattggtgtgttgggagctgagaagtacttcaatggagacatgggatccagaccaagggttcctagtgttctgtctctgacaaaacccagaaggttgagcagaaccgtcggcggctcgaagccgagcgcgaagaaatctactggtactccgagtgtccggtctgaatcaagctggaatagtcagagcgtgttgcttcagaacaaactggtgaatagctgcaacagttccttcaaggaaaagaagaacagtaatggtcagattcaaaaggtgaccaataataagaagagttttctcgcaaatttggggtgtaaatgcgcatgctctgatggggatactgtctatgtcgaggagaaaaccttcgtcaagagaagcgctgatccgaatatctctgttatcacaatgagatcttcctgcgatattaacacagacctgatcaagaatcagaagcaagaggagttatcccagagggaagtctcttggagttttttggatctccaagggcttttgagaag

SEQ ID NO: 81382 - DNA, 589 bp, Arabidopsis thaliana columbia
  unsure (1)..(589): unsure at all n locations
ccttgcggtcccccncttacggtaagnttntggnatggatgcatnccngtcaacccttcccagntggaggccatttccgcccggggcttttcggggcccctcatgattggtgtgacgcctttgacacatccccccgaacgtttgatcttttccacggcagggacccccttcaccagaaccccccaagccccgtggatgcagctttgaagatctgcttatcgagatggatcggatactacgcccagaaggatttgtcataattcgtgacacaactgacaatattagctatatcaagaagtatctgacattattgaaatgggataaatggtccacagagacaactccaaaaggtgatcctctgtcgaccaaagacgagatagttttgatcgccagaaagaaactttggagcttgcccgccatttcagtgtcctgaaatctaacagtcaacaggcgaatgaatgagatttacagcatcagaggcgcgtagctgaggaaaatactcagcaatggagaagtgtaaattacacgacattcatacatagttgttaacttgttatgcatttgttgtaggaaactgcnaaatcttctt

SEQ ID NO: 81383 - DNA, 737 bp, Arabidopsis thaliana columbia
aatccgttcaccatgacgtcgcatgcacgcgtacgtaagcttggatcctctagagcggccgccctttttttttttttttgcagatttaagtcatatatggtttccttctacaaacagaaacatgtaaccaaaaagtctcaacaactgtgtaaaaaaaacaacaaacttctccaaatattttagttttcctctgcctcaaaattcaactacttggaagtaacaagacaagacaaaagacaagagagacgagagagacgagagaagtgtttctacatgttttttctttttttcctttttaccttttcttcaaggatctggaagctgttggagagttctcaggtgtcttcagaggaagagctgatttttctgctgctttctccattggtttactatctttgtgtttgtcaatggctacacgaaactcttcaacaattgtcgggtctttgaacttcagtgcaaatgtagagagaccttctttgccttcgcttacactattcacacaagcgaatgtgattccctttttatccatgtttgcaagtttcatctctgggtaaagactcgcgtttaagatcaatctgtagtttcctttagctctcataactaatcttgctttaccatattactggagacgtttaccttgagttctccttttccacgctctttccatcctccatcaagatattcgaacatgatcgagtcagctgagaaggcaactttctcattctcttcacctgttt

SEQ ID NO: 81384 - DNA, 498 bp, Arabidopsis thaliana columbia
  unsure (1)..(498): unsure at all n locations
cccacgtcgccgtttctctctctaaccccttctctcttcagtctctctctctctagacgatctctatcttgaataaaataccgataatgacctcaaccaatccggtggtcgccgaagtaataccggcggaaacttctacagatgctacagagacgacgattgcaacgacggaagctggtgaagcaccggagaagaaggtgaggaaagcttacacaatcaccaagtctagagagagttggactgaaggagaacacgacaagtttctggaagctcttcaattgtttgatcgtgactggaaaaagatagaagatttttttggttcaaagacagttattcagatcaggagccatgcccaaaaatactttctaaaggtccaaaaaaatggggctttagcacatgttccaccccctaggcctaagcgcaaagttgctcatccatatcctcaaaaggcattcgaaaaattgctcaantttcggttnncgtttcnatngcctttcc

SEQ ID NO: 81385 - DNA, 1269 bp, Arabidopsis thaliana columbia
  unsure (1)..(1269): unsure at all n locations
atgatatnnnnnnnnnnnnnnnnnnnnnnnnnnnnnnnnnnnnnnnnnnnnnnnnnnnnnnnnnnnnnnnnnnnnnnnnnnccacgcgtccgtacggctcgagaagacgacagaaggtgaggaaagcttacacaatcaccaagtctagagagagttggactgaaggagaacacgacaagtttctggaagctcttcaattgtttgatcgtgactggaaaaagatagaagattttgttggttcaaagacagttattcagatcaggagccatgcccaaaaatactttctaaaggtccaaaaaaatgggactttagcacatgttccaccccctaggcctaagcgcaaagctgcttatccatatcctcaaaaggcatcgaaaaatgctcaaatgtcgcttcacgtttccatgtcctttcctactcaaataaataacctgcctggatatactccatgggatgatgatacatctgcattgttaaacattgctgtaagtggggttattccaccagaagatgaacttgatactctttgtggagcagaagttgatgttggatcaaatgacatgataagtgaaactagtccttcagcatctggtatcggaagctcaagcagaacactatcagattctaagggtttgagactggcgaaacaagctccctcaatgcatggtcttcctgattttgctgaggtttataacttcattgggagtgtgttcgatcctgacagcaaaggccgcatgaaaaagctcaaggaaatggatcctataaatttcgaaactgttttgctgttgatgagaaacctcacagtgaacttgtcaaaccctgactttgaacctacttctgaatatgttgatgctgcagaggaaggtcatgaacacttaagctcttagctgtttgtgcactcaacaagttatatatcttcttgacgacttcttgctcgcaacaactctctaccagctatcaaatgcatcgtacggttgttgtctgaggagaacataactgagtcgtcgtcacaaacaagaggaacatatgcagtttcggtcagaaccagtcgtgtgaatggtagatatatgtatgtgtgtgtagaaaatggttaccaattgtatcttctttttgataattattttttcatgccttttgtaatatgtaagtttctttacctcgttctctgattggttattttctggttatctgtttaaccaaaagctatgtaacacagtagcaaattgttacttaactcggaagtgagatacatacctctgttntattgca

SEQ ID NO: 81386 - DNA, 511 bp, Arabidopsis thaliana columbia
  unsure (1)..(511): unsure at all n locations
atcaaacctctttccagtgacaactcaaacccctaatccccaaaatggctcactggttgtaatccctagtcattgcattaacattcacaagctttttcactggtctctcagctagtngccaccttcttcaatcaacaccagctattaccccaccggttacaacaacatttccaccacttcccacaaccacaatgccaccatttcctccttcaacttctcttcctcagccaactgcgtttccgccattaccaagctcacaaataccttctttacctaacccagcacaacccattaatatcccaaacttctccacaaatcaatatccctaacttccccaattttcttatccccaaaacaaactttcccatttcaatttcttccccaccaggccatttccaaacaattcccatttctttnaatttccaaccaacctttncaaatggggggaggttagttaagggtctttagggtgggntcttggcacaagaacaanatggncccgggttnccnt

SEQ ID NO: 81387 - DNA, 801 bp, Arabidopsis thaliana columbia
  unsure (1)..(801): unsure at all n locations
cctagtcatngcattaacattcacaagctttttcacnggtctctcagctagtcgccaccctcttctcgccccacccgcccgtaccccaccggttacaacaacatttccaccacttcccacaaccacaatgccaccatttcctccttcaacttctcttcctcagccaactgcgtttccgccattaccaagctcacaaataccttctttacctaacccagcacaacccattaatatcccaaacttcccacaaatcaatatccctaacttcccaatttctatcccaaacaacttcccattcaatcttcccaccagcattccaacaatcccattcttcactccaccaccttccaaatgagaagctaattaagctctatagctagctactgccacacaacacatgaccacgataccatctatctattgtttgcatattatgtgttgtaaacttgtaatggtttttattcttttttttgtctaagtttgttatttcttttactgttcgtttgatgttatccttgctgttgatgttggtttcttttaatcagctgttttttgtaatatatccagcttattcttattctattgattacaaactttcttgttcccgataataaaggcccttccaaactattttggnnnnnnnnnnnnnnnnnnnnnnnnnnnnnnnnnnnnnnnnnnnnnnnnnnnnnnnnnnnnnnnnnnnnnnnnnnnnnnnnnnnnnnnnnnnnnnnnnnnnnnnnnnnnnnnnnnnnnnnnnnnnnnnnnnnnnnnnnnnnnnnnnnnnnnnnnnnnnnnnnnntg

SEQ ID NO: 81388 - DNA, 528 bp, Arabidopsis thaliana columbia
  unsure (1)..(528): unsure at all n locations
cggacgcgtgggcaagacctcactgctccattttttcatcaaactgggctacaagaccacactgctccatttaatcctcaaactgggctacaagaccacactgctccatttaatcatcaaactgggctacaagacctcactgctccatttaatcctcaaactgggctacaagacctcactgctccatttaatcctcaaactgggctacatgacctcacttctccatttaatcctcaaactgggctacaagacctcactgctccattaaatcctcaaactgggaatcgcaatgacccgagaagctcctcctttctgtataatcaaggccattttgacttctctggtggtaatgatgatgatccttatggcttttctgcttccatgagacatagaccaaaaatgtaaaaaaagaagaagagaagagaagcaggatttacaaatccaaccgcaaaagatcagaccgaatagnnnnnnnnnnnnnnnnnnnnnnnnnnnnnnnnnnnnnnnnnnnnnnnnnnnnnnnnnnnn

SEQ ID NO: 81389 - DNA, 599 bp, Arabidopsis thaliana columbia
gaaacagaaaactaaagaaaaaaaatatgcaatcggcgaaacagaagataagcgatatggctagtacagccaaggagaagatggtgatatgtcaagcaaaagctgatgagaaggcagagcgggcgatggcgaggacgaaagaggagaaagagatagcgcaccaacggagaaaggcgaaggaagcagaagcgaatatggatatgcacatggctaaagcggctcatgcggaagacaagcttatggctaagcaatctcactaccatgttactgatcatggtccccacgtgcctcaacaagcgcctgtaccggctcccgcaccggttatgggacacggttacgggcataatcctaccggagttacctcagtgcctcctctgacctatcatccgacttatcctccgacgggacatcataatcatcatcactactaatccgacctactatctttttaaaataaaaaaaaataacctgattatacgtgtggggcctttagtggttttcttagttcttaggcatgtgcttaaaattaagtgattaagcgttgagttgatgtttgcaactttgcgtacacgtttgttgataaatattttggttattcc

SEQ ID NO: 81390 - DNA, 1174 bp, Arabidopsis thaliana columbia
  unsure (1)..(1174): unsure at all n locations
gtccgcaattcccgggtcgacccacgcgtccggtttagcggaaaatggaaatgacaaatcatccacatattttcctatatatatttcctaaacgtttcttacactgaaacaaccaatcctatacacaatggcttcaagaaaacctgttaatcgcccatccgtgaggcacgcgagtcacaaccatccgctgcgtgtctttaaagctcgagacgaagatgaggtcgtttgctctggatgcgagctcgagctaaccggacaagctttcaagtgtatgaagtcagattgtgattacttcttgcacaagtcatgtttcgacctacctcgtgaaaccaatcacaagtctcacccaaaccactctttgaccctgcttcattccccaccgtacggtcagtcttacacatgcgacgcatgcggtgagtacggatctggtttcacttacaattgttctgaatgtcaatatgatgttcatgtcggatgtgcttttatccctgagaccgtggagcgcgaagatcacgaacccccactcacgcttctctaacaatacaccatgcaaaggtcgcgaggacggtgcttagttcatatgtgatggttgtgaagaaaaaatgtccgaaaatctttgggtttattactgcaaagagtgtgattatgggacgcatgtgcattcttgcgccgtctatgaagatcatgagtcagagaaaagaggaggaggtagggaagaaggagaaccgagctctgcggtttcaaggatgaaatcgttgatgaaggctcaacatcagatggcggggttacagctcgaggcaggtattagaaacgacactaataatgctatactcgatttatgggatagtccaaagcggagatattattattgatcgaataaacgagtgatcaatttgatacaatgattttattttattttgaataataataatgaagcttgtgattgttctttcttttgaaaattttgttttctcgtgtgatatgttgtaagtatttttctcaactatccaagtcaatctctgtaccctaatatagaagttaattatagatgacgttatatacattttccacataataaaatcgtaatttcgagttaaaaaaaaaaaaaaaaggacanncaagggcggccgctctagaggatccaagcttacgtacgcgtgcatgcgacgtcatg

SEQ ID NO: 81391 - DNA, 540 bp, Arabidopsis thaliana columbia
  unsure (1)..(540): unsure at all n locations
gttttgttccataacattttcatgaatgccacgatataatcagatattagttacagaattcactccatagagaaacaaacatcagattattttgtttgagggaatacaaattcctggtgaagcttttactttgttacacgaaccgaatcaaaaacacctagtttctttatttgttgatttttagtgcaataaacttttgtttggctcctctattgctcttctcttaaatctctgtaatactcactggatccatttctctataatgggcaacctcctgcctcctctggctccttcaagccactctgggggccacctttggaagcagccccggagatcctgcaggggggagccccttcctgggcacaaagcgcaacgatggctactggaaacggtccttaggacccccccaagggtccaaggggccggaatccatnggggaaaagaaggtgggtccaaancnttaagannggccaaccccatccccaatccgggggaccaaggggcgnggttacccggaacaagcagaatgnctggaagccc

SEQ ID NO: 81392 - DNA, 755 bp, Arabidopsis thaliana columbia
catgacgtcgcatgcacgcgtacgtaagcttggatcctctagagcggccgcccttttttttttttttttttttacagaatttactccatagtgaaacaaacatcagattattttgtttgagggaatacaaattcctggtgaagcttttactttgttacacgaaccgaatcaaaaacacctagtttctttatttgttgatttttagtgcaataaacttttgtttggctcctctattgctcttctcttaaatctctgtaatactcactgatccatttctctataatggcaacctcttgcctcctctgctctttcagccactctgggtcatcttttgtagcagccctgagatctgcatggtgagctcctttcttggtcacaagcgcaacgatgctacttgaaatgttcttcagaacccctccacggctccaagggtcctgcattccattggagaatatgatgttgcttccaaatctcttcagtactgtctctatcctcattccaccaaattctgtggtgatccaatggggtcgaggcttgactccgtatctagtcatgcattgttcttggaatgcctcagagtcattttcgtacggagggagcatgctctggttcgagcagctcattggcatcaccatctctgtacacgcctgatattgccaaccatcaagtccatgatccatcagttggtggtccatctcgaagcatttttttgatccccaatagttgtagtataagccttgcagcagcaaaagcct

SEQ ID NO: 81393 - DNA, 445 bp, Arabidopsis thaliana columbia
tgttcataaaccctaaaaatcctctctttttctcaaccttgattcttagccatggagttctggggaattgaagttaaatcaggaaagccagttacagtgactcctgaagaaggcattcttatccacgtttctcaggcatcgcttggagaatgtaaaaacaagaagggagagtttgtgcctttacatgtaaaggttgggaaccagaacttggttctgggaactctatcgactgagaacatccctcagcttttctgtgatttggtattcgacaaggagtttgagctttctcacacttggggaaaaggaagtgtttactttgttggatacaaaactcccaacattgagccacaaggctattctgaggaagaagaggaagaagaggaagcaagttcctgctggggatgctgccaaggctgtaggctaacccaaaggttagccttcaaga

SEQ ID NO: 81394 - DNA, 732 bp, Arabidopsis thaliana columbia
  unsure (1)..(732): unsure at all n locations
cttttagagagaatttagggtttagggtttatacgaagaagatgaagaaggggaaggggaagacgatgttcccacccattccagttttgtcagctttttaccagttctgtttaattacatttttcttttaacattcattagcaaatcctaacagtctaatctatttttgcttgcacaaaacgtagtgntaattagagtaaccaagaaaagtttcagtatttcaaaaatttggggtagaaagtgatcattcgagaaatgtgattgacaaattcataagttttaaaggtaaaaaacaacacagaagaacaatagagatgaaaacaaaacttttagtattacccaaaagttgaaataagggtattaataaattaatccaggcttccttctcggcttctttttcccgggttatcctcccccacgatatctgtcccgtctctcttctctcctacgtttcttatttatttcctcattcttagcttttctctgcttcatactctttcctcttcttctgatccgttgcctntttcttcttcatcgtgtgatggttgaagcagctggaattgctgggatgatagnangcccttttcttccttcggntccattaaaanngctcttttatccccaagggtgggctttccgcttgganantttggggtcgcataaacgggaacctttccagcgttggacngagggtgactcttggtcntcgtgctganggaccatccggaaggg

SEQ ID NO: 81395 - DNA, 757 bp, Arabidopsis thaliana columbia
  unsure (1)..(757): unsure at all n locations
cactctattccagctatgacgtcgcatgcacgcgtacgtaagcttggatcctctagagcggccgcccttgntttttttttttttttatccaagataagtttcagtatttcaaaaatttggggtagaaagtgatcattcgagaaatgtgattgacaaattcataagttttaaagtaaaaaacaacacagaagaacaatagagatgaaaacaaaacttttagtattacacaaaagttgaaataaggtattaataaattaatcaaggcttcttctcgtcttctttttctgtttatcttcctcacgatatctgtcccgtctctcttctctcctacgtttcttatttatttcctcattcttagctttctctgcttcatactctttcctcttcttctgatccgttgcctttttcttcttcatcgtgtgatgttgaagcagctggaattgctggatgatagtatgctcttttctttctttcggttccattataactgctcttttatcctctagtgatggtcttttccgctttggtatatttttgggtttcgacataaacggtaaatctttttctagacgctttggaatctgtagtggattgaacttcttttgctttctttcgattgccttgtagagtgaatccttattcactggaataggcggacgcgtggnnnnnnnnnnnnnnnnnnnnnnnnnnnnnnnnnnnnnnnnnnnnnnnnnnnnnnnnnnnnnnnnnnnnnnnnnnnnnnnnnnnnnnnnnnnnn

SEQ ID NO: 81396 - DNA, 836 bp, Arabidopsis thaliana columbia
  unsure (1)..(836): unsure at all n locations
aaaacactcagtggttcgcttgggaaatgtttccggtcgaagtttccactgaaagaggnaggccttcagttgttattgacaaggatgaaggattggggaagtttgatgcagccaagttaaaaaagcttagaccaagtttcaaggaggatgggggatcagtcactgctggaaatgcatcaagcataagtgatggtgcggcagcgttagtgctagtgagtggagagaaggctcttgagcttggactgcatgttatcgctaagattagaggatacgctgatgctgctcaggcaccagagttattcacaaccacgccagctcttgctattcctaaagctataaagcgggctggtttggatgcatctcaagtggattattatgaaataaacgaagcattttctgtggtagctctagccaatcagaaactactgggattagatcctgaacggctcaatgcgcatggaggggctgtttcactgggacatccattgggctgtagcggtgctcgtatcttggtcacattattgggggtgttgagagcaaagaagggaaagtatggagtggcatcaatatgcaacggaggaggaggagcatcagcacttgtccttgagttcatgtcggagaagacaatcggatattcggcactctgaagctaagagctgttgttttataacgcaaagcttatgtatatggttcatgtgtgtgtcacaagactgtaactttgtacttgagagagatgcaataaaagtgtgttagaaaaaaaaaaaaaaaaagggcggccgctctagaggatccaagcttacgtacgcgtgcaagcgacgtcatagctgttctataag

SEQ ID NO: 81397 - DNA, 751 bp, Arabidopsis thaliana columbia
ttgcagtaccggtctcgaattcccgggtcgacccacgcgtccgcttgtcctagaatcagagagttcaaaatcaagggcccttgaacttggtttaaagttggccggtagcgagaaacttgtcgataaactatcattaagagtcaaagagtttgaagagaaacttcaaaccaaagcaattcagcctgatattgttcaagaaagaagcatcttcgaaacaccgagagcaccttctacctcagagatatccgagattgaggacaagggagccttgggaataaaatcaatatcaccggtgcctacagcagcacaagtgagaacagtgaggaagggatcgacggttcatctttcaatcaacatagattcagagtccgagcatctgatgaacaacaacgaaacagatgaagataaaggacatgttttcaagtctctcaacatgtctggtctgattccaacgcaaggaaagataatagcagatcgggttgatggaatatgggtctcaggtggaagagtattgatgagcccgtcctcaagcaaggcttggcgttatggtatacagtctcttattgcatctgtggctcctagccttcattttggaatcaagacaggggactcttaggtttttcacatgaaactactacacacaaaagaaacacataaattgctctctcttctcttctctattcttccattctttgtcgacccgtaaacagaaaatgataggtgtcgtcttgtatatataacctgaataatg

SEQ ID NO: 81398 - DNA, 751 bp, Arabidopsis thaliana columbia
gtccccaatttccggtttgacccacgcgtccgatttctcggactctctcgccttctttccctcacatgtctctatttccctgatctggaggtccgagacaatgctaggatatatctgaggatgctggtctgtataccaggacagagaattaagaacattttgaagccggcagatgctgtcactccatcaacccattcttctacattttttagtgttcaaagtcctcgttttcgtcatgatcctagtaaatctcggaacctttcatcctatattcatcttgaacggggttacgcccctactccgtggaacaagtcatggtcattgtcctctaccatctctaagtgttggaactgatggatatagcattatagaaaacaaaatccaggtagatgaagttgagccggatggcagtcaagaacttcagattttggcagaagctcgaagaattgaatcaggaaaacctacgtttagggtaatggactcaaagattgcagagattctaaaaagattaagaagatttttctctggtgattcctgatttcaaacacatgccaggaattaaggttagaataacgtgtaccttgagattggatgctgaaccatatagcagtttatgggggaagtgaaactcagaaaatcgatttaagaaagtcgactcacctcctgcgattttcgcgacggtgctcaaattctcatcttcagccccttatggctctatttccttatgtcgaatacctttccttttcgggga

SEQ ID NO: 81399 - DNA, 761 bp, Arabidopsis thaliana columbia
  unsure (1)..(761): unsure at all n locations
catgccgtcgcatgcacgcgtacgtaagcttggatcctctagagcggccgcccttgnttttctttttttttattccaatttaaataaacttctcaaaaaacagaatttgtgttttgttcgtttgggtaaaactttacatgtaggttgggcccaaagaataagaagaaaatagtgaaagtctctgctattattacaaaaacaaagcttctaagtaatcatcaacataagctaagcaaggccaatagatctgttcttatatgcaccaatgtcgatccttgcccaacttccatttcaaacattcagatgatatccttggcggcagaaacatcagcatcttgtatctgttcccattcttccccctacttctcgtcatcgggaacctcttggtcatctccatatccaatgtatgtcagacgaagagggcctcggtttaatcccaccgaggatgaagaaggctggtccgcatttgtgtgatccccttgttcttcttcctcttccttccacacaatgttctcaataattcctccgtctcttacaatgtttacaagctgttctccactgatagccaccacaaagggcgctaaacgaagctcagtggcctgtattacagttttcgcagggacttcaagcagttttactgaccgagtcccgctgactgctgcagccattttgccaccttttagtgcaaatgtttcgtgtgcagtgctggacaaagaaccacacactttccacaaagcattgaatagatctgagtagtagct

SEQ ID NO: 81400 - DNA, 763 bp, Arabidopsis thaliana columbia
gtacccgtttggaattcccgggtcgacccacgcgtccggtggtttcaggttctcaacgagagtctttcgacagcttcttgttcctagagactttaagtcaactcgcaaaccctctgggtagaagacggttaggagatacttctagtctctctatccctgcaaagaagcagaactcaagtggaccaagctctagacagtggcctatgtttcaacgagctggtggcggcaatatccacactgaaaataatgatggcgcgatgcaggagtttcatttcagatctagtctacctcattgtagtacagctgcctgcccttttacttcagtgagtgagcagttggtagaggaatggcatgcgagccctgaggagctcaggggtgacaatgcgttccagccttcttcaaacatcttttagtttggggatcctcccttattgagttgctgacccaatttccagtgtgaaagggctcgtgagggctgcaatgcctgatatccggccaccgcatttcttcctcccaaatttctgtcgggacaaatcccaaggaagctgggttttgtctttgggtacttcatcccgaaatctcttgccggcccattcaaccggggacatcttacaatcctgaagtctttaatggaaccccggattgtttgccgaaggcttttttttttcccttgaacctgaaggcacagagtctggaactttcaacacttccttttcttgtccccaaaaaactgggcgaaacctgctggaaatttcggggaagc

SEQ ID NO: 81401 - DNA, 1016 bp, Arabidopsis thaliana columbia
  unsure (1)..(1016): unsure at all n locations
cccttctgcagtaccggtccggaattcccgggtcgacccacgcgtccgtatggcaaaaatattggctgggaggaggagatacttaggacattaacccactgttaggccgaatgcaaaaaagctttacagattattcatgaacaaagagaacacgacatgggaggagttttcatctaaagtccgttcgtttcagagagggttcatgggagagccaaaggaagtaagagctggtagaggtgaatttcacgaaaacccatccacgtgcatatgcgaagatacagaggctaaggcaaaggcgcaattagaatctagaaaacttggaaagaaaaacaaatccactaataaagacgcagcagtaactgtaaccaatgatgatcaaaccgaagaggatgacccagattggtcggagccagactatgaggaagaacagagtgatcttcaggacagaggattattcaacgggacaagtttagattacgatgatccatctacctctggatgagcctgagcttgaagcaatgctatcagattagttagatacgcatcagtgaccttcacatcactacactgaatctgtcctctgcttgggcacttcacagtgagttttccaaccttggtgctaagccttgttgtcaccattttgcatgtaatgtctcctgtacatagaaccacgcgatagagcattgttttgtttatcaggatctgaggacagatcaatttttttcagtcatattttagtactcggaattgtggctttaccagagaaagtagctatagaaaaagggaaaacaagtaggcatgtgtagcattatgacaccggtgattacttgatccgaatattttctttacaataaactgaattatagcagcaggttcattgactttgtaccaaagtattttcacgaggtttggttttccnnnnnnnnnnnnnnnnnnnnnnnnnnnnnnnnnnnnnnnnnnnnnnnnnnnnnnnnnnnnnnnnnnnnnnnnnnnnnnnnnnnnnnnnnnnnnnnnnn

SEQ ID NO: 81402 - DNA, 2256 bp, Arabidopsis thaliana columbia
agtcagaacaacacggagaagagaaaaaaaagaggtagccatgttcttgaagcttttaaccatcttcttcttcttcttcaacctcatttttcaatcttcttctcaaagtctcaactttgcttacaacaatggctttaatccaccgacggacttatccatccaagggatcacaaccgtcacacccaacggtctcttgaagctaaccaacacaaccgttcagaaaaccggtcacgccttctataccaaaccgatccggtttaaagattctccaaacggcaccgtttcatccttctcgacatcgttcgtcttcgctattcactctcagatcgcgagtctcagcggtcatggcatagctttcgtcgtcgctcctaacgcaagccttccttacggcaacccaagtcaatacataggtctcttcaacatcacaaacaacggtaatgagacaaatcatgtctttgctgttgaattagatacgatcttgagtacagagttcaatgatacaaacgataatcatgtcggaatcgatatcaatagtttgaagtctgtgcaaagctcgcctgctgggtattgggacgagaaaggtcaattcaagaatctgactttgatcagtcgtaagccgatgcaggtctgggtcgattacgacggacgtacaaataaaatcgatgtgacgatggctccgttcaacgaagataaacctacaagaccgcttgttacggctgttagagatctttcttcggttctactccaagatatgtatgtgggtttctcctctgcgacaggctctgttctgtcggaacattatattctcgggtggagtttcggtttgaacgaaaaggctccacctttagctttatcgagactcccgaagcttcctcgcttcgagcccaagagaatctctgagttctacaagatcggaatgcctttgatttctcagtttttttttttctcgtttattttcctcgtttgttacatcgtgaggaggaggaggaagtttgcggaggagctcgaggaatgggaaaaagagttcgggaagaatcggttcaggttcaaggatttgtactacgcgaccaaagggtttaaggagaagggacttcttggaactggtgggttcgggagtgtttacaaaggtgtgatgcctggtacgaagttggagatcgctgttaaaagagtttcgcatgagtctcgtcaagggatgaaagagtttgtggcggagattgtgagtattggtcggatgagtcataggaatttagttcctctcttgggttattgtcgtaggagaggtgagcttcttttggtgtatgattacatgcctaatggaagcttagacaagtacttgtacaacactccggaggtaacacttaattggaaacagaggattaaggttattctaggtgttgcctctggcttgttctatctccatgaggaatgggaacaagtggtgattcaccgggatgtcaaagctagcaatgtcttgttggacagagagctcaatgggagacttggggatttcggtttggctcggttgtatgatcacggatcggatcctcagaccacgcatgttgttggaacattgggatacttagctcctgaacatactaggacaggacgtgccacgatggctaccgatgtttttgcgtttggggcgttcttactcgaagtcgcatgcggtagacgtcctatcgagttccagcaagagaccgatgagacgttcttgctcgtggattgggttttcgggttgtggaacaagggagacatcttggctgctaaagatccgaatatgggttcggaatgtgatgaaaaagaggtggaaatggttttgaagctaggtctcttgtgctctcactctgacccaagggctagaccaagtatgagacaagtgctacattatctaagaggagatgcaaagttaccagaattgtctccgttggacttgtcggaagtgggatgatgtttggggttcatgacggatttagtgaattaggaatgtcgtattcctcctccgtattcaaagggtttaccggtggatcttccatcgctgattctcaactttctggcgggagatgaatagaatgttttgaagttatataaagtatatgttatttaatggcgatagttatgttttaaatatatttgaacctttttgtgtgttttgcatttcatctgtagagactatttgggcgagatatgggaatgggactatgtatatatacttcagcatatgttgaaaattactgtctaaaaaaaaaaaaaaaaaaa

SEQ ID NO: 81403 - DNA, 761 bp, Arabidopsis thaliana columbia
accggtccggaattcccgggtcgacccacgcgtccgagatccatcaaactttattaaagaaagaagaacaaagagatatttgggaagaagaacaatggttttctcatccgtctcaggctttttagatccaccaattaattggccacagtctgcgaatccaaataaccatcctcatcatcatcagctacaagaaaatggaagtttagttagtggccaccaccaagtactctctcaccactctcccacaaaaccctaaccctaaccaccaccaatgtttgagacagcagccgccaccaccgttgatcccgagcagttctcaattggccaggcggtcctgagaggtgcggcggggctagcttaagaactctcagccgccagagggagccctaaagtgtcctcgatgtgactcagccaataccaagttctgttacttcaacaactacaacctcacgcagccacgccacttctgcaaagcttgccgtcgctactggacacgtggcggtgccttgaggaacgtacctgtcggtggtggctgccggaggaataacaagggtaaatccggaaattcaaagtctttcttttcctctcagaacaagcagtcaacgtctatggtcaacgctacaagccctactaatactagtaatgtccagctccaaacaaatagccaattcccatttttggccactcttcaaaacctcactcaacttggtggtattgggttaaacttagccgccattaatggaaataatggtggaaatggt

SEQ ID NO: 81404 - DNA, 718 bp, Arabidopsis thaliana columbia
  unsure (1)..(718): unsure at all n locations
cgcatgcacgcgtccgtaagcttggatcctctagagcggccgccctttcttttttttttttatttttcngcccatatgaatataagtaagcaaaaaaggcaaaataaaaattaaaaaaggagaattatgaagaggagccattggaggaggaattgtagccgtaggggttattgcttgcccaattccatagatccctacacatctcctctatcccattcttagccttccaatttagttcgcgctctgctttttccgttgagccgtaaacaacctcagcgtctccaggacggcgtccagccatcaccaaagggattttctttccggatgctttttcaaaggcagcgaccatttctaggaccgatgttccattacccgttccaagattgtatacctcacaactgattttgagatcatcctgcttgcgcagagcagctatgtgtccatctgctaaatccatgacatgaatgtaatctctaacccctgtaccatcctttgtcttgtagtcggttccaaagacagcggacccgtggnnnnnnnnnnnnnnnnnnnnnnnnnnnnnnnnnnnnnnnnnnnnnnnnnnnnnnnnnnnnnnnnnnnnnnnnnnnnnnnnnnnnnnnnnnnnnnnnnnnnnnnnnnnnnnnnnnnnnnnnnnnnnnnnnnnnnnnnnnnnnnnnnnnnnnnnnnnnnnnnnnnnnnnnnnnnagtggtaaaagccctg

SEQ ID NO: 81405 - DNA, 789 bp, Arabidopsis thaliana columbia
actatagacgagtctatgacgtcgcatcgcacgcgtacgtaagcttggatcctctagagcggtcgccctttttttttttttttattttatcgaaatttattggtacaccgtacacgaaacatgcaaacaaacatacaggatcatatagttttacgattcacgaccctcccttattgcatcacacacacatatttacaaacactcatcatcaccgtcaccgaacattgtttatgcagagtcaactccataaaagaagagatcaccaaaccgatcattggtttgagctttcccaccaaacatcaccagtcctttcttaccatcaatggtacctgtcgtggacgcagaccaacctctgatactcgggagtctcttgctcttcacctaacttatccagcttctcccacttcaacgtctctgtatccaacgcaaaagttccaccactcaattgacccggaccttcgtgagcttttgggtccatcgctatctcacctccaaagaccaaaatgtgtttcccaacaaccgtactagcgaacacactcctagcgcaaggcttctcaccgaacgtctccacttgtgtccacttgtcttgagctggatcgtagcaatgaacatcatgtacttcacatccgttgaatccatacacaacccatactttcccttgtaccacttcgagcccggtttcttctgttacgctacacgaacctcccggggtccaacactgcacccacttgtgatcaacgatgttgtaagcgtctagtgtcttgagccaaaccgtaacactcactccac

SEQ ID NO: 81406 - DNA, 707 bp, Arabidopsis thaliana columbia
cacacgcgtccgctttttcatgttcgtagttgttcctctggttatcctcatcaacgggacccttgaaaccgtgtagccatcttgcttaatgattagagtcttaaagctgtgctctttcttcatcgatttgagcaagtgatcttggaaggctcttgagttctgaattccttgtaagcaatcatggcagggaaaagagaaaactttgtgagggtggatgatttggactctaggttaccatcatcatctgtagccttccaacagaactacgcctccaatttcagtggacaacttcatcctattcatgcaagcaatgaaacttctagatccttcaagaaaggtatccagaagggttccaaagggcttaagtcgatcggacgttcacttggtttcggtgtttatcgagcagtgttcccagaagaccttaaagtatctgagaagaagatatttgatcctcacgataaattccttttgtattgcaataaattattcgttgcgtcatgtattctttcagtgtttgtggacccttttttcttctatcttcctgtgattaatgctgagtccaagtgcctgtgtattgacagaatactggctatcacagcaagtacattgcggacttttatcgatgtgttctatctcgctcacatggctctccagcttatgactgcttatattgcaccttcatcacgggtctttgggcgatgtgaact

SEQ ID NO: 81407 - DNA, 512 bp, Arabidopsis thaliana columbia
  unsure (1)..(512): unsure at all n locations
gcaaacccaantccacccccttggaccgaaacccccaacccccaccctaaggggaactaaaaaccccccgggtttaagaaattacagccaaattggaaaacaaaacccgttcctaagctnaatcccttggcctgtnaaccctccgtttccctgtgtggtacccccctaagggcctttgggccttaancctggctcgagctgatttagttggaaccatgtagctcgggagagctggtgagccagcgaggctctcatcgtctctgactgatgaaccagcaatgctgtgtctgcggttcctctcggacaggaccgagattgtgcttttggagtcgtcgtcattggatttcctcgaggattggtttagccttgagggagttggaggtgagaagaaactgtttttgtttcttggggtccctcttgcggatgatggtgtgtttggttgagttgagccattgcgggttagagattttgcagcttcgttgcggttaatagagcccttgaccgaggcagca

SEQ ID NO: 81408 - DNA, 867 bp, Arabidopsis thaliana columbia
  unsure (1)..(867): unsure at all n locations
cnnnnnnnnnnnnnnnnnnnnnnnnnnnnnnnnnnnnnnnnnnnnnnnnnnnnnnnnnnnnnnnncttttttttttttttttttttacaatacaaataacatcatcatattccaattcatccaacattaataaaaataacttaaatattcaaagaaacaaaagaacatgaattttaaaaggttataaaatttattatagtaaaaaaataaatgactggcgcttacactgcacaaatgaattacgaaatgaagggaacacataagagacaacaatctcggacacattcataagtgggaaaataattatattaaataaaatacctcagctgcctgctccgttggtcacggtaacgccgccactctccaccttagggggagctgagaaccgccgtggtttaggcaatgcaggcgaagttggatacgagagccgtttcttagctgatgccttgtctgtgaacccttcgttttcctgtgtggtaccacctaatgggctttggggcttgagcctggctcgagctgatttagttggaaccatgtagctcgggagagctggtgagccagcgaggctctcatcgtctctgactgatgaaccagcaatgctgtgtctgcggttcctctcggacaggaccgagattgtgcttttggagtcgtcgtcattggatttcctcgaggattggtttagccttgagggagttggaggtgagaagaaactgtttttgtttcttggggtccctcttgcggatgatggtgtgtttggttgagttgagccattgcgggttagagattttgcagcttcgttgcggttaataagccccctgaccgaggcagcattgtcattggtgcctgtgctttgttctttctcggaac

SEQ ID NO: 81409 - DNA, 508 bp, Arabidopsis thaliana columbia
tatagcaagactatgacgtcgcatccacgcgtacgtaagcttggatcctctagagcggtcgccctttttttttttttttgaatagaaagcgtagcattgtgaaataagcaatctctacacaaagaccacatcaaaggacacagacaaagtaacatttgcaaaaagaaaagctaatgaaaaattaactataacacaaagatgtttagaaactatccatgatttttgtggggaacaggagaattgatgacctgcaagatctgaacaatctcggccattgttggccgattcgaaggtatctgagaagtacagaccagagcaagtttcaagacaggcaaaacctcatcttcagagtattgttcctccatcactggatcaatacactccaacacattcccttgttctaacataactcgaacatggtcactaagtatcacaaagctgtcttcaccatactccaccggtctccgaccagtcaccagttcgagtatcaaaaccccgaacccgtacg

SEQ ID NO: 81410 - DNA, 529 bp, Arabidopsis thaliana columbia
  unsure (1)..(529): unsure at all n locations
cgcgtacgtaagctaggatcctctagagcggctcgcctttgtgtttaattctttaatgaaattagtagatttggacactggaaattacaaatcatccgagtctcagaactaaagcagacctattaaggatgaaaatcacctgagaaatgactatccgaggaaaacgaatgccacggtgcatcaaaacactgcctccaaacagcgaagggcattttgtactcgcactatatacagtactcaccgaaacgatactgggatacttgagacgatcaacatcagatcctcccgaatcatcttgcatcatcagggtgttcaggccaccagctacgctaccggaagaactgcgggctcggacgctcggagaagacgaacacttgccagaatgagagcctcctccaatgagtggtggtggtggttccctaaancccttggcctccctggccttgcanggaccctatcagagagtccaggggttaatccggtgngtgactcgngngcccgntccagcngnccctgaccttgccaggcc

SEQ ID NO: 81411 - DNA, 922 bp, Arabidopsis thaliana columbia
ccctatagaagagctttgatgttgcatgcacgcgtacgtaagcttggatcctctagagcggccgcccttctatttcttttttttttttaaaaaaggcgaattggacactggaaatgtcaagtcatccgagatttagaaccaaagcacgacctattaaggatgaaaatcatttgaaaaatgactattcgaggaaaactattgccacggtgcttcaaaacactgctctaaacagctcagcgcattttgtactcgcactatttacagccctcatcgatacgatccttggatacttgagatgatcaacgtcacatattttcgcatcatcttgcatcgtcaggttgttggccaccagctacctctactggaagaactgtggtctcgtacgctcggagaagatgaacacttgctagaatgagagcctttcttctatcgatctgctgatgttggttctctaacatctctttgttttctctggcctttgctatgtttccttatcaaaagtagacccaggggtttcttatattcgttattgtgttgcaaccttcgttggaaaatcctatgcgttttttcaggattctggctctttttattttgaaaacccttttcggctcttcgggtgcttcccacggaaaaacccgggtttcacaccggaggggctctacttcgtgggagaacacggttggtccaaccggggtttttggttttggtgttcaagatgcggacactgtgcgtatcttaagggtaagggccatctgctgtaggcggcaatgtgttttggtataggggtacacatgctcgcctttggagaactcacagcctacggggtatcctggatctccccaaaaattatgtggaaacgatgggactctgttagatagcctccgggatttggtccctgagggggttattaattttgcattcg

SEQ ID NO: 81412 - DNA, 801 bp, Arabidopsis thaliana columbia
acctatagaagagctagacgtcgcatgcacgcgtacgtaagcttggatcctctagagcggccgcccttttttttttttttttgatgagaataaaattcaacattgaacccaaatatggaccaaatcatgtataaaatcatattgaggagtacaagttgtaatatgagaattgtataatcattaactgattatacaacgaacaaaccgattttgttgcgacaagtgagacagatgaaatctatattgagagctaataatgatatcttcttgctgatatgtacatcactaatttacctctgactgctgatgctggaatgattggactgaggatcttctgcaggcaatgtgaccattctgacagcgggtgagggcttctctggttctgcaactatgtgaagagagttcttagtgtctattgtctgtccccatggctgatctgttgactgccaagcgtaatgtgagtggttgggcgaggatcaagacatggatggacctgacatactccatgaagcggaagagactactagggaggatgcatctaccagaaccggagcaaatgtgccaatccccaaagtgtatggcgagaaatctggcaaaggtcggtttttgttcaggtacaggaccactcgttccattgtgggtctggattctggccctatatttgaacagagcagacccagtttcataacgcgtcttgacttcctcagctacaaattttcctcccaatctcgggtcagtagcatcaagcaaagaatccttttttcagcactcacaaacccatttgatcatatgtcgtttctc

SEQ ID NO: 81413 - DNA, 450 bp, Arabidopsis thaliana columbia
ggttgtaaagtagaacatatgtatatgttactgtgtaaagtacactgtaaatcaaattaaaagtctgtatcattccgacttatgaaaacgattcaagaacgtaacttataagtctatttggacaatgcgactttaattagcagacaggatattacaatttcggttgaagaaagatattaaagttacagtaagtgtaagtaccgttacaacaactagtcaaccactgattcatctacttcccgcctgaccgtcaagatataagttgttgttgatagaattgtgttccatctcttatgttgggttctctggacctgttcttgggatgatcagaggtctgaagaaaactaaggcgaaaagtaattccataatgaacaaactcatgctgatccagacaaacaaagttttcctccagttccatatgatccttttcaagaaaggaagtttggattc

SEQ ID NO: 81414 - DNA, 792 bp, Arabidopsis thaliana columbia
ttagacgagctatgacgtcgcatgcacgcgtacgtaagcttggatcctctagagcggccgcccttttttttttttttttgaggaaaatgtagtttttttttttgttgtttccttgtaagagaagcgtaattgaaaagtatttcgaagtaagtaagacaaatataaagtctgcaaaactagccaatccccatgggaaggataaatctctctctttctctcttgctctctctctatttatctccctttttgaccattcacaattccacatcacctccttttcaaaacagctctggatcactctgcctgaaccataaccggctttccccgtcccattgagaatcctctggtcccatcaggcattcgtggtccaggtggttgctgtttccccatgcctggttgctccatgttgttcattggattgttcgaaggttgtgttcccacttgatgatgatgatgatgatgatttcctcgcccattgtggttgtggttttggttatggctgtggttgttgttctggttttggttctggtgtggttgccctcgtcctcgtccctttcctctacctctgttacgcccttttctctgcccagccgctttctcattcccttgatcctctcctattggctgctcttgcatatgtgtatcccattccccagaacagtcatcagattgtttctcaatcggctgctgctcggatgttgtagcatcatcttcctcatgttctacatctgcatcatgtccttttcttcctcgcccttgaccttgttttggttccttcgtctgatgctttac

SEQ ID NO: 81415 - DNA, 531 bp, Arabidopsis thaliana columbia
cgactcactattgggaaagctggcacgcctgcaggtaccggtccggaattcccgggtcgtcccacgcgtgcgatcttcacaaaactcaccttgaagagaggattaagaagattgtgccggagtttccaagaacagcttctagcaagctactgagaagagtcttgagagatcagattaagcaagaactactatccttacgaagtcgaatataaagccttgatcttaagtttaactagaataaaataagatctgctgagtagtagttgatctacacatgattgggtactgctcggtccaaataagaaaaccgattaaatcaaatctaccggtccttgaattctctagcctgattcacatttacatgactaaacactttgactttgttatgtttgtgtttgtgtttggtgtatatatttcatatccgattataatcttaaatttcctcaaaaaaaaaaaaaaaaaaggggcggcgctctagaggatccaagcttacgtacgcgtgcatgcgacggcatagctcttctatagggg

SEQ ID NO: 81416 - DNA, 914 bp, Arabidopsis thaliana columbia
  unsure (1)..(914): unsure at all n locations
atttccgttnnnnnnttagaagagcttgacgtcgcatgcacgcgtacgtaagcttggatcctctagagcggccgccctttttttttttttttttgtgtatttaagaaatcttggtagttggtatatatagttttgtcaatgcatttctcgacaaaatcaatgctttccatttctcgacaaaacaattgctttccacaagagaagtcatccagtaatgagcttaagcagaagaatgatgtgctagagaatcatctaaaggtgcatctctgaaaaggtcatcatatgaaacaggtaccctgatcctctcatgaacagatttcctttccttttccggtttggattcagtctggtcagctaccggcataacacacatctcgctcaccagagcttcatcagcagatacatttccagaggcaactccttcggaggagctaccctgatctcttttgggccctgattttggtctcgtgtttggttgcctaaattgtttctcaaactccttggtctttttcattatctctctataagcttcaagctgtctcgctttgatgatgttccacaatacaccaccacttgtccgtttcctagtgccatcagcagtcacctgacctccacaggtctcaattgctaccacctcattgacaagatcacttaaggcagcaattccgagacacccaacagctgtgtatatcatgtaagacttcttctccttgaggcgtctacaagtttccctaacaaaccagtctacactcatgggtttgtccatcacagggccttttctctttttcctcctcttcttcctcttgttcttgtttgtctgctgcagtcccttcttctcacccaaaatcgcctctttatctttgactccatcaccatcataattttgtctctctccagaatctaagtcatgatcc

SEQ ID NO: 81417 - DNA, 472 bp, Arabidopsis thaliana columbia
atgactgccggcactaatccgactcactttagggaaagatcgtacgcctgcaggtaccggtccggaattcccgggtcgacccacgcgtgcgatcgtcacttttctttctccacactttccgcaagattgttctgttcttcaaacgattctaagatgaatggagaagaagtgaaaacgagtcaacctcagaagaagcttcagaaccctactccacgtttaaacgagaggattctctcatctttgtctaagagatcggttgctgcacatccatggcatgatcttgaaatcggacctggagctccagtgattttcaatgtggttattgagatctcaaaggggagcaaagtcaaatatgaacttgacaaaaaaacaggtctcatcaaggttgataggattctttattcttcgggtgtgtatcctcacaactacgggtttgtcccacgcacactatgtgaagacaatgaccctatag

SEQ ID NO: 81418 - DNA, 926 bp, Arabidopsis thaliana columbia
  unsure (1)..(926): unsure at all n locations
nnnnnnnnnnnnnnnnnnnnnnnnnnnnnnnnnntcggcagtaccggtccggaattcccgggtcgacccacgcgtccgcaccacaaatagaacaaagaaccccacacacacaccaatggaaccaaagctaacccatctttgttattgccttctactttttcttccactactctgccaatccaccatagccaaaccttcatcatcaccaaaccctagcagcagcatcaacttcattgtctcatcatgccgcgtcacgcgttaccaaactctctgcgtcaaatgccttgccgcttttgcagacaaaatccgccgcaacgaaaaccagttagctcaaaccgctttagccgttactctagtccgggttcagtccacgacaatctatgtagggaagctgactaaagctaggagaatcaaaaggagagagtacttagccgtgaaggattgtgttgaaaatcttggagacggtttagagatgttggctcagtcgatgagggagttgaagcaagttggtcgatctggtcgtgatcgagacgagttcttgtggagactaagtaacgttgagacttgggttagtgctgccttaacggatgagacaacgtgtctggatggtttcgatggaaaggttatggacggtgtggtcaaatcagcgattagaagaagagtggttcatgtggctcgagttactagtaatgcattggctcttgtaaaccggttcgcggctaggcataagtcatagaatattcggctaataaattaaaattcggtccttaataaggttttgtcatgtattttcttttttgtcctagtgggtgatttgtttctttatgatactttgtatttatgcgtaggcttgggatgtttatgcctttgtcatggtttcgactagagatatcgatgattttaacgggtttatggagaanaaaant

SEQ ID NO: 81419 - DNA, 705 bp, Arabidopsis thaliana columbia
ccggtttcggaattaccggatcgacccacgcgtccgcaccacaaatagaaacaataaaccccacacccctttttattatccgagccaacccctcgagaaattggctggtggtttttctaccactactctgtcactccaccatagccaaaccttcctcatcaccaaactcctagcagcagcatcaacttcattgtctcatcatgccgcgtcacgcgttaccaaactctctgcgtcaaatgccttgccgcttttgcagacaaaatccgccgcaacgaaaaccagttagctcaaaccgctttagccgttactcttagtccgggttcagtccacggcaatctatgtatggaagctgactaaagctaggagaatcaaaaggagagagtccttaaccgtgaaggattgtgttgaaaatcttggagaccgtttagaaatgttggcctcaatcgatgagggagttgaaccaagttggtcgatctgttcgtgatcgaaacaagtttttgatataaataaaaaatatgttttaatatttctaaaaaaattttaccccatgaaggagatgataaaagaataatctctttccctctcttaaattctctagtgcaattctatatacgcgcgggaacgtttataagctacagtgcaatagcgtatgcgcgatcatagctcatccaatgttggaatgcacataaggctgtgcatgcacta

SEQ ID NO: 81420 - DNA, 488 bp, Arabidopsis thaliana columbia
  unsure (1)..(488): unsure at all n locations
caaaaagttccaagatttttctaatagcgatggattgtgttgaatcttatttatccggagataattctgatgaatctccggtgatgcatacttggttttctccgtctccgtctccgtctgactcttcctcttctccttcatcttctgcttcttcttccattgggaggaatagcgacgacggtgagaaatcgtcggaggacggtggagatgacgccggagagaatgaagttgagtctccgtataaaggtcctcttgaaatgatggaatctctcgaacaagtcttacctgttaggtgagaaatctgattctttctctctgtttttgttaaagtaacgatttttaagacttaaaacttctaaattcggtatcagttttggtttctgattttgttgtgtgaatgtgtaggaaagggatatcgaagtattacagtggaaagtcaaaagtcttttacctaattttaaccggcggaggcagcttcggcgtttnct

SEQ ID NO: 81421 - DNA, 500 bp, Arabidopsis thaliana columbia
  unsure (1)..(500): unsure at all n locations
accccgncnaangancttctnccggagntgacacngtcgcccgggacccaggcccgncgacttctgnatcnacctncggaggccagctacatcaatcattcaacatcagattgaagaaagcttcctcccgttgtatccctaggagtcaagggtcttttggtaattctgacttcgtctcagtcgtcgttgggtttttgtgcctggagatcgttttcggtggctgattttccgaggtgttttccggcgacggcgagtgggattgggtttaatgactcgtaggaaatgatgataacaattgttttgttaaatttttatattttgaagttagtaacaaccacatccggagaatgtatgtgtatagaagagtttcaaaacttttgaatggatcatccacatcttttttttccattttggttttttgttctatcaattacatcttttcaaaaatctttgtcatatcgaaatctgttatctgtgtggaaagtccaacattcttcttt

SEQ ID NO: 81422 - DNA, 1196 bp, Arabidopsis thaliana columbia
  unsure (1)..(1196): unsure at all n locations
ttccnnnnnnnnnnnnnnnnnnnnnnnnnnnnnnnnnnnnnnnnnnnnnnnnnnnnnnnnnnnnnnnnnnnnngaccacgcgtctataaagatctcatctttctcttctccttcttccctcctgtatctgtattctcttatcagacaaaaagttccaagatttttctaatagcgatggattgtgttgaatcttatttatccggagataattctgatgaatctccggtgatgcatacttggttttctccgtctccgtctccgtctgactcttcctcttctccttcatcttctgcttcttcttccattgggaggaatagcgacgacggtgagaaatcgtcggaggacggtggagatgacgccggagagaatgaagttgagtctccgtataaaggtcctcttgaaatgatggaatctctcgaacaagtcttacctgttaggaaagggatatcgaagtattacagtggaaagtcaaagtcttttactaatttaacggcggaggcagcttcggcgttgacttcttcttcgtcgatgaaagatttagcgaagccggagaatccttacagtaggaggaggaggaatctcctctgccatcagatttgggaaaataacaagacgactccacgtggtgggatctcgaagaaacacgttatgagttctagcagaagcgctttgacgctagctatggctgttgcggctggtgtgatgaccggagaaggatcttcttccggaggtgactcgtcgccgggatcaagtccgacgacttctggatctcctccgaggcagctacatcatcatcaacatcagatgaagaagcttcctccgttgtatcctaggagtcaagggtcttttggtaatttgacttcgtctcagtcgtcgttgggtttttgtgcctggagatcgttttcggtggctgattttccgaggtgttttccggcgacggcgagtgggattgggtttaatgactcgtaggaaatgatgataacaattgttttgttaaatttttatattttgaagttagtaacaaccacatccggagaatgtatgtgtatagaagagtttcaaaacttttgaatggatcatccacatctttttttttcaaaaaaaaaaaaaaagggcgaccgctctagaggatccaagcttacgtacgcgtgcgtgcgacgtcatagctcttctatagttgtacctaatagaaatcg

SEQ ID NO: 81423 - DNA, 910 bp, Arabidopsis thaliana columbia
  unsure (1)..(910): unsure at all n locations
cggtaccggattcgaattcccgggtcgacccacgcgtacggacttgagtatttgcacaatggatgcaaaccacttttggttcatagagacatcaaaacaacaaatatattgttgaatgaacaatttgatgccaaacttgctgattttgggctctcgagatcattcccgattgaaggtgaaactcatgtttcaacagctgttgctggaactcctggatatctcgatcccgaatactacagaacaaattggttgactgaaaagagtgatgtttatagtttcggagtcgtattgttagagatcatcacaaaccaacccgtgatagacccaagacgtgaaaagccacatatagcagaatgggttggggaagtgcttacaaaaggagacataaaaaatataatggatccaagtctaaatggagattatgattccacttctgtttggaaagctgttgagctagcgatgtgttgtcttaatccttcatcagctagaagaccgaacatgtctcaagttgttattgaattaaacgagtgtttgacatctgaaaattcaaggggaggagcgattcgagacatggactcagaaggttctatagaagtaagcttgacctttggtaccgaagtgaccccattggctcggtagtttacatgaagaattcagcttctttttgaatttttgaatggtttcttctaaacaccatgtgagaataagtcatccacatataaccatacaatgtttttctaagttttcttactctcaaaattttgtgttcagcttgaggttaatcgaggtatcctagtggttaatcgaagtatacttcttcaaaaaaaaaaaaaaaaaaagnnnnnnnnnnnnnnnnnnnnnnnnnnnnnnnnnnnnnnnnnnnnnnnnnnnnnnnnnnnnnnnnnnnaac

SEQ ID NO: 81424 - DNA, 927 bp, Arabidopsis thaliana columbia
ggatagctggtccgcctgcaggtaccggtccggaattcccgggtcgacccacgcgtacggacctgtttttttgcacaatggatgcaaaccactaatggtgcatagagacatcaaaacaacaaatatattgctgaatgaacaatttgatgccaaacttgctgattttgggctctcgagatcattcccgattgaaggtgaaactcatgtttcaacagctgttgctggaactcctggatatctcgatcccgaatactacagaacaaattggttgactgaaaagagtgatgtttatagtttccgagtcgtattgttagagatcatcacaaaccaacccgtgatagacccaagacgtgaaaagccacatatagcataatgggttggggaagtgcttaccaaaggatacataaaaaatataatggatccaagtcttaaatggagattatgattccactttctgtttggaaaagctgatgaactagcgatgtgttggtcttaatccttcatcatcttagaacaaccgaacatgtctcaaagttggtctttgaattaaaccaaatgtttgacctcctgaaaattcaaaggcgaggatctattcctagaccttggacctccagaaaggttcttttatgaaattaagctttgacccttttggtaccccgaaaaggaacccccattgtgcctccggtaggcttcacctttaaagtaattccaaccctttccttctcttaaaatttttttgaaaaggggtatctcttcctacaaacaaccacttttgtaggaaaattaaggttcacttcccaccatttttttaccccaatacacccatggtgtttttcctcacagagtttttatatttaactcctctaataaaattttcttgtgtgtgtcacccctctcgaaagggttaaattccaagagtgtatcccc

SEQ ID NO: 81425 - DNA, 697 bp, Arabidopsis thaliana columbia
ggataagttgttccgcctgcaggtcccggtccggaattccggggtcgaccaacgcgtccgttcaaaattttttttttttctaggtttattactacacaaaaccaaacatcatcaactttagttactaaacaatggcatcaggctcaatgtcttcttatggctctggctcatggactgttaagcagaacaaagcctttgagcgtgctctagcagtctatgaccaagacactccggaccgttggcacaatgttgctagagctgttggtggtaaaacaccagaagaagctaagagacagtatgaccttctagttcgtgacatcgaaagcatcgagaatggtcacgtgccattccctgactacaagactactacaggaaacagcaacagaggcaggctgcgtgatgagggaaaggaggatgagaaggcatgaagcttgcagtgaggcaaggagcaacaaaacctacctccgtatgatcgtcaaaataaaaggggttcacttcagagagtggtgtttttttcaatgtctgccgaatcaatgtttttttcttgcaatttcccaggtttttccctaagaataggttttttttttcgaggccaccaacaaaaaaaaaataaccacctcgaaattttgtttacacaaaaaaaaaaaccaaaaaaaggggccgggccccccctctttaataagggattcccaaagcc

SEQ ID NO: 81426 - DNA, 473 bp, Arabidopsis thaliana columbia
  unsure (1)..(473): unsure at all n locations
gtcatctgttgtcttggcggcattgtccattccaccatttgtgcgggctcagagcgcatcccatatggaacttgaaaatgagaaagaacgcaatttgaggatggctaacctcattggattcaatcttgaacctagatttgagggcaaagatatgctttcccggtcagctcttctgtcagagctggtttcaaaaggtgttttgagctgtgcatctcaggaggtcaaagatctcttccatgttttggggcatgaatttcacccacttgatcttggctccaagattcaagcctttgctgggaaaagattttccaaatcttggtggggaactgtcctcaagctccttcttttaccagaagggcaacttttcccaatanngttccctctcttgggaagntttctnactttgagggtnntttaacaggggctaaagtttttcagccataaggattngggggttttncaagtnggaccct

SEQ ID NO: 81427 - DNA, 792 bp, Arabidopsis thaliana columbia
ccaactcactttagggaaagctggtccgcctgcaggtcccggtccggatttcccgggtcgacccacgcgtccggccaacctcattggattcaatcttgaacctaaatttgagggcaaagatatgctttcccggtcagctcttctgtcagagctggtttcaaaaggtgttttgagctgtgcatctcaggaggtcaaagatcttttccatgttttggagcatgaatttcacccacttgatcttggctccaagattcagcctttgctggaaaagatttccaaatctggtgggaaactgtcctcagctccttctttaccagaagtgcaactttcccaatatgttccttctctggagaagcttgctactctgaggctacttcaacaggtgtctaagatttatcagacaataagaattgagagtttatctcagttggtacccttctttcaattctcagaggtagagaagatttctgttgatgctgtgaagaacaattttgttgccatgaaagttgatcacatgaagggtgttgtaatttttggaaatttgggtattgagtctgatggactgagggatcatctggctgtttttgccgagtctttgagcaaaggaagagctatgctggatcctgtcccaagtaaagcatcaaaactagcttgcggtataccaaatttaacagattcctgtgagaaagagcacaaaagactgctttgtcgtaaatcaatccttggaaaagaggaaggaggatcaagagcgtccgccactctaaaatgggacctgaagaaggacctaaaccg

SEQ ID NO: 81428 - DNA, 647 bp, Arabidopsis thaliana columbia
tatagggaaagctggtccccctgcaggtcccggtccggatttcccgggtcgacccacgcgtccgaatcagaactatttttgagtatctgagtcagttctttttttttttttttttttggagcaacatctgagctagttcatggttagatttgtttagattttttttttttgtgtgttttatgaaaagacaagaaaaataataagcaaatcgaagtcaaatctactttggttttgatctggtttcaattagttaagattagttatatatgtatttgaaacaggattactcttatatctattttaatgagttttattggttatttttctatgtagtcagtcatgtataattatagaaatttgacgccctactgatttgtttaattcgtttttatccatttttctgtggtggtttcggtttgattttatccaattgatcacctagttgtgaatcaaaaataatcacacttctgattttattgcatcttcagatctttatgattcttccacacttcggaggactttctcaatgggattttgctggtgattaaagtttaattttgttattagtatatatagccattaatattttaattatgcgaattataagggtttgtggaactaataatttatttttcctctcacaaaaa

SEQ ID NO: 81429 - DNA, 670 bp, Arabidopsis thaliana columbia
ccaacccactatagggaaagctggtccccctgcaggtcccggtccggatttcccgggtcgacccacgcgtccgcgacatctaacctctgctctacttcagcctctacaacactactccttcttcttcttccttcttcttctcttcctctcttctctactcaacatgcgtgagattgttcacattcagggtggtcagtgtggtaaccagatcggtgccaagttctgggaggtgatctgtgacgagcacggtgtagaccctaccggcacctaccgcggtgactctgaccttcagctggagcgcatcaacgtgtacttcaacgaggccaccggtggtcgctatgtccctcgcgccatcctcatggacctggagccgggcaccatggactcggtcagggctggtcccttcggtcagatcttccgccctgacaacttcgtgttcggccagtccggtgcaggcaacaactgggccaagggccactacaccgagggcgctgagctcatcgactccgtcctcgatgtggtgaggaaggaggccgagtcctgactgcctccaagggttccagatcacccactccctcggtggtggtacccgctcaggcatgggcaccctcctcatctccaagatccgtgaggagtacccccgaccgcatgatgtgcacccttctccgtg

SEQ ID NO: 81430 - DNA, 332 bp, Arabidopsis thaliana columbia
gacaaagaaggtgtgaagaagttgggaaaacaaaattaacgcttgaagaatctaaaggtttagcttttttctcaatccgatcattcaccgagaaatattctattttatatatttatgtgaagctcttcaattgaagaaagaagaagaaaagacaatcgtcaaatgcttgactttggtttcagttcttcttcacgacagctcaaggaagatcggctctttgatgggatgggacaccaagaaatcaccatgggtttatgatgctatcaattactagtagtacgtgttatcttctgaatatatatcatggcatcctctggactgggaaatggagt

SEQ ID NO: 81431 - DNA, 810 bp, Arabidopsis thaliana columbia
ctatagggaaagctggtacgcctgcaggtaccggtccggaattcccgggtcgacccacgcgtccgggttcgattattaagaacattagaggtagaactagagctaacgttaaggttgtctctaaagatgtttctgatccttctcacacttgtgccatggattttgacaacattgttatgatatctggtgagactgaatccgtgaagaaggcacttttcgctgtttctgcaatcatgtacaaagtcagtcctcgagaacagattcctctggatacaactgtccaagaagttcccgctagtattataattccctctgatctgtctatctatccacaagccgggttatacccaagtcaggattctattttccaacatggggctaatgtttcatcgtttatcggtacactacctcagggttatggagaaaatgctgcaaatcctgtgccggttttttctgcttctgctcttcctgttgttcatggttttggtgggtcttccagatcagaaaagttggctataaaagttatttgctcttcttccaaaattggtcgtgttatcgggaaaggaggattaaccattaagggaataagacaagcaagcgggtctcatatcgaagttaatgactcgaggacaaatcatgatgatgactgtgttatcactgtcactgctacagagtcctccgatgatttgaaatctatggcggttgaagctggtcttctacttcagagatattaatggatgaaacgaggaccaagttaaaatgcacttccttgtatcttcttagggtaatatggagcctttttgggaaaag

SEQ ID NO: 81432 - DNA, 717 bp, Arabidopsis thaliana columbia
actactgagtatagggaaagctggtacgcctgcaggtaccggtccggaattcccgggtcgacccacgcgtccgagaaaggccatttgataggtttcctctcactttcaagatggctgacctagctgaggagcacactggactgtctagtctgacgagttcagatctttcaccaaatagctggatttcgatagcttggtatcccatttatccaattccaccagtgataggcgtggacggaatatctgccgctttcctaacgtaccatttattgaagccaaactttccagaaacaattggtaaggatgataaggggaatgaacaaggagagtcaagtacaccagaagttctacttcctccatttggagcaatgacttacaaggcctttggtaacctgtggatgatgcctgggacatcagattatcagaacagagagatgaatgaagaatctgctgactcgtggctgagaaaacgcggcttctcccacagcgatttcaacttctttatgtcccgtaagttttacggcggaccctattaatgccatcttgcaggtgaattgctaagcctaacaatggagtcctatcatcatatgaaaacctttatgcctgtaaaacattccccatctctctctattctctctcttccctctcttctgacttttgggattcttggctggttcttttaccttcttggagggaattatattttctccttttaaa

SEQ ID NO: 81433 - DNA, 342 bp, Arabidopsis thaliana columbia
aattcctccaccatctcctctcctacttctcatcttcatcaccaccgtctaaagattcaaccttttgtaactgcttccaatggcgttagctctctccgtcgcacctacatcttcttctttgtcttccctcctctctcggacccctaacccttctcctaatttcagaacaactcatctgaatttcggttctcaaacgaggatttacacaatcaatcctctccttagatcctttaaatgccttcaatcatcttcaagagacgtacatgcgtcacctttctcaatctcagctattgcttcttcttcttcttcatcacagaccacagagcttgtaccctataagct

SEQ ID NO: 81434 - DNA, 1138 bp, Arabidopsis thaliana columbia
  unsure (1)..(1138): unsure at all n locations
nnnnnnnnnnnnnnnnnnnnnnnnnnnnnnnnnnnnnnnnnnnnnnnnnnnnnnnnnnnnnnnnnnnnnncttttttttttttttttgaagaaaacaaaaaccaatttattcacacgcaatcaactatatatttatacaaaaattagcaaaagcaacggccgcatagacatttttaaaactttggaaataaagaaaagtagaaagaaagaaaaaaagaaactgataggtctcatctcaatttgaggctcaagaattaacgaacaaactagaacaagaacaaagaagaagaagtagaaaaaaggcgggaagtggggtcgacactattcaagaaattgcaacttgaccccaaacaatattcaaatcaatcaatttagacccccaaaaaatcagtcggatacaggatttggggagccagatgaatgagaaacctcctcaatgagtctggtgacttcagccatcgaaggacgactatctgggaactgagccgtacagctcataccgatcttcaataaacgaatgatgttctcattgccctcaggttggtaccttgtgagctcgggatcaagcacatcggacggtgtttgttgctcggtaacagattggacccatctcggcaaatctacgccttcttcattcaactgctgatgcgttggagacttacctgtgagtaattcaaggattaggacgccaaagctatagacatcagctttttgggatattttgcgagcatcagtgatttcaggggcacggtagcccatcaatacggttaggtgcagatgtagaactaatgatgggagcaagaccgtaatcagagaccttagcttcataggagtcagataatagtatgttcgaggacttaatgtttccatgagaagttgtcccatcacgcgaatgtaggtagctaatcgctcttgcagctcctaaggctataccggctctggtttcccagttcaacggagttctcccgtttcctttgttcccgtgcaatatcgcagacaagcttcctttagacatgtactcaaagacaagaagcttctcgtcacggctgaaatagtaagcgatcagagtcacgagattggcatgactcattgatcccaaaacatgcaatctctctatgaactctttctccggacgcgt

SEQ ID NO: 81435 - DNA, 372 bp, Arabidopsis thaliana columbia
gtatactggtaaaaattggtggtctcttctttgtctccgagtatggagaaaatgagagggaagcgaatcagaccaagagattccggcgagttagtcgaagatgggagatctgaaagcgagcgtaagacgaggaagaaagagaatgatgttgtgagcaaaggaagaatcggaagaggaagaggaagaggagaggtttcgaagcgatctattgaaatagacatttctaatcccgagaaggatattaagcctgacggaagcagaaagtgtttgggttcgacgtgtcatcattgtaagatcttgacgagtgagagtgatcttatcttctgttcaaagtgtaacaagaagtgttattgctttgactgcatcaagaga

SEQ ID NO: 81436 - DNA, 646 bp, Arabidopsis thaliana columbia
  unsure (1)..(646): unsure at all n locations
nnnnnnnnnnnnnnnnnnnnnnnnnnnnnnnnnnnnnnnnnnnnnnnnnnnnnnnnnnnnnnnnnnnccacgcgtccgcataacttggtttctataccgaatcggatcattgggaatggaaagagcaggagttcttgcattttcactcaacagggacgcaagggtattaatcaggacgcaatgattgtgtgggaagattttatgtcgaaagatgttaccttttgcggtgtgtttgatggacatggtcctcatggtcatcttgttgctcgtaaagtgagagattcattgcctgtaaagttgctgtccctcctgaattccattaagtcgaagcaaaatggacccataggaactcgtgcaagcaaatccgatagcctagaagctgagaaagaagaatctactgaggaggataaattgaatttcttatgggaggaagctttcttgaaatcattcaatgctatggataaggacctgcggtcccatcctaatctggaatgcttctgcagtggctgcacagctgttacaaccattaaagcaggggccaaatctttccatggggaacattggggggtcctcggcggtacctgggcctaaagacagcaatgattcgatgattgcagttcagctaacaatagacttaaaaccctgc

SEQ ID NO: 81437 - DNA, 800 bp, Arabidopsis thaliana columbia
cgactcactatcgggatagcttttgcgcctgcaggtcccggtccggaattcccgggtcgacccacgcgtccgcctccgcgcagattctgaacctatcaatctaagccggaatcaaaatgcagaatcagattcgaaacaatcgaaaaccaaaaccgaaccagatgtacggatttcaatcccaggcgcagagaaaagcattgtcgtagtacttcacaagcctacgcgtggttcgtccaacattcgaagcctgcaaatccgttacatcgatcctccatagcttcccggtacgaatcgacgaacgagatctctcaatggacgcgtcattctccaccgagctacaacgaatcttcgggaaggatcagaaccagaaccagaaccaggcgaagacgccgaagctgccgcgagtcttcatcggtggtcggtacataggaggagcggaggaggtgaaacagctacacgagatcggagagttgaagaaacttgtgcaagagttgccgaagattgaaccaggggtatgtgagatgtgtggtggtcatagattcgtgccgtgtaaggattgtcatggtagccataaagtgcatacggagaagctagggttcagaacttgcttaacctgtaacgagaatggtcttggcaggtgttcttcttggtcatttccacaatcttcttccaccctaaattcctaggattttcaagttttttttttttttttcaaattttcaattttttggaaaaacccagaaaattgggaaataaatttaaaattattgggggttttttaaatcctaaatttttttaaa

SEQ ID NO: 81438 - DNA, 406 bp, Arabidopsis thaliana columbia
aggacgcgtgggtttttagggatttcactttcctcttctctctctctctctctctgcctaacctcgatttctctcgatcgctcttcaccatggatctacgatcatgtggtccttcttgaagttttttgatctcttcttcttacgggtttttacttcgtttgattttcctgttgtttgttgttcaaggatcgagatttcgtggagctctctattcgcagcttggagattggacttgtttgaattggctcttttgtgatggaggatactcggtcagttgcttcactcatggactctacatcatccaagattcagcagcttcagaaggcgtttgctgaacttgaaagtcagcgtgctgtaacacttaatctgaagcggtagggacttgaggagcattttcatgggcttg

SEQ ID NO: 81439 - DNA, 628 bp, Arabidopsis thaliana columbia
cctgcaggtcccggtccggaattccggggtcgacccacgcgtccgcgcatcacaataagggatgtgttctaatgtcaggctctcaattccaagtaagacatgaatgaaaaccatttctagctaattttcttaagcatagctctaattttcattggaagcccgtaaagacgaataaacccggctgcatccgcttggttgtagatctcactcccttcaaacgaagatatgtcctgtctatacagactgttaggactctgacgccctgtaaccgacacagatcctttgtacagcttcagtgtcacagatcccgtggttgtctcagttatcttctccatgaaagcgtccatggactccctaagcggatcaaaccatcttcctgcgtagaccatctctgcatatttcaggtgctaaatgtggtctttacctgaatactctctctgtctagagtgaggggattctagttcctgtacagctgcaaagagggtagtgcctccaggggtttcatacacacctcgtgatttcatcccacccggccggttctcaaccatgtcatcccgcccaatcccgtgctttcctcctattgggtttgccctcggcagaagtgtgggtggactcagagccttcccgt

SEQ ID NO: 81440 - DNA, 722 bp, Arabidopsis thaliana columbia
  unsure (1)..(722): unsure at all n locations
gactcactatagggaaagctggtacgcctgcaggtaccggtccggaattcccgggtcgacccacgcgtccggatcaagattctgatagagttaaactcggagaagaaaagaagaatccaaacgacgtcggatttgcatcaacaacaacaacaacaccaacatgatcaaatcggtggatatacacttcaatctagcaacagtggatctacagccaccgcagccgccgcgcaacaaataccgggaaatttctggatggttgcggcggctgcggctgcaggtggtggtggtggtaataacaaccaaacaggtggtcttatgacagcttctattggtactggtggcggcggtggagagcctgtttggacgtttccttccattaacacggcagcggcacctttatatagaagtggcgtttcgggcgttccaagcggcgcggtttctagcgggttacattttatgaatttcgcagcgccaatggcatttcttactggccaacaacagctagcaacaactagtaatcatgggattaatgaagatagaattaataatgaaggaggaagaggtgcccgtggtggtgatcatcataatacaccgaggcctcatcatcattacaacacaacaacacatcacnnaaantccnccgggttaccagtcggcggaantccggggccccaccaggnccttgnggggnttggggcccantttnccccaacnttttgggc

SEQ ID NO: 81441 - DNA, 443 bp, Arabidopsis thaliana columbia
cacttgccgcacttccgcagtggacgtggaagggattgtaaaccacgtggagaccgacgagtgcgtttccgcttgtggggttgatcggaaaaccgtaggggtctcgtcagactccttgatggaggcaggtttcgccgctaagctttgctcatccgcttgcttggactattgccctaacattcttgatctctatttcaacctcgccgccggtgaaggtgcatttttacctgatctatgtgatgctcaacggatgaatccccagcgttcgatgatggaattcatcagctccggcgccgcccccaggccctgtctccgaaatttgcaccaggccccacctccgaagaagtctcaatctcctgctctagctccggcttctatgtaaaatgttcattaattccacatgtgtttaatactttatatttatattttcgattgatgatgat

SEQ ID NO: 81442 - DNA, 480 bp, Arabidopsis thaliana columbia
  unsure (1)..(480): unsure at all n locations
tatttccacgttctctctatattacatttttccttgaaaacatctcgaggttcaaaatctttaacccctacaaatcaagaaaaggagacagaggagaagagagaaaagaaaaacgcagaaacaatgtctttttcttccctcaaattgccaatctttctcattctctcaagtcttctccatgcggctataggggaaaacattgtttgcgagaatctgccaacaaatatgtgctcgttctcaaatatccgctttccggggaaagaatgtatattggagacggcttaatgtcggccggaggaatttccctttcccggaactttccgcaagtgggaccgtgggaagggggtttttaaaacccccggtgggggtnccccacggggttccggntttcccnntttttggggggttttattccggnaaaacccnttnggggttctttggtcaanactnccttttnttggggggcaagttttccccnct

SEQ ID NO: 81443 - DNA, 765 bp, Arabidopsis thaliana columbia
  unsure (1)..(765): unsure at all n locations
gnnnnnnnnnnnnnnnnnnnnnnnnnnnnnnnnnnnnnnnnnnnnnnnnnnnnnnnnnnnnnnnnnnccacgcgtccgtacaaatctttaaaaggagacagaggagaagagagaaaagaaaaacgcagaaacaatgtctttttcttccctcaaattgccaatctttctcattctctcaagtcttctccatgcggctataggggaaaacattgtttgcgagaatctgccaacaaatatgtgctcgttctcaatatccgcttccgggaaaagatgtatattggagacggctaatgtcgccggagaattcacttgccgcacttccgcagtggacgtggaagggattgtaaaccacgtggagaccgacgagtgcgtttccgcttgtgggggttgatcggaaaaccgtagggatctcgtcagactccttgatggaggcaggtttcgccgctaagctttgctcatccgcttgcttggactattgccctaacattcttgatctctatttcaacctcgccgccggtgaaggtgcatttttacctgatctatgtgatgctcaacggatgaatccccaagcgttcgatgaagggattcattcagcttcggcgccggccccaggcccctggtctccgaaaattggaccccgggccccccaccttccgaaaagaaagtcctcaaatcttccctggctcttaagccttccgggctttccttattggttaaaaaatgggttcccaattaaaatttcccaccaatggggggttttaaaaa

SEQ ID NO: 81444 - DNA, 724 bp, Arabidopsis thaliana columbia
taggttggaccgcccccaggtaccggtccggaattcccgggtcgacccacgcgtccgacactgtactgataagaagcggcgccgttttgtcgtggaacgctcgttttcagatcgctaaaggaatcgcgtctggtttattgtatcttcacgaagaatgggagaagattgtgattcatagagacgtgaaacctagcaatgtcttgattgattcaaagatgaaccctagattgggagattttggactcgcgaggctttacgaacgcggaacgctatcggaaacaacagcactcgttggaaccatcgggtacatggcgccagagctttcccgcaacggaaacccctcatctgcgtctgatgttttcgcgtttggcgttttgttgttagagatcgtttgcgggagaaaaccaacggattccggtaccttcttcttggtcgattgggttatggagcttcacgcgaacggtgagattctcagtgcgattgatccgagactaggatctggttacgacggaggagaagcaaggcttgctctcgccgtcggattgctctgttgccaccaaaaaccggcgtctcggccgtcgatgagaatcgtgcttaggtatctaaacggagaggagaatgtacctgagattgacgatgagtggggatattcaaagtcttcaagaggcgaattcggatccaagttggtaggatatgtttcgtcgacctcaattaccagagtttc

SEQ ID NO: 81445 - DNA, 540 bp, Arabidopsis thaliana columbia
gctccagatacagagattttctgtgagggtgaaccagttaaaagggaggacgaagaaaggcttgatgacgttggttatgacgatgttggtggtgtcaggaaacagatggctcagattacggaattggttgaacttcccttgaggcatccacaactctttaaatcaattggtgtgaagccaccaaagggaattctgctttacggacctcctggatccgggaagactcttattgctcgtgctgtggctaatgaaaccggagcattcttcttctgtatcaatggaccggaaatcatgtcgaaactagctggtgagagtgagagcaacctcaggaaagcatttgaggaggctgagaagaatgccccgtctatcatattcattgatgagattgactctattgcaccaaaaagagagaagacgaatggtgaggttgagaggaggattgtctctcagctccttacgcttatggatggactaaaatcacgtgcccatgttattgttatgggagcaacagatcgtcccaacagtattgatccggctttg

SEQ ID NO: 81446 - DNA, 841 bp, Arabidopsis thaliana columbia
  unsure (1)..(841): unsure at all n locations
nnnnnnnnnnnnnnnnnnnnnnnnnnnnnnnnnnnnnnnnnnnnnnnnnnnnnnnnnnnnnnnnnnnnccacgcgtccgtaatatagttaatgactgctttgactattacacatccatctctgcacaagaagaatacaaagagaaaggtagatttttgtatggagaatcaatgggaggtgcagttgctttgttgcttcacaagaaagatccttctttttggaacggggctcttctcgttgctcccatgtgtaagatatcagagaaggtgaaaccacacccagtagtcataaatctactaacgagagttgaagatattataccaaaatggaagatagttcctacaaaagatgttatcgatgctgccttcaaggattccggtcaagcgcgaagagataaggaacaacaagctgatatatcaagacaagccaagacttaaaaccgcacttgaaatgcttagaacgagcatggaccttgaagacactctccacgagatcacattgcctttctttgtccttcacggtgaagcagacattgtgactgatccagagataagcaaagccttgttcgagaaggcaagcacacgcgacaaaaccattaaactttacccaggaatgtggcatggattaacttctggtgagcctgatgctaacgttgacctcgtttttgctgacattgtcaattggcttgatgctcgtaccggcgactccgcttctctgacagtcactccccgtacatgattttacctccaatgttcaaaaggtcgctgacggtgttagtaacggtcaaggaaaatctaaacgaccacaagctagtctcctttgtggtttaaatggtggtgga

SEQ ID NO: 81447 - DNA, 573 bp, Arabidopsis thaliana columbia
  unsure (1)..(573): unsure at all n locations
ggnacggacgagaaaacttgggacggcagtttaccagattatatccggtcgacagaattcaacagttcctctctctaaaagatatgaaggagattaattttggctttgttagcaaagatggccggtcctcttctggcaaatccggcttttacaagcggttttggccggcttttatccttcctccgccgttcgatcggttgttcttaccgattgctttagtttctttttcagtttttctttcaataatttctaaagatttcaattggagattaattttaggtcataatagcctaagattaagttttcggatttgtatctttagaaagtttgatttgcagaatgacctcaagtatgaaaggaagcttttgtttccagcatattgggattgcctgtagccgtttctacatgtttatggagcttcgatcgatcaaatttgaggaatcctcagattattccttccccataccggttttgccaaaccctgatgatnatttggatgaatccccgttgggancnccccccggtaacagtccggggaaaacaaaacgngtgcccttcncgnntggccngggc

SEQ ID NO: 81448 - DNA, 959 bp, Arabidopsis thaliana columbia
ttggtccgcctcgcggtcccggtccggaattcccgggtcgacccacgcgtccgaataatatgatcacctctctcttctctccttcatatcttttagagagaggaactgttgaattctgccgaccggattattctggtaaactgccgtcccaagttttgggcttttgcccggcatctttttggctttgttagcaaagatggccggtcctcttctggcaaatccggcttctacaagcggttttggccggcttttatccttcctccgccgttcgatcggttgttcttaccgattgctttagtttctttttcagtttttctttcaataatttctaaagatttcaattggagattaattttaggtcataatagcctaagattaagttttcggatttgtatctttagaaagtttgatttgcagaattacctcaagtatgaaaggaagttttgtttccagcatattgggattgcctgtagccgtttctacatgtttatggagcttcgatcgatcaaatttgaggaatactcagattttcctttcctcattacctgtttttgccaaatctcttgattgatgattttggcatgcagatggaattgaattctctgtttgtgtagcctcccttctctgtttagcagtttccggtgagaaaaaaacaaaaatcgatggttgccctttttcgacgttgattgtgttcaccggatcggagtctttgacggcaaaggatgacaggaacgtttcatcgcttctcttgcaacacgtgtcttgttatacgatcgtgttttgttaaagagatatccttcctttaaagaaatgtaactaagtggacctttgttgggctgtattctgtggatcattaataaacataatctttccagtgaaaaaaaaaaaaaaagaaaagggcggccgctctagaggatccaagcttacgtacgcgtgcatgcgacgtcatagtagtgtaa

SEQ ID NO: 81449 - DNA, 744 bp, Arabidopsis thaliana columbia
  unsure (1)..(744): unsure at all n locations
cccactctagggtaggttgggccgcctgcaggccccggtccggaattcccgggtcgacccacgcgtccgcatgcacgattgggtcaacgtcgaaaagctcatcggaatggagaaactctgtcaaaactgacgaccctttctcaacgtcctctcgccggagttgccctaaatgggaatcttacaccgtcttccaaaagtacgacgaagaaatgacttttctcactagaatctctgctcaaaagcttcacgaagcagaatctttgaagtcaattatggtggagccaagatctatctcggagaggatcgttcacaagttatcatcaaacggtcacaagaaaaaacaaaaacaatatccaggcagcaatggtgtcgagaccaaacccttacgtggaactagaatccgctttacgtggcacagatatgtctaacatgggaagctctaagttggaactacaaaaacttcgagagaaaaagatcaaccacgcaacgaagcttcaacgacgtaggatgtcccgccggaatcgccgaccaattccgtacgtttcacattcttttacaaagatacgtagaaaatgaaccttatgaacatggaagaagaccagagatttatgctcgcatgcgaactctngctcctaaatgcttcttgttcctgaataccaagattatgaggaagaggaggaaaagggaagaccagaatcgaagagggtttcaaggtcgaggatatcggcagcttcgttcttgatg

SEQ ID NO: 81450 - DNA, 762 bp, Arabidopsis thaliana columbia
gaacccaccaaaggtgaactaaagcgggacctccaccgcgggggcggccgctctagaactagtggatcccccgggctgcttgaattcgcggccgcaatcaacaaaacatcgtatagatcccgacaaaaagatagaaagaggtctgatcgatcctctgatgctacaaaaagtattaactgaacaaacctaaacattttatgcatacgccttcgttccttccttcttgcggatctctttcctaacacttttttttttccttcttcattttcagctagtctctttctcctctcttcccatgtacagatcagatacaacaaatgaatagcgtggtcacctttccttttttttgttttcttttccggtcttgtatcctatataagtacctggctttggtctgtcagtatatgatgactctaaggagaccggcctgtggttcggaatagtcaagacctccttcttcgagtaggtagcgctgtacagcaactgggagtctagccggagtgcgggaaccccttgtgtggtggcctgtccctacacatatgtaaatctgaagcctctcttgcgttgctcgagcttgtgctcctcaacacactcaagttcgtgcttcaacacctgaagtgcttcactcacatgtaacccatgcaaggctatcattctctcattccctctactgtttccttgacccactgggttcctgtttcattttttactcataggcaggttagaacagaaaaactgagaacaggagttttgtttttcatt

SEQ ID NO: 81451 - DNA, 498 bp, Arabidopsis thaliana columbia
ccgtccccaaaaacaaaggaaacaaaaaatcagtcggcgaaacgggaagagatctatcggaaatcttacggcggcggaagtcatggcgaacatagaatcagaagcagtcgatttcgagccagaggaggatgaccttatggacgaagaaggtacagctattgacggagctgatgtttctccacgcgcgggacatccgaggcttaagtcggctattgccggagctaatggcgaatcagcaaagaagaccaaaggccgtgggtttcgcgaggagaaagattccgatcgtcagcgtcgtctttcctcacgcgatttcgaatcacttggttcagatggccgtcctggtccgcagagatccgttgaaggatggattatcttggtctctggagttcatgaggagacacaggaggaggatataaccaatgcttttggtgattttggggagattaagaatctaaatctcaatctcgatcgccgtaatggttatgtcaagggatatgc

SEQ ID NO: 81452 - DNA, 368 bp, Arabidopsis thaliana columbia
aagaatctgaaatttctacgtatccccttggacacgtctacgagagaggggacttcagatggagttgcatctcaaagaattaccatgttcaagaatattagtggccaccagggattttttctttctggctcaaggccggggtggtgtatgttgttcagagagcgactacgatttcattcacagctgtgcgacggatcaattgcggcctttactgttcttcacaatgtgaattgcaatcacgggttcatatatgtcacagcacagggagttttgaagatttgccaattaccttcagcatcaatctatgataattattggccagtgcagaagattcctctaaaggccacacctcaccaagttacttacta

SEQ ID NO: 81453 - DNA, 780 bp, Arabidopsis thaliana columbia
  unsure (1)..(780): unsure at all n locations
cccgtnnnnnnnnnnnnnnnnnnnnnnnnnnngctggtccgtctgcggtaccggtccggaattcccgggtcgacccacgcgtccgggttctctttgtcgtgtttggattgttgaattcgcttttcgaagggaaagtggtagcgaagcttccgtttcatccgattacgattgtgaggaagatgagtcatagaggattgaaaggcgatgattccactgattgttccatggcttttctttatctgctttgttctattagtataaggactaatctgcagaagttcttgggtttctctccacctagaggagctgctggtgctggtggtttgttcccaatgcctgatccaaagaccaattgatcaggtttgatctgatgatgaattggattctggattctgagctcgttgttactctgaaattttcatagataacctcaatgctctgatgtagtggtgttgttttcagttcgtttgatgagaaacactttcaaagtttcgagttttgagttttcttctagtatgaggtttggatttggatcccttaacatgatctactccttttcaaattcagtcttgattattgtgtgttcaagtccttttcatatgctttgacatctttctaatcatttgtacaccaaaaggcttgagttttcatgcgtatggattgtttggagactgaaatgagaggttagtgaaagatgtaggtaataaagagtacacatggattggggttttgtcaagtggtaatgggtaagttacagagaggctcaagtcatatcctcag

SEQ ID NO: 81454 - DNA, 131 bp, Arabidopsis thaliana columbia
atgatccaatgcttgtcttggagtattctatgcttgtcctgtaaagctgtccaactcaaaccatcgatcttgtttttgtctggaaatatctcagctgaccttgtcaattcgtatctgaagcagcatgctcc

SEQ ID NO: 81455 - DNA, 441 bp, Arabidopsis thaliana columbia
  unsure (1)..(441): unsure at all n locations
taaaaaagagtaagaagaggaagacgagagttacaagggttgaaaatgaagggacgtcaaggagagagagttagattgtatgttcgtggaacagtcctcggctacaagaggtccaagtcgaaccaatatcccaacacttctctcatccagattgaaggtgtgaacactcaagaggaggtcaattggtacaagggtaagcgtttggcttacatctacaaggcaaagacaaaggagaacggttctcactaccgttgcatttggggcaaagtcactagggcctcatggtaacagcggtgttgtccgttctaaggttcaccttcaaaccctaccacccaaagtcaaatgggngctttgagtcaanagtctttcctgtggccccctgcaaccattttgggggggggtnggttttcaagggagttttctggaaggaatnnnccnttt

SEQ ID NO: 81456 - DNA, 613 bp, Arabidopsis thaliana columbia
gggaaaggctggaccgcctgcaggtaccggtcctgaattcccgggtcgacccacgcgtcggcagattgtatgttcgtggaacagtcctcggttacaagaggtactttcaattttcagtctttctctgtatgttcttagatttttcagagttcaatgttgcgtttatggttggagattgtagtgtttagtttcattattcttaagttatttggatttgaatattcatctatcgttttggatatcaatataagatctcgataaaagtttgtaactttgccacaactgatagatttcaatgataatgctctcagatttgtaatcttattccatggtttctgatttatggttgtgcaaagtgatgcatttttgctattgcttcctttaagattagcttttaagcagttggttgatagtttgattgcttatataaagcggattaaagattgattactaacgattaagtaatgtttcaggtccaagtcgaaccaataccctaacacttctctcgtccagattgaaggtgtgaacactcaagcaggaggtaattggctcaagggtaagcgtttggctacatctacaaggcatagaccaagatgaacggttctcactaccg

SEQ ID NO: 81457 - DNA, 523 bp, Arabidopsis thaliana columbia
cagttttatttttgatgcaatagtcccatttattgctttcatttcagttgaattgaacaccactgattctgtaacttgagatttaagattagctgtttcatttttcttctctaatggcgaaaccttgtcaacaaggctatatctatttgaaaggttgtgcattgtagttaagagcaattagattataatcctttaagtataatagattgtccaagatttatatacttaagtgaacatggatcctgattcgatttcctaatgcaggaggctagatttcaacaagtatcggaaggaatcgccattatcatttctcaggagctgtagttttatctattcacttttattctagactctctgttgggtttgattttatcctgagacgaagtaaaacattttttttcttgagatcatatactatcgagtattaatggaaaaaaaaaaaaaaaagggcggccgctctagaggatcccagcttacggacgcgggcatggcacgtcaaagctcttctaaaagtggccaccct

SEQ ID NO: 81458 - DNA, 710 bp, Arabidopsis thaliana columbia
  unsure (1)..(710): unsure at all n locations
cccacgcgtccgaatcgctcgccggcataaaagagagtcagaagaggaagaagagagttacaaggattgaaaatgaagggacgtcaaggagagagagttagattgtatgttcgtggaacagtcctcggttacaagaggtccaagtcgaaccaataccctaacacttctctcgtccagattgaaggtgtgaacactcaagaggaggttaattggtacaagggtaagcgtttggcttacatctacaaggcaaagacaaagaagaacggttctcactaccgttgcatttggggcaaagtcactaggcctcatggtaacagtggtgttgtccgttctaagttcacttcaaacctaccacccaagtcaatgggagctagagtcagagtcttcatgtaccctagcaacatatgaggaggctagatttcaacaagtatcggaaggaatcgccattatcatttctcaggagctgtagttttatctattcacttttattctagactctctgttggttttgattttatcttgagacgaagtaaaacattttttttcttgagatcatatactatcgagtattaatggaacttgagaaaagctatgatcccagtcattttccttatttaaaaaaaaaaaaaaaaaaannnnnnnnnnnnnnnnnnnnnnnnnnnnnnnnnnnnnnnnnnnnnnnnnnnnnnnnnnnnnnnnnnnnnnnnnnn

SEQ ID NO: 81459 - DNA, 3126 bp, Arabidopsis thaliana columbia
  unsure (1)..(3126): unsure at all n locations
cccacgcgtccgccatgaagaaaagaagaacctttcttctattttcatttacctttcttcttcttctatctctttctaaagctgattctgatggagatctctcagcgatgttatcactcaagaaaagcttaaacccacccagttctttcggttggtctgaccctgacccatgtaaatggactcacatcgtttgtacaggaacaaaacgtgtgacccggatccaaatcgggcattcgggtcttcaaggtacactttctcctgatctacgtaacttatcagagcttgaaagacttgagcttcaatggaacaacatctctggtcctgttccttctttaagtggtttagcttcattacaagtcttgatgttaagtaacaacaactttgattctatccctagtgatgtctttcaaggtttaacttcgttacaatctgtagaaattgataacaatccttttaagagttgggagattccagagagtttgagaaatgcttctgctcttcagaatttctctgctaattcggctaatgtttccggttctttacccggttttctcggaccggatgagtttcccggtttgtcgattttgcatttggctttcaacaacttagaaggagagttgcctatgagtttagctggctctcaggttcagtcattgtggctcaatggtcagaaactaaccggtgatattactgttcttcagaacatgactggtttaaaagaggtttggcttcactccaacaagttttcgggtcctttaccggacttttcgggtcttaaggagcttgagagcttgagtttgagagataactcctttacaggtccagttcctgcgtctttgttaagtcttgagtcacttaaagttgtgaacttgacgaataatcatctacaaggaccagtgcctgtgtttaagagctctgtttcagttgatttggataaagattctaacagcttttgcttgtctagtcctggtgagtgtgatcctagagtgaagtctttgcttttgatagctagttcattcgattatccgccccggctcgctgagagttggaaaggaaacgatccttgtactaactggattgggatagcttgtagcaatgggaacattactgttatcagtcttgagaaaatggaactaaccgggacgatttctcccgagtttggagcgatcaagtcgcttcaaagaatcattcttggtatcaacaatcttactggtatgattcctcaagagcttacaacgttacctaatctcaaaacactcgatgtttcgagtaacaagcttttcgggaaggtcccgggttttagaagcaatgttgttgtgaatactaatggtaatcctgacattggaaaggataaaagctctttgtcttctcctggttcttcttcgccttcaggtggttcgggttcaggtatcaacggtgataaagaccggagaggaatgaagtcttcgacttttataggaatcattgttggttcagttcttggaggtttgttatcaatcttcttgattggtttgttagttttctgttggtacaaaaagaggcagaagagattctcaggaagtgagagctcaaatgcagtagtggtgcatccgcgacattcggggtctgacaatgagagtgttaagattacagttgcgggttcaagcgtaagcgttggagggataagtgatacttatacgcttcctggtacaagtgaggttggagataatattcaaatggtggaagcaggaaacatgctgatatcaatccaagtgcttcgttctgtgactaacaacttcagttcagataacattcttggatcaggaggtttcggggttgtgtataaaggcgagttgcacgatggaacgaagattgcggttaagagaatggagaatggagttattgctggtaaaggctttgcggagtttaaatcagagattgcggttttaacaaaggttaggcatcgtcatttggttacgcttcttggttattgtttggatgggaatgagaagttacttgtgtatgagtatatgcctcaagggacattgagtaggcatttgtttgagtggtcagaggaaggacttaagcctctgttgtggaaacagagattgactttagctttggatgttgctagaggtgtggagtatctccatggattagctcaccagagctttatacacagggatcttaagccttctaacattcttcttggggatgatatgagggcgaaagttgcagactttggactcgttcgtctcgctcctgaaggaaaaggatcgattgagactagaatcgctggaacatttggttacttggcacccgaatacgcagtaacgggtcgagtgacaacgaaggtcgatgtatacagcttcggggtaatcctaatggaactcataacgggaagaaaatctctagacgaatcgcaaccagaagaaagcattcacttggtctcttggttcaaacggatgtacatcaacaaagaagcatcattcaagaaagcgatcgacacgacaatagacctagacgaagaaaccttagccagcgttcacactgttgctgaactagcaggccattgctgtgcccgtgagccttaccagagaccagacatgggacacgcagtcaacattctgtcatcactcgttgagctatggaaaccgtcggatcagaatccagaagacatatatggtatcgatctcgacatgtctttacctcaagcacttaagaaatggcaagcttatgaaggaagaagtgatctcgaatcttcaacttcatcacttttacctagcttggacaacacgcagatgagtattcccactagaccttacggattcgcagagtcattcacttcagtagatggacgatgaatgagagattccttgaaacccagatttgatttttctccttttggaaatttgggtttcctctcctcttcttcccctcccaattttttcatgtttcttgtgatgcaagtaacatttagggcttaatttgggtgtcttaatattattttgatgttgagtgtttnnnnnnnnnnnnnnnnnnnnnnnnnnnnnnnnnnnnnnnnnnnnnnnnnnnnnnnnnnnnnnnnnnnnnnnnnnnnnnnnnnnnnnnnnnnnnnnnnnnnnnnnnnnnnnnnnnnnnnnnnnn

SEQ ID NO: 81460 - DNA, 821 bp, Arabidopsis thaliana columbia
aggatcgatcaaagtcttgaatatttcatctatatatacctaagaaagaaaagagttaaagaagtatattttcgattcaaagaagaaaaatgaattctcaccagaatcaaaccggagtgcaaaagaagggaataacggagaaaatcatggagaagctaccaggtcatcatggacctactaacactggtgttgttcaccacgagaagaaagggatgacggagaaagttatggagcagctgccaggtcatcatggtgctactggtaccggtggtgttcaccacgagaagaaaggaatgacggaaaaagttatggagcagctgccaggtcatcatggatcacaccaaactggaaccaacacaacttatggtactactaacactggtggtgttcaccacgagaaaaaaagtgtgaccgaaaaagttatggagaaactaccaggtcatcatgggtcacatcaaactgggactaacacggcttatggtactaacactaatgtcgttcaccatgagaaaaaaggtatagcagaaaagattaaagagcaactgccaggtcatcatggaactcacaaaactggaaccaccacaagttatggtaatactggcgttgttcaccatgaaaataaaagtacgatggataagattaaagagaagcttcccggtggtcatcactagattgattaacaacttgtttaagcttattttaagtatttgtgtggtgtaataatatgatgatgtggctttctttcattgagtcgctaaataatatatgtaagtgatggatctttgaattaatataaaatatctacttctggtttcgtttaa

SEQ ID NO: 81461 - DNA, 752 bp, Arabidopsis thaliana columbia
accccccctctggtcgacggtatcgataagctggaatcaaattggcggccgcttttcatatgattcatgttaatgttgttgatacaatgtgaagccaaataacaataaaagtattgataccaagatacatgatttcactgtaaacctttttggatacatttgtgttacacacttacacttgcacatataactcgtcgaacgatgagaaacaatggacttcctctattagatgaacaaaaacagattgagtctcttacttctataacttgtcggtccgaatgcatctcaaatccttgtcaaaagtaaagactttccctggcaacaattcggcagccgcagagattcctctgtacactattctgggtggaaacaaatctgttccgaccaaagaccaaacctccacaagggttccctttccattccactttatactaaccggcacaccggcccctttgcccttagcccattcacaaatgccgttaggccttttatctgctggaagtgccgggagcaaatatagatccttcgtagtgctctgcactaacatttctgctaccgctgctgcgaatccaaaattagcatcgatctggaatggcgggtgtgcagtgaacatgttactatacagtccctcctcatagttacgttcgttcaacggatccacaagatcaaaaatatgtgtaaccatccgatatgcgtgctcgctattgtgaagccttgcccacaaagcggctttccaggtggttgaccatcct

SEQ ID NO: 81462 - DNA, 769 bp, Arabidopsis thaliana columbia
cgtgcacgtacctggggtggatggcctcgatgagcttggcatcggattcgcggccgcattataggtaatagactgagtgttagcatctctagggatgattcttctgatggtaaaaagccggtgtctgctctatttcgagccaaatctgcgaagtcgagtttgagtttggatgtaaaaaaagaatctttggggaagctcaagacttcttcgggttctaagtctattccttcttcgccgacgagttgttactcactgcctaattcttttgcaaagtttgctaatgggattaagcagcaacagactgtgaagccaaagttattggagaagggttctcctagaatggggttgtcagagaagggccggtctcttcttaaagcggagagtccgaaagttgggataaagcttcccatgattaagaattttgtgcaggggattgagtttggagctaaggcgttgaggaaaagctgggaagggaatttagatatcaggggttcagatagaacaaaatccagccttcccagacgtgatttaacccctgattcccggagtttagcagctccgcggagaagcacatcgagtgagaagttgccaagcaaacaggagagggctaatgtatttgcaagatcatcgaaggagcacaataagatacagtccaaccaaagaaaggtcgaagcccaacttggcaggtggttgggaccacccagaaaaattaaaaaccgagttacgggccttaaaaatcctaccatttctggtgtcgaagaaaagaaaa

SEQ ID NO: 81463 - DNA, 451 bp, Arabidopsis thaliana columbia
tcgcgggtcgacgcaagactctaaagtgagtcgtattagacagaaggggactcgccaagaagtttcctttcctttgattgcacaactaatctcaaactaaaagatcttctctttaggcatacccagatctttctctctctaaagtctccacctttcacggttttttgcttctcacctgaatccaatcaatctcgccggagtgaattcaccttcctccggttgactcgtcggacttagtccgacctttcaattcgtagattctgtttacaattcactgatcgtttgattagaaatgggttacttgttcttctaagtctctctttagctgaaagtttgttgctttacgactcttcgatttacccttacttgttcaagttcttcatcaaattcgtagttatggcgataagaatcactttcactcactccacccatgctgctcggaatctcgtct

SEQ ID NO: 81464 - DNA, 673 bp, Arabidopsis thaliana columbia
atgatacttcagcgtctctacgactcactatttggaaagctggcacgcctgcaggtaccggtccggaattcccgggtcgtcccacgcgtccgcttcaaacaacaatctttgcttctctctgagtgatcatctttcttgttcaatggctggtcaaaagatactttctttactggttatagctcttgttgttacttttgcagctgcggctcggcttcttgatgaagaaaatgcattctcagctaccacaaccacccttggctcaggttcaggttccaccggaattggttttggtgcaggaacagggtcaagtggttcaggttccacgggattcggttttggtgcaggatcagggtcatctggttcaggttctactggaagcggtctcggtgcaggtacagggtcaataccatcaagtggttcaggtcctggtcttctaccaactgccagttctgttcctggttctttagcgggtggtggttcaggttccttgcctaccactggttcagccactggtgcaggtgcaggtaccggttcagctcttggaggtggtccaggtgctggctcagctcttggtggtggtgcgggtgccggtccagctcttggtggtggtgcgggtgccggtccagctcttggtggtggtgcaggtgctggttcagctcttggtggtggtggt

SEQ ID NO: 81465 - DNA, 764 bp, Arabidopsis thaliana columbia
  unsure (1)..(764): unsure at all n locations
nnnnnnnnnnnnnnnnnnnnnnnnnnnnnnnnnnnnnnnnnnnnnnnnnnnnnnnnnnnnnncgataaaaacggcaaacgannttttcccattttcggccgccttacttgcaaagcaagaaagaaagcaatcaataaaaagtctatgtccccgcacaagttttcaataacattatcatacaaacaacaacaacaaaaaatcatatcgtggcaaatattagaaccggaacaaaaacctaaagcggtttttcagagttgtggccaagacgcagatcgcttgatgactggtttcatgagtttgtcttccttcaagagagatcataccaatgtgtgaaggatcttctagcaacattttcgccactaagtaaccctgcgtttgcccaagtctggtatttccttgccctgttttccaacggaccttccggagcttaccggtcgtaatactctgggccaacagtctcggtgaagacgcgattctatgaggtcaaccgcgcgtcttgcgatctgcggtctccctgtcttaatgcacgctgctgttagctgccacagcaaaactggccaagatccaccattgtggtagctccaccgtgtgttcttggggtcacagccagtaacgatgcgccactcatggccctcgaggcatggataacanatcttgagaggcatctcacctacaagctctgcccaccggtgctcaaagaggtccataatggccctggaattgaatctgaatggcccatgaagaaagtattgagacaccattac

SEQ ID NO: 81466 - DNA, 784 bp, Arabidopsis thaliana columbia
  unsure (1)..(784): unsure at all n locations
nnnnnnnnnnnnnnnnnnnnnnnnnnnnnnnnnnnnnnnnnnnnnnnnnnnnnnnnnnnnnnnnnnnccacgcgtccgcgcagatccgaacttgaaaccatatatacaactcttctcaaggccaacatggatgctgttgcattctggaatcaacaaccactagctgcaagggaatatgcatcagccactgtaattccagccagtgaagttgttgtggacatttcaaacagcgcaaaagatttcattgagaaagaagtgtctgctttctttcaaagtcctgataacagtctttatatgcttccagcaactccccagggacttctggaatctatgggagctaatggatcgacgggacctgaagctgttgcatatgcagagaaggatgctgctctatttacgggctagagcttggtgcaagagatcccttcggccaataccatctatattggccgcatttccttgctgcccttcaaatatcctcgcaggtcttgaaggggttcagaatgcaagtttggcctcagtgttagagtctcttgagttctgcttaagagttcgtggttctgaagcatgtgttttagaagacttagcaaaggcaatcgatttggtccatattcggcaggatctagttgaaagtggccattctctgttagatcatgctttccgtgcccagcaaaaatatgaaagaacaactaactactgcctagatctagcttctgaacaagagaatacaatatcggaccagtggttacctgaaactangactgcagttcaaaatgcgcaagct

SEQ ID NO: 81467 - DNA, 1029 bp, Arabidopsis thaliana columbia
  unsure (1)..(1029): unsure at all n locations
acttntggaaagcncaaggccctgcacntnggaagccntngaccgaatggaacccnggntnctnttccccnggnctgtccntagatcccgggncggttctactattactttgncaaccccattgnaaccagcaggtaaggngaaaganctnaaagaccaagngaaggcacaagagctctacttgcaagttaaatctgaggtagaacaatgcattgactatttaaaagtgaaaagagagagtgatccctacagacacttattgcctaggatgttgtatcaggcctcacatggttggtcttctgaaattccaacgtttgatctctaagtctctctttgtacccacccatttaatcatgatgaatagaggttctaagattctttggagatctaagatctttatatgttcaagaaaagtaagacaaaagatcattttatcgaatgcgcggccgcatgaacctacctataaaggttttatgaatgcagtcatatgtgatgtgactttaggttcatacatgcgtttcaactacagtttaaaaggatggattcttcatttacatgttatgaaagtagaggtaaattctgcattgtaaaactcaccacagaagaagaacgattctgactaaacatcgtttatcagacaagacaaaaatgtagaatcttctccagctgggcaaaagtgttatgtgaaatcccctttgattcgcttatctactatgctttgacatacttgtctacataacccataaccagtttggtaagcttctgctgtgaggattcaatgtacttatcggtcttagctcttgattggggaatacggcggccctccattgggtttgatactttatccaccactctcttcacaatagtcttaaacccctccttgctcatattcccttgtcttcacgatggtttcagaagatccttgacgaattttgtaagcacgactttgaaaagcttcatggacacttgatgaatctctctccttttgatttctctcgagacttttttccttgagttaattcgcctttc

SEQ ID NO: 81468 - DNA, 426 bp, Arabidopsis thaliana columbia
ggaggaatgatggaatcttcagctttaataaatctgcagactctcaaaattccgattcatcttattgaagaacaattttccggcgaaacagccgatgaagtctcgcctgaatcttctgtacctttcaccggcgattgacttcacttcagaatcgagagagaagaaatcgatggaaaactaaaaatagaaagagtttcaaattctcgctctctcttcaaaaccgcaaatcaagggaacgagagacgagagagagagatgagtaaacggaatccgaagattctgaagatttttctgtatatgttacttctcaactctctctttctcatcatctacttcgtttttcactcatcgtcgttttcaccggagcagtcacagcctcctcatatataccacgtttcagtgaataaccaatcggcgattcagaaa

SEQ ID NO: 81469 - DNA, 596 bp, Arabidopsis thaliana columbia
caagatctctctaattcaaactgagagttacaaagatcaaaagatggattctagttcttggctcaacaatatattcaaaggcttaaagctctacagctactagaatacaaacattggtaagtacattatacaacaattttacaacaacaaaatgcagacttgcgaaatctgctggcgtacaaactgtttctcatattggtgatgttattgaatgttaaacgacggctttgagtagagcctcatgtacagcttctttggttggaagggccgggattgcgcctctcactttaacggttaatgccccgcatgcattcgcaaacataagagcctctctcagtcgctcttcgtcctgaagcaaggagagatcattggctagttgcgatagtatccccgcaacaaatgcatcaccagcacctgttggtgtccactacatccaccttcaatccatgcactctcccactaaaatccttggtggtagtaccgacagccttcagggccttcagtggcaaggggaagtttcagcttaggatgaaacaacttgcgtacaacattatcatcatacggatcttctcctttcgttagaacccacgcgtccg

SEQ ID NO: 81470 - DNA, 589 bp, Arabidopsis thaliana columbia
  unsure (1)..(589): unsure at all n locations
cccccccgcctagtgagaggaaacaataagcttgatatcgaattcggggccgcattcatatggcttaaagctctacacctactagaatacaaacattggtaagtacattatacaacaattttacaacaacaaaatgcagacttgcgaaatctgctggcgtacaaactgtttctcatattggtgatgttattgaatgttaaacgacggctttgagtagagcctcatgtacagcttctttggttggaagggccgggattgcgcctctcactttaacggttaatgccccgcatgcattcgcaaacataagagcctctctcagtcgctcttcgtcctgaagcaaggagagatcattggctagttgcgatagtatccccgcaacaaatgcatcaccagcacctgttgtgtccactacatccaccttcaatccatgcactctcccactaaaatccttggtgtagtaccgacagccttcaggaccttcagtgacaaggagaagtttcagcttagggtggaacaactgggganaanttttcncnaagggggttccctttcggagnagnaatccccnccnctactttaaaacggggtc

SEQ ID NO: 81471 - DNA, 748 bp, Arabidopsis thaliana columbia
ggtcgactgtatccataagcttgatatcgaattcgcggccgctatataacagaagaaagacagtttgcaggagaacttttagacaaactaaaaaacgttttagctttttagcgtcaaatctcacaagtcacataacgcaatacaagactatccaccaaacaaaaagaaaaactaacgacaagacgctctatggaaatttcccagctccaggatcaatttaccacaacaccctttgaaacttttctgaaaaccgcttcttaaaaggtcgaaattgcccctcgtcatttgcacaaatttacagttcctccacaacacaacacacccactcctcctctattattccattcagctctcctcccgtagccatttgatcaacgttctttgcatccccatcatcaactccaggctggagcttctatcatggagccagcttttcattccttcctggtaatccttgcttgagcctttcttgggcccgggcatggcctggactttaaccactgacctctcaagccgttcctccgcttgtttctggcttgtcttgtaaaaaatctccaccgcctcactcccttcctttttcgtcagggtgacttaacctgaagggcctttgaaatcctttttctctttcaagtctccaatcttaaaaaattgggcctttttcaaagaaaccttcccacttggacccatgggttaattttttccgggggaaccttggggcctttcctttaaccttgggggaaaaaaccct

SEQ ID NO: 81472 - DNA, 806 bp, Arabidopsis thaliana columbia
tggccagcctcgggtctacttatctagaatctaaatatcggatccgtggcctcgcaatcttcacctatacatttcctgttgtctagtctagaaaaatctaagactttttactcctcccttgtcttctggaaatctgggaggattttaaggttcttcttgtccaaaaattaaaaaaattgccaatcgtggattgtgtatcattcattgtcatcatctaatcttcttcttcttctacttacgagtttggagaagttatccgccattgaagcatttaaaatgccggagaaaggaatgattttcccgccggtaccgagccaattggtgattcttccggccaagcccttcttcttcaattgggcgggcttggtgcctcttacaagcactcggcctgcttccccttatgttcagtcggtctggaggtattgacgggttgttccgattcaaaaggcttcgttcagccattggagattcaatgcttactctgttcgaatcagtccttctgcgtcgccgtttatgtcaacgaaacccaatctagtatcagagaaacctcaccgccaaaatctcaccttgatgatggctccacgaaatctggttccgaagaagacgaatctcactttcaactcgacccgggtccagttcgagtggataaccgctggatctcagaagaatttcaccgccaaattgatgagaagctgcttgggctcccggaggaacgcccgtgtaaagaaatcgaagaacccgtctaagattttcaattttcccgggtggtctaaccgggatattggatttttttggggaggtttaac

SEQ ID NO: 81473 - DNA, 582 bp, Arabidopsis thaliana columbia
  unsure (1)..(582): unsure at all n locations
ccccccctcggtgtcgacggtatcgataagcttgatatcgaattcgcgggcgctttttttttttcatcaaaaaaatttggtcaaaaattaaatcgacagctaaaagtttgaacataaaattcggtaacagaaaacagtaaagccaccgacgatgtaaagttattatagaaacgaaattcaatggtgtggttgacttttcgttcctatgataactttggcagcttttggaggtaatgcattttgataactccaaagagaggaaaaaacgaatcatcagccaaaacgccgtcgtacaggctccaaaaccttcatcgtcttggcgtcttttggctgagacccatagtaatataagaaagggtgtatcctagtcagggaaattcaacggtacctagtaacaaattatttattgtctccatgactatacggtatttcatattcataaatggaattccgtattttagcagcattaattaggggaggggaagaaataaagggatgggtattatttatttatactaaataggataaatnacgnccctggtggggatgtganngctggnaattccngancccccnncngtc

SEQ ID NO: 81474 - DNA, 546 bp, Arabidopsis thaliana columbia
  unsure (1)..(546): unsure at all n locations
tccttttttttttttttttgtcatcaaaaaaatttggtcaaaaattaaatcgacagctaaaagtttgaacataaaattcggtaacagaaaacagtaaagccaccgacgatgtaaagttattatagaaacgaaattcaatgtgttgttgactttcgtttctatgataactttggcagcttttgaagttaatgcattttgataactccaaagagaggaaaaaacgaatcatcagccaaaacgccgtcgtacaggctccaaaaccttcatcgtcttggcgtcttttgtcttgttgtgaatgtgagcagctgagcaatttctgaatctctctatcttcttctgtttcgttcattttaattccattaaatgcttaaaccccacattccattaatgctctcctccttccacttcaatatttctttttaatcatcaccaccgtccaaatttcatcttacatctcggccctacacgggctctcctctcactcncggggaanagggcccgggcncgactaacgggcgagatgggggngncgagnacggccgcacg

SEQ ID NO: 81475 - DNA, 552 bp, Arabidopsis thaliana columbia
cggacgcgtgggaccgaattggatccgactttgacatatccttacatgtatagagctgtcacacgaatgtcgaaacaaaatgctaaggctgctcttgaagaaatcaatcggatcttggggtttaaacttgctttagaatgcttagaaattcggttttgtctttatcttggtatggatgactatgaagcggctcttcgtgatattcaggctgctcttacgctgtgtcctgattatagaatgttcgatgggaaagtagctgggaggcagctccagacgcttgtgtatgagcatgtcgagaattggacaaccgcagattgttggatgcagctatatgagaaatggtctaatgttgatgatataggttctctttctgtaatctatcagatgctcgaatccgatgcttgcaaaggtgttctctacttcaggcaatctttgcttctcctaaggttgaattgtccagaagcagcgatgcgcagtttacagttagcccgcgagcatgcctcaagtgaccacgagcgtctagtttacgaaggatggatcttgtatgataca

SEQ ID NO: 81476 - DNA, 550 bp, Arabidopsis thaliana columbia
  unsure (1)..(550): unsure at all n locations
nnnnnnnnnncagctaannnnnnnnnnnnnnnnnnnnnnnnnnnnnnnnnnnnnnnnnnnnnnnnnnnnnnnnnnnnnnnnnnnnnnnnnnnnnnnnnnnnnnnnnnnnncggccgccatttacttaagcgatataaattatttgcatcaacaatatatacatgagtccactaaccttaaagccaacaacaagatttagagagtcttaaacttacaattggcaaaaaagactcactcattacatcaaccatcttgcaacatgagagcaactcttaatcgcatatttacatttgtttaaatggtgcagatcaagatcttttaaatccctttttaagttaagtagttgcaagttgcagagacccgcaagcatcagaagcatgcttgccttctccaaaaaccaagttccctctcacaaatgtcgaaaccactttgcctgataatcttcttcccaaataagctgagatactagggtgtttgaagtgaattggatgatcttcatctacatcaaattcggcttcaggttcccacacaacaagatctagcgtgtttt

SEQ ID NO: 81477 - DNA, 461 bp, Arabidopsis thaliana columbia
ggccgctggatctggcgcatgatctctaatggacctctcaagcaatctgctgaatctacctcaaatgaaacccataccaaagatgtgtataatttatcattttcgaatacacgcaatggatgagggaagcaaagaacgaagtcgacaagatgatggtcacgaaccagtgggcaaagtcgattgttctaatagcttagagccgataggttcatcgaaggacttaacagtgaatactaggcctgaagttgtaccttatagcaatatagacaagcaatcgagtgaaagttttgatcgggcttctactctaagagaaactgcatctcttttttctggaacctcaatgcagatggatggtttcattcacggcaggggatcaacctcatccagaaaagactctctacaacctactaccaggatggcagggtcttttgacgaagttgccaaaaaccaacagggaagtg

SEQ ID NO: 81478 - DNA, 596 bp, Arabidopsis thaliana columbia
  unsure (1)..(596): unsure at all n locations
cccccctgaatgaggagagaaaacaaaagctggatatcgaattcgcggccgcctgaaactggacattataagttcttgaaaattatgtataaaacccacatataaaaagggaaaagaatttaaaaaacaaacaaaaaaatagtgaatataaacggtatttttttccttgttctctgtcttggttttgtgtgtgtctagctgatctgttctccgatcaaatccaaccctacaaccaagaaagacagtccctgaaacaacaaaaagtagaagtgaagaccgtgcgccgatagaaagctccttgcagctgcggttagcagcaagaacgcaagcccgagctctttcttgaacaccatgttcgtcttcttcttgttcttcggcctcattagccctccaaggctcttcttcacggtttcttgccctacaagatttgtctcttgctccttaaggttgctcagaagctccaaacctgactccgagtttctcctatgcaactcctcttccttttcaagcaacggtagcaaatcggnctccgtgantnccgggtttcttcgganaaccactcgaagncggtcnaacngaaagccggggtatnggta

SEQ ID NO: 81479 - DNA, 479 bp, Arabidopsis thaliana columbia
  unsure (1)..(479): unsure at all n locations
aggcaactattttcattcaacttattcttgtaaagacaatgcaaaacgatttgaaacaaaagaaggaaatggaagttagggaaaaaaaaatggtaaagaatatttacaggcaaaataaacatttcttcacattgcaagtgctcgtggtcgctacaaaagtaaactaatcttaacgtagctaacaagtaattgcttcaaaactcgtaaaagtgaaatctttggtcttctcttatgtgaactcgtatgatctcaaaacttgcacgatgtaccaagtctctgtgtgttcctcaacgtcatggtcttgcggttctgcaaaagccgagtaaagcaactcctgaaacctctccaagaacacaacccattcaacttctttcatgtcggctaacttcacaaagtttacgctaagcgggagctgcacgttcgcgccctgggactaccaatgctttgtcggntggntgccttcgggggtcaggancggg

SEQ ID NO: 81480 - DNA, 791 bp, Arabidopsis thaliana columbia
cccccccttgtggtcgacggtatcgataagcttgatatcgaattcgcggccgcgcaaaataaacatttcttcacattgcaagtgctcgtggtcgctacaaaagtaaactaatcttaacgtagctaacaagtaattgcttcaaaactcgtaaaagtgaaatctttggtcttctcttatgtgaactcgtatgatctcaaaacttgcacgatgtaccaagtctctgtgtgttcctcaacgtcatggtcttgcgttctgcaaaagccgagtaaagcaactcctgaaacctctccaagaacacaacccattcaacttctttcatgtcggctaacttcacaaagtttacgctaagcgggagctgcacgttcgcgctcttgtgacttaccaatgctttgtcggtttggttgtctttcggaggtttcaggtatccggatcccatggtgttgcttagattggtcttcattgatgtggaaagctttgagagagatagagtaagttttgcctcctcttcgtcatcttcttcttcttcagcaatgctctctttgagctctccaagtgaagaacgtccggttgaaaatgggttcttggcgaagaactcatcggtttctgtctcagagccataaaccgagtctagctcattgtagtctatatcaaactgaaactctgtctctccttctccatctgacttgggagacaaaacgtcttgttcagtggttaatctcttggcttcgatacacaacatttctagttcacatggttcctcttctcctgcacgaaattctcgagtcatcatc

SEQ ID NO: 81481 - DNA, 725 bp, Arabidopsis thaliana columbia
  unsure (1)..(725): unsure at all n locations
ggaccaaagcctgaacctccaccgggggggcggccgttctagacctagggaatcccccggcctgaagaaattcgcggccgttcaaaaccaatcttctttattcgacctgaaatggtgaaggaggatgatacttaaggcttaagcctgttactttaaaacgtgatatgtccattcaaattagatttaacagaatctcttgtttcttcttctcagataaacagatctattcaactaaaaattttgaaccgggaaatgatcactcctggttttatcttaaccggtttccatgaggcaaagagttttgcttgtaggagaaggcaccttctttcctttcagtctcttaacttaaacgggcaatcaaaaactcttcagtgttctgtaggcaaaagattgtttagcgagaaccggatcgtaacatgaccgttggtgttccatgctcactcaagcttccggtcgataatctcctcatcttttgccagaaactcttgcctcgacccgaggtcaagggaccgagttagactggctcctcgaacctccctgaccccgggtacatttccgatggagataatcccccccctggaatcaggntcagagccggaatttggnagcattgggtancgggccanccttgctgagctggcaccacaagagtctcagctgaggggcatcctaaatcgcttagggtagaagtaagatgggtcttagtacaatngtgnngnagttng

SEQ ID NO: 81482 - DNA, 731 bp, Arabidopsis thaliana columbia
  unsure (1)..(731): unsure at all n locations
ggcccccccctcgtggtcgacggtatcgataagctggatatcgaattcgcggccgcaccagaatctctggtttcttcttctcagataaacagatctattcaactaaaaattttgaaccgggaaatgatcactcctggtggtttcttaaccggtttccatggggcaaagagttttccttgtaggagaaggcaccttctttcctttcagccccttaccttaagcgggcaatcaaaaactcttcagtgttctgtaggcaaaagaattgtttaagcgagaaccgggatcggaacattgacccgttggtgttccatggctcactcaaagcttccaggtcgatcaacctccctcatcttttgccaagaacctcttgcctcgacccgaggtcaaggggacccgagttagactgtctctcgaacctccctgaccccgtgtacatttccgatgtagataatcctctctctgtatcaggctcagagtcgtaattgggtagcattggataccgagccatccttgctgagctgtcaccacaagagctctcagcttgagtgtcatctctaaaatcgtctttagagatagaagttaaagaattgagttctttagcttcatnacattcgttgctgacaagtttcaaagcttgcactacttctcccatgaaaggacggtgtgatacttctggttgaacgcacatagaagctattgccgcgactttagctatgctatcgaatgagatc

SEQ ID NO: 81483 - DNA, 1964 bp, Arabidopsis thaliana columbia
  unsure (1)..(1964): unsure at all n locations
nnnnnnnnnnnnnnnnnnnnnnnnnnnnnnnnnnnnnnnnnnnnnnnnnnnnnnnnnnnnnnnnnnnnnnnnnnncgggggacccacgcgtccgcttttcagagttcaatcacacaacacctctcttcaatagcaataaccatggctcacactctcggtctcactcaacccaactccactgagcctcacaagatctcgttcactgcgaaggagatcgatgtaattgaatggaaaggagacatactcgtagttggtgtgacagagaaggacttagccaaagacggtaactcaaagtttgagaatccgatcttgagcaaggtcgatgctcacttaagtggacttttagctcaagtctcttccgaggaagatttcactgggaaacctggtcaatcgactgttctcaggcttccgggtttaggatcaaagagaatcgctttgatcggtcttggacagtctgtttcgtctccggtggcttttcatagccttggtgaagctgtagctacagtttcaaaagcttctcaatctactagtgctgctattgtgcttgcttcaagtgtttctgatgaatctaagcttagttctgtatcagctttagcttcaggcatagtacttggtttatttgaagatggtaggtataagtctgaatcaaagaaaccatctttgaaagctgttgatattattggatttggaactggggctgaggtagaaaagaagctgaagtatgctgaagatgtttcttacggtgtaattttcgggagagagctcattaattctcctgccaatgtgcttactcctgctgtactagctgaggaagcagcaaaggtggcttctacgtacagtgatgtcttcactgcaaacatcttgaacgaagagcaatgcaaagagttgaagatgggttcttacctagctgttgctgctgcgtcggctaatcctcctcacttcatccaccttgtctataaacctccgaatggctctgttaagaccaaacttgctcttgttggaaaaggattgacctttgacagtggtggctacaacattaagactggacctggctgctcaattgagctcatgaaattcgacatgggcggttcagctgctgttcttggcgctgcgaaagctattggtgagattaagcctcctggtgttgaggttcatttcatcgttgcagcctgtgaaaatatgattagtggaaccggaatgagacctggagatgtcatcactgcctcaaacggaaagaccattgaggtcaacaacacagatgctgaaggtcgtctaacactcgcagatgctctagtgtatgcttgtaaccaaggcgtcgacaagattgttgacctcgctactttgaccggggcctgtgttattgctcttggaacttcaatggcaggaatctatacacctagcgacgagcttgcaaaggaagtgattgctgcatcagaaaggagtggagagaagctgtggaggatgccactggaagagagctattgggagatgatgaagtctggagtggctgatatggtcaacacaggcgggcgggcaggaggatccatcaccgcggctctcttcttgaaacagtttgtgagtgagaaggtgcaatggatgcatatcgacatggctggaccggtgtggaacgagaagaagaagtctgggaccgggtttggtgttgctacgcttgttgaatgggtacagaagaattcatcttcgtgaatgaaacctagagagcgtgagggagagactgtagagtttttcgggtgttgaaatgattgctggtttttaataaggtctcaaaagttactatgttttcagatgttcttaacttgttatgaaaagtaaaatcgtcaaaagttgaataaagtggtactttgttttaaaaaaaaaaaaaaaaaaaaaaaagnnnnnnnnnnnnnnnnnnnnnnnnnnnnnnnnnnnnnnnnnnnnnnnnnnnnnnnnnnnnnnnnnnnnnngaa

SEQ ID NO: 81484 - DNA, 546 bp, Arabidopsis thaliana columbia
  unsure (1)..(546): unsure at all n locations
tnncgcccatgcccgggggcggctggccccctgagggccccccctttttttttttttaattaattggcttttgggataaaaactgcaaccaccaaaaatcccaaaatcccgcttttaaaaaccaaactggaaaaacccattaaaaatcactgctttctactacagattattactctagcttcctctttcttctcctccattctcttctaagctaatctccttcttctcctcagtggacgagaatctgcactgtcaacatcagagacccttgaactgttctcatgtcttctaacagacgaagaagtcgatacagtcaacattgaattaatctcagccgcngtttcaacttggctctctgagtttatcacacctactatgcttgagaacgaatccctgtcttcaacaccaacaggaggactgctgttttgtccttggttcctccccaatgcatgtgttatcaaataagtatccgctaatctttcagcagggctcaaagtaaacgacgacaccctcccatacatctgtgccnatcgtctctgggttgcc

SEQ ID NO: 81485 - DNA, 672 bp, Arabidopsis thaliana columbia
  unsure (1)..(672): unsure at all n locations
gaagggggggttccnccaaagggggntaanggtgggnacccccagggtttccccaggtccgncgttgtaaaccggcggcccnggggattggattttgggngcccttttgggaggncntttggcngnccgatnacngnggccgaaagnttggnccctctngggcgggcccccctttttttttttttncggctacattagtcttttagcataaaaactggaacaacaaaaatccaaaatcccatataaaaaacaaactgaaaaaaccaataaaatcactgctttctactacagattattactctagcttcctctttcttctcctccattctcttctaagctaatctccttcttctcctcagtggacgagaatctgcactgtcaacatcagagacccttgaactgttctcatgtcttctaacagacgaagaagtcgatacagtcaacattgaattaatctcagccgccgtttcaacttggctctccgagtttatcacacctactatgcttgagaacgaatccctgtcttcaacaccaacaggaggactgctgttttgttcttggttcctccccaatgcatgtgttatcaaataagtatccgctaatctttcagcagggctcaaagtaaacgacgacaccctcccatacatctgtgcccatcgtctctgggttgcc

SEQ ID NO: 81486 - DNA, 536 bp, Arabidopsis thaliana columbia
  unsure (1)..(536): unsure at all n locations
cgatataagcacgaaatcgctgtttctctcttcgacgaagctttgataatttgatctcaatcgatcgattctattgagaatttgtgtacctgttttcttataaggttaactaaggattgtggaatcagaagtgttgtgtttttgtgatcggagattatggattggggaaacgtaacggttgatgatctcttcgatgctctccgagaagttgactggtcgtctccgccgcgtcctccgtctgagttcttctcaaggttcaccgttcctaaatctgtccctaaatgggatagtcgcctcaagtgcaatctctactactaccgaacaaactatttcatcatgatcgtcgttatacttggattgggagtccttacaaggcctttagcggatcttcgctcgcgctttttnccaggattaagtttggcatttttaaatgacagcttttcagggttccttttagtgagaaggcggcacggaccgtcanaagggtttttcccgagtaagttctaaatnggcccctttnnaaccntantngtttc

SEQ ID NO: 81487 - DNA, 917 bp, Arabidopsis thaliana columbia
  unsure (1)..(917): unsure at all n locations
nnnnnnnnnnnnnnnnnnnnnnnnnnnnnnnnnnnnnnnnnnnnnnnnnnnnnnnnnnnnnnnnnnnnnnnnnnnnnnnnnaaccacgcgtccgcccacgcgtccgcctaaatgggatagtcgcctcaagtgcaatctctactactaccgaacaaactatttcatcatgatcgtcgttatacttggattgggagtccttacaaggcctttagcgatcttcgctgcgcttttgacagcattaagtttggcatttctaaatgacagctttgcaggttcttttagtgagaaggcgacacgaaccgtcagaagattctctccacagttagctgctaaaatgagacctcctttgacacctgtcactcgtgggcgtccatcatcaaagagagcaatccatgtatgtggtcaaccccgttgggtttttgtcttgacatgctcacttgtgagttttgctctttggtatatttcctctggtttgctcagagtctcggttgcgctactcattgcacatcttgcaacaattcttcatgcaagcttgagaacaccgaacttgaaggcacgttttaacacatttagggaggaattccgagcagtatggcgtaactccagcgagatttagagtaatcttgtaccaccatgatcgtgttctgctgaggacataacgctgtaaagtccaaacttactgcctttctccaagataaacccggtttcgttaacactgtactatggatgttcaatctggatttgttgctcaatgactgggatcatctgttttttctttgatttgagatttgagctctgagctctttttgctagcaaaatcctctcttttttttgctaaagacttgtaaagctagctttgttgttcttcgttctaacacaaaccctttgtgtgtttagatcctagaaatcgtttatat

SEQ ID NO: 81488 - DNA, 573 bp, Arabidopsis thaliana columbia
agaacacgcaggtctatcagtatgtgatgtggttcatcaagattccgagcagaaactagagaatactgctcacgaggcaaaaaacacaatggctagcactgatttcctggcacagctttcaacttctcttttcgaagaagacatggaaccgttcatggaagtagatggcaaagaagttgacaagtcatattatgatggtcttagctcactgttggtgaactctacaaatgatacaaaccgcgaggcttttcctaaccccaccgagcaagaaccttccattgcaccaactcatccaggagaggcaaccctggatgatcatgtgatgcttgagctagatggtacaatcgctttagatcctcatcctgagattgttgggggtgtaatctgctgtttattaaacgaagaggatcctgatattccgtgtaatgatgacattttcctgtccaacaactcccgtccgatgtcagtttcttctttagcccggcggaactttaaggataccaatagtccaataactacatgtgtaagagacgtctccgccagtaaggaaaaaagtgagggatattcactcca

SEQ ID NO: 81489 - DNA, 1109 bp, Arabidopsis thaliana columbia
  unsure (1)..(1109): unsure at all n locations
ggtaccgggccccccctcgttgtcgacggtatcgataagcttgatatcgaattcgcggccgcctggataggaaattatttgtttaaaacccaaaatgatgattcttgaaaacaaaaatacagatacaacacatgtgaagaaaaagatgcaaaagaagtagagcaagaccaagaacaatgaagattaaaaaatttacttgggaaaaatttggctcaggaattttggaaactgtttttgacttctcgtcttcgcttggcgtcttataaggtcaaactatctggattctcaatgatctttgcaaaggtttggagaaaagcagccaagtcagctccatacacaatgcgatgatctgcagtcacattcaccagcattgtgttttttacactgaagaatccatccttatcagcaactacagttggctttgacgctccaacagccataatagcaccctgtcctggcggaagaatagcgtcaaatctatccactccaaacataccgagattcgataaagtaaaagttccaaagttgtattcatggggttgaagttgcttgcttctagctttccccaccagctctttccatttttgagattaccagtccaaatccaacttatctgcatcttgtagaacaggcgtaatcaggccaccattgattagcaaccgccactgcaatgttaatgctactattgtaactaaaactcttcccgtctttgcagctagcgttcaccacaggatgctgagccaaggccatccctgcagctttagctaataaagctgtcattgttacaccctttggcttcaccttctcgtaaagtgcatcaagagcgtcagtgttcacaggataaccaacacggaatgtaggaacagagagactctcaatcatgttcttagatactgcagattgcattgctgtgaaaggaacaatgcttgaatcaggtaacagaggaggcaaattagtggtggttgctttagccgtcaccggaggtggaggaggaggcggtggtgcgatggaggatttggacggagcaattcccggacgcgtgggtcgacccgggaattccggaccggtacctgcaggcgtaccagctttnnnnnnggagtcgtattaga

SEQ ID NO: 81490 - DNA, 591 bp, Arabidopsis thaliana columbia
  unsure (1)..(591): unsure at all n locations
ccccccgattgaggggggaaaccaaaggctggtaaccgaattcggggccgcaaaccaaatggtcatttgaagaggaccgtaggcagcaaagagggcatttaccaagctgcagatcctaccgagagacctctcaagggtgccacattctcaatctgccatactgcctagcagggtacctaccaggggcgcaaaggttccacttcttgcgcgtggaaatctcatactgggaacgtggcaccgggcactttcttccggttcgaaggatgggtctattcaagaaattccggaggcggttgacaaatccacttgctatgctcctaaaggggctaaagcatggcacacatgggcattattcaatacagcagtgatgtcgcattacatttcacgaggtcaaattgcttcccagtacgttgtttctgcagccaactggataatttttattctatagcatgtgcagcaaatgccaaaaggagctgaggatagtttacaagacatactgcggctcctgcattgtggtcaccatggnggcncagctgatgccaaccgcttganncagntnngcntggcacattanncatgggtgttggnttc

SEQ ID NO: 81491 - DNA, 579 bp, Arabidopsis thaliana columbia
  unsure (1)..(579): unsure at all n locations
ggtaccggcgccccccctcgaggtcgacggtatcgataagcttgatatcgaattcgcggccgcgctgttgtctacctccgagcccaccgtctctaccgatcattggtcatcttcactttctcctctctgttccatgttacaaatcctttcagaaactctcctccaagtatggtcccttccttcacctccgcgctttcaatatccctatagttctagtctcgtcgggctccctggccaacgaagttttgaggatccaagacctgaactttgctagccgtgatagcgggcagactcctataatggaaaaatcattactttttggatcttttggctttgtctcagttccttatggagattactggagattcatgaagaagctcttagtcaaaaaacttctcggggctcattccctcgagcagacacggctcctccgtgggaaagaactcccaaactttccggggctaggttgcgttgataaaggcggcaaagaatgagactggttgacgttggtaaagagatggtgaaagctaacggacaacaggaattttnaagganncaatngggagggctgtcagnggc

SEQ ID NO: 81492 - DNA, 633 bp, Arabidopsis thaliana columbia
  unsure (1)..(633): unsure at all n locations
cccccccccctcgatgagggtaaccataagcttgatatcgaattgggggccgcaaaatggtactaagagaaaaaggatgatgacaaagttatctgtccacaagagacgatcaagattttgtatggattccaagaataactttgacccagaaaaggggaaacaaagtagatacaattgtaatgtattagtgggtaatttataagatctctcccctattctctctatgtcctctctaatatacaacttaatgctaaacccatcttctgatgatgacacagccgaatcaaaactgaaccaaaagtctatcagatgcttaccgcaaatctcatttccaacaatcacactcgccgaaaagattttactcctaacctacacataccttactgacttggaatcggtctacctaggggaagcctttctcattatggaagcctaaccaggccataccgcgacatctcccattccaatgggtggcgggctatcaaggggttaaaacactgccattgggggtggtggtttncccggggtaangggccncacccatggggnttgttnngggggggccttccccggggtggaaccaagggnanccccanccnaaccnggatgggggnaccgttggggggggnnant

SEQ ID NO: 81493 - DNA, 556 bp, Arabidopsis thaliana columbia
  unsure (1)..(556): unsure at all n locations
aaagctggatatcgaattgggggccgcgttgtgcttttaatgcagaaggagaagaaaatggtcacctgatcttatttacccatttgtacccaattaggtcaaaagaaagatactgttatatgtacaaaagaaaagagaagagagagcacgatgatgtagagacaagcacttggtgaagaaaatagcaatgtatctgcatcatcttggaatcatcccacaaagctaaaactgctgttggcattattcactaaatcgacttctcttcttccgcagaggttttgcagattgggcaccaattcttcatccgcagccattgttgtacacagctcacatggtacatatgttgacatggaatagtccctaattcatctccatcaacatactcttcctggcaaatactgcacttgatatcatcatccttatacagagagatggaaccggtttcatctgtctcctgataaatgcttgcttaagggtcctgggagtgctcttcgctagngntgngccactgacccattttatccccaagcnggacccccantggcaggtanggggc

SEQ ID NO: 81494 - DNA, 570 bp, Arabidopsis thaliana columbia
  unsure (1)..(570): unsure at all n locations
gccccccctcgtggtcgacggtatcgataagcttgatatcgaattcgcggccgccgtggaggacgaaggcggtttggtaacatggctggggtttttcaagtaatggcatttagtgttggtgcgttagagaaaggggagagtgattcagttttcatgggaaagcttgctaagattgctacagctgagattatatcttccaaggtgtgttgcgacggctgaatcattgttaaagatttcttttttgtacgtactgatagttagatagatttacgtagtgaacttggaatccgtaggtgagctacattatttctataaaaacaggggacacttcttgcaatgctcacaaactttctcgcaactgtccgtatatgtttcctgatcaattttggcaccttttaatggttcatcataacggagggactaaatgctgattggcaaaggcaagcatcagggctgctcgtctcaattggaacacattttcccgatcctggaagcctggtttttcccttccggttgccaaatccaagnggggttcctgacattggaaaaacnggtttttaggccccgggc

SEQ ID NO: 81495 - DNA, 496 bp, Arabidopsis thaliana columbia
cacacactgctcccaagtcctctcacttcttcttcttcctccgacaccgttgcttaacggttttccatttttgtcccttcaagatgatctcatggcacgacctctacacggtcctcaccgccgtgattcctctctacgtggccatgatcctcgcttacggctctgtccggtggtggaaaatcttctcacccgaccaatgctccggaatcaaccgttttgtcgccatcttcgccgtccctctcctctcttttcacttcatctccaccaacaatccttacgcaatgaatctccggttcatcgccgccgacactctccaaaaaatcatcatgttgtcacttttagtcctatgggctaatttcactcgctccggtagcctcgagtggagcatcacaatcttttccctctccacactttccaacactcttgttatggggattcctctcttgatcgccatgtatggcgaatactctgggttcctcatggtccaaatcgtcgt

SEQ ID NO: 81496 - DNA, 553 bp, Arabidopsis thaliana columbia
actgggtgaccacgccccccctctggtacgacggtatcgataagcttgatatcgaattcgcggccgctctgtgacaatactaagctcgcataaagtcgacgactttcttatcgcatacgcttatttctagatcccaatctgatctgacttacttcgtgagccgcaccaatgtgacttcaccttactagtcgggtgactagctagtctatagcctccgttgctctctgcgagatgtcctctttgctcgctggtttcacatacaggcctcactgacctggcgtcatgacagctgtcactgtctacacgatgctgactggtgtcgtctatctcctcacggcactatgattagtcactctcttaccattgcttcttaaggctaacgttcacgaccttgtgttgagtgataagaccagagatctcgatcgtgaggttgcgatcatcatgaagcatactcagacgtgcttgcatgttcacctgctgactaccatgatcaagacgtctcttgatcgacacaccattctatacactacgactagtggagttcgacgagact

SEQ ID NO: 81497 - DNA, 601 bp, Arabidopsis thaliana columbia
  unsure (1)..(601): unsure at all n locations
ccccccctcgactacgacggtatcgctaagcttgatatcgaattcgcggccgcccaatggaggttacctccaccaccttcatctccactaccagatcttctaaataccttaccttaacttcgtactctccggtgattcttccggcttctactctccgccgtgattttcttggttgttgtcatagtctccgtccttctcctcatcttcgaactcgcgccgggaaacgcaattctcgtcgttcttcaattcgatcgcctcgtttagttgttagagcttctatcgattctggtttgattcttattgttgttgctgtcactgcgttctctgccattgctttcgcttattgccaaagtactttcaggaagcggaaatcttccgatgaggttgcaacggttcatggcggaaaaaatagtgctgagaatcggcgggaaattcatggagatattcatgaaggcaatcctgtggaaataaatgtaggtttcagaaaggtagaggaagaaagtgggaccttttggggaagaaagggcanaaancatgaagttncngggtgggaanggtcagtcancggggnccagtgcngnnaaggggcaagtgcaggcng

SEQ ID NO: 81498 - DNA, 554 bp, Arabidopsis thaliana columbia
  unsure (1)..(554): unsure at all n locations
ccccccctcgatgtcgacggtatccataagcttgaattatcgaattcgcggccgcggaagatcaatgtctaaagtagttagcttcaagaacagagtatccaagtatcaagaacagaacatcaaagtgtcgaaataaagcttatacatattattacagactcttttgtaacataatcccttacgtgttacgacgattcacatccttcatatgtgcctctttttaacacagatcacacacatgttcttcctcactcgcagacttcttttacaagagtgtatgtacaatggcgttcttcttcggtttcagagaacctcccttcggcatcctccatgcctgcagattcattcgacgcaggcctccatgactggcgaagaggtatggcctcaaaaaaagtcgaggagatttgcggggttttggcttcagggacatttggggaaccccctggtccctttccttcaatccccaacatatggggatttgtttgctcccaccatcggaaccggggcaaatggggaatcangacgggntcacnccaaaaaaaggccccccttgg

SEQ ID NO: 81499 - DNA, 586 bp, Arabidopsis thaliana columbia
  unsure (1)..(586): unsure at all n locations
cccctctggttcgacggtatcgataagcttgatatcgaattcgcggccgccgaccacaaaacaaagagagagttggttccttgttcatgactttcaaatgtgtttgttttcttattcttcttgccgatttggcgtgatttcttcacctaatttggaatatagttatggtgatgcaatatttgcatgtttgatcttttgttcggtaaaaaggcaaatcctttggacataccaaagtgtcaaactatatgatgaaaccattcttctttccctctatatttgtcacttgatgatctgtactatcgaattgatacagagttaccaccaagaattagatgatgtgtgtatattgacgtctatataaaaatcagaagttgctctggcatctaacctttaaatttgtgaactctctgaccaaatgtaaataaaaagaatcgattttttttgggttgggtcgggttggccctacacacgggacctaattgggcccgaataaaccgaaatgaacaaaccccaaattatggttactcaccctccanaancagnttnccttnaacttttaancncaacgcgcgntngggggatggtc

SEQ ID NO: 81500 - DNA, 643 bp, Arabidopsis thaliana columbia
  unsure (1)..(643): unsure at all n locations
ccaccccccccctcgatgacgacggtctcgataagcttgatatcgaattcgcggccgcgttttttttgtttcaataggaaatgtctgttgctgatgttgctttaagcccgattcatagaggatcggcgtttgctgttggtggtttcggacaatcgacgacgacgcattactctgttaaatcggttttggtgttccttagtgtttctggttctacgatgcctatgctcatcttggagtctgattctattgctgaggttaaacttaggatccagacttgtaatggttttagggttagaagacagaaacttgttttcagtggtcgagagcttgccaggaatgcctcacgtgtgaaggactatggtgtgactggtggtagtgtgttgcatttggtgcttaagctctatgatcctttgcttgttactgtgattactacttgcggcaaggtctttcagtttcatgtggatcgtcgtagaaatgttgggtatttgaagaaacggatccctaaaaagggaaaggggttcccgaaggtgatgaccaaaaaccttgttaaaggcgagaaccttgtgccaacagaacnttgatggngttgaaanangaacccgaaccantccgggaaaaccgggnacccgggaaaaaaaacctc

SEQ ID NO: 81501 - DNA, 465 bp, Arabidopsis thaliana columbia
  unsure (1)..(465): unsure at all n locations
gcaattattatttacaatatgaaacacatgttattatacaagccaatcttttgacctttcgagtcttggaatcccaaataggaaattcactaaggactctcagaatcctcaaccaagcgactcttcaagccgtgacgttctccgaaattccgaccggacggcttgctatatactgttgcaccaccaacactgatgccaccgtcgaaacactttcgctttccgttaacaaattcccgatcggtccaagctcaggcgtcgtcgcctcttacgtttatccctgacgctacagaaccttccggtgacttccccaccaagaaaaggttgcttttaggaatactctttaataacttcggataacttcctcggtaacattttcacggattttctcttcgtaaatgatattagatttagaatccgaattagnacgagnactttctttttctttaatctttgctttaagttcgg

SEQ ID NO: 81502 - DNA, 728 bp, Arabidopsis thaliana columbia
agcttgatatcgaattcgcgggcgcgagacatcttatttgagaaacacttgctgtttacaatatcaattatcaaagctgcatcgtttattctataactttaactgccattatccatcatagcaaccttaaaccaggtggattacaaatttttaattttgaggaaccaacttaagggagcaaagataaaattttgtgagacaaaagggaaagggcaagagacaaacattggagtgccggttttttagttcaaccttagtttcagcgatacttcagaccatcgggggcgcctctgggccatgatcactaaagcatctcagagatgggggaacgtggcaatccacacgatggaaactactcctgtggatctcatcggctctttctcgaaccccatcggttgggaattgcttagcatattcttctaccatctcacggagctttgacatctctgactgtaatttctcatttgattgcattgttgctacaaagtctttcaactttgttccttgagactcttcagtcgtgacgttcttcgaaattccgaccggacggcttgctatatactgttgcaccaccaacactgatgccaccgtcgaaacactttcgctttccgttaacaaattcccgatcggtccaagctcaggcgtgtcgcttcttacgtttatccctgacgctacagaaccttccggtgacttccccaccaagaaaaggttgcttttagaatactctt

SEQ ID NO: 81503 - DNA, 650 bp, Arabidopsis thaliana columbia
  unsure (1)..(650): unsure at all n locations
cccccctcgggtcgacggtatcgctaagcttgatatcgaattcgcggccgctttttttgataaatctatgggcctacacttttgggcccaaatttatataactcttctcgcgttaatcagaaactgatgctacttctcaaggttcttacaaaatgtgtaacaactaacaagtaagaactaaagaacacaaatctcaaatttgcttttccagtttctcaggtctagaaggaagagattcctgccagcagtctaaacttctcataggagacccaaaacacgaactgccacggtccaagccttgcccatgtcgggaagaaacctttccacagagctcttattccttcaaacttaaccgtcttcaccaaacagtcgtaagaatttctggtacacagcattttcaccctggttcatcatcctcgtcttcaccacatcagctgggcaactccaaacttgtcgaagcaagacccgacattttggaagcaagcagtggtgcgcaaaaatggtaatccccagcaatcttcttaccggtggcaaaggggtttgggggggnntagnaaggaggtcncccaattccnngaaagncncnggggttggngnaaccttccanancctttacccccgggtggggttggnaacccgtggccgggcnc

SEQ ID NO: 81504 - DNA, 597 bp, Arabidopsis thaliana columbia
  unsure (1)..(597): unsure at all n locations
taagcttgatatcgaattcgcggccgcaaagaattgaagtacaattacaattgataaatccgttgcttaaaccaagcatgaaatgtaaacgcaaaaagagccttggtggttacatggttaggctacattggctaacaatggaggaacaaagctcgatcctttaagagtctgctcaaatatgtgacccactttcagcaatttctcctcatcaaacgctgctccgatcatttgaagaccaacaggaagacccgagggaccaccttcgactaatccacaaggtaataccattgcaggaagtccggcaagattcacatttgaccgtcataatgtctccagcatacattgccagtggatcatctttcttttcaccaatccttgtatgcagcagatggggctgccgggggaataagggtatcggtctgttctaacgctgctttgaaggcctttccgtttaggggcctcacctgttgagccgcttgnagaagnatcggaggnacccgcggaagnggnntgncccataaaatnncaattcacccnccnccnaaccntttccacgggggatnaanagtnttgggntcgncanctggtccaacggcc

SEQ ID NO: 81505 - DNA, 624 bp, Arabidopsis thaliana columbia
  unsure (1)..(624): unsure at all n locations
cccccctcggttcgacggtatcgcataagcttgatatcgaattcgcggccgcgtatgcgcatatagatggaaatagagagaaaggaaacaaaataaagcatatacaaaagcttttgaaaacgctattttatcagcgcttgttactcttcttagcttccaatgtagtcccatccttaagagcttgctgagcatcggcttccatacccagcttgaacaagctagccgcttgcagatacaaggcggttggccaatccggagacacaacctgtgcctgcaatgcatctgtcagagcctcttgtgcgttgtcgttcatcagatatgacaagcaccgccgtgcgtggtactgttggtgacaccattgttcccccatctatgaactgagtgtagcaatcgaccgcgggttgtaaaatctttggaacgggaagctaaagtcgccttgcttcttcgaattgagagattcctgcatctgattgggccacatttgaaacgggagcccattggaatccttcatcatcctggaccaacctaacngggattcccggatgnnggaantcaccctaagatgntcccaaggggcaaaaaacggncctnttagccggtnatgggnncnaaaacggggnannt

SEQ ID NO: 81506 - DNA, 509 bp, Arabidopsis thaliana columbia
ccccccctcgagtacgacggtatagctaagctagatatcgaattcgcggccgcgctccatgtaaaatatgtggggaggatataaaatataaggaaatttgaaagatccattttgagcaaacaagcaagaaacacttgataaaaccagtaaccacaaactcatatcatccatcacctctctctctctcctttcatttatctttattctagaagaagagcattttatcacctttaaagcgaaggaggcacatactgtctagacaaactaaacagatctttaccctcaaaaggcgatgtccactctctcccatttccaactaaagcagctttcctgcactcccattgccacacccatcccattcccattcgtcatcattcttgtccttccattcatgtgcgcttcatacggggatgttgctgcactatatggggttgatgctcccacagactgctggctagggctcacaacaagctgggcctttatctagactccagccgatgatgttgtaa

SEQ ID NO: 81507 - DNA, 648 bp, Arabidopsis thaliana columbia
  unsure (1)..(648): unsure at all n locations
atgatatgccgnnnnnnnnnnnnnnnnnnnnnnnnnnnnnnnnnnnnnnnnnnnnnnnnnnnnnnnnnnnnnnnnnnnnnnccacgcgtccgaaaacctgaagtaaagccatctaaggaagtcacagagattctgatttataaaattgaccaaaacaagtcacagaggagaccccggaaaccaaacagtcgacgattacgaagatgaggatcactgtcatgaccgccggtgaacaaatcatcactctcgatgtcgattctcaggagactgttgagaatgttaaagccttgctcgaggttgagtccaatgttccgattcagcagcagcagctgttgtataatggaaacgagatgggaaattccgataaattgagtgccttgggtgttaaggatgatgatttattgatgatgatggtttccaatgcctcatctggtgccactagtgcggcggggaatgatttgggcatgaatcctgatgggtcagctttgaaccctgcagcctttcaacaacacattcgtggggattctaatcttatgggacagttatttcagaatgatcctgagcttgcacaagtgatttctggaagcgatttaaataagttacaggatgttttgcgtgcacggcatcgtcagcgatctgttttacagc

SEQ ID NO: 81508 - DNA, 558 bp, Arabidopsis thaliana columbia
  unsure (1)..(558): unsure at all n locations
ccccctcgttacgacgatatacataagcttgatatcgaattgcgcggccgcatcactttgtcaccgcgacaaaataattcttctgacttagaaaaacaaaacacaaacaccaatcacaaaataaacacagctaagctctaacttacagttttgagaagagtttaagtcacttttaagctcgttgtgaccttctttgtcctcttgccacgaccatgttcggcattacctcttcaagatactcacaacggtctctatggtgttcgatccatatacataactgtcttatcgcttctctcttctcttctcctaatcccaacaatgtctccttcaacttctccttctctttctcctcttctcttacttgaccttcaagcttctttctccacctcttccttctccttcggccatctcgtctttctccttctttcatctctaccacacacttgttcgccggcaagggcatcttcggcgcttcaaccactggtttcttggagggtttttggngtnnttttnaggttttaaggaaagggttggnccggtttnggatttttgntttac

SEQ ID NO: 81509 - DNA, 558 bp, Arabidopsis thaliana columbia
  unsure (1)..(558): unsure at all n locations
taccggttcggnattcccggctcgacccacgcgtccgcgaggcgccggcgatgccgacgatcaccccggccaggatcaccacgaacagtggccgcatctggtcaggccccatgcccagcgtgcgcatcaggttgaccacgccgtaggactgctcggtggtgaggaagcggatcaggaaggcgccgacgatgaaatgcaggaccggcagtgtcgacagccaacggatctgcagcagcggattgcgccggtagtgttcgatgatcaatgcggtggtggtcagcgcgatggatgcgatcagcgcccagcccagccacggcgtattgagccaccagcgcgtgtagccctgcgccagcacgatcaccagcagcgcaacagccggcgcgagcagggcaaaggtgaggaagtccaatggctcgaatgccttcacctggatgccgggtggcagcttcagcagcaccaccgccgcgaacgcacacagggccaggccggcttcaaacgagtacagctggtgccactggccggtatcgaccaggcccggcgagacgatccaggcaatcg

SEQ ID NO: 81510 - DNA, 865 bp, Arabidopsis thaliana columbia
gcggtaccggtctcggattcccggctcgacccacgcgtccgatcggtttcctgatgcaactcctgaagaacttagttcaaatgatgccacttgtatcatatgtcgtgaagaaatgacctcagcgaagaaattagtatgtggccatctatttcatgtacattgtcttcggtcatggttggaacgacagaacacatgtcccacttgcagagcactggttgtcccagctgagaatgctacatcaacagcttctggaaaccgtgggccacaccaagaatccctgcagcaaggaaccggtacttcaagttctgatggtcagggttcttctgtttctgctgctgccagtgagaatatgagcaggcacgaggctaggtttcaagccgctgcttctgcagcctctatatatgggagatcccattgttatccatcttctgcaaacacactagtatggtctcaaggtaattcattacttcctcagacggaggtagaagctcaaagaagatttcttgagtcccaaatcgaggtgttaacgaaccaacttcggcttttggagaaaccgacaactgtagatacgaaaggaaagtccgttgcggatactgcatagtggtgaaccattaacgcaaatgtggtggtctcatcagaggtcatttgcgtaaacaaaaaacaaaatgtggtaaagaagagttaggatttcggagtaaagagagaagtaagagtaaacttcagattgtgtgaatggttttgctatagagaggatttgaaaatgtaaatgttgggtgtctcatagaagcttggaacttaaaagtagcaaactggtcttctgtttaccttaccacacttgtctctctatctataatagtttttcttt

SEQ ID NO: 81511 - DNA, 700 bp, Arabidopsis thaliana columbia
taccggtctgggattcccggctcgacccacgcgtccgcggacgcgtgggaaacgatccaaacgttcgagatctgatcttcatcataaccaccgtctcactgaggaagagtatctagctttctgtctcatgcttcttgctcgggatggcggcgatcttgactctgtgacggttgcggagaagccgagttataagtgtggcgtttgttacaagacgttttcgtcttaccaagctctcggcggtcataaagcgagccaccggagcttatacggtggtggagagaatgataaatcgacaccatccaccgccgtgaaatctcacgtttgttcggtttgcgggaaatctttcgccaccggtcaagctctcggcggccacaagcggtgccactacgatggtggcgtttcgaactcggaaggtgtggggtctactagccacgtcagcagtagtagccaccgtggatttgaccttaatattataccggtgcagggattttcgccggacgacgaagtgatgagtccgatggcgactaagaagcctcgcctgaagtaagtctttgttgaagacctggaagtttatcaaatgtaaatatcaaatttcaatttcaaggaacagttttgttgattctattaccaatacacaatacgattcaattcctttgtttctgaagtaacagcatactaaattcattagaaaaccgaatcg

SEQ ID NO: 81512 - DNA, 863 bp, Arabidopsis thaliana columbia
gcagtaccggtctggaattcccgggtcgacccacgcgtccgattacaaagagatttgtgttcgaagcttctaaggtggaagatctcaggaccaaagccgctagtgaagaaacagtagaccaacctacgcgggtggagagcgttactgcgctcatctggaaatgcttcgtcgcatcctcaaagacaactacttgtgatcacaaagtgctggtccagcttgctaacttgcggtccaagataccttcccttctgcaagaaagctctatcggaaatctcatgttctcttctgtggtcttgagtattggtcgaggaggggaagttaaaattgaagaggccgttagagacttacgaaaaaaaaaggaggagttaggaactgtgatcctagacgagggtgggtcatctgactcatcttccatgatcggttcgaaactagcaaatctgatgctcaccaactattctcggttgagctatgagactcatgaaccctataccgtgagtagctggtgtaagctacctctttacgaggccaactttggatgggattctccggtttgggttgttgggaatgtgtctcccgtgttaggcaacttggccatgttgatagattccaaggacggacaaggaattgaagcgttcgtcacactgcctgaagagaacatgtcgtccttcgagcagaacccagagttgctcgcctttgctaccatgaaccctagtgtcttggtttaaatcctgtactgaaatttgttgtttcctcaataaagatttggatacaccgaatctatatatatcttcaagatgtaatgcaagaaatgtaaactactggaatatcatttaatgtttaaacttttctgaatataattcctc

SEQ ID NO: 81513 - DNA, 493 bp, Arabidopsis thaliana columbia
ttccggggacccgtgggcaaggttacccgagaaagatcgatcaaccttttctgtgttccgacttacgatattgatcttatctggcacacacatcagcttcatgctatctcttattgcaatgatttgactaagatgattggtaaggtcttggagcatgatgatacagactctgaccgtagcaaaggtaagaagcttgatactggtttctctggaactactgctcaatgggaagaaacatttggtcgaaggtattggaaagccggtgctatgaaccgtggtaataccccaaagccagtcacaacttctccttatgtttgttctggaaagaaatcaattgcgaaagagggaagagtcccagaatgtaatccaatatccagaggtgaaagtcattgaagttatcttggagatggttgggggttaagaacttaccagatgctcacaaaggaaaggtctttgttctgttcagcaaaactcaaccagattctctgtttaa

SEQ ID NO: 81514 - DNA, 593 bp, Arabidopsis thaliana columbia
gcaggtaccggtttcggattcccgactcgacccacgcgtccgcaaggctcaagaaatgctgaagaacaatgagatcaccaaaccggttgctaccatggacttagcttgggttggggccacagctttaattggattccctcttatattcatcatcaaattgctttctgcagtctccaatcctaaggggaagaagagacacaaccataaaaaagaaccaaccaccgggtaccgcagagccaaacgccgacatcctcaccaatgatacaataggactataacttgaagagatcaaaaaggtggtttgtatatacctttctggtttctgagacttataatagttaaatatctattggctgaagaagttgaagcagaggtgttctacaaaactataggtctctcttgactctctgtagtgacaaaatcttagaacaatctttttcagttttcatagtttatgggtttttataaagtagagaagagaagaaaagaaaagagttgtaaatcttctcacattgatacagatgtgattggggattttgggtttcccatgttaatgtaaccaggcccagcccaattgtgttgggtacaagttg

SEQ ID NO: 81515 - DNA, 553 bp, Arabidopsis thaliana columbia
tcgcccgcaggtaccggtcctggattcccgggtcgacccacgcgtccgcattcttttccttgtgattcattattttgcctagttttacttttcaaatagacttctaacaaaagttatgactgaaaaccaattatatagctttataaccatgaagagttcattgtctaaatgcaaacagtcttcttctttgtctttccctttgtttggtctgatcaacttcttcctcatcggttttttcagatgggtttcttttgctcagttatttttctctaggttctggcctcttgttcaacaccagcaatgtgtttccgagaagaagagcaaagatcttgagttccaaacttcgatcaaacacgaagaatatcgtgatgatgatgatgatggtctttgcagagaagatgtagggatggttatgaaaagcttagggctttccactgaccaagaaaacgagggacttcaaaaacagtacagttccaaggaggtttcgagatctgttcgaagagaaggagccaagcttaagggaagtgaagcaagcttttgatgtctttgatga

SEQ ID NO: 81516 - DNA, 499 bp, Arabidopsis thaliana columbia
  unsure (1)..(499): unsure at all n locations
gagagttttgcagaaacatgcatccattggatgtagcaagtgttgtctctcacgacgatgaagcttatgctatcgccaatacaatgccgaagctgaagcggttagagatagcttaccaccgagtcagcacagaaggagtactcaagatcttatcgtgctgtgtttttcttgagttcttggaacttagaggctgttgggacgtgcaacttgataacaagtttttcaaagagaagtttccggatatgaaagtgttaggtccacgcgtgatcggattctatgatatgataaatgattgggaggattgctgctcagattacttctcagatgggtctgattacttggcttgggagttttttgaagatggtgtaaggggagagttctatgaggatgagtttgagcatggttgggccgataatttttatgcggaaaacgcagttttaggcatggacccgcatatttgccccactcttgaccaggctttaatntccnagctttccca

SEQ ID NO: 81517 - DNA, 546 bp, Arabidopsis thaliana columbia
  unsure (1)..(546): unsure at all n locations
gaaccttctnccccaaaaacccaaactaaacggtnaaaanactnccaccngnnacacagaggagtnccaaagacntaccgtctgtgtttccatgagtcctgggaacctaaaggctgtttgggacgtgcaacttgataacaaagtttttcaaaagagaagttcccggatatgaaagtgttaggtccacccgtgatcggatcctatgatatgataaatgattgggaggattgctgctcagattacttctcagatgggtctgattacttggcttgggagttttttgaagatggtgtaatgggagagttctatgaggatgagtttgagcatggttgggacgataatttttatgcggaaaacgcagttttagacatggaaccgcatatttggcccaccatctccatgaaccaggccttgttatgttcgaagtctctacctaaaagttgcaactaggaatggttttagcctctcttaagtgtcttaatctatgtatggtgcttgaacttgtgtggcttctttgtgttattctaatctaaaaggcttttttcc

SEQ ID NO: 81518 - DNA, 539 bp, Arabidopsis thaliana columbia
  unsure (1)..(539): unsure at all n locations
cggtaccggtcctggaatgcccggactcgacccacgcgtccgtttttcttggcaggaacgagttatgatagaattaggcttgtttatcttgatgaaatgggtggaatggctatctccattccaaaaatatttacaatgttcactattttatcgatggcttcccttgcattgccgggcatgagtggttttattgcagaattcattgttttttttggaataattaccagccaaaaatattttttaatttccaaaattttcattatttttgtaatggcaattggaatgatattaactcctatatatttattatctatgttacgccaaatgttctatggatacaagttaattaatatcaaaaacttttctttttttgattctggaccccgagagttatttctttcaatctctattcttttacccataattggtattgggatttatcctgattttgtgctctcattagcaagtgacaaggtcgaatccattttatctaattatttttatggatggttcaggaaaaaaagnggccgcntggggnc

SEQ ID NO: 81519 - DNA, 687 bp, Arabidopsis thaliana columbia
agcccttctgagcccatgtatttcgcttttctgcttgtcactagtatactgtttgctgcttatcttgttgtgacgactgttttgagtgaggtgtttatactgcccagcatactcaaatatgttcttgtggctatcatggtgttacttttgttgtcgcctcttgcggttcccatcaagatgacacttttccgttcaaatgccaagagctctccactggggtcttcagacaatctagccaaagaggaaggtactcatgaagaaccgttgctgacaccttctacctcagcttcaaaccttgggcctatctttgagggagatgatgagtcggatatggaaatacttcttgctgaagcagaaggtgccgtgaagaagaagagaaaacccaggagaggtgaggatttcaagtttggccaagtttttgtcaaggcagatttctggctcctttggtttgtctacttcctcggcatgggttcaggtgttacagtctcgaacaacttggcacagatcgggatttgcttttggtattaaagggacacaacaatacctcctgtgtccttttcaagtttcttcaactttcataaggccggtcttgccttcaggtgccatttctgagcactttgtgaggtcaagaacgcttccaagaacactatggatgggagccgcgcagctagttatggtgttcacatt

SEQ ID NO: 81520 - DNA, 606 bp, Arabidopsis thaliana columbia
  unsure (1)..(606): unsure at all n locations
nnnnnnnnnnnnnnnnnnnnnnnnnnnnnnnnnnnnnnnnnnnnnnnnnnnnnnnnnnnnnnnnnnnnncgcggaaactcagtatatcaccccccgcggatcaccaaccctcgacgagttgctgaaagactgcgacagtttccgaaaaggagattccggcgacggcgtaaaaagcgacgatcctgcacatcacataatagatgtcgaagccttgtacctaatacctgtcccgtacgtcttaaactttaacaatcttcaatacgatgtcacacttcgccggcggtttggcttctcacggcaaaacggagtaaagactctactcgatgatggttccggagaggcttctgacggcgatatcctcgccgttctcggtgcaagtggagcaggaaaatcaaccgttgattcgatgcactagcggggaagagttgctgagggaaagcttgaagaggctctgtaacccttaaacgggggagaaagttctggcaatctcgattgtttgaaaggtatatcggcgtttgttattcaaancngtntttnttttcccgttggtnaccngtaaanaacccnnaatgttcggttccgggttttggttnccnnnaggtttct

SEQ ID NO: 81521 - DNA, 598 bp, Arabidopsis thaliana columbia
  unsure (1)..(598): unsure at all n locations
ccnnnnnnannnnnnnnnnnntttttttttaatcagatgctaatttggatatttaagaagaaatacttgtttattttacagnatattcttttaaagaacggccgctgaaatgagtataaattttacaacttcttcacaaatgtatagtaacatcgagaagctaattcttcaagcttcacttaaatatgtagctaatgcgcacaaatgtatttgtgggcgctagtaagtagtaacctcacgtcctcttattcctgctcccaaacagcaaggcgaagtaaaataagatcctaaagaagagacctgaagcaaacgtaatccacaagcaatcccacttgctcaattgcgtaataccctgttgtgcaagtaagtcagaccccgtcctcaagcatgtggactccgttatcttcgttctcagagatttactgagagtttcaaggagcttaaccttcccggagtcagacactcccccgagaagagtactgtcgaaaacctggacacccctaacaaaacaacgagacgggtcatcaaactcgttggttaagcagcctcttanggttnnttgggattnnatttnatgnaccnggcccntaaccgggta

SEQ ID NO: 81522 - DNA, 722 bp, Arabidopsis thaliana columbia
  unsure (1)..(722): unsure at all n locations
cnnnnnnnnnnnnnnnnnnnnnnnnnnnnnnnnnnnnnnnnnnnnnnnnnnnnnnnnnnnnnnnnnnnnnnnnnnnnnnnnnnnnnnnnnnnnnnnnnncggccgctattaacttcaacattggtgttgtcgtgttgtcgtttcagacataaacccatgaagcttggataaattagaagaaagtagatcaactctatttcaagaaaataagaggaattgaagtaacattagaagttgaagtctttttgttcactaagcattctcataaaatttgtttgacaaaaacataaaataatgtttagtgtcaagaagatgatgccaccaacttaacctgatctgctcgggtacaacaaacatatcccacagttcgatccatctccgcaagaacaacttcccagcatagaaccaatcacggggttacggatcagcatagattgttcactatctttgagacagtagcaaagatgctaagatttcggaacggtgacattaagtatcttcacttcttggtaaggcctgtcgttcttgtctgtcttcacttttctctataccctgaacggcggnccattnccttnaaaactntttccaaaaacagtgtgcttattgcntggcccggtgtagcccctntttgtgttaaggccttnggcccttttntgtttgggccggaatttccatggcaattgnncggccttnatgcttagatttttgaatnggccnaatgc

SEQ ID NO: 81523 - DNA, 818 bp, Arabidopsis thaliana columbia
gaaagatcacactactgttttttggactcgagcttcttcttcaacaatgcctctctctctccgacttgctccatctccgacgtctttccgttattctccgcggccgcctaccggcgccggaggattttcccccgtgaagcagcactcccggatcccgaattcgggcgtcgcgaacgaaaattggattctgttctggtggtggtggtgttttagattccggtagaaggattggttcctgtgtggtgaggtgtagctttagaaacagtgaatgtcacttgtttgggcccagggtgaccggaggtctgaataaggacacgttcttggccaaatttgttaaaagcccgccggtgcattaagattgttttgtccctcgacatggtcactcagtggtgtggtccttgcaaagtgattgctcccaaatacaaagagctatcggagaagtacccaggacatggtgtttccttaagcttgaattgtaacccaagacaaacaaagccattggcgaaagagctaggaattagagtggttcccaacttttaaaatcttgaaagacaacaaggtagtaaaggaagtgaccggggcaaaatatgaagacttacttgcagccattgaagcagcaaggtcaggctgagtctctctctatatcactcattatgtaaagtattaggatcattctccatccatgtaattcgtttggttctatgtatgtaactctttgctgttcccttaaccggaatcggttgttcactatctatgtataaatgctggaaagttatggaatgatgagctgaatgtgtatctgtatgcatcaaaaaaaa

SEQ ID NO: 81524 - DNA, 648 bp, Arabidopsis thaliana columbia
agaatcatgttccctgttcttgaatctgttgatcgagggatgtgtaaaagtgcaaatgaagaacatgggagagaattaccaatgatgaatggtatcaaagaagatatcaaatctattggagttttggattctgggatttgttcagaagctctctttagtcttgcttctcgtttcaaatcattgcagatgatgtgtaaaacacattttgaagaggaagagaaagatttattgccaatggtggaagctgcagaaatggggaaagagaagcagaagaaattgatgaatcaaagcttagaagttatgagtgggactcattctaactcgtttgatttcctactagaaggtctcactccacaagaagctatgcagtatattgacttgctcatgacatttggtgatccaaatcttatctcatcttttctctgaaaaaatgttgttgactgattttatcctttttaggctcactttgtgaaaaactgttgttgtgtgtggggttgtgaattttgtgtatatagagtcagatttgtcgattcaggtgttgctatgttttctcaaaaaaaaaaaaaaaaaaaaaaaaaaaaagggcggccgctctagaggatccaagcttacgtacgcgtgcatgtgacgtcataatcttctgatagt

SEQ ID NO: 81525 - DNA, 663 bp, Arabidopsis thaliana columbia
  unsure (1)..(663): unsure at all n locations
nnnnnnnnnnnnnnnnnnnnnnnnnnnnnnnnnnnnnnnnnnnnnnnnnnnnnnnnnnnnnnnnnnnnnnnnnnnnnnnnnnnnnnnnnnncggccgcttttgctccaaatcctgcagattgtaatctggaaactgaagcatgtataggccaataaattacattctccaaggaaattgcttaaatgtgttcgcttaagtaagtatacagacaaacaaacaaaaacactgatccattacactttactttccagcaatttctattagctatttaaggcgacagctatgcatgttgtaacatgagcagacaaaacttacgtcgaaaaccaacctcagttgattagaggcgtacccatctgcgaatctgcacctatatcagttgcgaagtccttaggcaatgggatatttaattccgagcaaacaagcttcacaatattagccgttacacctcccatagacatcttgttcagtgttactgcaatgggaaatctgttgttgatgtcacagaagcctgttgatcctcctaaccctgaatgtccaaagccaaccagngacccatcttgagaatgggggngcttaaaccaagcccaaanttccatcaggactactaagccntggaggctccagaccctgnagnacngggtcncggggggaaaanatatgaa

SEQ ID NO: 81526 - DNA, 674 bp, Arabidopsis thaliana columbia
  unsure (1)..(674): unsure at all n locations
aacatttcaaaccgacgatttctttatgattccgcataaaattacacaaaccggattcggtttgtacctatggtcctatgatgatgatatatgtatataaacataacattacaaccaaattaagaaaaaaagagcgaaaaattctgaagcaacaaaaatccattttttttcttcttttcttaatacacaattaacgaagcagaggagcaatcaaaagcgagagttttgattcttcggcttccctctcgacgtcactttgatcatgagatttctcacaatgttcttcttcttcaacccaatgatccgtacgcagtcacgtttttccttgaaccgggtccatcctgattcatacctactggtttattcgataaccgacgtttataccgcttcaaaaccgaagccaaattctctttcccctttgggaaagccacatcacctgcagctgtaccggttcggccttttctacaagagattgccatttcaacgtctttgattagatcaagaagtgtgactgcggttgtgcatttgcctttagccggttttgcagccggaggtaacattccgttagctgaagtcggactcgctctctggtggtccttggatttgaggaaaaagacgggtattgggncnagttttanngcggttaatatccttaggggttancgagtactttt

SEQ ID NO: 81527 - DNA, 496 bp, Arabidopsis thaliana columbia
  unsure (1)..(496): unsure at all n locations
annnnaaggggccgggtttaggccccnatgttggtgttgttgtttctgagaactggacatctccttgnttcccacgaattcacagagatcggccgctaaaaaaatgcttctttacaattcactagtccgcggtagaatcacccgaaccatgacgctctcttctgatcatatctagtagatcttgaacaacttctgacatcagtggtctaaattctggttcagactgaacacaccgggatattatatcagcaaagtgtgacaatgactttgcagggtattgtccattaagagatggatcaaccattttgcccaatgcatcgatatcatgaagctgtgggattgcccacctcaccaagaactgctctcctctactccggtccctatcgtaggacattctacccntcaatagttctnacattacaacaccaaaactatatacatnactctnccatgtatagattccagagtcgaactttggagctccatatccgtaagc

SEQ ID NO: 81528 - DNA, 612 bp, Arabidopsis thaliana columbia
atataaaattttaactatttatgggataacattttctccacaatcataaactgacaagcttatacccaaaattaacaaaattataatacttgaaaaaaagaaaaagaaaaaaagaagtcactcttgctaaaaatgccaatatatattatctatatagtaagcaccgccgccacgattacccctttgttttcaaccccaccagatgctattactactacttatacccccacaacttaggaagtaagctctaaactaccctcccaatggacaaaacagatcgtactaagagaaatctacattaaagacgagggaaaattgaaatatccataatgtagaatccccattatgcccttccatcaatcacctaggccttggcttcgccggacaactgagagcttgccggagtttcctctgccccgacggactcgaattagagctagcgataggcattccgaaagtcatggtctgtgagagattcaccatgtccaccattgattgcgtctgagaagacgatgcagttgaatcactgatatcgcctctcgccgttgctcgctgacaggagtgcgagctcagaccggagagcacgtgagccctacccgaagcctcatatac

SEQ ID NO: 81529 - DNA, 604 bp, Arabidopsis thaliana columbia
  unsure (1)..(604): unsure at all n locations
cnnnnnnnnnnnnnnnnnnnnnnnnnnnnnnnnnnnnnnnnnnnnnnnnnnnnnnnnnnnnnnnnnnnnnnnccacgcgtccgcaccgctattcaacaacaactccatcgtgaacaccacgcgcctcaacactttcctcggcttgtcttcttcttcgccaaacacttacaacaccaacaatctcttgttacgaccgtttgctcaaaaactcactccagcgactcctctcttatccggatcacaaattcagcaatatcaaaaccctaacaacggtttcgaggatatgaatctgcaagctcttcttcaagctcatatttcaaaccctagaagcaatgagcacgatcagtttggtcttggtatgatgcagactccatctactaatcctcctactacaacggcagcggctaacgggaacataaacaccggtgataatggaagctacggtggctccgatcatgaacataataatgacggtacttggttatcttcgtcttccgaccagagaacataaatatatttatgtatagtccaagtccgaaatcaaagctaatctcttgacatgattactcaacaaattaaacatagcacatatagcatgatgaag

SEQ ID NO: 81530 - DNA, 654 bp, Arabidopsis thaliana columbia
cgtatcgctcgttacttgaagaaaggtcggtacgctctccgatacggttccggtgctccggtttacctcgccgccgttctcgaatacctagccgccgaggtacttgagctagctgggaacgcagcgagagataataagaagaacaggataaaccctaggcatctatgtttagcgataaggaacgatgaggaattggggagattgcttcatggagttactattgctagtggtggtgttcttccaaacattaatccagttcttcttcctaagaaatcaacagcttcttcttctcaagcggagaaagcttctgctaccaaatctcctaagaaggcttgataaagaatagtatcgatgttgctttttggttatattcggatcttagatgaagaagaagaagaagaagaaacaacttgttttttgttttagaggatttgtgtaggtatctgaaatcttcttctctttgttttggtttgtcttatgtaaaaaccatgggaagatgattatgtttgttaacgcaatttgtaatggaaaataattaagttctgggattagtaaaaacatccgtctaattttggcgggcggcccctttaaaggaacccaggctacggaagggggccatgcacggcctaaatctcctttaaaaggtgtccccta

SEQ ID NO: 81531 - DNA, 693 bp, Arabidopsis thaliana columbia
  unsure (1)..(693): unsure at all n locations
tgatacttcccagctctccacgactcactattgggaaagctggcacgcctgcaggtaccggtccggaattcccgggtcgacccacgcgtgcgcaaaaccgaaaaaaacactaattgtgctttccctttagattcatttgtattttcttttggagcttttgaacaatggagtcatcacaagcaacgacgaagccaacgagaggagcaggaggaaggaaaggtggagataggaagaagagtgttagtaaatctgttaaagctggtcttcaatttcccgttggtcgtatcgctcgttacttgaagaaaggtcggtacgctctccgatacggttccggtgctccggtttacctcgccgccgttctcgaatacctagccgccgaggtacttgagctagctgggaacgcagcgagagataataagaagaacaggataaaccctaggcatctatgtttagcgataaggaacgatgaggaattggggagattgcttcatggagttactattgctagtggtggtgttcttccaaacattaatccagttcttcttccaaagaaatcaacagcttcttcctctcaagcggngaaacctnctgcnccaaatccnccnagaagngttnntaagaangancgatgtccttttnggaaatccgngcttgntgagannagagagagacacctgttttgnttaggtttnt

SEQ ID NO: 81532 - DNA, 487 bp, Arabidopsis thaliana columbia
acccaagcgtccggacgcggagaaggctactgataagactaatgtccatctctcctcggaccatgagcgttgtccggtggaggaagtggctcttgttgtgcctgagacggatgatccaagcctaccggtgatgacattcagagcttggttcttgggtctgacctcttgtgttctgctcatctttctcaacacgttcttcacataccgtacgcagccactcaccatctcagccatcctcatgcagatcgctgttttgcccatcggcaagttcatggctcggactcttcccaccacttctcacaaccttcttgggtggagttttagcctcaatcctggtccttttaacatcaaggagcatgtcattatcaccatctttgctaattgtggcgttgcttacggtggtggtgatgcttactctattggggctatcactgttatgaaagcttacgataaacagagccttagcttcatctgtggtctcttcatc

SEQ ID NO: 81533 - DNA, 585 bp, Arabidopsis thaliana columbia
  unsure (1)..(585): unsure at all n locations
cnnnnnnnnnnnnnnnnnnnnnnnnnnnnnnnnnnnnnnnnnnnnnnnnnnnnnnnnnnnnnnnnnnnnnnccacgcgtccgggagcaagtagtgaagagagaacattggctatgataaagccagttggagtctctggtaactatactgaagaaatcaaaacgatcgtcgttgaggctggtttcaatatcgtcaaggagatgcttactcagctggacaaggagacagcttctgcgttttacgaggagcactcatcgaggagcttttttcctcatcttgttacatacatgacgagtggtccggtgttggtgatggtattggagaagcgaaatgcagtttctgattggcgtgatttaatcggtccaacagatgcggaaaaggctaagatatctcaccctcacaggttcgatttgttgccaaacacaattcttgactttgcaaactcaaatcatcagagcattatgtggtaagaactcacagaagaactgtgtgcacggctcggattcaacatcgtcagctgaaagagagataaagtttttcttcaaggatgtagtttcaggtgacattgctacacaacaacatgacg

SEQ ID NO: 81534 - DNA, 686 bp, Arabidopsis thaliana columbia
  unsure (1)..(686): unsure at all n locations
accgggttacgaanaagtnnattgtcctctttgncacaanctcgaantcccnccatttcntgggangccttaccngtttcctnntaatcgaccaanatgggaacgnattgtccaaaggcccactcgctatgtacnccccgtttgggactaaccgccagtggntaaaccggntnccctgtggnccattgaaactacagagcatcttccccgagtcntgcatcccatagctttactgttgagtcaaatgatgcacttgcaagagttagctgtttgttaggattgttagttcctggtcctgtagggctccatctgattgtataaatttccttagtatgctctcggaggtccatgaacaaaggtgctttgttttatattccatatcttagcagtactatcatctgagcatgaggccaataatgaaccagtaggatcccatttcacacagttgacctcaccctgatgcccagtaaaggttttggcaggcctagtttctccaatcttacataagtagatcatgctgtccgtggaactcgttgcaaaagatacattgttgcgccaatcaacatcaagtgttggacctgaatgaaattcaaattgttgcttccactcctctgcctttacgtcccaaacaacagcagttctatcaacactaccggttagaagatagtcccccttcttgttccctc

SEQ ID NO: 81535 - DNA, 535 bp, Arabidopsis thaliana columbia
aataacccttacttaaggggaccaaagctggaggttcaacgggggggggggcggttttaaacttggggattccccgggcttgaggaattcgggggccgttaattaaattaccaaaattatcttaaggtccggttcattttttggaattaagggtattacctattggtttgggccaccaccaaaaggaacaccttggcctgagagagggttattaggactccatttaagaaacctacattctgaaatcaagaccgcaaactgagttatcagcgaggcaggctgcgattttgttaccttctttgttccaacacacttcgaatatccctccatttcctgtgtatgtctttacgattttaccttctttaatcgaccatatgtgtatcgatttgtccaaagacccactcgctatgtactccccgtttggactaaacgccagtgagtaaaccggttcctgtgtccattgaaactacagagcatcttcccgagttctgcatcccatagctttactgttgagtcaaatgatgcacttgcaaga

SEQ ID NO: 81536 - DNA, 561 bp, Arabidopsis thaliana columbia
gcgtccgatcaccagctatcatgcgcccacctctccaccgtgctctccatcatcatcattccatataggaggcattcacttgtagaagcgtcgtctctttcacactaaaattcatcgatgacggatcctcccagacccgacccgtttcctgttacccgactcgattccgacgccggtgctctcttcgtcctccaatcaaaaggcgagtggtggcacgccggatttcatctaacgacggcgattgttggtccgacgatattgacattaccatatgcgtttagaggattaggatggtggttagggtttgtttgtttaacgacgatgggactcgttactttctacgcttattacctcatgtctaaggttcttgatcactgtgaaaaatccggccgccgtcacatccgtttccgggaactcgccgccgatgttcttggatctggattgatgttttatgtagtgatctttattcaaacagctatcaacactggaattggtattggcgccattctacttgcaggtcaatgtcttgatataatgtattcgagtcttttcccgcaagga

SEQ ID NO: 81537 - DNA, 540 bp, Arabidopsis thaliana columbia
aattacccttacttaaggggaccaaaggttgaggttccacgggggggggggccgttttagacttagggattccccgggctgtgaggatttgggggccgcccaaacatttatcacgcttcgaccaacgggcacatggcatttttgagaaaaagaatgttcagttgtggttacagttgaagataaatttaaattgggaaagactaaaaccgaaaatctttagcaaacaatcggctatggatcttgcacaaatacgttactccttaacacatgaagaaaagatctcaagaaaccgccaacttatgaagaaaaacgcagacctgtgggtatggatgaacatggttttaagatgaagaccattcttatcttctattcagaccacgatggtcccagccttaattaattatacacttctcaccggcattctgaatcacccttagagaaaacctccaccagtccaagcggtgtctgatttcccgttgtgaccagcagatttcttatcgcctgctctttggtaatgaccatcgaacccatcatctttgg

SEQ ID NO: 81538 - DNA, 592 bp, Arabidopsis thaliana columbia
  unsure (1)..(592): unsure at all n locations
aggggaaacaaaagctgggagctccaccgcgggtggcgggccgctctagaactagtggatccccgggcttgaggaattcgcgggcgctgcatatacagtggcagtctaatacaatctatagtagagtaccagctgggatacaaaacttggagattccttataaccagaatttttttcgggccttttaggtggaagggtactttggttggaggcaagtggaccggtctttcgaacgaagcacttagaatcatttcttctttggaggttcaaatggtgggggggatgaccgaaggggcctggcggtgtccattttatagagtattgggtagcttcttaacattaagagcatcttaatttaacggtggagaatattacggattggctggtaatgatgcgggttcaagatcggttccgccgagattccagcataatcagaggtgaagactaatgatttactgtccgggctgaagatcgggtggtttgttctcccacccgtcccgctttggatgagcttccttaaccctgttccgttggggtggatcaagnagagctcaaaactacccgagccagggctttctcgatctagaactag

SEQ ID NO: 81539 - DNA, 546 bp, Arabidopsis thaliana columbia
  unsure (1)..(546): unsure at all n locations
aaattgaacaacactgatcttacgaagaaaagccatgtataatatatatttatatcttttaacaaatcatgtttgtttcttacttaccaataatttctgaaacaaagatggataaaagatgatccaactgtgaacctggcgggcggcaaaatgcagacagtcacttcctcttgctgttcccaatactgaggagctcaaggctctggagggtaatgtcacgagcggctctcgttggtgcagcttttgtggctactgaggaggacgaaggagcgaactgggtcctcagagttgtagaagaccgatcattgtttgggatgagtctgcttaatcgattctctgtgaaatcagctgaaggaagtggctcgaacacttgacccagcaattgcttttctttgacgaactcaggttcctagataaagaagtttgggcctcccctggtttgcggggccctgggctgcaaganatccccgggggccttggcaacaaacggtcagcttgaacgccggcccgngccattctccggggaancccgaaacccnggaccnc

SEQ ID NO: 81540 - DNA, 591 bp, Arabidopsis thaliana columbia
  unsure (1)..(591): unsure at all n locations
tatagggcgttttgggtcccgaccccccccctggaggtcgacggtatcgataagctggatatcgaattcgcggccgccttgacttcacatagagtatcaaagtatctgtggttactatattattacaacaatcttttttttagaatggctcttgtaagaaacttttcattggttgtacagcctttgaccaactattacatttccaataccaatccttgttttagagtaaaggttttgacatcttcttttacgatttcgcttaggtcatgtttgttttcgttatcttcaccgggtagttttccccgaggctcgaacagagactccatgtaacagtttaacatacccgaagaagctaagctttccatcagtgtgtctgatccaatcatgtaggactgaaatgtacccggtatagatggcccaacaaccaagttcagaggcaaagttcttcgatggcaatagcttcgggtttccattcttgtcgaaaaggtccataaggatgtcgggttgcttttnttcccaacaatanagggggctggggcttgntggccgtttttggnggtgcnaaaactttnaaaaccatncccnngtttt

SEQ ID NO: 81541 - DNA, 552 bp, Arabidopsis thaliana columbia
gggtccgggcccccccttgggggccgccggttcggctagcctggttttcgatttcggggccggggagatttcttttttttttttttttttccgaggcctccgaccattatttaccgattttccggggacccaccgtttactacgccgtttaatccaccgccaaaaccgaaaccagggattctctttctattcctcgtgggggtattcaggtttccaatcttctttctcttcctggtccttaccggtatcgcctctgttcttatcctccctttcctccttttttctctccatcgtcaccaccgacgtcgtcgtcgtaatcgccgacaagaatcctcagatgggttatcttcaagattcgggaaaaagcttcctcaattcaaattctccgaacctagcacatacacacggtacgagagcgatggtgtggttggttttgatggattcagacaaggacaatggtgtcggaatcttcctggttgtggacacgtgtttcatcgaaagtgtgtggacacttggttgctcaaagcctcgacgtgtcctatttgcagagct

SEQ ID NO: 81542 - DNA, 729 bp, Arabidopsis thaliana columbia
gcgagatgctgatcaggtcacaggcaatcctttgttgctccatgatgaaaaggggcctttggattcaatagccatggaattggcattgtgctagaatcttcaccatcagctcctccattgacagatgatgatatagctacagtagacgatggtccaattcattacccatcaatcgattcaacaccagtcgatctcccatctgctgcttctcttccagcttcaacagaaggtgaaaggaaagaagacgggaacactggaacgtgtgcgatatgtctcgatgctccatctgaagcagtctgtgtcccgtgtggacatgtcgcgggatgtatgtcttgcttgaaggagatcaaatccaagaattggggatgtcccgtctgtcgagccaagatcgatcaggttattaagctgtaccgtgtctgaaaacaggtatcaacaacaacatgggattatctatatccttcattgaactattgaaactatatctctctatttacacagctaaaatcaataccatgttttctttttatcaaaagctaaaacaatatgtttgtaatttggaacttgataaaaaacagttccagtattttgtatatatgtttttggacaaaaggaagaatgtatcaatgtaaagtgtggtaatatattctgtaaaaaaaaaaaaaaagggcgaccgctctagaggatccaagcttacgtacgcgtgcatgcgacgtcatcagtcttctatag

SEQ ID NO: 81543 - DNA, 1046 bp, Arabidopsis thaliana columbia
atagacgagctatgacgtcgcatgcacgcgtacgtaagcttggatcctctagagcggccgccctttttttttttttttttttttagtaaaaattcaaagcaaacaaagtaattattattctaattaagatataatcacacataatatgtttcatactaaacatcataaggaggacagtaatcaacgtatatgagtttgggacttagaaatcaaactactgaagcatcaacaaaaatgctcagaagttagtaagtaccatagctatgtctcagaacaatccaaccaagtttcttggatttgagtttactaacttggtgcttcagtctctctctgacctggatggtttatgcagcagctgcatcaaacctcttcatcatgtcgcaacgtggcgtttcgcggatatatccccattgttgtctctgaagctcatggcgacaattctggccaagtatagacaagtaaatctctatcaacttcgctcttcaaccctctgtctctcggagctaacttatcgggatattccctgctcgaacttggctggcctaacaaagtaagtgacgcccccatgcggggtgaatttgagctcgtagttatacgatgggaaagcgagtaaattggttgaggagaaggcaaaaagttgagtagtagtatgaacacaacaggaagtatttgaagaagtacacgaggattgaatcctgtatcagaagcttgattagctgttctagttcctccaccaaaattgaatgatcggaactgagtagtagcaggattcatttcaccaccaccaaagaagcttctgaaaatctcatcagcatcaaattcatcgtcgtagaatccattgaatccgttgtttcttctcgcatctcggcgtggttgataagcaggctcatcggaaccactgccgtcgtactttcttctagtgtcttcgttgcttaggcattgaaaagctttagagacggatttaaaagcttcttcagaaccaggagctttgttcttatcaggatgaactttcaacgagagtttccgataagatttcctcaaatctt

SEQ ID NO: 81544 - DNA, 536 bp, Arabidopsis thaliana columbia
  unsure (1)..(536): unsure at all n locations
aaaacacaaacacttaaaatgctagcaactgtatgagtttcagcagggcaattctccttctcttgccttcaccttactcaacaatatggaaggtgagaattactaaaataaacccctactgaaagattaagtcaataccaaatccatactccatctcattctcctgagattttgagtaaaaaggatgatccatttgagttctgttcgaccccgcaaatcatcggttaagctaacgaacctgattcctaatcgataaagctgctataaggggttagctcgagttaccggcatatatacacattgcatctgatcttggagaatcatcctcgggctaatgctcccttcaaaggctgtctttagccataaggctctctctttaggcggtagacatcagtatgccaaaccgggcggtgatcttccaagctcccgttctcnaagntnaactttggccctntngntnnggcaatcgggtgtgttgtcttgccncttcctcttgtggnnctnnangatcggttaagnccgggttaagcnanngc

SEQ ID NO: 81545 - DNA, 596 bp, Arabidopsis thaliana columbia
  unsure (1)..(596): unsure at all n locations
nnnnnnnnnnnnnnnnnnnnnngccccccctcgagttcgacggtatcgataagcttgatatcgaattcgcggccgcatatattacccaatacaatcaaagtatgagacatttctcataagacgagagcatactcttaaaattccccaatacaaacacctatacccaaaaaatttaattccctgcataatcttattaaggaagactgataatctcagaaacgcacaaaaccggagacttttcatgtattaggatagtatccatatgggtaactaacagaatgagatctgtagtgaagattctgttgagtattattattcatttgatctccagactctataggcttcggcttaggcttagccacacgcttgctgctctgttcttggaccgctccaaagactatctcattagacttttcactgtcctgctcataataagtatgcgggatcgatgagtaatgccttcgatgctgctgctgctgttgttgctgatgctgatgcttctggtgctgctttttgctgctgttgctgcttggttggggacctaagggtccagctactttangattcgggggttntnacgnaggtcttaattttnc

SEQ ID NO: 81546 - DNA, 872 bp, Arabidopsis thaliana columbia
  unsure (1)..(872): unsure at all n locations
ctggtatccgaatacagggccgccccgtatattcctgaaggctacggtccttttaaaatttgggaaggtccggttggcgaatgactttaaccccgctggggtccttagccccgtggaggcaatgagaaggaaactttggatgtacctaacattaccgggtttccgaggctggccggcttatcggacctttcttttgatgatgggcccgaggatcgaaactgggctctgaaggtgttgttcgtttcgctaaaggaatggggaaacaggttttccacacctttctgggagagtatcttccatcgcatctggtttccaattttcgaccatgtgagccttcctggaaaggaaagcttaacatcttccggggatgaaaaatttcggagaaacaggcattcatcccccttcagctgcctttgcattctttttcaatacgttttacaaggaagtatgttttatgctgcctccacttttaagtttgctcctagactgtgcgatgaaatcagatcagacagttgtttcaatttcattaggagcattggttcacctcatcgaggttggaggccaccaatttagtgagggagactgggatatgctcttgaaaagcataagagatgcatcatacacaactcaaccgctggagctgttgaatgctttgagttttgacaatccgaaaaagaacctagttttggcaggagacatagaggccgatgcctctaaattctccacgngttgatcgtaatccggacggttattaaagntaattgggaaantttccgccccaggaatttcccaggnnttggtacccatgggancttcccnnngaattctggggttaccncctnaaggnttanttgttcggaaggtnggccnnt

SEQ ID NO: 81547 - DNA, 602 bp, Arabidopsis thaliana columbia
  unsure (1)..(602): unsure at all n locations
agggcgattggggtcccggcccccccctggaggtcgacggtatcgataggctgggcaaaaaaatagctttttccatcaaaggcctatgttcatttgtatccactggactcaatttttccccaatgaagctacaaggtatgcacataatcatatcttacatttccaaatacagaagaaacgttcaggggcagtcttcaaaggaaccgtgtcggcattaactcgttgattctaaggggcatactatagaactcatcgttcctgccgtctccgttcctgtgctggaagggcttccaccacgggattcctcttgcgtcgtcacttgcatgtcttgcttccaacgtgttatctagtatggtcgcaagaatggtcgccaccaacggagccgaagcaaatatcgtattaagtatatcgttgaaccatcctcctgctgtcctaactggtccatatcctgctcttgaagtgttggcaagaaagtactgagcgatggaaagacttaagaagagggggacaccattgcggacatgtttctcatcgnatnagtncngnaaactgttaaacggnnttcnacaggaacaacggntcnaggagtcaggtttggtntc

SEQ ID NO: 81548 - DNA, 3482 bp, Arabidopsis thaliana columbia
  unsure (1)..(3482): unsure at all n locations
cttcaaatgttcattggaagaccaataccttatcttctactatcttcaccttccttccatggcttccgctgcggcggcttctccttctctctccttaaacccaacctctcatttccaacaccaaacttctctcgtcacctggcttaaacctcctccctcctccgccctcttccgccgcaaaacccttcctttcttcgaacgccactcacttccgatttcagcttcttcttcttcttcttcttcctcttctacttccctctccgttcacgagaaacccatttcgaattcggttcacttccacggcaatctcatcgagagcttcgagaatcaggactcttcatacgctggaaccattaaaggagcaagcttgattgaggagcttgagaatcctgtcgaaaggaatggactttctggtcggagaagactgtttatgcaagacccaccatggatctctgctttgtttctcaagggtttgagtaaaatggttgatcagactttgaaaatcgagcggaaagatatcgataagaggaaatttgattccttgaggagacgacaagtgaaggaagagactgaagcgtgggagaggatggttgatgagtacagagatttggagaaggagatgtgtgagaagaatctagctccgaatttgccttatgtgaaacatatgttcttgggatggtttcaacctttgaaagatgtgattgagagagagcagaagttgcagaagaataagagcaagaaggttagagcagcttatgctcctcatattgagcttttgcctgctgataaaatggcggttattgtgatgcataagatgatgggtttggttatgtctggacatgaagatgggtgtatccaagttgttcaagctgctgttagtattggcatagctattgagcaggaggtgaggattcataacttcttgaagagaactaggaagaacaatgcaggggactcacaagaggaattgaaagaaaagcaattgcttaggaaacgtgttaatagtttgattcgaaggaaaaggattattgacgcattaaaagtggtgaaaagtgaaggtaccaaaccatggggacgagctacacaagctaagcttggaagccgtctgctagaactattgatcgaagcagcttatgtgcaacctcccttgacccagtctggggactctatacccgagtttcgacctgcattcagacacaggtttaaaactgtgactaaatatccagggtctaagctggtgaggaggtatggagttattgaatgtgactcgctccttcttgcaggactagataaatctgctaagcatatgttaattccttatgttccgatgttagtgccaccaaagagatggaaaggatatgacaagggtggttacttgtttttaccttcctatatcatgcgtactcatggatccaaaaagcagcaagatgcactgaaagatattagtcacaagactgctcatagagtatttgaggcattggatacacttgggaataccaagtggagggtgaataggaatatacttgatgtggtagaaaggctctgggctgatggaggcaacattgcaggcttagttaatcgtgaagatgttcccatacccgaaaaaccatcctctgaggatcctgaagaactccagtcctggaaatggagtgctcgaaaggccaacaagattaacagagagaggcattctctaagatgtgatgttgagctcaaactttctgtggctagaaaaatgaaggacgaagaaggattctactaccctcacaatcttgactttagaggccgtgcatacccaatgcatcctcatctgaatcatctgagttctgatctttgccgtggaaccctggagtttgctgaaggacgaccacttggaaagtcaggcttgcattggctgaaaatacatttagcaaacctctatgcaggtggtgttgaaaagctctcacatgatgcccgtctggctttcgtggaaaaccatttggatgatataatggattcagctgaaaatcctatacatggaaaacgatggtggttaaaggctgaagatccgtttcagtgtttagctgcatgtgttattctgacacaagccttgaaaagcccttcaccttattcagtaatttcccacttgcctattcatcaggatgggtcgtgcaatggtctacagcattatgcagctttaggaagagatagttttgaagctgcggcagttaatctagttgcaggagaaaaaccagctgatgtctactctgaaatttcacggagagttcatgaaataatgaagaaggacagcagtaaggatcctgagtcaaacccaaccgccgcactggcaaagatccttatcactcaagtcgacaggaagctggtaaagcagacggtaatgacgtcagtatatggtgtcacctatgtaggggctcgtgaacaaataaaaagaagattagaagagaaaggtgttatcactgacgagagaatgttatttgctgctgcttgctattctgcaaaagtgacgctagctgcccttggagagatatttgaagcggcacgtgccattatgagttggcttggtgattgtgcaaagataattgcttccgataatcatccagtgcgatggatcacccctcttgggcttcctgttgtgcaaccctattgcagaagtgaaagacatctgataagaacatctcttcaggttttggctctgcagcgagagggtaacacggtcgatgttaggaaacaaagaactgcatttcctcccaactttgtgcactcgctggacggcactcacatgatgatgactgctgttgcatgtcgagaggccggcctaaactttgcaggtgtgcatgactcatactggacccatgcatgtgacgttgacacaatgaacagaatacttagagagaaattcgttgagctttacaacacaccgatccttgaagatttgctccaaagtttccaagaatcatacccgaatctcgtgtttcctccagtaccaaagagaggtgatttcgatttaaaggaagttctcaaatcacagtacttcttcaactgagtcatgcatgtagcaccagtgaaccatctgaagaagggagcaagtttttgacgcagggatcttccttggtggcctgtaaataacatccaccacctcaaaatgacatggaaagaaccagaaatgtgcaagaaagacaaactgatactgcaacacactaagattctgacataaattatcttgcagcagaagaggaattcagacaaatctacttagagaaattttggcagcattcaagaagtttctagctcagtaggtaggtcctagacagtcttgaataattgatgtaaggtatgagtcatttgcatcaagcttgtttttggagatgagattaggattagagttgtgttgtatctgtcattcgtaatgttgtacagagagagacttcatatacaaaacaagaacacaataacgatcnnnnnnnnnnnnnnnnnnnnnnnnnnnn

SEQ ID NO: 81549 - DNA, 606 bp, Arabidopsis thaliana columbia
  unsure (1)..(606): unsure at all n locations
tatagggcggattggggtgccgaaccccccctcgaggtcgacgggatcgattaggctggttttcgatttcgcggccgttagacttattcttgtgcatgccacctccaagagagaatgtgggttttgagaagtcagattctactgtgtcacgggaggcaaaccttgttgaaagcacgttagaaacatctggaatgaagcctaccgaattaccttcagttggttcagtgcctaaaccatctattttagtgaatagatcggaaaatgctaatatgttgagttttccagcgggccctgcatcagcggggatcacaccaccagcaattgttccacccaacggtgagcctaaaacttctgggatgccttctgagaccagtgatgtagattctgcgtatgctccttcacctcaacttcctctaagccccagactatcaagtaaactttctggctatcacactcctgtagaagcgtttgagcaagtgctaccacatcataagcttggtggcaaaacaagttctgctggttatttttatgtgaggcaaactggttatttttgggggagaatttgggtgttntttttcggggaanctttngggaagncggnttttc

SEQ ID NO: 81550 - DNA, 546 bp, Arabidopsis thaliana columbia
  unsure (1)..(546): unsure at all n locations
cccccctggagtccgagggaatcactaggctggatatcgaattcgcggccgccattccattacgctttttttctcttcccaggtctcatttcagaatccaatttcccctcagacccggaaaagaaactcaactacgtcgctgtttcacgactctgtcatcattaacggacggtggagcaccaatttccggtgggaaggagctgtggctgcacaacacgatgagccggaagaaggagctgtttaagcctaaggtcgaaggtaaagttggaatgtacgttggcggtgtcactgcttacgatctcagtcacattggacacgcacgagtctacgtcactttcgatgtactcttgaggtaccttaagcatctaggatatgaagtgtcttacgttcgaaatttcacggatgtggatgacaagattattgccagagcggaagaatttgaggaagatccaatcagtttgagcagacggttctgtgaggaatttaatcgggatatggaacagcttcaatgtttagatccgtctgtccaaccaggggtttaagnca

SEQ ID NO: 81551 - DNA, 398 bp, Arabidopsis thaliana columbia
ggagataataatcacaaactacaaaagtagaaagaagaaaaaagaacaaagtatcagttcttgaatatttgcatcaatggaggaatccaaaacacctcacgttgcgatcataccaagtccgggaatgggtcatctcataccactcgtcgagtttgctaaacgactcgtccatcttcacggcctcaccgttaccttcgtcatcgccggcgaaggtccaccatcaaaagctcagagaaccgtcctcgactctctcccttcttcaatctcctccgtctttctccctcctgttgatctcaccgatctctcttcgtccactcgcatcgaatctcggatctccctcaccgtgactcgttcaaacccggagctccggaaagtcttcgactcgttcgtggagggag

SEQ ID NO: 81552 - DNA, 556 bp, Arabidopsis thaliana columbia
cccccccctcgataacggcgggtatcgcatagcttgatatcggattccggggccggttcacttctatctttaattcggccggggcagatcccacccctcttggacccggtccaatcggtccgatctaaatctgttcagctttctaatctccattccgctactgagttaccatctcacttccgttcgtacgctccgtctctctaagaagcttcgagatctagcgggattttcctgatccagataaagatcgatctcactaaagctgcacagtttccatttcgagaatcttaacaatgtgtaaagagtatgatctcttttggcattgatgtgattgattgaggaaatcaaagtttgttactgaggatttggagcagcaaattgagatccttgaagctattgaaggtgtttcggaggagaggcatggaaagggttgaattcaagctgaagttggggctggtttgccaagttttctataaccttggagagcttaagtctacgggggatcaattggtgaataagtataagggaatggctgtgaagagtgtgagtgttgcta

SEQ ID NO: 81553 - DNA, 583 bp, Arabidopsis thaliana columbia
  unsure (1)..(583): unsure at all n locations
tttagggcggttttgggtcccgacacccccctggaggtcgacggtatcgataagctggatatggaattcgcggccgcacgagttacattcaaaatcgtcataatggtaaaagaacaattgaagcatcattacactttcacatggttgagatgttgttacttatttgagttttaaatggatcctttcaggaagttgtcgacctttgaattggttgcagaagagagaaacttcatgcaaacaggaggattaactccggctatagcgagcacggagctcggcaaagaccaaatgccatctccgcatatcaaaccagaagccaccgctgtcccaaaagcttcagccttggctgcatctactctttcccagataaaaagtatccaaacttcccacacacatgtcaattgcgaagtaaggtcccaagaaaaacggtatagccattgccatgggaagtgggatgaaccttccccaattgctatggggactatctttactatgtttacgggatcgccacaccgagaccggtggtncgacaagaattccccggaggatggganctccacccagttagcnggtcggnaaaant

SEQ ID NO: 81554 - DNA, 572 bp, Arabidopsis thaliana columbia
ctatagggcgaattgggtgaccggaaccccccctcgaggtcgacggtatcgcataagcttgatatcgaattcgcggccgccaaagacacactcacaatttaaaaaaaaacgtttcttttctcttcgattcccgattacggcttttgattttgtgggactcttctcagtttttctgggcttttggtttttggattctatcttctttcatttttcagattttttattttattttgttgtatttctatattgggaaacaaaatcatgcagaggatcgtcgataatgctcttgctatcacaaaagagtcagtgaaaactctgacttatgagtctttgaacaacattgcaagatgcattaatggattttctgcgcttctcttgacacttttgcccggaaagtccaatgttcttgaaggtcttcatggatgggagcttaggcctacattgcgtggacctcgtttaccacgcttggatgcataatggagtctcttctttcaaccacttcattcacgaactccctgtggattctgatacttctagcttggactattcctctggtgatgatgatagtgatg

SEQ ID NO: 81555 - DNA, 547 bp, Arabidopsis thaliana columbia
tctccagctctaaacgaccctctcttagggaagctgggctgctgctcgcccggtgcgggatcctcggtaaaaccacgcctccccgggctggaagaattcccgggcggttattaagccttctactttttgcttctaaaattccttgcggcaccaagagagctctggttaatcctcaaactcaatttttctttcgatggggggcccaagaatttaattgggcccctggccggttcaaaaggatttacccaattcccaccaccgggttattaaaccccttccgacccaaaaaaccggaggccccctggccagccaggctcttctttagtcttccccgttggaggactatcacgatggctgggcagtggcctttgcaccgacgttctttcacagcttccttcacaggacggcgacttaccgggcttacttgcaagccctccttcaaaagtttctggacaaatccaccagcatcactgggtccaaacacttcccacaatccatcgcaaccaagaatcatgaagttttctctctcagttaattcaaaagcatg

SEQ ID NO: 81556 - DNA, 557 bp, Arabidopsis thaliana columbia
  unsure (1)..(557): unsure at all n locations
cttgtcaatggcttatgccgcgtctaaattgtaaaggcatctcttcggctccttaagggagcgggaaatgtctccaagtgctcgtttgtggagtagactctactggatcttcccttctttgcatcccgggttaagatagggaagaacggtcttgaagctgtgattgagtcaccccttcagggattgcctgagtatgagcagaaagccctaggagctcttaaggtagaattgaaagctagcattgacaagggtgtcgcatttgcaaacaaaccagctgctgcagcagctaactagatcgcaagctccccccatttttcttctgatcatttccagttttgttttatttttcatatttgttgcatcggcgagacattttcgtgttgtagaataaagaatgtatttgcttcagtttgaggtttaaaaccccaaaaaaaaaaaaaaaaaaaagggcggccaaaannnnnnnnnnnnnnnnnnnnnnnnnnnnnnnnnnnnnnnnnnnnnnnnnnnnnnnnnnnnnnnnnnnnnnnnnnnnnnnnnnnnnnnnnnnnnnnnnn

SEQ ID NO: 81557 - DNA, 555 bp, Arabidopsis thaliana columbia
cggacgcgtgggcggacgcgtgggcggacgcgtgggcggacgcgtgggcggacgcgtgggttttttttgtaattttggtttccctttttttttattaaataagatgtattcctccatcgttacctaatccccttcttcgtcttcttcagcttcactgagtcttacgaacatagcaaaatccaaatcaaattcctgaagaaacctctttcgctctcgtcttcgttttcagatcaacaagaaatggcaacagcaacatcagcttctctgttttcaactgtttcttcatcttactccaaagctagctccataccacattcaagactccaatctgtgaaattcaactcagtccctagcttcaccggtctcaaatcaacctctctcatctccggatctgattcctcttccttagccaagactctacgcggttccgtaacgaaagcacaaacatctgacaagaagccttacggattcaaaatcaacgcttcatacaaagtagctgttcttggtgctgctggtggtataggtcagcctttatcacttctcatcaagatgtct

SEQ ID NO: 81558 - DNA, 1628 bp, Arabidopsis thaliana columbia
  unsure (1)..(1628): unsure at all n locations
taggtgcaactatagaagagctatgacgtcgcatgcacgcgtacgtaagctcggaattcggctcgagcagcttcactgagtcttacgaacatagcaaaatccaaatcaaattcctgaagaaacctctttcgctctcgtcttcgttttcagatcaacaagaaatggcaacagcaacatcagcttctctgttttcaactgtttcttcatcttactccaaagctagctccataccacattcaagactccaatctgtgaaattcaactcagtccctagcttcaccggtctcaaatcaacctctctcatctccggatctgattcctcttccttagccaagactctacgcggttccgtaacgaaagcacaaacatctgacaagaagccttacggattcaaaatcaacgcttcatacaaagtagctgttcttggtgctgctggtggtataggtcagcctttatcacttctcatcaagatgtctccgttagtctctacgcttcatctttacgatatcgccaatgttaaaggagttgctgctgatctaagtcattgtaacactccttctcaagttcgtgatttcactggtccttctgagttagctgattgtttgaaagatgttaacgttgttgtcatccctgctggtgtgccgaggaaacccggtatgactcgtgacgatcttttcaacatcaatgccaatattgtcaagactcttgttgaagctgttgctgagaattgccctaatgctttcattcatattattagtaacccggttaactctacggtacctattgctgctgaagtgttgaagaagaaaggtgtttatgatcctaagaagctgtttggtgtcactactttggatgttgtgagggctaacacttttgtttctcagaagaagaatcttaagcttattgatgttgatgttccggttattggtggacatgctggaatcaccattttgcctctcctctcgaagacaaaaccgtctgttaactttactgatgaagagatccaagagctcactgttaggattcagaacgctggtactgaggttgttgatgctaaggcaggtgcaggttcagctactttgtcaatggcttatgctgctgctagatttgtggagtcatctcttcgtgctcttgatggagacggagatgtctacgagtgctcgtttgtggagtcgactctgactgatcttcctttctttgcatcacgggttaagatagggaagaacggtcttgaagctgtgattgagtcagaccttcagggattgactgagtatgagcagaaagcactagaagctcttaaggtagaattgaaagctagcattgacaagggtgtcgcatttgcaaacaaaccagctgctgcagcagctaactagatcgcaagctgataacatttttcttctgatcatttcgagttttgttttatttttcatatttgttgcatcggcgagacattttcgtgttgtagaataaagaactgtatttgcttcagtttgaagattttggaacatggcattgaagtagaatttataaatcnnnnnnnnnnnnnnnnnnnnnnnnnnnnnnnnnnnnnnnnnnnnnnnnnnnnnnnnnnnnnnnnnnnnnnnnnnnnnnnnnnnnnnnnntagctg

SEQ ID NO: 81559 - DNA, 657 bp, Arabidopsis thaliana columbia
ttaggtgcactatagaagagctatgacgtcgcatgcacgcgtacgtaagctcggaattcggctaagtcgaggtctctctatctctctctttcgtacacttcgcgcttctcttcctgtcagaggcgtttctcatggctcctcttactctctccgttgatgtgaagagctcttcagcgacctctcatgatgtttcgaagagggtaatgcagagtccacagctcaaaataaacaaaggcttttttgcatctgttaatacacaagaagataaaccctttgatttcttccgcactctctttgaggggtttatagcaggaggtacagctggagttgtagttgaaacagctttatacccaattgatactattaagactagacttcaggcagctcgtggaggtggaaaaattgttttgaagggtctttattcaggattagctggaaatatcgctggtgtcttaccggcttcggctttatttgttggagtttacgaacccacaaagcagaaactgctgaagacctttcctgatcatttaagcgcagttgctcacctgactgcaggggccatcggtggacttgctgcatctctgattcgagtgcctacagaggttgtgaagcaaagaatgcagaccggacagtttacatcatctcccagtgcttgtc

SEQ ID NO: 81560 - DNA, 534 bp, Arabidopsis thaliana columbia
acgactcactattgggaaagctggcacgcctgcaggtaccggtccggaattcccgggtcgacccacgcgtgcgctcattctctcttcttctccttcttccttctcctccaccacaaagcggtaggtttctctcttcaacaatcgtctccccattaggcacattgttgagggcagggtagtctcgtgagttctcttctcctgagtgtaactgtggttaaaagcttagccaagatgcagggggagagggccagtcttggctatttatcagaggccttgaactttgagcatggttcttcttcaagtaatggtgtgatagatcattgggagaatattcacagtcttggtgataatgacttgcaggattacatgattgcaaattctgaatcaaatacttcgcttgcaaactcagtttatcacgagcaacagggtttacgcagatttagccttggtgaggctagctctagtggcacgaaggatgaagcttccagtcacaatgagcaacgaatggaaacaagatgctttgacggacgagga

SEQ ID NO: 81561 - DNA, 580 bp, Arabidopsis thaliana columbia
  unsure (1)..(580): unsure at all n locations
gctctaatacgactcactataggggaaagctgggtacgcctggcagtaccgggcccgaattcccgggtccggcccaagccttccgaaaaggttcgaaaggcttgtcgatcggaaaattcaccattgccggatcctgattcatggcaaggtaaattaaccaggaccggccaccgctctgttccttcaccgactgaagaaagtgtagtgtctacacaggtccagtgattggttcgattctgattgatgacgtagaagattgtgttctggtattggcgtcgcatcagatcagaatccattgcgctaggaagagtgatttctacctgagagtgaggagtcgtcccataattgaagacagtaacggtgtcagatttgctccttattgtttggattacaaagggattgatgaagatttgaagacggctgggtttggaggaggagactaacaactgggccaatgtggatgatttccggtggctgagagctgtacagtcgccgaattggtcactttttgccggaagaagaaagggcctttttgcttaccatttccggggnttttnnncaaaacnnnaggtcccaaatt

SEQ ID NO: 81562 - DNA, 536 bp, Arabidopsis thaliana columbia
  unsure (1)..(536): unsure at all n locations
ccnnnnnnnnnnnnnnnnnnnnnnnnnnnnnnnnnnnnnnnnnnnnnnnnnnnnnnnnnnnnnnnnnnnnnnnccacgcgtccgacgacactcctctcttgagcccttactcctgcagccgccgctgtccagaagattcccaaacccaaaccaaagaaagctacaccgttatctgttgtgacacggctgtggcagatacaacacaccagaagagtctcaacaaccaacataaaaagaaaccgaagaaagtcgctgagccattcgaggatgcaaagaaaagaggtgacgcgttggcgcaaaagatgaaagatctcaatatggtggatctgagagacgtggatcacgcattggatgtaagggaagcgcttcgatgctattcaagcatcagcaagtccttgtgtatcttgacatttgttgacaaatttctttcacaggacatgtttttacggtgttctctgatcctcgtacctctgctaagatcaacggttcaaggagaaaggcaggctccttcaggctttaaagttcctctggatcag

SEQ ID NO: 81563 - DNA, 692 bp, Arabidopsis thaliana columbia
atgaactgccggcactaatccgactcaattagggaaagcacgtacgcctgcaggtaccggtccggaattcccgggtcgacccacgcgtgcggttctctgcttttgtctcccccaaacaaaaggataaagaaagttgcagaaaacaatctctctgttctttgagctttccctttgagctctcacacgagcggcttcttttgtcatctcaccttttccttcattctttcttccttcaaattctggtttttttcacagatcgttttctcagattttgactctttttggtgttgttgttgttcttctccttcgtgaagtggaagaagaatataacaaaactgggttttttatatctggaattctgaagaaattcttcacggatttgatctgtttaaactataaaagtcttgatttttataaatcagctaaaaataagacacggtttagggtttatggtttgactagaaacaacaatactgaaatgggttgtgaggtttcaaagttatgtgcattttgttgtgtttctgatcctgaaggatctaatcatggtgtcacagggttagatgaagataggagaggtgaagggaatgatttgcctcagtttcgtgaattctcaattgagacgttgaggaacgcaacatcaggatttgctacagagaatatagtatcagagcatggtgaaaaagcttcaaatg

SEQ ID NO: 81564 - DNA, 501 bp, Arabidopsis thaliana columbia
cgcgtacgtaagcttggatcctctagagcggtcgcccttttttttttttttatctcataaactcatatcaatataataactgtgggtcttttcatcacatagttgaactgcttattgttgatttatcatgaccttagagaaaaatacagaaatacaatttagaattcaggtacaggttcttcttcaacgggagcaagaacccattcaccatcttcgttcttgatcagtcctttgttcttctctacccaccaagatcctggcaccaaacactcagctttcaagaactcgcatgacttgttcactaatgcaatacttctcttaaccatcagtttaaactctcctttcttcccattccatccagctacaacatgtaacatcgcctgaagattatgccaatcccctggattccttgaatcgcttaggaacggggacttctttgtatcgatcacaaagtttattcctaatgccacataccctaaaagtccccctgggtatcgagta

SEQ ID NO: 81565 - DNA, 890 bp, Arabidopsis thaliana columbia
  unsure (1)..(890): unsure at all n locations
aatacgtctcactatagggtaagctggtacgcctgcaggtaccggtccggaattcccgggtcgacccacgcgtccgggagaaatggggcgggaagccggatgtcttggtggcttgtgtcggtggtggttcaaacgctatgggactcttccatgaatttgtgaatgacacagaggtccggatgatcggtgtggaagcagcgggattcggattggacagtggcaaacacgctgctacattgacaaagggagatgttggtgtcctccatggagctatgagttacttgctgcaagatgatgatggacaaatcattgaaccacactccatcagtgcaggattggactaccctggagtcggacccgagcacagtttctttaaagacatgggacgggctgaatactatagcataaccgacgaagaagcgttggaagcgttcaagagagtgtcgcggttagagggaatcattccagcactggagacctcacacgcactagcttacctcgagaagctatgtcccacattatcagacgggacgagagtggtcttgaacttcagcggaagaggagataaagatgttcagacagtggctaaatatcttgatgtttgaagagagaaacacttatgtttgtttttcagttattcagacagaatgaaatcctttttgtacttgtaatctgtttgtactttacttctctctggtcagtacgtttccaacaaaattggaaatagaaaaagattacgaagagaacgaaatttgaataaatgtattatcaataaaataaaaaacatttcataaaaaaaaaaaaaaaagnnnnnnnnnnnnnnnnnnnnnnnnnnnnnnnnnnnnnnnnnnnnnnnnnnnnnnnnnnnnnnnnnnnnnnnnnnnnnnnnn

SEQ ID NO: 81566 - DNA, 1624 bp, Arabidopsis thaliana columbia
  unsure (1)..(1624): unsure at all n locations
aaaagattcactaaatggccaccgcaagcaccgctgctactttcagaccctcctccgtttcagcttcttccgaattaacccatctgagatcaccctccaaactccccaaatttacgcctctgccatcggctcgctcacggtcctcttcttcgttctccgtctcctgcaccatcgctaaggacccagctgttgtcatggcggactcggagaagattaaggccgctggatctgatccgactatgtggcaacgacctgattcattcggtcgtttcgggaagtttggcggcaagtacgtccccgaaactctaatgcacgccctctctgaactcgaaacggctttctattcgctcgccaccgacgaagatttccagagagaattagcagagatcttgaaagactacgttggtcgggaaagtcctctttactttgcagagaggctcacggagcattaccgccgtgaaaacggtgaagggccgctcatatacctcaaaagggaagacttgaaccacaccggtgctcacaagatcaacaacgctgtggctcaggctcttctcgccaagcgtctaggaaagaaacgaattattgctgagacaggggctggtcaacatggtgtagccacagctactgtgtgtgcacgtttcggtttgcagtgcattatctacatgggtgctcaagacatggagagacaagctcttaatgtgttcagaatgcgtcttctcggtgctgaggtaaggggagtccactctggaacagccactttaaaggacgcaacttctgaagctataagggattgggtgaccaatgtggagactacacattacatattgggatccgttgcgggtcctcatccttatcctatgatggtcagagactttcacgcggtgattggtaaagaaacaaggaaacaagcgatggagaaatggggcgggaagccggatgttttggtggcttgtgtcggtggtggttcaaacgctatgggactcttccatgaatttgtgaatgacacagaggtccggatgatcggtgtggaagcagcgggattcggattggacagtggcaaacacgctgctacattgacaaaaggagatgttggtgtcctccatggagctatgagttacttgctgcaagatgatgatggacaaatcattgaaccacactccatcagtgcaggattggactaccctggagtcggacccgagcacagtttctttaaagacatgggacgggctgaatactatagcataaccgacgaagaagcgttggaagcgttcaagagagtgtcgcggttagagggaatcattccagcactggagacctcacacgcactagcttacctcgagaagctatgtcccacattatcagacgggacgagagtggtcttgaacttcagcggaagaggagataaagatgttcagacagtggctaaatatcttgatgtttgaagagagaaacacttatgtttgtttttcagttattcagacagaatgaaatcctttttgtacttgtaaaaaaaaaaaaagnnnnnnnnnnnnnnnnnnnnnnnnnnnnnnnnnnnnnnnnnnnnnnnnnnnnnnnnnnnnnnnnnnnnnagggaattgcaaactcaatgggggggggcgggggc

SEQ ID NO: 81567 - DNA, 1752 bp, Arabidopsis thaliana columbia
gttcctcctaatctcaccttcactgttcactctctactctccacttctctcgcttttgtcccaaagtagctatcttcaacaagattcatgtctcttatgatcagatcctcttacgtttctcacatcactctcttccaacctagaaactcaaaaccatcctctttcaccaaccaaatctccttcctttcctcttctaataacaacccttttctcaatttggtctataaacgaaacctaacaatgcaatctgtttcgaaaatgactgttaagagctcgttgattgatcccgacggtggtgaattggtggaattgattgtaccggaaactgagattggagtgaagaaagctgaatcagagacgatgcctaaagtgaagctgaatcagattgatcttgagtgggttcatgtgattagtgaaggttgggctagtcctttaaaagggttcatgagagaagatgagtatttgcaaagtttgcattttaattctcttaggttaaaaaatgggacttttgtgaacatgtctcttcctattgttcttgctattgatgatgatactaaggaacagatcggatcatctgagaatgttgctcttgtttgccctcaaggagatatcattggttctctccgaagtgtggagatttacaaacacaataaggaagaaaggatagctagaacttggggaactacttctccaggattgccttatgtggaagaatatattactccatctggaaactggctgattggtggtgatttagaagtttttgaaccgattaagtataacgatgggcttgatcattacaggctctctcctaaacagcttagggaagagtttgataatcgtcaagcagatgctgtttttgcgtttcagttaaggaatcctgtgcacaatggacatgctctgttgatgaatgatacacggaaaaggcttttggaaatggggtacaagaaccctgttctcttgcttcatcctttaggaggtttcactaaagctgatgatgttcctcttgatgttagaatggaacaacatagcaaggttctagaagatggagttcttgacccgaagactactattgtctcgatctttccgtcaccgatgcactatgctggtccaactgaagttcaatggcacgccaaggcaaggattaacgctggtgctaatttctacattgtaggtcgtgatcctgcaggaatgggccaccctactgagaagagagatctatatgatcctgatcatggaaagagagtcttaagcatggcccctggacttgagaaactcaatattcttccatttagggttgcagcttacgatacaatcgagaagaagatggcgtttttcgatccttctcgtgcaaaagagtttcttttcatttctggaacaaagatgcgaacttatgcaagaacaggggagaatcctccagatggatttatgtgtccgagtggatggaatgttcttgtcaaatactatgagagcttgcaagagagcgaagcaaaacaacaagccgttgtttcagcctaaagaatccagttgcatctctttcagaattgaaactccttagtgatctatatgaggcttttgtttcacctttcattgttttgtttaaattactacccttggatccatgtttttgtctcatggaaaaaactcagatgtttcgaaactctgaaaccaaataatgttctgattgacgagagaagtttgttaataatgtcaggtacactattcaaatctttttaccataaaaaaaaaaaa

SEQ ID NO: 81568 - DNA, 444 bp, Arabidopsis thaliana columbia
  unsure (1)..(444): unsure at all n locations
gctctgaaaatactcgngagcgtagtccctggtgcaaaaggaaacgaagcgctcttacttctggacgaagcaattgattacctaaagttgctgaaacgagacttaatctccacagaggttaagaaccaaagctccaccactcacaagtcaccaatcttgttgcttaaagagacaacatggggaacaagaaatctgcagacagataaggcgtgaaagattctgacgagttaaaacgtgtgaagtgggtttttgggtacgtatcctctgcaccagctttttagctgtatatagtggactacttttaagtattatatatgctactgcaaatttcaaaaagttaaagaagaaaagaggtcactttcttcttctctctgtgtggaatgaaaagccaaagtcgtcatggtcattgatggacaatgattatcttttttggctgagtgtgga

SEQ ID NO: 81569 - DNA, 556 bp, Arabidopsis thaliana columbia
  unsure (1)..(556): unsure at all n locations
gatatgctagcgtctactacgactcactattgggaaagctgatccgcctgcaggtaccggtccggaattcccgggtcgtcccacgcgtccgaagcgctcttacttctggacgaagcaattgattacctaaagttgctgaaacgagacttaatctccacagaggttaagaaccaaagctccaccactcacaagtcaccaatcttgttgcttaaagagacaacatggggaacaagaaatctgctagacagataaggcgtgaaagattctgacgagttaaaacgtgtgaagtgggtttttgggtacgtatcctctgcaccagctttttagctgtagatagtggactacttttaagtattatatatgctgctgcagatttcaaaaagtgaaagaataaaagaagtgattttgtttttgttatttggtggggaatggttaattgttagtatagtttaagattttntttgngaggagtgtggtggttggataatttttttttgtggttggaggtgtgagttttttgtattgttttggtgttaagagaggtattcgctcccca

SEQ ID NO: 81570 - DNA, 595 bp, Arabidopsis thaliana columbia
  unsure (1)..(595): unsure at all n locations
tgannnnnnnnnnnnnnnnnnnnnnnnnnnnnnnnnnnnnnnnnnnnnnnnnnnnnnnnnnnnnnnnnnnnnnnnnnnnnccacgcgtgcggaggagcatagagagcttctaggccgtgttaactcagatgatacaatacgaaggataagggaatggagacaatctggaggaatgcagccaagtatgcgcaatgctgctcaagtggttcacgatacattgccaagcccttctgtttcagcttctatgaagacgcacaaaccaaaccagccaattccttctcaaccattcgctagttcttcaccttcttttcatcctcaagctgatcccactcacccgtttgcttcatcgacagctaaacgaggacctgttcctattgtcaagggcaaaaaaacacaaaccagtttttcctggctcgtcttccacaaaacatgccccataccatccttcagatcaacctccacgaggacaagtcatgaacagattaccatctgttcctgccagttcaagtgaacccacaaacggaatcgatcctgaatcttttttaggaagaagagttagaacaaagtggcctgaggacaatacattttacgacgc

SEQ ID NO: 81571 - DNA, 602 bp, Arabidopsis thaliana columbia
  unsure (1)..(602): unsure at all n locations
ataacttccattcgccccttccttaacctggattcttttaaaccggccgcctttttttttttttttttttgccaaaaaaaccattacatttaacaaaccactgcctaaaaggggtcatgtttaaaaaatgttactggtctattaagtagccttttgaagttgcaccagaaactgagcattacgatgatctgttacgggtaaaaaagggaaaatcattactctctcaatcttctttgtccttactttaatgatgtatgtgcagtgcaaaagccctaaggattccactgatgtggctgttttttttataacctttggctgaagtacatgttcatgaaatatcttgacgggttgaatccgcttaagataagaataggagacaggacaatgacaactccgattgggtagaggaagaatgttgttcgctccaaaaatggaagcacgtcatatcctaggaagttaagataatggtagtacgaagccccgaccatgaaaagcagattcgatagcagtaaagggatgaatccgtgtgctatcaggagcggtgataagaagtaatgtacgacgtagagcagnacaaacattggaaagaacgagttgcagtg

SEQ ID NO: 81572 - DNA, 533 bp, Arabidopsis thaliana columbia
  unsure (1)..(533): unsure at all n locations
aggtgacctataaaaaatcttgacgtcgtgtgcacgcgtccgtaagcttggatcctctagagcggccgccctttttttttttttttttttttttttccaaacaaaaatttatccgggttcctacgggtttttaattccggtttaggatatttaaaaaaaaaaattactctaccaaaaatcctaatccaaacaaattacccactacaaattaataaaaagcccaaaatacaattcaaaaaagcccaaaacaaaaactaatagcccacccctagaaaatattagggttttgaccaaaagatatgagctgccgaagggttgcggctgcggctccaggtgacgtaacgacgacggccatctctgatgatcctattcatcctttcatcgtcattggccgggctattcatcttcctcctttcaacttcattcgcctcggacgcgtggnnnnnnnnnnnnnnnnnnnnnnnnnnnnnnnnnnnnnnnnnnnnnnnnnnnnnnnnnnnnnnnnnnnnnnnnnnnnnnnnnnnnnnnnnnnn

SEQ ID NO: 81573 - DNA, 519 bp, Arabidopsis thaliana columbia
  unsure (1)..(519): unsure at all n locations
nnnnnnnnnnnnnnnnnnnnnnnnnnnnnnnnnnnnnnnnnnnnnnnnnnnnnnnnnnnnnnnnnnnnnnnnnnnnnnnnnnnnnnnnnnnnnnnnnnaaatgaaagctacgggagaagcttccaaatttcactgataagtgttttatgttatgcaataaaaacaaaagaaaatttgtttttgtgggactgaaacatctagtctatgtatcagtggccatttccaagcttccatctttgtcttttgtcgaatgattgaggaaattcccaagcagcctttgaatccaacaccatgttaggtaccttgtccccgaagaatattttggtgttacgagcaatggcatcgatgaatttgagttcaagaaattcaggggtgagcttcaacttttttgcttcagcttctctcagtacacggtagtaatctgcatccgcgagactcttttgacggtcaaggtacttctgattctcgatatcagcttctctccttgaactgtctttctcagtcaacttctgttgcatc

SEQ ID NO: 81574 - DNA, 610 bp, Arabidopsis thaliana columbia
  unsure (1)..(610): unsure at all n locations
nnnnnnnnnnnnnnnnnnnnnnnnnnnnnnnnnnnnnnnnnnnnnnnnnnnnnnnnnnnnnnnnnnnnnnnnctttttttttttttttcttcaatcaatatttgtttaacgaaataagtttcaagagaagacaagctactatgatttttagtctcaagagtcttacatttttatactgaaaaccaaacttatagagctttacatttagaaaaccgaaaaaactatcaatcattaggttagcctttggattcacgacgacgtatcagatttgcgttcagcgtctgcggcagactgcatttgagctgcgtattgtaagttccagagaacatcttccaaaggaaggtcttgcggaagggtccaagccaaacacatttattggcgattgagatcgcaatcggtaaagactcctgcgagcttgttgttaggactgttggacttactattttccgccgaccggcttggctccccaatggggtcattccgttgaaaaaaccccccttttangggccgggccnaaaaggtccnnagttgacccgngtgnanacggcccccttanncttttttgcctgggggccnntttcccannttggcncaagggngccaaccngtt

SEQ ID NO: 81575 - DNA, 804 bp, Arabidopsis thaliana columbia
gactgtttttggtatatatgatcccctgcaaaactctattactgagattagattcatgttggctttcagaatctgttcttctgtggctttcgtgtctcttttcctaacttgtgattgtttccagaagcttccctttgttttccgaagcttctgttaccggggcgctgtggtcctgttctactttgattaatgtcggaagcaggtgtgtgttgttgatatgttctcttttgccgtttgaatttgttgccatcttgtttggctgtagtttctgatgaagcttctctgtaatttcttttccgcggccctctggatggatcgatggatgtagtctgtgactcattggtctcttctttgtcttttgatttccccgaacggttctctaaaactgtctcgatgaaactcttgtgcttgtctggtgtggctaactggactgcgcgggtgccgcacttccttaccataaactctcaacctatgaccggtaaccctccgacttaaaataatgccttgaaacagacgaccaggggaagaattccgtataagaggttctgcagtagactgtgcaagtcctgagcttgcgatgttgagactaaaactttcacaaaacctaaaacagcttttataatctcaatggatttagtgtgaagcaatgataaaacagatgaaagaagctcaggtgacgatacgcatatctcagggtctttgtataccaaggcagataatgcagacactgctccactccttatgtgcggcgaccggacgcgtgggtcgacccgggaattccggaccggtactgcaggacgggcc

SEQ ID NO: 81576 - DNA, 1037 bp, Arabidopsis thaliana columbia
  unsure (1)..(1037): unsure at all n locations
gtgacactatagaagactatgacgtcgcatgcacgcgtacgtaagcttggatccttttaagcgggccggcccttttttttttttttttttttttttttttgggaaagaatattattgggggcttttcctgggttaccaaattaccttttattaggtccattggcccttaattaaaatggattttaacttttgggaaaaggtaaacaaccaacctttaaccggttaaaccaccttgaaaatcccaaattttttaaccattccccaatcggaaacttgatggtttaccaaaagttgaaaaggtaaccttgacctaaggaaaaaccaacctggacttgaccctcggtggttaagtaaaaattgtcggactttagcggcaatcccttagcatctacacagaccacattcgacagtttcagtcccaactgtgcttctctcaccttatctatgtatcctcctcccgatgctattgccacctgaataatgggaagaaaaggaggttaagcntttagggggttttaaaaaaccgggccaaaattgtcccgaaccccccgggcgaaatggattgccaaaaacggaactccccccctttaacccaaaaaaaaccgcctttgaacctccccgccgaatttccctactctccctccggtccctttgaccaatcctcccggtacaagtggcttccacgctcccactcttttatcgccgtcccaccggaaccgcacggcaccaacccgatcacagccgaatctgtttccaggcgattcttcaccgcgttagcgaacgccattcctggacctactccacacactttacctgtgtcaatgtcaacgtgtagtggctcgtgtgcttcttcccaccggagatctgcggacaggcggaggatcgatgagtttggtgcgcattccggtggaaggattttatcccacacccagcgattgttgtggtggtctttgaagacgccgccgcgtcctgccatattgctttgtccagagagtatgaagatctgatttggtggaattggagattggatctccggt

SEQ ID NO: 81577 - DNA, 1082 bp, Arabidopsis thaliana columbia
  unsure (1)..(1082): unsure at all n locations
nnnnnnnnnnnnnnnnnnnnnnnnnnnnnnnnnnnnnnnnnnnnnnnnnnnnnnnnnnnnnnnnnnnnnnnnnctttttttttttttttttttttaattgtcnaggaaagaatattatgtgtgctctacatggataacaaatttacatataatcagtaccatcgtccatcacttagactgcatatcacctcttgggagatgtagacaaacaaacattaaactgctagatcacactgaaaataccacaatttctcaccaatacccgatcgtcaacttgattgtctagcaaaagttggaaaggtaagcttgaggctaaggagagaccaaagctggacttgagccctcggtggttaagtgaagattgtcggactttagcggcaatcccttagcatctacacagaccacattcgacagtttcagtcccaactgtgcttctctcaccttatctatgtatcctcctcccgatgctattgccacctgaataatgggaagagaaggaaggttgagatcatgacggaggttcttaatcaaacgatccatattgttcccgtagctctcggcgtcatggatgtccaacacgtcactctctccttgataccacaacaccgccttgatctctccgccgcatttcctactctcctccgttctcttgaccatcctctcgtacaagtggcttccacgctcccactcttttatcgccgttccaccggaagcgcacggcaccaacccgatcacagccgaatctgtttccaggcgattcttcaccgcgttagcgaacgccattcctggacctactccacacactttacctgtgtcaatgtcaacgtgtagtggctcgtgtgcttcttcccaccggagatctgcggacaggcggaggatcgatgagtttggtgcgcattccggtggaaggattttatcccacacccagcgattgttgtggtggtctttgaagacgccgccgcgtcctgccatattgctttgtccagagagtatgaagatctgatttggtggaattggagattggatctccggtcggacgcgtgggtcgacccgggaattccggaccggtacggcaacggaca

SEQ ID NO: 81578 - DNA, 706 bp, Arabidopsis thaliana columbia
atgtttgcatatcttcatcttcttcttgagatgaagttgaagttgtcatcaatctccatgaatcataagaatgtgcttctcatcaagctcatctccgctattctgatatcttttttcgcgttccgtctcttcattctccactccagcgagttttctccaatctttgcgtcggtcaccggaaaattcgaagctcggtttctgccgccggagattatcgtaccggaaaatgaagatctgattcctcaagatattgaagtagagaagtgtgatcttttcgccggaaaatggatcccagattcagtaggaccaatctacacaaacaaatcatgcggatcactcattgacggtcaccaaaattgtatcaccaatggccggcctgacttagattttctctactggaaatggaaacctcatgactgtttgttaccacgttttgaccctagaagatttcttcaacttatgaggcataaatcttgggcatttattggtgactccatatctcgtaaccacgtcgaatcactgctttgtatgctctctacgattgaagaaccggttgaagtataccatgacatggagtacaaatcaaaacgttggcatttccctttacataaccttactgtatccaacatatggtcgccatttcttgttcaagccgctattttcgaagattctaacggtgtctcgaccgcttctgttcagctacatc

SEQ ID NO: 81579 - DNA, 980 bp, Arabidopsis thaliana columbia
aggtgacactttgaagactatgacgttgcatggcccccttccttagcctggattcttttaaaccggccgccttttttttttttttttttttaccttggataatcaaccttttattgataacctcaaaaaaatttggggggtaggaaattcaccaccttttaattgccccttccaaaaaattccactcttgacccacttactacaagaggctgccgctttatagacgacccattaattctcagaaaaaaattccccccacccttggtccatggatgaaagaggaaacggttttgaccaaagcattgtgaaggattatagatatttgagggtttttggttttttttctttgagtagtatccgtatatatgaaggatcaaccagccattttggttaggcggtgaacagtacttctagcgattctattcccgggatcaatctttagaaccatccttaggtcttcagctccgagtttgtatttctccatgctctcgtataacagtgctcgttgaaccagaatggtcacattcttcttgtcgtgatcaagtacctttgtgcagtcggctacagctttcttatactctccaacttctttgtaacacgaagcccttgttgaaagaacctcggctgatccagcttcatcaccagctctctggttatcaatgcccttgttcttagctgatgtagctgatacacccggtggaggcggtggcaaaccatcaagctcggtggtggaaccagccccaccgtcaaaactttcaaatccccaatcttcggtctgtggcgtaggtggtgcagctgagggtttggaattagagaacattcctaatggatcatcgtttgcactcgaagattgtggaccacttggttgcacaccaaaatcaacgtttgaagcattgaagctacctcctgatgagaatgtgtttgatttcgaagcctgcggacgcgtgggtcgacccgggaattccggaccggtaccgcaa

SEQ ID NO: 81580 - DNA, 1645 bp, Arabidopsis thaliana columbia
tgagtaatttaggaagtcaatgagaagaaaagaacgattttttttttttaattcccaacttgtgttcgatctctgagcagctcttatctgatacaaccatttttttggatataatatctaaatttgtagtctttagtttaattcagatcccaattataataatgcccttttgatctgatccacattgcgtatcaaaggctattattattttattcccagagttcaattatttagttggtagaatctctctgtgttgttgtgaatctgtctgtttatgtaaatcaattcaaaaggttgtgacttttgtgtttgacttaggaaaatggaagtgaaagctagagctcctgggaagatcatacttgcaggggaacacgctgttgttcatggatccaccgctgtagctgccgccattgatctctacacttacgttactctccgctttcctcttccatcagctgagaacaatgataggcttacacttcagctcaaggacatttccttggagttttcatggtccttagccagaatcaaagaagcgattccttatgattcaagcactctctgccgttctacgccggcttcatgttcagaggagacccttaaatcaattgcagttttggttgaagagcaaaatcttccaaaggaaaagatgtggctctcctctgggatctccacgtttctctggttatacaccagaattatagggttcaatccggctacagtagtcattaactctgagcttccatacgggtctggcctcggttcatcagcagctttatgtgtagctctcacagctgctctccttgcttcttctatttcagagaaaacccgtggtaacggttggtcatctctcgatgaaaccaatcttgagttgctaaataaatgggctttcgaaggcgaaaagatcatccatgggaaaccttctgggatagacaacaccgtcagtgcatacggcaacatgatcaagttctgctcaggcgagataactcggttacaatccaacatgcctctgagaatgctaattaccaacactagagttgggcgaaacacaaaagctctggtctctggtgtgtcacagagagcggtaagacatcctgatgcgatgaagtcagtgttcaacgccgtggattctataagcaaagagctcgctgcgatcattcagtctaaagacgagacctcagttacagaaaaagaagagagaataaaagaactcatggagatgaaccaaggtctgctcctgtcaatgggggttagccacagctcaatcgaggctgtgattctaaccacggtcaagcacaagcttgtctccaaacttacaggagctggtggcggcggctgcgtcctcactctattaccaaccgggacggtggtggacaaagtggtggaggagctcgagtccagcggttttcagtgtttcacggcattgattggtggtaacggagctcagatttgctattgatcaggtcggaaaaatcatatttggcctctcaccattcttaaacttgctgacgtgtacgtcaagaaggctgcaattagaaattcaaagagtcgattttttcttataaatgatgtgttgaatgtaaaattgctttattattataccatgtgacaaataattgaaaaaagctaaattactcacgtttac

SEQ ID NO: 81581 - DNA, 388 bp, Arabidopsis thaliana columbia
gcgtccggaacattcttgcggaacgagcgacctacagttccagagagaactccatcaatggcttcaagggaactgcttcagctaagagaaagacaaactgtctctggcttaagggaagggttccataacgggagggaaaatattgtccatgaaaatactagcaacactgataatgataatatcaatacttccacaaatgctcttgcaattgcaatcactgctgggaattctcagcgtgtaaccgatgagagttcaacttcttccagacaagggaatgatagtcccattttgcctgataactcagaaagcaacctagcaaatgcggatagagactgggaagaggataccaatcaaagaaggatctggcaggaaaatgtcccagtagatg

SEQ ID NO: 81582 - DNA, 876 bp, Arabidopsis thaliana columbia
ataacgtcgatggcacccttccgtaagctggaatcctttaaagcggccgccctttttttttttttttttcggcagggcaggaaaaaagctgcctgaactgttcatggtactagttctcgggttggtcccactgatcctgtgaagatcctttcaccaatcatacaagattatgtaaatgagattccccctcattaagatttctttttttgttactctgaaacaaatatttctttttcatctttttaacgcaaatccctacataaatcctaaatattttagagtttgagcaaatatttacactagctccatttgttccaattgtctgatggcttgttaaatgtcgaggctgatgtttgcgtgggattgctcttaggcatcttcttcttcaacttctttgggctctccatgtgagagacaatgtgagatttccactgggttgtctctgaactactgtcatgtggaggatgatcgcgaacatggcgaaatatgtggaaccaacactgcagcatcaagagcagcatactcaagctgattctggctcaaaggcctttgttcccagccgctattgcgtcttgttttgttcaaagacactcccaatattttcttcgttagtcctgctaaaccaccaaatggttcattaaaaacattttgaatgtctagcaacatgtcgtatcggtcgaaacatttcaaatccccatatgaaagcgccaactgcttgatgtcacattgaaaattgtaaccgagctttaatgtactcttcgattgcaaaatgtgactaaggcagttgtccagaatttcagaggcgtcattgtaaagctttatcacggacgcgtgggtcgacccgggaattccggaccggtactgcagacggccaat

SEQ ID NO: 81583 - DNA, 965 bp, Arabidopsis thaliana columbia
  unsure (1)..(965): unsure at all n locations
nnnnnnnnnnnnnnnnnnnnnnnnnnnnnnnnnnnnnnnnnnnnnnnnnnnnnnnnnnnnnnnnnnnnnnnnnnctttttttttttttttttttagtgaaatcagtgaatctcgaaaataataataacgatcaatcagattcaaaaaggaattaaaatattcaagaagaagacgaagaagaaaaaaagaaagagtcagtgaattaacaaaaatcaagaagaggttcggttaatactaagtccttgaaagagccaatgaggtctgttcttctctcgatccaccgacgtcgtacttgagcctgctcataggcgtgtttggtccgctactttcttggttatcactgctgttattatatagattatcattgctctgattattacaatgatccgatgatgatctcattgacgttgttgacgagtagtccatgtcattgttcgtcgtcgtggtcatagtagtagatgaagaagacaatccaatgctcaatgtcaattagagttcgctctgttagatatgatccgtcgtcgtttgtgttgctctaaccacattttcgaggtctatgcctgaacaacttccggttctctctcttgaaccgggttggtctttgttgttaacagtccaatagtggcttctatgtttcagttgagtcatcatcattttccgtgtatgatatactttatgcagctctcgtacctgctgcttaaaaatatccttttgggcttgcactgtatgtctgatggattcagcattttgcttttcaagaaacctatccactgaccttaaaataaaaactcgttcttcttcgtagtgtgtcaacgtctcctttgacgattcttgtggaccattaacaacaaatattgatgaacccactatgatcaacactctttaagccactttggtcggacgcgtgggtcgacccgggaagtccggaccggaacggcaatcaacatccaaaggggggggccggg

SEQ ID NO: 81584 - DNA, 357 bp, Arabidopsis thaliana columbia
acgaaaatcacgtttccaaacgtggattttgcaagcccagcaaaactgaagcggcagattttacgtcaggaaaggagaggtcaacgaactttagagctgatccgacaagaaaaggaaactgatgagcagatgcaagaagcagccattcagaagtcaatgagctttgaaaactcagtcatagggaaatacagtatatggaggagagactatgagagcccaaatgctgatgctatcttgaagcttatgagagaccagatcataatggcaaaagcatatgcaaatattgccaaatcaaaaaatgtaaccaatctgtacgttttcttgatgcagcagtgtggagaaaataaacgtgttata

SEQ ID NO: 81585 - DNA, 649 bp, Arabidopsis thaliana columbia
  unsure (1)..(649): unsure at all n locations
nnnnnnnnnnnnnnnnnnnnnnnnnnnnnnnnnnnnnnnnnnnnnnnnnnnnnnnnnnnnnnnnnnntttaaaactatttacacaatgatttaaggttttgtaacaccagtattatgtaccaaaaatatagtattggagagaaaaccatggtatatacacgaaaaaacacaggcctcagttacatttccctatatattattacttacaaaaagaaggaaaaaaaaagaactgacaagtataatactaataatttttacgattaaaaaaggcaaaaatctgagtcaccccttcttcttttcgttttccctacccatgaagcaattccgaaccttcagctcaggctagctccgatattggtgacactcagctacgacccaccgggccaccgtgttaggcccaaacttaggcccgtataaactccaaaaactatggcttctaacttcaccacttttcgaaacaggagagtttatacgtcgacgtttgagaaggggcgttccgtagcctcgttggatttcaaacggggacacggcaaaccataggtggggaacaatttgatccgtccttcccaaccaccgggggactataaccaatccccggggtgggatgacccgacgtctcggacgaaacggggatttgatnggttcggtt

SEQ ID NO: 81586 - DNA, 930 bp, Arabidopsis thaliana columbia
gacctatagaagacttttgagtcgcatgcccgcgttccttagcttggatcctttaaaacgggccgcccttttttttttttttggaaatggaccttcctccaaaaagggttacctttagaaaaccggtcaatggaaccgaaatggattttaaattatccgggtattattttaccttatattatccttttattggaccagccagctggggggggggctccatttcttctttggtccttcaaaggcttcctattactgcagatggtttcttatcatcgagtctagaagcaaacctctcagagatgcttattaggcctactctttcgagtatctttattggttggccgcgcagtttatcgatcaatatcttaccatctctcgattcatccccttccgcgatcacttttatgtgctcggctctcattttcggcttcagtgaagcgtcatcgcctcccaaaggaactgctccaagaacttcccctaagaacatgtcgatgtgcgtgtatctcctgtgtttctgatgaaagaccttgcaatcctttacaagcaaacccgtttcacaaaaccccgaccttctggtgtttccggtcgaggaaatagacgcctatcaaagcaattgttgggaaagaccccaccttgtgcttgtgttgctagagggacgagtgtgatgtttagagcggattcaagaacggtccttagctgctaaaggatcaagaaacatattgaattcagcatatgcatttgaaggaatcgtgaaaatgttccctttgtctgatttctcacggtttatatgtccacccacgatgtaaacttccttgattagtgaggatgattttttatctgatgagataatcttggctaagttagttaacggtccattggttagtacagcggacgcgtgggtcgacccgggaattccggaccggtactgcg

SEQ ID NO: 81587 - DNA, 763 bp, Arabidopsis thaliana columbia
  unsure (1)..(763): unsure at all n locations
nnnnnnnnnnnnnnntcgttnnnnnnnnnnnnnnnnnnnnnnnnnnnnnnnnnnnnnnnnnnnnnnnnnctttttttttttttttttctttttcgttctttttccactttattaacataaaatttattcaaacaaggaaaaaattacaaatggaataataccgtttttggatcggaactcacaaaagggaatggttttgttcatgttgtcggaatctaaaaaaaaagctacaaattgggaacaaattacaaagaaacatgggagtgtacaatgcgtgaagggttgttgttgttattctctcatcatcagttttatgaaaccgaaagaaaaaaaggattttgttttgttttgtctgtcctcggttgtcacttgttgtcgtcccatccagattccgagcagacaagagaaaaagggcaaatttttatgtttttttttgttggttctcatcaggtaaagaatttacatgtaatcattgacgccggagctaccggagccgactccaacagttctcttgctcatgttagctctctgcaccaatacaaccaatgcttgcaccacttcagacatgggtggtctaaactctggctccggctggacgcaaagggcgataacatctgcaaatcgggagagggatttaaccgggtatagccctttgagagctggatcaaccattttgcccaaagcatcaatgtcgtgaagctgaggtgttgcccatcttaccaatgattgttccgatcttgaccttgtgctgtcgaatggtttt

SEQ ID NO: 81588 - DNA, 265 bp, Arabidopsis thaliana columbia
ctcttcctccatcggtggaaacttgttacccttgttcaaccgctcctcacgctaaagctccctctcctcctgagattattgctcctgttcctcttggaatttatgatggtggtcaaaagaatgttgtcaagattacgtgtgtcttttgctgaaccggtagaagaagtcagaccaattgaaaccattatagagcatgatcatgatctagacgaagattatgatgaagaaagtgtgggcgatgatgatggtgttgttgttgtggttg

SEQ ID NO: 81589 - DNA, 671 bp, Arabidopsis thaliana columbia
  unsure (1)..(671): unsure at all n locations
gnnnnnnnnnnnnnnnnnnnnnnnnnnnnnnnnnnnnnnnnnnnnnnnnnnnnnnnnnnnnnnnnnncttttttttttttttttttttttaatacgaaaaaagacttacataaggattagtttcacaagctaaaatgcacaatacaaaaaagactcaaagatgcatactaaaaaagtaaaaagacaaaccgctcaagattcataggctttgaatatcatctttgcagtttcattcacgagtccagacctctgcaaacatagctcaaactgcttagccttaagcttcttccatttctcctccacttctctcttctcagctccatccggcaacctttgcccaaaccgcagttaatgtggattcatccaaaccacaagaactcccattatctgcattgaggaacgatgcaatctctttaccaatggagagacctgtgttcacaacctttgcctctgttctttccggtttcttcgcttcttcttgttgtttcttgggagtagagtgagctactaacttcatctctttcggtgcaggtgttcctccaactttcttccttgatgatttaccagtaaccaaaacaccattgcttccccaaatctttctggacaattcaaaacctttttgctcaagatctttagcaaactcaatatcatcttcagtctttcctcgtgcc

SEQ ID NO: 81590 - DNA, 558 bp, Arabidopsis thaliana columbia
  unsure (1)..(558): unsure at all n locations
attgannnnnnnnnnnnnnnnnnnnnnnnnnnnnnnnnnnnnnnnnnnnnnnnnnnnnnnnnnnnnnnnnnnnnnnnnnnctttttttttttttttttatggaacaatgtcattgtttatttcatttgacgaactggtccagtattacacttcacacgttttatctttaataccgaggttacttgaattgtaaaagaaactaatactagaaagccattgacgatgggcagctacgaggtgtcgagatcctcagtcccttggtactggttttcaaccattctaaatacttggtcgctcccacccagggatggggcaacgcaattacttctggcacactaaaggtaacaagtaaaccatatttattaacttagcttgtgtgattgctaaagaaaaggcaagacactcgcattactcatgtttttatatgcagaatacgtcatagaacaatgcttactcgtattcgtgatttgcattgacatgctcggttagaggttctagaagggattgccttgttttgattatcaggagctcctctgaatcactctgaaccttcccctc

SEQ ID NO: 81591 - DNA, 1837 bp, Arabidopsis thaliana columbia
  unsure (1)..(1837): unsure at all n locations
ccnnnnnnnnnnnnnnnnnnnnnnnnnnnnnnnnnnnnnnnnnnnnnnnnnnnnnnnnnnnnnnnnnnnnnccacgcgtccgcggaaatttctccttctccggtgtcgaatcgccgagggaaggtgatttttccgggaaagtctccgttttgtttcacctaatcatctcaaagactcgtcctttataaatggcgacgacggtcatggcccttgcagagaaagtactcgaaagagtttacggaacttccaaatccgccgtttccgtaacaagcggcgacggcgaaaagactcaccgtcatacccatcatcacattcaccgtatcaaaagctacgacgacatcgacgaggatgaatcatcattggagcttatccagatcggtgctgagaggactaagaacgtcttgatcctcatgagcgatactggtggcggtcaccgtgcttccgctgaagccattcgtgacgctttcaagatcgaattcggagacaaatatagagtaattgtgaaggatgtgtggaaggaatacacagggtggccattgaatgatatggagagatcatataagttcatggtgaagcatgttcagctatggaaagttgcttttcacagcacatcacccaaatggatccactcttgttatctagcagccattgctgcttattacgctaaggaagtagaggctggtttaatggagtataagccggagataatcattagtgttcatcctttaatgcaacatattccattgtgggttcttaaatggcaagagctacaaaagagagtcctttttgttactgtcattactgatctcaacacttgtcatcctacttggtttcatccgggggtgaataggtgctattgcccgtctcaagaagtggcgaaaagggcgttgtttgatgggcttgatgagtctcaagtccgtgtctttggtttacctgtgaggccatcttttgcacgagcggttttggtgaaggatgatctaagaaaggagcttgagatggatcaagatcttcgtgcggttctactgatgggaggaggggaaggtatgggtcctgtgaaagaaacagctaaagctcttgaggaatttttgtatgataaagagaacaggaagcctattgggcaaatggttgttatctgtggacgtaacaagaaattggcatctgcattagaagccattgactggaagattcctgttaaggttcgaggatttgagactcaaatggagaaatggatgggagcttgtgactgcatcatcacaaaagctggaccaggaacaatcgctgaatcgctgattcgatcacttcctatcatcctcaacgattacattcctggacaggagaaagggaatgtgccgtatgtagtggagaatggtgcaggagtattcacaagaagtcccaaagagacagctagaatcgttggggaatggtttagcacaaagacagatgagttggaacaaacttcagacaatgcacgtaaactagctcagcctgaggcagtcttcgacattgtcaaagacattgatgagctctcagagcaacgaggtcctcttgctagcgtctcttacaatcttacctcttcttttgccagtttagtttgatgtcccatgtttatattaacatgtctcccttagtagttcttttgtctgttattttttcctttccttatattccctaatttgtttattgattgaagttgtatgtattatttttaagcaaaaggttcatgatgtctttgcaaaaaaaaaaaaaaaaaaaaaaaagggcggccgctctagaggatccaagcttacgtacgcgtgcatgcggcgtcatagtttactatagttcagttcaatcaagc

SEQ ID NO: 81592 - DNA, 630 bp, Arabidopsis thaliana columbia
  unsure (1)..(630): unsure at all n locations
cttatagaagagctatgacgtcgcatgcacgcgttacgtaagcttggatcctttagagcgggcggccttttttttttttttttttttttaattgaaaattttgatgaatttgattaaaaccccaaaccgggttaaacccaccttaaaattccagggggtttggtttttaccttcaagaaaagccaactttccccgaccaaggtggtttttaaccggccttttaattttttcccagaggatcagttgggacagtttttaaacctccaacccagcattccatcacacgagttcttgataacttgaaagacaaatcgaatcctcatgtcacctattcctcttctctttccggaggaaggccgcagggtaatagcattttctgcatgaaattgtagcgttctcgtccaatagactcgttctcagcaatagcaaagtatgaaagcatagggtagtgaccaatgtatgaagcataactatcacgctgaatgttcacagcccactcaaatctactcaaatcagcatgaccggttccaacatatttagcttgaagatgctcaagctnagaattgatgttaaacctattacttgcctgcatntttttcagagtttcgcagcaactagaagnaggagaag

SEQ ID NO: 81593 - DNA, 508 bp, Arabidopsis thaliana columbia
  unsure (1)..(508): unsure at all n locations
cgatatcagacaaaaatgtacaagaaattaagatcagtccagggataatgctgttgattttcaagagagctgcgagtcatgttcctttgaagattctatcaatcgaagatggcactcttctgaagtccttccatcatttgcttcaccgaaataagaaagttgatttcattgaacaattcaatgaaaagcttctagttaagcaagagaacgagaatctacaaatacttgacgttcgaaatgctgagctgatagaagttagcagaactgacttcatgacaccatcagcattcatattttttgtatgagaatcagttgtttctaacattcaggaaccgaaatgtttctgtgtggaatttccgcggagagcttgtgacctcgtttgaggatcatcttctttggcatccagactgtaacacaaacaatttttccatacaagnggtcaagtcttggccacccnaatttcaaggaggttctgagggcccttggttnnagggaatcngggncggtt

SEQ ID NO: 81594 - DNA, 741 bp, Arabidopsis thaliana columbia
  unsure (1)..(741): unsure at all n locations
aggtgacactatagnagagctatgacgtcgcatgcacgcgtacgtaagctgggatccctagagcggcgcgcccttttggtttggggtttttttggcttccaaggaaaattatatttggatttctttttggacaaatttttttccttaatggaaaccgactttccaaaaaaaaaaacctaaaggaaaattttcggaaattcccctcttttttcctatctctctcactgattaggtccaagggtctttctttactttacacaaatgacccatacaaagaaatctgaccttcccaaatatttaatatctcttcaaaacctaactcttttatttttcctctccttaatacttacaaaataaccacaaaaaaacactagatacttaataaaacttaacccagaaaattgctccgttacctatttacactcttgaaaaaagcaaactccaaaaggatcatcgatctcctctttcccccctcaaagattccacacaacatctcaatctccttaacacttataatttacggcggcactaaatggttttttttttttgggnggttaaccncaaaggggatnnatggaaaancctaaaaggggtcggttcnggggttcggtttctaagccaagggcagggatgctgaagnttccgggaancccgggaaagggaaatcnaancccttaaancttaacccttgggggggntanccaaaatggccttaaaaaaaatncccntttccnccnnggg

SEQ ID NO: 81595 - DNA, 754 bp, Arabidopsis thaliana columbia
tttaaaaaactttaacttgccttgcccccttccttaagcttggttcctttaaagcggccgcccttttgttttttgtttttgcaagtaaaacaatctatttttataacttctaacaataatgggggtaggacaaccgaaattgtccagtaaatgaaaacaaaacacttgaaatttttgttcaaatagatggttgattcattgactgctgcaaaatcctaagatttctatgaggtgatggttatgtatcatctttatgctcttctctaccccaatcactcccattgtgtgggcatcttgcacaaatgactcctgagagaaccgaaaccggttatggaagctcttctcaggatcgccacgagctttcttataaaggattgtccccaaaaaccggcaagaatcgataccgaaatcaagtacattgcgtatggtattgggaatctcttgaggagatagaactcgactacggataaggacgaagaaaacatcatcacaaaggtagctgttgcgctagcaacctgtgggatgactccaatctcaagaagcaaaggcccgagaacaaatccaccaccggatccaaggagaccacctacgatacctccaatgagaccacagagaccacagaagattagactcagaggagtccactcgatcgtagcttcacagatacatttcagtgttgccactgtttaacctctttttgttcgctgtatacaatttgcttgcttcaaacccaaacaccgctaaagcaactggg

SEQ ID NO: 81596 - DNA, 571 bp, Arabidopsis thaliana columbia
  unsure (1)..(571): unsure at all n locations
nnnnnnnnnnnnnnnnnnnnnnnnnnnnnnnnnnnnnnnnnnnnnnnnnnnnnnnnnnnnnnnnnnnnnnnnntctttttgttttttgttngatgcatgtcnagagctnttattgcgaactggtaaaagaaacactccatacatannatcgtcatgaagacggggaagtactaccgaacaaacaagagagggtttaaaagaaccaaacacaaaagagaaaaaatcgacataagttgtcttcagatgacttggactctcagataggtgatgatgataatcaaaagcacaacgacgggtgaaggtgttgatgagggctcgtaacttagatgcgccataacagaatctttcagcttaaccggcgattttcctagagtagggattggaaggctgtgtaggtctgaggaacatgtcaccactttctcccacccaccctgccttcatcgccggttgttgttgcctttgactttgagtccatcttcctccaattgttgcatttgccagtttatttgcagtctctgatgctccacgggaaaagacccngttcttttccatagatgctgcaagtggactc

SEQ ID NO: 81597 - DNA, 445 bp, Arabidopsis thaliana columbia
  unsure (1)..(445): unsure at all n locations
tttttttttttttttttttaagatatataatcacattctgattcatgatttgctttaaaacatcagtactcactatattacaaaacaaatacaccgtaaaaaatcgaaaataaatgctgaatgaatcattttgttgtttgttcccaaaagtcttcaataaataactttctttctataaatttttcaaaaacaaacaatgtctgtctctgctgttgttttcaccaaatgtgttcttcttctaccttccacgaggatgaacaagctgcgaaaacaccgcactagtagtcgcgtcttccgcatcatcatcagtcccggtccccgaatttactcctcctctatcgattatacccctcactggtatcaaagggttcccattggcgccattggaaccccggaaagggggttnnaaaatggaaagggggcccaaaaggcggaaggtttcccc

SEQ ID NO: 81598 - DNA, 608 bp, Arabidopsis thaliana columbia
  unsure (1)..(608): unsure at all n locations
nnnnnnnnnnnnnnnnnnnnnnnnnnnnnnnnnnnnnnnnnnnnnnnnnnnnnnnnnnnnnnnnnnnnnnntttttgtttttgttattaaaacctaaattaaaaaacacattctgaatcatgacttgggtttaaacatcagtcctcactatattacaaaaacaatacctcggaaaaaaatcgaaaaatggatgctgcatgaatcatttttgtcggtaggccccaaagtttttgaggggtaaactttttttctttaaattttcaaaaaacaaccgatgccggtctctgctgttgttttcaccaaatgtgttcttcttctaccttccacagaggatgaacaagctgcgaaaacaccgcactagtagtcgcgtcttccgcatcatcatcagccccggtccccgaatttactcctcctctatcggttatactcatgactgttatcaaacggttccattggcggccagtgggaatccctggaatgggggtggtactatgggcatcaggctccatcaaagccgaagatgtttcttctagctgtaacgcgtactccaaatccacaatacatctcccatagaaggccggtccacaccgtattccgctaaacatttc

SEQ ID NO: 81599 - DNA, 521 bp, Arabidopsis thaliana columbia
  unsure (1)..(521): unsure at all n locations
nnnnnnnnnnnnnnnnnnnnnnnnnnnnnnnnnnnnnnnnnnnnnnnnnnnnnnnnnnnnnnnnnnnnnnnncttttgttttttggtttggagtttaaagataaaaaagttataaactaattatacaaactgtattattcttttcttactcaagacacagaactaccttcttattattactgcatattacaaaaataataacaataataatgttacaaaatctcatatgttttctttatcgcctttgtcccatagcaaccacagggagagtcactttatgccctcggcttcctttcaatgtaacctgtccgaagctataagctccagtcactgatctcactgttagagtcaccgaaaaggttctagaagcgcccgctcttactgtcattgcaggaggactcacttcgatggcgattgctggctccatcctcgatgtgattgggtatgtttcttcttcttcccgaacattcgtcactcttctggttacggtttgtgttctgacgagatgagagatggctatg

SEQ ID NO: 81600 - DNA, 489 bp, Arabidopsis thaliana columbia
ccccttccttaagcttgggatcctttaaagcggccgcccttttgttttttgtttttttatgtaagcttttgagcgtttcccttaactcgcaaatctggactacttaacctacacaatttttcctaacctaagaacataaggagagaagttgggtcagatctttggccggatcatacatggggggagcatgttggctccaaagggcggtccaatagcagcagaagaaaacatcggctggaatcaacaatgttgctgcctcttcccattcagagtaaaaccttttttaggtcagtgggactgtgcttcgagaaggatgtttgtggcggcgttgacatcattcctggcgtgcacaagcgcctgtctcgctgcgtttctgtcgaatcccattgataccaatggagttatggcttcctcagatggctccacacttgagggcaacggagctggctgatatctctctgatcgacgccctgtgttaggtgatatact

SEQ ID NO: 81601 - DNA, 559 bp, Arabidopsis thaliana columbia
  unsure (1)..(559): unsure at all n locations
ttcnnnttnagngnattcancagntcnagacaaaaaannctaacccggaaaagccaaatganccncaaaaagaataaagggaggaaaggnatcacgacggaacccgaaactgcccaggatgatgatgatgatgatgaacacgataggagacctctgtaggagcttctacttcagaggatgagatttgaacttaccctacaaagcctatcggtttaatgtaagaagataaatggtctaacttccctctctcattttcctctccgtgttttctgttatcatcatcatagcctgtttcttttgctttcaagcattgatccgtctttaagagcagcgtgtgcttcgttctcttgtcctagagctgatagagctacagcttgaagataggatgcgatatgccaagccggagatatcacttgggcttgcattgcatcattcagcgcctcttggggcatctcattcattaggtaacacagacttcttcttgcataaacagtcggggaaaccattgtcccaccctcaatgaactgagaatagcagtcgatggcatttgcaaattctt

SEQ ID NO: 81602 - DNA, 814 bp, Arabidopsis thaliana columbia
  unsure (1)..(814): unsure at all n locations
cggcccgctggtttgatttcgttnnnnnnnnnnnnnnnnnnnnnnnnnnnnnnnnnnnnnnnnnnnnnnnnnnnnnnnnnnnnnnnnnnnctttttttttttttttttttttttttttttatgcaaatctcaaatgatcattgacaattcaaagacaaagtactctcttctttacattacatactataaaacattgattacaaatcatggaatccatcaaagcaaatccacaatcacaccatttccagtttttctaaaaatcaaatctccatcaaattatgaaacttttttcttcttctgtatagcagggaaatgttcatgccagtaaccaagaacataaaaagagtctaattcgcggtagtagaccaaatgaatgcttccaataagaaataaaagagaaggaaagggtatacacgagcggaacccgaaactgaccagtgatgatgatgatgatgaacaccataggagaactctgtagtagcttctacttcagaggatgagatttgaacttatcctacaaagcccctatgggggcgtttcggtttaatgtaagaagataaatggcctttagctttcctctctcattttcctcttcgggttttctggtatcatcatcatagcctgtttcttttgctttcaagcattgatccgtctttaagagcaagcgggtgcttcggtctcttgtcctagagctgatagagctacagcttgaagatacgatgcgatatgcccagccggagatatcacttgggcttgcattgcatcattcaacgccctttggggcatttaattcttaggtaccacaacttttttt

SEQ ID NO: 81603 - DNA, 891 bp, Arabidopsis thaliana columbia
  unsure (1)..(891): unsure at all n locations
nnnnnnnnnnnnnnnnnnnnnnnnnnnnnnnnnnnnnnnnnnnnnnnnnnnnnnnnnnnnnnnnnnnnnnnnnctttttgttttgtgttagattattatttttcttctttttgaaagaaaaacagctagaaagtctgtttgttattgaacaaatgattctacgaaaaaagacctataatctaatacaaaaggttatacacaaacccccctcctatgattcatccctattgacatataatggagagataagaagaagaaaaaaaaatcaaaatgatgaaaaaacctagagaaagatcacaataccttaccaatttataacttaaaaagatccaaatctcttactatactcactcacacaccagaaggttaactcaaagatatcaaatatcaacctaaatggttccttggttgtcttattcttctcgcccttcatcatataccactcggcatcgtctttaactcgttcaatgtcgttctaatctgctcttgaaccaactctaatctccttgaatacacttccaattccagaatccgggttgttccctccaccgctcatctgcaaccgccttgtttcctcctccctctacaccaaaaccgaaattgaacggccgtgtaaacatggggcttagcgagccaaaaccatgaccaccaccaccaccaccaccaccaccaagacccggaaaccctcctcccattgcagccatcatcatacttgttgtcccattcatcatctctttgatcacaggagagacacagtttttcacagtctcttcgatcgaacccccgagatttcctccaataccaacagctgcagcttcgttgaggttgacattgctagctattggcccatcagagagagtgatgacaggtttgttgtcttcctcaatcttc

SEQ ID NO: 81604 - DNA, 1252 bp, Arabidopsis thaliana columbia
tcagaacacaaaagtttggctacagttgtgttctgatagtgatgatcatgatcatcacatgaataagtagaagatatctcttaccttctccttcttctaataagatcagagttttggttcttatttctttgacctctcaaaacaatgggtagatcaccgtgttgtgacaaattgggtttgaagaaaggaccttggacaccagaggaggatcagaaacttttagcttatattgaagaacatggtcatggaagttggcgttcattgcctgagaaagctggtctccatcgatgcggaaagagttgtagactaagatggactaactacctaagacctgacatcaaaagaggcaaattcaacttacaagaagaacaaaccattatccaactccatgctctgttaggaaacagatggtcagcgattgctactcatttgccaaagagaacagacaacgagatcaagaactattggaacactcatttgaagaaacggttagtgaaaatggggattgatccagtgactcataaacccaaaaacgagactcctttatcttctcttggtctatccaagaacgcagctatacttagccacactgctcaatgggaaagtgcaaggcttgaagctgaagcaagactagctagagaatcaaagcttcttcatttacaacattaccaaaccaaaacatcatctcaacctcatcatcatcatggattcactcacaagtcattgttacctaattggacaacaaaaccacacgaagatcaacaacagcttgaatctccgacatctacagtgtcattctctgagatgaaggaatcaatcccggcgaagatagagtttgtcggatcatcaactggtgtgactctgatgaaagaacctgaacacgattggatcaattcaacgatgcacgagtttgaaactacgcagatgggagaaggaatcgaagaagggttcacgggtctcttgctcggtggtgattcaatcgaccggagtttttccggcgataaaaacgagacggccggcgagagtagtggtggtgactgcaactactatgaggacaacaagaactacttggacagcattttcaactttgtagatccttcaccgtcggattcaccgatgttctgaatctaagggttgatatttgttgggaatgtttttgattctttttttagtttctagtttttgtgcttaaactctgattagacaatttttaaactaatccaatttttgcgctaaaaaaaaaaaaaaaaaa

SEQ ID NO: 81605 - DNA, 589 bp, Arabidopsis thaliana columbia
  unsure (1)..(589): unsure at all n locations
aggtgacactatagaaagactatgacgtcgcatgccgcgtacgtagctgggatctctagagcgggcgcctttttgtttttggtgtttttttcacacaatttttctttgtaaacgaagcctgagcctgaaaggttattaaacaaacccacaaatgttgagaacacacacacgccctaccatcaaccccaaggggtcatagaattagatataaatttcagtgacccggccccggccgatggattggttagcaactcaagggacttcttgagatgttctacagcagccgagccttcatcaaaagccaaagctcccacagcgaatctagcagccttgagtgcctctgcaaccttctcaggccctggctggtaagctggctatcgtaatgggacttctgagctgaactccggggcaggatcttagcacggggaggcaatattgatacgcccgtttgattgagtaaggtggaaggaggaggagcaaaggggaagcttgttggaagaaggagcaggtgcaaagtgcggggaagannagtaaaggttccgggntttgganttaaaaaggnattngggnanngatgggggngnccccc

SEQ ID NO: 81606 - DNA, 898 bp, Arabidopsis thaliana columbia
  unsure (1)..(898): unsure at all n locations
attcaatcgctctttcgtaaaaatggcgagttttgaggaaagctctgatttggaagctatacagagccatctcttagaagacttgttggtttgtgatggtttcatgggagatttttgacttcgatgcttcttttgtctcagactttggtgtatagaaccacacgttcctaaacaagaacctgattctccagttcttgatccggattctttcgtcaacgagttcttgcaagtggaaggggaatcatcatcatcatcatcaccagagctgaattcatcgtcatcaacatatgagactgatcagagtgtgaaaaaggcagagaggttcgaagaagaagtagatgctagacattaccgaggagtgaggcgaaggccgtgggggaaatttgcagcagagattcgagatccagcaaagaaaggatcaagaatctggctaggaacatttgagagtgatgttgatgctgcaagagcttatgactgtgcagctttcaagctccggggaagaaaagccgtgctcaacttccctcttgacgccgggaaatatgaagctccagcgaattcaggaaggaaaaggaagagaagtgatgtgcatgaagagcttcaaagaactcagagcaattcatcttcatcttcctgtgatgcattttagcatattaagagtgtgagcagtttccttaagttgtataaagtaattgtacagaggaaacgaattgtgtaggtttagtgtgcttgcaagttgcaacaaatgtgtatggatgttctgtttcttcatgtccctaagatttagaaacatcttcttatttccaaaaaaaaaaaaaaaagaaagnnnnnnnnnnnnnnnnnnnnnnnnnnnnnnnnnnnnnnnnnnnnnnnnnnnnnnnnnnnnnnnnnnnnnntnnnn

SEQ ID NO: 81607 - DNA, 616 bp, Arabidopsis thaliana columbia
  unsure (1)..(616): unsure at all n locations
nnnnnnnnnnnnnnnnnnnnnnnnnnnnnnnnnnnnnnnnnnnnnnnnnnnnnnnnnnnnnnnnnnnntncctttttttttttttttttaataaaagccgttcattttataactcttctttacaatagattggaattacaaaaattactctactcgatagtaattttttatcctaatcttttctactaatagcaaaaaaaaaaaaacgaaacgagcttccgtttacctcttctctcgtcgtttttttttacttttcaaagcagccgttacattgccgttaactcattggaagcaaaacattatcaccgttaccatttccggcaatctgaacgttaccgtcaccaccgtcaccttcctctagccaccgttgcaccggagcacaatccattttatgccgggagtttccaatctaaagcttgacaagcgcgtgaacaataattaacaacgccacaaaccggacatcgcctaaactcatgcttcctcgtctccgggcgtccacaaccagcgtgtgaacacaatctcaacccatctcggggaatcccgcgggaaaggnccatcgggaaaaccatcnggggtggttcggggggaataanccaacctaganggagttggcngg

SEQ ID NO: 81608 - DNA, 769 bp, Arabidopsis thaliana columbia
atacgactcactatagggaaagctggcccgcctgcaggtaccggtccggaattcccgggtacatctttcgcgtaacatttgttctaataagaaatttgtctcttgctttaacaagaagcaagactagccttatctgtacctttctttctgaattaaagaaccctttaagattcatatgattttcttaattcttttttatatatgtagatttgtttcttaaacactatatttatgttttacaataattgttttatatgttttcaacttctttgtagatttgcttcttacacacactaatgttttatctttgcagagaaacttgacatttatggagtctgtgaagaccaaatcctccaccgcgaggagcgttgagctaccgcctcgccgtggaaaggtgaagcgagagatctttggtttcttagccaattccattgtttccgccgccgtgaaagctggtggatcgtttaggaggaacggcggaggtggtggtggtggctcttcttcctaaccaccactcctccagggagtggatacacctccgaccagaacaacgaatccacttaaacaacaaacagacataaagacataattatgaaagtgccaccaccatggcactcttgagaagaaagctgagtggttctgttcgtttttgaaaacagaacgctacttttttctccaagtccggttcggttttatggtggtttgttttcttatgtgtggtacgacccggtttaacttcgtttttttgtgggttaaactgggaatacgt

SEQ ID NO: 81609 - DNA, 422 bp, Arabidopsis thaliana columbia
  unsure (1)..(422): unsure at all n locations
actatagaagagctangacgtcgcatccacgcgtacgtaagcttggatcctctagagcggcctcccnttgngtnnaaaancccnnnnnngtttttagaacacaaacttgaaccatttaaactcttgtggctgagcatttagggccaacaatagttttccaacagaccaaaagaaagatttaaacattcggacttattttaatgatttctctggtttggagaaaacgagaaaggtggaactgctttggcttcaagttacaaaggctgaccactgatccacctttggaacatgatataactctcctctggggtatactctggtgtgtgtcctcctcctttgatagtagcaaatgccatctaattggcataggtcctcgtggnatccagcganntgatcncccngccatccaagggctccagnca

SEQ ID NO: 81610 - DNA, 453 bp, Arabidopsis thaliana columbia
attctgaatacgtttgatgaacgtatcagttcatttgctgaacaaaagttcacgcgagatggtattgatgttcagactggaatgcgtgtaatgtctgtgactgataaagatatcacagtgaaagtcaaatcaagtggagaactcgtaagtattcctcatggattgatattgtggtccactggagttggaacccgtccagttatcagcgacttcatggagcaagttggccaaggaggcagacgtgcggtggcaactaacgagtggttacaagtgacaggatgtgagaatgtatatgcagttggcgattgtgcttccatagctcaacgaaaaatcttgggggatattgcaaacatattcaaagctgcagatgcggacaactcatgaaccttgaccatggaagagttagaaggcgtggttgatgatattattgtgaggtatccgcaggtggagctc

SEQ ID NO: 81611 - DNA, 743 bp, Arabidopsis thaliana columbia
  unsure (1)..(743): unsure at all n locations
nnnnnnnnnnnnnnnnnnnnnnnnnnnnnnnnnnnnnnnnnnnnnnnnnnnnnnnnnnnnnnnnnnnnnnnnctttttttttttttttttactaacaaaaattgtgtattcaccctttgtagcttgattcttagcccttaaccctaaacaaatcttccccttttcacttattaggggggtcaagattatttacaggctcgggaaaaggtttagcggatggattcctaccaatttttctctatttaaaaaacattctctagtctctcttcttatggagtttgacatggtacccatttggaaactgtaatccaggcgttcgagttatattccctccttttatctcctcccacctgtattttgttaccaagctgtgaagaaacgcagccatctgcaattttgtgaagtcggttccaacgcagaacctcatacctccaccaaacgccatgaagtgctttgatgcgtttgtaacttttgatccctcccatcttgatggattaaagactaaaggatctttatacatttcgggattcaaatgtacagctggtggacagaccatcaccgcccagccggctggaatcgtataatctttgaattttatatctctcaacgcctttctgaagattgcaggaactatatttgctagtctcgcggttccgtttatgaactgaaatgtgtaagtcattgacttgtattcttcccatgtaagtccagagtctgcatcttgccggtttctcagaattgtc

SEQ ID NO: 81612 - DNA, 558 bp, Arabidopsis thaliana columbia
  unsure (1)..(558): unsure at all n locations
aggccacaaacggtggcaaanaataccannnagcacaaaaattaccctcccctgaacaacccaggtaataagccttaaacctgcaacaaaatgtttagcggtgtacagacactgttctcaccgcattctcctgaaaagcaatgctttggtgtcctgattgtggcatgccctgattggcagctaggcctttggtttcatctgattcccctattatttactccaaagatttggcatcagtctttgtttgcctgattttccatattgaagcgccactgtcatcatcaagttggccttttgtaatggtcaaaagggctaaactctgtggagtcgcattggcatcttctgctatacaactcagatctttgttcttaacttcatcaattccttgcttcagtatcttctagtgagcaaatgtccttcctgggggcatatcatggtcatgttttccctcgtatgtcgttataagcaacttcgcatcacaagatgacctttctacctgtttcttgaccgcacatccagaacttgaacatctatagtaactcctgattcagcagttac

SEQ ID NO: 81613 - DNA, 856 bp, Arabidopsis thaliana columbia
gatgaaattattttggattgaatggatcattcattactcatactaaacaaggaatcccattcttattaaaatggtgcttgcaagttagaaataacagaaaggcaggcactcaaaaagaaaacagaaacaattgacttgggaactatgcgatatgggtacaagaaaaatttgatcaccaaatgcaaacagaatctccgtcttctctacaggtactttcttgcaagtgcacgtactttggtgtcaaaatgtgacgacgttatccgagaacccgggagatacaagggattcagaagaatctttatataaagctcatgcacctcttgaaagaagctcttgatgccgtcctaattccgtgaatcatgaaggagcatcagtcgggtatggcctgcggtaacatatactgacacaaccagatcgttaaacctgtccactgacttcaagaacatggcacttgtagtccatgctaggtcttggacaacatctaacgctgcatgtaatataaattggtgcaactgtgcagcatcttctcttttagcagcagatccaacttcagcttcatagatgggaatatcattccggcccacaatgataaagcaggcagtgttagccatagaatccctcgtctctaaataaaggaaatcctagatcttgtgtctccaaaaaaagaagtaaaaccctgtgaatctgatgtgcgtatcgtttcttctttaccatcaacgcatcttatgtctagacaaacattggagaatcagattccttgggatgtctctcgtgtttggatccgtgctaaatacttcaaacaggtttgattctgtcgtgtactagtttaggactatacaccacgagaactttttag

SEQ ID NO: 81614 - DNA, 742 bp, Arabidopsis thaliana columbia
  unsure (1)..(742): unsure at all n locations
nnnnnnnnnnnnnnnnnnnnnnnnnnnnnnnnnnnnnnnnnnnnnnnnnnnnnnnnnnnnnnnnnnngccgccctttttgttttttttttcgcgaaagaccatctgacacacatgtaacagagtcacttcaatgtcgacaacattaagtttccacaaagatcccatcaatgtttctttgttggtctgaatatgagactctaactcatttgctggactagtcccatctttctttattctccggttactctcttcttgcagctgaagtaactgtaaagctcctttagctgcactaatctgtgatttccaagaatgacctttgttcctaacccattcagctacaaatggaactcctaagtaaagagctctcttcccaagttcttgagctgcttgtcttgtgtatacatatccaattgtatgcaacatatccgctccaaaagctgcatctgaaagtctcttggcttcagattctgcgcggcttatgaatccttctttgtctccgtggacatattgactcagaaaatctttgagaaaccttgaaaggttttcttctctttctttctgaacagcctttagtttgccttgaaactgatcagagttttcgatttcagaagccatttgagtggaagccattgatgcaacagccaagtgaccgatataatcctcgaatagttcacttccgaaaagaagagcgaaaacagccgttggatcaaccattgtttctttgggagctgagaattttcc

SEQ ID NO: 81615 - DNA, 576 bp, Arabidopsis thaliana columbia
  unsure (1)..(576): unsure at all n locations
nnnnnnnnnnnnnnnnnnnnnnnnnnnnnnnnnnnnnnnnnnnnnnnnnnnnnnnnnnnnnnnnnnnnnntcccttttttttttttttttttttcagaaaaatgaagagatagtagatactcaaaaatacaaaagcaaatgtgacacctatgagaaagtaaacctttcactagttttattaactttcaagtccaaaataatctttcataatcaagagtttattagcttcaacaataacattcaactcaaagtacaggggataaactatgggtctctttgtcatggagttccttcactgatagttcctaatgatctttgccaccgaagaatatgtccccaaggtcccgcttaccaccccgatggccacaatgatcgaactcagaatcatctgtgttcttgttgctttgttccccattatctttatgaagcataaagctggcattattattgccactagtatactgagaagagatcctataagagccatcataagaccaaaaaatggaataaggaaagcagaacaaacagaagaagcgacgagtgctgttcttagaagaagagagcaccatatgttct

SEQ ID NO: 81616 - DNA, 709 bp, Arabidopsis thaliana columbia
ccggcaggtcccggtccggaattcccgggtcgaccacgcgtccgctcggtgaggctgtcggtgttgaagggctggttgtcggtctgcgcgctcagcgccagcagcgcgcgccgcgagaagcaggtaccgacaccggccgacggcaccatgccggaaacactttcgcgcaccaccagatccttggcatgccattcggcgaactcgtccatgtagacgccggccaccagttcgtaccactcgcggtccagcgaggtgaccggcaactggatcatgtccttgcgcggcaaaaggtagttgtagaagcgcagttccatcgggtgcagcacgtcctcgctgtcgtgcaggatcaccccggcgaactcgatgtcgtggcgcttctcgtaatcgaagatggccaggatcagccagttcaggcagtcggccttgctggtcggcccgtcatgcggcacttccacgcggcgcaggcgcttgtagcggcggcgcatgcgctccacttcgtcgatggtctgctggtcgttgggataggtgccgacgaacacgacgtactcgcggtaatcgagtacgttgatcatgttctccaccatctgcgcgatgacgtcgtactccatccacgccggcaccatgatcgccaacggctgggcggccgctttaaaggatacccagcctacggacgggtgccagcgacgtcaaagttctttaaaagtcccct

SEQ ID NO: 81617 - DNA, 515 bp, Arabidopsis thaliana columbia
ggactgcaggtcccggttccggtttcccgggtcgacccagcgtccggtttttttttttcgacctctctttctttcatcacgaaaaatttatacttatctcaaataaaataaaaatatatatatatggatatgaagggaacatacttagtaacggttattctcttggttagtacgttaagtgtggggatgtgttctaacggctggataagagctcatgcaacgtattatggtgtcaatgatagccctgcttcacttggaggagcttgtgggtatgacaatccgtaccacgccggattcggagcacacacggcggcgctaagcggtgagctattcagaagcggtgagtcatgcggtgggtgctaccaggtgaggtgcgactttccggcggatcctaagtggtgtctccgaggagccgccgtgacggtgacggctacaaactttggcccaacgaataacagtaatcggctggtgcaatctccctcgccatcactttgacatgtcctcccccgctttct

SEQ ID NO: 81618 - DNA, 509 bp, Arabidopsis thaliana columbia
ttttggaagaacttgacacgcgcatggcccccttccgtagcctggattcttttaaacgggccgcctttttttttttttttttgggaaaaatggtctttccctttattttaaatcctgcaaaactttttaacctggccgagtatggcttcatccttaattgaaaacccgttccgttaattaaatttaaccttgaatttttttgccattaaaggagaaccaaaggacccctgcccatttaaaacaggggcatgttcagaaataagcaaagattggcgttttgaccagagcacgacttagttttgtagttaaacgaattgccttcctcgagaagagaaggtttggccaaaccaccaagaagaagggacaacgttcaaaaatgtctgcgttttgctgtccgtcagagtaactttgaaggagagtctctgtccccggagatcaccggagctctgccagttggcaccccaattacgggtcatctgaggccaagtctttccctttgagcctctcac

SEQ ID NO: 81619 - DNA, 507 bp, Arabidopsis thaliana columbia
  unsure (1)..(507): unsure at all n locations
ttccgactcgaccacgcgtncggccactttgacatcaatagtgggtatgggtacaagtaaacagaccaagaatatattccttcctggaactcccattcgtattcctgctgcagagttcaccaactcaccggctcttatgtaagttcatcctaataattcattaaattaatatttccttttattttctcgattttgattgatcatctttagtaaatgtgactaagggccagagttcatatgtgatttgtatatctcatatatagtcaaactaagtagaccatataattatggggttgttgtgttgtttggagaagtaatagagggttgttttatcaaacaccggttcttaaaccatatctttatccctaactttggcaggaagccatgtcaaatttgggttggtggaataccaatgatccgcttggtccgggtcaccatggtttggaccattgaaaatctggtcagagcggggattttttatgtatacaaaaatatatatttaattta

SEQ ID NO: 81620 - DNA, 781 bp, Arabidopsis thaliana columbia
  unsure (1)..(781): unsure at all n locations
cgaaaaattcatttcacttntccnataacaattcaagattaagctatgggttatgaaaccaaatcgactttggacaccgagagatcgaccgcgccaggaaccggcaccacgacgaagagttgttcgatgactcaagttgtcctaagatttgttctgtttgcagccactttgacatcaatagtggtaatggttacaagtaaacagaccaagaatatattccttcctggaactcccattcgtattcctgctgcagagttcaccaactcaccggctcttatatactttgtggtagcattatccgtggcatgcttttacagcattgtatctacatttgtcaccgtatctgctttcaagaagcattcctgctctgcgggttctcttgctaaatcttgccattatggatgcggtgatggtggggatagtggcctcagcaaccggggcaggaggtggagtagcttaccttggtctgaagggaaacaaagaagttagatggggcaaaatctgtcatatctacggcaaagttttgccgtcatgttggaggagcaatcgccgtctcattgtttgcttcgggtgtcctcctcctcctatccatcatctctgtcctctccctctacaagaaaatccgttgagtcactctctttgtttcggtgtttcctctcaaagggaatacaaaattgttggatgttttttggttttcttattttggggataatctgtcggagttggaccttgtatgccgccttagntctgtaagcgttgattannaantncgttngcngng

SEQ ID NO: 81621 - DNA, 518 bp, Arabidopsis thaliana columbia
acccacgcgtccgcccacgcgtccgtgaatctctaaaaacagtagagagagaaaccttcttcttctttcttcttcttctacaaaatttcacaaaacgagagagaggagagattcaaacaaacgaatcaacaggtgagaaattcgaaatctttgcgagctcgtctcgcccagaatctcgatttctccacctttcctcttcaattcatcttccaaatccctaaaaaaaagactcaaactttttaattttggtccaaaaaagactcaaactttcttcatcaatggcggagaaaatcacgagagagacgtcgttacctaaagagagaagcagcccacaagctctaatcctgggacgatacgaaatgggtaagcttctcggccatggtaccttcgctaaagtttacctcgcacgtaacgtgaaaacaaacgaaagcgtagcaatcaaagtaatcgacaaggagaaagttctcaaaggaggtttaatcgcacacatcaaacgcgagatctcgattcttcgacgt

SEQ ID NO: 81622 - DNA, 623 bp, Arabidopsis thaliana columbia
  unsure (1)..(623): unsure at all n locations
gttcgaattccgggtcccccaccctccgcttggggaaaatccgttgcttccggagatcgtgaaacctctggaattcaagttaaccgattttcagaagccgcgggttaagccaacccttgattggttgccgaagggagggttccaccggaacctgaagaaagaccggaagagccgtcctgccgaattgggggatgttatgggattcaacccctggaaacccggcgaagaagtcccccgtggcggggctgttggggatgtcgggaagcgagaagagtaagaaaatgatggtgtcgtccggagcaatagggtatctgaagaagctgtcggagatggaagtaatgggcgccgataagcttctcgagaagcttggaaaagaggaaagctaagaagcttctttcaacccggtaaaaccgaacgatgccggaagacattgaagcagccaagataaaaagtgtaatattgtctgatgtaagtttattaaccgttagttaaactttactagtaattaaaaagtgttctttgggctgnnnnnnnnnnnnnnnnnnnnnnnnnnnnnnnnnnnnnnnnnnnnnnnnnnnnnnnnnnnnnnnnnnnnnnnnnnnnnnnnnnnnnnnnnnnnnnnn

SEQ ID NO: 81623 - DNA, 504 bp, Arabidopsis thaliana columbia
  unsure (1)..(504): unsure at all n locations
gctagtgggagaatccggttgcatcccggagatcgtgaaacttctggaatcgaagtcaaacggatgtcgagaagcggcggctcaggcgatcnctggattggtagcggaaggaaggattcgacgggaactgaagaaagacgggaagagcgttctgacgaatttggtgatgttattggattcaaaccctggaaacacggcgaagaagtacgccgtggcggggctgttggggatgtcgggaagcgagaagagtaagaaaatnatggtgtcgtacggagcaatagggtatctaaaagaagctttcggagatggaagtaatgtggcgccgataagcttcttcgagaaagctttgaaaagagggaaagctaaggaaagcttctttccacccggtaaaaaccggaccgcttccgggaggccatttaangcaggccaaggtaaaaaagtgtaatattgcctnntgtaagtttttttacccgtngtttaaccttttccctngnantttnaaaa

SEQ ID NO: 81624 - DNA, 689 bp, Arabidopsis thaliana columbia
  unsure (1)..(689): unsure at all n locations
taggtgccactatagaagagtctatgacgtcgcatgcacgcgtacgtaagctcggaattcggctcgagtgtctcttcccgattctctagggttttcaagctcaacctcaagctccactacgatctcttcttcttctctaatctcagttgaaagatgcaaggtgtgattcgatccttcgtctccggtggaaatgttgtgaaaggctctgtgctgcaacatctccgtgtgattaacccggcgattcagccttctgtgttttgttcacgctctgaatcaactcaacctgcacgtatggaggaatctggattcgagagcacaactatttccgatgtcatgaaatccaaaggcaaaagtgctgatggatcttggctttggtgtactactgatgacactgtttatgatgctgttaaatccatgacacaacacaatgttggtgccttggtggttgtgaaacctggtgagcaacaagctcttgctggtatcattaacagagagagattatctacgggagaatcattgtgcaagggngatcatccaaatcaacaaaagttgngacattatggcctgagggnataanctttncctggggcnccggggnccaaggnttgcggncatnnaactggtngccantanccggtncgggaatccnggaaccaaaanagggngtttttgaanggnccaaggnantt

SEQ ID NO: 81625 - DNA, 562 bp, Arabidopsis thaliana columbia
  unsure (1)..(562): unsure at all n locations
agatttttnnnnnnnnnnnnnnnnnnnnnnnnnnnnnnnnnnnnnnnnnnnnnnnnngtaccggtccggaattaattcccgggtcgacgagctcactagtcggcggccgcccttttttttttttttttttttaatgatggattgatggtggagaatggagatgttgtccgtgcagtggttcatgagcatagagaggagcttcaacgcctaaatgcgtatattcagggaggttactagatcttgaataatggaaagaaaagagttccctgttgtgtcgtctggtcttgtgctgctgaatctgaaaagcttccagatcagtgtaaatatgcagtcctcgttgttattgttgttgttgctgtgtttgatgttttgtgttgtttcgttgtttaacttgtcaaaactaaggccttgtgctgcttctcttcttgcgcttacttagcaagagaataaaaccaaaaactctgatctctttatgaaaaaaaaaaaaaaaaaagctcgagccgaattccgagcttacgtacgcgtgcatgcgacgtcataactcttctatagtgtgtcctaa

SEQ ID NO: 81626 - DNA, 1239 bp, Arabidopsis thaliana columbia
  unsure (1)..(1239): unsure at all n locations
aaaaactggaattgcactccccatnnnnnnnnnnnnnnnnnnnnnnnnnnnnnnnnngctgtgccgtaccggtctcgaattcccgggtcgacccacgcgtccgcaaaaaactctccactcaactctctctggtcagctgtctcttccccattctctagggttttcaagctcaacctcaagctccactacgatctcttcttcttctctaatctcagttgaaagatgcaaggtgtgattcgatccttcgtctccggtggaaatgttgtgaaaggctctgtgctgcaacatctccgtgtgattaacccggcgattcagccttctgtgttttgttcacgctctgaatcaactcaacctgcacgtatggaggaatctggattcgagagcacaactatttccgatgtcatgaaatccaaaggcaaaagtgctgatggatcttggctttggtgtactactgatgacactgtttatgatgctgttaaatccatgacacaacacaatgttggtgccttggtggttgtgaaacctggtgagcaacaagctcttgctggtatcattacagagagagattatctacggaagatcattgtgcaagggagatcatccaaatcaacaaaagttggagacattatgactgaagagaataagcttatcactgtgacaccggagaccaaggtcttgcgtgctatgcaactgatgacagataaccgaatcaggcatattccggtaatcaaagacaagggcatgattggaatggtggccataggagatgttgtccgtgcagtggttcatgagcatagagaggagcttcaacgcctaaatgcgtatattcagggaggttactagatcttgaataatggaaagaaaagagttccctgttgtgtcgtctggtcttgtgctgctgaatctgaaaagcttccagatcagtgtaaatatgcagtcctcgttgttattgttgttgttgttgtgtttgatgttttgtgttgtttcgttgtttaacttgtcaaaactaaggccttgtgctgcttctcttcttgcgcttacttagcaagagaataaaaccaaaaactctgatctctttatgaaagatatgatgtttgtttttgttatcaaaaaaaaaaaaaaaaaaaaaggnnnnnnnnnnnnnnnnnnnnnnnnnnnnnnnnnnnnnnnnnnnnnnnnnnnnnnnnnnnnnnnnnnnnnnnnnnnnnnnnnnnnnnnnnnnnnnnnngagagtatcat

SEQ ID NO: 81627 - DNA, 782 bp, Arabidopsis thaliana columbia
  unsure (1)..(782): unsure at all n locations
gaaaaagccgaggcagtacgtgatgaagaaggtggcgccgagtaaggtttggccaccaatagctctcggagcgtcgatggcttgttggtacgaacacattagccgtaccatttgtctcctcatatgcaaacaccaccgtgtttggcaattcatcgccggtgtcttgacccgaaacaacaggactgtaaactttttaattgaaggtttcatgtgtcacacacacaacgcagcatggcatactctacataacattatatgtgggacaggaagcaaactcgatacgtatctagacatcgtacgagataaactaaagtgcaacgtgaccatcttccacggaggagacgacgaactcatccctgtcgagtgtagctacaacgttaaacagcgaattcctcgggcacgagttaaggttattgagcacaaagatcatatccctatggtcgttggcagacaagatgagtttgccagagagctccaagagatttggaagactttttcttgctaaaattatgtttgatgagagaacttgtgatttattaggattgttctatgtaatgggttggtaaaaatatttttaagagttttataattacaaattaaggaaatccttatgtatcatgagataatccaggaaatggagtattaaataaaaatttcgcatctgttttttatgcttcnnnnnnnnnnnnnnnnnnnnnnnnnnnnnnnnnnnnnnnnnnnnnnnnnnnnnnnnnnnnnnnnnnnnnnnnnnnnnnnnnnnnnnnnnnnnnnnnnnnnnnnnn

SEQ ID NO: 81628 - DNA, 1145 bp, Arabidopsis thaliana columbia
  unsure (1)..(1145): unsure at all n locations
gaaaaatttcgcttttctctctacttcaaaacttttgataatcttctttaaactttcttcttcgatctctctttgttaactttctttcgttacgtctctctcgttctcgttatttcttattctcagatcttggattcacgaccatctcgatcgttgaccgtcgaatttgggttcggctaaaaatccaatctttttttttccggtgagaagctcgagagagtatataatttaataaagggtacgtacgattttggttgagtgttttgatgatgttgacccaatttgttggggtgtgaagtatacttatggaactgattgtcacaatacaagaagaacaacatcatcaacaaacaagaataataagatgacactttatattcgtcgtgaatcttccaagctatggaagagattttgctctgagatatcgacggagattggtcttcttgctgagaactggaaatatcttctcgctggtcttatctgtcagtacattcatggtttagctgctaaaggagttcattatattcatcgcccgggaccgacacttcaggatcttggcttctttcttcttccggagcttggtcaagagagaagctacataagtnaaaccgtgttcactagtgtgtttctttcgtttttcctgtggactttccatccattcattctgaaaaccaaaaagatatacaccgttttgatatggtgcagagttctagcattctnagttgcctgccagtttctccgtgttataacttttctattcaactcagcttcctggccctaaactatcactgccgtgagggcctctaaaagtttctagggttgccatggcccaaaagcgctcttagggttctcgagattaacccgcatggggtgatgtatggatgcggagacctgattttttcatcgcacatgatattcactctagtctttgtccgtacttaccagaaatatggcactaaaaggttcataaagctgtttgggtggctcactgcaattntncagagcctcttgatcattgcntctcgtaaacattacagtgtcggntgtagttnttgcaatggaatactnngnaaatttggggggggggtcntttttngcaaagaatttcccngatttccccanttgggctctnntgtttttncccc

SEQ ID NO: 81629 - DNA, 655 bp, Arabidopsis thaliana columbia
  unsure (1)..(655): unsure at all n locations
ggtcccggttccggattcccgggtcgacccacgcgtccggaaacggtgaatctggttttgggttgggaacaggtggttatgcagcaagaaacccaggggctaacaaggcagcaccatcctcttcattctcttctgcctcagcaaccaacaacacgggttatgatacagcaggacttgcagagttttacgggaatggtgcagtttatagtgaccctacatggagatcaccaactcctgagacagaagggcctgctccttttagctatgggattggaggaggggttccttcttcagatgtttcagctagaagttcatctccaggttatgttggcagttacagtgtgaacaagagacaaccaaacagaggaattgctacttagtacaatcgtttttgttttacccacgatattgtaggcgagccatcacggtgaacgatctgtgtcttttggcgaatcttttagattatcttcttttcccttcatacaaagccagtgaggccggaactgntcatatcatcacctagggctaaccagggatcccgcangcttttctgccatgggttggttccaatatccatggtcccccagggttttccgngtcccttttttccaatttggtcccttcccctcataagggggaaaaaaccgggcgnatc

SEQ ID NO: 81630 - DNA, 584 bp, Arabidopsis thaliana columbia
  unsure (1)..(584): unsure at all n locations
cnnnnnnnnnnnnnnnnnnnnnnnnnnnnnnnnnnnnnnnnnnnnnnnnnnnnnnnnnnnnnnnnnnnnnnnccacgcgtgcgtgtgtcttctttcttctccttctcacttacttaacccataagccatcaatcccaaacacaccattacaatggcttcttctatcttcttcttcttccttatcttcctctccgtcgtctccgccgtcaaactacctctctctcccttctcccactccgaccaatcaccaaaagacccttacctctctctccgtcgtctcgctgaatcctcaatcgctagagctcataaactcaaacacggcacctcaataaaacccgacgaagatgctctctcctccaccaccaccgcatccgccaccgtcgtgaaatctcctctctctgctaaaagctacggcggatactcagtctctctcagcttcggcacaccgtcgcaaacaatcccattcgttttcgataccggaagcagtctcgtttggctaccttgtacctcaagatatctctgctccggttgcgatttctccggtttggatccgactctaatccctagatttatccccaagaact

SEQ ID NO: 81631 - DNA, 817 bp, Arabidopsis thaliana columbia
gcaggtaccggttccggattcccgggtcgacccacgcgtccgcggagcttccacagtattgaaatcaatactcgacagagcttccgagcttatccgggctaataatttcaacaacgcagggatagctctatggcgcgcttcctttaatgagttctttaatatgttgatgaggtactgcatcagcaaatacgatagcatcatgcagagtttgcaattgccactcgcattttgccactgagatatctgaagaagctgcaaaagccattgtccgcgaaatgccaatagagcttctacgttcaagtttcccacacattgatgagcagcaaaagaggatacttgatggggtttttgaaacgatctatgctcggaagccagaaaaccgagccagtattaagttgataggatgaagattgaaacagtaaaatccaaaggaacctgtatggtgaagtctgtatatgaaggcataaagatcacgcagataccgcgggaagaaaggtagagagaatcggttcaaactttttctttttccatccgagagttagggttcttccttcaaatggacaatactggttttgtgtcttataggtaaaagcagtggagaagaagtttggtctctgtacagagaaaaaagtctttaggttttgcagaacttatgaagaggtttcaggcaattggaattctgtcctttggttaggtgatctcaatgtcggttcgaaaattggttttgaaaccctggttaaggttttgaaaaaatctccttcccttttttttaaaaaaaaaaaaaaaggcggccggtttaaaagaatccaggctaagg

SEQ ID NO: 81632 - DNA, 566 bp, Arabidopsis thaliana columbia
  unsure (1)..(566): unsure at all n locations
gcagggtacccggtctcggnaattccccgggtcgacccacgcgtccggcgcttcaacaacttcggtggatcacatgttgctacgcctaagcagattagagatcttatgaaggtcgatggtttaactaatgacgaagttaaaagtcatttacagaaatatagattgcatacaagaagaccagctactccggtagtaaggaccggtggtgaaaatccacaacaacggcagtttatggtgatggaaggcatttgggtaccttcacacgatacaactaataatagagtttacgctcctgtggcgacacaaccgccgcaatcttcaacgtcgggagagagaagcaatcggggttgcaaatctcccgcaacatcttctactactacacacacaccacaccttcttcctctttcataaatatatagttaccgatttgtatgaaaatttgttttcttctttatatatttgttttgtaaccaaggatgttcgttctaggtttaagagttttgataaattgtancaataggtntncatngcacncaattggntaaangnaaaggtttngtnnaaaa

SEQ ID NO: 81633 - DNA, 561 bp, Arabidopsis thaliana columbia
  unsure (1)..(561): unsure at all n locations
nnnnnnnnnnnnnnnnnnnnnnnnnnnnnnnnnnnnnnnnnnnnnnnnnnnnnnnnnnnnnnnnnnnnnnncttttttttttttttttatatgtaactcattttttttagcacaagacagtattttcacaacagcacatgtttcaaatggcacaatgagggtacaacatacactaggctactactatatctctttataagcttctacgagaaaaccccattagccaccgattataaacttttgctctctatcttcctcttacccgaaaagtaagatcaggtctgtttttaagtcttacttggcgtcaaacccgtccatagctagaacgtgaagagtagtaaccagtggaagagacagcggaaatgtactgccatgcaaaagcagcaatcaccagaaccataaattgcggctatccacggctttcatggaagtgtatacaagtggcattttcccaaattctgccacaaaccggtttacgcagtgtgttcttttttctgtgtgccctcctatgctactnattccagttgaaccgntttcatatnttttacctttaanccatat

SEQ ID NO: 81634 - DNA, 5110 bp, Arabidopsis thaliana columbia
  unsure (1)..(5110): unsure at all n locations
ctcgattgctctcaagaacccaagtgacgtctggtttcagctgatttgtttcttctcattctctatcttcttctctgggaaatatcgattttgatctattaagagctgctacgagctttgggatgtggtgagatgcttgttctatctcgaacaatccgccggttgttgattttaaacaaactctctatcacaaatctttcccgatcatggattttattgagatctcgttgatctttcgagagcatttgccactactggaactatgttcggtcatcatcaacctcctactctttcttgtctttctatttgctgtctccgcgaggcagattctcgtctgcgtgagaagaggcagagataggctctctaaggacgatacggtttcagcttctaatcttagcttggaaagagaggttaaccatgttagtgttgggtttgggtttaatctgtctttgctctgttgcttatatgtgttaggcgtccaagttttggtgttagtatatgatggggttaaggttagaagagaagtcagtgactggtttgttctttgctttccagcttctcagagtttagcttggtttgtccttagcttcttagttcttcatttgaaatacaagtcttcagagaagctacccttcttggtgaggatatggtggttcctggcgttttcgatttgcctctgtactatgtatgtcgatggaagaaggctagccattgaaggttggagcagatgttcttctcatgttgtcgccaatttagctgttacacctgctcttgggtttctctgctttctggcctggagaggcgtttctggtattcaagttaccagaagctcctctgatcttcaagagcctttgcttgttgaagaagaggcagcttgtcttaaagttactccatatagtactgctgggctagttagccttattacgctttcatggttggatccacttctctcggctggttcaaaaagaccgcttgagcttaaggatataccgcttcttgcaccaagagatagagccaaatcaagttacaaggtcttgaagtcgaattggaagagatgcaagtccgagaatccttcaaagcctccttctttagctcgtgcaattatgaaatcattttggaaagaagctgcttgcaatgccgtatttgctgggttgaatactcttgtgtcctatgtcggtccttacttgatcagctactttgttgattatcttggagggaaggagattttccctcatgaaggatacgtactcgctgggatattctttacgtccaagcttatagagacagtcaccacccgccagtggtatatgggtgttgatatcctagggatgcatgttagatcagctcttacagcaatggtataccgaaaaggtctcaaactttcaagtatagccaagcagaaccacacgagcggtgaaattgtaaactacatggcagtcgatgtccagcgcataggagattactcatggtatcttcatgatatttggatgcttccgatgcaaatagttcttgctcttgcaatcctatataaaagcgtgggcatagctgctgtagctacattggttgctacaataatctcgattcttgtcacgattccactcgctaaggtccaggaagactatcaagataagttgatgactgcgaaagatgaaagaatgaggaaaacctcagagtgtcttaggaacatgagagttctgaaattgcaggcatgggaagatcgttatagagtgagattggaagaaatgagggaagaggagtatggttggcttcgcaaagccttatattctcaggcttttgttacttttatcttttggagttcccccatttttgtcgccgcagttacattcgctacttcgatatttctaggcactcaacttaccgctggaggtgttctttctgctctggcgacattcagaattcttcaggagccacttcggaactttcctgatctggtttcaatgatggctcagacaaaggtttctcttgataggatttctgggttcttgcaggaggaagaacttcaagaagatgcaactgttgttattccacggggactttcgaatatagccatagagattaaagatggtgtgttttgttgggaccctttttcttcaaggccgacattatctgggattcagatgaaagtggagaagggtatgcgtgtggctgtctgtggcacagttggctctggaaaatcaagttttatctcttgcatcctaggggaaatcccaaaaatctctggcgaagttagaatatgtggtactactggttatgtgtctcaatcggcttggattcagtctggtaacattgaagaaaacattctatttggcagtccaatggagaaaacaaagtacaagaatgtgatacaagcatgttccctaaagaaagatatagagcttttctcacatggggaccaaactattatcggggagagaggtataaatctcagcggaggtcagaaacagcgtgtacaacttgcaagggcattatatcaagatgctgacatttatttactagacgacccttttagtgctcttgatgcacacactggctctgatttgtttagggattatattctatctgcattggctgagaaaactgtggtttttgtaacgcatcaagttgagtttctccctgcagctgatctaatattggttctgaaggaaggcaggattattcaatcgggtaaatatgatgatctgctgcaagcaggtactgattttaaggccttagtgtctgcccaccatgaagcaatcgaggcaatggacatcccaagtccctcctcagaagactctgatgaaaatcctattcgcgatagtttggtcttgcataatccaaagtctgatgtttttgaaaatgacatcgagactttggcaaaggaagtacaagagggaggatctgcttcagatctaaaggcaatcaaagagaagaagaagaaagctaagcgttcccgcaaaaagcagcttgttcaagaagaggaacgagtaaagggaaaagtcagcatgaaggtgtacttgtcatacatgggtgctgcatataaaggggctctgattcctcttattatactcgcacaagctgctttccaatttcttcagattgctagtaattggtggatggcttgggcaaatcctcaaactgaaggtgacgaatctaaagtggatcctactctgcttctcatcgtttatacggctttagctttcgggagctctgtgttcatatttgttcgagctgctctggttgcaacttttggtcttgcagctgcacagaaactgttcttaaatatgctcagaagtgtgttccgagcgccaatgtcattctttgattccactcctgcaggaagaattttgaatcgggtttctattgatcaaagtgttgtagatcttgacattccttttagactcggtgggtttgcttcaacaacaatacaactctgtggcattgtcgctgtaatgaccaatgttacctggcaagttttccttcttgttgttccggtagctgttgcttgcttttggatgcagaaatattacatggcttcttcaagagaattggttcggatagttagtatccagaagtctccaataattcatctttttggagaatcaattgctggtgctgccacaataagaggatttggccaggaaaaaagatttatcaaaaggaatctttatcttctagattgttttgttcgacctttcttctgcagtatcgctgctatcgaatggctttgtttacgcatggaattactttccacacttgtatttgctttctgtatggttttactcgtcagttttccacatggaaccattgatccaagcatggcaggtcttgctgtgacatatggacttaacttgaatggacgtctatcacgatggatacttagcttttgtaagcttgaaaacaaaataatctcaatcgaaaggatttatcagtacagtcagattgtaggagaggccccagcaattatagaagatttccgcccgccttcctcgtggcctgcaacgggaacaattgagctagttgatgttaaggttcgttatgctgagaatcttccaacagtactccatggggtgagctgtgtgtttccgggtggaaaaaagattgggattgttgggcgaacgggaagcggaaagtcgactttgattcaagctttgtttcgattgattgagccaactgctggaaaaattactattgacaacattgacatttctcaaattggtcttcatgatcttcgtagtcgccttgggattatacctcaagatcctacattatttgaaggaacaatccgagcaaatcttgacccacttgaagaacattcagatgataaaatctgggaggcgcttgataaatcccagcttggagacgttgttagaggaaaagacctaaaacttgactctccagtactggaaaatggagataactggagtgtagggcagagacagcttgtgtcacttggacgagcattactgaaacaagccaaaatacttgttcttgatgaagcaacagcatcggttgacacagcaacagacaatctgatccagaagataatcagaacagagtttgaagactgcacggtctgcaccattgctcaccggataccaactgttatagacagtgacctagttttggttctcagcgacggtagagtagcagagtttgatactcctgcacggctattagaagacaaatcatcgatgttcttgaaattggtaacagaatactcctcaagatctactggaatccctgaattatgatcctccatgttaaaaattcagtttagggggtttcttttctcaagaggatataaaagaactgatatgtgacaaaagcttaaggtctaaagtaagagagagttttccacagggtttaagaaaagaaaaagcatgaaaggatgccaaaatctccgcgcttaaaaaactttgggtttaaatctcttctgtcgaacattgggagaaactttttttgtatggaacagttagtttctttggttttcatgtttatcgcggccctgcaaaaacaaacaaaaaaaaaaaaaaaagnnnnnnnnnnnnnnnnnnnnnnnnnnnnnnnnnnnnnnnnnnnnnnnnnnnnnnnnnncaaattgnngtaccta

SEQ ID NO: 81635 - DNA, 520 bp, Arabidopsis thaliana columbia
  unsure (1)..(520): unsure at all n locations
ttgatttaaaaacagttggtggaaagcttactttgtaccaaacgaccctatgcgagagaatctcaggggataacattgatctcgggctagatctcgggtctcaaagctttttgccaacatacaacaaaaatgacatccagctgatatgctgtcaagctgatgcaagtnttttacggcctggcccctgacacagttgtgaccagattttattcaatcccttgactggggcacagatatggacatcacctttacttgggttcttaacagagaccgccctaaaggcaaggagactgtgaaatatgnaagaagtgtcgaccctcctggaccttccaaaacggtctgatatncaaatgggttcctcaatgggtcgattgggatggntttagggtgcataatttntaccccaaagttcttnccgtgtnacnngggtnctggnnnttgcaaggntttcggggggtnaaacgggttaaggtnagtcaggcatcttcttaccntgaaatttcaaggggnggngnaatcc

SEQ ID NO: 81636 - DNA, 744 bp, Arabidopsis thaliana columbia
  unsure (1)..(744): unsure at all n locations
aactttgaactcccatgccccccttccttaacctggaatcctttaaaccggccgccctttttttttttttttttttttttttgggaaaaaaaaccacaagttattgagtaaaaaatgaattttacaatataaatagccttttttggtaaggtatgtatcacaacactttatttatagagttgggttacaatgtatggaaatgtaaaattgaagttttcacttggggaactctacattatttattcttcaaggcattaaccatgatacttgggtttccgtgggaatgatactctactctcgaagacgcaccattattccccaacacactgatctagctgacagaaagttaagaccacttcaatgtcatgatgcaccaccacaaccgtagaaacttcagccggttttaagcggctttccaagcagacaatggtggtgtctcagcgttcttgaaagttggtatcatgttactgtatctatctcctttcacaaaacctggttgggcaatggcctcaagctcagtcatctcttcaggagtgagtttcactgacaaagctccaatgttctgtttgagggtctcgatcttagtggttcctggggtagggcaacggcatctccctnggnggtgacccatgccagggntagtttncagggngaccttttttttccggtttngacaaactttntanaaanaannttttggggcaaggttccccctggnnttgnaggnccttttnagnaaccttt

SEQ ID NO: 81637 - DNA, 581 bp, Arabidopsis thaliana columbia
  unsure (1)..(581): unsure at all n locations
cgcacagtttgaagcgtgagggcagtccaaggatggtgaacatgaatgaaactgcaaaaccggctaataaccggaaaaggcttaaaccaggagagaacccaagaccaaggcctaaagatcgccaaatgatccaagatcgtgtcaaagagctgcgtgaaataataccaaacggtgcaaattgtagcattgatgcactccttgaacgtacaatcaagcacatgctctttttgcaaaatgtctccaagcattctgataagctgaagcaaaccggggaatccaagattatgaaagaggacggtggaggagcaacatgggctttcgaagtagggtcaaagtctatggtgtgtccaattntcgtagatgatataaacccgcctcgcattttccaagtcgngatgttatgcgngcaacgaggattcttttcttggaattcggagntttggttcnagaagnttagggttaccggttttttntgggggtcatnggaactncgggnggcaagntttggggntgnttcnctttttagggggnntcgggccgttccgnggnttgnattntttttcaccttgggttttttttgg

SEQ ID NO: 81638 - DNA, 766 bp, Arabidopsis thaliana columbia
gcggtcccggttccggattcccgggtcgacccacgcgtccgagaggacggtggaggagcaacatgggctttcgaagtagggtcaaagtctatggtgtgtccaattgtcgtagaagatataaacccgcctcgcattttccaagtcgagatgttatgcgagcaacgaggattctttctagaaatcgcagattggatcagaagcttagggttaacgatcttgaagggagtcatcgaaactcgagtagacaagatttgggctcgcttcactgttgaggcgagtcgcgacgtgacgaggatggaaatattcatgcaactagtgaatattttggagcagacaatgaaatgtggaggaaactctaagactattttggatggtatcaaagctacaatgcctttaccggttactggtggctgttcaatgtaatgacacaaattattgaccgtaccggattgctccggtttaataaaccgggctggttaaaagcttgattcatatagaggttacgagcggaccgctctcaaggattttaggctcgctatgactaactaaaaagtcagtctaaaccagagatgatgatttttaagtgtgtttttttttctcaactttatgttttgtacattagttgcgaattttcatttgtgtggaattttttaattttaattcagttttggagttgtaaaaaatttagaaaaaaagggcggccgctctagaggatccaagcttacgtacgcgtgcatgcgacgtcaagattctctatagtgtcacc

SEQ ID NO: 81639 - DNA, 617 bp, Arabidopsis thaliana columbia
  unsure (1)..(617): unsure at all n locations
tcccgggtcgaccccgcgtccgggaggaagcactgacgcaactcagggaggaagcactgatgcaactgaggagggtttaggggttagccttaagccacttcaaggagaatgatcatatgaaagttaggactgttagggctctgggttataaagacgtttcctaacagtgtttaatgtcttatagggttatccgaaaggcatagtttgttctgaaacagtatgtataaaagggtactacgtaggttggctacgtaggtcgtcggtagtgtttctaggttctgcaatcgttttggtccacagcggagatgagatcgtaatgtagtcaatgctgggtatagtgatttggtgtatgccggattgctgggtttagagtttcattttgaaaacattatggtctgctcttgctggcttactgtttttctctaggatttctgtaagacttcagtttctgcaaaccctttacttgaccttaatgtataattaagtttttaaaaaaaaacnancnanannaataaatacaggggccnnttnnnnnnnnnnnnnnnnnnnnnnnnnnnnnnnnnnnnnnnnnnnnnnnnnnnnnnnnnnnnnnnnnnnnnnnnnnnnnnnnnnnnnnn

SEQ ID NO: 81640 - DNA, 470 bp, Arabidopsis thaliana columbia
tttaagaggaatcatttattgagtaccatgtagtgatcaaagcttatggaatcggtagcagagagggtaatgtatctgctggtaaaaagacaatgaagcgggagattttgatttcttcatggattatacaaaactgaacagaaacaaaacaaaaaagagactaaaatccacaaagtcacaatctatttacatgatgtcattgtgccatgaaagaactatatcttcaagctcagtaatcaaatcagaccaccgtgaatcatcttcttcaccttcaacaactttcacttcaaccaccacaacatccaccgttaactccactgcttccaccacaatcacagttcttcctctccctaatccaacaaccttcacttctccttccttcttcatcatcttcttcttcactacataacctaacttctccccaatcatcttcgccttctcctccacttcaacacccgaaatccttcgcc

SEQ ID NO: 81641 - DNA, 619 bp, Arabidopsis thaliana columbia
  unsure (1)..(619): unsure at all n locations
nnnnnnnnnnnnnnnnnnnnnnnnnncnnnnnnnnnnnnnnnnnnnnnnnnnnnnnnnnnnnnnnnnnnnnnnnnnnnnnnnnnnnnnnnnnnncttttttttttttttttttctttgaagcgggagattttgatttcttcatggattatacaaaactgaacagaaacaaaacaaaaaagagactaaaatccacaaagtcacaatctatttacatgatgtcattgggccatgaaagaactatatcttcaagctctgtaatcaaatcagaccaccgggaatcatcttcttcaccttcaacaactttcacttcaaccaccacaacatccaccgttaactccactgcttccaccacaatcacagttcttcctctccctaatccaacaaccttcacttctccttccttcttcatcatcttcttcttcactacataacctaacttctccccaatcatcttcgccttctcctccacttcaacacccgaaaccttcgccgggaatctcctctccttcttcttcttagcctcaaacaatccagaaagatctaatcccgacgataacgagatcaaatcaaaagcagtaatcgaattaacactcgatttcatctctactttcgaatcaa

SEQ ID NO: 81642 - DNA, 512 bp, Arabidopsis thaliana columbia
ctatagaagactatgacgtcgcacgcacgcgtacgtaagcttggatcctctagagcggccgccctttttttttttttcttttttttttaatctcgaataaattttaagactccaaataagttaaaaggttttagctcttcttcatgtttttatatagaagaattgttctttgtgcttaaccagagtttgaacattgtctaaatacttttgatatagaaattttttattgaacccaaatgaggtaaacttgactctatcattcattctcttccggcccaaaacttctctgttctttccttaagacctctcttgacgttcgcgactgagcaagattactagtctaaactgacataaatctaagcgcagtgcgcatatcgtaagaattatttcaggtgaaaatgatcagagttcgtcgcgattctgaggtttgtcttggttcatcaacttctcgagcttctgttgtagatctttaagattggctaccaaacaccgagctggagtagataagatgg

SEQ ID NO: 81643 - DNA, 483 bp, Arabidopsis thaliana columbia
  unsure (1)..(483): unsure at all n locations
aaattttnaaanaaaaaaangnacctnaacaccaaanggngggggntggttgggaaaanttggcccccttttncccctggtnaagaaaccnattggagcagnttttccnagcgancggaagccaaaaaccgccgtcttntctccntccgntcttaatccccaccgtttttgtaangcaagacgcagtctctgcggctgaaccgctgcaatctccatgaatcgatatactgagtctaggaaccgcagtgatgtcagacaccgatcttcgtcctggttcgatcataacgcttcttgatttcgaaccagagtctccgttttccgaggaaaacatagttgtcatcgaagttaacttgttctccaacattctcttcgcttccatctcttccttgattcgcgaagatacccatctgatcctcttcatcccctctcttcacatgatccaatgaagaaaatctctcgctagaaatcgaattaaccatctcg

SEQ ID NO: 81644 - DNA, 521 bp, Arabidopsis thaliana columbia
  unsure (1)..(521): unsure at all n locations
taggtaccnnnnctatagaagattatgacgtcgcatgcacgcgtacgtagcctgggttcctctagaccggccgcccttttttttttttttgttaaaacatcataatatttttaatagttttttccgcggacaatgcggaatgagttcttattagacaagaaaatcacatatcacacgtcacacacaatcgcagaatacaaagtttaaaaaatcttcattatcattggattgatatcacagacccacaagtgctaacaccgaagttgtcattgctgtgatgaaaattctcctcaatatttcgtttcctttcataacgttaatagacgatgagccgcttggtgattgagaagttggcaaaccggttgtgtcatacttcaaaaaacatttagaaagatagaactgagcaaaacgagcattggtacaacagcctgagagacctttgaccacaagtctcaaacagacgccgcaatttgctggatcaagatcaggactacactgaaccaccgtgtctaatgtatact

SEQ ID NO: 81645 - DNA, 696 bp, Arabidopsis thaliana columbia
  unsure (1)..(696): unsure at all n locations
nnnnnnnnnnnnnnnnnnnnnnnnnnnnnnnnnnnnnnnnnnnnnnnnnnnnnnnnnnnnnnnnnnnnnnnnnnnnnnnnnnnnnnnnnnnnnnnnnnnnnnnnnnncttcttttgtttttttgtatcactaataagaactagaaacctgtgttgtagcacgggtgctagtctaggtattattttatatgatcagcacaacattacaccattctttgtaagccttaaattcaaacatataggcaactaaacttcatagatcaaatatcataattggcactcaaattcaaagttagagcttcaccacaatgggacttctcacacgatgcttcttgtctgaccaaaccaattctccaaacacatagcccttagccacatttcccttacttttcacaaggatcactttaaacgtcttttgctctccaactttggtgaaattcaagctcgttggcttcaccgcgacataaacaccctgtgggttattcaccttgacggtatacatcgaaggtcgtccaacgtttttggcagtccttgaaacggtgactttgcttgatgttaagtttggaactgtgatggaaggatagttgaggttatcaagactggttttagggcttgaacaagtaaaaataaagcccgagaagacagagatttgtaatgcattgtatccacggacgcgtgggtcgacccgaaattcaag

SEQ ID NO: 81646 - DNA, 658 bp, Arabidopsis thaliana columbia
  unsure (1)..(658): unsure at all n locations
gattctannnnnnnnnnnnnnnnnnnnnnnnnnnnnnnnnnnnnnnnnnnnnnnnnnnnnnnnnnnnnnnnnnnnnnnnnctttttttttttttttttttttgatgtgatcaaatatgataaagaagagagttgattgatagtgataacagattcaattgggggatgcaaaatgcatctcttaaaaattgggttttgttcttttcggataaatcgaaaagaagctgtgaatctagacattgttggcggtggcggcggtggcatcaatgtctaactcttcggattctgaaagaatgtgcctaacttggtttgcaagatctgtgacatgtttatctttaaacccgagttgagcaagagcctcttcgaggttgaagagatagtcccctggtttggcccctgaagggccctttccgcctttaaccatcctgtttcggcaatatccttccaagagggagcctgggcctaagtagttggttggtggccccccctggtcaggggaagcctatgtacaccattactcctgcaaaaccgggtcccaaggattaaaggccagggaagaatccagaancccttccnganaaaangggtccccccccnccaaannnaaaaagaccccttaaccccccctaagaacctgaagaaccccaaaatttctgggg

SEQ ID NO: 81647 - DNA, 506 bp, Arabidopsis thaliana columbia
  unsure (1)..(506): unsure at all n locations
nnnnnnnnnnnnnnnnnnnnnnngtcactgcacgcgtacgtaagcttggatcctctagagcgtccgccctttttttttttcttttttattacagggtgcgtagttaaacatctatattacatgaactaaaccctttaaaaggaaaaattaaaattaacggaaatgcaaaagaaaagaaaaaaaataaaaatctctggaaaaaagcttgagccagaaataaattttattataataagctaaggttatttatttgtctttttagtaaatttcatcattttttccaccaaaatgtttggaaatttccttatccccaaactcccaaaaatctctgaccaatgaaactcataacctttccaacggagcctttctccttctccgcctcttcaccgccgcaatttccatctttctccgagtcaccaccagcaaactcggctgaactcgaacccaattcactgagtcgactcgttcctatcgagttaactcgtccagaagcttttcccgatcgc

SEQ ID NO: 81648 - DNA, 545 bp, Arabidopsis thaliana columbia
  unsure (1)..(545): unsure at all n locations
cgacccgtctaaagaaatgggatcgtctgcggatacagagacggcgatgataatcgccacaccggcgtcgaaccataataatccggcaaccaacggcggagatgcgaatcagaatcatacttctggtgcgatactcgctctcacgaattcagaatcggatgcttcgaagaagagaagaatgggggtgcttccgctcgaggttggtactcgcgtgatgtgtcaatggagagacggaaaataccatccggtgaaggttatcgagcgccgaaagaattataatggtggtcacaatgattacgagtactacgttcattacacagagtttaatagaagattggatgaatggattaagcttgaacagcttgaccttgattcagtagagtgtgctttagatgaaaaagttgaagacaaggtgactagcttgaagatgaaatctatcgaagctctactttgtcaatgtttgaggtggatggcaagaagaataaggtctatgcacagaacctctgttatctggcaaagttatttcttgnacacaaaactcttta

SEQ ID NO: 81649 - DNA, 720 bp, Arabidopsis thaliana columbia
  unsure (1)..(720): unsure at all n locations
cgcctgcaggtaccggnccggtantcccgggtcgtccaccgcgtccggaagagctggatgctgccagtttgcgtgaacacgaggagttcacgaaagtgaagaacatagctacgattgagcttgggaagtatgagattgagacgtggtacttctctccttttcctccagaatacaatgactgcgtgaagctctttttctgtgagttttgcctcagttttatgaagcgcaaagagcagcttcaaagacatatgaggaaatgcgatttgaagcacccccctggggatgaaatctatcgaagctctactttgtcaatgtttgaggtggatggcaagaagaataaggtctatgcacagaacctctgttatctggcaaagttatttcttgaccacaaaactctttactatgacgttgatttgttcctgttctatattctctgggaatgggatgatccgggatgccacatgggtggatacttttcaaaggaaaaacactcagatgaagcttacaaccttggcttgcatccttacacttgctccatattaaaagaagggctatggcaaattcttaatagccttctcctatgaactcttaaagaaagagggcaaagtcggtacaccggaaaggcccgtctctgatctaaggttaggggggtacaaaggttactgggctcgggttttatttgacattttgaaaaagcaccagggaaacatatctattaag

SEQ ID NO: 81650 - DNA, 1869 bp, Arabidopsis thaliana columbia
  unsure (1)..(1869): unsure at all n locations
cnnnnnnnnnnnnnnnnnnnnnnnnnnnnnnnnnnnnnnnnnnnnnnnnnnnnnnnnnnnnnnnncccacgcctacgaaaatcaagtctttggtttccttttatccaaaaaaaaaaaaaagtcttgtgtttctcttaggttggttgagaatcatttcatttcaatggaatccaattgtgttcaatttctcggtaacaagaccattctcatcacaggagctcctggttttcttgccaaggttttggtagagaaaatactaaggttgcaaccaaatgtgaagaagatataccttctgttgagagctcccgacgaaaaatcagccatgcaacgcctacgtagtgaggttatggagatcgacctttttaaagtgttgaggaacaatctaggagaagacaatttgaatgccttgatgcgggaaaaaattgtgccggttccaggtgatatatcgatcgataatttgggattgaaagacactgatctcatacaacgtatgtggagtgagattgatatcataatcaacatagcagccacaacaaatttcgatgaaagatatgatattggtcttggcatcaacacatttggagccctgaatgttctcaacttcgccaaaaagtgtgttaaaggacaattgcttctccatgtctcaaccgcgtatataagcggtgaacaacctggattgttactagagaaaccattcaagatgggggagactctcagcggggatcgggaactagacatcaatatagaacatgatctaatgaaacaaaaattgaaagagcttcaagattgttctgatgaagagatctcgcaaacaatgaaagattttggaatggcaagggcaaagcttcatggatggccaaatacatatgtattcaccaaagcaatgggagagatgctaatgggaaaatacagagaaaatttgccacttgttatcatacgtccaacaatgattactagtactattgccgaaccattccccggttggattgaagggttgaaaacattagacagtgtgattgttgcatatggtaaaggaaggcttaaatgttttcttgcggattcaaactcagtctttgaccttataccggcagacatggtagtaaatgcgatggttgcagccgcgacagctcattcgggagacaccgggattcaggcaatatatcatgttggttcgtcttgtaagaatccagtcacgtttggacaacttcacgatttcacggctcgttacttcgctaaacgtcctttgattggtcggaatggctcgccaatcatagtggtcaaaggaaccattctgtccactatggctcaattcagcctctacatgacccttcgttacaagcttcctctacagatacttcgattgatcaatatagtttatccatggagtcacggagataactacagtgacctaagccgcaaaatcaagctagctatgcgactagttgagctttaccagccttacttactcttcaagggcatatttgatgatttaaataccgaaagactgcgaatgaaaagaaaggagaatatcaaagagttagatggatcgttcgagttcgatcccaagtccattgattgggacaattatatcacaaacacccacattcctggcctcatcacccatgtgcttaaacaataaattatgctggtaatatgtttggaactattgtgaatctcgtgtgtaatattattaaagaatacgattatatcattctaatcttgtaatttacagtttgtgttggcgtgtaatatcaaaataaataaaaaaaacttattccacaaaaaaaaaaaaaaaaaatcatgcnnnnnnnnnnnnnnnnnnnnnnnnnnnnnnnnnnnnnnnnnnnnnnnnnnnnnnnnnnnnnnnnn

SEQ ID NO: 81651 - DNA, 557 bp, Arabidopsis thaliana columbia
  unsure (1)..(557): unsure at all n locations
tggggacnnnnnnnnnnnnnnnnnnnnnnnnnnnnnnnnnnnnnnnnnnnnnnnnnnnnnnnnnnnnnnnnnnnnnctttttttttttttttttttttttccacctcaaatttttatggtttatcattaagattcaagatggattatcagagactgaaataatagcttgtagatcggcgagacactccgccggaagagagaggaacgtgttcataaacaaatcgtcgatggtctcaactttcgcgacgccgacgagtctacactttccttcttcgtccagtctctctcctttccctctctggttctctcctatcgatccctccgtcgtcaacacagttctcaccaccaacgccggagctctgtatatccctcctcccgccgggaaaaagaacttcggccataaactcccaattccaccttcccgggattctggggtgatagttcctgggaaaatctccggggagataccgatttttagaaacggtggcaatggaaagcggggaaattcggggtttggcaattgananagggatntaaangggggcaattgaanaana

SEQ ID NO: 81652 - DNA, 620 bp, Arabidopsis thaliana columbia
  unsure (1)..(620): unsure at all n locations
cacactatagaagattatgacgtcgcctgcacgcgtacgtaagcttggatcctctagagcggccgccctttttttttttttttttggagaaaacaatcagagctcaaatatgtgtcaatgacttaaaaactgttattttactaaaaataactcagagctaatcacaacctgaataaactgaactctaccaaatcaagtcctcttctgttccaaagccagtagcttggaagttagaacctttaaagcattataaacatctcacaatttctacaggtttccatctgagccagctgcacaaaagaacccggaattctcatcaacgttttgaactctgatttcttgataatggcgtgtcatggatttctggggaaaccgacgccgaaatcatttgggcgtcatcataaacatgcaaggaaaaaccggaatcatcaatccagatgtttggctgcagccgttgcagcagctggctccatcttcacatccctcaacatgtcatcttcacattccacaaccgcctcttgcgtggcgtctccaggtttttgcggctcgccaccacatctagggaatcctaccggggccncctgaacagggacaaaanccnaaccgggcctgtagcgatg

SEQ ID NO: 81653 - DNA, 619 bp, Arabidopsis thaliana columbia
  unsure (1)..(619): unsure at all n locations
nnnnnnnnnnnnnnnnnnnnnnnnnnnnnnnnnnnnnnnnnnnnnnnnnnnnnnnnnnnnnnnnnnnnnnnnncttttttttttttttttttatcaagcaattttttattttagtgaaattccttctgatgaacaaaacctttgtacatgtcatttgatcaatacaaaggctcatggtttgaggggaaaaaagaaagaaagaagcagatgtaaatatcgatactagtagaataaaacggaaaatgcccaccaatacccaaatacaattgatatacaaaatatatgctccacgaattaacccgaggtttacaaaacatgatgatttctccatctaaagtttgcttctacttgcacttgctagatgttgggtaacaagaaagatgagtttggtggcattggtcatgaagggaaggtgccaaagaagatgccagtggcacctatgagaattaatatcataagtacgtgcaaatctccatacgtattatattagctacagaatgcatgggaattgcnggngngagcctagtcnggtggtagaaagcatacctccccaggacaatgaataggggcnggggngngcccngnggggngacttccctgaccggccggggggcacgtg

SEQ ID NO: 81654 - DNA, 503 bp, Arabidopsis thaliana columbia
cgcgtcacgtaagctgggatcctctagagcggtcgccctttgttttatttccttttttttttttttttttttgggaagccacccaaatcttattattccttgcaaaaaaaccggttcacaccctcttacctggtttccgatgaaagtggggaaaacctacccgaatcagtgtaaaccccaaaaaggaaaccgataatactcctcctctggagcagccccagcaggtaattggggccattcctcattgcttattggccttatgcgggatgatcctactttcagaacaactttcatgaactcgtaaacaaagtaactgattgccccggaaggcaaaacctgcaataagccgggaatcaagcccgcatattgagcaggaacacccccttggtcaatgatcttcacacaagtagcccactgcgcttaaccttttagcatgtgactgcatttgtaaaccccttctcacaacttaaaacggatatttcgctgctcggaccccgtgggtc

SEQ ID NO: 81655 - DNA, 521 bp, Arabidopsis thaliana columbia
aggtaccggtttcggattcccggctcgacccacgcgtccggccgcccttttcttgtagcccatctcagggatgatcataaagttgacatgcacgctggttccacttttaaccaccgctatgtcaaatccaatccgcgtgaagtagagaacgctacttggatgctaaccgtattccattgctttgggcagtacttctgcctccatttcgaagcgttccagcttgggatgggtccagtatacatggcattcctgagattcatgggggacgaggaagatgcacggagctacagctacagcttagaagtgggaggcagtgggaggaagctaacatgggaaggaaccccaagaagcatcagaggatagccacagggaaagtaaggggccagcaacgacgggttctcatcatcccaaaggaaccatggcgtctctttttcttccggttggggacaaggaaagagctttaaactttgggtcccctgggtaaaatctggaaagagcaacacagtccagattctggactt

SEQ ID NO: 81656 - DNA, 646 bp, Arabidopsis thaliana columbia
  unsure (1)..(646): unsure at all n locations
tncagncggggtccntttnccccggttttnaaaccaaccggtgaattgggacgctnnttggnggttaccgtttcattgtttgggcagtatttgcctccattngaagcgtnccggttgggatgggcccagtatacatggcattcctggagattcatgggggacgaggaagatgcacggggctacagctacagcttagaagtgggaggcccttgggaggaagctaacatgggaaggaaccccaagaagcatcagagatagccacaggaaagtaagagacagcaacgacggtctcatcatccaaagaaacatggctctctttttctccggtggagacaggaaagagcttaaacttagagtcactggtaaaatctggaaagagcaacacagtccagattctggactttccataccaaacctatcttcttacctgatcattcttttatctttttgttttttctctctttgagaaggaatgttgtatgatgattcgtttgcactcttcttctttgtctgtatctaaaacatatcatgaatgaatgtttcatcttatagtctcatattttggcaaaaaaaaaaaaaaagggcggccgctctagaggatccaagcttacgtacgcgtgcgatgcgacgtcatngtcttctatag

SEQ ID NO: 81657 - DNA, 584 bp, Arabidopsis thaliana columbia
  unsure (1)..(584): unsure at all n locations
cgcgtacgtaagcttggatcctctagagcggtcgccctttggtttaaatccttttttttttttttttggagcaaaagggaagatgggataaacattataactactagacagatagagagacagacattaggcagtattggatgtacaactgaaacgactaaacgacgacgggtttataaaccatataatcctccaccctcaacaaatactttttctttgggataaagaaagataaaaaaaataacctgaaaattaaagaggtttctaagcagaagacaaagggaattcttcttatatatttaagagcttaaaactagataagcccaaggaacaatgcttcttggtggcgggccaatccaaagatcgtttaagggcgactcactttccccacctccaaacgcatgccccggatagtggccccaccagtctgtaagggtgggggttcaccccctctggcaatgcctgtaaagctgaaaagggtttggagttagccaatttaagganccggnggccccacgtgtnccaccggnacccggttaaaagggaatggcatnccctcaacagcttgnggccccnaggnaaac

SEQ ID NO: 81658 - DNA, 686 bp, Arabidopsis thaliana columbia
  unsure (1)..(686): unsure at all n locations
acaaaatctaaccctcaagacatcaaatacagggaatgaacattcagggatttcncctttttggtggccatgagctgtatcttactattgatgtctatacnccatagtaaatcgaaagaaaaacaaagggacaaatcttttattaaggagttgaatatatctagttttcagctatgaaaccaaaaactgaaagcaggagaaaagttgttaaagcaggagtgacgagccttggtcctgcgctacaacacaaaacattcacatgtaaaaatgcttttctcgactatgatgattgtttacctttaacctcatcaatggggccaaaatgtctccgcattcctttagcctcaatgttaatacttcagtaacagacagttgcgtcttcaacttgtaacttcaatttgctcgatttcattatcgctgtaatctccccagcacttgcctccttgtcgttctccatttttctcatcacaagtctcatgtgatgtgggttccacttcacctaactgtcgaatgtccattttcaggngaactggagttcctgnccaacgggttcggcaacctcncaggaattttggcggtggtgggttcttcctcgggtccgggctcnccccagnggttcagacagggaatccccggaaaaggcacctgggggngaanggcagtancgggancccgnacgggggagc

SEQ ID NO: 81659 - DNA, 2316 bp, Arabidopsis thaliana columbia
  unsure (1)..(2316): unsure at all n locations
cccacgcgtccgcccacgcgtccgcattctgttcttggtttacttaatcttctttctagttaagtatattcttgttgctcatcaccaaagcttgtgatggaggctctcttcttgagttcttcttcttcctccattgtagcgtcaaacaagcttactaggttacacaaccattgtgtctggtctacagtgattagagataagaaaaggttcggtcccacttggtgccgtgtaggtggtggtggtgatggtgggagaaacagtaacgcagagaggcctattcgggtttcttcgcttttgaaagacagaggtcaggtactgattagggaacagagttcgccggctatggatgctgagacattggttctgtctccaaacgggaatgggagaaccattgagatcaatggagtaaagactttgatgccttttagtggcgcttctatggtggggatgaaagaaggacttggcataatcagtttcctccaagggaagaagtttctaatcactggctcgaccggtttcttagctaaagtactgattgagaaagtcttgagaatggctcctgatgtcagcaagatatatctcttgattaaagccaaaagcaaagaagctgcgatcgagcggctaaagaacgaggtgttagatgcagagctttttaatactctaaaagagactcatggagcatcttacatgtctttcatgttaactaaactcatccctgtgaccggaaacatttgcgattcaaacattgggttgcaagcagattcagctgaagagattgcgaaagaagttgatgttataatcaattctgctgctaatacaaccttcaatgaaagatacgatgttgctctggacatcaacacaagagggcccggtaatctcatgggattcgccaagaagtgcaagaaactcaaactgttcttgcaagtatccacagcttatgtgaatggacaaagacaaggaaggatcatggagaagccattttctatgggagattgtatagcaacagagaacttcctcgaaggaaacagaaaagcattagatgttgatagagagatgaagttagctcttgaagctgctagaaaagggactcaaaatcaagatgaggcacagaagatgaaggatctcggtctagagcgggcaagatcatatggatggcaagacacttatgttttcaccaaagcaatgggtgagatgatgatcaatagcactcgaggagacgtacctgttgttattataaggcctagcgtcatcgaaagcacttacaaagatcctttccctggatggatggaaggaaacaggatgatggatcctatagttttatgttacgggaaggggcaactcacggggtttttggttgatccaaaaggagttcttgatgtagttcctgctgatatggttgttaatgcaacgttagctgctatagcaaagcatggaatggcaatgtcagatccggaacctgaaataaacgtgtatcagatcgcttcttcggcgataaacccgctggttttcgaagacttagcggagcttctttataaccactacaaaacatccccatgcatggactctaaaggtgatcctattatggtgcgtttgatgaaacttttcaattccgttgatgatttctcggatcatttgtggagagatgctcaagaacggagtgggttgatgagtggtatgagttcagcggatagtaagatgatgcagaagctaaagtttatatgcaagaaatctgttgaacaagccaaacaccttgctactatttatgagccatacactttctatggtggaagatttgataacagcaatacacagagattaatggagaatatgtcagaggacgagaagagagaatttggatttgatgttggaagcattaactggacggactacattacaaacgttcacattcccggtttaagaaggcatgtcttgaaaggaagagcttaactttgaatctcactaaaccagaccaaacagaatcgatcccttcttttatctttttatctttttcttttttcattacgtgtaatcgtgttgtgtctaatatatcagtttgatttgtaataatttgaaaaaaaccggaaatgttgttatctttaagtttgcccaaaatctatagtcatgttcgattcaagacaaaaaaaaaaaaaacaacctgtaaaaatattcatagtctttgatgttcacgtatcttaaactgaattattaaatgttgaagttagtaacatacaaaaaaaaaaaaaaaagnnnnnnnnnnnnnnnnnnnnnnnnnnnnnnnnnnnnnnnnnnnnnnnnnnnnnnnnnnnnnnnnnnnnn

SEQ ID NO: 81660 - DNA, 390 bp, Arabidopsis thaliana columbia
gatcgttaacatccaatctctcggtatattccttccttccattgtggcaataagtaacaaaccttgccctctacttcattccctccttgttttgatttcatcgtctttgttagctctcctctgtttttttttcttagtcaatcgatggcgaaggagcttgctgataaggctaaagaggctttcgtagacgatgacttcgatgttgctgttgacttgtactccaaagccattgacttggatcctaattgcgctgagttcttcgctgatcgtgctcaggcctatatcaaactcgaaagcttcactgaggccgtggcagatgcgaacaaagcaattgagttggatccttcattgaccaaagcttacctaagaaaaggaactgcctgtatgaag

SEQ ID NO: 81661 - DNA, 560 bp, Arabidopsis thaliana columbia
  unsure (1)..(560): unsure at all n locations
gacgacagaatggggcaacaaaaaaaaaaagcctagaggaatagaatcggtctctttctctataatctctctctctctctgacttgtttgtgttctctcaaatcctctgataagaatcaatggccaaggaattagcagagaaagctaaagaagcttttctagatgatgacttcgatgttgctgttgacttatactccaaagccattgacttggatcccaattgcgccgccttcttcgccgatcgtgctcaggccaacatcaaaatcgataacttcactgaagctgttgtagatgcgaacaaagccattgagttggagccaacgttggcaaaagcctatctcagaaagggcactgcttgtatgaagctagaagaatatagtactgctaaagcagccctggaaaagggagcttctgttgcaccgaatgaaccaaagtttaagaagatgatagatgaattcagtcttcgtatttcagaggagggaagcattttggtaagccgttgcacccnggtttctttaaggtttcaanacccttgcacgnagntatncncnccgtccatc

SEQ ID NO: 81662 - DNA, 485 bp, Arabidopsis thaliana columbia
  unsure (1)..(485): unsure at all n locations
acccacgcgtncgcgggagtgatggaagcccttcttctagcaagaaatctggactccagcaattaattgaagcctctgtagctaacgaggaatcagtttggaccaagtacttcaatcaaattttgacggttgttcttgaagtgctcgatgacgaagatttttcaatcaaagagcttgctctttcattgatttctgaaatgctaaagagccagaaagatgccatggaagactctgttgaaatagtgatcgaaaagctgcttcatgtctcaaaggacaccgttccaaaagtttccactgaaggctgagcaatgtttgaccccagtcttggtcccaatacggtcccttcagatgcttaagcggttattgtcccccttattggtggccggaggattggaaacactttgtccgttgcataaaattgtttaacggggcttgtgggtaggctctcgcaagaagattaatggatcatttgtcgtcttttttgc

SEQ ID NO: 81663 - DNA, 490 bp, Arabidopsis thaliana columbia
  unsure (1)..(490): unsure at all n locations
cgcgccgtaagctgggatcctctagagcgttcgcccttgttttttttttttttttatgtagaaaaaatttagatagaagtgaaagtttccggttacaaaactcgaagggtcaggaataaaacattgtcacacacatgaaaacaaaaaaatgtgagatcatactgaatctttatcacatttctactaaggttttctgtatcgggataacagaccggagcacaccaaagagcaaacatcgaatcaaacacgcgcaaagagcagaagaaagaagaaaccaaagctggctgcttttgcagccttttattgttatcattttgtgttagcgtacgattatttcaatgcttttgctgagttcctccagctttgtcatccgcagtttctcgctttccggtgaccanctccacgancttnccaacaaatatanccttccccttngnccttncattnnnacctccaangccnccttnaatcccccccccttccccnaaaa

SEQ ID NO: 81664 - DNA, 476 bp, Arabidopsis thaliana columbia
gaccccgcgtccgggctctgcctctgaccattctcggaacggtcaggtcactcacgcgtcctcccttccgtctccattcactgccactggcctcgagagagcgtgcgttccacgcacctagttcctttggttcgtcaggctcgaccaccgaccagacatcctcttccatgagctccagctcaaaggttgcctctctcgtccacatgatggtcatcggactgctgatggctcccaagaaacctctcgcttcgactaatcgctgaaggtggggtctatttatatctccgcatgggaaagcacacaagatatgtcgcaggtcagctgttcgacacgtgttcactcattgcaagcaggcccaactaattttggtctattaaacgtggacacgtggcctaatctgaacccatcattaggcagattgagaccggactccaccagggtgttggtggattggagagggaagggctacgatggag

SEQ ID NO: 81665 - DNA, 580 bp, Arabidopsis thaliana columbia
  unsure (1)..(580): unsure at all n locations
ctcctntntcgccggacgagtcgcgatagtgaccgggccttctcgcggaatcggacgagctatagccatacatctcgccgagctcggcgccaagatagtcatcaactacaccaccagatccaccgaggccgatcttggcgccgcagaaatcaactcatccgccggcaccgttccgcttccgatcgccggcgggttcctcgccgatatctcagaaccaagccaaattaagtggtctcattcgacgcgggcggaggaaagcctttaacctcgccgggttcaacatcctagttgaacctcagcctggaattcttcattcccaatttacccctaccttcggcaaccactccccatttgaaggatttcggttcagcatcttcgaaggcgaacaccaaggggggtcatttcttatgctggaagagaagcagtcaaaaaaggcttaaaccggggggcggtgggagggttttacttgctaaggngggngttaaccgggggggttattccgggggaangggttttnaaggttaaagggagtttttttaaaaatgggaggtttttnttgggcttaagttttggntnntgc

SEQ ID NO: 81666 - DNA, 671 bp, Arabidopsis thaliana columbia
  unsure (1)..(671): unsure at all n locations
accnttanncccccccccctttggggnaacccttgtccccccnccngggtcccgggcccgggattccccgggncnccccccggggcccgttactaactttgagataaagtcttttgatggctctgcaaatcctcaccttggtttggctgttataatggctgctggtattgatggtctccggcgacatcttcaacttcctactccaatagatataaatccggcggatgtggctgctacattgaacagacttccggaaacgctctcagaagctgttgaagctctggacaaagacaaagttctccacgatttgctcggacaaaagcttttagttgccataaaaggagtccgtaaggctgaggtcgagtattattcgaagaatccggatgcatataagcaactcattcaccgatactaatcctttgagcatctctatgatgattgttggatcatttggttttattgtggactttgtgtcacatgaagggtcgtatttgcaaaatacttgacataaagatgtggttcagaaaattaataaactaaatttcatatttcgagacgcatgctcatgctggggtactatttgtatttcttaccttttcgtcccatgctttcaaaagccagggttcaagaatatacagagtattttcaataatacggagtagttcttaatc

SEQ ID NO: 81667 - DNA, 488 bp, Arabidopsis thaliana columbia
cgcgtacgtaagcttggatcctctagagcggtcgcccttttttttttttttttttaaatgaaccactgtttgctttttcattgctgttgaaacattatgcggggttacaaacaaacatatgcgtggacccttttagaggggaaaataataatatgcggatcgaaaaacatatgcacaacgtagtagaagcgtcgtccctttggaatgtgaccgcgaggagtaacagatgcagcaattctctcactatcaaaatcctatggcttcataagcttggccccgaaggatgggcttaataagtcacagcttccccttacacaacgtcttgcgtgaatgataccaccagctctgcctttttgttgaacaattttgcaggtgcaaaaccgtggtttttggtcgccggtggacttactttcacaatcaacaaccaatcatttggtttttacagggcgggggaaccacatctatttggtccaggcttaagagccagc

SEQ ID NO: 81668 - DNA, 606 bp, Arabidopsis thaliana columbia
  unsure (1)..(606): unsure at all n locations
tttttgaacgtccctggcccccttccttaggctgggatcctttaaagcggccgcccttttttttttttttttttaaccattaattatatataattctttataaaaggctaaaattttaaagagtctcaccaccttaaaccacttgaattagtattcctaacaaaataaaaatacacataatagttacaaatatacgaacagaatcataaaagacatttctccttgaggctaacaatagtgtctctaaggcttgatttcataggagtgaactctactcccaaatttttcactttctccacacacacttggcatatcatctcattcatctcactttcttcattcgtatcagcaatagacaaatctgggaacagcttccgaagaatgtctataatgtcgtttacactcatatttggaccatcgatgatgtatctgccattggctgaaggagtctccaacgctttgatatgaaccaaggcgacatctcttacgtccgagaacctgtagtatcttttaattgaaaggggtcttaccatttatgaaatccncaattagccnaccgncatgtaagagtnggtgcaagaggggccgcaataatccnggtcacnc

SEQ ID NO: 81669 - DNA, 544 bp, Arabidopsis thaliana columbia
  unsure (1)..(544): unsure at all n locations
gtgacactatagaagagctatgacgtcgctgccgcgtcgtagcttggatcctctagagcgccgccttnnttnntttttttttctttttttnggtatgacaccaaccatctttatatgattttccattctcgtgaaaatttgagaaacagtacacaaagagagaagaaataactatagttgtcacaacttgtcaacttaggacagtttcttgaaaactcactcactcgcatctttagttgttcatatatgcaggaggaggtcctcttagcctctgaccgttctcattcagccactctttttctctcagaaatctaagaaacggtccgggatcgtcactgaagccataaggatttgttgtgctttgttgaacgttgccgagcttctctcctctagattcatggtcttccatgtagagctgagggtgaaacgttgagttttgagaagaatcgtttggtgtcccgtacctagctaagagactgaacttggaagagccatgagccataaagtttctcaaattgtttgttccctgagcttgataggaata

SEQ ID NO: 81670 - DNA, 571 bp, Arabidopsis thaliana columbia
  unsure (1)..(571): unsure at all n locations
cgcctgcaggtaccggtccggaattcccgggtcgacccacgcgtccgggataataatagtcacggatcttataaaaaagacttgaagcagcatatgattgtcactcgaacatgaatgagagtctcccccataatcatcgctcacatgtcggtagcaataactttgatatgagttccacgactgagaacaacgctttcacaaaaccaggagctccaaaagtaagctcagcaggatcttcatcagtgaagcattcatcgtttcagcctttaccctgtgatcatcataataatcatgcctcctataaccttgtccatgtcgctgagaggaagaagctaccgccacaatgtggatcctcaaatgtgtacaacggaacggtttgaaggtaacaacaacacagtggattacagtgtgaatggaagtgtatcaggtagtggtcatgggagtaatgggccatttggaagcagtaccgggatgaatgctggggggatgatttggggagtggtaatgggtntnggaaaatggnatggnggtgnaggtgnaccggngtggangtggtccggaacttgggggt

SEQ ID NO: 81671 - DNA, 1949 bp, Arabidopsis thaliana columbia
  unsure (1)..(1949): unsure at all n locations
agctannnnnnnnnnnnnnnnnnnnnnnnnnnnnnnnnnnnnnnnnnnnnnnnnnnnnnnnnnnnnnnnnnnccacgcgtccgcggacgcgtggggcagcttttagtatttttttcaacaatcgctttttttttttctcgatctccgtgaagctctcgaatctctggttttgagttttggagaatggtgtttttccgcagcgtatcggcctttactaggctgaggtctcgcgtcggccaacaatcttcactcagcaattctgtcagatggattcagatgcagagctctaccgacctggacctgaagtcgcagctgcaagagttaattccggaacagcaggaccgtctgaagaaactgaagtcagaacatgggaaggtccaactgggaaacatcactgttgatatggttattggtggaatgagagggatgactggattgctttgggaaacctcattgcttgacccggaagagggtattcgctttaggggattgtcgacttcctgagtgccagaaagtattacctactgcccagtctggaggcttgaaccattaccggaggtcttttgtggcttctcttaactggaaaggtaccttagcaaagagcaagttgaagcactgtcgaaagacttggaaccgtgctgctgtgtcagattatgtgtacaatgccatcgatgctctgccttccacagctcatccaatgactcaatttgctagcggtgttatggccctccaggtgcaaagtgagtttcaaaaggcatatgagaatggaattcataagtcaaagttctgggagccaacatatgaggattgcctcaacctgattgctcgtgttcctgttgtagctgcatatgtttatcgaaggatgtataagaatggtgattccattccctcagataaatctttggattatggtgcaaatttttcccacatgttgggatttgatgatgaaaggttgaaagagctcatgaggctttacatcaccatccacagtgatcatgaaggtggaaatgttagtgctcacactggtcacctggttggtagtgcactttcagacccatatctgtcatttgcagctgcattaaatggtttagctgggccactccatggtttggctaatcaggaagttttgctttggatcaaatcagtcgtagaggaatgtggagaagatatatcaaaagaacagttgaaagaatatgtttggaaaacattaaacagtggcaaggttattccgggatatggtcacggtgttctgcgcaatactgatccaagatatgtatgccaaagagaatttgccttgaagcatctacctgacgaccctcttttccagctggtgtcaaagctttatgaagttgtgcctcctgttctcactgagcttggaaaggtgaagaacccgtggccaaatgttgatgctcacagtggggtcttgctgaaccactatggtctaaccgaagcaaggtactacaccgtgctctttggtgtttcaaggagtcttggcatctgctctcagcttatatgggaccgagctcttggacttgcacttgagaggccaaagagtgttaccatggactggcttgaagcccattgtaagaaagcttcatctgcttaagtcaccaccgagtcctgagttgtcgcactctctcgtgtttcaacaaaagtcattctcttccacactggatagctttttttgtttttaccttctattgacagaagaaacatttgttcatgtagaaattgttcctgagaaacacatgcttggtgcaaatttgcatttccgggaaactcgtgataataaataaacagttgtattcagtttgcgtaaaaatcaaacatcaatatcactcatgaattaaagctaaaaaaaaaaaaaaaagnnnnnnnnnnnnnnnnnnnnnnnnnnnnnnnnnnnnnnnnnnnnnnnnnnnnnnnnnnnnnnnnnnnnnnnnnnncat

SEQ ID NO: 81672 - DNA, 521 bp, Arabidopsis thaliana columbia
cgactcactattgggaaagctgacacgcctgcaggtaccggtccggaattcccgggtcgacccacgcgtccgctttgcttttgttcccttttctcgtctctgcagcttccttgttgtcaacttctggaagcctttgattgattgcaacttctatctccattctcctgctcatttaatattccaattaatagtcaatctcgtcgaatcttcaattttttaaagcttttggtcaaatcaaatgttatgcaaagacagaccaaaacctcctcttcttcttcttatatacttcctctcctacaaaatctctatttacttccatcttctctgctaaagacctttcttcaccattcccaattttccgttcttgtttctgattgaatctagatattgattaagctatggatgtcaatcggaaagctcacccggattgtcgatattcttcaaatcctttccatgaatgtgcttcagattgtttagagaagatctctcaaggccgtggaaataagaattcaaagaagcag

SEQ ID NO: 81673 - DNA, 521 bp, Arabidopsis thaliana columbia
agctctcaacgactcactattgggaaagctggcacgcctgcaggtaccggtccggaattcccgggtcgacccacgcgtccggctaaagacctttcttcaccattcccaattttccgttcttgtttctgattgaatctagatattgattaagctatggatgtcaatcggaaagctcacccggattgtcgatattcttcaaatcctttccatgaatgtgcttcagattgtttagagaagatctctcaaggccgtggaaataagaattcaaagaagcaaggtactttctctgttctcacactatgtttgatccgttactctatgagtatgcttctgttgtgatggatatttctgtctttgtccttctttaggtattgcttcaaggataattcttggagggttgtctgttatgacagttatagtttgatcaaggctttttagctttcgatggatctgcaaagttgtttcctttcttttctcattgtgatttggttgttacaggttcaaagattcttagccttccg

SEQ ID NO: 81674 - DNA, 570 bp, Arabidopsis thaliana columbia
  unsure (1)..(570): unsure at all n locations
ccggatcgaccacgcgtccgctcaatggagtaccacatttcagccatccacacacttctaaaactccaacagattcagccacataaaagctcagattcttcagtaatctgctcaggttgtgaatcagccatctctgaatccgaaaccgcgtatatctgttcaacatgtgacttcaatcttcatgagcaatgtggtaacgcagtgcgtgggatgcaacatccttctcacgctggtctccaccacttgactctagtcccttacacaacttacagcgctggtaccttcctctgcagagcctgtggctgcactggaggtaaagggttctcttactgttgtcctttgtgtgactttgaccttcatgttcaatgcgctcacctgcctcaggtcttggttcatgagtctcatcctatgcatagtcttcttcttgtctacaacagaactcctcctatggcttttactcagtttgggtttcgggaatcaagtttgtttgaancnttgnaatatgccnatggatggaaggttttggctncaactgtatgnttgaacntnaaatcatgntcaagggtggtc

SEQ ID NO: 81675 - DNA, 470 bp, Arabidopsis thaliana columbia
ccgggctgacgtcacttaacagtcagatgtttcacgtcgcgattaacggctgcagtaacgtaaagctcgacggagtcaaagtttctgcagacggaaacagtccaaacactgatgggatccacgtgcagtcatcatctaccgtctccatcctcaactccaaaatctccaccggcgatgattgtgtctccatcggtcccggcactaacgggcctctggatcgagcaatgtcgcttgtggccctgggccatggggatcagccattggaagcttgggaaaagaaaagtgttggaggtaggtgtccaaaacattaacagttgaaaaacggcggcggtttacaagggaccaggggattgggggtgaggaataaaagtcaggggccacggcccagtaatggatttgctaagaatatccgtttccagcattgtgttatgaacaacgtacaaaacccaatcgtcattgaccaaaactac

SEQ ID NO: 81676 - DNA, 817 bp, Arabidopsis thaliana columbia
gcaggtcccggttccggattcccgggtcgacccacgcgtccgacagtccaaacactgatgggatccacgtgcagtcatcatctaccgtctccatcctcaactccaaaatctccaccggcgatgattgtgtctccatcggtcccggcactaacggcctctggatcgagaatgtcgcttgtggccctggcccatgggatcagcattgggagcttgggaaaagatagtgtggaggtaggtgtacaaaacataacagtgaaaacggcgacggttacagggaccagagaattggggtgaggaataaaagtcatgggccaggcccagtaatggatttgctaagaatatccgtttccagcattgtgttatgaacaacgtacaaaacccaatcgtcattgaccaaaactactgccctggcaacgaaaattgccctaatcaggtttctgggataaaaatcagcgatgtaatgttcttcgatatacacgggacatcggcgacggaagttggagtgaaattagactgtagctctaagaagccgtgcacgggaattcgaattccagatgtgaagttgacggaccggaataaaccagccaccacagattgtagtccccctggaggtagttaggcaggatttcaacggccccacagttgtttatggccagaaaagaaaaatatttgtcttctttttgttagtagtgtaattgtaaggaacgtcggattttcatatataatacggctttaatcccggaaaaaaaaaaaaaaaaaaaaaaagggcggccgctttaaaggatcccaggttacggaagggggccagggacgtcat

SEQ ID NO: 81677 - DNA, 581 bp, Arabidopsis thaliana columbia
gcacgcgtacgtaagctgggatcctctagagcgtccgccctttttttttttttttttttttttttaatttaagggggggttaatttaatgccaaaccagaaataaaccagagttttttctaccaagctcggtacaatccggttccggccttatactcttaatatatttcttataccaaaccggggctgtgtcctatggaaatcaccaagatccaaagaatctaattttaccagaacctaatcaagtttcaaaccggttcaagcatagaggtttcttccacagcgatcacactcggttatatgagaaaccggagttttaccggaattgattttcagcagatttggaagatcgagctcgaggacatcgtgaagagcctcagatccttctcggagttcatcagagcttatagagagtggtggagttaaccggacaatagtgttgtgagtaggtttagccaagactcctctctccttcaagctcaagcaaatatcgtaagctgaaaccggggacaactttcgctattgaactcaatcgcattaaacaagcctcttcctcgtacttcctttatgtacttcggaaac

SEQ ID NO: 81678 - DNA, 550 bp, Arabidopsis thaliana columbia
  unsure (1)..(550): unsure at all n locations
tgatacttcnnnnnnnnnnnnnnnnnnnnnnnnnnnnnnnnnnnnnnnnnnnnnnnnnnnnnnnnnnnnnnnnnnnnnnnccacgcgtccgggacctttgaagaagaagaatcgcgatttcgagctctatggtgtccgtaaaccctagacctaagggttttccagttttcgattcctcgaatatgagtttaccaagctccgatggatttggttcgattccggccacgggacggaccagtacggtgtcgttttctgaggatccgacgacgaagattcggaagccgtacacaatcaagaagtcgagagagaattggacagatcaagagcacgataaatttctagaagctcttcacttattcgatagggattggaagaaaatagaagcctttgttggatcaaaaacagtagttcagatacgaagccacgctcagaaatactttctcaaagttcagaagagtggtgctaacgaacatcttccacctcctcgacctaagaggaaagcgagtcatccttatcctataaaggctcctaaaaatgttgcttatacctc

SEQ ID NO: 81679 - DNA, 563 bp, Arabidopsis thaliana columbia
  unsure (1)..(563): unsure at all n locations
gcaggtaccggnctcngaattcccggctcgacccacgcgtccgagtacacagccattgttggtccaagcgggtcaggtaaatccactataattggcttgatagagcggttctacgacccgttaaagggtatagtgaaaatcgatggtcgcgatataaggtcgtatcatctgagatcacttcgtcgacacatagctttggttagccaagagccaacattgtttgctgggacaatccgagagaacatcatatatggaggagtgtcagataaaatagacgaagcagagatcatcgaggcggcgaacgcagcgaatgctcatgatttcatcacgtcattaacggaagggtatgacacatactgtggagacagaggagtacagttgtctggtgggtcataaaccagaggatcgcgatagctagcagcggttttgaccaaaccccgtcagtgttgcttctacacgaagcggccaagcgctttgtgccagccagtacggaacgtgttggtcaaaatgctttcggcggtnttttgntnaggnnggccgngtttggtatcccacatagggtt

SEQ ID NO: 81680 - DNA, 644 bp, Arabidopsis thaliana columbia
  unsure (1)..(644): unsure at all n locations
gcctgcaggtaccggtctcggattcccgggtcgacccacgcgtccgaatctttggccaagcaccatggcaacaaccatgaagactgccatctctggcaagactgcgggtctccagaagtctggcgtgaggcccgccagggcctccgtcaagatggaggttgtcgccgagaagaagctcagggtggccatcaacggcttcggccgcattggtcgcaacttcctgcgctgctgggagggcaggtccaacaccctgcttgacgttgttgctatcaacgactctggaggtgtcaagcaggcatctcacctgctgaagtacgactccatcctgggaaccttcaacgctgacgtgaaggtggtcgatgactccaccatctccgtcaacggcaagcagatcaaggttgtcttccagccgtgaccccctggccctgcctttgggctgacctgaacatcgacctggtcatcgagggcaccggtgtcttcattgatgtcaagggtgccagaagacattaagggcggtgcaagaaggntttattacggccccgcaaggcaaggaatcccaacttngtttttgggtaacgcacgggtaaagacgggtcccatatttcaanggttnacacaatatgccttgaagttttggggnggta

SEQ ID NO: 81681 - DNA, 542 bp, Arabidopsis thaliana columbia
gcctgcaggtaccggttcggaattcccgggtcgacccacgcgtccgcgttgaaagtggtgaaaccgaaccggcacgagacactggagaacacgtggaacatgataactgaggagggaaaatcaacgccgttgacttgtcattaccggaaaaccagtatgtctggacttaacgccggcggcgatgtaaaacctgtcttgaggaaagcggagacgttcagggacgtgactaattatcgacagtcgtctccgacggtgacgtcaccggtgaagatgaagaaggagatgtcgccgagtagggaggagctgaatcgaagagtagaagcgtttatcaagaagtgtaaggaagagagattggagtcgctaaaattggagaaataagtggcttaattaaacacgagattaattagctttttgtcttaataattaattgttaatcgttttttactatttaaatgtcttttatattttgtttttttttatatggactccaagtaatgaagcaaaaagagtatttgaacccataaaacatctaatcgagtttt

SEQ ID NO: 81682 - DNA, 644 bp, Arabidopsis thaliana columbia
  unsure (1)..(644): unsure at all n locations
gacccacgcgtccggactcatctgaaaaacacgatatttgcagtcgagaggtgatacgcagatcaactatatgtgttttgggttctgtgtgtcgagtggtttatggtgattttggattcggaagaatcgttgccatgaatgggaatacttgtaggaaaggttccgattggggaatgtaaagcgactgtagtttacatgtccggttacttaccaggagctgcgtcggagaagtccccgattctctcccctgttcccgtgcgtttatccgcggctgttcacggtggagattcgtaggaaagatgtatgtcggtggtgggttgtggattcgctatggctatttcagagaaaggaaagcttataacttgggggtctacctgatgatgaaaggccagagctatgtctgcttctggagaagcatgggggaaactccagaagccgtttcctcttcctacggaggctccantcgttcaaggcttcttcaggattgggacattttccggttttaacanagccttgtgagnatttcctttggggtgaagnagtcattccnaaagatcccctttgaaanagnaagtgntaatnagccncatncaaggtcaaatcggttntgncgcctnanttgnccaagtggggnctttacgggg

SEQ ID NO: 81683 - DNA, 553 bp, Arabidopsis thaliana columbia
  unsure (1)..(553): unsure at all n locations
nnnnnnnnnnnnnnnnnnnnnnnnnnnnnnnnnnnnnnnnnnnnnnnnnnnnnnnnnnnnnnnnnnnnnnnnnnnnnnnnnnnccacgcgtccggagaaattggggattagagattcgaagagttgtcgtagcgagatcgagtttttggaagaacagattgtgaatcatgatggtgatttggagccaacgggatcggttattaatggttttgtggcgattacaagatactgtaggttcttgttgtttggatttgaagaagatggaatggagtggtggattgagaataatccgaagaagcctcgaaaagggttcgttgcacaggagattggagacacgtttataactgtgccaaaggattttgtttgtccaatctctcttgatttgatgacagatcctgtgattatttccactgggcagacttatgatcggaactctatagctaggtggattgaacaagggcattgtacttgtccgaaaacaggacaaatgctaatggattcgaggattgttcctaatagggcgttgaagaatttgattgtgcaatggtgtact

SEQ ID NO: 81684 - DNA, 454 bp, Arabidopsis thaliana columbia
cccacgcgtccgcccacgcgtccgcggacgcgtgggcttaaaggtggagctttcttcgaatttctccgatcagctcaagaggcaattgtgttaccaccatttgttgctttagctgtgagaccaagacctggagtttgggaatacgtaagagttaacctccatgatcttgtcgttgaggagcttcaagcttctgaatatcttcaattcaaggaagagctcgtcgatggaattaagaatggaaacttcactcttgaacttgactttgaaccattcaacgcggcattccctcgtcctacgctcaacaagtacattggagatggcgtttggagttcctcaaccgccatctctcggctaagctcttccatgacaaggagagcttgcatccgctgctcaagttcctccgcctccattcccacgagggaaagactctgatgcttaacaataggatccagaa

SEQ ID NO: 81685 - DNA, 1034 bp, Arabidopsis thaliana columbia
  unsure (1)..(1034): unsure at all n locations
gactcactatagggaaagctgctacgcctgcaggtaccggtccggaattcccgggtcgacccacgcgtgcgggaggttaaaccccaatctgtacgaagaaggcaaagtctgtcttagccttctcaatacctggacaggcaggggaaatgaagtctgggatcccaaatcatctagcatccttcaagttcttgtttcactccagggattggtgttgaattcaaagccttatttcaatgaagccgggtatgataagcaggtcggaactgcggaaggagaaaaaaaactcactgggatacaacgagaatactttcttgctaaattgtaaaaccatgatgtatcttatgcggaaaccaccaaaggattttgaagaactcatcaaagatcatttcagaaaacgcggatattacattttgaaggcatgtgacgcctacatgaaaggatatctcataggttccctcaccaaagatgcctcggttatcgatgaacgcagcagcgctaattcaacttcagttggttttaagcttatgctggctaagatagcaccaaagcttttctcagcactgagcgaggtaggagctgactgcaatgaattccagcatctgcagcagcaataacacaatcctaaaaggagctggatacaccgatcgttgccaatgaaccaagtgaaggtttgcggcttctttactattacaagtttcaaattcagatatttctgaaacgtgtgtagtagagtttttttggagttatacaagaattaagcgatactaagttgtaaccccatctggtcgaacaatatcgacaaatgaatttgttttggttggtcatgttttggggcctacttaaaagttttaggggtgcacttcaacacctgtttcttttgtcatgggttgtcaaattacttttctaacaaagattatttaagtaaagttgtttcgctttggtttaaaaaaaaaaaaaaaaagnnnnnnnnnnnnnnnnnnnnnnnnnnnnnnnnnnnnnnnnnnnnnnnnnnnnnnnnnnnnnnnnnnnnnnnn

SEQ ID NO: 81686 - DNA, 546 bp, Arabidopsis thaliana columbia
  unsure (1)..(546): unsure at all n locations
tgccaggtaccggttccggattcccgggtcgacccacgcgtccgggatcatgttgaaggttatctcgagctgtcagcaaagactaaaacttactttaccacggcttttgcaatgtgggatgcagacttctacgtcaaagtcgatgatgatgtgcatgtaaatatagccacgcttggagcagaattagcaagataccggatgaagccccgagtgtacattggttgcatgaaatctggacctgttcttgctcagaaaggagtgagatatcgtgaacccgaatactggaaattcggagaagagggtaacaaatacttccgccatgccacaggtcagctctatgcaatatccagggagttggcgtcttacatatcgataaacccaaacggtacttcacaaatattgtgaatgaagatgtctcttttagggatcatggctttctttgggtttagatgtggagcatgtacatgaccgtaggctattgtttgtgggtcaacagcattgtgagtggaaggcgcaggcgggaanaacttttgtttccncggtcgg

SEQ ID NO: 81687 - DNA, 604 bp, Arabidopsis thaliana columbia
  unsure (1)..(604): unsure at all n locations
gcctgcaggtaccggtttcggaattcccgggtcgacccacgcgtccgggaagtcgcttggaattcagttaagctcaatgaggttttccgatcacctgggccttgacaacgcctctactctgaggttcatctcctcaagaatctcaatcacgaatccattattcggtactgcacgtcttggatcgatgtcaaccgcacaacattcaactgcattactgagctgtttacatcaggcacccttagagagtgtagaaggaagtatcaagaggttgatatccgggcaatcaagagctgggcacgtcagatcctgaatggtcgtgcttatctccatggacatgatcctcctgtcatccacagagacctcaaatgcgagaatatctctccgttgatggacaaccttgggcaaagttcagattggtgacctggggcttagctgcgatttcttcgtggatcacagaatgcgcacagcggcatagggaccgcctgaatttgttggaccagagctatatgaggagggttcaacggggtttttgcaattattcgnttgggatgntgtgccnngnngtggttcccgtgggnntcctnntgngattaccnacccctnc

SEQ ID NO: 81688 - DNA, 526 bp, Arabidopsis thaliana columbia
  unsure (1)..(526): unsure at all n locations
nnnnnnnnnnnnnnnnnnnnnnnnnnnnnnnnnnnnnnnnnnnnnnnnnnnnnnnnnnnnnnnnnnnnnnnnnnnnnnnnnnnnnnnnnnnnnnnnnnnagacattaaattcagagtttttattatccacgaacgtgcaaccctcacgaaagtctttacaacaagagtcccaataatcaaacgtaataagaaaaagtgagtaaaataaatccttgataggcataacaaaagcatccataagaaacctaaatgagcaaatcagtcacttggtaaaatatgcaaaacaacaaaagatgacttagacttgaagacttagtagtagtactggtacattcacacgtaccttcccttccctgtctgtctctgtccggggaatcagtgatgtccccacgtcatcaatcattcaggcaacgattgggccccggcattcaactacggtccccccctggtcaacctcccggtagttggtgtcgttgtactcctgcatactatcatcagggctctcctttcccggtgaggctgtggt

SEQ ID NO: 81689 - DNA, 535 bp, Arabidopsis thaliana columbia
  unsure (1)..(535): unsure at all n locations
cacaaacctcctctcatcttcaccataaccgaaaaaccaaacaaaaaatccttacataatcagatcttgatattatggatcatatcatcggctttatgggcacaacaaacatgtcacataacacaaaccttatgatcgctgccgcagccactaccactacgacctcttcgtcttcctcttcgtcctccggaggctcggggactaaccagctaagcaggtacgagaatcagaagagaagagattggaacactttcggacagtatctacgcaatcaccgtccaccactttctctctcccgttgcagtggtgctcatgttcttgaattcctcaggtacctcgncccaattnggcaagactaaggttcacacacaactatgtncgttcttcgggcaaccaaaacccacccagaaccatgtgcctgtccactcggncaagcgtnggggtagtntggnnggactnattggccgtcttagagngtgctttttnaaggnacggtggtttccagagntgnaccctttttggtnaagggncgntc

SEQ ID NO: 81690 - DNA, 427 bp, Arabidopsis thaliana columbia
  unsure (1)..(427): unsure at all n locations
cggaaaaggtaggcatactccggagaaagggcataattgccaaataaggggtctttcccagaaccaagtctccaaagaaagcaaatagctgttctgcttgatagctttctcaaagtgcctctacctgataaccttctggcaaaaatgtagaggagaagcagagacttgatcagtggtctcagtttccatcgcatcagcatccatggtcatctaaaacatatacagtagatttacgaaaaaaacctaactttttaatctggaaaatgaaccacattcatctnataagctctacctaatgcccagcaattcttgaaatgcttccaatatagagctaatgaagccagcaagaccgatttccgaaacagtcttctgttcgagaataacagtgagcggcgttgtgatctcttcttccttccccggttcatgg

SEQ ID NO: 81691 - DNA, 1839 bp, Arabidopsis thaliana columbia
  unsure (1)..(1839): unsure at all n locations
nnnatgattctccaggtctctacgactcactattgggaaagctggtccgcctgcaggtaccggtccggaattcccgggtcgacccacgcgtccgcaacaaaacaaccttcttcctcgcgaaaacagagagaaagaggaagaagaagaagaagtctctgagaaattttcgaacatgagggagatcattagcattcatatcggacaagctggtattcaggtcggaaattcttgttgggagctttattgtctcgaacatggtatccaacccgatggcaccatgcccagtgatagtactgttggtgcatgtcatgatgcattcaacacattctttagcgagacaagctcaggccaacatgtgcctcgagctgtgtttcttgatctcgaaccaaccgtcattgacgaagtaagaaccggcacttacagacagcttttccatcccgagcaacttatctctggcaaagaagatgcagccaataactttgctagaggccattacactgttggaagggaaattgttgacacctgccttgaaaggctgaggaaattggcagacaattgcacagggttacaaggatttttggtattcaatgctgttgggggtggaacaggttctggtttgggttctttactgttggagcgcttgtccgtagattttggaaaaaaatcaaaactcggtttcaccatctacccttctcctcaggtttctacagcagttgtggagccgtataacagtgttctctcgactcattctcttctcgaacacacagatgttgttgttcttttggacaatgaagccatatacgatatctgcaggagatctttagacattgagaggcctacatactccaatttgaaccgcttgatctcccaaaccatctcttcgcttacaacttctctaagatttgacggtgccatcaatgtggacatcaccgagttccagaccaaccttgtaccttaccctcggatccacttcatgctctcctcttatgcacctgtgatttcatctgcaaaggcctaccatgagcagttttcggtccctgagatcacgacttccgtctttgaaccctccaatatgatggctaaatgtgaccctaggcatggcaagtacatggcttgctgtttgatgtatcgtggtgacgttgtgcccaaggatgtcaatacagccgttgctgccatcaaagccaaacgaacaattcagtttgttgactggtgcccaactggattcaagtgcgggataaactaccagccgccttccgttgttccaggtggtgacctggctaaggttcaacgagcggtttgcatgatcagcaataatactgcagttgctgaagtgttctcacgtatagaccataagtttgatctcatgtactccaaaagagcctttgtccattggtatgtaggagagggtatggaagaaggagagttctctgaggctcgtgaggatcttgctgccctcgagaaagattatgaggaagttggtggagaaggagcggaggacgacgacgaagaaggcgatgagtattagaaagacacaagagtgtgtgttcccttgtttctttcttgtgaagtacagtaattatgtctttgtgaatgtgatctctacagttattttgtgatgtttacgggtctctccccttttatttctcatttgtgtttactaaaggattgcatttctagtgcatctcaatacatagtttgaaggatttttggcatttcaaatacaaataacaaactaataaagatccttgtaagaaaaaaaaaaaaaaaagnnnnnnnnnnnnnnnnnnnnnnnnnnnnnnnnnnnnnnncatnnnnnnnnnnnnnnnnnnnnnnnnnaac

SEQ ID NO: 81692 - DNA, 545 bp, Arabidopsis thaliana columbia
agctctctacgactcactattgggaaagctggtcacgcctgcaggtaccggtccggaattcccgggtcgacccacgcgtgcgctggcttttgcaacatggattccacgagaaagccctagcagctgttgaggctagtgaaggacgaaccgaactaattgataaggtgggagctgggtatcttgatcatttgattgtggaaagaaaatatgctgaagcggcatctttatgccccaaattgttacgaggatctgcttcagcctgggagaggtgggttttccattttgctcaactacgccagctgcctgttcttgtcccatatatgcctacggataacccaaggcttaaggatactgtgtatgaggttgctctagttgcactagcaaccaatccctcataccacaaggagcttttgtcagcggttaaatcttggccacgttctgtatattctgctttgactgttatctcagcaatagagcctcaactgaacacatctttaatgacagatgccctcaaagaggggctggcagagctgtttgtatttgat

SEQ ID NO: 81693 - DNA, 658 bp, Arabidopsis thaliana columbia
  unsure (1)..(658): unsure at all n locations
nnnnnnnnnnnnnnnnnnnnnnnnnnnnnnnnnnnnnnnnnnnnnnnnnnnnnnnnnnnnnnnnnnnnnnnnnnnnnnnnnnnnnnnnnnnnnnnagttttgcaaaccgcatgcatgtgatattacaaaattcacggtgaattcgtaatgcgtcttggttcaaaatagaaagagactaaacattccagatttcaattctcagctacagaaatgagtgtttaacggatacagaaacaactctcacaatcttcattcatttcatttagctactactttccaaaggaacttcaacgcatacctttttcctctccagaagatcatgtttgtctgcactctcgtttgcctcagtatctttctcctgatgctcttcagatatatgttccaatttcgaacaatcaacaggatcaagtccgggtcttttcctctgacggaatcacagtgaagaaggctggtttccagtccctagtctccagaaacttgacgagtatctccaaaacttggttcacagtgagacctgagactggaatttcanaaancccnaggggagntagcngnttaagcctggctgagcctggcagggggccttgaccggtngncccagcccgaangagagntagggngtnccaaagttgacncggggaccaatttttgggcgggg

SEQ ID NO: 81694 - DNA, 474 bp, Arabidopsis thaliana columbia
gacgtcgcatgcacgcgtacgtaagcttggatcctctagagcggcgcgcctttttttttttttttttttttcataggaaacgagttcttattttggcactcaaacagtttatatcctcaaggggacacacatttttttcccatccagatgggtgtaaaaggatacacactactttacatagaacggcgaagacactaccaaatctgacatatatatatatataaggtgagtgcatctatatactctactgcggatttgggggacgactattagcagcagagactctagagccccactccaaaagttccttgcttgtatcgtctttgtgcactatcacttcaatgaaacaaaagctctctttttcctcattggttgccgggttgattgctttcactagctcctcctcgcatctcaccttggcagtccagcattttccttctccattgggtatgcctcaaaaaagctgtgtagttc

SEQ ID NO: 81695 - DNA, 725 bp, Arabidopsis thaliana columbia
gggtcccgcccggggatttcccgggttgacccacgcttccgaaaagatttttttttttaacgcgactattttggaaaatccaacgataagctttataatttttctacttatgagtggatgtgtgaagagcagggaaaaagtacgaaaggaaaatatgagtgaggagaagaggaagcaacacttcgtgctagtacatggtgcgtgccacggcgcatggtgctggtacaaggttaagcctcttctcgaggctttgggccatcgtgtaaccgccttagacctagctgcttccggtatagacacaaccaggtcaatcactgacatttctacatgtgaacaatattctgagccattgatgcagctaatgacttcattgccgaatgatgagaaggttgtactcgttggtcatagctttggaggtttgagtttagccttagccatggataagtttcccgataaaatctctgtctctgtcttcgtgactgcattcatgcccgacaccaaacactcaccatcgttcgtcgaggaaaagtttgcaagcagcatgacaccagaaggatggatgggctctgagctcgaaacacttggttcagattaattccggcttgcctgggttcttccccacccgacttcttgaagccccgtttctaccaacttttcttctggtggaggaaactttgagccttggaatttggcttctaaaagaagggccccggtcccactggggt

SEQ ID NO: 81696 - DNA, 810 bp, Arabidopsis thaliana columbia
tatagaagactatgacgtcgcacgcacgcgtacgtaagcttggatcctctagagcggtcgccctttttttttttttttaaggcattggtataatttgaggcatatttaaaagcgatatgcacgttaaaccaataactttttattatttttactaaattaaaataaagcagttctatctaataatattacaaggcatgctataaaaagaaaatcacattgttgccattttgcagtaattgcagcgatcctatgtaatctatgaaccggctctaaatatgttgtatcacatttggatacaaaacatacaccagttttccaaaaccatattatgctgcaaaattatttaatagttgattcaacaaaatcttgaatcattttattgggttggaccatttgttaatacgagcacttgctttctgcgcctctttttcccagtcacatctcattgtgataaaacttaagatcatggtttgaacagcggttcctccaaaaatcataccaccccaaattcccatgacaccgagtttaaaaccccagcccatgagaaacccaagtggaacaccaatgcaatagtaacatcccaagtttatatatgccacgtacgattgccaacccgatccaaccgccacaccggaaagaaccggttgaacgctgttaagaagaacggtgaaagctagcagaagtgagagtttattgacggcgtctaagacggctacactcgaagagaagatccatgcgatttggttatggagaagcattacggacgcgtgggtcgacccgggaattccggaccggtactgcgacgggcat

SEQ ID NO: 81697 - DNA, 586 bp, Arabidopsis thaliana columbia
  unsure (1)..(586): unsure at all n locations
acggacgcatgggccagagtgtattggtagattttgatttacgtacgccaacactctttgacaacaagtattatgtgaacctcaaggagaacaaaggacttatccagagcgaccaagagttattctctagccctgatgcttcagacactcttcctttagtccgagaatacgctgatggtcaagggaaatttttcgatgcgttcgcgaaggcaatgataaggatgagtagtctttcacctttaacagggaaacaaggagaaataagattgaactgtagagtggtgaattcgaaatctaaaatcatggatgtggtagaagatgctcttgaatttgcaagctcaatgtgaggaaatgtttttctttaacaataaataaattatcaatgttgtcaagatgttatcttttttccttacttccttgtttgttttgtgttacttatttaaattctatataactattaaaccttgaatccataaattatttttaccaaaaaaaaaaaaaaagnnnnnnnnnnnnnnnnnnnnnnnnnnnnnnnnnnnnnnnnnnnnnnnnnnnnnnnnnnnnnnnnnnnnnnnnnnnnnaatcg

SEQ ID NO: 81698 - DNA, 726 bp, Arabidopsis thaliana columbia
taccggtctggaattcccgggtcgacccacgcgtccggaactgtgaaaccaaaataataaaaaaaatgatgatgatgataattctcttgtggtcaataattttcatgaccattctcttcttaaaaaaacagttgagtgggaagaaaggtaagacacctccgtcaccaccgggacttccgttgatcggaaaccttcatcagctcggccgccacactcaccgatcactatgcgatctcagtcgccgttacggtcctctcatgctccttcacttaggtcgtgtccccgttcttatagtctcttccgcggacatggctcaagaaatcttgaagacgcacgaccaagctttcgcaaaccgcccacggtcaaaactctcccagaagcttctttacaacaatcgtgatgtggcctcagctccttatggagagtattggaggcaaatgaagtccgtgtgcgtcattcatctcttaagcaacaaaatggtacgatcttttcgagatgtaagagaagaagaaatcactttgatgatggcaaaaatccggaaatcgagttctttgccgtttaatgtaagcaaggtcttggagtgtttgaccaacgatgtgatatgtagagtcgctttgggacggaaatatggtggtgaaactgactttaagaaggtaacggatagactaagcgagctattggaaacgtttaatatagggagttttgaaccgggctcgcgtgggttga

SEQ ID NO: 81699 - DNA, 639 bp, Arabidopsis thaliana columbia
gctggtacgcctgcaggtaccggtccggaattcccgggcaacaatacacttctcttgacgcctatctctttctcaccaccaccattaccttcgtcacttctctcttccaagcaatttaaaccttcaactaatccagaaatgcaaatgctaagaaacttaagcacgaggacgaggagtcgtcgcggcggatatgagcgtgtaagcgatgattccaccttcagcctacttggagcaaagctaaggaggtcaacgagcgttccatactatgctccatcgataaggcttggtggagattttcctgtgattttggaaaagcttccacgccaaaaaccaactaaaacagtggtgacaagcaaattaagccatccaatcttcagtttatttgatggttatcgccggcataacaagaagaaagcgacggctaaaccggagttctctagataccatgaataccttaaagaaagtggaatgtgggatttgagatctaataagccgggcatctactttaaggagatggatataacaccatatatgttagggttgggcctcatttattatattatttgggacaattcttaaggatccgaatgatcgaactataagagctattttctttttcttccccttggaattttttaa

SEQ ID NO: 81700 - DNA, 729 bp, Arabidopsis thaliana columbia
cctgccagtaccggttcggaattcccgggtcgacccacgcgtccgggactgtccttggtgtaagagatcctatatctgcagcactctctattgtgaagggtggcctaacagctactgatgtctttgctgttgaatggattcataccggtattatacactttggaatgactgtttcctactatggttttgttagcgatgttttggagctctctgaaaaataccaaaaacggtttggtcctttgcgttactttgttgctggattcctcaagttcatgtgtttgccgaagtatagctatgaagtggaatatcttccggcacaaaaagaggatgcagaaggcaaaattcgacttgaaaaggaagctgtggatatgcaagatctctacacggatgtaatgaggagatcaagcagagaaggatttcctagagcctccagtttatcaagtattgactccataatgaccccaagcgtaggcgaattagacacttgtagcagcacacatgccagcactgagccgtctgaatatgtccgtggaatagatcctaaaatgaaacgcttgtcctctggaagaagagatgttacggctgagccagaggttatttatcctcaaacacagtcaacaacccctaattggcccaggacaagatcaaagtcaagactggataaaagatggatggggttaacatccgtgcaggatcctccaactcgatgttcatgggagaatacccggg

SEQ ID NO: 81701 - DNA, 719 bp, Arabidopsis thaliana columbia
cggaatttccgggtcgacccacgcgtccgagagaggttctacaaagggctgttcgatagggccatgaagaatggaagcgttatgattcataagggaagccgtccagattcgttaccaatagccctttacaagattgtgcacggggaagggagctttttcagtgggagaataatggagtggagagaattatggaacttactgccgacttaggtgccttgtcacagaagtttttcgggtcaaagatgtttcgtaagctgcttgagaagctcggtatctcacttttcaaaacggagataatggttgtttcacgtagatttagtgagctggttgaaaggattcttattgaatatgaagagaaaatggacgggcatcaaggcacacagtttatggatgccttgttggcagcttatcgagatgaaaatacagaatataaattcactaggagccatatcaagtcgcttctcacggagtttttcattggagccgctgacgcctcatcaatagcaatacagtgggcaatggcagatatcataaacaaccgtgagattcttgagaaattgagagaagaaattgattcggttgtaggaaaaacaagattggttcaagaaacagatttaccaaaccttccttatttgcaagctgtagttaaggaagggctaagattgcacccgcctacacctctggttgtaagggagttccaagaaaggtgtgagattgga

SEQ ID NO: 81702 - DNA, 944 bp, Arabidopsis thaliana columbia
  unsure (1)..(944): unsure at all n locations
gcctgcangtaccggttcggaattcccgggtcgacccacgcgtccgagcaatcgctcgagaccccttacaaatattgatctctctctttctatatacataacaagactcattttgtgaggccatgtcaggagtttgggtgttcaataacggagtgatacgtctagtggagaacccgaaccagtccggtggagtttccacacagtcgcacggccggagaaatgtcttggtttacttgccgaccggtgaagccgtctcatcttactcgtcgctcgaacaaatcctaaggagcctcgggtgggaaagatacttcaatggagactccgatctcatccagtaccacaaacgctcctccatcgacctcatctccttaccaagagacttctccaaattcaactccgtttacatgtacgacatcgttgtcaagaaccctaattccttccacgtccgcgatttcaattgaaatccacacggaattaattactctcgaccaagaggtctagtttgtgtttcttttgttcaaccgggaaattccagacataaaacctataatgtcaaaatcggaatctgcagtgtgaatatgaatcacgtagaggtagaagagaagatgtgtgcagctgtttgaattcgagaaacgaagcgatgactattggattatcatcacttagttagattgtgtttatttgttgatatgtgtgttttaaatttttaactgtttgtttggttttaactggttctccaagtttgtagcatgtgcatgcttctttatttttcattttaatttgtgaggcttgtatgggacaagatagtagtgttgcaaaaggtggcacattacttaaaaatgttgttaatttttttgtttgtttgtagctttgtccctgtggtgcatggtgatcgatgtaagaattgtatatcatttggctttaaactattttacatttactcc

SEQ ID NO: 81703 - DNA, 534 bp, Arabidopsis thaliana columbia
  unsure (1)..(534): unsure at all n locations
cnnnnnnnnnnnnnnnnnnnnnnnnnnnnnnnnnnnnnnnnnnnnnnnnnnnnnnnnnnnnnnnnnnnnnnnccacgcgtgcgtgacgttcatcatctccgggccgataccagtgtgcgtttggatcgggttgacatgagcctcgacagggtgattcagcaagtgggttccatgaaaattgggggaggtggcttgatatcagaggccatgaagagagccgaggctatggagattgagaccaacgacgattcggagaaatttggggttggattggaattgggaaaggttaaggttaagaagatgatgttcgaatctcaaggaggggtttttgggatcagtggaatgggcggtgttggtaaaaccactcttgccaaagaacttcaacgggaccatgaagtccaatgtcactttgagaaccggattttgtttctgactgtatcacaatctccgcttcttgaggagctgagggaacttatatggggtttcttatctggttgtgaagctggaaatcctgttcctgactgtaattttccg

SEQ ID NO: 81704 - DNA, 522 bp, Arabidopsis thaliana columbia
gtgcgcctgcaggtaccggttcggaattcccgggtcgacccacgcgtccgcaagtatatgatgcgcgctctagaggatgatttcaaacaagttgttggtattagttggtatctttggatctttgtcgtcatctttttgctgctaaatgttaacggatggcacacatatttctggatagcatttattccctttgctttgcttcttgctgtgggaacaaagttggagcatgtgattgcacagttagctcatgaagttgcagagaaacatgtagccattgaaggagacttagtggtgaaaccctcacatgagcatttctggttcagcaaacctcaaattgttctctacttgatccccttttatcctctttcccagaatgccttttgagagagccttgtttttcctttgggatttgggctacatacagattcgactcgtgcattatgggacaggtgagatacattgtgtccagattggttatcggggtcttcattcaagtgcttagcagttacagtacactgcctc

SEQ ID NO: 81705 - DNA, 922 bp, Arabidopsis thaliana columbia
ctgcaggtaccggttcggaattcccgggtcgacccacgcgtccggcaaaacttgatccaaccaggacatggattatctcggaagaggatcaatggtggaatcaatggaggcctcatcaatgagatttcactagaatctttggagtatcgaagggatttactttttccattttctctcttattgaacaacactcgacctgttgggcgtcaggatactcttctccgttttatttccatccttctccttgctgatctttcagttacgctacttgcattacttcagttctattggcttgcccttgcagcctttcttgctatcctcctgattctccctctctcccttctttgcccattccctgccggccttaacgctttattaagtaaagaaatgagaagagcctcacttactcgtatctacggcctgtggaatgctacatctctaacaaacgtcattgtggctttcatttgcggtgtcattcattccgggtttttcactgacgagctaccaaacatctggaacgccataagggatgatgataaatggtgggtattaccaacaatcctcttgttactcaagtcaatacaagctcggttccttgattggcacgtcgcaaatctagaagtaccagacttttctcttctttgtccagatccagataccttctgggcatatgaatctggagcttgaccatcaacatgattataaagaaagaccagcaaaagatatatcttatttttcatgtaaatcttttaaaagtacaaagttcttctcggtgatagttgttaaaaacagttctctagaacatctggttatatatctggtgctgaattagcagttcgccagatcaatggtagttgtagaaacttacaccgatagtatgtaatgcttaatgttttgcaacaacaaaaaaaaaaaaaaacaa

SEQ ID NO: 81706 - DNA, 1403 bp, Arabidopsis thaliana columbia
  unsure (1)..(1403): unsure at all n locations
cccaagcgtccgcggacgcggagagagagagggacgatcttttctataactgaaacactactcgaggccaagttgctttagccgtaatcgtcgtcgtccctcttcccgatattatctcttctctgttcttcgatttcgaaaccctaacctcctctctttaattcgcgttttctggatcgaagatggtggcggctggtaaatccgacctttccttgcccaaaactttcgcctgcagtgccttcgctgcttgcgtcggcgaggtatgcacaattccattggacactgctaaagttaggcttcagctccaaaagtctgctcttgctggtgatgttactctgcctaaatatcgaggattgttgggaactgttggtaccatagcaagggaagaagggttacgttcactatggaaaggtgttgtacctggattgcatcgtcaatgcctatttggaggtcttaggattggaatgtatgagccggtgaaaaacttgtatgttggaaaagactttgtaggtgatgttccattgagcaagaaaattcttgctggtttgacaacaggtgcactgggtatcatggtagcaaatcccactgatcttgtgaaagttaggcttcaggcggaaggaaaattagctgcaggtgcgccaagacggtactctggagcgctgaatgcgtattcaacaattgtgagacaggaaggagtccgagctctttggactggtcttggacctaacgtagcaagaaacgctattatcaatgctgctgaattagcgagttacgatcaagtgaaagagactatcttgaagattccagggttcactgacaacgttgtcacacatattctatctggactgggggcaggattctttgctgtttgcatcggttctcctgttgacgtggttaagtcaagaatgatgggagattctggtgcttacaagggcaccattgattgcttcgtcaaaactctgaagagcgacggtcctatggcattttacaagggtttcatccccaactttggacgccttggctcatggaacgtaatcatgtttttgaccctcgaacaggcaaagaagtatgtccgggaactcgatgcgtccaaaagaaactgagacacaaagttttaagcagagggaatgagagcaacattgttttcttcttcattttcggtgattgagagaggccagaacttggtcgaatattgttttcggaatagagattcagttttcgagtaaaactgtgaaataaaatttctgtggattgctcataaaaaaaattnnnnnnnnnnnnnnnnnnnnnnnnnnnnnnnnnnnnnnnnnnnnnnnnnnnnnnnnnnnnnnnnnnnnnnnnnnnnnnnnnnnnnnnnnnnnnnnnnnnnnnnnnnnnnnnnnnnnnnnnnnnnnnnnnnnnnn

SEQ ID NO: 81707 - DNA, 581 bp, Arabidopsis thaliana columbia
  unsure (1)..(581): unsure at all n locations
nnnnnnnnnnnnnnnnnnnnnnnnnnnnnnnnnnnnnnnnnnnnnnnnnnnnnnnnnnnnnnnnnnnnnnntttattttattttgcatcatcatcatcaatatcattcatcatcatcagacatcaggtgcgtcataagctccacaaaaaactcatccatggcgattcttagttacatctcagcaacatcaaccacaccaccaattcctcaagatcaatctcccaattctcgtctaccaaccaaaatcattctacccaataagaaacctgagaaatggtccaccggagttgctcccggagagtacggtggtcctccgactaccaccaagctccgaaagtactggggaggtgaaaaagaagatcccattacttccacagacttaatctggaacagagattttatggatcaaatgaagaaattgtttgatgatcctaatgattcttctctcgacccatctccttcaaaggaaaagtcttctgggtttctgagctttagcagagttatgagtcttgacagtatggatgttgatttaagtaaagagcttgcatcgtcttctaaatccgttgtgaaaaatcgtcttg

SEQ ID NO: 81708 - DNA, 558 bp, Arabidopsis thaliana columbia
  unsure (1)..(558): unsure at all n locations
atgatactccagctccctacgactcactatanggaaagctggcacgcctgcaggtaccggtccggaattcccgggtcgtacccacgcgtgcggaaaaagaagatcccattacttccacagacttaatctggaacagagattttatggatcaaatgaagaaattgtttgatgatcctaatgattcttctctcgacccatctccttcaaaggaaaagtcttctgggtttctgagctttagcagagttatgagtcttgacagtatggatgttgatttaagtaaagagcttgcatcgtcttctaaatccgttgtgaaaaatcgtcttgacacctccaagtcagaagctaaaaagcaaatgagtaaggctattgtgtctcctaaatggaagctggcacctacacgtcgtgagcaagagaaatgggatagagcaacgaaggctgcaactggtggcagtgatgtgatgtttagggagctgagacggccacgtggtgacccagaagtacaagctgctaaagacagggaacaatattttaagctgaaaaataagattcaggttctca

SEQ ID NO: 81709 - DNA, 881 bp, Arabidopsis thaliana columbia
ggtgcgcctgcaggtaccggtttcggaattcccgggtcgacccacgcgtccgagcgaatctcgaagaaagagattgaaactaaactgttgaaattttccgacaataaacttatctcttttcctcattcaatcctagagaccaaaaagcttaaaagcaaaaaagaacacaaggaaatttactcagaggtaatcgtcgtcggagccaggaggaagaggagggatgggagaggtctggacatggattatttcattcttaatccttatcactcttctcggactcatcgtctatcagcttattagtttggctgatctcgagtttgattatatcaacccttacggctctgcatcaagaataaactttgtggtattaccagaatccattcttcaaggatttttcatgcgggattttacctcgtaacgggtcattggttcatggcactcctttgcgttccttatctctactacaatttccatctgtactctcgaaaacaacatttgatagacgtgccagagatcttcaacttgcttgattgggaaaagaagaaacgactcttcaagctcgcttacattatcctcactctctttctcaccattttctggttaatctattcaacacttgatgattacgaggactgaatcacgcttgaagatacacccctgtgacaggcgacaacaaacggtttggtcaaacccctctcttagtacttgacaccgcgcttgatacaatggcatgagaaggaaggcttttaggttatgtaagttaattaatgtggcattagagagctgtgtaaaccagattttatagtcattagaatttcattgtggatctttgtggtgaagccaagcagtgaattgttaaccatgattggaaccctctaact

SEQ ID NO: 81710 - DNA, 891 bp, Arabidopsis thaliana columbia
  unsure (1)..(891): unsure at all n locations
nnnnnnnnnnnnnnnnnnnnnnnnnnnnnnnnnnnnnnnnnnnnnnnnnnnnnnnnnnnnnnnnnnnnnnnnnnnnnnnnnnnccacgcgtccgtttccatttaaaactctcttcttcttttttgttctctctctctcttcatggaagctcaacaccttcatgccaagcctcatgctgaaggagaatggtccacaggcttctgtgattgcttttctgactgcaaaaattgttgtatcacattctggtgtccatgtatcacctttggccaagtcgccgagattgtagatcgaggatccacatcgtgtggtactgctggagctctatacgcgttgatagccgtagtaactggttgtgcatgtatatactcatgtttctatcgtggaaagatgagagctcaatataatattaaaggagatgattgtactgattgccttaaacatttctgctgtgagctttgttctttgacccaacaataccgtgaactcaagcaccgcggttacgatatgagtcttggatgggcggggaacgtggagagacaacagaatccaggaggtgtggccatgggtgctccggtcttccgaggcggcgtgacccgctaaggattatttctttatgtaattcatttgtcttttatatgtagtgataacgcggggtttaatcctcggtttgtgttgttaatatgcttgttgtgatttgaacaaaaaaaaatgcttgttgtgaaagtttagacatacagtatatgaatgtttcttcattgtatattccactatttggttacaagaattaaattacaacgtcgnnnnnnnnnnnnnnnnnnnnnnnnnnnnnnnnnnnnnnnnnnnnnnnnnnnnnnnnnnnnnnnnnnnnnnnnnnnnnnnnnnnnnnnnnnn

SEQ ID NO: 81711 - DNA, 535 bp, Arabidopsis thaliana columbia
  unsure (1)..(535): unsure at all n locations
caaaaanctttatctttcctncctttgaaatctcccggagaaaaactatagagattttccgtttcccgctttaatacagtgccccaattcgcgcgacacatagagtgtagagacgctttcacgagcgtttccgacgtcggactttcagctcatcatctccacatctttaacggtaaagattaatcatgcctgaaattcatttgggtgctcatacaataagatcccatggagtaacagtcgcgaggttccacatgcatgactggctcattcttctgctgctaatagtcattgaaattgttcttaatgtcatcgaaccctttcatcgttttgttggagaagatatgctcactgatctcagataccctctgcaggacaacacaattcctttctgggctgtcccgttgatagctgttgtgctaccttttgctgtcatttgtgtttactacttcattagaaatgatgtttatgacctgcatcatgcaatactagggcttttgttctctgtacttataaccggtgtcataaccgatgctat

SEQ ID NO: 81712 - DNA, 419 bp, Arabidopsis thaliana columbia
agaaaagtctgtttttttattgagatttttttgtttctatagattctatcgaaatgccgatgtttcagccgttaaagagagatgggttaataggatttgaaggtggtggtgatgggcaagtcttagatctggatactgcagtgaaagatggagttctcggtggtgttaatggtggtggtgttggagttgttgatgagaaattggatctgaagaagatgataaaggagctagatttacaagatataccttctgttttcatttgtcctatctccttagagccgatgcaagatcctgtgactttgtgtactggtcaaacctatgaaaggttaaacattcacaaatggtttaacctaggtcacttgacttgtcctactacaatgcaagagctttgggatgatacggtaactcctaataaaact

SEQ ID NO: 81713 - DNA, 1321 bp, Arabidopsis thaliana columbia
  unsure (1)..(1321): unsure at all n locations
cnnnnnnnnnnnnnnnnnnnnnnnnnnnnnnnnnnnnnnnnnnnnnnnnnnnnnnnnnnnnnnnnnnnnnncccacgcgtccgcccacgcgtccgcccacgcgtccgctctcaaaaccaaaatcactaaagaggagaagattgctaaagtttgataaaacattccaaaatcaatggctgataggatcaaaggtccatggagtcctgaagaagacgagcagcttcgtaggcttgttgttaaatacggtccaagaaactggacagtgattagcaaatctattcccggtagatcggggaaatcgtgtcgtttacggtggtgcaaccagctttcgccgcaagttgagcatcggccgttttcggctgaggaagacgagacgatcgcacgtgctcacgctcagttcggtaataaatgggcgacgattgctcgtcttctcaacggtcgtacggacaacgccgtgaagaatcactggaactcgacgctcaagaggaaatgcggcggttacgaccatcggggttacgatggttcggaggatcatcggccggttaagagatcggtgagtgcgggatctccacctgttgttactgggctttacatgagcccaggaagcccaactggatctgatgtcagtgattcaagtactatcccgatattaccttccgttgagcttttcaagcctgtgcctagacctggtgctgttgtgctaccgcttcctatcgaaacgtcgtctttttccgatgatccaccgacttcgttaagcttgtcacttcctggtgccgacgtaagcgaggagtcaaaccgtagccacgagtcaacgaatatcaacaacaccacttcgagccgccacaaccacaacaatacggtgtcgtttatgccgtttagtggtgggtttagaggtgcgattgaggaaatggggaagtcttttcccggtaacggaggcgagtttatggcggtggtgcaagagatgattaaggcggaagtgaggagttacatgacggagatgcaacggaacaatggtggcggattcgtcggaggattcattgataatggcatgattccgatgagtcaaattggagttgggagaatcgagtagacaaagtgagattattaggaaactgtttaaattggagaagaagaaaaatgctctgtttttttctcctttggattaggcttaagaattttgggttttaaggaaatgtatagaggaaatcgagtgaacaaagctcgagagctggggacgtagtgacgaagacgaagatcaaatttctcttaagctattcaggaaaataaaataaatttttatttataaaaaaaaaaaaaagaa

SEQ ID NO: 81714 - DNA, 433 bp, Arabidopsis thaliana columbia
aaccgtcaccttgttatacacatttaatggagtttacactagggacagtgaaatgagttcttcattgactttgacttgcactgacggtgctcctgccttaaaacaaagaaccatcggtctcgctaacacccacttgtcgattccctcgcagctcatctccatgtaccagcttcctcataagatagctctttgtttgccttccaccgaacgaagtcagtctcataatggtgacctttggatcggtaaaggggaatattattatctgccttacgataaagatgtctctaagatctttgcctccacgcctctgatcggtaatggcaagtccggcgagtacttaatcgatgtgaagtccatccaaatcggtgcaaagaccgttcctataccctatggagccacaaagatcagcactttggctccttacaccgtattc

SEQ ID NO: 81715 - DNA, 453 bp, Arabidopsis thaliana columbia
gttgttacaggttcaaagattcttagccttccggggagttttggtaagaaaaagacggagtcacagccaccgtcacccctgagtacaaggaactatcagaatggtgctgctaataccccaaaggttcgtcaatcaagaccttcaccagtagctatgaagaagacgccagttccagaagcgaacaaatctttacactctttatcgtctgatggaatctctattgacctcaacggtcagaatgattcttttaaccataagcaggagaagccatcgcgaactgttcctctatccccaaacagcatggctgatcgtgggaaacccttatcaccacgacctcaagggcatgaacacagtggcaagaatgacacagccagtgagattagtttgtttaatgttgtaagccctccaagatcatgcgccaatgatgatgatgatgatgatgatgaaaacaat

SEQ ID NO: 81716 - DNA, 853 bp, Arabidopsis thaliana columbia
acctcttgggataacgggtctgatatttaatcagctttcatgctgcaaactaactcacattttacaaattgatttggatgggaagctaaaatgcaacggaagggtgacaactttatgctaaaacacccatttcctttgatcatcaaactacatgcttaagcgccaaaccaaaggtctttgcacggagaaaaagttttaaaagttacaaagctggtgtttgatagatatggaatgcaaactgatcatgtttatgtttttattttcgcttatgcagaggcaagctgacacagtgaattgtgatatgattccgacgaggtcaacataagtgtgttggcacaccgaattatattatgcaatgaaggaaaaatagttgagttggatagcttttgaatgcgtctcatgatcatgctgcggttggctgagctgaagatggacatgttcgttcgaggtatctctcatgtctagaccatttgtgagaagagaattcttgtttgcgattttcacaccctcgacctctgaaaccttttcatgtagttccatgttctgttggtgcattaggtttactttcttgtggaggtctaaattctcttggtgaacgagattcccctctcggttaagtacttgtatttcttcgattaacatttgatcctttttcattcgaacgccacgaaggctcaattcaagctgattttccaaattctgtaaagcttctacacttagtccagagagctcctcccccatcatttgccggtggttttcttgcaagttatgtagctgacgctttagaatcgcagcctccttttgccagaactgaatttctgaagcgggatcattttctgaactggtttctcct

SEQ ID NO: 81717 - DNA, 680 bp, Arabidopsis thaliana columbia
  unsure (1)..(680): unsure at all n locations
ccccccctagccttgctgagggtataacataagcttgatatcgaattcgcggccgccaaactacattgcttaagcgccaaaccaaaggtctttgcacggagaaaaagttttaaaagttacaaagctggtgtttgatagatatggaatgcaaactgatcatgtttatgtttttattttcgcttatgcagaggcaagctgacacagtgaattgtgatatgattccgacgaggtcaacataagtgtgttggcacaccgaattatattatgcaatgaaggaaaaatagttgagttggatagcttttgaatgcgtctcatgatcatgctgcggttggctgagctgaagatggacatgttcgttcgaggtatctctcatgtctagaccatttgtgagaagagaattcttgtttgcgattttcacaccctcgacctctggaaccttttcatgtagttccatgttctgttggggcattaggtttactttcttgtggaggcctaaattcccttggggaccgagattccccccccgggtaagtacttggatttccccggttaacatttgaccctgcaaaaggcaaagagggcccccgatcctgaacccngggggcccangtncanngggccccccggggngnccaccttgccccctagggggggaatccncctngggaaccngggaacgg

SEQ ID NO: 81718 - DNA, 647 bp, Arabidopsis thaliana columbia
  unsure (1)..(647): unsure at all n locations
aagcttgatatcgaattcgcggccgccaccaaagatgatacatgttacttcgtggaatcactcataaagtgtaacctcaaatccttggcttgtgtctctgaaagattggctgctcaagacattaccaattccatcgcaactttctgtaacgcttccaatggatacagagagaagaatcatacagaaaccaacctttgtagatttggctagattagtcccacgaacaaactcagtgaaggaaatttagattcatagaagcacgtgtgatcatgcttctctgctgctttactcagatcagctccatgggccattttcgagcatgcagtcaaagttttgatgtaatttggttttctgggggtttgttggacagtgtctgtatttacgcaccattgttaaggaaaaacagagctaggtagtatctatattatcaccaagagtcgttgcagggacattttccggccctgaaatggtggaccctggccccttcttgggaaaacaacctcgcggttccccaaaaccggcatggatttggctacgggggggctatcaggcggccgnnggatccctgancccggggggccccaattttaaggggccnccgggggggccccnttttnccctagnggggnattcgncnggggaaaggt

SEQ ID NO: 81719 - DNA, 907 bp, Arabidopsis thaliana columbia
  unsure (1)..(907): unsure at all n locations
cccctaggctcngagggttaacaagcttgtatcgaattcgcggccgcaggagttgtatatgcgcagatatagttgccatggctgctagagatgcctgtcttttgggcgggggggcccatattatgccatcccgaaaggaaggtttgatggtaaaagatcaaagatagaagattcaaggattctcccttcaccttttcttaatgcctctcaactcactcatacttttggccaacgtggttttcactccccaagatgttgttgctctctctggagcacatcccctaggagttgcacgatgctcctccttcaaggctagacttaccagtcccagactcttcattagacctcgactttggcaaacactctctctaaaacatgcagcgcgggtgaccatgcagagcaaccctttgatgctacgcgcaacgatttcgacaatgcttacttcaatgcgcttcagatgaaatcaggagtcctcttttcagaaccaaactttattcaacacaccaaggaccaggaatcttgttaacggctatgcacttaaccaagccaagttcttctttgattcccaacaggccatgcgcaagatgagcaatcttgatgttaaacttggctctcaaggtgaagtccgtcaaaattgtcggagtattaattaggctagaccacatctacttacgatttttgtatttataataagttctctactcttgttataggaagaatcatgaatcttctaggctactatgtaaaaattgtgtactctcgtaatatgcagttgtatacttattgcttgtgtggttcagatatccatcaaaaagtaatatactttggttgcattttcgcggccgcgaattcttgcagcccggngcatccactagaatagagcgtccgccaccgcggtgcagctcca

SEQ ID NO: 81720 - DNA, 592 bp, Arabidopsis thaliana columbia
  unsure (1)..(592): unsure at all n locations
cccccctagagctcgacggtatagataagcttgatatcgaattcgcggccgctaccccatggctcgccttaatcccactttgtcaagatttggaaaattttgtgggatagtgactgtggagtcatttgctgcgtctgcaatgggtctaactgttggagctatggtcccaagcacagaagctgcaatggccgtgggaccatctctcatgacagttttcatcgtttttggaggttactatgtcaatgcagacaacaccccaatcatcttccgttggattcctcgtgcttcattgatcagatgggccttccagggactctgtatcaacgaattcagcggcctcaagtttgatcatccagaacacttttgacgtccaaactggggaacaggcgctagaacgactgtcgtttgggaggaaggcgggtaagggggagcgatagcagctcaaagccgggttctgatgtcctgggatagcgccacgtaccttcccctgggagaaaaacaagccaaagtttcaaaagctagagcttttttttaaaatggaaactnggantncngggncccnctggaaaacggggtttntaaagggaaccga

SEQ ID NO: 81721 - DNA, 567 bp, Arabidopsis thaliana columbia
  unsure (1)..(567): unsure at all n locations
tttttcnncttataaatcttcagacggcgatcctgacgttagcgcaggggtgttttcaagccaatgttcaaagttccccacatctctctatacgttttctctccttcctcacattgtttttggaagtcaccgcattagaccttttcttctcttaaatctaatacaaacttatgaataattagtgctaaacaggagattagtcgagtcttacattggtttaaaggcaaagagaggtaagaggagcaaccacttttattcgaatccctttattctcacactttgctacctgcttcgaggacaaagggacggatttcgtcaagctcatcatccgaatccgatgtttgattttgatcgtcaagtggttgattgatatcatcgtcttcaggtttctccgtttggtcaacctctgctttatcccagttggactcctgaattacccagtttctccattggtcaacaagaagctctagcttttgatactttaggctagtttttcttccagagaagggtacgtggcgctataccagaacatcagaattccggctttgagctggtatcgtctcccta

SEQ ID NO: 81722 - DNA, 1131 bp, Arabidopsis thaliana columbia
tcttcttctctacaacaaacaaacaaaagatctgtttcaatggcggatcgtgttaaaggtccatggagtcaagaagaagatgagcagctacgaaggatggttgagaaatacggaccgaggaattggtctgcgattagcaaatcgattccaggtcgatctggtaaatcgtgtagattacggtggtgtaatcagttatctccggaggttgagcatcgtcctttctcgccggaggaagatgagactattgtaaccgcccgtgctcagtttggtaacaagtgggcgacgattgctcgtcttcttaacggtcgtacggataacgccgttaaaaatcactggaactctacgcttaagaggaaatgcagcggaggtgtggcggttacgacggtgacggagacggaggaagatcaggatcggccgaagaagaggagatctgttagctttgatcctgcttttgctccggtggatactggattgtacatgagtcctgagagtcctaacggaatcgatgttagtgattctagcacgattccgtcaccgtcgtctcctgttgctcagctgtttaaaccaatgccgatttccggcggttttacggtggttccgcagccgttaccggttgaaatgtcttcgtcttcggaggatccacctacttcgttgagtttgtcactacctggagctgagaacacgagttcgagccataacaataacaacaacgcgttgatgtttccgagatttgagagtcagatgaagattaatgtagaggagagaggaggaggaggagaaggacgtagaggtgagtttatgacggtggtgcaggagatgataaaagctgaagtgaggagttacatggcggaaatgcagaaaacaagtggtggattcgtcgtcggaggtttatacgaatccggcggcaatggtggttttagggattgtggagtaataacacctaaggttgagtagttttggtttagggttaaaacttgaatcgattggggattttcaagagcattcatttttggggtttatggtaaaattaaaaacaaaaacaaaatgtacagaggaattaaaatttctatggaataatcttaaatctcaaatatttgttacttgttttggtgattcataaccaaaatcaaa

SEQ ID NO: 81723 - DNA, 548 bp, Arabidopsis thaliana columbia
  unsure (1)..(548): unsure at all n locations
agaagagacaaaggggagagagagaaaagaagagcgaacaaattccttctttttcccctctttctctctctctcccactctctcatcttcttcttcttatgattttcaacttattacaacaacaacaacaacaaaataatcttgcaaagtttcagtctcaggtggttcacagttaatgctacttgcaatgatgaatccatcccaatttcgataacctctactgaggcatccaaatgttgaacggaaaagaagagcctaagcagaagaaaggttggtcagagtcgctgctagaatttcggtcagggtttggggaaaagatgaaagttgtgtcgaagaaacgttggaaatctcttggtcctcttcatctgaaaagcaaatcagttgcacggttttgcttcttttcgaagttgaagtcaaacaaccatggtccaggccgtgcaccagtgtatctcaatgtttatgacttgcctcctattaacgggtatttcttttgggcaggccttggtatattnaactctggngtagaagttcatggngtagtgtatgct

SEQ ID NO: 81724 - DNA, 575 bp, Arabidopsis thaliana columbia
tttttactttttttagttttttcggggccgacaaatcaaaattttccagatatgttaagaagcttaaacattgtaatggagaaaataaataatgtggagaaaccgaaaaaagaaggagataaaagggtacaacatcagagaaatcctctttaaagtgtggagagaacaaaacgaaaaaaaacaagaaaaaaaaaaaggacaagacccctctctttttttgtggcattgttcttcaaacttgaaacccagccttatatagaaaaacaattatacacatttggcatgttacaactccaaaacattttctgatccacacacctcggggaaagattcattaaatctcaagtttgatccgggtctgtaggaacagatcttccatcttctgtaaattatctcctgggttgatttgcttcttattgatagctaagagggttttcaggttgcaactgagaggctcttgaatgcttcgagttgtccgtcgctcaattcagtctgacccattggatggtttggcgtgtcaccgttctcattgctcttgcgggatgagttgtacactgaatcaggcatcaaagagc

SEQ ID NO: 81725 - DNA, 486 bp, Arabidopsis thaliana columbia
acaataatacaatattattatataaaatatcgtggactttacacatacatttatttattcattaattatacatccatcacacaacaattcgtaacaatttcattttgtaatatatattcaatttagtttaagcagtcatatcttctttttcttcttgaccgagtcggtaatcttgagaaccataaggactaaaagcttcaaggaggaagttggatttacgccaaggattgagtcccatgtcgttgcacatatcatcagcatgttggatgctgaacgtggaaatgcaatgacgtttgtagaatctgcttgagtttctcgtcacttccatttcttttaagaattgatccaacatcttctctttgcttggtaatctgaatttctcatccactagccggcttagccacattgaacgtagctctgatgtgtgtaagttcgagctgctttggacgtatcctacgaaacccatgtttggtattaatggatgga

SEQ ID NO: 81726 - DNA, 542 bp, Arabidopsis thaliana columbia
ctagaagagctatgacgtcgcatcgcacgcgtacgtaagctcggaattcggttcgagcctccggccaaccttaacccttaagcgaacggtgttcctttgcggattgcgatcgttccgtcgatcccttcatcgcccgatctaaatctctaatcgtgtcggagattaaaagcagaggttttgtggtgaatcatgtctgatgtcccttcttgttctagcggtaatgatacaaacaacaatgattcgagtaacttcgaatgtaacatctgcttagacttggctcaagatcctattgtcactctctgtggtcacttgttctgttggccttgtttatacaaatggctccatctccattctcaatctaaggactgtcttctgttcgcaaagccgggaatcgaagaacaccaattgggttcctttggacacagtgaaggtaaatggtgctgcgtgtccctagggaccaaggttcattccgggggcttataagtcgcctaagcgtgccttttggtgaaaagaaacctagtgcaggccgacgcgtctgggtc

SEQ ID NO: 81727 - DNA, 451 bp, Arabidopsis thaliana columbia
  unsure (1)..(451): unsure at all n locations
gaattagaatatttagttgatcagatgagaaaggatcaggtttgcttttgatctcccatgtctataaacaagatagtctcactgaagacgagccaaaaaaaaaagacattcatctatattgacaactgaagtagccttgtcccaaaccagggcttgtgacccggtaaaaaggtaaaacaatcatcgatgaacagacgaaaaacttaaaacttgaaggtttcagtcactgtattgttctgcctatcaatgcttttgtcgaggttagtacttagctgtaatttctattgcatattgggcattccacaactggcctttttcgaggatatgtaaaatcctaactgggtctccccaacccttctttctggtccatgggtatatagccggntttagcttcgacatnatnggccaaaatcctcctactncnggcnttgacaggcnctnntntcntttc

SEQ ID NO: 81728 - DNA, 365 bp, Arabidopsis thaliana columbia
atgaaactggttccttcattattttcattgtaatttttacaagaacatgttgtgtcttaggttgattatcaagactactacaatgcaaagaaaactaggaaaacaacatgttgtgtcctaggttttaacatctttaggatcttgttcatgatcatcatccttgaggtttctgtatttgtaaaaccaagagcagacaaggaaatagccgagattcaagactcctcctatgactacaacccagtaaacattgtcaactcttccatggtttatgtcatttggtaaccacgaggtggttctttggatcacgtcgataacagctgtgctcagatagaaagagattccaatcaccactgaggtcaatgaag

SEQ ID NO: 81729 - DNA, 673 bp, Arabidopsis thaliana columbia
aacagctatcacgtcgcatgcacgcgtacgtaagcttggatcctctagagcggccgcccttttttttttttttttttttttaagactgaatcaggaaaaaaagatttgtatgattggtccattacatgaatttacacaaactgaaagatctgtggatgtctggttccttgatactaagcttcattattttcattgtgattttcaagaacatgttgtgtctttaggttgtaacatctttgggatcttgttcatgatcatcatccttgaggtttctgtatttgtaaaaccaagagcagacaaggaaatagccaagattcaagactcctcctatgactacaacccagtaaacattgtcaactcttccatggtttatgtcatttgggaaccacgcggtggttctttggatcacgtcgataacagctgtgctcagatagaaagagattccaatcaccaccgaggtcaatgaagccccgggggtcctcagagactcagggaatcctccatagaatactgcaacattcgcgggaaattgaaaggcctcgcctattccaaccatcacaagagcaggaactagccatagcactgacatgggatagatgatccagttgttgagcatgataaagacacatccaaagacgagtactatgacttgcagagacccagcagagacttc

SEQ ID NO: 81730 - DNA, 439 bp, Arabidopsis thaliana columbia
aaaaaaactctttattatactcatttcaaaggcgtttcagttacaaatccctcatgtcactcaaaaataagtactctctcaggaagcttaactagataattctcccttcatagatcaagtggcttcaaaactaattgaactccatacttaggttttatagtaagcacaactataggagcatgtctatagttctccgatattgcaaaactgaatttggaaacaagcattgctaatattatcttcgcctccatcatggcaaaagtctggccaatgcagttcctaggtccagccgcaaaaggcataaaatggcgactagatgcaaaacttctagtagtaaatcgttcagggttgaactcgttcgcatcttcgccccataattcattactatgatggatcgcaaggacagggatccaaatagataaacctttagggatgatta

SEQ ID NO: 81731 - DNA, 918 bp, Arabidopsis thaliana columbia
tcaacccaccagtccaagtcaaacctcctcaagccatcccctaatcctatatatcagtttcttctcgcaaaccacctcacaatctatcaacagttttaaaaaaagacataactcaaccaatctcactttgaaaaagacatgaacaaaacccgccttcgtgctctctccccaccttccggtatgcaacaccgtaagagatgtcgattgagaggtcgaaactacgtaaggccagaagttaaacaacgcaacttctcaaaagatgaagacgatctcatcctcaagcttcatgcacttcttggcaatagatggtcattgatagcgggaagattgccaggacgaaccgacaacgaagttaggatccattgggaaacttacctaaaaaggaagctcgtaaaaatgggaatcgacccaaccaatcatcgtctccaccatcacaccaactacatttgtagacgccacctccattcttcacataaggaacatgaaaccaagattattagtgatcaatcttcttcggtatccgaatcatgtggtgtaacaattttgcccattccaagtaccaattgctcggaggatagtactagtaccggacgaagtcatttgcctgacctaaacattggtctcatcccggccgtgacttctttgccgctctttgccttcaggactctagcgaatcctctaccaatggttcaacaggtcaagaaacgcttcttctattccgatgagaaatggtgtatttctttgtacacatttgttatattacaaatgcacatattataatattcactagagagatggtataacgatgtttgaaatatgttaatcctgaattggaccggctggtcattgaacaactattctcttaaatgtccggttctgttttcagtgattagtattatagtagatcgttaataacta

SEQ ID NO: 81732 - DNA, 487 bp, Arabidopsis thaliana columbia
gcgggacccggcccgaattcccgggctttccagaagcaaaaacaagataagatctcttcagattcctacactccaacaaatataagtttcattagattctttcttagctagagaatgaaactgattgagaagacgatgagcatgaaccagtttaggactatggaggaggagaagcaagacggtggtgagcttttccataccatcgaggtagctaaagttgaccggaacaacgtgtctcagccgccgccggctgctactgcagcactgctagaagttcccggtgatgaacttaacctaattccaccgttgaacttttcgatggtcgataatggtatattccggtctggattcccggactcggcgaacttctccttcatcaagactcttggccttcgctcaatcatatctttgtgtccagagccatatcctgagaacaacatgcagttcctcaaatccaatggaattagtctttttcagtttggcattg

SEQ ID NO: 81733 - DNA, 545 bp, Arabidopsis thaliana columbia
  unsure (1)..(545): unsure at all n locations
cngcccaccagganccccgtgatncactagggcctaggtatgaaagggaccttngttnccgcaaattanggatcccnatagctgccttacaggtatgggnacctcggattcgggcaaatcccttatggatcaatccagatcttcctcctctgttacctgttattcgtcagatctttctttgtttgttgatttgacatgcggatgaggatgagacttctgtttttgtatccccttcccactgtattatgcagtatccggtgagaatcaataaaaatcgatgttcgctcagtttttccggcgtcgattgcattcaccggattcggagtcgtcgatggtaaaggatgacgaattatttcagagtttctcttgtgacacgacttgcttcacgtgtgtctatttttgacacgtgtaatggccataaatttatccttgtttccttggtgtgatatcatttgggctttttagtgggcttgtaaacttgcatatagatatacaaatttgaataaaatttagttcacttgtgaaaaaaaaatatcagcaaaatc

SEQ ID NO: 81734 - DNA, 427 bp, Arabidopsis thaliana columbia
agaaagggatacaaaaacagaagtctcatcctcatccgcatgtcaaatcaacaaaaatcgatgttcgctcagtttttccggcgtcgattgcattcaccggattcggagtcgtcgatggtaaaggatgacgaattatttcagagtttctcttgtgacacgacttgcttcacgtgtgtctatttttgacacgtgtaatggccataaatttatccttgtttccttggtgtgatatcatttgggctttttagtgggcttgtaaacttgcatatagatatacaaatttgaataaaatttagttcacttgtgaaaaaaaaatatcagcaaaatcggatctcttttaaatgtcaatatgatctaaacaacgaactttaacagatatgtatttccccctcctttgcctctgcaaatctctcatctttttcttgtt

SEQ ID NO: 81735 - DNA, 346 bp, Arabidopsis thaliana columbia
tttttacaacaacaaaactaatcttctgattgatttaacttggcatacttagttgcacaaaaaaaaaaaaacttgtcccaccacacaaagcaaaaacacaactagttcacatcagtcagagatcaccagacttcatcttaagaagaagaatggttctgtacccactcaactagtgtcgcaactccaaacccagttgcagctttcttcttctcgttccacactggtccagccatatctatgtgcatccactcaacatcctcgctcacaaactgtttcaagaaaagagccgcggtaatggatccacctgcacggcctccagtgttaaccatatttgcaacacctgact

SEQ ID NO: 81736 - DNA, 425 bp, Arabidopsis thaliana columbia
ctaaaacgacaagtttgtttcattactgaaaattatccccacaggttacaatgaaacacacaaaatatccaaaaagaaagttaaaacacagctctaaaggctatagctgaacctgaatatctgttttatacaaagctttcctaaataacccgcatgcctctgatccagatggaggggtttcatcatagcggagatgtctgattaagtccctctatgcttgaagaagaccggttatttcgatgtctagaccagaatcccttcttcaatgcagagtctttggacgagggtttattccacttggagctgatagaagcaaagtgccatttcaagaatgacttattagacgagctcttgctactgcaactagcttccagcttgagagctttgccttctcgtttccccattttctggaatacaaactcatc

SEQ ID NO: 81737 - DNA, 528 bp, Arabidopsis thaliana columbia
  unsure (1)..(528): unsure at all n locations
gaggtcaagtaataatattagtgcaatatagtttgaaataatataaatttatggttgaaacttgatgcaagatacagacaagtttaagatgaagataacaataataattcagcataaatcaaaaagataaaaaaaaaaggaagcaagaaaaacagagtaaaacgaataggttttgacaataattgccagatatttgtattttgtcgttgttcatattatatctgtaaaaactgttcttgaaacacatccatggctgtagcgggaagtccaagaagcacattgatgcttctcctctgttctccatgagacaaaaacagagttacttctttctcaggcaaagctactggaccggataaaatcgggtctccccaaccggaatctgtcgtgtggaacccaatcttgaccatgtagtgatcagaagagncgaggaaagagaggnctgcncncgngcctccgagnaaccatagcggtccctgtcccacagtaccacctaatggtnccggcaaccncgggaccacggttcggagc

SEQ ID NO: 81738 - DNA, 465 bp, Arabidopsis thaliana columbia
gttatgatttacttttctatccttatataattatgatgatcatttccttgcccagaaagtcgccgagaaagttaaaagtagaacggcggagaaaaaaaaaacgaagaggaagaggagagatggagtcgcagaagaagatagctcatgagatcggaggtatgaagaacgatgctcttcgctttggtcttcacggcgttaagagcgatatccttagatctcatcctctcgaaacggcttacgaatctgggaagcaatcacaagaagaaatgaagaggagagtgatcacgcatacttatggagctgctcttcctttgaagatggatcttgatagacaaatcctttctcggtttcagagacctcctggaccaattccttcatcaatgcttggccttgaagtctacacaggagctctagataattttggttttgaggattacttgaatgatcctcgcgaatccgagacgc

SEQ ID NO: 81739 - DNA, 463 bp, Arabidopsis thaliana columbia
  unsure (1)..(463): unsure at all n locations
cctgctctaatgacgaaactataaactagcacttttgaagactttgtacacaatttgagttcatatgcacaaggaggaaacacatttgtatcggacaagaaaagcagacagaaaactagggaaaaaaatcagagccaacactatctcacttccacattatccacaactataaaggtcaagagtcaataacattatctgagtacacttgaactgtgcgttgtggctggtgttttgtggaggatcaagattcagtcttggtggatttcatcaaaaggcgcatgagcaaatctcacatcttctggccttgcaatcacgactgggctcatcagcaaataggggccttgaggaaaagatggagttttcaagggacgtcgatccgtcatccgggggtacaccaaatgnccagaagtagtagcgtgggnccgctatcattnccagaaatccccccatggacttgnaccaa

SEQ ID NO: 81740 - DNA, 827 bp, Arabidopsis thaliana columbia
ccagtgcatatatgattatttatctgaggcgaagattcctctcttcatcttgatgcgactactactggtccaactttcattggatcggttgatttgaggccgttgttcttacattttggtgtcccacctgttcttttagtactgttttcctttttgtttctggcaatcagaaaacataaaggcaatcagtcatccttctcaataacatacaaagatttggttttcaagagaatcttctatagaaagctagacgtttacttctgtcttattaaggagaagtactggttctttcatttatatcttggctggtttgggaattgcatccaaatttcttgcagtgggtgtcagcctggagctgcagaaaagtgagttgatgttagagattgtaggatcttactccaaaaagccagaaaaggtccttgcgactctctaacttgaaagttgtttcctttttttgaatctgagctggttttggaattttggtgtcaagatttggaatttgaatctgtagtaagattcaggtttagtgggggagggaacaagttggaagcttttgctagttttgtcaaaggtgtcactaaagtactaactatcagaaaacattttcagccagaagcttggtgatgtatcttcagattttcaacaacccatctcatggcttagctcatttatgctactctagtcgggtttcgtgtagggtaagactgagtcgtgtccttgccatgccaccgtcttcagtcctcttgcatatggacgaaagcaatgatcttcccaagcccaagaagggtttttgtctgagtgaagattcgagaaacagtttaaacagt

SEQ ID NO: 81741 - DNA, 355 bp, Arabidopsis thaliana columbia
ggggaggcaaaactttacctattagacttagaaatagataatagcttaaccagaaaagtttcctgtctttttagaccttattgccttcaactttcctttaaaacaactcgaactcaagatgatctccggtggctttacattcaagataccttttattcccctcaggagaagtcgtttccggggcaccattgtcatagatatctggcccctcagggggtttggcccagcggatgagagcccaattcaatccttcaaagaaggggtgtcttttgatctctggagctcctttttctgacccaagacgactttttggatccttcaccagcagccttttgaacaactcctttgcctggaa

SEQ ID NO: 81742 - DNA, 677 bp, Arabidopsis thaliana columbia
  unsure (1)..(677): unsure at all n locations
ggttgggccttgtttgnaaaatccntnccccccaantgcccccaaatatnaaaccnctnttaaagccggcctttcnccaaggggggttaagtcaaancaaacaacggggntttgcccattaaagtttnnaaacccaaaccaangaaaaatcttttaaaggtgatacaacnatatncgttttaagacataacttaatctgaatccggagattcgaaaaacgggggattcagctcagataccattttggacagattctccctcatttcctgcaattcttctctcccaaatccccaggccctaaccacatctgatcccatggctccccactggatcccaagtttctctaaattccccattctagtttccaaaaatggcaaaattgcgcttgaagatctccatcttgttgctactggtatggagtgaacatctagtgagcctctgtagagagaatccgagactggactgctcagtatctcacctttcctcccaacaaggtttccaaatatagaaggaaacggtaatggtaccggaagaggacaacgcgaaaccgatagattgcaaaacaacggtttccctttggtggttgcctgttcgtaagatgcatnaaccgcattcttcacttctgaaaccaatgcttctttatcttctgatctaagggctccaagtatacacattga

SEQ ID NO: 81743 - DNA, 410 bp, Arabidopsis thaliana columbia
actttgtctctgtcgcaatctcaaccatatggagaaagacatggcaatgatgggagacaaactgatactgagaggcttgaaattttatggtttccatggagctattcctgaagagaagacgcttggccagatgtttatgcttgacatcgatgcttggatgtgtctcaaaaaggctggtctatcagacaacttagctgattctgtcagctatgtcgacatttacaagttagttttaattactaatatgagaggatttgctagagatagttaactaaattctcccctttactcttgaccaatccatttttattgtgacctcatccaaaaatgacaagctttgcttatataacaatttgtcatcactatctgtgtcactgagtgatgcattgattataggatatgaaatgatt

SEQ ID NO: 81744 - DNA, 1202 bp, Arabidopsis thaliana columbia
gtcaagctgagtctcggagtgaaaagggtccggtttagtgaagccaagtaagcaaagccccttgtttttgacggacattatatctcctcctcttctcttctataaattgggcacctttttccaattttacgcacagtcacggagatagatagtaagagagagctatggcggaggagcacttcgacgttctgactaaatccggtgagaagaccggtgtgtccaaacccaggggagaggttcacagagatggagattaccatcgtgctgttcatgtctggatttttgtggagactactcaacagctacttctccaacttcgatctgatgataaagattcttggcctggtcaatgggacatctctagtgctggccatatatcagctggtgatacatcgcttctatctgcacagcgggagcttgaggaagagcttggcgtaaaactcccaaaggatgcatttgaaaagatcttcgtttttctgcaggaatgtgtcacaaacgatggcaaattcataaataatgagttcaatgatgtgtatcttggtactattctgcatccaatcccattagaagcctttactcttcaaaaagaggaagtctctgctgtaaagtacgtaccttacgaagaatacagaaactttctgtctaaggaagatcctgcttatgtgccatatgatgttaatggagagtatggaaaactatttgacataatcagacagaggtgccaagtgaacactgaggcccgtagtttatctctgcagaagcaactccagagatattctccagtcaccctcgaagccaagttgacagaactttctgaagcagatcagaaagcgttgggtctaattgtgaaggctgcaaaaattatggacgatatattctatgagcaggtttggaacagcaatccagccctaagagattggctgaaggatcatgccaatgcatcaaaactggacaaactaaaatgggattacttcacgatcaacaaaagtccatggtcgtctcttgatgaaaatgaagcattcttgagtactgcggattcagctgtaaagttgcttcctggagcaacaaaagccatagctggctggaagggtcttgaatatagagcagcctttccagtgactaaaccacctggtgccaatttctatcctcccgatatggataaaatggagttcaccttatggctcaatggccttacggaagag

SEQ ID NO: 81745 - DNA, 326 bp, Arabidopsis thaliana columbia
tccttttttttttcccccccccccatagtagcataaaactataatttaaagaagaatgtcgaaggaagatcctatcttttctctagtacaactttaaaggaaataggtgaaattacgacagacaatgaaacttggccttttagttatacaaagtttcattccattcagaaattggagaagtggttccgagatgactgaacaatctgcaaatccgtcgtcgtttgacaagaggtttcatcactcatcagtgtctctcgggggcgtgacaaccaaagggagctaagagctctgagccgtccatagtactctccgatgactaggaaaca

SEQ ID NO: 81746 - DNA, 466 bp, Arabidopsis thaliana columbia
acccacgcgtccgctctcttcgtcttccctcccgagaaagctcaacggagccctagactggttttatcactctcgccaacaccaaccacgctttttctctctttacctccatttttgtattcgtcaccggagtagatggatacgagagaaatcaacggttttgcctccgccgcgagatcgatatctcttcctacgcagcctaattacagtagcaagcctgttcaggaggcgttgaaacatttggcatctataaacctcagagaattatgtaatgaggcaaaagttgagcgatgtcgtgcaacaagagacttagctagctgtggaagatttgtgaactatgtgttgaatccatgtggtcatgcctccttgtgcacagagtgttgtcagaggtgtgatgtttgtcctatctgtagaagtacgctaccaaaatttggagatagacttaggcttcgtctctattatgagt

SEQ ID NO: 81747 - DNA, 468 bp, Arabidopsis thaliana columbia
cccacttgtctctcgaatcgtaacccataacgtctttgggtggcatccatcgctctctcatacaaaattcagatctgaagcacacacaagcttcggattccagatcaaatccggcgattcaagccgctttcccaaattcaccgtcgatctggagccgttacaggatccgccgcagaccacggcgtcctccggtaccggcaacggcaacggtaagatacgctaccgttcgccttcttccactgagctcctggagtctggtaaccattctcctacatccgactctgttgacggaggtaagatgacggcgaagcgtgggattggacggcacgaatctcttgctgacaagatccaacgccatcgtgggattatacttgtgatttcggttcccattgtgttgatcggtctcgttcttctgctaatgcctgcgagatcgatttctgattccgtcgttgaagagtattctgtgca

SEQ ID NO: 81748 - DNA, 536 bp, Arabidopsis thaliana columbia
cttctttcctttatatttaaaaaccttcttcttctctctctgtacatcgtcacagcaaaaaaaaaacagaaggagaagaaacaaaaacaataatctcagcaaaaacaaatctctactcatcgaaatcgaaatcaaaatatagaaacgatgtcttgctccgtcgccgtatgtaattctccggtgttttcaccgtcgtcttctctattctgcaacaaatcttcgattctctcgtcaccgcaagaatctctttctctaacgctttctcatcgcaaacctcagacctcttctccttcctctccatccaccaccgtttcttctcctaaatctccatttcgtctccgtttccagaaacctccgtccggattcgctcctggtccattatcttttggatctgaatctgtttctgcatcctctcctccgggaggtgttttaaagaggaaacgacctacaaggcttgatataccgattggtgttgctggatttgtagctccgatttcttcatcggccgctgtggctgcgacgccgagagaggagtg

SEQ ID NO: 81749 - DNA, 404 bp, Arabidopsis thaliana columbia
  unsure (1)..(404): unsure at all n locations
tccttttttttttnttaacaaaaagagaaccaaaaccgtgcgcagcagagtttctcaaagcaaaggggtaaaatatccattcaatagaaacggttctggaaactctgcaattttgggagaggctcaattaaagccgtacatgtcaaaactcttgtcgtcaggtggtcttgtgttgttgccaccttcaggtactctaaagctgtccattggaggtggccctgcggcagctggtgccgttggtggcacccaatgcggggtggtaggaacagagaagttagatccagaagcctcttgatgtaagacaacaacattaggatttgcttgtggtgagtttcctgtggttcttcggtttgaggaatttgcagaagctagagacgatggatacgattgatgttgctgattct

SEQ ID NO: 81750 - DNA, 443 bp, Arabidopsis thaliana columbia
gcttgtgagcagagagagagagcgagcgaggaggctagagaatcgagaatcgatcttcgccgaaccaccttgtcttctcttagctcatcgaatctctccgtcgccgtcgattcttcccgccggtgaatctctgccttattgttttcttcaatttgatcgtcctgaattcatcgtcctatttagggtttcgatcacaatctgaagaggaggtcatggacgtttctgctagaaagtcacaaaaagctgggcgcgaaaagttgaggagggaaaaactgaatgagcattttgttgaactgggaaatgtactcgatccagagagacccaagaatgacaaagccacgattctgactgatactgttcagttgttgaaagagctcacatctgaagtcaacaaactgaaatctgagtacaccgcattgacagatgagtcccgcgagttgaca

SEQ ID NO: 81751 - DNA, 647 bp, Arabidopsis thaliana columbia
attggtgaggggagcccccccactcgtcaaagcttctcccaagctggttctgggggctattccgttctaccagcaccaggggattaggctgaagcagatgggaccgacggtgaggaactcatgtgtgtatatgaaagggttgaaatggaaagaggaacaagagagagcaatggacaaactttcggcggagcggctgtctgatatgctttccttccaccatatgatggctcgtctttgctccaatgccatcaagagaaaactactagaacccgaacacacagataggaccatagagtcctccttttttctcaactattagcctttattgcaaaaacagttttacacacaataagaaaactagcattctgtgaatttacagaagctaccaaatgaaaaacttttgacagtatcctatatgtaaggtttcctcaagacagtaatcataaagagttcctttttataactccctatatcatttttcgtcatcatagtataatctatcattaccggcggcagaagaagatgaaatcaggatggttgacttgacgcaacctcagccaattatctgcggcttggaagagagagttcgcgagctggtggcccgagccaccaaagcttgtccatacagaacctctcaacttgtatga

SEQ ID NO: 81752 - DNA, 766 bp, Arabidopsis thaliana columbia
gctatgacgtggcatgcacgcgtgcgtgagctgggatcctgtagagcggccgccctttgtttttgttttttttttttttttttttttttgaggtaaaataccatatgagagattatgaggatcaaccttacataagaatatttttttttatattagcctaaagagagattacacacataaacgatgaaagtagtagagtcgctacatatacaaacacatggcatatttgatcaaaagttgacgaagctctctaagcagctggggtctctatgactctctccatgtctcataccctcattactattttaaaacgccctttttgagaattcattcattcactcactggcttcctttcttagtgcagcaagaagggcatttgtattgcttgatgctctctgctttggctggggttatcttcacacacttcccatggtaccaacgttcacacacattacaacatatccagaactcgggggtggggtagtttcctccacaacttccacagagggggggtccatgctcatggtgttgatgttgatagctctcttccattagtttcggcgtgctctttggctgcccttcaatggatctctttaccccgtttctggatttgcttccgagatccatgcttgggttaccgtgtttgaggggggtgctacccggactactttaaagagagttgggagatcgttgatcagactaaatagacgtttcctctcattgggattaagaccagcgcccgaggaggaagaaaccgggagtggcc

SEQ ID NO: 81753 - DNA, 370 bp, Arabidopsis thaliana columbia
ggaaatgaatacttgctaattaaagaattttttaagaaaataaacaataaaaccagtttaacttacatgaatttttgttcactgtcgatcttaatagtctaaaatcatatatcacaaatgtttagattaacgaatagttttgtcttcaacgaggagttacacgagtaatggaagcttcgccgactgaacaatgcgtagatgaatcaatagatggacctgcttgttcctgcttacttcggaagaaaaatccaggtggtctaggctcagcgagagcgaccaagctagtagtgagcatttgaactatcgatgacatggttggacgatcttcagcatcttcctgaacacatagtaaagcgatatggatgcacct

SEQ ID NO: 81754 - DNA, 403 bp, Arabidopsis thaliana columbia
  unsure (1)..(403): unsure at all n locations
tcctttttttttttnntttttttcccgataagaacatacacatcaagttttgcatttcttttaaaaaagctttatacaatctaattctagacagtagaaaccaaacacatgatctggtaagagtaaacaagagaaaaatgtcataggggtgaattaaacactctacaacatatttcaaagtcttcaaagaccgatacgatcgacaaacagagaagtcatatactccttgatctttccttggggataggtaaatccttcatatccattgtaggtgatgaagatcatacgtgcaagatcaaaggttgctttaagaacgcaatgtcgcacacccaccgttgtcaggaactcttcatttaatatcttatcagcctctacgatgattttggtaagctccccaaaagct

SEQ ID NO: 81755 - DNA, 403 bp, Arabidopsis thaliana columbia
ggctaaaacgtatcgattatttcttattttgggcaatttttaccacagtgtacgtagtagctcaaacattacaaaggaatttgctttgttgcaagtatatagagagaggggaacatccgcaagtcgcaatgctgactctaacttcaacgagatgagtttcctgttatcttcttggcaaagctgcttatgtcaaatgtatcattgccattctttgttatgacccctttctcggttatgattcctgcaatcagctctgctggagtcatatcaaaagctgggttccaaactgagatccctggtgctgcaatgcgttcaccaagtcctccgtgtgtgtgcatcaactcctttggagatctttcctctatcacgatttctttcccggatgaaagtgacagatcaactg

SEQ ID NO: 81756 - DNA, 422 bp, Arabidopsis thaliana columbia
tttgaacaaaggtagcatctcaattatttggcaaaaaatggcgacgagagcctgaagatggaccatctattttcggcggtttaaggcaatcactgaagcaattggtagagaactgagggtagaattaaaaccaaaaaaaaaaaaaacaagacgaggctgcttcacatttagcagaagccacactatttcttattacaatagattgttttccttggatcagtgatggtcatcaccatgtccgtcaggaggtcctccagggccgaccacttcaagcttgaagtactgtgtacacacagggcattcaaaagacttgcctttctccagccaaaaccagacaacatcatgctcatcctctccttcaccttcagggcaaccaactattctcatgtcgtagtaggatttgactacagcaggagcttcct

SEQ ID NO: 81757 - DNA, 4896 bp, Arabidopsis thaliana columbia
tttttcccagaaacgcgtttagatttgcaaagttcgtcttctccaatctacagttctacaccaaatctcagtttattcgctttgaggacctttttttgtagatttagaagctcagtgctcgttttgatttaatctagatccagaaagctgaagtctttgatctacgaaacgaaatggttgctaacttcaatccatcagtggggtcatttgtgtgggtggaggatcctgatgaagcatggattgatggtgaagttgtacaagttaatggtgatgagatcaaagttctatgcacttcaggaaaacatgttgttacgaaaatctctaatgcttatcctaaagatgtggaagcaccagcctctggagtggatgatatgactagacttgcttatttgcatgaacctggagttctacagaatttgcattcaagatatgatattaacgagatttatacttatacaggaagtatacttattgctgttaatccgtttagaagacttcctcatctttatagtagccatatgatggctcaatataaaggagcttccttaggagaattgagtccacatccattcgccgtgccagatgctgcgtatagacagatgattaatgatggagtaagtcaatctattctggttagtggagaaagtggtgctggtaaaactgaaagcacaaagttgcttatgagatatcttgcttacatgggagggagagctgctgctgagggaagaagtgttgaacagaaagtgttggagtcgaatcctgttttagaagcatttggaaatgcaaagactgtcaggaacaataattccagtcgctttggtaagttcgtggagattcagtttgacgaaaagggaagaatatcaggagctgccataagaacttatttgttggaaagatcacgagtttgtcaagtctctgatcctgaaagaaactatcactgtttctacatgctttgtgctgctccacaagaagatgtgaagaaattcaagctggaggaaccaaagaaatatcactatctcaatcagtctaaatgtctagagctggatagtataaatgatgcggaggaatatcatgccacaagacgggcaatggatgtcgtcgggatcagtacggaggagcaggatgctattttcagcgtcgtggcagccattctccatatcgggaatatcgaatttgctaagggggaagagattgattcatcgatatccaaagatgataaatccttgtttcatctgaaaactgcagctgagcttctcagctgcgatgaaaaagcacttgaggattctctatgcaagcgtatcatggtaactcgtgatgaaaccatcacaaaaactcttgatccagaagctgctactcttagtagagatgctttggctaaagtcatgtactcgaggttatttgactggcttgttgacaagataaatagctcaattggtcaagatcatgactcgaagtacttgattggtgttcttgatatttatggatttgagagtttcaagacaaacagttttgagcaattttgcatcaatttgaccaatgaaaaacttcaacagcattttaatcagcatgtctttaaaatggagcaagaagaatataagaaagaggaaatcaactggagctatatagagttcgtagacaatcaagatattttagacttaatagaaaagaaaccaggaggtataattgctctgctagatgaagcttgcatgtttcctaggtcaacgcatgaaacttttgcacagaagctataccagacattcaaaacccacaagcgctttaccaagccaaaactagctcgtagcgacttcacaatttgtcattatgctggtgatgtcacttatcagacggaacttttcctggacaagaacaaagattacgttattgccgagcatcaggcattgttaaattcttctagctgttcctttgtagcaagtttgttcccaccaatgtctgacgattccaaacaatcaaaattctcatctataggtacccgtttcaagcaacaattggtatcgttgctcgagattctaaataccacggagccgcactatattcgctgtataaaaccaaataaccttctgaagcctggaatctttgagaacgaaaacattttacaacaattacgttgtgggggagtgatggaggcaataaggattagttgtgctggctatcctactaggaaacattttgatgagttcttggccagatttggtattcttgctccagaagtgttggtaaagaactctgatgaccctgctgcttgcaagaagcttctggacaaagtgggactcgaagggtatcagattggcaagacgaaagtttttctgcgggctggacaaatggctgacttggatacccgaaggactgaggtcttgggaagatcagcaagcattattcagagaaaagttcggtcatatctcgctaaaaagagtttcatcgttctgcgtaattctgctaaacagattcagtcagtttgcagaggttatctcgctagaagtgtatatgaaggcatgcgtagggaagctgctgctttaaaaatccagagagacttgcgtaggtttctggctaggaaggcttacacagagctatattctgctgctgtttcggttcaagctggtatgcgtggtatggttgcccggaaagaactatgttttagaagacaaaccaaagctgcaataataattcagacttggtgccgtggatacctggctcgcctgcattacagaaaactaaagaaagcagctatcacgacccaatgtgcatggagatcaaaagtggctcgtggagaacttcgaaagcttaagatggctgctagagaaactggagcactccaagcagccaagaacaagctagagaagcaagttgaagagctgacctggagattgcagttagagaaacggataaggactgacctggaagaggccaaaaaacaagaaagtgcaaaagcacagtcttctttggaggaattgcaactgaagtgcaaagaaacggaggcattgcttattaaagaacgtgaagctgccaagaagattgctgagactgccccgattattaaggagattcctgtggttgatcaggaattaatggataagatcacgaatgaaaatgaaaagctgaagagtatggtgagttcactggaaatgaaaatcggtgagacagagaaaaaacttcaagagaccaccaagattagccaggatagactaaatcaagcattggaggctgaatctaaactagtgaagttgaagactgcaatgcagaggcttgaagagaaaatattagatatggaagctgagaagaaaattatgcatcagcaaacaataagcactcctgtgaggacaaatctaggacatcctccaactgcacctgttaagaatttggaaaatggccaccaaacgaacttggaaaaggagttcaatgaagccgagtttacaacaccagttgatggcaaggctgggaaatctgctgcagaacgtcaaattatgaatgttgatgctctcattgactgtgtaaaagacaacatcggtttcagtaatggaaaacctgtggctgcatttacaatttacaagtgtctacttcactggaagtgtttcgaatctgagaagactaatgtgtttgatcgtctgattcagatgattggttccgcgattgagaatgaggatgacaatagtcacttggcgtattggttgacaagcacatcggcactactatttttgcttcaaaaaagtcttaaaaccaatggcagcggagcaacacaaagcaagaagccacctgcttcaacttctttatttggaaggatggccatgagcttccgctcttcacccgcttcaggcaaccttgctgctgcagctgaagctgctgctcttgcagtggtccgcccagtggaggcaaagtacccggctctgcttttcaagcaacagcttgcagcctatgttgagaaaatgtttgggatggttagggataacttgaagagagagttatcaactttactttctctatgcattcaggcacccagatcttctaaaggagggatgctaagatctggcaggtcctttggaaaagattctcctgcagttcactggcaaagcattatcgacggtcttaattcgcttcttgtcacactgaaagaaaatcatgttcctttagtactcatccagaagatatactctcaaactttctcatacattaacgtacaacttttcaacagtctccttctgcgtaaagagtgctgtacatttagcaatggtgaatttgtaaaatccgggcttgcggagctagagctatggtgttgtcaagccaaagaatattctgggccgtcttgggaagaactgaaacatattagacaagccgttgggttcttggttatccaccagaaatacagaatctcatacgatgaaatagcaaacgatctttgcccggtcctcagtgtccagcagctttaccgtatttgcaccttatactgggacgatagctataacacccgaagcgtctcacaagaagtgatatcgagtatgcggacactcatgacagaggaatccaatgatgcagacagtgattccttcttgttggatgatgattccagcattcctttctcaatcgatgatatttcaagttcgatggaagagaaggattttgtaggaatcaaaccagcagaagaacttcttgaaatccagcatttgtattcttgcactaagttcctgaaagttgagaagctcagattctgaaaagctctcttcctctgtgattgttttagttttgaggtggaagagtaggggccttcctgaaccaaaaggaaagaagatgggaaaaagtgtaaattcatctttgttgtggagctgtaattctcaactattctttcatttattatttttgacctcagatttttcatttgttttgtta

SEQ ID NO: 81758 - DNA, 429 bp, Arabidopsis thaliana columbia
  unsure (1)..(429): unsure at all n locations
aaaataccaatataagtcttgttctctctaggaagttctaaactctcacagtattacgcaccaccaaaaaaattgcataaacggggagcgccctcacaaagtcagacatcttttaaacgtacatacaccagaatcccaattcgtctatccggggaaataaaagaagaaactccggtgaagggatcatgacgagccctcatactgctcctttacggctcttgctgccgcattgtaccatcccgctgctgccattgcacctggatctggaaccgttgcaagattctctgcagatacatcagctttgatctcccagccangtgcttgcatccttgnatggttgattccnggtncgggnaagtttgccgncttcggccttnatagaatttaaaagcaaggttatttggntccncntccagcgctnaagtttnt

SEQ ID NO: 81759 - DNA, 461 bp, Arabidopsis thaliana columbia
cttccctccatatatgcgactgagcttcactataaaggacgcaacttttattctccaactatgaattgtatacaactcttatctactctgcgtatttctgataaatcttcaaaatacaaacaagtctgcaccaaagcctagcaggggaacttatacagaagaaagtgctcaaggtttctgaccaagaagccatggctggaagaagagatggctgcgagcaatctcgacgagttcacgtggggcattcatcgtttcatctctcagcgcctcaagaatcgcctcacacgagaactctcttgttataagaattctgcagagcatctttaagatgggacaaagttcagccggagttacaggcttgccctcttcagggtgctgaagacttaacgaggattggttcaacaactcgaaaaatgctttcaccgtagaaaccccctgaatcattcccttgcctttgatgc

SEQ ID NO: 81760 - DNA, 512 bp, Arabidopsis thaliana columbia
  unsure (1)..(512): unsure at all n locations
nnnnnnnnnnnnnnnnnnnnnnnnnnnnnnnnnnnnnnnnnnnnnnnnnnnnnnnnnnnnnnnnnnnnnnnnnnnnnnnnnnnccacgcgtccgctgaatctgagctatctctggatcagcttgggatccgccacgtcacttctgacagccgccggagatgaacctcacgtgaccgttcttcagatcggatcttctgtgtgtaaccgtcgaggaggactcttcttcttcttcttcttcttcttcttcttcttcctcgctcacattgttcagtcttgaaacactctaatggcgacaatgagcaaagctcaaaggaccaaacccacttctggatctcagcgtcttgttctgttctgtatagttgtgttctcattcctcctcctcttctcttcggtgatctccaccggcaaattgggattgccttatcaacaaaccctaatcgactatttcgtgtggtctcctcgtggtaagagacagcattcgttgtcggagaagtacttgtattggggaaaca

SEQ ID NO: 81761 - DNA, 486 bp, Arabidopsis thaliana columbia
tccttttttttttttatttatttgggataaaaaagaccattagaatgttatcttggtttttgttgtgtacaaaatcgaatccaacacaatcggcctcaattctaactccaatcccacctaagaaagttaaaaaaacttctcgggacagaaactaacattgttatgtcccaaagatttctcacaagatattagcaacggtcaaaatcattactgtcaagatactccatataccccgactgtaatacaaatcactccgtattccagaagaagttgttgagtttgccgatggcgctgttatgttcacagacgtcccgtttctaccattaccgcggctcccagcaaacacacatgtaccatgacttggatctgtggtagtgatactagcaacaccattgaagttgcaagcatcaggattattcccagtctgatgataataagtatcaaacgcgtagttagcatgcgcgacgacattatccggttcataac

SEQ ID NO: 81762 - DNA, 419 bp, Arabidopsis thaliana columbia
aaaagaacataatttgatgatcttaataatgaagggttcttacaagaacgattgtcccctaacattctggagtatattatatgtacaaaaatcacgatcataaatatctccagaaaactctacaaaaattaaaataatttcaaatctaatattccaacttttaagattccagattctgttacaaaaggaatcgaatcaaagatcttcccggagaaaaggatgagcaagaagctgcggcgccgtccatcgcttactcgaatctttacggagacaacactcaacgaagctcctaaactcttcagaacatccctccggcgctcgcggcggttctccaaaacacaccgcgcacatcaacgtcgcccaatcaggtctctgtcccggcggaagcaaaggaaaatgaccaacgagaagctcaagca

SEQ ID NO: 81763 - DNA, 656 bp, Arabidopsis thaliana columbia
ttttaaaacgaccccggaatttaggatccaccattcacaacccagaaaccttataaaatatcaacatcaacaaatcttagtcaaattttctcactttggtagcttctcttactctctgtatacattgaaagtagcatatgtatatatactttcttttgaccatgagtgaagcttctcttagactagtttaccactaaagggcaaagacggcgaatcgtccccactgattatgctaggagccggagtatttctcctcgactgacgtttggtgggaacaataatggcttcatcctcaaacttcccgaggccttgccatcaatgtcataaccgtcttcatccgcctttgaaaaccggatgaacgtaagcattttgcaagtagcctttaaggttcaggtttggttctcttgcggtttctaatgtatctttcatcatagcttcctgtaaagggtatctgatgaaagctggctcataacgacctttgcagaagtggtggaaaccaatggtaagcacaggcaaagcaatgagaaacggtgcagctaatgcagcgtgctttgttcccaatagacccatcagaagcaactgtgatattaccaatgctgctatgactcgtccatgaacgtctggccaaaacgctgcagcactctcgtattcttgat

SEQ ID NO: 81764 - DNA, 455 bp, Arabidopsis thaliana columbia
  unsure (1)..(455): unsure at all n locations
ccctccatattcccngggggaacaaaaaccgggaggataatatttttcatgggatcaaccgaagattcggagactaataaagctacattgatctcccctaaattggagatcttcactaatttcaaccccctaaactttctacaattcacccaaaatgaccccaaatcaaatttacaattcccccaccaatacattttcactatataatcaattccttttgtgacccactaatcattggtccttcacacctcgctctcaccataatccaatccccaccctccatatcacatctggtcccatccaaaccaccaacacacttcagccgtccgatcctctccgagtaacaaccccacaagcttaaacgatcaagatctctcgaatccttctgtatttcctctgtttcttcttcttcctcttcctctactgatctccaaaacgtttgatctgtcacactt

SEQ ID NO: 81765 - DNA, 461 bp, Arabidopsis thaliana columbia
  unsure (1)..(461): unsure at all n locations
gaaaaacgagaagagggtagattactaacgaagagaaaagagttttgttcctgttaaagttcctctgcaacgacaacataaaagaaaacaaaagttctccaacatatctcttatctcacgcaattaaacacagaaattggcaaagaaaagcaagcttcttgttttgtttactgaggtcctgcaaatttgcccatcatctttgcaatcacgggagccaccttcggattcgcctgatgcttcgctagattcgcagggttcttcatcacatcttgaagagcagccatgacttcagggtcgctaaatgccgtcattagctcaggatcattcaatattttgctgaagtccataccaccacggcataccggcaccaccaggcataccaccgcctgcacctggcataccgccaccacccattcagcagggtacancgccattccggggtacacggcatctggaggaaa

SEQ ID NO: 81766 - DNA, 547 bp, Arabidopsis thaliana columbia
  unsure (1)..(547): unsure at all n locations
ggcttctttcaaaggattcataatcttaattgacaatgggtaaaattaaattatccaaacaaatccataaaagaaaaaaacaacatttccctaccaccctttatcttttcccttcaatccaaatctttccatctttcatactcagattataaatacgaacaaattctatctttttttaaaaaaaaattggggacaaacttgcctggctctgcaatggtgtgggggcttgagggtaccttctgtttctttcattttggattataaaattgaatagttaagaaaaaaaaaagctctttcgagaaatcatcatgctatcctccgcttcttcggggtgttcaagcctgtagtcttgcagattgggcaaagattcttccggttcagccatccttaatgcattggcaatgggatcangccacatncnagggnccccaggcctcccctcgggggannccccggcaaaaaagnaggggccgacctggggggantggggngctnggantcgggggtaacgggtgnaaggtcccggtaacgggaanacccaccgggc

SEQ ID NO: 81767 - DNA, 504 bp, Arabidopsis thaliana columbia
  unsure (1)..(504): unsure at all n locations
ataaccccaacgtgtttgtcttttttattcgaaccttctacaaatacagagccgtagagttttaaattataaactacaccaaagatataaaaattaaactcggggtaatcatctacaagttctcccgttttgcgtgccaaaaacacctaaatttaaaatctttcactcatttttccctctctcccgaggaaatggtcttgtaaaaatttccaagtttctcaaagtatgagcgagtcttgctgtgctcaggctgtttctgcccaccttccgtcactctcctatagtacttgntcatgttctcccacttcnccttacactttttcgcagatctttcgtancctctttcctttcattcttgctganatctcatcccaaatcgntcccttggttgatccccgtcttctcttccanatngnttcttggaattatcaaggctggaanttcctctgggggaaccttntaacatggnngaaanggcgttgggacnaaattaaccccttcttt

SEQ ID NO: 81768 - DNA, 553 bp, Arabidopsis thaliana columbia
  unsure (1)..(553): unsure at all n locations
aaactcaaagtcaattcaatcgtaacacttggccactcatcgggatataatacaaaggcacaaattctggcacacatgttttctccatctctcgcctttctctttttgctatattttagagaactacagaacaaacaatgaacattttcttctttaaaaaaaaatatatatatgttcgaagcacaccaaaaatacttcacaaacacatgcacaaaaggggtcgctaccgagcggacgcagcggcggcagtagtacataatatgcaccgtaaacgcgaccgcccaggtctgtctccatcaccatcctcatcttcttcctcatcctcttcctcctcatccacaccgttatcgtagctatattcataccccgaagaacctttggttgtcttgtgattgttgttactgaaggctgcatccatgaggacgtctcgtggtaagcatgggagcagaaggagacactacagnggcccctcttatcgaaccggggcgaagnacattcaaacggggggccccggggnttcgattnantctggcaccttatggnaagattangc

SEQ ID NO: 81769 - DNA, 615 bp, Arabidopsis thaliana columbia
  unsure (1)..(615): unsure at all n locations
tctatcttatatagcctataacaattaaaaaagtaaattagaggcgccactcacaaggaaattaatgataaaaaaatgtgaaaaatacaaataaaaaacaactctgctgatactgaaacaagccttacttattatcacacaacacaattattcacccacacgtcgttctgtataaaaacaccaaatcaacaatcactaatttattgagttttcctcaaaggaaagatatatctttcatgtcctcctcttaagaccgatacgcgattataagactctgaacatcatcaatgtccctaacctcatatcgagcaaagccagcttctttaagaacaaagtcccattctttcaaagtccgttctttgcctgtgcttgtgtgagccatcatcaccatatcaagcatcaatctcacgtgctctaacttttcatctcgttcgtccactatcatcgtctttttattctctccggtcaccgattccactatcaacactttttccgatatttggaggggccgcttctttgcaattcttcaatcatctttattgaantttttggtccccaatggggnaaacccntttgatgaaatggggtggaancggntaggtaaanaatggnngc

SEQ ID NO: 81770 - DNA, 781 bp, Arabidopsis thaliana columbia
  unsure (1)..(781): unsure at all n locations
nnnnnnnnnnnnnnnnnnnnnnnnnnnnncccacgcgtccgcccacgcgtccgctcatttccattacccaatcccgctccttttctctgattttgaatcgaacccttaatacccagaaatctcacggttccgaggagtgggtttttgggggttagggttttcgagagatgttgaatgtcaggttcattgatgaatctgttttctctctgcttcaagccattcgggcacgtctgtgataattccgaagctggatcgggtggtggtggtggcgtttctggtggaaccggcggtgaaggcaaagacggattgctttggttccgtgatctcggtaaatattgcggcggagatttctccatggctgtgattcaagccaatcaggttcttgaagatcagagccaggtcgaatccggtaattttgggacttttgttggtgtttacgatggtcatggtggtcctgaagctgctcgttatgtctgtgatcatctctttaaccattttcgagaaatatcagcggaaacacaaggagttgtgacgagagagacgatagaaagagcctttcatgcgacagaagaaggattcgcttccattgtgtcagagctgtggcaagaaataccaaatttggcaactgttggcacttgttgtttggttggagtgatatatcaaaatactctttttgtggcaagtcttggagattcacgggttgttcttggaaagaaaggcaactgtggcggactctctgctattcagctgtcgactgaacacaatgctaacaatgaagata

SEQ ID NO: 81771 - DNA, 5017 bp, Arabidopsis thaliana columbia
tctacaccgcgataagagagagagattaccaaattctcaccggagaagaaaaaagggctttcctttcctgagatttccggtgaaaagtcattgactttatcactctcaagtctctccacaagttgattgattctgctctaatctcctcatctggggtctttcccctcttgctattcaaatggctgctccagtcataattgtgggttcacatgtgtgggttgaagatccacatttggcatggatagatggagaagttactcgaatagatggtataaacgttcatgtcaaaaccaagaaggggaaaaccgttgtgacaaacgtatattttcccaaggatactgaagctccatctggaggtgtagatgacatgacaaaactttcatacttgcatgagcctggagtcttacgaaaccttgagacaagatatgaacttaatgaaatatacacatatacagggaatatcctaattgcagttaatccattccaaaggctgcctcatatttatgaaactgatatgatggaacaatataagggaattgcacttggagaactaagtcctcatgtttttgcaattggggatgctgcatacagggcaatgattaatgaagggaaaaacaattcgattttggtaagtggagaaagtggtgctggtaaaaccgagacgacaaagatgctcatgaggtaccttgcctttttgggagggaggtctggtgtagaaggaaggacagttgaacagcaagtcttagagtctaatccagttctcgaagcatttggcaatgcaaaaactttacggaacaacaattcaagtcgttttggtaaatttgttgaaatccaatttgacaagaatggaaggatatctggggcagctattaggacttatctgctggagaggtcccgtgtttgccaaatctcagatcccgaaaggaattaccattgcttttatcttctttgtgctgctccgccggaggatataaagaagtacaagctggaaaacccacataaatttcattatctaaatcagtcaagttgctataagttggatggtgttgatgatgctagtgaataccttgaaaccagacgagctatggatgtagttggaatcagtaacgaagaacaggaggcaatcttcagggtggttgctgcaattcttcatcttggtaacattgattttggaaagggggaagagatagattcatctgtcatcaaggataaagattcccgaagtcatcttaatatggcggcagagttacttatgtgtaacgcccagagcctagaagatgctcttattaggcgtgtgatggttacacctgaagagattatcacgagaactcttgatcccgataatgcaattgcgagtagggataccctggccaagacaatatactctcacttgtttgactggattgtgaacaaaattaatacctccatcgggcaggacccacggtcaaagtcgattattggagttctggatatctatgggtttgaaagtttcaaatgcaatagttttgagcaattctgcatcaatttcacgaatgaaaaactgcaacagcattttaatcagcatgtcttcaaaatggagcaggaagagtacaccaaagaagagattgcttggagttacatagagtttattgataaccaagatgttcttgagttaattgaaaaaaaaccaggagggattatttcacttctagatgaagcctgtatgtttcccaagtctacacatgaaaccttctcccaaaagttgttccagacgtttaaagaacacgagagatttgccaaaccgaagctctcgcgcactgattttaccatatcgcattatgcaggagaggttacttatcaatcaaaccatttcatcgacaagaacaaagattatatagttgctgaacatcaagcactatttactgcatctaattgcaagtttgtggcgggtttgttccatgcgcttcatgaagactcatccaggtcatcaaaattttcttccattgggtcacggttcaagcaacaacttcactcgctgatggaatcactgaatggtacagaacctcattacatcagatgtataaagccgaacaatgttcttaaacctggtatctttgagaatttcaacgtcattcatcaattacgttgtgggggtgttcttgaggccattcggatcagttgcgctggctatcctaccaggcttgccttctatgactttctcgatcgttttggtctccttgctccagaagttttggaaggaaattatgatgataaagtagcttgccaaatgattcttgataagaaaagtctgacggactaccagataggaaagacaaagattttccttcgagctggtcagatggctgaactagatgcgaggagagcagaggtgcttgggaatgctgccagagtcattcagaggcaattccgcacatgtatggctagaaagaattaccgttctattcgcaatgctgcaattgttttgcaatccttcctacgaggcgaaattgcccgggcagtgcacaagaaactgagaatagaagctgcagctctaagagtccagaagaatttccgccggtacgttgacaggaaatcttttgtcaccacaagatcatctacaatcgtgttgcagactggcttaagggccatgattgcacgtagtgaattcaggctaagaaggcaaagaaaagccgccattgtacttcaggctcattggcgtggtcgccaagcattctcatattacacaagacttcagaaggcggcaatagtcacacaatgtgcctggagatgcagacttgctagaagagagcttagaatgctgaaaatggctgcaagagacaccggtgctcttaaagatgctaagaataaattggagcagcgggtagaagagctttccttgcgtttgcatttggagaagcggttaaggactgatcttgaggaggcaaaggtgcaagaagttgcaaagctgcaagaggcattgcataccatgcggttacaattgaaagaaactactgcaatggtcgtaaaggaacaggaggcggctcgagtagcaattgaagaagcaagttcagttaataaggaacctgttgttgttgaagatacagagaagatcgattctttgagcaacgaaattgacaggctaaagggactgttgtcatcagaaacacataaggcagatgaagcacagcatgcttatcagagtgccttggtccaaaatgaggaattatgtaagaaacttgaagaagctggaagaaaaatagatcagctccaagattctgttcagagattccaagaaaaagtctttagcttggagtcagagaataaagtactccggcaacaaactcttaccatctcaccgactactagagctttggccctaagaccaaaaactaccataatccagagaactccggagaaggatactttctccaatggagaaacaacacaacttcaggaacctgaaactgaggataggccccagaaatcgcttaatcagaaacagcaggaaaatcaagagctgttactaaaatctatttcggaagatataggattttctgaaggcaagcctgttgctgcctgtctgatatacaagtgtctgatacactggagatcttttgaagtagaaagaaccagcatatttaatcgtataatcgagacaatagcatctgccattgagatgcaggaaaacagcgatgtactatgctattggttatccaattccgccacattattaatgtttcttcaacgcactctgaaagccggtgctacaggaagcataactactcccagacgtcggggaatgccttcatctttgtttggacgggtatctcagagtttccgaggttctccacaaagtgctggattcccatttatgactggaagggcaattggcggtgggctagacgaactacgtcaagttgaagctaaatatcctgctttgctttttaagcagcaactcacagctttcctagaaaagatatatggaatgatccgtgacaagatgaagaaagagatttcccctctgcttgcttcttgcattcaggttccaaggacaccgcggtctggtttagtaaaaggacgttcacaaaatacacaaaataatgttgttgctccaaaaccgatgattgctcattggcaaaacattgttacttgtctaaacggccacttgaggactatgagggccaattatgtgccttccttgctaatttctaaagtgttcgggcagatattttcatttatcaatgttcagctgtttaacagccttcttttaagacgtgaatgctgctcgtttagcaatggagagtatgtaaaaacagggcttgctgagctggaaaagtggtgccatgatgcaacggaggagtttgttggttcggcttgggatgaactaaagcacattagacaagctgttggcttcttggttatacatcagaagcctaagaagagcttaaaagagataactactgaactttgtccggtgcttagcattcagcaactgtataggatcagtacaatgtattgggacgacaaatacggtacacatagcgtatctacagaggtgatagcaaccatgcgggcagaggtgtcagatgtatcaaagagcgcgatcagcaattcatttttactagacgacgattcgagcatcccattctcgcttgacgatatctccaaatcgatgcaaaacgtagaggttgcagaggttgatcctcctccgttgatccgccaaaactccaacttcatgttcttgttggaaaggtcagattgaagtagtcaaagttccctatacccgatcgatcgctaggacattttcagattaggagatcagtattgtgctttcaaaaacaaagcctgtacattagtacatatgcctatctttgccagtggctttctggtactgttctactattaataggggtatattgggtaggaaaaaatatatatatgtgaactaaatatttgttgtgtccatgcgttgataggccatttgcttcatggatttttctttgtttatcaagatcagagatattagtttttttttttt

SEQ ID NO: 81772 - DNA, 528 bp, Arabidopsis thaliana columbia
  unsure (1)..(528): unsure at all n locations
nnnnnnnnnnnnnnnnnnnnnnnnnnnnnnnnnnnnnnnnnnnnnnnnnnnnnnnnnnnnnnnnnnnnnnnnnnnnnnnnnnccacgcgtccggctttacttgtaccacacgatccttatagctcatcatctaatggccaggtaatccgccagagaagaagaagaagaagagaatagattagggtttttcattccacaatagcccgaatccaaattcgaaatctttcttctgattttgatctttccgagcatgtcatcggtctgtgttaacgaagcattaaccgatgacgagctgagatgggtattgtcgagactacacagtgataaagataaggaagtgcttggtttggtctgcaagaggtggctcaatctgcacagtaccgaccggaagaagctagcggcacgtgctgggccacatatgctgcgccgtctcgcttctaggttcactcaaatctggcgagtgggatttgtctcacccaatgtctaggtccttttatccaggaggtactgattctgacctccctgttt

SEQ ID NO: 81773 - DNA, 551 bp, Arabidopsis thaliana columbia
  unsure (1)..(551): unsure at all n locations
gcaggtaccggtctcggattcccggctcgacccacgcgtcgggtttttcattccagaatagccctaatccaaattcgaaatctttcttctgattttgatctttccgatcatgtcatcggtctgtgttaacgaagcattaaccgatgacgagctgagatgggtattgtcgagactagacagtgataaagataaggaagtgtttggtttggtctgcaagaggtggctaaatctgcagagtaccgaccggaagaagctagcggcacgtgctggtccacatatgctccgccgtctcgcttctaggttcactcaaatcgtcgaattggatttgtctcagtcaatttctaggtccttttatccaggagttactgattctgacctcgctgttatctctgagggattcaagtttctcagagttcttaatcttcacaactgtaaaggtattacagatactggattggcctcaattggaaggtgtctttctttactgcagtttttggatgtatcaaattgaggaaagctttangtaaagggtttcacctttttcanaagnt

SEQ ID NO: 81774 - DNA, 426 bp, Arabidopsis thaliana columbia
tttttttttttaacccaaaaacaaatttgatgaatcagagcagtttgtacagattcgctaagccaaaacatagagggcacagacacaaacaaagctaaactgatcattgccatttctcgctaatatgtctgcaagactgcaactctatttgctttttgcttccctctttacacattcaatccggagtttctgataaaacaaaaacctgtcctaatcttctctgtgttcaaaaacaattcatactataaataaccttccttgatgttcaatgcattgctggagtttcccatcagaagacacaactaagtcctcttactttttacaggttccgtttgcggtttaatttggcatcttggcatagtctttaatacaagtatggatcatcttctgcgttaagtcgattcttcttccttccttccaaaaact

SEQ ID NO: 81775 - DNA, 445 bp, Arabidopsis thaliana columbia
acaataaaaggtggtggaggggagtaaaaacaaaatcaatgtccgtaccaacaacaatagtcgttctgaaactcgagaaaagttttcacttcaaatcttttatttataaacaagaaagagagagagagagagacaagagcaaggaagacgcaagagccttggtcataccacacagattcaagaagatgcagctagaacagacatttgtgttgtccaatcaaacttatcacgactgtatttgctgctgcgtgaagaaatctgcttcttgtctttgctgctgcgggaattgctgcttcccttttgtcctttctttccattcttcttcaggttgtctttgctctttgatttctgcggttgccgtttcttgcttcttgtgtgagagacaatggagggaggaggatcatacacatctttagcccatgacacactgagcttctcgagtgac

SEQ ID NO: 81776 - DNA, 535 bp, Arabidopsis thaliana columbia
  unsure (1)..(535): unsure at all n locations
cgaacannnnnncattataagaatcattgactattttattttcatgcgaaaacgaataaatacaaagtttttttttttttgtagatatacagagaccaacggctttaccatgcaattaacttcttgtcaatatgcaacatcctcatgcaagaactaaagcttatgcagaaaagtaatgaagcaaaacttgaatcttcaccttctgctgcgacgctggaggaatgctgtgatgtaacatgtactgagtatatatatgaagttccgtggaactactaatccttcaaaacaaaacaaaaactctcataggttaaggatcaaaatggggacgccttctcagtttctcactcaagtgacaggttccctaagtcgaatgctgcgttgctgacgantgatttgggttccnaatggnacttgcgctgatcttaaatccccnggttnccaccagagatggnggatcgggcttnggtgnaccagttctcaaagaacccattgntctaacctgaaccctncatggagggaacaacctccanatgct

SEQ ID NO: 81777 - DNA, 520 bp, Arabidopsis thaliana columbia
tcctttttttttttttttttttgattgaaaaccaaaccttaattccgaaaccatatcaaccgttttacattggttttctcaaaccgagatttttctccatagaaagaagcagagtggtaaagaagagcacataagggaatactatcatgggagcatatgagaatgagattcagagtcaagcgttaacctaacaccttccttgaaagaagttggagagagctcaagtgtatgaatcagtttagttatgtccatagatatatctgctggtgacactacgccacgatcaatcgatgatgcagacacatgtttagcccaaggacaggtcgtatcctctgcacttctgcaaccatttgagccatttgaacacgagatagcctctcgggtccaccagcattcagaactaggccgcatctgtttatcatcagagacccatctgtctattaatttgaaagtgatattcacaagatccttaacgtaaatggggcaacgaaactcgtcatggaagaagtctaccgtgtcc

SEQ ID NO: 81778 - DNA, 507 bp, Arabidopsis thaliana columbia
  unsure (1)..(507): unsure at all n locations
accaaaagacaaatcatatgtggccacttttatatatttgttttaacaatacaacaaactcttccttctgagtttttcatttttcctaaagttacactctggaaaacttctttatatatatgtgatagagattctgtacagagatgatgaaaacaaatcaagaaatctggggaaaatgctcagatgatgtatctgagtaaagcccttagagacaaaccaaagaattttttcttaaagacacactggtgccttcttttgtagatggcttccttatgttaagtaagaaaagaaagagaaatctgaatctgagtatatggcagattcttgagaacattctttgatggggctagaaaattgttaccgttaacattctaggtccaggaatgtaacttaaaaaccttgagggaggatttcagatcatggcattgcccgcttttancaaaaacttcccagggcgattatggnttncaaanaccctaattttgaaaataanntntttgnggaagg

SEQ ID NO: 81779 - DNA, 692 bp, Arabidopsis thaliana columbia
gcacgcgtacctacgcttggatcctctagagcggccgcccttttttattttctctttttttttttttttcataaagacactaagccaatcttagctttagactgtcactttaatgtgcacaaaagtacaaatgtacagcatttgggggctgaaacataccctgactctgtgtctctcttctcagaccaatacataaaaagcgtcttaaaaaccatcagcggtaacctcctgttgagggtgaatccagcagcaacctccttctcatcctactacctaacccttagcttcctcctcctccgccattacccatggccccgggtttacagacttgggcaaacggtcctgataacccaccacttattcaagcattctgcatggtatttgtgcatgcaatccagcgttgcgattttatcttcgtttttgtagttttcctggcatatcgtgcaagaattagtcttttgatcagtagatggacctttttccacgttgattttggtcgaggtttttttttccaaaaattctttaacattcttttatgacaaagccagttttcacagttccaatctggtcgctcaaagcaagaagctcctcatatgacatattttctatgtctaaccgcctttttttgaagatgaacaacataatttaacagcatcgtcaccctattttccaaaaatgcattcttcattccg

SEQ ID NO: 81780 - DNA, 861 bp, Arabidopsis thaliana columbia
  unsure (1)..(861): unsure at all n locations
tccacccacccaaatcaaagcctacgtctttgatgtgatcagagcatgtgttccaaagctgaacttggacgatgtgttcgagcagaagaatgaaattgccaaatctgtggaagaagagctagacaaagccatgactgcttatggttacgaaatccttcaaaccctaattatcgacattgagcctgatcaacaggttaaacgtgccatgaacgaaatcaacgccgcggcgaggatgagagtggcagcgagcgaaaaagcagaggctgagaaaatcattcagatcaaaagagcagagggtgaagcagagtcaaagtacctgtcgggactcggaatcgctcggcagagacaagcgatcgtggacggtctgagagacagtgttctagggttcgcaggaaacgtgccagggacgtcagccaaggatgtgttggacatggtgatgatgactcagtactttgacccaatgagagatatcggagcaacttctaaatcctctgcggtgtttatccctcacggtccaggcgccgtctctaacgtggcagcgcagattcgaaatggattattacaggccaacaatgcctcctaatcactcaagtcaaattgtctttggtcgtctctttacacacttttgtatcttcttattaaaaaggtaaatttgacttttaatgtaatggtgtgctgattgtgatttgtcattatgtatggacctatctcttttgtgagtggcgtgataaaaaaactttggatttgtttttaaaaggcaacataaatttctgtttgcgagtgnaacaaaacaaaaaaaaaaaaaaaagggcggccgcttctagaggatccaagcttacgtacgcgtgcatgcgacgtcag

SEQ ID NO: 81781 - DNA, 633 bp, Arabidopsis thaliana columbia
  unsure (1)..(633): unsure at all n locations
agagagacaaatgcctataataagccattcataatcttcttgcttcttgttcagaataatggggaatcttttctgttgcgtgcttgtgaagcaatcagatgttgcggtcaaggagagatttggcaaattccaaaaagtacttaatccaggtctccaatttgttccatgggtcatcggtgattacgtcgccggtacactgacccttcgtcttcagcaactcgatgttcagtgtgaaaccaaaacaaaggacaatgtgtttgtgacagtggttgcatccatacaatacagagtcttagctgacaaggcaagtgatgctttttacagactcagcaatccaaccacccaaatcaaagcctacggtctttgaatgtgatcagagcatgtgttccaaagctgaacttggacgatgtgttcgggcagaaggattaaattgccaaatctttggaaggggcgctgggcaaagccatggcttcttttggtcccgaaatccttaaaccctatttttgcactggcggcctgtcaacaggttaacgggcccttccggnttacggccggggggggtttnnngtgnaccggcgnaaggagggtttgaatttttgccaagnggggnnngggtaaaccttgggttnntnt

SEQ ID NO: 81782 - DNA, 437 bp, Arabidopsis thaliana columbia
  unsure (1)..(437): unsure at all n locations
atacgactcactttagggaaagctcgtacgcctgcaggtaccggtccggaattcccgggcgacgacgaggggaaaaggaaaaactcagagagacaaatctaaatggcgatgattacgcgcaacaccggccacgcgcctccctctcctcctccaatctcaacgcgccggcgccgctgcctcggtctctcacctccacacatcccttcccgctctctctccctccacatcaccgacgggcctacaccagacctggtcctccttcgacctcccctcctcctcctgggctctctaaagcggccgaatttgtgatctccaaggtcgatgatctcatgaacttggggctcgtacccgatcggtcttgggcctattggacctttggtctcgcttgcttgggcccgcggcaaatgattgaataccggggngtttntttnggtaag

SEQ ID NO: 81783 - DNA, 1210 bp, Arabidopsis thaliana columbia
  unsure (1)..(1210): unsure at all n locations
cagnnnnnnnnnnnnnnnnnnnnnnnnnnnnnnnnnnnannnnnnnnncggaaaccgggtcggcccacgcgtccgcacaactccacgacgagaggaaaaaaaaaactcagagagacaaatctaaatggcgatgattacgcgcaacaccgccacgcgcctccctctcctcctccaatctcaacgcgccgtcgccgctgcctcggtctctcacctccacacatcccttcccgctctctctccctccacatcaccgacttcctacaccagacctggtcctccttcgacctcccctcctcctcctggtctctctaaagcggccgaatttgtgatctccaaggtcgatgatctcatgaactgggctcgtaccggatcgatctggcctatgacctttggtctcgcttgctgcgccgtcgaaatgatgcataccggtgctgctcgctacgatctcgatcgattcggtatcatcttcaggcctagtcctcgccagtctgattgtatgattgtcgccggtactcttaccaataagatggctccggctcttcgcaaggtttatgaccagatgcctgagccaaggtgggtgatttcaatgggaagttgtgccaatggaggtggatactatcactactcctactcggtggttcgaggatgtgacagaattgtcccagtcgacatatacgtcccggggtgcccaccaaccgctgaggctttgctctatggactactccagcttcagaagaaaatcaacaggcgcaaggatttcttgcattggtggaacaagtgagcttcgaacccgtcctccaatcgtgaaagggacttttttcagacatttttaccaaagtttggggataataaatcgtggacgtttcattgcatatttctttgtggtggagatgccatgtaaaggagtgtgtttctaagtttgttgtggaaacttaataaacttaagatgtttgttgtctgagttcttttatgggctcttttattatatatctctctctaccagttttcagctacatgctgactattgctaaatacctacatatatttatacatacgagtgtgttttgtagagctttacagtcaatcaaaagcttagtcggacaaacgagtgtctgacacgcataaaaaaaaaaaaaaaagnnnnnnnnnnnnnnnnnnnnnnnnnnnnnnnnnnnnnnnnnnnnnnnnnnnnnnnnnnnnnnnnnnnnnn

SEQ ID NO: 81784 - DNA, 453 bp, Arabidopsis thaliana columbia
  unsure (1)..(453): unsure at all n locations
catttttcnttctttctgcaaatttaattttcccgaggaaatcatcactgagaaaaatgctcgctgtgtttgagaagacggtggcgaatagccctgaagctttacagagtccacactcgtctgagtctgctttcgctttgaaagatggatctctcgctactcatttcgcttccgtgaatcccaactccgtcacgcttaacttcggatctnctggatttgttgcttactctcttgataatcctgatcctcgtgttcctagattatttgctgtggtggatgatatttnctggtctcttccaaggncacattggaggaacctaccggtttctgaaagcagccagtatcggcctgaaccaaaaatcancaaagcgggggccatcattgtaaatttgagggtttaaaaggccaccncgggggttccccgggcctttaccccctggcataaaagttttt

SEQ ID NO: 81785 - DNA, 506 bp, Arabidopsis thaliana columbia
  unsure (1)..(506): unsure at all n locations
cccccctctgggtcgactgtatcgataagcttgatatcgaattcgcggccgcggcgaatagccctgaagctttacagagtcctcactcgtctgagtctgctttcgcgttgaaagatggatctctcgctactcatttcgcttccgtgaatcccaactccgtcacgcttaacttcggatcttctggatttgttgcttactctcttgataatcctgatcctcgtgttcctagattatttgctgtggtggatgatattttctgtctcttccaaggacacattgagaacctaccgttttctgaagcagcagtatggactgaacaaaatcacaaacgaggccatcaattgtgatttgaggcttacaaggacactacgtgatcgnngggtccttaaccctgtggacaaaggttggtangaagaatttnccatgggnaaagtnttgcggngtaaanctccttncgntanncggcaaagaaaanctggncctttggcttggntgcntnantccca

SEQ ID NO: 81786 - DNA, 1235 bp, Arabidopsis thaliana columbia
  unsure (1)..(1235): unsure at all n locations
cnnnnnnnnnnacccactatacggtataagctggtacgcctgcaggtaccggtccggaattcccgggtcgacccacgcgtccgttttcttctttctgcaaattttattttcccgagaaaatcatcactgagaaaaatgctcgctgtgtttgagaagacggtggcgaatagccctgaagctttacagagtccacactcgtctgagtctgctttcgcgttgaaagatggatctctcgctactcatttcgcttccgtgaatcccaactccgtcacgcttaacttcggatcttctggatttgttgcttactctcttgataatcctgatcctcgtgttcctagattatttgctgtggtggatgatattttctgtctcttccaaggacacattgagaacctaccgtttctgaagcagcagtatggactgaacaaaatcacaaacgaggccatcattgtgattgaggcttacaggacactacgtgatcgaggtccttaccctgtggacaaagttgttagagatttccatggaaagtttgcgtttatactcttcgatagcgtcaagaaaactgtctttgctgctgctgacgccgatgggagtgtgccgttcttctggggaaccgatgctgaagggcaccttgtgttttctgataacaccgagatggtgaagaaaggttgcgccaaatcttatggtcctttccctaaaggttgtttctttacgtcgtcgggtggattgaggagctttgagcacccaaagaacgagttgaagccagtgccgagagtggacagctcaggtgacgtgtgtggtgcaaccttcaaggttgacgctgagactaagagagagggtaccaaaatgcctagagtcgatagctcccaaaattgggccggtcatatctaaaccggaaatcatacacaaatcacaagctcagcatcttctccctcttgtcttgtcccctctctttcgttacatgtttgagttacattgagaaaataatttcaaaccacaatgttctaaacgcgtttatgtacatgtttgaggtgggatttggaaaggatgtcgagttttgtgaaactttggaattacgagactactagacttttgtttctctgtttacgtttcttaaatcaataaataaataagtttttaaaaaaaaaaaaaaaaaaaaaagggcggccgctctagaggatccaagcttacgtacgcgtgcatgcgacgtcatagtcattctatagtgcgcctaa

SEQ ID NO: 81787 - DNA, 558 bp, Arabidopsis thaliana columbia
cccacgcgtccgcacacgcgtccgcagagagcacgcgattctagatcgatccaacggtgagagacgccggagtttttatccccgcggcggagtaaaccatttcttcttcccgatgtatcagtgaagttaagtagtcgagagaggggataatgatggaagtggaaggatcgatgaatcgtgctcctgatcaatcatccttcctacgatcaagacgatccaaagctctgtatcagtgtaagcagcagaaactcccagcttgtgagccagtcttaacaccaatatcggttataacagtgtttatgttaatgggttttgttttcattcccattggtctcattactcttcgtgcttctcgtgatgctattgaaattatagaccggtatgatgttgagtgcattcctgaagaatatagaaccaacaaactgttgtatataactgattcatctatcccaaagaattgtacgcgctacttgaaggtacaaaagtatatgaaagctcccatttttatctactaccagcttgataactactatcaaaaccatcgccggtatgtaaaga

SEQ ID NO: 81788 - DNA, 524 bp, Arabidopsis thaliana columbia
cggccgccctttttttttttttttttgtaatatgctttgattgttaataaagaaaatatgtttacaaaagcttgaactcaagtttggtttcacatactcgctacattggaattgtaagtgagaacatttctaatcataactcacaatattaacactcactgagctatcaaaatcaacgccttgttcgttcctcagccacgttcactttaattgctctgccttccaaattctgtccatcaagagcagcaatggcaacgttaacttcattctcattcgacatttgaacaaacccaaacccacgtgaacgacctgtctctctatcagaaaccactcgggcatcaactactttcccatgctcgctaaataatcgttccaaacgaccactatccacatcccatggcaggttcccaacatagatcctaaacgcagcatcatatacacgaggttgtcgttcaggtcttgatcctcttggagctgctctgtttactgtcaaacgcctcccattcacttcaaaactattgaac

SEQ ID NO: 81789 - DNA, 558 bp, Arabidopsis thaliana columbia
agcgtctacacgactcactattgggaaagctggtacgcctgcaggtaccggtccggaattcccgggtcgacccaccagagagaaaaaaaactgaaacatcccaaatggatcatcatcttcaaccataacaacacgaaacccttcttctccaaaatccccaaaaccttgaaacaaagtctcaaaatttcacttcgtggatccgaatgtctcagaacccatcactcttcttcctcttatgtctagggttaggtttttgcgttgacctgggtcaatccctgaaagttcctttcagcgttaacgatgttcttccgatgctacctcgtcaagtctcatggcctgttttgaacagtttccacaacgctgtggatttgttgccggtttttattgggtcagttactcctaataatgtatctattgagtggaaaggtgcttgctttaatggtaatgaagctcgtcttgatatcaccggtagcgatcgtgacgtccctggacttggtggtggtgttcttcatctcacaacatccaaggcacatactttgcatgtatgatcttatgtgt

SEQ ID NO: 81790 - DNA, 769 bp, Arabidopsis thaliana columbia
tgcagtaccggtccggaattcccgggtcgacccacgcgtccggaacgagtctgcgttttacttcttctccttgagtttcttcttctagatctgatcgcgaatcaccaaaaggttttattttatacaatgggtcgtggaaacagctgtggtggaggtcaaagctcattggattatctctttggtggtgacgctcctgctcctaagccagttccagctcctcgtcccgctcctactgagtctaacaacggacctgcaccaccagtaacagctgtgactgcaaccgcactcacgactgctactacttctgttgagcctgcagagcttaacaagcagattcctgctggtatcaaaactcctgttaacaactatgccagagctgaaggacagaacaccggcaacttcctcactgaccgtccttcgaccaaagttcacgcagctccgggaggaggatcatccttggattatctcttcactggtggcaagtaaaataattgcaaagacctttatctatccattgtctttgctgcgttatctcactatgaaactgtttgatgtgagcctttaaatgataagaagtcggtttcttgtctcaactcttatctgtaatattttgctgaaaaaatgtttgaatcaaaaacttcccaacttgtctcttattaaccatcaaatgcgagtacaactttttaatcccaaaataaaaaaattaataataaatggggcggccgctctagaggatcccagcttacctacccgtgcttgcgacgtcata

SEQ ID NO: 81791 - DNA, 456 bp, Arabidopsis thaliana columbia
atcaaacctcaagagagagcagcaatataataagaaaaagtgaagatacggtttacatattatttagtaacgactatatcaaggacataggaataacagataatacttggaatgtttatcaattattatctagttaataacagtgagtcgacttggttttttccacaaggacccttttgccttatcagagaacggtactcgtcgaacctgattggtttataaagagcaggtcggtttgcagttactagttcttcgattggtccaaccgggatatcacttctcgggttatagaagaatgccaaagagactcgttccataccggaattaacgatcacttgatgttccacgcttttgtaaattccattgctaagtatctgaagttgatctccaatgttaacgatcaaagcattagggactgatttaatggtgacccagccatcaccacgacggacctga

SEQ ID NO: 81792 - DNA, 604 bp, Arabidopsis thaliana columbia
  unsure (1)..(604): unsure at all n locations
gatacaaaaggttcctcagcatttgatttaagtgaacaaagaggatcaagtttaacattaagaaaacataacatgatgcaatgtatggaacttacaatagatcaaagaaataatctaaaccttgtccgatttcccagattgaaatgccgattccccagagacgagcattctcaagccgtagaaggattgacatcaatgtaggatagaaaacagcatgcttgatgttcttatcatctctatacatgaaaagatgttcgccgctctctttatcccaacggaaagttggcttgtgtttctggagtaatgcgaggtaatcccttccggtgattgctcctccacctcctgaatctccagagattacaaaatcgtggccgtaaaagttgataccaagaagaaccttcctggctatgtttgagtctatgttgttggatgacccaagcaggagcttgagagttaaatctatccacttgacaggagcatgggggccagggttctggggatttgagaaatcataggccataagggggaacccatcaccgatctttcagatgagactctggncaaancggaattgngctcctgacggggggccacgnaaacatga

SEQ ID NO: 81793 - DNA, 640 bp, Arabidopsis thaliana columbia
  unsure (1)..(640): unsure at all n locations
taacaagngccccccggntcagaatcccccggncaacttttntttgancancggcggctccanggggccccancggganncacntccagtttnanaaaagggntccctttgaanggnctnaagttaaccagtnntgagaaatcttttgctgagaagcactacgaaggctttaccttcaaagtctttcttcagtggactcgtttgactacattgtatccggccctgttgttgctatgatctgggaaggaaagaatgttgtcttgaccggaagaaagatcattggagctaccaacccagcagcttctgagcctggaactatccgtggggactttgctattgacattggcaggaacgtgatccacggtagtgactctgtcgagagtgccagaaaggagattgctttgtggttccctgatggacctgtcaactggcagagcagcgttcacccttgggtctatgaaacttgatgatctgttgctttttcagtagtgtgttttcgacattgcttgtcttttgaacaagactgctatattttaagttgagtttgattaaaaaaaaaaaaaaaaaaaagnnnnnnnnnnnnnnnnnnnnnnnnnnnnnnnnnnnnnnnnnnnnnnnnnnnnnnnnnnnnnnnnnnnnn

SEQ ID NO: 81794 - DNA, 623 bp, Arabidopsis thaliana columbia
gaaaaacatggagcaaacttttattatgatcaagcctgacggcgtccagagaggactcatcggtgaagtcatctgcaggtttgagaagaagggtttcactttgaaaggtctgaagttgatcagtgtagagagatcttttgctgagaagcactacgaagacttatcttcaaagtctttcttcagtggactcgttgactacattgtatccggccctgttgttgctatgatctgggaaggaaagaatgttgtcttgaccggaagaaagatcattggagctaccaacccagcagcttctgagcctggaactatccgtggggactttgctattgacattggcaggaacgtgatccatggtagtgactctgtcgagagtgcaagaaaggagattgctttgtggttccctgatggacctgtcaactggcagagcagcgttcacccttgggtctatgaaacttgatgatctgttgctttttcagtagtgtgttttcgacattgcttgtcttttgaacaagactgctatatttaagttgagtttgattatccttctctactttgcttgcttgctacatatgaatacaacagctaccaactggtgatataaaatatatcagttattgcagaaa

SEQ ID NO: 81795 - DNA, 374 bp, Arabidopsis thaliana columbia
gagggttgcacacgacacggttccatgagaatcaatccacagagcgtctcttttgatactccaaatctgctttccctagcctactctgatttagctgctgaggactatccgttgggcaatacgaaaagcttagccaaggctccaatcatccttggagtcgatgacgatcaaatcgcccgaatgcgagccccaactaactatttgtcagaggatgatgttgttcgccgatttggcaatgtggtgaagctcatgaagggcatacaaaatgttcagcaacttcacttgcattctgatacactcgaggtgctttcaatgtgctgtgaatcgatgccggtgttcaacaacgtcaaaacgttaggcattaagagtgacta

SEQ ID NO: 81796 - DNA, 924 bp, Arabidopsis thaliana columbia
  unsure (1)..(924): unsure at all n locations
tcgtccacgcgtccgcccacgcgtccgcccacgcgtccgggcgtgatgagtttcggaagtaccatgcttctgctattcatgttcctggccctgaagtagcatgattggctgacgtggctaggaaaaaccatgtgtacttggtaatgggagccatagagaaggaagggtataccctctattgcacagttcttttctttagtccacagggtcagttcttgggcaagcaccgtaaactcatgcccacatctttggaacgttgcatttggggccaaggggacggatcaaccatccccgtttacgacactcccattggcaaactcggtgctgctatttgctgggagaataggatgcccctctacagaactgcattgtacgccaaaggcattgagctttattgtgcacctactgctgattattcgttggaatggcaagcatcgatgattcacattgcggtagaaggtggatgtttcgtgttgtcagcgcaccagttctgcaagcgtagagagttccctgaacatcctgattacttgtttaatgacatagtagacactaaagaacatgatcctactgtctccggaggtggaagtntcattatttcacctttgggaaaggttctcgccggaccaaactatgaatcagagggctcgtacagctgatcttgatcttggtgtatagcanggncaagtatcttcgtgtggttggcattctcaaagncagtattttaacttnccgnaattggaccccaaggaccggnncattattgcggggcngggaaccaggggttgcnaaccaantngcaaggtttaaatcgctnctnaggaagcaaggctgnaatgttttttccggttaaggtgtgccaggttttcttccnncaaaatnagggncttncgntttaaaaaaccattggcnncccttgttaatntc

SEQ ID NO: 81797 - DNA, 597 bp, Arabidopsis thaliana columbia
  unsure (1)..(597): unsure at all n locations
ccccangngggccccnnccccngttcctnttaacgcntggtgcccctaaggacctgtcctctncccccggggngnaggccattntcccccttgggaaaggtcnccccggcccaacttggatccgggggtctcgtcacagctgatcttgatcctggtgatatagccacagcccaaggtatactccgatgtggttggccatttctcagagccagatatttttgtcttggccgttaatgagcacccgcagaacccggttacattcatgacgaaggtcgaggaagcagaggatgaatcaaacaaatagtcaagatttgcaattcgtcttctgaagttgagtcaagttcgaaatgtttttttttcagttttaaagttgatgttcaagtttagttttctttctcctcaataatgtaagaggactatttccatatgtttaaatcaaacccattggttctctcctcctggattccattggcgtgtaataatgttttggtccactcgagtgttggttaaggtgtattccaaaaacattaaaaaaaaaaaaaaaaaaagggcggccgctttaaaggatcccagcttacggacgggtgcattcgacgt

SEQ ID NO: 81798 - DNA, 1381 bp, Arabidopsis thaliana columbia
aaaacaaagactcgagttaatatgtctagtactgaagaaatgtcatcagtcaaaaacacaactcaggttattggcgttgacccatcctccaccgtacgagttaccatcgttcaatcttccaccgtctataatgataccccggccactttagacaaggcggagaagtttattgtggaggcggcgagcaaaggagcgaagttggtgttgtttcccgaggcgttcatcggcggttatcctcgaggttttaggtttggtttagcggtgggagttcataacgaagaagggcgtgatgagtttcgtaactaccatgcttctgctattaaagtccctggccctgaagtggaaagattggctgagttggccgggaaaaataatgtgcacttggtaatgggggctatagagaaggatggttatacactctattgcacagctcttttcttcagtccacaaggtcagtttttaggtaagcaccgtaaagtcatgcccacatctttggaacgttgcatatggggtcaaggggacggatcaaccatccccgtttacgacactcctattggcaaaatcggtgctgctatttgctgggagaataggatgcccctctacagaactgcattgtacgctaaaggcattgagatttattgtgcacctactgctgattattcgttggaatggcaagcatcgatgattcacattgcggtagaaggtggatgtttcgtgttgtcagcgcaccagttctgcaagcgtagagagttccctgaacatcctgattacttgtttaatgacatagtagacactaaagaacatgatcctactgtctccggaggtggaagtgtcattatttcacctttgggaaaggttctcgccggaccaaactatgaatcagagggtctcgtcacagctgatcttgatcttggtgatatagcaagagccaagttatacttcgatgtggttggacattactcaaagccagatatttttaacttgaccgtaaatgagcacccgaagaaaccggttacattcatgacgaaggtcgagaaagcagaggatgaatcaaacaaatagtcaagatttgcaattcgtctactgaagttaagtcaagttcgaaatgtttttttttcagttttaaagttgatgttcaagtttatttttctttctcttcaataatgtaagaggactatttcgatatgttaaaataaaaccaattggttctctcctcttgtattcaattgtcgtgtaataatgttttgttcaattcgagtgttgattaagttgtattctttatttttcctttgcatgtcaaacacagattttttgctgtttaaataagttgctagctaagtctagatgtgagtttgaaaagtcactacaaaactacttaata

SEQ ID NO: 81799 - DNA, 1312 bp, Arabidopsis thaliana columbia
  unsure (1)..(1312): unsure at all n locations
ctcaagctcaagttaaaacagaaaaaatgtcaacttcagaaaacactccgtttaatggcgttgcctcatccaccattgttcgagctaccattgtccaagcctccaccgtctacaacgatactcccgccactctagaaaaggcgaacaagtttattgtggaggctgcaagcaagggatcggagctggttgtgttcccggaggcgtttatcggtggttatcctcgaggttttaggtttggtttaggggtcggagttcataacgaagaagggcgtgatgagttccgcaagtaccatgcttctgctattaaagttcctggccctgaagtagaaaagttggcggagttggccgggaagaacaatgtgtacttggtaatgggagcgatagagaaggatgggtatacactctattgcacagcacttttcttcagtccacaaggtcagttcttgggtaagcaccgtaaactcatgcccacaagtttggaacgttgcatttggggtcaaggagacggatcaaccatccccgtttacgacactccgattggaaaactcggtgctgctatttgctgggagaataggatgcccctctacagaaccgctttgtacgccaaaggcattgagctttattgtgcacctactgctgatggttcgaaagaatggcaatcgtcgatgcttcacattgcgatcgaaggtggatgtttcgtattgtcggcttgccagttctgccttcgtaaagatttccctgatcatcctgactacttgtttaccgattggtacgacgacaaagagcctgactctattgtttcccaaggtggaagtgttattatttcacctttgggacaggttcttgcgggaccaaactttgaatcagagggtctcatcacagctgatcttgatcttggtgatgtagcaagagctaagttgtacttcgattcggttggacattactcgagaccagatgttttacacttgaccgtaaatgagcacccgaagaaaccggtcacattcatttcgaaggtggagaaagcggaagatgactcaaacaagtaatcggttgtgattcgtcagttcatgtcactcctatgaaggagtcaagttcaaaatgttatgttgagtttcaaacttttatgctaaactttttttcttaattttcgttaataatggaagagaaccaattctcttgtatctaaagattatccatctatcatccaatttgagtgttcaattctggatgttgtgttaccctacattctacaaccatgtagccaattattatgaatctggctttgatttcagttgtgttcttttcttnnnnn

SEQ ID NO: 81800 - DNA, 1357 bp, Arabidopsis thaliana columbia
ttcccggggtgaaccaaagtaaaaaacaaagactcgagttgatatgtctagtactaaagatatgtcaactgtccaaaacgcaactccttttaacggcgttgccccatccaccaccgtgcgagttacaatcgtccaatcctccaccgtctataacgatactcctgccactatagacaaagcggagaagtatattgtggaggcggcaagcaagggagcagagctagtgttgttcccggaggggtttatcggtggctatcctcgaggttttaggttcggtttagcggttggcgttcataacgaagaagggcgtgatgagtttcggaagtaccatgcttctgctattcatgttcctggccctgaagtagcaagattggctgacgtggctaggaaaaaccatgtgtacttggtaatgggagccatagagaaggaagggtataccctctattgcacagttcttttctttagtccacaaggtcagttcttgggcaagcaccgtaaactcatgcccacaagtttggaacgttgcatttggggccaaggggacggatcaaccatccccgtttacgacactcccattggaaaactcggtgctgctatttgctgggagaataggatgcccctctacagaactgcattgtacgccaaaggcattgagctttattgtgcacctactgctgatggttcgaaagaatggcaatcgtcgatgcttcacattgcgatcgaaggtggatgtttcgtcttgtcggcttgccaattctgccagcgtaaacatttccctgatcatcctgactacttgtttaccgattggtacgacgacaaagaacatgattctattgtctcccaaggtggaagtgtcattatttcacctttgggacaagttctcgccggaccaaactttgaatcagagggtctcgtcacagctgatattgatcttggtgatatagcaagagccaagttatacttcgattcggttggacattactcgagaccagatgttttacacttgaccgtaaatgagcacccgaggaaatcggttacattcgtgacgaaggtggagaaagctgaggatgactcaaacaaatagtaagagacttgaagttcgtatctgctggagttatgtcaatcgtatggagtcaagtccaaaatgttctgttgcgttttcattttatgttcaagtttatttatctttctcttcaatggtaagatctatggagtcaagtaataatggtaagacttatgttgttgaataaaacgaattggttctctcctcttgtattttaaaactgtgccattatgtttatctaatttgggcgttgggcgttgaatcatcaattgttgttcagccgtaaaaaaaaaa

SEQ ID NO: 81801 - DNA, 440 bp, Arabidopsis thaliana columbia
  unsure (1)..(440): unsure at all n locations
nnngtaatggattcaacttctctttttgtttcaatgccaagaaaaatctttggtttatttcgaagtttcctctcacgtgatacatatagtgtacatagcttatagcttgggtttgctcagattgagccgttcgacgggttatgtatatgcctcgaagttgatttgctgccctaagcaacttagctttgtgaatgcagttttgagatcaacctcgtaatcagtctgagatacggtttcacggcttctttgatacttcctgaacccatggagcaacttgagggtcagtagctaagagctgttctgttgcagcttgatcaggacccaagaatgcagacattacagctagctgacgaggacccaatccaacggcaatgaacttatctttcatctcttgcacagttgctttcccccactgtgggactctgccttctctcgtgccg

SEQ ID NO: 81802 - DNA, 497 bp, Arabidopsis thaliana columbia
ttgacgtcgcatgcacgcgtacgtaagctcggaattcggctcgagatctctttctctgcaacataatcaaaatcacgacaacaaaaaagaaaaactctcaagaaacaatggatgcttcattgtctccattcgatcaccaaaaaactcaaaacacagagccaaagaaaagcttcattacctcactaatcactctccgttcaaacaacatcaaagaagacacatacttcgtctcagaactcaaacccacggagcaaaaatcacttcaagaactcaaagaaaagctctcagcttcatcctccaaagcttcttcaatgtggggagtctcactcctcggtggagacgacaaagctgacgtaatcctcctcaagttcctcagagcaagagatttcaaagtagcagactctttgagaatgcttgagaagtgtttggagtggagagaagagttcatagcagagaaattgacagaagaggatctgggttttaaagatttggaaggt

SEQ ID NO: 81803 - DNA, 1360 bp, Arabidopsis thaliana columbia
  unsure (1)..(1360): unsure at all n locations
ttaggacaactatagaagactatgacgtcgcctgcacgcgtacgtaagctcggaattcggctcgagaaacacagagccaaagaaaagcttcattacctcactaatcactctccgttcaaacaacatcaaagaagacacatacttcgtctcagaactcaaacccacggagcaaaaatcacttcaagaactcaaagaaaagctctcagcttcatcctccaaagcttcttcaatgtggggagtctcactcctcggtggagacgacaaagctgacgtaatcctcctcaagttcctcagagcaagagatttcaaagtagcagactctttgagaatgcttgagaagtgtttggagtggagagaagagttcaaagcagagaaattgacagaagaagatctgggttttaaagatttggaaggtaaagttgcttacatgagaggctacgacaaagaaggacacccagtttgttacaatgcttatggtgtgtttaaagagaaagagatgtatgagagagtgtttggtgatgaagagaagcttaacaagtttctgagatggagagttcaggttttggagagaggtgttaaaatgcttcattttaaacctggtggtgttaattccattattcaagttacagatcttaaagatatgcctaagagagagcttagagttgcttctaatcagatcctctctctttttcaagataattaccctgaattggttgctactaagatattcataaacgtgccttggtacttcagtgtgatctactcaatgttcagcccattcctgactcagagaacaaagagcaagtttgtgatgtccaaagaaggcaatgcagcagaaacactctacaagttcattaggccagaagatattccggtgcaatacggtggtcttagccgtcctactgattcgcaaaacggaccgccaaaaccggcgtctgaattctccatcaagggtggtgagaaagttaacattcagattgaaggcattgagggtggagcaaccataacatgggatatagtagttggaggatgggatttagagtacagtgcagagtttgttccaaacgctgaagagagttacgcgatcgttgtccgagnaaccggagnagatgnaagctaccagatggagctgtttgcaaccctttcactacagtagaagctgggaagnccattcccnctggttngacaanacnccccnctcgccaanaagaaagtggtgncttnccggtacacctgtccgggaatntttttnaaccgggtnaacctttaccgggttttccaaaaatnggggggttctttanaacaactttttnggggggttttanggggttcttcctnggggttnnancagggtttttcg

SEQ ID NO: 81804 - DNA, 589 bp, Arabidopsis thaliana columbia
tttaagaggaatttgatggcaatttatcaaggttcaaaagggtgactaaccatccatgcagacaaaactgttgacacagagtattttttaaacagagaagggccgggccattgatcgaagatgaggatcgagaagagacttcaaggtccaagccccgcaggctcgagacacaacttgaaccagcctaattacaaaataaaaccaaatagtagatccgaaaacagagttgtaattaaagttgcgatttgtgcactttatttacaagactcaagagaaccatcatcattgatccatatctcaacaaaaccctaattatgtctactgctgaaatcttcttgtatgttcataccattcttcaagcaatctgctttctagatacgatccagccggaggatacattgggccattgttcatgcctgaagacgtcaatttagtttgtgtatcaggtactgcatatgcttgactctcaagtatcttccctattctttgcatcttttggatctcgttttggttcatccgataaccaaactgtgagccggtgtaatcgttttgcgtgttattataatgctcgttagccacctgagacgat

SEQ ID NO: 81805 - DNA, 784 bp, Arabidopsis thaliana columbia
tgacgtcgcatgcacgcgtacgtaagcttggatcctctagagcggccgccctttttttttttttttttaatgaaagggaaaaatttattatatattctagttcttacatattatgatacatacattgtcatagtaattattcaaacaacatcgacaatcttcttgttgtccctaaggatagtctattaaatcattccatcgatttcttcgaagtcatctcaacatcatcggaggacttgtcctcctcaaagtcttcaatcggtaaaccgaccttgtaccggtatccccgagcacaataccaaaagtaaaccagattaaccacacccaaaaccgcaatcagataatagaagtaatccaattttcccgcgttgagattcttgtttagccaatccggacgatcatgcccaccggagaatttatgaacgacagtcacaaggaaactactaaggtagctcgaaccggcgaacgataaagagaagagagagttagcgatacttctcatgtgctctggaaactgactgttgaagaactcaatttgtccgatgatattgaatgcttcacatagtcccatgagaattagctgcggcgaaagccaaaacaccgactttggaatcattcccggtggatctccggcattgatgggagcgtatgcgttttataccccttcacaaatgcccggcaaacggatcatttgaaaaagaaccgcgaaaaaaccgaacccccgggttccctaatccttttgggagggaagtgtgggatttccgggattttataggggccgggg

SEQ ID NO: 81806 - DNA, 559 bp, Arabidopsis thaliana columbia
gctctctacgactcactattgggaaagctggcacgcctgcaggtaccggtccggaattcccgggtcgacccacgcgtgcgcccacgcgtccgatttggtgtacctgttcagttacagaggttctggatttgggcaaagagacaaaaccatacctatcgtcccaatcgcccccttacgcctcaagaggaattacaaccggttggacaaataagggaagcatctaataaggcaaacactgcagaactcaagctttttttggaagtagagcacctggatttacgtcctattcctcctcctgaaaaatcaaaagaagatattcttcttttcttcaagctttatgaccccgagaaggcagtattaagctatgctggcaggctgatggtgaaaagttccagtaagcctatggatataactggaaaactgaatgaaatggttggctttgctcctgatgaagaaatagaactttttgaggaaatcaagtttgaaccttgtgttatgtgcgaacacttggataagaaaacttcattcagattgtgtcaaattgaagatggagatatca

SEQ ID NO: 81807 - DNA, 400 bp, Arabidopsis thaliana columbia
catttctctctgactacttcatttcctcttcccaacagttaacaaaagttctgattcgattcaagccaagatccacgtataaagatatgttcatgcgtagaggtttggtatacaacaatatatacatataatagtttgtcgttatgcctggctccctgtatgccacgagtggataccgattttggttttaaaatcggctgccggtggcgtacaaggagtcaagcatgaccagaagcatatggtaactcaattgcatctacaactaaatatgaaatatctagttatgtatatggtttgtgttctataagatgttttcttcgaattttgatttttgtgttccatttgaataagcatacagaaataaaaccaagttttgtagttttttgctttctttctgatt

SEQ ID NO: 81808 - DNA, 594 bp, Arabidopsis thaliana columbia
  unsure (1)..(594): unsure at all n locations
aggcaagcaagtggtatcatcaacaaacaaagcacttctcttttgattcgattctctctttaccttgaagcttcaatatcaaccaaatcttttttctcaaaatctcaaagaatctctcaaactcagtctcctatctgtctctctgcaaactattaccaaccagataatttagatatggaagctactcagaaacatatgattcaagaaggatcttcaatgttttaccatcaaccatcttcagtcaaacaaatggacctttctgttcagacatttgattcttactgcacacttgaatcctcttcaggcaccaagtctcatccttgtcttaacaacaaaaacaactcttcttcaaccacaagcttttcctctaatgaaagtcccatttctcaagccaacaacaacaacttatcaaggtttaacaatcattcccctgaagaaaacaataactctcccttgagcggttcttcagcggcaaacaccatcgagacagagcttnagtctcattgcttaaagatttggngactgcaattnttgggggcctgatgtagncaacaagntttatcagtcaanggcgggttttgggcaggagcattg

SEQ ID NO: 81809 - DNA, 1134 bp, Arabidopsis thaliana columbia
  unsure (1)..(1134): unsure at all n locations
cggacgcgtggggtcgtttatagttcaatccttttcctcttctttgtttctaaaaagagaaaagtcacttatggcggatatctcgggaaacggctatggcaacgccagagaagaagtagtaatggtgaatctcaaggatgaagtcgaacatcaacaagaaatggaagacattcataacccaagacccttgaagaaacaagactctctactctcagtctctgtccctttcttacaaaagttgatcgcggagtttcttggaacctactttttggtattcaccggttgtgcatcggtggttgtaaacatgcaaaacgacaatgtcgtgactcttccagggatcgctatcgtttggggactcaccattatggtcctcatttactctcttggtcacatctctggtgctcatatcaatccggccgttaccattgccttcgcctcttgtggccgtttccctctcaaacaggttccagcttatgtcatatcacaagtgataggatcaacgctcgcggctgcgacattacggttgttgttcggacttgatcacgacgtttgtagcggaaaacacgatgtgtttatcggatcatcaccagtgggatcagatcttcaggcgtttacgatggagtttatcgtcactttctatctaatgttcatcatttctggcgttgctaccgataatagagcgatcggagaacttgctggattagcaataggatcaacggtgctacttaacgtgctaattgccgcaccggtatcgagtgcgtcgatgaatccaggaagaagtttaggacctgcactggtctatggttgctacaaaggaatttggatatacttagttgcgccaactcttggtgcgattgcgggtgcatgggtttataacacagttagatataccgataaaccattgcgagaaatcactaaaagtggttcatttctaaagaccgtgagaatcggtagcacttgataagagaaaagaaaacatgggtggagttgatggagtattttcaaatgaatgtaacaactttcaccacacttcacnnatatggcctttgtattaattgctacgtttatctcttttattgttaacgccaagattctctatcttgttattaatgtgtaactgtaccgnntattttt

SEQ ID NO: 81810 - DNA, 546 bp, Arabidopsis thaliana columbia
  unsure (1)..(546): unsure at all n locations
tgatactccagctctcnnnnnnnnnnnnnnnnnnnnnnnnnnnnnnnnnnnnnnnnnnnnnnnnnnnnnnnnnnnnnnnccacgcgtgcggttttgaaagtgttcctgaaagctccattacaaaactctcgaggtctgagattaagcaggaattagtgaacgctcaaagaaagcacttggaacaaatgatactgcccaatgttttggaactagaggaggttgatccctttttcgatcgtgactcagtggatttttctctacgcatcaaaaaacgccttgaggaatcaaaaaagctgcagagagatcttcagaatcgtatcagaaaacgtatgaaaaagtttggtgaagaaaagctttttgttcaaaagactccagaaggtgaagctgtcaagggatttcctgaagcagaggtgaaatggatgtttggagagaaagaggtggttgttccgaaagctatccagctccatctacgccatggttggaaaaagtggcaggaagaagcaaaagccgatttacaacagatacttttggaagatgttgattttg

SEQ ID NO: 81811 - DNA, 573 bp, Arabidopsis thaliana columbia
  unsure (1)..(573): unsure at all n locations
aagagagattcattcacttgtttaaacaaatcacaatacaaaggagacaaagtaaaattacactaagggccaaagtttctgagttttcaaagaaacttaagccacacctttccacttcttccccacctacttacatggagaaaaagacaccaaacttttaccattacataactttaaccatccctaaaaactacccaagaaggcggatttgagtgagtgtgtgtagaaagaaacaaggtgaattcacaagacaagataactcgagagacgagccactactacttggagcctagcttatggacacttctggtttttaccagggcctccatagtaaaagtaatgaccccaatcatcattgcttccggtttgaacatcataacagttagactgttcagtggaatgttccaagtcctttagggtgccttgagggttggttttgcccantcaaaccaaccctgaaatgttccttnaaggnaanttgcttttnnctaaaaggcctcntncttggnaaattttnccacnttncccaattttgtgttnaaggtgtnttnggccantctanattgtnnngtt

SEQ ID NO: 81812 - DNA, 623 bp, Arabidopsis thaliana columbia
  unsure (1)..(623): unsure at all n locations
nnnnnnnnnnnnnnnnnnnnnnnnnnnnnnnnnnnnnnnnnnnnnnnnnnnnnnnnnnnnnnnnnnnnnnnnnnnnnnnnnnnnnnnnnnnnnnnnnnnnnnnnnnnnnnnnnnnnnggaggttgaatttctttatttcgaagaacaaaatacgagatttctttctttctttttttgccaaaaaattgaaaacctaaattgaaaaaaatacaagacagacaaattatttacaaaaataaaaaaatgttcgtcacttgcatttgcgttgaacttttcagtctttattagaccctaccatgccaatcaatcatttatcatcaatacatctccccaacggcaccgtcagcctcaatgacggcgtctgcgtcttctcaccatcctctcaacctctgattccgtcagttccgtcaacgcaccgttaaccatcctcatgtctcccacagtaatctctccttcgacgtcatcaccgacgtagatcttgtccacgtcacctacgtcaaccctaatgatcttcccgagtaaccttcccggctgcttccattccgcgagcaacgcgggcaccccaaaaccaacgcgtgcatcccacgcactcacttccaagccggcggatcctttcttctcca

SEQ ID NO: 81813 - DNA, 469 bp, Arabidopsis thaliana columbia
tggtgattcattaaccacttcatgataattataatcttccttctcttctgacgattgaattacatcttcttctgatagctgttctgatttttttctgtatacaaagtaaattcaaagtggacaaacatcggtattttaatctcctctcgataatgaagtgtttcttgttctctggtggggataagagaggggaacagaagacccctatttcggtttcattgacctctatcttctctgaccgcgaaataaaccgaagcgggtcagagttcaactctcgtgatgtctctgggacgagcacagaatcatccatggggaggaagaactcgtaccctccggtgtctactagagcaagtaatctcagagagttcagcattactgatctcaagtctgcaacaaagaactttagccgatctgttatgattggagaaggcggtttcggctgtgtcttcaggggcacagtgaggaactt

SEQ ID NO: 81814 - DNA, 502 bp, Arabidopsis thaliana columbia
  unsure (1)..(502): unsure at all n locations
atttnntaanatntctaanntnnttaactttcaaaaaaaaggatgcattttttgtaaaaatgtttttggatgaatacaattttttacattcattaaaatatatatatatatatatatgtgatttttgataaatgcgtagctatttagtgctttgataggttcaatggtagcttcttggatcatccttctgtgtagacagagacatcctctgaaagaatagaagattcatgaagatttgatatggggatttgctgcaaaacaggcctaggagggacttcaagagcttccaagcttccttccatcatctctacaactctgttcatcgctgggcgatctaccggagaaggctgaatacaccacaaacccaccaatgtcatcttctttgcaagctcatcttcttcgctgttaattccatcctcaatatgccttccagacttgcatgattcaagatccctatatacccattcaggaaagtacattgaacttgtgttagaagcacatg

SEQ ID NO: 81815 - DNA, 1272 bp, Arabidopsis thaliana columbia
aggtttgtttctttgctctgaggtatcttcgtttgatacaaggcgaaatcgatcttcttcttcttcttcttcatccccttgcgttttccatctccatcgtctgctgaaaccatttgatcgatctctcaggttacttagaatggcacaagaagccgatgggatcagattggaccaaagacatgggaaggctcgagtgagagttggaagagtttggcgtcatgctcatgatggatctcatcactttgttgaatggaatgttagcatcagtcttctctctcactgtctctcttcttaccgtcttgatgataactctgatattgtcgccacagataccattaaaaacactgtttatgtgaaagccaaggaatgtggagatcggctctcggtggaggaatttgccatacttattgggaaacacttttgctcattttatccacaggtttttactgctatcgtgaatatcattgagaagccctgggagcgtgtctccatcgatggaaaaccacatttacatggttttaagcttgggtcagagaaccatactacagaggcaagagtagaaaagtctggtgcattaaacttaacttccggtattggaggactagctctactgaagacaacccagtcaggatttgagaggtttgtcagagacaaatacaccattctgcctgaaactcgtgagcgaatgctggccacagaggttaatgcatcttggaggtactcgtatgagtcagttgcaagcattccaacaaaaggactctactttagcgagaagttcatggacgttaagaaagttctgatggatactttctttggtccaccagaaactggtgtgtatagcccttctgtccaacgcactctctacctcatgggaagcgccgtactgaaaaggttcgctgatgtatcatcgattcacctaaaaatgccaaatattcattttctaccagtaaatctttcaacgaaggaaaacccttcaatggtgaagtttaaagatgatgtgtacctgccaaccgatgaacctcatggatctatagaagcaactctaagccgtataacctcgaaactatgaggttttaagacaatacatcatacatggaaatatcaaacacaatttcacaggttctgcaacttttggcgtttgcctcgtttatgaaataacaatttaaatgaagtgtgtaaggtcaacttttggcttttgttgcaagaataatactgtaactgcaaacagtttcacataaaaatgtagcttacatatattatcaaaaaaaaaaa

SEQ ID NO: 81816 - DNA, 535 bp, Arabidopsis thaliana columbia
gatactcagctctacacgactcatatatggaaagctgtccgcctgcaggtaccggtccggaattcccgggtcgacccacgcgtgcgatcaaagtgtaaaaagaagaagaaaaaaaagagaacgaagaagatagaaaaatggaatgcagaaaacacaaccaccaaggcaacagaggagtttgtccttgttgtttaagagataaactctctcgattacctaatactacgtcgtattacatcgttcacagatcttcttcttcttcatccaccaccgtttcgtcttctccgtcgtctccggcggtgaaggatcatcggagagctggttcgatgtcgatgtctttcgctgttagggaagctttaaatggtaatctgatcgaagctttaggtggaggattaatgaaaagcagatctatggctcatgttcccaaggattatattgttagggatttgccgaagaagaagacggagaatttgaaatctaccaccgttaagaagaggactgggttttggactaagttgcttcatctaaaaggaaa

SEQ ID NO: 81817 - DNA, 427 bp, Arabidopsis thaliana columbia
cacaggaaaacataaaatatattgatatggaggagagacatacacatgtcttgaaaagtgggacttgagaatgaagagttaatgagataaggtcccataaatttacacaatacagaaccaaaatgaataatacacatttgatgaatcatcatgatcagaagatgagatttgggggattgaatatttgatcagtaggggttcctatgtggagtctgcggagcagaacgaggagggtttaaaagaggttgaagtgccttcaccacaatgctcatgtttggtctgaaatttgcctcatattgcacacagagtgcagccactgcagctagcttgccaacagctttgggagggtactctccgagtagtcttgcatcaacgcattgcttcactttggcttcacttagtttaggggttgcccatgtcactagac

SEQ ID NO: 81818 - DNA, 547 bp, Arabidopsis thaliana columbia
  unsure (1)..(547): unsure at all n locations
tgatacttcnnnnnnnnnnnnnnnnnnnnnnnnnnnnnnnnnnnnnnnnnnnnnnnnnnnnnnnnnnnnnnnnnnnnnnccacgcgtgcgagaaaagaaaaaattgcaaagagaggaagaacaaagaaacttgaatggagaagagaaacgagagacaagtgattctttttcctctaccattacaaggttgcataaaccctatgcttcagctagcaaagatcctttactcaagaggtttttcgatcaccatcatccacacgcgcttcaacgcgcccaaatcttcagaccatcctctcttcactttcttacaaatccgcgacggcttgtctgaatctcagactcaatctcgtgatcttttgcttcaactcacgcttctcaacaacaattgtcagatcccatttcgagagtgtttggctaaactcattaaacctagttcagattcaggaacagaggatacgaaaattagctgtgtgatcgatgattccggttgggtttcacacaatccgtggcggagagtttaatcttcctcgatttgcctctgtgctta

SEQ ID NO: 81819 - DNA, 424 bp, Arabidopsis thaliana columbia
  unsure (1)..(424): unsure at all n locations
aaggggtaccacataactttctttgtctatagaagaatgtggataatgtctttaatttacaagaatgccgagtacaaaacagaaaaacatttatgagtatacaaacaaatacaaaggcatatacaacaatcacatattgtttaaattactctaaatctccttccctgcctttttaactaccaagagaagaacaaaattcatggaaccctgatcagtgtgagacgcctgaagaagaagaagaagaaaccggagtttggacaaggaaagtcagagaataatccctctggtcaagaatgaagcttctgaggccaaaaaaaaacgattgaatcccaagaactgaatgattgcttacaagagtcagtcttgaaatctggtcatggctacagtaggccttgttttgtnantaaccccncaattttcccag

SEQ ID NO: 81820 - DNA, 786 bp, Arabidopsis thaliana columbia
  unsure (1)..(786): unsure at all n locations
taaaccnggaaacnnttntgggttncaaccaatcaaggnatttncaaaacncatnttgttaaaattccccnaaacccctccntcctttttacntccaagnggagncccaatttcatgnaccctgancagtgtnagcccccctgaagaagaaagaagaagaaaccggagtttgggcaagggaaagccagaggataacccctctggtcaagaatgaaagcttctgaggccaaaaaaaaccgattgaatcccaagaatgaatgattgcttacaagagtcagtcttgaaatctgttcatgctacagtagtcttgttttgttactaacccacaattttccaagttgctcacttgaaactgcccataagtcaaaacctttcttgttcgattcttcgccatgtatatatatctatgtacctttcaaaaggagtcttcaataacttctggttggggtgagagggtcgtaatcataagcttcaccagctttgacaaatcgcccctttacacgccgtctcacatcagctcttgctttgcgggaagcatacctcactctcttatcaaacttgcgagccttcttcttctccttgtaacgcataactgcgttattacgggttactgaatgtgagcaggcattgttatcctgtaatgttggaggataccatggtggctcccccgagagctgtatggaagatgatgcaccacattcttggaaatctccagcactactttctccagtgactccagagaaggatatgttcgaatgtgctggcttcgatgcgaagcaaattatt

SEQ ID NO: 81821 - DNA, 444 bp, Arabidopsis thaliana columbia
acaatggaaaatctctaccaaagaatttaaacaaaacaaagctctcaaagaaaggtctttggttccgtattagacaaatactcacgaaactagacaagagtttaaaaaagaacaaaaaaaaaaatgaaaaattgagatactcacgaatccaaactcttgtggcagtagaaagcacgaagaagatatacattttatgtctcctgcttctcctttatgatttcaccattatgatttttctgcagcttatgaaaatcatgaaacaaattggctgctggagaaagctttcgtttaatcacagtaatccgcgaatggctttgacattaatgagaaagaatttccaaaaggcgggattgagcatctgaaggagtatctcttccaggaacattgacccacagagtattccaatcttctgaaggtcaatgttcctgaaggagtatctaaacc

SEQ ID NO: 81822 - DNA, 532 bp, Arabidopsis thaliana columbia
  unsure (1)..(532): unsure at all n locations
aggatgagaaattaactaagacatttaactaacaacactaattatcatccatccgtgttctctcataatctaaatatttttagttaaaacccccaaatttataatgaacataataataacaagagatcaaagggtttatcaaccaacagcttctaacaaaacatgtcttgaaccattactacgattccaatgagagagtaactcacattccttaatccttcttcttgttcagagctcctcttggaatcttgcttatgaccttacgcaataccttctcatcaagtactgcatattgctttttgatctccctcatcgccttctccccataggcatctactttggtcctccatactttctcgtagagtacagggaatggtgaagagaaggccagtagcagtgtagaccatggccagaagtgtagcagctgccataatgggcaaanccncaagcagnaattnccgggtaattcctggnatctttccggtggatgtccaagaggggaacccgttggtcacctatccgacagtgngaa

SEQ ID NO: 81823 - DNA, 1983 bp, Arabidopsis thaliana columbia
  unsure (1)..(1983): unsure at all n locations
cgcgcacnnnnnnnnnnnnnnnnnnnnnnnnnnnnnnnnnnnnnnnnnnnnnnnnnnnnnnnnnnnnnnnnncgctctttgtttgaacaatttatctgggtttttgattctcggatctactccaagacggttttcgaaattaacaagcttttcaggaaatggatcattcatcaaatagatttggcaataatggagtggaatcgattttaccgaattacaagcttggtaaaactcttggaattgggtcttttgggaaggtgaaaatagcagagcatgttgtcacagggcataaggttgctatcaaaatccttaatcgtcgtaagatcaagaacatggagatggaagagaaagtgaggagggagattaagattctacggttgtttatgcatcctcatattattcggcagtatgaggtaatagagaccacgagtgacatttatgttgtgatggagtatgtcaagtctggagagctctttgattatattgttgagaaaggcagattacaagaagatgaggctcgtaactttttccagcagataatatctggtgtagagtactgccatcgtaatatggttgtccatagagacctgaagcctgagaatttactattggattcgaggtgtaatattaagattgcagactttgggttgagtaatgttatgcgggatggtcattttctaaagacgagttgtggaagccccaactacgctgctcccgaggttatatcaggtaaattatatgctggacctgaagtagatgtatggagttgcggagttatattgtacgctctattatgcggtactcttccttttgatgatgaaaacattcccaaccttttcaagaaaattaagggtgggatttacactcttccaagtcatttatcatctgaggctagagacctgatcccaaggatgcttatagttgacccggtgaaacgaatcaccattcctgagatccgtcaacaccgttggttccagactcatctccctcgttatcttgctgtctctccaccggatacagtagagcaggctaaaaagatcaatgaggagatagttcaagaagtggttaacatgggatttgatagaaaccaggttttggaatctctacgcaacagaacacaaaacgatgctactgttacatactacctgttattggataaccggttccgtgttccaagtggctatctagaatccgagtttcaggagacaacagacagtggttccaatcctatgcgcacacctgaagcgggcgcttcacctgtaggccactggattcctgcacatgtggatcactacgggttgggagcaagatcacaagtccctgttgatcgaaaatgggctcttggacttcagtctcatgcgcatcctcgtgaaatcatgaatgaagttttgaaagctcttcaagaactcaatgtgtgttggaagaagattggtcactacaacatgaaatgtcgatgggttcctggtttagctgatggtcagaatactatggtcaacaatcagctgcacttcagagatgaatccagcatcattgaggatgactgtgccatgacttcacccactgtcatcaaatttgaacttcagctatacaaagcccgggaagagaagtacttgctggatatacagagagttaacggtccgcagtttctcttcttggatctatgcgccgcctttcttacagagcttcgtgtgatctgaatgttttaaccatttgttgagacattttttttctttcatgttcaatggtttgtaatagtagagaacataatataatatgtgggtgcagtgtttactttgccgggttacttttatatacctggattctaagttaaactctactgtaatagtaactatcctttcttctttttgatggtttttaaggtttgatcatgtgtacataacttagctgtttcattctaactattgtatttctcctctgatgccaattttatacaacgtttatatcaaaaaaaaaaaaaaaaaa

SEQ ID NO: 81824 - DNA, 360 bp, Arabidopsis thaliana columbia
agaacaaccaaatttgtttccgtcttctgctaacatatcctctttttcatctgggaaccctaatttcttgactaacttagggttttatttatccatttgagatactctgtaattgaaaggttgaatttttagaagagacatgggaggttcgtcggagacaaagatcttacaagaactcatactttacgcggcgagcgctgctttcagctgcttggttctctttgcgggtcttcgtcatctcgatcctaatcgtgaggcttctaaaaaagctctcgagcataagaaggaaatctctaaacgtttgggtcgtcctcttgttcagaccaatccatacgaggatgtaattgcatgtgatgtgat

SEQ ID NO: 81825 - DNA, 459 bp, Arabidopsis thaliana columbia
aaatatataaatatcaatatctgctggtagcatggagacataagatcaaactagttccataacgagacataggtcagaagaatctactcataaaacacaccattagtctctaaacaagcagcttcacttaatacataagttacctaaaccacaagaaccaatctttttttcctggattagacatttacctaacaatccttcattcatggatcaacctcaagcaccgcagtactgacttctgccttgtcagactcttcttccaggtccttaatcactctctgatcatcttcttcagcttcgtttcctactttaccagtctcagggatgcttgaatatgtttctttatcaatctcttctccctttgtcttagacatatcctccttctcaatcaattttgtgtctgcagtttgctcttttgctgactctttctcttctaccttggtcttgggttctgcattt

SEQ ID NO: 81826 - DNA, 523 bp, Arabidopsis thaliana columbia
tcgccgagcactaatacgactcacttagggaaagccggtacgcctgcaggtaccggtccggaattcccgtgtcgacccacgcgtccgcacggctgcgagaagacgacagaagggggaagaagagaagaagaagaaccttacaattgcttttgtaaatattgtaggtagtttaaggacgtcactacctacatacatggatttatgtggaactcagatgctgcgcctctcatcgcctcatttcaaaacccttcatttggtgaggcatgcacaaggagtccacaatatagcattagaagagaagggagagaaacctgaatcagaaaagctttttgacgcccacctttctccaaagggtttgcaacaggtttcggaaaggcgcaaccaaatccttgaatcaggattacttaacactgtcgagttagtgataacctctccgctgtgcagagcaatggaaacttcaataggaatatttaggggacaaggatatgtaaatatatccgaagactttgcaaaagctaacaac

SEQ ID NO: 81827 - DNA, 474 bp, Arabidopsis thaliana columbia
agcggacgcgtgggcggacgcgtgggttttcactacttcttcgtctctctctctctctctctctctctctctctgtatcccttgtgtgtcggtgatcagatctcgtgccgacgaaaacgtgcgtctaaagcaatgctgttcgcactctgctatcttcaattcctcgatttatcttgaactgcgattgtttgttgttgtttcgatttcgttgggggtaattgggtgaattagagaggtgaatgagaaattcgcctgcgattctgtctctgtcggtgatcgattgccggagcagaaccaggtcggattctagcttcgccatttggagtagtggtcgatggggccaatgcggctgatctgaatttctatttccctccccccaattcagatcgaattctagggttcttctaattcctgggtttttagtctgtgtttcaattgagtcacgatgcagcaagataatcgcagaaagaataa

SEQ ID NO: 81828 - DNA, 443 bp, Arabidopsis thaliana columbia
atactctcttttgatggctggaggagagaaaagaagaggacttagtaaatcttgtgctcttcccatagtgattgctgggatagagagatatgcattcaaaggagttgcatcaaacttagtgacatatctaactgatgtagtgaagatgagcaattcaagagcagccacgactgtgaacacttggagtggcttcactttcatgttgcctctcttctctgctccttttgccgattcttattgggacagattcttcaccatccttgcttcttcttctctctactttgtgggtctagtgggattgacatttacggcatttgctgggtcacgttcgactacaaaaacaatctctctttacttcctctacacttcactttccctcgtcgctctaggccttggcgtcttaaacccatctctacaagcctttggtgctgaccagctcgact

SEQ ID NO: 81829 - DNA, 532 bp, Arabidopsis thaliana columbia
  unsure (1)..(532): unsure at all n locations
atgatcatgccgnnnnnnnnnnnnnnnnnnnnnnnnnnnnnnnnnnnnnnnnnnnnnnnnnnnnnnnnnnnnnnnnnnnnnnccacgcgtccgccttcctcgccaatcttcatcttcctcatgttttctctaattctccatggaagaaagtctgtggaattacagaaatggcgtaatttaagagttacagtgagcattgtgcaaaatgcatttccttttaccaccaaatcgttctcttctacaatagctaaagattcgagtccaaagggaagtactttcacagtctcttatctcgttgaatcattgggtttgactaaaaaacttgcagaaacaatctcaaagaaagtcaccttcgaagacaagatgctgagaaatctcttcgtccaaagcttcagtttttaaagtctagaggagcttcaagctctgaggtcatagagattgtttcgaatgttccaacaatcttggataagaaagagggaaagaaaggtaacagaattcgaaatatatcggttttgagagaattgggagtacc

SEQ ID NO: 81830 - DNA, 568 bp, Arabidopsis thaliana columbia
  unsure (1)..(568): unsure at all n locations
agaaacacccattnggattctcatcactaaacaantcaggcgcacgcatgtgaccataaggatctgcgtaaccttgttggttcatatatggtggtggtggagcttcttgtccatacccttgaccgtaaccttggntcatatacgantcttgcacgtatccttggttcgaatacggttcttgtacatacgattgcgatgattgaccttgcatcatgtaatgttgttgaccgtatacttgtccttctgggtagtaatacatcggctgtggaggataaccgtaaccgttatactccgatttcttcacatccatagcaccaccgtctcctccacctccacctcctcctccaccgccgccaacagcaacttctttcttcttctcaccaccaccgtcgactttcttttctccaacatctttaatctctttcttttcaccagcaactttgtccttcttctcaccgccagctggagccgccgctgcagctgccactggtgctccgtcatcctttttggccggaacaacttccaccgtgcgtttaagcttctcgttaagataaggagtgagttgttt

SEQ ID NO: 81831 - DNA, 499 bp, Arabidopsis thaliana columbia
  unsure (1)..(499): unsure at all n locations
aatcagaactaatatgttttcttttcattatgatcacctgacaattacatagcacaaaaagttaagaacacatgtttgttccgattcaaaattatagtacctatatagaagaaataaaccaaccaaccaatccacgcctctcaaaaaccggttctaaccggccaatcttgccggtttagattaccggactcggaagtttccgtgctttcgtagtataccatttttgtcatagctaacattctcaccctatattgttttagttatttacattttcctccccatttggtttactcacatcacagaacacccatttgggattctcatcactaaacaactcacgcgcacgcatgtgaccataaggatctgcgtaaccttgttgggtcatatatggtgggggtggagctcctggccaancctggaccgaacctggncaanacggtctgacgacctggncgaacggnttgaaacgtgnggggtgcctgnccagaagtgtnccgaa

SEQ ID NO: 81832 - DNA, 388 bp, Arabidopsis thaliana columbia
ctttctttctttcttgttggtctctcttacttctttcttattcatctaaaacaatttcgatccatttacacataaatatatgtaactggccgtagaagaaacacattgaaggaagagatggctcataggagattaatcatgacgatgacaaagatgatgatgatggtgaccatgatgatgatgatggataaaacatgcatatgtgcggacatttccagaggcagttttccaaagggctttgtctttggaactgcttcttcggcttttcagcatgaaggagcggtgaaggcagaaggcagaggtcctacgatatgggacacattttcccacacttttggtaaaatcaccgattttagcaatgctgatgtcgctgttgatcagtatcatc

SEQ ID NO: 81833 - DNA, 265 bp, Arabidopsis thaliana columbia
ttttttttttaacttctcaaagtcaaaagatattaaacctattatagccatgaatgtaagttcacttacttctccaatgtgaagatcactcaggccaaaaggatcaccgtgtgttgtaaaattcctatgaacatcccacttctcttaaaactctacaagagaaccccaaacaaaataaatggaaaaaaaacaaaataaaaacgtgtcaagaactcataaagattgatgagattcaataagcaacgcattgagcatgacatggaca

SEQ ID NO: 81834 - DNA, 424 bp, Arabidopsis thaliana columbia
ggagccgaaaacgaataagaagattaattgaggagaaatcgaagatgtctatagcgttagtggagaagattcaagccaaattttgaagaagtctagtagattctgtattgtaagctactaaaatctgcgatggtgaggcatttcaatcgtcgccggaaaattcatcggagatattaaaattgaatcaagcttcgaattggtcaaccgatctatattgagtgatccagaggacgaaaccgagatgtatgtggtttacgcaaacagaaccgaggatgacattcttgtgagggaagagctagaaggatgggctagtaagcataaggagaggctaaagatttggtacgtcgttgaaatcgcaaaggaaggttggagttacagtaccgggtttataactgaacctgtgcttagggaacatatccctgag

SEQ ID NO: 81835 - DNA, 1447 bp, Arabidopsis thaliana columbia
ttaggaccaacgtgtgcaagcctgggagaggagagatagggatagttttcgaacacccgaccagacccggaaaccagtcgggtgggtggatggcaaaggagcgtcagcttgagatttcctcagaatccaacaataccttgaagaaatctgtctcatctcctttcatgaacactgcctcgaagatgtattcaatctctgaagttagaaaacacaacactgctgactctgcatggatcatcgtccacggtcacatctatgactgtacacgtttcttgaaagatcatccaggaggcacagattctatcctgataaacgcaggtacagattgcaccgaagagtttgaagccattcactctgacaaagccaagaagcttttggaagattaccgtatcggtgaactcatcaccactggctacgactcttcccctaacgtctcagttcatggtgcctcaaactttggtcctttgttagctccaatcaaagagctaactcctcaaaagaacattgctttggtcaacccacgtgagaaaatcccggttaggctcattgagaagacttcgatctcgcacgacgttcgtaagttccgattcgcattaccatcagaagatcaacagcttggtttaccggtggggaagcacgttttcgtttgcgccaacataaacgacaaactctgtctcagagcttatactcccaccagcgccatcgacgcggttggtcatatcgacctcgtcgtcaaagtttacttcaaagacgttcatccaaggtttcccaatggtggactcatgtctcaacacttagactcgttaccaatcgggtcaatgatagatatcaaaggtccactagggcacatcgagtacaaaggcaaaggcaacttcctggtcagcggcaaacctaagtttgccaagaaactagcaatgctcgccggaggaacaggcatcactcctatctaccagatcattcaatctatattgagtgatccagaggacgaaaccgagatgtatgtggtttacgcaaacagaaccgaggatgacattcttgtgagggaagagctagaaggatgggctagtaagcataaggagaggctaaagatttggtacgtcgttgaaatcgcaaaggaaggttggagttacagtaccgggtttataactgaagctgtgcttagggaacatatccctgaaggtttggaaggcgaatcgctagcactcgcatgcggaccaccgcctatgattcagtttgcgttgcagccaaatctagagaagatgggttacaacgtgaaggaggatctcttaatcttctagatttgctcaagttctgtgctattggaaattcgaaagttgataacaagtatcgcttatgtgtgtatatacatggttatttgggcacttttgtcatagttgttgtttatcagagctccaaattgtatattgtataaaattgtgtttaattt

SEQ ID NO: 81836 - DNA, 417 bp, Arabidopsis thaliana columbia
cccaagcgtccgcggacgcgtgggttcgacttttcctctctctcttatataaattatatattttgctttggttttttttttttcaccggatcgatcgagaagagagaaaagttcatcttcttcttgttctgattgtttgacaagttttacgacaatggcggtttacggcgagaagaagcattggtggctccgcaacaagaagatcgttgataaatacatgaaagaagcaaagagtttaatagcgagtcaagatccaaacgacgtgaaatcagctctaaatcttctggaatctgcactctctgtatctcctcgttacgaactcgctctcgaactcaaagccagatcccttctttacctccgtcgatacaaagacgtcgccgatatgcttcaggattacattcctagtcttaaattagc

SEQ ID NO: 81837 - DNA, 558 bp, Arabidopsis thaliana columbia
  unsure (1)..(558): unsure at all n locations
ccnnnnnnnnnnnnnnnnnnnnagctactacgcctgcaggtaccggtccggaattcccgggttgacccacgcgtccgcccacgcgtccgctttttggattttggtgaaaaagtttaatttgtctctttctctatttatctccggcgtcaatttcacggcggctacacgacggttatcgatgtcattgactgtaccggagttcgatttcagattgacgccacagtttggtttctcacagtcaccgatcggggagcgtaatttcgcggatgttgataatctggagaactgtattaagtatttgaatcagagcttagtcacctctggattctctgcttcgcttgacctcttcgctaccgatcctgtttcgattgctagaacttgcaattgcgtatacgctttgattcaacagaggcaacgagatgtggaatttagagaatctgctaatgatcagagacaacgacttttatccgatatggcgagactcgaagcaaaagttgaaaggcttgagactcaattgcaagctaaagaaagggaacttggttcggtgacaagaacgga

SEQ ID NO: 81838 - DNA, 548 bp, Arabidopsis thaliana columbia
agctctctacgactcactattgggaaagctggcacgcctgcaggtaccggtccggaattcccgggtcgacccacgcgtgcgtctagctcttcgatttcacgtcactcttcactcaataaaaaagctactgcttcaaagctctacttcttcaatttactctcattcgtttgcgttgatgtagcaaaacaaaaaccaaaatggttcccgtctcgttctgcttcttctttctccttctcttgctctctgctggagagagttcatcgcaattagtttctggtccacacatcaccgatgttaacatactcttacctcccaagatgaagaatccggttgagtatcgccttcaaggaagtgatggctgcttcaaatggtcatgggatcatcatgatattctatcagtcacacctgagtttaattcgagcagtcattgttcgaccagcgcgcgtctcagatcgatttctccgtatagtggtagaaaggagactgcagtttatgccactgatatacagactgggatggtgattcgctgcaaggtctttattgacaac

SEQ ID NO: 81839 - DNA, 552 bp, Arabidopsis thaliana columbia
  unsure (1)..(552): unsure at all n locations
nnnnnnnnnnnnnnnnnnnnnnnnnnnnnnnnnnnnnnnnnnnnnnnnnnnnnnnnnnnnnnnnnnnnnnnnnccacgcgtccgctccgatcatgtcgtcgaagaaagcgaagacgaagaacgaggcgagtagcagccgtggtggcatcggcggagagagtatagtcgctgattgtggacgaaataaatcaacttgcggttactgtaaatcttctacccgctttagtatttctcacggtttatggacagagagactcaccgttaatgactatcaagctcttcttgacagtggatggagacgatctggctgctatctttacaaacctgagatggagaagacttgttgcccttcttatacaatccgcttgaaagcaagtgattttgtcccttctaaggagcagcagcgagtgcgtagaagaatagaaaggtttttggatggtgaactagatgcgaagccgagtgagcagacagaagatcaagatgtctctttctcccgtgaagtttcagtgtcagtgaaaaaatcacttggagcttgctaaagagaaaaaaaca

SEQ ID NO: 81840 - DNA, 1939 bp, Arabidopsis thaliana columbia
  unsure (1)..(1939): unsure at all n locations
cnnnnnnnnnnnnnnnnnnnnnnnnnnnnnnnnnnnnagtgcgagcaatttagcttgaatcaaatctcaaacttgcaaagaaacttgaaatattttataacaatgggtgattctactggtgagccggggagctccatgcatggagtcaccggtagagaacaaagctttgctttctcggtgcaatcaccaattgtgcataccgacaagacggccaagttcgaccttccggtggacacagagcataaggcaacggttttcaagctcttctccttcgccaaacctcacatgagaacgttccatctctcgtggatctctttctccacatgttttgtctcgactttcgcagctgcaccacttgtccctatcatccgggagaatctcaacctcaccaaacaagacattggaaacgccggagttgcctctgtctctgggagtatcttctctaggctcgtgatgggagccgtgtgtgatcttttgggtccccgttacggttgtgccttccttgtgatgttgtctgccccaacggtgttctccatgagcttcgtgagtgacgcagcaggcttcataacggtgaggttcatgattggtttttgcctggcgacgtttgtgtcttgtcaatactggatgagcactatgttcaacagtcagatcattggtctggtgaatgggacagcagccggatggggaaacatgggtggcggcataacgcagttgctcatgcccattgtgtatgaaatcattaggcgctgcggttccacagccttcacggcctggaggatcgccttctttgtacccggttggttgcacatcatcatgggaatcttggtgctcaatctaggtcaagatctgccagatggaaatcgagctaccttggagaaagcgggagaagttgccaaagacaaattcggaaagattctgtggtatgccgttacaaactacaggacttggatcttcgttcttctctacggatactccatgggagttgagttgagcactgataatgttatcgccgagtacttctttgacaggtttcacttgaagctccacacagcagggctcatagcagcatgtttcggaatggccaatttctttgctcgtccagcaggaggctacgcatctgactttgcagccaagtacttcgggatgagagggaggttgtggacgttgtggatcatacagacggctggtggcctcttctgtgtgtggctcggccgcgccaacacccttgtaactgccgttgtggctatggtgctcttctctatgggggcacaagctgcttgcggagccacctttgcaattgtgccctttgtctcccggcgagctctaggcatcatctcgggtttaaccggggctggagggaactttggatcagggctcacacaactcctcttcttctcgacctcacacttcacaactgaacaagggctaacgtggatgggagtgatgatagtcgcttgcacgttacctgtgaccttagttcactttcctcaatggggaagcatgttcttgcctccttccacagatccagtgaaaggtacagaggctcattattatggttctgagtggaatgagcaggagaagcagaagaacatgcatcaaggaagcctccggtttgccgagaacgccaagtcagagggtggacgccgcgtccgctctgctgctacgccgcctgagaacacacccaacaatgtttgatcatacattccacccacggtggaatggtgaaggatgatcgcatataagaatatgtcacacagtgaaaaaaaaaaatgcaaatgttatcaatgcttgcataacattactatctatctttcatttactaaacaaaccttttgctttttgccttgaaatctttttattatatatcaaaatatatctctatgtcttgaggtttgattattttgcatatatcattaatgatttgataatattggaactg

SEQ ID NO: 81841 - DNA, 559 bp, Arabidopsis thaliana columbia
  unsure (1)..(559): unsure at all n locations
tgatacttcnnnnnnnnnnnnnnnnnnnnnnnnnnnnnnnnnnnnnnnnnnnnnnnagcccacgcgtccgcgccttgacccccgcgcccgccgtttcttcagcctctcgccgctaattaacgccgtctctggttgctaccaccgccgtaaccctaacggcatttttaatggcgtcgtgtgatgacgatttctctctacttggagacgatcagtcaaaccctaatcaacatcaccaccaccaccaagttcttcatcacacgccctacgctcctagacgattcaacccgaaaccatcgaatcagatccttttaccgcatcaccagaggaacggcgacgaggacgacgagaacgatgtcgttgtagaagcgtcttctgctttccacggtcacggtgttaatcctttcacggcggacgaaaattcgaatccgtatgatgataataacgcagctgtagacgaagacgaagacgaagatctcggtgccaacagatctagaatcggaggtgttcgtgttgagaagaggcagagtcaggaggagctaagtgacggaggaacaacaaa

SEQ ID NO: 81842 - DNA, 519 bp, Arabidopsis thaliana columbia
cacttagggaaagctgctacgcctgcaggtaccggtccggaattcccgggtcgacccacgcgtccgcccacgcgtccgatttgttcgccggaatatgctcccttctcttaacgtcgatcacctgttcttctctttccctctctctctatttttctcaactaggaatcaaccatgaatctcccatcattctcacttctctcttctaattctttcatggaagtttcaggttagaagaagattccgggcagattatctgttgattcgaagaataccgaatacgcgtttgaaatttctgaagaattatgggatacttggacttggccttgtcgtattccaaccagccgcagactgttgaagctccagcgagcggaggaggtctcagccagaatggaaaatttagctatggatatgcaagctccgctggcaagagatcatctatggaagacttttttgaaactaggatcgacggtatcaatggagaaatagttggtctagttggagtttttgatggccatggtg

SEQ ID NO: 81843 - DNA, 547 bp, Arabidopsis thaliana columbia
  unsure (1)..(547): unsure at all n locations
cnnnnnnnnnnnnnnnnnnnnnnnnnnnnnnnnnnnnnnnnnnnnnnnnnnnnnnnnnnnnnnnnnnnnnnnccacgcgtgcgcgttacacctacccctcaacaaacgttggcatcattgaattcaacaaagtacacaaacaagttctttctgctgctcttcatctttcacaaggttgtggctattgggtttgtaggcttccttgtcttcagaggcgttcaaggtctaattggatcaaatggtagcgtcaaaaggaaagagaaaaagatcctcagattcttacttccacaagtcgaagctgcatcgctcttgagcatcattcttgcattcctttggcaaatggcattcaggatttggcctgatttcatgattcacttcatactttggagtacgtttttgatgtctttatcctcaggaatcctcttactgtgtttccagatgccagccactgatgctgttggggtttgcctcattgccttctcaattggcaatggtttatatgcttgctgggtcactcgtagaatcaagttctgttctaagattttgg

SEQ ID NO: 81844 - DNA, 1031 bp, Arabidopsis thaliana columbia
  unsure (1)..(1031): unsure at all n locations
ctctccnacgactcactattgggaaagctggcacgcctgcaggtaccggtccggaattcccgggtcgacccacgcgtgcgagaacaaccaatctccactcttgtcctctctgaatcaacaatggcctatggacgcattctctcaagtgacaacgaaggcaacttcagaggacctttgacactctctctcaaacaaggatctttgttggtgatgagagggaacagtgcagacatggcaagacatgtaatgtgtccatcacaaaacaaaagagtaagcatcacattctttcgtattcgacctgacacatatcataaccattcacaacccaacagtcctcgcaacgacggtgtcatgacaatgtggcaaccctaccaaatgacaccaactccattcctcaatggttatgatcattcaattgacatgatgccaaaacttggagccctacgtcctacaatggtcatgatggcaccaccaccggttcaaccaatgatattaccaagtcccaatgtgatgggaaccggtggtggtaccggtgttttcttaccatgggcctctgttaatagctcaagaaaacatgtgaagcatttgcctccacgcgcgcagaagaagcgattacttccgcttcctcctgctgcttcttcttctccagctggaggatccacctctgagcctgtgatcactgtaggttaatcctattcgacttcttcagcaaaaagaaaaaaaaacttggaattggtctttttctaagcaaagctctgtttcttctctgttctgtttccttttttgttctttcaaattcagtttaggttaactcaggttttatagatagaattaagtttgttacatcccccgaggcatgtgttttctactttgtggacgattttattatcagtatattctcaaaatgttaccttttaaaaaaaaaaaaaaaaaaaaaaaaaaaaaaaaaaaaaaaaagggcggccgctctagaggatccaagcttacgtacgcgtgcatgcgacgtcaaagtctnnctataagtcacctaa

SEQ ID NO: 81845 - DNA, 579 bp, Arabidopsis thaliana columbia
  unsure (1)..(579): unsure at all n locations
gctcccnnnnnnnnnnnnnnnnnnnnnnnnnnnnnnnnnnnnnnnnnnnnnnnnnnnnnnnnnnnnnnnccacgcgtgcgcatgggctctcgcttggacataccgtagacagaatttgttacgggaaattgtcaagtaccgtgcagatatagtttgtctacaagaggtacagaatgatcattttgaggagttttttcttcctgagctggataaacacggataccaaggtctttttaagaggaaaacaaatgaggttttcatcggtaatacaaacacaattgatgggtgcgctactttcttcagaagagacaggttctcacatgtaaaaaaatatgaggttgagttcaacaaggctgcacagtctttgactgaggctattatccctgtttcccagaagaaaaatgctttgaatcggttggtcaaggataatgttgctttaatagttgtactggaagcaaagttcggtagccaggctgctgacaatcctgggaagcgccagctcttttgtgtggctaacacgcatgtanacgttccttatgaattgaagatgtaagctgtgcaggttcacacattattgag

SEQ ID NO: 81846 - DNA, 593 bp, Arabidopsis thaliana columbia
  unsure (1)..(593): unsure at all n locations
ttttcttcattttttggtaataaacaaaccgaggccatactcgcatggggtgcgattgagattattccagctcacaggtatccttattaaatcgatattgcctggctatatcatagtgtttatacacaaagcacaagaaacaataagcaatgttacacagtatctctcactaaacatattttctgggaaacaaaagattttcatcatgctctctgccatgcatctccttcttcatcacaccttccattgttctgactccaggttgcatttcactcattagcagcagcagccgcagcctggttaagaggattatctggtgatttcttccacatcttccatatcaagtccttgtactgtgtgtgagttagacctggtttctcagacttgagccttggaagttccacttcttcatatgccttaaaagaagccttgagcctcttctccgggtgtcgatcaacgggcaggtatctgacacagtaatccgggcaagagcctcgtcaacgggaatgtgccncgatgagggatcaccgcgattggaattggcaccagaccanctttcaantnacttccngcatggggctgtctctangctt

SEQ ID NO: 81847 - DNA, 424 bp, Arabidopsis thaliana columbia
ctttgaagtgaaatcggtttcgagagacagtgagacgaaaatgttaaggattttggggagaagagttgtttcagcttcgaaagagcttactagtattcaacaatggcggatccgaccaggaaccgattctcgtcccgatccttttcgaactttccggggactacaaaagggtttctgcgtgggcattttaccggacggagtcgacagaaattcggaggctttttctagcaattcgatcgccatggaagggatcttatcggagcttcgttcccatatcaaaaaggtattggccggaggtggagaggaagcggttaagaggaacagaagcagaaacaagcttttgcctagagaaaggattgatcggctacttgatcctggttcttcctttttggagctctctcagcttgcaggacatgaattgtat

SEQ ID NO: 81848 - DNA, 775 bp, Arabidopsis thaliana columbia
  unsure (1)..(775): unsure at all n locations
atgatactccagctccctacgactcactatagggaaagctggcacgcctgcaggtaccggtccggaattcccgggtcgacccacgcgtgcggtagcatttgcttcaccctcatcaggtgtgatgcctgattccaccaatcctactatgagtgtgaatgcccaaggccatgaaatccaaaatggtggtggaacaacaagccagttctcatcggctttgtgggcattaatggactcaataccttcaacgccagcctctgcgtgtgagggtccccttaaccgaacctttgtacgtatgtctagcttcagccgtatgaggttcaatggaaaggctaatggaacgccagtgagtactaccatagcaaagaagggtattagaaacagacgttggcttctattatcaatcctgggtgctctgtgtgccatcttctgggtgttggtagccacagttcgagtctcaggtagaagtcttctcttgaaagactagtggtggttctcttgaactcttaactactggtaagttagaagaagaaaccatgatccacattagtgttcatgggattattgacctatctataatatatgaaactttgaatatgtacagagtttgaaagagtaaagtacaataatncgtgataaaggagtttcttttccttctcgattgtccttgtttttttttctgcatatcttctgggtttcaatattcacaaagtagaaaaananaaaaaaaaaaaaatggatgtctaggagttgtttacttttgagtgttctgtacaaa

SEQ ID NO: 81849 - DNA, 671 bp, Arabidopsis thaliana columbia
  unsure (1)..(671): unsure at all n locations
aanttttttgccacacaaccnttttgggcctttgtccccccacgggnggccccggtcccccancccccntggggggaaccccnaggccttgaacccnaattggggnggaccaacaacccagtcccancggcttngggncattaatggactcaataccttcaacgccaccctctgcgtgtgagggccccccttaaccggaccctttgtacgtatgtctagcttccagccgtatgaggttccaatggaaaggctaatggaacgccagtgagtactacccatagcaaagaagggtattagaaacagaggttttcttctattatcaatcgtgggtgctttgtgtgccatcttctgggtgttggtagccacagttcgagtctcaggtagaagtcttctcttgaaagactagtggtggttctcttgaactcttaactactggtaagttagaagaagaaaccatgatccacattagtgttcatgggattattgacctatctataatatatgaaactttgaatatgtacagagtttgaaagagtaaagtacaataattcgtgataaaggagtttcttttccttctcaaaaaaaaaaaaaaaaaaaaagggcggccgctctagaggatccaagcttacgtacgcgtgcatgcgacgtcaaagctctcntataagtcacct

SEQ ID NO: 81850 - DNA, 439 bp, Arabidopsis thaliana columbia
gttgggaaaatgcttcatttactgggaaaattcgtaacgtttggacattcaataatatagctttgacaagacattgactccggtagaaaagaaaccaagagaaatctaatgagattctcaatcgtaaatagtattactgaaagttgtccaatctgtttagagagctttcttcacctcgaaaaagttggagcgttcattgttcgctgcatcaatgtcttccgcggatgccacagccaccgcaacacctttatctctaaccacatctattgcttgtgcgaaatccttgaagtccttcaaacttgttgttagtatctcttcacgctttctttgtcgttcttcgtcagttactccgagtaaatgcctcaacaaactgctataacctttggcatcaggtaattggtatgaatcaacatcaccgatggtgccaataatagcttta

SEQ ID NO: 81851 - DNA, 1783 bp, Arabidopsis thaliana columbia
  unsure (1)..(1783): unsure at all n locations
gccagnnnnnnnnnnnnnnnnnnnnnnnnnnnnnnnnnnnnnnnnnnnnnnnnnnnnnnnnnnnnnnnnnnnnnnnccacgcgtccggacaagttcagagaacgagattttaccatcccttattctatcagaccggtttaagctgcagatttctaggcttagcgttcgatttcgtcgctgaaagtgaaaagttcatctagctttagttttctcttttcatggtttccgcgggaaaagttcgtcttttttgaagcccttttgacacaaaagaccagaacaagttgaagaaatatgaatacaacctcgacacattttgttccaccgagaaggtttgaagtttacgagcctctcaaccaaatcggtatgtgggaagaaagtttcaagaacaatggagacatgtatacgcctggctctatcataatcccgactaacgaaaaaccagacagcttgtcagaggatacttctcatgggacagaaggaactcctcacaagtttgaccaagaggcttccacatctagacatcctgataagatacagagaaggctagcacagaatcgagaggcagctaggaaaagtcgtttgcgcaagaaagcttatgttcagcagctagagactagccggttaaagctaattcatttagagcaagaactcgatcgtgctagacaacagggtttctatgtggggaacggagtagataccaatgctcttagtttctcagataacatgagctcagggattgttgcatttgagatggaatatggacattgggtggaagaacagaacaggcaaatatgtgaactaagaacggttttacatggacaagttagtgatatagagcttcgttctctagtcgagaatgccatgaaacattactttcaactcttccgaatgaagtcagccgctgcaaaaatcgatgttttctatgtcatgtccggaatgtggaaaacttcagcagagcggtttttcttgtggataggcggatttagaccctcagagcttctcaaggttctgttaccgcattttgatcctttgacggatcaacaacttttggatgtatgtaatctgaggcaatcatgtcaacaatcagaagatgcgttatcccaaggtatggagaaactgcaacatacattagcagagagtgtagcagccgggaaacttggtgaaggaagttatattcctcaaatgacttgtgctatggagagattggaggctttggtcagctttgtaaatcaagctgatcatctgagacatgagacattgcaacagatgcatcggatcttaaccacgcgacaagcggctagaggtttgttagcattaggggagtatttccaaaggcttcgagctttgagttcgagttgggcggctaggcaacgtgaaccaacgtaattaaggtgtttagatgtcaagaaaggtttgagaccttaacaatcaagaatggagtttgctggtgagtggatttttgggtcaagaacaagagcaataacacaagctgctgtgtgatgatgaatcttgtcttgcggctaaaggaaatgtttgaggaaagttgtacatatgatcagcaacgtaaagtttatagctttttagaaaccaacttttcgatggttgttcttttttttttgtatgtaatattatagataagcttgtggtatatatgattttaatgtgacattacgaacttgatttataaccatggtaaaatgaaaaaaaaagggcggcaactctagaggatccaagcttacgtacgcgtgcaggtgacgtcatagatcttctatagttgtcctaa

SEQ ID NO: 81852 - DNA, 555 bp, Arabidopsis thaliana columbia
  unsure (1)..(555): unsure at all n locations
aaataattcccanaaacccccaaaaactacaacgggggaaattttgaaggtttgattccatgtaatgaaaccagaacgcacccgcatcaaactcgggtttataacagcaaaagtatctaacaaaaacaacaaaaaaaataccaaaaaggcggtttcaaaagcgttaagaaccttttttcaaaccccattacattcaacaacagcttcagcagctcgtcttggtttgttcttccttctgctcccattctgcctaaacccaatagacgacgatgatttcatagaatcttctgtgcttgattttgaccctaccccattctcttcttcagttatggtgcctctttagactccactggggttcttcctcttcctcccattctctgncacattttccttactggttactggaaccattggatcatcaacctgggcttcttcccaacggcttcttcaaaagnncttctcctcctcctcttcaancttnacgggttnggggggccccctttccaaagggggaccttttcccgggggcccggnttcagagagaattggnctggt

SEQ ID NO: 81853 - DNA, 1117 bp, Arabidopsis thaliana columbia
accttctggctcagtgtggagagcatctggtgaaaggtgatatccaccagggtccagctgtgattggattagctatggttgctatgtctgaggaattgggtctggatatggagatccgttctttggagcgcgtactacagtatggagagcagttctttcgacgtgcagtgcctttggctcttggtctcctatgtatatcaaacccaaaggtgactgttatggacactttgagcagactaagccatgacacagattcagaagttgcaatggcagcaattatctcccttggattgataggcgctggaaccaacaatgcaaggatagctggcatgcttagaaatctctccagctattattacaaggatgccagccttcttttctgtgtgcgcatcgctcaagggtttgtgcatatgggaaagggtctcttaactctcaatcctttccactccgaacggccccgcctcccgccaaccgcacttgctggtatagtgacattgttgcatgcatgccttgacatgaaatccattatactggggaaatatcactatgtgctctacttccttgttttggcgatgcagccaaggatgatgctgacggtggatcagagcctgaagcccatctcggtgccagtgcgggtaggacaagcggttgatgtggttggacaggcaggccgacctaagacaatcactgggttccaaacgcactcaacacctgttctccttgctgctggggagagagctgaactcgcaaccgagaagtacattccgttgtcgcccatattagaaggtttcgtcatattgaaggaaaatccagactacagagaggagtaaatccaaagttgcaagcatttgaagaaagagagagagcctttgaatactttcactacggttgtcaaaagttttttagtttattcccgtctgttcccaggaaatggttcacaatctctccttttaaaagaaaaaatagcttcattgcaatatataggaacttcttgtgcactactttaatatcgcattctaaaagctggataagtttccaaaaaaaaaacacaaagggcaggccgctctagaggatccaagcttacgtacgcgtggatgcgacgtcaaagtcttctaga

SEQ ID NO: 81854 - DNA, 454 bp, Arabidopsis thaliana columbia
ccttatttattatgtaacgagaggatgaagccttttgacttcttagctgcttcttatcttatgttttgcttaatacattctttatgtacaaagagagagaggagagctatattctctgtttaccatttaacattttacagaagctcccattcagattcttctgatgattggttttcctctatcggtttcggattatcgccacattctctcccattttcaacatcttctgcgtaccattgccgggcaagtcgcttgtattctttttctctgttttgcttcattcttgaagatatagcgtctctgatcttcttgtaaggtttgtgtttgtcattctccatcttgtcaggaaacacactatggaattcgtctctatccacaagtatacagctttcttcaactgatctcccactaagatgttggagaatctctgacttcggctctgagacagaactcg

SEQ ID NO: 81855 - DNA, 385 bp, Arabidopsis thaliana columbia
ttcttttttttttttttcctattataactccatttatgcaccatttctgttgggttgtatcagattattattgggcgcaagttgttactctaaatatggaaatatatttaaatacataaaaaagctaaaatctagcgttttcgaaaccatgcaagtcactgactctgttcatatgtttcctcaccatcgccactttagccaacctctccgccgctttccaagccgacgtcggagtaagcgactccaaactctctgatgccgccacgtgtcttcctttcacactattaagatcagctatctctgcgtccagtccacgtatacacgcatcgctcgagctcaaaccgtgctgcacaagcaatgctctagctgacgtcagcaatctatg

SEQ ID NO: 81856 - DNA, 523 bp, Arabidopsis thaliana columbia
  unsure (1)..(523): unsure at all n locations
gcacatgtaaaccacccaaacgcagctaggcttcgcggtttcagcagtgatcgcggtttgcattttgtncttgagtacgctccctatggcagcctcgcttctatgctttttggatcagaggaatgtctagagtggaagataaggtataaagtggctctaggtatagctgatggtctgagttatcttcataatgcttgtccaagaaggatcattcaccgtgacatcaaagcttctaacatattgctcaaccacgattacgaagctcagatttcagatttcggacttgcaaaatggctcccagagaactggcctcaccatgttgtattccccattgaaggaacattcggatatctagctccagagtatttcatgcacggcattgttgatgagaagattgatgtgtttgcctttggagtattgcttctagagatcataaccagtcgccgagctgttgatacagcaagcaggcagagcattgttgcatgggcaaaaccttttcttgagaaaaatagcatggaggaca

SEQ ID NO: 81857 - DNA, 541 bp, Arabidopsis thaliana columbia
  unsure (1)..(541): unsure at all n locations
gagacaaagttctattgttattgaaatttaacacaatgtctattgactatgttctctttttatcttgtccctaaatgtttgtgtttgctacagatcttcttccacaattacttcaaacaaagcccatttccattaaacttctaagaacagtactcaacagtactctggatcaagttgtaaaaccttgagaacgataaacaaactcagtacacgagatttgctatcctctttccgtgttcataccttaagagattggattgttcattctcaatcttctcaggcagacgagctctttcttgtggcatacacacggtatgcagccagcccaacgaccacagcagcagcaccaatggaaacggccataagagagcggttggattagcctgttgtaatgtttgcggcgtttgcctgcttcgggctctgggatgctcaaatgaggatgttgtgctgcagttaagattttgcgggataaattgttgaaatcccccaattgggaggtttgagacggggggnnatncccaactggggancccgggggnct

SEQ ID NO: 81858 - DNA, 392 bp, Arabidopsis thaliana columbia
ttcaaaacccaatttgattattggtcgtattattaaaaaaagagagttgcattcattaacacacaaatttgttaaagatagaagtacaaatatatttctacttgtacaagcaaaagtagtaaaaagaaaaatggcgaaacaatattctcatcgtctcaatatttgtagcgtgaagatctctcatgcatagtcttgtcttctaccttcttatctgcaaaaaatctctgcaaggatctgaggaaatgaacctgtttggttgatatattaataaagctacttcttcctttaattatcttctttaattatgtgctaaactagaagcaaccgaaataaagagagaaaattaaaataaatgaaactccgtaagagaatctgatctttgcatcggatcc

SEQ ID NO: 81859 - DNA, 459 bp, Arabidopsis thaliana columbia
ctaataaattaattagtttattcttttcccaatagttctccaaaactgttttacaagccgacgataacattaaattacttcttaacaaaatcacaaaacacccaaaaaaaaagaaaaagaagaaaaaacaaaatcttatcacaactccatacaaaatttgaccacaccggcgattttgcaaccaaaccggtgtttggttaatggcaaaaatatcacacaagtaagagatcggatatcaaagaatcatcaagatcgttgaacgatgaaccaatctctttgatctcggaggagtagtattcttctgcgttgctatcgaataacataaggtcgttgaagaaatcattctctgttggttgaataggagacataggttgatcgaagatggagatgtctggtaatgattcattgaaatagttgtcgagaaatgtaatgtccaatggaaatgaatcatcattagta

SEQ ID NO: 81860 - DNA, 709 bp, Arabidopsis thaliana columbia
  unsure (1)..(709): unsure at all n locations
tgacnnnnnnnnnnnnnnnnnnnnnnnnnnnnnnnnnnnnnnnnnnnnnnnnnnnnnnnnnnnnnnnncttttttttttttttttgaagaaagctctactttatttggctactgttcttatacttacaaagggaatagttaaatactgaagaacatgaaaccaaatctagtgctttacattgtttgagtcccttaacttggagggttttacacagatataaggttaccgaagccatcaacagttacccctttcaggacaacgttgcatctacttcaattcttaaaacacgggacaaccttcaacaacaacacctttggctagagggcaatgcgctagagggcaatggtctgaattctcaagcccccaccaatcaggtaagcttatatcattgttctggaatgcgaagaatatcaacactcccataatcgcagtacctgcatcaagcgccgcagagaggatgtaattgtgcctcgcccaccaagttttgaacctcctgaagatgtagtagttgaacacaaccccaacgatggcccaggaccagtaatgcacagccttaccttgtggcatggcgcttactgcagagaagatcaagggaacatggatctgttttagccatttcttctctgggaacttcttcgataggtaccagaagggaactggatcgaggagaccgataaggaagaaccagttcatcccgggatagatacc

SEQ ID NO: 81861 - DNA, 416 bp, Arabidopsis thaliana columbia
atccttcttgtgctgcttctccttgtgcttttcctgcaggtgaaatcccacgagaaaaagaccacacgtatataagtgatgattagaagaaaggcatacaaagatttagttacctttacttgtcaactcttgggttacctttacttgtcaattcttgggtcaacttatataagttttcagagaagaaaccaggttaatcatcaaattcaatgagtatgcgtctacattcattcaaggataaaggatcacactagtgatattactaagtttggcatcaatggaatacaattatctaacatccaaaaccaccagctacagaaacccatacacttcaatatgtcagcatctcagcattctaagttagtcaaggatcctgcaatgcttgctgggtactaagaaaaacaagtggaaggaca

SEQ ID NO: 81862 - DNA, 440 bp, Arabidopsis thaliana columbia
ttcctttttttatttatattaatgcccttccctatatttgcccatatttgtagaatacagctgatgctcatagtcatagctcaaatcataagaaagttcacgaacagttcacttcattgccacactgtttgctgcaatccgcatcacttactgctgttacaagcccccttctctgcatatcaagaagcaaatccgaagcagcggccatgtttccctccttttcataagctctaatcaagagatcaaaaacagccgaatcaggacttattccgctattcaacatttcatcgaaaacttgtcttgcctcaaccatcaaacccttgctagctagcccgtaaatcaatgtagtataggctaacaaatcaagcaaaagaccttcctgaaccattctggtttttaacttaaacgcatccaccaaattcccttgcttacacaaacca

SEQ ID NO: 81863 - DNA, 452 bp, Arabidopsis thaliana columbia
gcggccgtccttttttttttaatgtttcgcatgattgcaactgagggcggaaattcatggaaatacaaagcattaccaaaagaacaaaaggtcgagaatttaactctcccttgaaaagatagactactacatgtgaattagaaaaattcaaaagaactaaggctgaaactaaatcagccattattgtaattgaaaacacaattttgaaaaacatgttgagatgaaacaactacatctttgcacaatctgttggcttaaatgacaccgttttggaaacagcgtcgtatccaacaagaaagctcatctgcgccacattaccgtatatggagaaactcgggctttcgcggaaggcaaagcaaaccaaatccttcgagacttgtacaaaggcattggaggagtcaagcttcacatcggctccatcaaaatgcatagtaatgactggaacttttaga

SEQ ID NO: 81864 - DNA, 415 bp, Arabidopsis thaliana columbia
cctcaaaaaattgaatataaagtttttgtggtctacgaaataatacattacagaaaaaccactattttctgttcttattcgaacgggctttgtatattgaatgcaaagcctaaaaaggttaaaaatcctctgatagaatccatcagaatctacaacagagaagagaagagtaatgtctccatcctttcttcccctttcgaaggtggctcttctcatctttctcctttcgaagttgtctctcctcagctatcaccattcgaagttgggtttcctcagctttctcctttcgaagttgagtctcctcagctttcaccattcgaagttgagtctcctcagctttcacctctcgaagttgggactcctcagctttctcctttcgaagttgtgtcttctcagctttatcctttcgaacttt

SEQ ID NO: 81865 - DNA, 307 bp, Arabidopsis thaliana columbia
  unsure (1)..(307): unsure at all n locations
caacctcatcacttgattcacgatgnaccaaatatgattttcatgtttcgaattcacaaaattctttgaagaataacaagagaaatctcagacatagaaaaaaaaaaaaaattttccaaagctttacaagacataacccgttttggttcatttgttcaacaaacttaactaaatggtcctgaaagatgttgaaattgagtaacacagtggggacttcatgaactttcctttgctttctttttagtcttcaagctgttttggggcactgcgtttccaaattccagccaagacgctaccgaggattgag

SEQ ID NO: 81866 - DNA, 810 bp, Arabidopsis thaliana columbia
  unsure (1)..(810): unsure at all n locations
nnnnnnnnnnnnnnnnnctatcacgtcgcatgcacgcgtacgtaagcttggatcctctagagcggccgccctttgttttttttttttttttttttttttttttttttaaaataatttcatgtatttcataccaaatgcatacaaatacatatgtatttattttagtcgaatacaaatatgtatttataactcgagaaatgctttcttcacttatattccagatgtgttactatgcgcaccaccaggaatggtcacattgctgttgtcgcttatagaagaaaccaatttgttgtcatcctcacttttagttgtgataggcaattcttggaggctattcttttcaaggatatctaatccggatacttcatagtcttttccttttccccaaacaaccatatacaaacccgcggcgatcactgcccctcctattacacatccgaaatggatttgttcatgaagaataaaagaggcaaggagagctacaagaatcatgcagagagggttaaaggcagtaacaaaaactggccctctcgtcttcataaccatcccttgaacatagtacgttatccccgagctaactattcctgtttaaagaggtgcaaaaagccttgcattccaaccaaccgcccattcggtagggtgtctcttcaccacaagcgctaccgcgaagctttggacagccccggctaggcatattaaggcctgataatgaaagatcggcaggggtaccttttttatttgttatcgactgtaaacatataaaccgcccgaaccaagcaaccacaaccgggggagaaatcaacaagggtt

SEQ ID NO: 81867 - DNA, 749 bp, Arabidopsis thaliana columbia
acactatcgaccagctatgacgtcgcatgcacgcgtacgtaagcttggatcctctagagcggccgcccttttttttttttttttttttttttattctatatgaattataaacccccaataagtctatacaaatagaaataagaaaaccaaaacaaaagagttcgaacataatccaaaagaaagaagaagatgataatcacaccatagtcaaaagaaaagaggacataatcagtgaattcacttcacaggtttgcggacgagccttgaagaaggccatctctaatctgagaagccacatcacgaaccgctcctggtccatgaggtatgaacacggcagacgacttggagctagcaccaatctccttcattgtgtcaaagtactgtgtaactagcaccatgtccatcacatctttagcagttgtcccagggacattcacagcgaaacccaaaacactgtcgggtaatccatcgacaatcgcctgcctttgacgggcgataccaagaccagagaggtacttggactcagcttcaccttcagctctcttaatctggaggattttctctgcctctgccttttcgtttgcagccaatctcatccttgcagcagcgttgatttcgttcatggccccgtttgacatgttcatcaggctcgatatcaacaatgagagtttgcacaatctcataaccggaaggccgacattgcctttttcgagctcctctttaacaagcttttgaaataacattctttt

SEQ ID NO: 81868 - DNA, 184 bp, Arabidopsis thaliana columbia
gtggttagagggaaacgcttggttgaagcactaaattactgaaacgggggaactaagcacacacttcacaacaagcttttggcttttgaaagagttaaaaaaacaagtttcacattgctaataaagaataccagacagtcattgcaatggccttttttcatccctaaagcacaagaaagagggg

SEQ ID NO: 81869 - DNA, 426 bp, Arabidopsis thaliana columbia
  unsure (1)..(426): unsure at all n locations
tccttnnnnttttattaattttccttatcgtaaacgcatcaaccaaatcagtgtaaaatgcaaacaatctatgagtttgcttcaaaaagtaaaaccaacgattgttaatctctctactcgtgatcaatctcttgaagaacgatctcccatttaagcgccactgactgtactgtaagcttgataatatcccttcacaaaagtctaaccgtatcttttagaggaactctatcaaaaacttgatctgagcatctcaaaaagttaaaattttagcactatggacgataatatttataatcctcttctcatactctactctaaccgtgtttggaaacaaacttagccgagacaaggacttctggtctcaggagggggcagcatcagcgtagaaccaaacaatttcttcgacaatgatgatcccgcagaaaa

SEQ ID NO: 81870 - DNA, 261 bp, Arabidopsis thaliana columbia
ggggaaaccaaaaaaaaagccccgattaatgaaaaggaccgattggtcccccgttcatgaaacccgatttcaacttcttatttacaagagttcaacatgaaactccggggaacgatggggaaccttttttagagggaacccaaaggggaacttttaaccacaaatccaaaatttttttattttctgcaaaggatcttcattagctatatatctctgcatctcgatttttcctttaacactcccatcgaccaattttttttt

SEQ ID NO: 81871 - DNA, 452 bp, Arabidopsis thaliana columbia
cagaaacatgttttgaacatatactctattacttaaaccatatagtggccatttatgtgcgtaatcttctgggtttggggaccacatggtcatatttcaacatggatgcatagtatcagatttttctacaggtctacagcacaaacaataaataatacatggagattgactctcataataatttcaaagcttggagttggaagttgctatcttgatgagatctttgcgtagaatcttgcctgaagggttctttggtattgaagatacgaaagcaacttttcgtatcctcttgtatggtgctacttgtttcgctacaaactccattattgtcttctctgataagctgctcccagttttccttacgacgtatgccattggaaattgccccacttctttgtccggaaacgggatcactgcagcatcagtgatttcaggatgagtaagcaacaaag

SEQ ID NO: 81872 - DNA, 362 bp, Arabidopsis thaliana columbia
agaaacaatctgagtttgaatttacatggcacaggaaggaaacaacacctacaaggaacacagccaaacaaaaaaaatccctgaaaccttgtaatagaacacataaaatatacaatctggttcccatttatgagttggggaagggtatgcataacgagatgtgtgagatagaaagttagaaattggttatatcgaagaaccttaccatgtttctacaaaatctccccatgtctgctgaatccagtgtcttcaccgtccgtgtttgaatccaaaccacaaggagagtcataccatttcgagttttcttgatagaagctatcgacttgtataccagctaaacctacatctgtttctatactacc

SEQ ID NO: 81873 - DNA, 311 bp, Arabidopsis thaliana columbia
tttttaatcacgatgcttttcactcttgattctacttttttaacctcttggttggttacacgttaattaggcatttgcaagagcaagtgttattttatcaacattttgaaacttggaacaaaagacaagtttggggaagagattttaaacagcgagacaactaaggagagaaaaggccaaaagagatgctacagtttacatgtgattgaggctgttgttgttgttgtctcccttttgcttcactctcaggggcagggagatcaatatcaatgttcccacacttgataagatggagaataggatgaccattt

SEQ ID NO: 81874 - DNA, 477 bp, Arabidopsis thaliana columbia
cgacccacaagcgagaatttcataaatgcttgattcttactaaacaatgaaaagtaacatcgcagagtttgaaagttgtcggaaaacaaaccaagagtcatcaagagggaaggcaaagtaacatccaggattgtcacgcaacgaaaagaaaagtatcacgcagaaagaaagggaaaggaaacaacatccttcagtacagaatgctacatagagcttttaacctgtgaaccatcaaggtgactcactgcctttaggggaaggacggctaagctcagcctcatcatcaatcgggctcctgtcttgaccattaagtccaacaggactttcaccacctccaacaatgggactcgcagagttcctgccattaccattctcttttgggctaccatcatagtctgatccacgctttgggcttgcatctatcacttttcggtctggactcaggctttggtccctacctttgggagatacagatcg

SEQ ID NO: 81875 - DNA, 431 bp, Arabidopsis thaliana columbia
  unsure (1)..(431): unsure at all n locations
nnnnnnnnnnnnnnnnnnnnnnnnnnnnnnnnnnnnnnnngggtaaagaatatatggctccattgatcagctgtgattaacaaaattggacaacaaattgaatgaaggaaaaaaagaaccaagtttcataactatagatatggggttatgtacaaagcgctaacacagtgaactagccagtgtgggatggggatattcttaagaaattttgcagactaaacaaatcttcccaaccccattcgctatacactaccttcgaatgccatttcctacgtctgtgaacctgtcgactaatcattcttttggtggttgcaccgaataacagtgtttgacaatgcaggagttgcttcatagttcctgtaaaagagtcaagctcttaggcttattagcagcttctgacttcattcaagtggattcaaccttggattata

SEQ ID NO: 81876 - DNA, 360 bp, Arabidopsis thaliana columbia
cgattacaaaatgtgtgcttagattgatgaagttacaaaagaacctcgagtttctagtctacgaatgtcttagacttataaacgaacaaacaaatcgttttctagtctatacatcccttgaacttatctagcgaaagttgtaatgaacaaaatggttatggaggatttcctagaggagttggctaatgcatacaatagtacaacgtgccaaaagggtcacatccgatgtggaacaaaacggaaagaaggaacgtaggtgaaagcgctctgctttgtagctaaagttcatcagaggaacggctttgagaagaaaaaaactgtacagccatgtcctttgctatttgaagcaaactcttaacg

SEQ ID NO: 81877 - DNA, 472 bp, Arabidopsis thaliana columbia
tttccctttttttttatatgtttatgatcaatctttattcaaatctgttaaacatactaaaagaaaaaacaaatcaatgcttcataatgtatatactaatgtaagatcaattcaagagcctctttcatgatctcttcttccatttcaggtagctaaagaagtgtctctctggaaccggaacagacttcactaaccatccaatcggccacgatgcagctgcgatggcaatgcaaactccccattgacccaagtttagcctctctgtatcagcaaatctcttgagaaactcaaccatcacaacttgcaaaaccacagtcacaactataattccaatgaagagtctgttcttgtgtaaccctttaaacacattcttcttctccaaactcctagcgttaaactcgttgaacacctgacaaagcacaaatgtattgaagatcaaagtgttcttcactttctcagtcacgttgaaaat

SEQ ID NO: 81878 - DNA, 490 bp, Arabidopsis thaliana columbia
ttattaatctctctctctctctcttcatcgccgccggcgtcttctccggctcctccgctctgtctcgctgctacttcttcttcatcttcctgatgaatactcacaaaaccgaagaaggcctgttccaccatcatgatcttgatccgacggctgacatactcgttcaatcaccaccctccattctccaccaccaccacgaccacaattccgaagtcgatcccgcgttttctctcccggaattcatactcttccgctcttctccttccggagattctcccggtctctcctcagacgagcaagacgattcccttaccggaaacccccaaattgctgattcgccaaattctagggtttcgagtgcaggaagagatgggcttttcatcagccccgatcctcatatctcatctcagttctacacattcaacgcagcttctcactctctcatgtgtcgctgtctccgcgagggccgtctcgctactccggcggagat

SEQ ID NO: 81879 - DNA, 409 bp, Arabidopsis thaliana columbia
ctcacagaaaatttggttttcttcttgacatcgaagaatctattgtgatgttttgtttacacagagataggaaaaaaattaagcttttagcttgttctcaaagagaaaataaactctgaaggagagaattgggatacagatacaatagggtttagggtagtgactccttcaagatgaatatgaatgcttaccaaccaccaatggctatgcctctacgtctccgtcttcctttttgcaaccatccaatgtatcaagcaaagatatcctctgtcaacaatggttcttcaccattcacacagccttgaggtgcacactcgatttgctcatagttaagttgtctggacgcttcatacagagcaatccctacactcaccgaaagattcagacatctcacatacgtttctaccat

SEQ ID NO: 81880 - DNA, 387 bp, Arabidopsis thaliana columbia
gatataacaaatgcattcggagtttgtgatgaaaaacactacataatcatgtggttacataactacaattagatagaacataacatatccattttcgttgtagatctttgacgtctctgctcaattggtagtcaaggaggctgcctttttgttgcaaagcttatcgcagatgtaaacacagttctacgtaaccaacaaagacaccattgcagctgcagagtcaggtccatcattgtttacactcggtatgatgacttcaggtgacactttttgcacaaactcttttagctccgtgaagctgctatgctcactgtaaggaacctcgtaccttattattgtaccctgttgcaaccttcttcctggggacttctttttagtcttaccaga

SEQ ID NO: 81881 - DNA, 352 bp, Arabidopsis thaliana columbia
caatgtaatggcaaggccaaattaattatttgtattacaacattttcacttattacaaaatgaataatcaccacaccattcacagaatcaattagcacatttttaatcccaaaaaaactgggatcaaaaattttataaaaaaggtgaaaaaaaagaggattgagtttgagttagcaagcacttccaccggttgtaacacaatggttaagtgcagaaaaccaagaacgtttcccttcaacctgcgacgttgatcgcctgaatcctacaccggatcttgaatatgatccaccaattaaccggcttcgaggttcatcaacatctgagccaccaaggcagagacttggaggaaacc

SEQ ID NO: 81882 - DNA, 546 bp, Arabidopsis thaliana columbia
  unsure (1)..(546): unsure at all n locations
aagagataaattgtagtgacaaatcctcattaacaaaatattgtaagagataaatacaaaaaaaaaatcaaatcaaaataattaacaaatatgttccatagttttcagatctatacaacatgttttagacattgacttacaacattcagaagaacaacaacatattttgaaacagaaacaaacatttgacatgagagactaaacgtcaatattgttctctgtttggtaaagctccaccatcttcttcttgtttctcttatgcagagtgtagaagtaagatcctaaagccacaactgttgctatcaaagtaccaattctaggccaactaaactcatcatccatgaaatcaaatgccaacacaacaaacaaagccacaagtggtgaagtacacatatgaacaacatcgccaaacacacccgaaacataaagcaccaaacccatcagcccgaccgcccaaacgccacgaatgcaacccgacactcaacggatcggtcccttctnacnggggncgctgngcctntccgcncggaaacccggggaaaccgg

SEQ ID NO: 81883 - DNA, 506 bp, Arabidopsis thaliana columbia
  unsure (1)..(506): unsure at all n locations
tttnnttnnntncctataacatatcaatacctttataagatgctcttattagtattaagtatatatatactaggccaaaaaatactacacatggattcttttctcttctccatgattcattagaaagaagaggagaaaaagagagtaaaactttaccacaagacatagcagaacttaaaatgtagacaaaacctggaaaagattgaggaaactctcatctggtaaacaaatatgatgtctgtgccaagccggcttctctggagttactttcctgaaaaagttcaatctttgcagtatctcgcgtttcaccagaagttaatgagtcattcacaggttctgcatatgaacctcttttaccggatttgaagcaggaaactaaccaaagtgttgactttattgtcggtaatccaagaaggagagattccccatcatcatccncccttggcaaaactggtttgaaacnccttnngnaanagccnttggggaaagggggngntcngntnnta

SEQ ID NO: 81884 - DNA, 398 bp, Arabidopsis thaliana columbia
cacatatggctttcgatagaaacggtgtcaatagtagtattacaacacaccacagaaaaagggacgatctattacagcgtttcaaaattgtggtttgtttgatattaagcttcagactgaacgtttctggtcttgagaccgaagagattcttaagcaaatccgccgtgtttggaggaatcttcgctggtcgtggagccataaagttgacaatcttctcatgaacattatacctgatctttctgctctttgaggcacgtcgatccacaactttcctcttcttcgtctggaacttcttcatctcgtagaaagccgcctctgaggaagctggatcgatagtcttgagaaactcctttagtaactgcctatagaactcagcatcttccacaagttcagggtc

SEQ ID NO: 81885 - DNA, 385 bp, Arabidopsis thaliana columbia
gacccaataaactcgaattgataaaattcaccagaatgagccaggtgttgagagatttggctacaatctatgagacaacatttgaccttaattaagtctaaaacatcgtttgcaagtagtaaaaaaaacaaggattatgtttgtgacaaacacgacaaaacatttaagaaactttaaacagacaaagatgaaacaggaatcatcaaccatgcgaggatctcttgccacttgatcggctatcatcataacgacttcgacccctgcttgagtattcacgctctctgcttactctatcatcatcatcatcttcctttacccgttgctcgtcttccatcacctctgtacctgtctctcccatgcttatgactcttcctcatcatgcctt

SEQ ID NO: 81886 - DNA, 499 bp, Arabidopsis thaliana columbia
gttcatatgaacttgaaacttttatttcctgaaaccatcataagaaacaaaaaaaacaaatcaaaagttcataaaataagaagatcaaaagaacaaagacacaaaccaaacatgagcattcaaagaaacagagaagacaacatataagtagtctctctaatgggtagtcactttaagtcttaaagatttattaatccaagccttaaaacttccaccagctccttttctagctccattaatcggaaaattcgatcttcccttatcttcctcaaccttcttctcctctggtttcttcttacacaacataaagttcctcactcccaccgacccaattgcttcccatggactcaaagctccaggtccaaccattggacaataaaaaacaaaatcgttgaaatcagatccaagaataggaagacgaccttcacgagcataacatttcaaagcagtatcaatcacagatgcaacaagatcaccttcattagcaacgaaccggatc

SEQ ID NO: 81887 - DNA, 328 bp, Arabidopsis thaliana columbia
gtccttgcgctaaataaaaagcatttagctgctgcgttgtaatgttccatatatattatacaatttaaccactgactaacttagaaggtcctacaactacaacagttacattttaatcaacacatctacacaactcacacttaatacaaaaatcgtaggtactctctgtctttaaaagttacatccttcgttttccccatctttttccggtgtctaaaccaacgagccttgaagatgatggagcaggtgatggaccttctataccaacagactctggaatatccagattcccttgcattgattgcgcagatgctactagtgactgttc

SEQ ID NO: 81888 - DNA, 396 bp, Arabidopsis thaliana columbia
  unsure (1)..(396): unsure at all n locations
ggattnagaagtcttagagaggacatattgggggcaaaactgagcatgccggggtgcgtgtgcaccaaatgccagaaaaaagaacacatgcattttcaatttactccgttcctactactctcatcatttcatttatcccactccagctctaactgtggttcagtctttagatgagaaacattcctcgacggcagagcttcagtattaacgtgaccagttaaccgattccaacccatgatgtgtggaagagcaaaactaaaagctgtcttcatcactgcaaattcagcttttgtgacaggaaccacaaaatagtcattggttttgaggatgctattgttaacgctcaatgagatgaagtagccgctaccatctgcgtggggcttaactgacagtgac

SEQ ID NO: 81889 - DNA, 388 bp, Arabidopsis thaliana columbia
aaacaatgaagtttcctgtgtattggtggaaataattcacaagtgtgtgttatttagcttttcttaaaagtaaaatattgatctcctaaatacataataattcagccggttcggaatttggatttactgatgagcggtccgaccagtgggtgtactgagctttccttgcatccagttctgaagcatttgcaatgctgcctttggctgatccatcggaaccatgtgtccagcatcatggacctttaggaaagtgagtgaaccgtagttcttcattaaacccgcttctttgttgtctacgtggaatggaactgtcgctgctgctacaaactctttctggcctgaccattccatttcgtgaacccactttgagtttccgagccaattgcag

SEQ ID NO: 81890 - DNA, 558 bp, Arabidopsis thaliana columbia
  unsure (1)..(558): unsure at all n locations
gcattgccccnaacaaaaaatcacgggnngaattggtttctnaaagggnccnccaangggtgacngncttcctttgaancaaggtctnaanatttaaatgctnctttggctgacccatnggacccatgtgtcaagcatcatggaccttaagggaaattgagtgacccgtaggtccttcatttaaacccggcttcctttgttgcctacgtggaatggaactgttgcggctgctacaaactctttctggcctgaccattccatttcgtgaacccactttgagtttccgagccaattgcagatgagatcgtattctccggcataaacaaggagcttaattccatcttgaagaagagctggaatcccgacctcaagattccgcatccagtccatctgcattgcttcgtagaccgctgtactgcaagacacaaactcgatatctcccacacctaatgccttccgcaccgatttctggttcaagaaattctccatgttcgagaaatcatagcacaagcttccttcacattgtttcctcacgtcataatagtttaccggacgcgt

SEQ ID NO: 81891 - DNA, 340 bp, Arabidopsis thaliana columbia
aagagtgtgtataaatatattctattatttcacaaacttatatttatgcaattacatctttatttcaatcttcaaaagagaattaggatctaatgaatctaccagagcaattgaaagtgtaatgtgaacagttgcttactgtgagtttttgactgtttttgtctgctctgcttccagctacgcctagcaatgtgtagagaatgtacggtggttgaaaggccgatgcacagatatattatatagaaagcctagcaggcagccagagtcgcatttgcggttttcgtctctagaggtaccacgttattactttggcctttacgtgctatctggtttaagtgat

SEQ ID NO: 81892 - DNA, 386 bp, Arabidopsis thaliana columbia
  unsure (1)..(386): unsure at all n locations
tnnntatattntattttatcacagtaacacctttttgggcaatactgtagtgttaaatggagatctctctaggtaacgggtacattatattttcatgtttttattttttttttaaacttttatgaattattttttagtggcaagcctttccttaatcttatcaaccatcttagatcccacttgaaaagtcttagttaacacatcttccggcaaagccggctctgccgcaaatagggttgccgcaacagaagccgttcccggcaactgactattaaatgccgacaaaaccgacgcgggagatttcccattgttcttttgaaaatgcacaagccctcttggaaaaacgaaaacttcaccaatctttatggttttagtgaaaagcttat

SEQ ID NO: 81893 - DNA, 384 bp, Arabidopsis thaliana columbia
caaaaacctaaagattcattatcagcgcaaattacggatcctttgatgacaatgcacaaatgatataaacattgctggctttaggttcggtagttttacaactcacaacaaaatcatcatcatcaaaatctaaatttctacatagtgttttgaggattaaaccttcttcttccttctcttctgtagtagggagtttcatccactgttctcttcacatactccataaatggtgatggtgttcttggagattcctcatggtatataactgtgccgcttcttctttctggtgttccctgtgctgcatttccactgtatgttgccgttccagtagctcctgtgggcacttgtcgatctatcactttcatcaagatgatcactgataca

SEQ ID NO: 81894 - DNA, 760 bp, Arabidopsis thaliana columbia
tgacgtcgcatgcacgcgtacgtaagcttggatcctttaaagcggccgcccttttttttttttttttgagccattaaaacaatggatatagagagaaaacacaggtgtgtccatcaaatgaggatcagtagtaacaacgcaatcatacaaagtaagaagaaaaaaaaaacaagacgaagaaaagggatgagccggggcatcaggccacagcaaaactcacccgaatcaaagctttttattgagcacacaaaaatccccacacctaaccttacaacactaaatgtcacactcaaagagggagaggcccacacaataaacccccttcactctggccatctcattacgggttaagaggcattgccataggaaacagatcctcctcttcgtaacatgattcttcagcaccagcgttctcactttccttttctgctgatacttccctgtgatcttgaggtttttctgtgctaaaagaatcatccccttcttcgtgtatctcaatatcttcttttcccaagtccttggggtcacaatccaggatgcaatcgccaaatatatgagttgtttttgggtttggtccatgagaaattatacaggtatagtcctcagagagagccatctcacgcccagagagggagcgagagtacgtggagatgatatccataggggatgatgaacttgatctccttggttcctccacaatgacacaaggatcactggaaagcttgggagttgctgtattaacattgttgaccttgacctg

SEQ ID NO: 81895 - DNA, 420 bp, Arabidopsis thaliana columbia
cctgggtgattatcataaaaaggttggggcacgcttctaaagcttatttgggcttctcaattccagctgaaaccatttaaatcaaactgtttaggacgcgttgtgccatagttttcgtcgtgtgtgttaagatctagagctgttcttgtgtgtgtttcaagcttgcaatcttcattattctcgttgaatctttcttctgtatactcactgttgttgctactccttcctctgtgttcatgtaatcccactcctattgacaatcttccaggacttcttcttgaagacgagattctcggttctgcgttgttaaccattgttgaaagatatggcctggtgtgattctctctgaggctttcttcttctgcccatgtgagctccattctatggaagaatggctcttccattatctctttttgctct

SEQ ID NO: 81896 - DNA, 371 bp, Arabidopsis thaliana columbia
cgcttgtaaacaaaactgcattcacactctggcgggcataaggtatacacagagtcatagaatcatggacatattttgtaacacatatattgacaatttgacattacgtaaatgcaattaaaactggaatgtaatttccggtttaccagtcaacatacaaaaccagctttcggtttaatattcgtccaaataagtgtagagcgtatcgtccttctttgttttgcgtcggctaagtagcgcctttagcagccgtttgctcttgctcggttgttgttgatgctctggttctttctgagcttctttctcgaacgcaacccgaaccgaagccgatcttcttggttctgacggataccgtttaggagttggagtta

SEQ ID NO: 81897 - DNA, 527 bp, Arabidopsis thaliana columbia
tttttgtttagactttgctttttagtagttctagatcatatcaatcgctatggcaaatgtggacaggcgtgtgaatgtcgaccgtactgacaaaggacttcaacttcagccgcagtacgaagatcgtgtcggttatggatatgggtatggcggtaatactgattacaagagtcgcggcccttccactaaccaaatcgtggcacttatagcaggagttccaattggtggctcattgctagccttagctggactcactctagccggttcggtgataggttttatgctctccattccgctcttcctactcttcagtccggtgattgttccggcagctctcaccatcgggctagctgtaaccggaattttggcgtcagggttatttggtctgacgggtctcagctcggtctcgtgggtcctaaactacatccgtgggaggagtgatacggtgccggagcaattggactatgctaagaagcgtatggctgatgcaataggctatgctggtcaagaaggaaaagagatggggc

SEQ ID NO: 81898 - DNA, 1074 bp, Arabidopsis thaliana columbia
  unsure (1)..(1074): unsure at all n locations
nnnnnnnnnnnnnnnnnnnnnnnnnnnnnnnnnnnnnnnnnnnnnnnnnnnnnnnnnnnnnnnnnnnnnnnnnnnnnnnnnnnccacgcgtccggtcgtggtcgtatatagttggacacttgacaaatctgagcatttcctttttgctgacagcggaaatatctgaaccaacgcgatgccgtcgacgcagtccttgaccgtcgcagcgaagacgctacgaaatcggatcttctctaggtctggatctacatccgccggtccgagtcggtgggcgacgccaggtcacgaggagcgacctaagggttactttatgaaccgtactcctccggcaccaggacagtcgcgaaaatgggaagattgggagcttccttgttacatcaccagcttccttacaattgttatcctcggcgttggactcaatgccaaacctgatctttcaatcgagacttgggctcatcagaaagctttagagcgtcttgagatggagaagctcgcgaccgctggagattcatctgattaagcatcaccgttggatctccggttgcttgatttggtatgtccttattctccgggagttgaggagtttttttaccgtttaatgatgatgataacgaagactggagagttagggtttcgtttggcccttgaactttgtttcaattctcctttgttttgtcgataatgatgatgttcatgaaataagtgttcttttaactgtttagacgcaattgccttcactctctacttcttattacaattctcaaatttggtcactaaaaaaggcgaatgtggaccgtgatcggcgtgtgcatgtagaccgtacggacaaacgtgttcatcaggcaaactacttagatgatgtcggctctggcaacttcagcggacacgcttatgagttgtggcacctgttacttgatccttgcaagtttcattgcctaattattcccgaggtgttttcacttattccaaagtttatgctaatgcgtttttttatccttattataacttgtctatggttaatactttttttctgttaatttttttttattagttttttaactttaattttcttta

SEQ ID NO: 81899 - DNA, 863 bp, Arabidopsis thaliana columbia
cggggggaccaggcgtccgttcgtagacttatctctatatacccccttttaatttgtgtgctcttagcctttactctatagttttatatcatatcaatcgacatggcgaatgtggaccgtgatcggcgtgtgcatgtagaccgtactgacaaacgtgttcatcagccaaactacgaagatgatgtcggttttggtggctatggcggttatggtgctggttctgattataagagtcgcggcccctccactaaccaaatcttggcacttatagcaggagttcccattggtggcacactgctaaccctagctggactcactctagccggttcggtgatcggcttgctagtctccatacccctcttcctcctcttcagtccggtgatagtcccggcggctctcactattgggcttgctgtgacgggaatcttggcttctggtttgtttgggttgacgggtctgagctcggtctcgtgggtcctcaactacctccgtgggacgagtgatacagtgccagagcaattggactacgctaaacggcgtatggctgatgcggtaggctatgctggtatgaagggaaaagagatgggtcagtatgtgcaagataaggctcatgaggctcgtgagactgagttcatgactgagacccatgagccgggtaaggccaggagaggctcataagctaatataaattgcgggagtcagttggaaacgcgataaatgtagttttacttttatgtcccagtttctttcctcttttaagaatatctttgtctatatatgtgttcgttcgttttgtcttgtccaaataaaaatccttgttagtgaaataagaaatgaaataaatatgttttcttttttgagat

SEQ ID NO: 81900 - DNA, 395 bp, Arabidopsis thaliana columbia
tttgtgaccaaacaacagtttcctattataagactgcgcaaaagtggattttcaaatatttcacaagtcacaaatcgcccttccaggcaaaaaaaaaaaaccagtgtctatgaggcttacatgcaaacccaaaatgctcactattatccaaaattagctttgcaatatcagcaactcagctgacgcatgtaaagagtaaaggttttatgtggacaccaagtttttcgtcattggtcttcagtggctctttctagttctgctcacgttagagctctgatcggtaaggaacttgaggacatcgtttagggatcttagccggtcccaaatgttgagtccataaggggtttcgactagggcctcctggaattcaaatgcgttttctgctaccggatact

SEQ ID NO: 81901 - DNA, 739 bp, Arabidopsis thaliana columbia
  unsure (1)..(739): unsure at all n locations
acgaagatgcgtcgctttttaggtaaatggcattttagttgggcccttaagtgttaggttttaggcccaaataagtccaatctcctaagcgacttttttgttatcggcccaaatttagttactttgtgattttaccttcaaaacactaaacccctgtctggaggagtgttatgtgatgagtttcagacatttgttaatgtctgtaaaatgtaaacaagaaaaaaagaaattacttgaacacaaacttggtgtgtttctgtgatttaagatttagataagtataaactttaaaatggtaacgtttttcgagcgaaactgaatcagattatagcagagacacttgtaatgtaaacaatctaaagcaaagctttatcacattaagacagtgaattatgtgaagatagggtcttgttgttgttgttgtgtgtgttgaaatgtttagtcccattgttcttcccagaaataagtccattctgaagaatttactgtctgtttgccatctgctgatacaagatcataaggagagtcatctgcgaattctgttggcattgatttccagtgaagtgatggatgccattccgcttctttaaccactcttagtatctctcccgctactattttgcttccttgtgctgacaaatggatccccgtctgtgaagcaaaacagtttnccagtcatntgcttcntgaaaaggtagagaagaggctcaannacttnctangnccggggtccttggga

SEQ ID NO: 81902 - DNA, 564 bp, Arabidopsis thaliana columbia
  unsure (1)..(564): unsure at all n locations
caagaagaagaaaggaactttcttttatttatttcattggttttatacatatcaaagatctgattatgcgaaactgtttacaattctcccattacaaaaaaaaactgctaaaaggttagtaaaaaacataactcaatttctctaacgatcctctccaacagaaacataagtattacatataattcgattctaaatttcaccaaccgtaagcagctttttttctttcccaatccagattacaaaacccaaaacatacagggtacatacatacccctcatgatctctggctttgggggcttccatcaaggccttctattcagtgtcagacgggcaagaaagaaatgggttgggagaattcggggatagcgggttcatcaaccgctggaaaccgcgacaggntcagctactacatcatcagctggtcaagttttgcaacttggggttcaattcattgttacagaatctccaacncngggttaacccccgtcctcctgnctccaaaaccacgtggggcatcgaanccgggganggatggcttncctggtncccaggtccaaactntct

SEQ ID NO: 81903 - DNA, 422 bp, Arabidopsis thaliana columbia
acaaaagaaaaatgaaatttattagtctcctttgttccttgaagaacaaacaatgggaatagcaaacaacgaaactcacgacacataaccaacacaaatgtatacgtacgtcctttcttgcacaatggcacctcaaaaaaaagaaagaataaataatcaaaagtgaatcaaatgaattgaaaaaaaaaaaaacctattaacagaaaaatgagcctcatcataatcttgtcgtcaataggcagagctactctcactagcagagagagaaggcccttcagatttgactaagcttgagctattgctactaatctccagcccttgcattcggccgttctgtagaaagtccgacacgctttgagaattggacatctccataggattgaaactagaatgcatctgcatatcatggaggttcattgagc

SEQ ID NO: 81904 - DNA, 481 bp, Arabidopsis thaliana columbia
tttggcaaaagaaaagaaggatttctttatttttgattcaatttaaggagaatcacatagcagaaacaggagaaagatgagatagatacaaaggttctttggctaaaaataacaactctgctccaactttgaaaagacgaataaaacaactctgattgctaattttcaccaaacatgtgttcaatcttagcctctagatagctgaaaagtattctttgctgagcttggggtcaggtttcattgatttctcccctggcttccatcccgcagggcacacttcatccgggttttcttgaacatactgtaatgcctggagggttctcattgtctcatcaacactttcggccaatacccgaggttgtggatggtggaatgctgaatgactccttccttgtctatgatgaaaagccctctcagagcaatgccctgatcagggatgagcactccaaacgattttgaaatggatttagtgatatccgaa

SEQ ID NO: 81905 - DNA, 408 bp, Arabidopsis thaliana columbia
taattattatagcatctacagatatcagaattcaggtaccttttttgttctataaagagcaagtttcaaatttctttttgaatcatactttgacattgaagatatagagctttagcacaactgcaagagcgagctgcaaaagaaagatgctggcgataatcaggatcgatctctctccagcggaattgatatgcgctttgaggttcaaagccacaaatgttgcggacatgaacccagctacacctgcgatgacccatctgaaaatctccactggcacgaccgagagacacaatgctgggataaagacgaaaagggaatagccataaagacagaagagttggactaggcctgatggtgcagagaagtatttgagaacgacatataatgcgagaggaacaattgtgacat

SEQ ID NO: 81906 - DNA, 417 bp, Arabidopsis thaliana columbia
gtcaatgcttccgtcctcttttatctctggcgggacgctttcggtttccatcgactttctcgcgtcttctacatctttttcttcatcatcatcatcagaaggaacatcgacgcaataaaccctaaagcttggagatccaggaccaatcattctctcatcaaagttgttgatactcccttcatcaacatcatgattcttaccatcatctccttccttcttaacattgatgacgaccacatcatcatcatgattttcctcctcttgcttcttcacaacctctttattttcctcctcttgtttctccacaacatcttgatgatgattggcctcttcttgtttggtcacaactacttcttccttcacctctttaacatcatctttggatggaatcttttcaaaataacctctttcttctct

SEQ ID NO: 81907 - DNA, 410 bp, Arabidopsis thaliana columbia
  unsure (1)..(410): unsure at all n locations
tccttttttttaaatanattaataaaggatcttttccttttgattaatctctgtaatactactcattatttgaactcaaggtaacgttacagatagaacttctgatgttcaaaaacaaagaataaagcaaatgaatgacagtgttttcttctgaaaaatcgttttatgtgaaatcatcagaggcattggagatttatgaatcagaacagcttgcagaaatcatgcacttggaggcttgtaaagcttctcaaccatcttcctgtactcttcttggttactccaaagctgagctgcttgagtgttcaatggtgaactgatgttcggctctcccaggaggctctgaatcgatagtagtatcgtcctcacatcgtaagcagatgaccacttatcctgaagaatgtctaagcaga

SEQ ID NO: 81908 - DNA, 610 bp, Arabidopsis thaliana columbia
tcctttttttttttttttaagagaaatagaagaatggcattaagtattatggttcacgagttatagttgaagaaatgatgtcacacaccaaacacaggaaaaccaaaaggtacaagagcttttttagcaagttaaaaatcaattcttcttaagagcattcccaatagctaatacagagatgagaaaaaaaaaaaaaaaatctagactgtatctagagagtttcactttcaaaaaataaaattaagaaaaaaaccatgtcgagattctgacaaaacgatgaacaaaaactatatttatgatcttcttcttcttcatctgggcttttttatccccaattttcttctcattgtgtttttggcttctcgatcttgacataagggagaactcccagaaagtattttacctttgggttccatccacgttgctgagctctgcagaacatcaagaatgtgtttgcgcagtaagagttgaaactcatgaacacatgccacagagcatgtccctgaggattcacaggccactgagatatcgtcttgcagaagacacggtcacagaaccagcatatgcttcccactaagatcgtagcaacataccatttcgcaatcctttt

SEQ ID NO: 81909 - DNA, 395 bp, Arabidopsis thaliana columbia
cctcgtcacgcttacgctccttctcctttgccttttcttgtaaactcgttatgtattcctcaaataacccttggctaacactttcatctccaatcgatctaaagatattcaaaatgggaccttaagaaggtaataccacaacctttttttacgtaaggtaagccatgaagcaacctattcaaggcaataaattatttacctgtactcttgactttcttctactagttggttgctatcttcccaatttgaagctacggtgatttccttgaaagtgtgcaacagattggtaaattcttcagccagacgctgaagctttctggcctctttttcttctttttgcttcactctcccaaccaagtcatcatatataagctttaaatttatgtctgatatct

SEQ ID NO: 81910 - DNA, 408 bp, Arabidopsis thaliana columbia
aattgaaaagattcattgaaattttttggtgagggatcaaattacatacaaaaggggtgtatgtaaaatctttcatcaagtttaatgccatttaggaacagagattctgagccgctttgctctcttcacgtttgggtttcaacctgaaggagatttttaccctttaagatcattctcaaaaacccaacaaacagaagaaccaaaaccaaaatgttgggcaaagtcagctatataactacaaatttgtcctaaccatgtctctcctctctatttctctctctctccctaatacttaagatacagctttgcaggtcttcttgttgtgtcctaaacccttgccgttgctacactggagctgacgcttgaacatgtccagcggttccacctgcttactctttggcctccctg

SEQ ID NO: 81911 - DNA, 339 bp, Arabidopsis thaliana columbia
aggcaaacccatactggagataataggaggtgttccgacaacatcaatcacatgcttaatagtattattggaagaagacaaaagtatctaataagacataaaaaagggtgtagacacagatttcgtctggatataataatacaattacaaaagaaagataaagctgagaaaccaaaagaaatcctgaccttcctataggagatctcattatggctactttggttggtctcttgactgctctccattatctgcaaaaatcatatctttttaacgatctgaacaacatcctagtcctcaagctcgtgttactttccaactctttgaggcttgtgtttggca

SEQ ID NO: 81912 - DNA, 365 bp, Arabidopsis thaliana columbia
  unsure (1)..(365): unsure at all n locations
aattntnggatcattcgcattataagagagctaaatagttacactgtttcagcgaagaactgtacacgagggatccagcagcagatttttagtcaaaagatagaagctgtgagactgagatagatatatggaaaaaaacctaacttattcttcctggtcttggtctctgatccatttggttgccacccatttctctcctttggtcaccgggcagctcccgtgaagcgaagtctgatcaatcgttccatttggaaacacggaataaaaaagaagaccatctcctttccgaggctttactttcaacccaatacattgcttgtaatcgtatccgatgcccatattagaaccgttctcaaatgggaaca

SEQ ID NO: 81913 - DNA, 646 bp, Arabidopsis thaliana columbia
tttctctgctaatttctactatttgtgttggagggatatattataataaaaagaaccaatggcggaccaaacaagaacccatcacgagatgataagccgagacagtacccaagaggcccatccgaaggccaggcagatggtgaaggcagcaaccgctgtcacagccggtggatccctccttgtcctctccggcttaacactcgctggaacagtcatcgcactcacggtggctactcctctcctcgtcatcttcagccccgtcttggttccagcagtggtaaccgttgctctcatcattaccggattccttgcatccggtggctttggaatagccgccattaccgccttctcttggctctacaggcacatgacgggatctggatcggataagatagagaatgctcggatgaaggttggaagcagagtgcaggatactaagtatgggcagcacaacattggagtccaacaccaacaagtttcttaaaattcaaaggctaaaaacgatttccacattaaattgtcatccatcgttagatctcttctctttgtttttattttcaacgtttatgttgtaatgtgtgatatataataacatgcaatgtatgatgtaatcttgttgttgttgtatgagtaatgttttgatccc

SEQ ID NO: 81914 - DNA, 477 bp, Arabidopsis thaliana columbia
aacaaaaagaaaaggaaacatgttggcaaacgttgtgtcatggttaatgatttgcttcctccagattaggaaacgcagtgtttcaaattatacaagatctctaccaaaacccaaacggatcaatcataatatgaaatcaaaacggattcgatcggggagaggaacacatgaagagtaccaaagagaaagatataaatccacacatcatttaaacacaaaaaactcacaacggtctcccctaaagcctttgtctgagctcttgattctcttttcgcaacaactttaactccttcatttgctccgcttggttctccagaatcgagcttaacaccttcgacatctccatctcgtgcatgtggaactgtctgaggatctcaatgtgaaggttccttacgtcgtcagaattgagttttggaaagaatccagagttccttcgagcgttctttgaaatagctgaagcgtgaaattgctactacc

SEQ ID NO: 81915 - DNA, 399 bp, Arabidopsis thaliana columbia
aagacttaactataactagtggcatctgggtttttaccattaaatgtatgaatacaaccgtccataaactgttcaaagaaaatcctctatatattagaggataaacaagcatacttagaaaagaagagacactccaatcttgaatcttcccatcatagttatcaaggtaattttacaaatttgtaaccctataagcccctaagggaaggtaaaaccgtaaaatggagctactttcaaatgttatgaaacaaactctagaatctcaaatgtacatgtaagatgatgtgttcctgagatcttcaggctttagttttaggatacaaactttttatgttcttttgggttgatttatatatcatcttgatgaggaatttcgtgtacaaagaaactagcggcgac

SEQ ID NO: 81916 - DNA, 1055 bp, Arabidopsis thaliana columbia
  unsure (1)..(1055): unsure at all n locations
cagctannnnnnnnnnnnnnnnnnnnnnnnnnnnnnnnnnnnnnnnnnnnnnnnnnnnnnnnnnnnnnnnnnnccacgcgtccgatttatttttccctttcactgtagatccttttttccgactcacacactttcgatattttcttttgttttcttcaaaaaagacatattttttttgctgggactatcaattggggtccgtcgccacgccacgcgccgagctcgcaatatatcgaaagcaacgatctaggaaggatcttaaaaatcctacttggccacaaatttttgctatttttattattttccgtgtttaatttctgattcagacaggaagattaatattaagcactagttgtgcaaattcacaattttttttttgtggatggaaacaaatttctggcacacgtattccaatccaaatcgacaatatacgcgtctctgatggatatgttttggattcagtgagaaacagagattgattttggttttctttaatcatggtggagccttatgagacacgtaacaacggtgaagcatcccagatgatcagatatcagagttataaccatcacaattccagactaccatcttcattatcatcgccattgcttgatttgagagtgttctatgtcagaatcagtaatttcaaggtggatcattcgacacctgaggttctcaccattactcatattcctttggatccagattcacttctggagattaatggtgttagaatgagcatgtactctgaaggagtttcttctcagcttaggcgtgatcgtgttgataagaaatctgaagttgctacttttatcagcacggataatatcagggttatctggtactgtgaagtttgagggtttacgataaagatgagcctggttttgtctggaacgcntgagatgtctgggnagtaatgggtttcactggggannctaagcaagcgtgaacggtgganatgaattgtgaactgagatcnctgcagagcngggtccttggagggnaacanattggnggtcgngtacctnccattgcaccattgngccngcccgggc

SEQ ID NO: 81917 - DNA, 506 bp, Arabidopsis thaliana columbia
  unsure (1)..(506): unsure at all n locations
atcagttgatttatttctgcacttctcatgtctttgggcaaaggaaacaacataatcttgaaagttttcataaattgtcatatgtgcaattgaaaacactgagacaacattacataatcaaggttcagaagaatcctcacaatcattgtcataggatcctgtcaatcttcgcatgatgttgaattatatgaatcagaaaggtatggattgccgatcaggccaagactcgatcttctggaagtaatcgacaggcaatacaccatcaatgccttcagtcaaaatcactttgttgtctgatatgtagaacgcaatcccatcttcaagagctttccttgatgtcgaggaagatgataacatttacatttcttctcatgccactaatcacttcaccatctgttggtaatccacaagagaagtgaacatgcattccaatccatacgcttaagccggtgcaaagatgggtccaatctcngataagtccatgacaacntggnntctctggggng

SEQ ID NO: 81918 - DNA, 543 bp, Arabidopsis thaliana columbia
  unsure (1)..(543): unsure at all n locations
aggacgcgtgggcaagaagatagagataaagacttgacctttttcaagtcttccttggtgttaatactctgcaaattcttgagggtagtttggaggaagagatcgtgtttaatattgttgtttaatcagagaaagatgggtctttctctttctttgctcttgtctgcttggaaagaagttgtgacgacccagttcttcagtttcaagaaccctgtcgagagttttcttgaaaccagatctttcagcttaaaacttaaagaaggaggcttgacttcaagaaccaacagtttcaagagtgagaacccgcaggaaaagtctccgaagacgggtatggagcggtctttgagcttcaacagctgggagattgtgacagaaggtgtagccctttagccggttgagccaagggaagnttnngggnggntttttgancccgccggaggcctttctccgaaacaatttttaattggagggaccttttnngggaancccaataacgggggccttctttttnncccccttcggctttttnggtctttttnccaa

SEQ ID NO: 81919 - DNA, 537 bp, Arabidopsis thaliana columbia
gctctctacgactcactattgggaaagctggcacgcctgcaggtaccggtccggaattcccgggtcgacccacgcgggcgctgatttccaacgattttttctcttccatggctttttttcgctgatcggtaaatcaaacgtttgtttcggtttcgatggtggaagctacgtcgaatttgacgccgactcagagatatgcggccggcgcattgtttgcgatcgctttgaaccaagcgcaaatcaaccagactcagccgctgggaaccccggcggcggaagacgacgacggaggcgatgaagagcgaagaagcaattgcagtagcggagattctgtctccgatgaccccagcctttgggtacacgagacgtctggccttcttcgccccgttttcagatgtcttgagattgattcaccggcttggcttggtctcgagcaaacagcttgctcttctccggctaagcaccacatcggggcgttcacgaggttactctcagaagaagcgaatgatgcttctgccgagatggtggagcaagaga

SEQ ID NO: 81920 - DNA, 576 bp, Arabidopsis thaliana columbia
ggacaaccttatccttaaaatctcaccggtactccaactcccgttcaccggagctctgactctctgtaaagaagaagggagaaatagataatgagcagtagaaacggcaatgagagattaagaacagtgtggacacctgaaatggatcagtatttcatcgagcttatggtggaacaagttagaaaaggcaacagatttgaagatcatttgtttagtaaacgagcttggaagttcatgtcttgttccttcactgccaagttcaagtttctttatggcaaagatgttttgaaaaacaggcataagacattgaggaacttgtttaaatctgtgaataatcttttgatagaagatggttttagttgggatgatactagacagatggttgttgctgataactgcgtttgggatgagtatcttaagattcatcctgattcgagatcttttcggataaagtctataccttgttacaaagatctgtgcttggtttactcagatggaatgtctgagcacaaagcttaggagagtattagtgagggagaatccaagacactgattcaagaagatgatgggtacaac

SEQ ID NO: 81921 - DNA, 377 bp, Arabidopsis thaliana columbia
attctgcattcctcgcaatgcattggattacgagattctctgctttcttctcccgccgcattagccatgattctcctttctccttcgctccaattccttttctccggcggcacctatccgatcatctcacccctacgccgacgaattcaaaccccaacaaaactcccattactcctccttcagagaatctccaatgttccgtaacgccgaacaatgcagatcttccggcgaagattccggcctctgtaaccctaatctccgtccacgtagccatcactctcgacatgattacctccgtggctcaatcgcagccgtcaattcgatcctcagcactcatgtgcctaagcgtctctcagcttctgtctctcgagtctcaa

SEQ ID NO: 81922 - DNA, 490 bp, Arabidopsis thaliana columbia
  unsure (1)..(490): unsure at all n locations
cctgcaggtaccggtccggaattcccgggttgacccacgcntgctagaacctgaaactgaaactgaaacacttctctctctctctctttctcgcttccacgaatcgagagttctacaaattcgcttcctagggtttctcaattcttctaatttcttcatttctatggcgagtcaatgagcgaaatggcggctagctccgcaatctctcgtctcgacatcaaactccgacgattcggcgttggcgcacgtaaccatgaattgcgcctaactaagtggttcaaaggtgatcaagccggagctccgacgagaagattcacctgcttcgcagatatgttggcaccgattcgccgctctgagaagtcagaggaacggcgttttgatcagaaagatgagtgctcacggtgccggaatcaaaacttcttcctctgcagtgccatttgcttctcctaaacctcggtttttgtctaagccagaaaagttctctcctcgc

SEQ ID NO: 81923 - DNA, 513 bp, Arabidopsis thaliana columbia
  unsure (1)..(513): unsure at all n locations
tggccccgttcnntgggncttcttcccnccncgttctttgcctnctgtcttcacatccccaagtccnggnccgtcatccgaagtgcttccncagtccctcggnccagtcttgccaaggtcgcaaggcaagagtttcttctgcaagtgcttctgccgctccaggtgaggctgcagctgccagtgactcgcaaagctgctgctgcacgtgcaaagggtaaggtacttccgcatcaagggtgaagggttcctctgagaagaagaaggagggcaaggggaaggaccgcaaaggaaaaaaggattgagcgtgaggtcatctcatattctcatgcatgcgtattcctcaaacctatatattaataatatcctaaaaactacaaactcacaatctctttcttgttcataaataaaaccagagattgtcacctctatatattattgtgaaatgctactcattctcatgtaatggcttttttaaaaataaaataaatgcaataaatcttatactaatcntcc

SEQ ID NO: 81924 - DNA, 431 bp, Arabidopsis thaliana columbia
caaacacacagtttaatccaaaaaaagatcaaaagatggatgccacaaagttttatgtgcttctcgtgattggcgttttgtgtgccattgtcactgcaaggcaggtggaagaagtgtccaaagagaccaaattaggtatctctactccaaaaactactatcaaaggcgtcggagctcagctttctgctaggggcagaactttcagcaactctgggggctctagctttgctagagctactcatggtcgcaaaggtccagaggcttatgcatccgaaggtggctccacaagtaccggcggagaaatcattgccaagggtcgaaagacaagagtttcttctaaaagtgcttcagtctcaaagggagggtctaaagctgcagcgaatcgcaaagctgctgctgcttctgcaggtggtgccacaggttccgaatcc

SEQ ID NO: 81925 - DNA, 632 bp, Arabidopsis thaliana columbia
  unsure (1)..(632): unsure at all n locations
aacacaatctaatccacaaaatcaaaagatgaatgccacaaagtttcttgtgcttctcgtgattggcgttttgtgtgccattgtcaccgcaaggcaggtcgaagatgtgtccacggagaccaaatttggcacctctcttccaaaaactactaccaaaggcattggagctcagctttctgcaactggcacaactttcagcgatagaatgtcgttagctatgctagtggttttaacaatccgaaaggtccaggggccaatgcattcgaaagtgccaacacatttaccagcgggcaagtcactgccaagggtcgcaaggcaagagtttcttctacaagtgcttctgccccgctgaaggggatggcttcagctgcagtgacttcgcaaagcttgctgctgcacggtgcaaaggggtaaaggtaggtttccggatcaaggggtgaaggggttcctctnaggagaagaggggggcccccaaaggggaaaagggttttccccgttgggggntcctattctcatgnatgggtttcccaaacctttattttagggattcttaaacctcaaaccccaactttttttttcaaaaaaacccgggttggcccntaaattttttgnggcccttccccgaagggttt

SEQ ID NO: 81926 - DNA, 569 bp, Arabidopsis thaliana columbia
  unsure (1)..(569): unsure at all n locations
gtcccggttcggatttcccgggtcgacccacgcgtccgggacaagatgcgcaggaaagtgtttctttcgcagcgcagggaaactaggagaaagatgctcggaactcttttaaagaggatgaaaaccttagtttgtttgagggtaaagaagatgctcagagaactagttcttctaaagtggatgaaagttttggtttctttgagggtaaagatgctcagagaactagttcttctaaagacgatgagagttttggtatgtttgaaggtaaaaaagatgctcagagaaatagttcttctaaagaggatgagagttttggtatgtttgaagggttcctctgagaagaagaagggcaaaggaaaaaaggattgagcgtgaggtgctctcatattctcatgcatgcgtattcctcaaacctatatattaataatatcctaaaaacttcaaactcacaatctctatcttgtccataaataaaaccagagattgtcacctctatatattattatggaatgctcctctttcccatgnatggctttttaaaataaaannaatncataaanctttnctta

SEQ ID NO: 81927 - DNA, 813 bp, Arabidopsis thaliana columbia
  unsure (1)..(813): unsure at all n locations
cggaaccgcacgcacaaacagacaatttaattccatctaatccaaaaaatcaaaagatgaatgccacaaagtttgttgtgcttctcgtgattggcgttttgtgtgccattgtcaccgcaaggcaggtcaaagatttgtccacggagaccaaattaggggcctctcttccaaaaactactaccaaaggcattggagctcagctttctgcaactggcacaacttacagcaccagcagtgtcgttagctatgctaatggttttaacaatcccaaaggtccaggggccaatgcattcgaaagtgccaacacatttaccagcggacaagtcactgccaagggtcgcaaggcaagagtttcttctgcaagtgcttctgccgctgaaggcgatgctgcagctgcagtgactcgcaaagctgctgctgcacgtgcaaagggtaaggtagcttccgcatcaagggtgaagggttcctctgagaagaagaagaaggacccagcaaaggaaaaaaggattgagcgtgaggtcatctcatattctcatgcatgcgtattcctcaaacctatatattaataatatcctaaaaactacaaactcacaatctctatcttgttcataaataaaaccagagattgtcacctctatatattattatgaaatgctactctttctcatgtaatggcttttttaaaaataaaataaatgcaataaatcttatcttatagttnnnnnnnnnnnnnnnnnnnnnnnnnnnnnnnnnnnnnnnnnnnnnnnnnnnnnnnnnnnnnnnnnnnnnnnnnnnnnnnnnnnnnnnnnnnnn

SEQ ID NO: 81928 - DNA, 534 bp, Arabidopsis thaliana columbia
  unsure (1)..(534): unsure at all n locations
ctttttcttttttttttttaaaagaaaacataatatatcacaatcccacataaatcaccgagttagtctgaaaacaataaaagaaaaacaaacaaactcgaagcacttcttgtaacctcgagtccaaaagaaagaaaaaaaagtagtgttaagctcaaaactaataactaaagaccagagacaatgtgaaaggtcaaaaacacaagcaagtaatgcatctgtacaaacaaagccgaatctactaccgagctgttggctgcaatactgattcatcaatggatacataactctgtggtccagccaggtcaagcattcccatgttgagcggagacgaattgagccgagcccctggggaaactcgtctggtataccgcctctttgcagccaacgcttccttctcgatcctaatcgcgtcttggatatctttttgcaccccggacatcgagggcccaggtcccgggggggttnnnacaaagaangttttncgnaatttcccnttggttggggnngganctttcccggaagggggggtgg

SEQ ID NO: 81929 - DNA, 1184 bp, Arabidopsis thaliana columbia
tgatactccagctctctacgactcactattgggaaagctggcacgcctgcaggtaccggtccggaattcccgggtcgacccacgcgtgcgcggacgcgtgggcggacgcgtggggtccattactgcagcatttcttcgtatgcagtttcatgattgctttgtcaggggttgtgatgcttccctcttgatcgacccaagacctggaaggccatcagagaaaagcactggaccaaatgcaagcgtgagaggctacgagatcattgatgaggctaagagacagctcgaggctgcatgtccccgaactgtctcatgcgcagacattgtaactcttgccacaagagactcggtcgcattagctggtggtccaaggttctcagtaccaacaggaagacgtgatggattaaggtcaaaccccaatgatgtgaacttacccggaccaacaattccggttagcgcatctatccaattgtttgcagctcaaggtatgaataccaacgatatggttacacttattggtggtggccacagcgtcggtgttgcacattgcagtctcttccaggacaggctttccgaccgtgcaatggaaccctcattgaagtctagcttgaggaggaaatgcagttcccctaacgacccaacaacgtttttggaccaaaagacttcatttactgtggataacgcaatctatggagagatccgaagacaaagaggaattctaagaattgatcaaaacttgggtcttgatagatcaaccagtgggattgtgtctggttatgcatcaagcaatacactcttcagaaagagatttgccgaagcattggtgaaaatgggtaccattaaggttcttaccggacgttctggagagatcaggagaaactgcagagtcttcaacaactgaggacgttgattcttgcacacattctttacaattattcacggagagatccaaagactgagcggaatcctacgttttttcttttctttgctttttttcttacaaatcaaatcggaaagtgtgtttgttccggtatcatgttttatttttccctaaaaattgattcgcgtgtttcattttcatgaactatatattgttctaatttgatattaacttcaaacccacgcgtccgcggacgcgtggacgagaaaccgatagcgcacaagtagtgtgaacaaaaatattaaaa

SEQ ID NO: 81930 - DNA, 2077 bp, Arabidopsis thaliana columbia
cctgtgccaccatcacttaccctttctcgcctctcctgaaatcaaaatcccattgtgcaaatccattgtcatcgtcatcaatatcatcaccaacttcattctcatcatccatggcccatttctcatctatgtagattctcatctctctacctcctcctcattttctcctcttgattcactaattcttcttcttcttcttcttttcagacatgactcttccttatcgtttctcttccgttagaaaccactcacttctacttaagacttctcatctctgcacacccagatcagctcttggttgttgtttctctcccaaggaatcccctttcttcaggaagaacactgcccaattcctttctcctcagaaacacacttctcttcctctgaaacttgtctgccctttagctagtttctcttcttatgcggattctgagggagaagagcaacaccatgctgatcaaccgatacagaaccctcacgaatcttctaccgtttcaaacgaatcagatgggaaaggtaatgcagaagctactggagacttttctggaatggctcaagcctttcacatttcttccacaacagcaagggcaatctctatagtcatcgccttctctgctctcacccttccaatcttcatgaagtccctgggacaaggactggctctcaagaccaagcttctctcttacgcaacactactctttggtttctacatggcctggaacatcggagctaatgatgtcgcaaatgccatggggacttctgttggatctggagccttgacaatccggcaagctgtgatgacagctgcagttctcgaattctcaggtgctcttttgatgggaactcacgtgactagcacgatgcagaaaggaattctcatggctaatgtgttccaagggaaagatatgttgctctttgctggtctcctctcttccttagctgcagctggaacttggttacaggtagcttcttactatggatggccagtatcaacaactcactgtatcgtcggatcaatggttgggtttgggcttgtatatggaggagctggtgccgttttctggagttccctagctaaagtagcttcatcttgggtcatctctcctatactgggagctcttgtctccttcctagtctacaaatgcatcaggagatttgtttacagtgcaccaaacccaggacaagcagcggctgctgccgctcccgtcgctgtatttgtaggtgtggccagtatctcctcagccgcattgcctctaagtaagatctttccaatagctctatcacaagccttagcctgtggagtagcaggagccatagtattcgacagaatcatccgcaaacagctcggtcacctcctagctaaaacaaaatcaccagaaacatctcaaaaccaacccaaaaccattggtttcctctccgatatcgcaggaccaacaggtacacaactcgaaatagtctacggaatctttggctatatgcaagtcctctccgcttgcttcatgtcattcgctcacggaggcaacgacgtctccaacgcaatcggaccattagccgccgcattaagcattctccaaaacggagcagctgcaggaggagccgagatcgttatcccaatggatgttctcgcttggggaggattcggaatcgttgctggtctcacaatgtggggatacagagtcatcgcaacgatagggaagaagatcactgagctaacaccaacaagaggattcgctgcggaattcgccgccgcgtcggttgttttgtttgcttcgaaattagggcttccgatttctgcgactcatacacttgttggtgctgtgatgggtgttggtttcgctagagggcttaatagtgtgagagctgagactgtgagagagatcgttgcttcgtggcttgtcaccattcccgttggtgctacactcgccgttatctacacttggattttcaccaagatcttatcttttgtattgtgagtttctgtttcttttggttttgttatacgaagaacatgaaattgatcttcttcttctatgttcgtttgaatgattcgagtttgaaaaaaccctaaagttatcat

SEQ ID NO: 81931 - DNA, 821 bp, Arabidopsis thaliana columbia
  unsure (1)..(821): unsure at all n locations
nnnnnnnnnnnnnnnnnnnnnnnnnnnnnnnnnnnnnnnnnnnnnnnnnnnnnnnnnnnnnnnnnnnnnnnnntcgaccacgcgtccgaagatttggttttgcattcctcttctctctcgccgctctcaatatgcttcgatttctattctcctcttcctcttgattttgtcttcttctctttgctgcggagagattaagaaacccaagggttttaagcaagagacgcggcgaggaagctatccagaactctctgaaacatccattcctttttctcatggacgtagtgttgccggaaactgccgtggtaaccggtggttcggttatcggagattatggatttaatgtggatccttttctcgttgaggcgttgcacaactctcgccatcgtctcacgattttgcggatggaacttgatgttcaaaggttgttgcagaaccctgaacagcagcagtttgagttccagcattttcctacttcgtatcttcgtcttgcagcccatcgtgttgctaaccattatgggctagctacagctgtccaagagagtggtgctgatggacatgaaaacagaatccttgtgacgaaaactacagagagcaaatttcctgctgttcggttgtctgaaatcccggtggctaaacaatcagataatggtaagtttgagagcaggatagttttcatcaagactcgaccttctaaaggatctggatatgggcgctggtgatctggaaaagattcgtggtcctcttagaagtgttgaagagaggaaagatgagtatgacanggctcgagacgcatattcagggtcttactggtcttagtt

SEQ ID NO: 81932 - DNA, 403 bp, Arabidopsis thaliana columbia
  unsure (1)..(403): unsure at all n locations
acnaaaaaggcttcgaacatttccactcaatactgattcacaagggaacaaacctctttatttggttcagattaaaagttctaagagcaatgtccttatttaaagatgattgggcatcacacaacgttttgggacttacatcaaccattgctgcctgatggaagaaagcttaagccaagtactgtttcatccaggaggtgaagcgagaccaagcaagctccactgcggcttcatcttcatcagaaagtcccatgcttttccttctgctcactccttctggactcctgttcaagaacgcgtgtccattacctggatagatgtgaacttcatgtgctactccagacgctttcagcttcctttcgagattttttgctgccgtgacatcagaaaaaccaacaaaatt

SEQ ID NO: 81933 - DNA, 507 bp, Arabidopsis thaliana columbia
cgggctccgactaacaatttggctatgtcgacggagaagattaggctaaggttgattgaggaaggagtaagtgagctagctattcaggactgtgagcaaatgatgaagtctgagttctcagcacttcagagccagctggtgcttcttaaacagaagcagtggcttctcattgatactcttaggcagttggagacagaaaaggtagatcttgagaacacagttgtagatgaaagtcaaagacaggctgataatggatgttccggtgaattaagacacgagaagttcagtgaaggcactgccactgagtctgatgatgataatgaacgaggtgatgcccccgaggtggaatttgatgaggaagaaaataccttttttgatacacgtgattttctttcttcaagttctttcaagagtagtggttctggttttcgtacatcatcaatttcgtccgatgaagatggctttgagtctgaagatgatattgatccttccatcaagtctattgga

SEQ ID NO: 81934 - DNA, 646 bp, Arabidopsis thaliana columbia
tacggctgcgagaagacgacagaagggtacggctgcgagcagacgacagaagggtacggctggcgagaagacgacagaaggggttgtcaaagcgacacaaggacgaattcctgtcttcttggatggtggagttcgacgtggcactgatgtcttcaaagcacttgcacttggagcctccgggatatttattggaagaccagtggtattcttattggcagctgaaggagaggctggagttagaaaggtgcttcaaatgctacgtgatgagttcgagctgaccatggcactgagtgggtgtcggtccctaaaggaaatctcccgtaaccacattaccaccgaatgggacactccacgtccttcagccaggttatagagaggaaaataaccaacaagcagagaacagcagcaacacagaaccaaaatattggctaaacttattcatactctgattgtacttggcttctactctgctaaatatctcaagacttgtttctccctctatcagatcacaaaccaagcctagtgattctgtaatactatttggctacttctttcttaaggccattcttatttctaaattccatgtacttacattcccacagatcaatttcttgtgattcccagataatacgatgaacatatgcat

SEQ ID NO: 81935 - DNA, 472 bp, Arabidopsis thaliana columbia
  unsure (1)..(472): unsure at all n locations
attcttgtcaagggtgttcttacaggagaggatgcaaggatagcgattcaagctggagcagcagggatcattgtgtcaaatcatggagctcgccagcttgattatgtcccagcaacaatctcagcccttgaagaggttgtcaaagcaacacaaggacgagttcctgtcttcttggatggtggtgttcgacgtggcactgatgtcttcaaggcacttgcacttggagcctctggaatatttattggaagaccagtggtttttgcactagctgctgaaggagaagccggagtcaaaaaggtgcttcaaatgttgcgtgatgagttcgagctaaccatgggcactaagtggggtgccggtcactcagtgaaatcaacccggtaaccacatttgtcacggaatgggacactccacgccatttgcccaggtttttaaaaaaaaannttaggggggggccctcaaggggncnntcttt

SEQ ID NO: 81936 - DNA, 1332 bp, Arabidopsis thaliana columbia
  unsure (1)..(1332): unsure at all n locations
ctcaaacttctcatccatattataatccaacttgccaataattttttcaactgttacagattactacatcaacgaaatattaaacatttaaccatatataaaagttggagatatatgatataagcttttcttagcagtcccacccttcctctctcgagagagctccattccaatcaaagcaagaaacacacttcggaagatggagatcactaacgttaccgagtatgatgcaatcgcaaagcagaagctgcctaagatggtgtacgactactatgcatctggtgcagaagaccaatggactcttcaagagaacagaaacgcttttgcaaggatcctctttcggcctcggattctgattgatgtgagcaagattgacatgacaaccaccgtcttggggttcaagatctcgatgcccatcatggttgctccaactgccatgcaaaagatggctcaccctgatggggaatatgctactgctagagctgcatctgcagctggaactatcatgacactatcttcatgggctacttcaagtgttgaagaagttgcttccacagggccaggaatccgattcttccagctctatgtatacaagaacaggaatgtggttgagcagctcgtgagaagagctgagaaggctgggttcaaagccattgctctcactgtagacaccccaaggctaggccgcagagagtctgatatcaagaacagattcactttgcctccaaacctgacattgaagaactttgaaggacttgacctcggaaagatggacgaggccaatgactctggcttggcttcatatgttgctggtcaaattgaccgtaccttaagctggaaggatgtccagtggctccagacaatcaccaagttgcccattcttgtcaaaggtgttcttacaggagaggatgcaaggatagcgattcaagctggtgcagccggaatcattgtatcaaaccatggagctcgccagcttgactatgtcccagcaaccatctcggcccttgaagaggttgtcaaagcgacacaaggacgaattcctgtcttcttggatggtggtgttcgacgtggcactgatgtcttcaaagcactttgcactttggggcctccgggatatttatttggaagaccagtggtatttctcatttggcaagcttaagggcagaggcttggagttaggaaaggtgcttaaatattgcnacggtgattggtttggctttcccatggaacttggttgggtttcgggcccccaaaggaaatctcccggaccccatttcccccgattgggcanttcacgnccttanccaggttttggggggaaaaccancatnt

SEQ ID NO: 81937 - DNA, 742 bp, Arabidopsis thaliana columbia
  unsure (1)..(742): unsure at all n locations
aaaaanggggggggggaggggggggagggaanaaaaatcctttctaaatttattttttaaggttgactcgtctgcggggctgttgtcgtatccgatctcccaccatcttccccaaagggctcacctgatcgccatgacccttccactatttcttcgagccccagtcgtggtggtgacaatcagtctgaagtcatattcaagagtgaagagtatcggcaattgtttcggctttcagctgacgaaatccttgttcaagattttaactgtgcttgtcaggagagtattcttatgcagggtcatatgtacctcttgatgcattatatctgcttttactccaacatctgtggttatgagaccaagaaaattatcccatttgctgaaatatcttgtgttaaacgagccaagactgctggtatttttcctaatgccattgagattttagctggagggaagaagtacttttttgcatcgtttctttcccgcgatgaagctttcaagcttatccatgatggatggttggaatatggtagtgctgtcaaatcagaaggcgagattctggtgaccgaaccgcaggtaagcgatggagttgttaaaagggcacgcagttccatggatttggccaatgaactagatattccagtaagggatgaaactcttcatctttccagcagttccagtcttcctgtcattagtcagaatggcgttccaccttcatccgttcagcggcacgctgaaccagatg

SEQ ID NO: 81938 - DNA, 394 bp, Arabidopsis thaliana columbia
gaggaaccatgaaggttgacccgtctgcgtctccggaggtcgtatccgatctcccaccatcttccccaaagggctcacctgatcgccatgacccttccacttcttctccgagccccagtcgtggtggtgacaatcggtctgaagtcatatccaagagtatctgaatgtgacgaggaggggaaggtggaaatggtgggcgaaggggtagttaaaaaaagcttaaaggaagcatgggtgaatctgacttcatttgtgaagaggcaaagcgggacaaggcacgttatagtattagcgtttgcagtaatcttactgatgcaggtgacgatagtggtgccactgaaaaaaggaggaagggggcaagtggagtatcatgagaggtacgacgagtacagtg

SEQ ID NO: 81939 - DNA, 386 bp, Arabidopsis thaliana columbia
tttcaaaattagaagaactatggctcggaagaaaccgtatcaaagttgttaacctgtgtgggctcaaatgcataaaaaagattagcttgcagagcaatcgattgacctctatgaaaggatttgaggaatgtgttgctcttgaagagttatatttgagccataatggtatctccaaaatggaaggcttgagtgcattggtcaacctacgggtattggacgtgtcgaacaacaagcttacttcagttgatgacattcagaacctcacaaagttggaagatttgtggcttaatgacaaccagatagaatcactggaagcaatcacagaagctgttacaggatctaaagagaagcttaccactatctacctcgaaaataacccttgtgcc

SEQ ID NO: 81940 - DNA, 416 bp, Arabidopsis thaliana columbia
tcgacccagccgtccacactttcacctttctctctctaaacatggcgatgctttctactgcttccgtttcggggagcgtcgaccttcctcgaggaaccatgaaggttgactcgtctgcgtctccggaggtcgtatccgatctcccaccatcttccccaaagggctcacctgatcgccatgacccttccacttcttctccgagccccagtcgtggtggtgacaatcagtctgaagtcatatccaagagtgaagagtatcggcaattgtttcggcttccagctgacgaaatccttgttcaagattttaactgtgcttgtcaggagagtattcttatgcagggtcatatgtacctcttcatccattatatctgcttttactccaacatctttggttatgagaccaagaaaattatccca

SEQ ID NO: 81941 - DNA, 514 bp, Arabidopsis thaliana columbia
  unsure (1)..(514): unsure at all n locations
aaagggcgcgccggtcttttcaaaacttagggcccgaacccggccggaccggccgtcggtgcagatcttggtggtagtagcaaatattcaaatgagaactttgaaggccgaagaggggaaaggttccatgtgaacggcacttgcacatgggttagtcgatcctaagagtcgggggaaacccgtctgatagcgcttaagcatgagtgtagcttcgatttcaaagaagttggacgtgatgcaattgcaaaggctaatcctttggttaaggcgcccaaagttcagaggatttgaagaaaacaaactttgttatttttaagtattttcgttgtcttctgcatttgatcagtttctgcctgggatgttcgatgtttggtttccatgaatcaaaatgaaaattgctgttcttgcttaaaaaaaaaaaaaaaaaaaaaacaaaaaannnnnnnnnnnnnnnnnnnnnnnnnnnnnnnnnnnnnnnnnnnnnnnnnnnnnnnnnnnnnnnnnngtacctann

SEQ ID NO: 81942 - DNA, 1018 bp, Arabidopsis thaliana columbia
  unsure (1)..(1018): unsure at all n locations
gcaaaagacatatatggtagaatcgtaaccatagaatacgaccctaatcgaaatgcatacatttgtctcatacactatggggatggtgagaagagatatattttacatcccagagggcctataattggagataccattgtttctggtacagaagttcctataaaaatgggaaatgccctacctttgaccgatatgcccttaggcacggccatacataatatagaaatcacacttggaaggggtggacaattagctagagcagcgggtgctgtagcgaaactgattgcaaaagaggggaaatcggccacattaaaattaccttctggagaggtccgtttgatatccaaaaactgctcagcaacagtcggacaagtgggaaatgttggggtaaaccagaaaagtttgggtagtgccggatcgaaatgttcggctaggtaaacgctcctgtagtaagaggagtagttatgaaccctgtcgaccatccccatggaggtggtgaagggagggctccaattggtagaaaaaaacccgtaaccccctggggttatcctgcacttggaagaagaactagaaaaaggaaaaaatatagtgagactttgattcttcgtcgccgtagtaaataggagagaaaatcgaatttctttcttcgtcttaaaaaaataggagttaattaactgtgacacgttcactaaaaaaaaacccttttgtagcaaagcatttattaagaaaaatagagaagcttaatacaaaggcggaaaaagaaatcataataacttggtcccgggcatcatgggcgaacgacgggaattgaacccgcgatggtgaattcacaatccactgccttaatccacttggctacatccgcccctacgctactatctattcttttttgtattgtctaaaaaaaaaaaaaaatacaaatttcaataaaaaaaaaaaaaaagnnnnnnnnnnnnnnnnnnnnnnnnnnnnnnnnnnnnnnnnnnnnnnnnnnnnnnnnnnnnnnnnnntgtaccta

SEQ ID NO: 81943 - DNA, 708 bp, Arabidopsis thaliana columbia
  unsure (1)..(708): unsure at all n locations
ctactggttctacttgttcctctgttttggattgtggtggctctctaatggcggcggttattggaaacgtggcgttgttacttgacgttaacnctcaccgtacggnggtaactgatcggagaattcgtttaacggtggtcgaccctcgcgtccggggcgcacggtcgctgcaaaacctagggcgcgagccgcggcggagcggccgtcggtgcagatcttggtggtagnagcaaatattcaaatgagaactttgaaggccgaagaggggaaaggttccatgtgaacggcacttgcacatgggttagtcgatcctaagagtcgggggaaacccgtctgatagcgcttaagcgcgataacttcgaaagggggatccggttaaaattcccggaacccgggaccgtggcggttgaccggcaacgttagggagtcccggagaacgtcggccgggggcctcgggaagagttatcttttctggtttaacaagcctgcccaccctcggaaacgggctcacccggacggtaagggtccacccggcttgaagagcccccgcaccgtcccgtggtgcccggtgcncccccgggggccttttaaaacccggagnaccnattncggttaagccggttgaattataaccgataaggttccaagggaaaacccttgtcatngaaaattttgaaggaattcnaaatggtccgnaanttggaaaag

SEQ ID NO: 81944 - DNA, 804 bp, Arabidopsis thaliana columbia
  unsure (1)..(804): unsure at all n locations
nnnnnnnnnnnnnnnnnnnnnnnnnnnnnnnnnnnnnnnnnnnnnnnnnnnnnnnnnnnnnnnnnnnnnnnnnnnnnnnnnnnccacgcgtccgagaagacgacagaaggggccaggcctcgatgagtaaggaggccccggcggcccctgcaaaaacctagggcgccagccccggccggaccggccgtccggtgcagattcttgggggtagtagcaaatattcaaatattcaaaactctcagacatactcaggtgatggattctgtgatagtagggaatggagattttctgcccatcactcatattggtactatccctctgaacatttctcaaggacaaacgaacacaacaactcctcacacaaggaaacaagcataaaggtctctacgtgttgaaggatgtcccgtttcaaacttattactctaccaggcaacaatctagtgatgatgaagtgtggcatcagagattgggtcaccctaataaagaagttctacaacaccttatcaaaactaaagctattgtagtcaataaaacaagctccaatatgtgtgaggcttgtcaaatggggaaagtatgtcgtcttccttttgttgcttctgaatttgtatcttctcggcccctagaacgtattcattgtgatctatggggccctgcccctgttacttctgctcaaggttttcaatattatgtcatctttatcgatnnnnnnnnnnnnnnnnnnnnnnnnnnnnnnnnnnnnnnnnnnnnnnnnnnnnnnnnnnnnnnnnnnnnnnnnnnnnnnnnnnnnnnnnnnnnnnnnnnnnn

SEQ ID NO: 81945 - DNA, 652 bp, Arabidopsis thaliana columbia
  unsure (1)..(652): unsure at all n locations
tntttaancagtttanncttntcagnnccaatgttaaaaaaccnccaaatnaaccattgttgaccnaatncgaaaatttnnaaattgggattgaaaattcaccctagtacgaggggaacccgttaatcgcaaaattggncancgcgcttggttgaaaanccagtgnccnnaagctaccgtgcgctggattatgactgaacgcctctaagtcagaatccgggctagaagcgacgcatgcgcccgccgcccgattgccgaccctcagtaggagcttaggctcccaaaggcacgtgtcgttggctaagtccgttcggcggaagcgtcgttcggaccgccttgaattataattaccaccgagcggcggggagtttcctgtgcagacgacttaaatacgcgacggggtattgtaagtggcagagtggccttgctgccacgatccactgagattcagccctttgtcgctaagattcgaccctcccctaaatcactccaaaaaaaacaatccccaattctacacaagtgtttctacactaacaaagcaacagctccttaacgaattcccaactttacacgagctcgtctctcgaggttaaatgttattacttggtaagattccggacctcgccaagtgttttgaaaacccgcaacgctc

SEQ ID NO: 81946 - DNA, 915 bp, Arabidopsis thaliana columbia
  unsure (1)..(915): unsure at all n locations
gcgcgctgacatgtgtgcgagtcaacgggtgagtaaacccgtaaggcgcaaggaagctgattggcgggatccctcgcgggtgcaccgccgaccgaccttgatcttctgagaagggttcgagtgtaagcatgcctgtcgggacccgaaagatggtgaactatgcctgagcggggtaaagccagaggaaactctggtggaagcccgcagcgatacttgacgtgcaaatcgttcgtctgacttgggtataggggcgaaagactaatcgaaccatctagtagctggttccctccgaagtttccctcaggatagctggagctcggacgcgagttctatcgggtaaagccaattattagaggcatttggggggcgcaacgccctcgacctattctcaaactttaaataggtaggacgtttcggctgctttgtttgagccgtcacacggaattcgagagctccaagtgggcccattttttgtaagaagaactggcgtggccggatgaaccggaagccgggttacggtgcccaactncgcgctaacctagaacccacaaagggtgttggtcgattaagacagcaggacggtggtcatggaagtcgaaatccgctaaggagtgtntaacaactcacctgccgaatcaactagccccgaaaatggatggcgcttaagcncgcgacctatacccggccgtcggggcaagagccaggctagttctagatccggagcggccgttttagaggatcccaagcttacgtacggggttcattcaanggcatagctcttcttttagtgtcancntaaattcaattcaattgggcgtcggttttnaaacgtcgggactttgggnaaacctnggggttacccaactttaatcgnctttaannaaatncccttttncnaantggggtaanttccna

SEQ ID NO: 81947 - DNA, 1227 bp, Arabidopsis thaliana columbia
  unsure (1)..(1227): unsure at all n locations
taaacattngncccccngggttaaagnttcnccccccaaaggaccttatttcggaccccntgggggtncccccaccaccttantttttnnagggttcaatttgnnattcctntnggccccaaagttgntnnctttccttgccccgcgtcccgccagaggaaactctggtggaagcccgcagcgatactgacgtgcaaatcgttcgtctgacttgggtataggggcgaaagactaatcgaaccatctagtagctggttccctccgaagtttccctcaggatagctggagctcggacgcgagttctatcgggtaaagccaatgattagaggcattgggggcgcaacgccctcgacctattctcaaactttaaataggtaggacgtgtcggctgctttgttgagccgtcacacggaatcgagagctccaagtgggccatttttggtaagcagaactggcgatgcgggatgaaccggaagccgggttacggtgcccaactgcgcgctaacctagaacccacaaagggtgttggtcgattaagacagcaggacggtggtcatggaagtcgaaatccgctaaggagtgtgtaacaactcacctgccgaatcaactagccccgaaaatggatggcgcttaagcgcgcgacctatacccggccgtcggggcaagagccaggcctcgatgagtaggagggcgcggcggtcgctgcaaaacctagggcgcgagccccggcgganggccgtcggtgcagatcttggtggtagtagcaaatattcaaatgagaactttgaaggccgaagaggggaaaggttccatgtgaacggcacttgcacatgggttagtcgatcctaagagtcgggggaaacccgtctgatagcgcttaagcngaacttcgaaaggggatccggttaaaattccggaaccgggacgtggcggttgacggcaacgttagggagtccgagacgtcggcgggggcctcgggaagagttatcttttctgtttaacagcctgcccaccctggaaacggctcagccggaggtagggtccaccggctggaagagcaccgcacgtcgcgtggtgtccggtgcgcccccggggcccttgaaaatccggaggaccgagtgcngctnacgcccggntttttttacaagagactcgtaaagatanggaaattaatgttnagagaagtaangacttnaggtacaatttnangggancccgttnctntaa

SEQ ID NO: 81948 - DNA, 1249 bp, Arabidopsis thaliana columbia
  unsure (1)..(1249): unsure at all n locations
gcgaattcgtaggttcaattcctactggattcacgccaatcggaccctccaataagtctattggaattggctctgtatcaatggaatcttctcatcatctatacataacgaattggtgtggtatattcatatcataacattggcccagtaagaactagcattcttattgagactagaactcatagggaagaaaatcgatttatggatggaatcaaatatgcagtatttacagacaaaagtattcggttattggggaaaaatcaatatacttttaatgtcgaatcaggattaactaggacagaaataaagcattgggtcgaactcttctttggtgtcaaggtaatagctatgaatagtcatcgactccccggaaaggttaaaagaatgggacctattctgggacatacaatgcattacagacgtatgatcattacgcttcaaccgggttattctattccacctcttagaaagaaaagaacttaaatcaaaatacttaatagcatggcgatacatttatacaaaacttctaccccgagcacacgcaatggagccgtagacagtcaagtgaaatccaatccacgaaataatttgatctgtgggcagcatcattgtggtaaaggtcgtaatgccagaggaataattaccgcaaggcatagagggggaggtcataagcgtctataccgtaaaatagattttcgacgaaatgcaaaagacatatatggtagaatcgtaaccatagaatacgaccctaatcgaaatgcatacatttgtctcatacactatggggatggtgagaagagatatattttacatcccagaggggctataattggagataccattgtttctggtacagaagttcctataaaaatgggaaatgccctacctttgaccgatatgcggttaggcactgatttacgtaattggaagtaaccaattaggtttacgacgaaacctagaaatcgatcactgatccaatttgagtacctctacaggatagacctcaacagaaaactgaagagtgtaacggcagcaagtgattgagttcagtaggtcctcatataaaattattgactctagagatatagtaatatggagaagacaaaattgtttcaagcaccgacagaaccataagcgccccttgtttcaaagagaggaggacgggttattcacatttcatttgatggtcagaggcgaattgaaagctaagcagtggtaattctaaagattcccccggngaaaaatagag

SEQ ID NO: 81949 - DNA, 1141 bp, Arabidopsis thaliana columbia
  unsure (1)..(1141): unsure at all n locations
nnnnnnnnnnnnnnnnnnnnnnnnnnnnnnnnnnnnnnnnnnnnnnnnnnnnnnnnnnnnnnnnnnnnnnnnccacgggggcgggccgcgtacncccacncgtncgtacgggtgcgagaagacgacagaaggatacggctgcgagaagacgacagaaggggattgttgcgtgtttggttatctcttctttcttctctctcacctaaatcaagggatttgttctgatcaactttgaacagaatttacaacaaatccctagaaaaatctgacccttccttcttcctcaggaagatttaagatacttgttgataaggatattcggaagaagcttttgaaatttttggcaaaggtctcatttgatccgacttttctgttgaaggtgaaatagatacaaaaaaaatgggctcagaggaaaacaacagcacaagctttccaccaacagagccaaagctctgtgataacggatgtggattcttcgggtcaccatccaacatgaatctctgctcgaaatgttacagaagcttaagagccgaggaagatcaaaccgcggtagcgaaagctgcggtgaagaactctttaaagcttccatcttgcagtatcattgcacctggacaaaaacatcctctggaaattaaaccagctcatttggaaaccgttgttgtaaccgctgagccgtcttctgtacctgtagccccggaacaggacgaggctgagccgtcgagacctgttagaccgaacaacaggtgtttcagctgtaacaagaaggttggtgtaatggggtttaagtgcaaatgcggtagcacgttttgcgggagtcataggtacccggagaagcatgagtgtagcttcgatttcaaagaagttggacgtgatgcaattgcaaaggctaatcctttggttaaggcggataaagttcagaggatttgaagaaaacaaactttgttatttttaagtattttcgttgtcttctgcatttgatcagtttctgcctgggatgttcgatgtttggtttccatgaatcaaaatgaaaattgctgttcttgctnnnnnnnnnnnnnnnnnnnnnnnnnnnnnnnnnnnnnnnnnnnnnnnnnnnnnnnnnnnnnnnnnnnnnnnnnnnnnnnnnnnnnnnnnnnnnnnn

SEQ ID NO: 81950 - DNA, 1036 bp, Arabidopsis thaliana columbia
  unsure (1)..(1036): unsure at all n locations
gacgacagatggtggcctctgacatctggcgttcgattacagctccacagaggattcggaaatggttgagtcaaaggttgtagttccagagtcggtgttgaagaagaggaagagagaggaggaatgggctttggagaagaagcagaatgttgaagccgccaagaagaagaacgccgagaacaggaagcttatcttcaaaagagccgagcaatactccaaggaatatgccgagaaggagaaggagttgatctcgttgaaacgcgaggccaagcttaagggaggtttctatgttgaccctgaagctaagctcttgttcatcatccgtatccgtggtatcaatgccattgaccctaagactaagaagattctccagctcttgcgtttgagacagattttcaatggtgttttccttaaagtcaacaaggctacgatgaacatgcttcgccgtgttgagccctatgtcacttacggattccctaacttgaagagtgtcaaggaattgatctacaagagaggttacggaaagcttaaccaccagaggatagctttgactgacaactctattgtagagcaggctcttggaaagcatggtatcatttgcactgaggatttgatccacgagattctaacagtaggacctcatttcaaggaagccaacaacttcctttggccattccagcttaaggcaccactaggtggcctcaagaagaagagaaatcactacgtggaaggtggtgatgccggaaaccgtgagaacttcatcaatgagcttatcaggaggatgaattagaatgttatcgttttcaatgtcaaacttctctgcgttttcattatgtgcctcctcctggattttgatcttctttctcaagttaaaagacattttgaatcttctcttttgttctctttggatcttaatttgtgctttgattactgcaagtgattctacatttctctttaataggatttttaagaaactgtttcttcaaaatctctttacctggacaatttcaaaatggttgcctacattntnttgacg

SEQ ID NO: 81951 - DNA, 625 bp, Arabidopsis thaliana columbia
  unsure (1)..(625): unsure at all n locations
ctatgnaaagccgcantgannccaccncaanttcnccaaataacttgctcgccttttgcagtccgaatccgaaccgtgaaaccgtggcctatcggatcctttaagaccttcgggaatttgaacctagaggtgttagaaaaagttaccacaggggataactggcttgtggcagccaagcgttcatagcgacgttgctttttggatccttcgatggcgggctcttcctatcattgtgaagcaagaattcaccaagtgttggattgttcacccaccaacataaaagccttcaacctgcaagcccacttccacttaatcccatagaaaacatgatggaagttacccccatctcaaaagtgacaccgaaccatcaagttgatgaattttcatcacccaatctcgtagctcatctcagctccactccattcatcactctcagaagacattagtcgctatgtcttgttttctctattcttcttttgtctgtccaaaggtagcttttgaaagatgtagcagcctttgtctatttctctgtgttgagaaaaaaaaaactcttatgtacgaccnacgcggccggcggaattcggatgatgcaagcttnatgcnatgaccgtcgtaccttcgtngg

SEQ ID NO: 81952 - DNA, 1980 bp, Arabidopsis thaliana columbia
acatcgacgttcactattctcccatacctactggaggaactggcaccggaggaactggcaccggaactggcaccggaactggcactggaactggcactggcaccggaactggcactggaactggcactggaactggcaccggaggaactggcactggaactggcaccggtactggaggaactggcactggaactggcaccggaggaactggcactggaaccggcactgggactggcactggaaccggcactgggactggcactggaaccggcaccggaggaactggcactggaaccggcaccggaggaactggcactggaaccggcactgggaccggcactgggaccggcaccggaggaactggcactggaaccggaactggtaccggttcaggtgctcagaaattggaagcacaaggcaacagtacaggaggtacatcatgggacgatggatccgattacgatggcgtgaccaagatatacgcaagctacggtggggaaggtattcaatacgtcaagttcgactatgtgaaaggtggagtaacaaaacaaggagttctacacggtaaacaacaaagtagacaaaatccacaagagtttgtgattaaccatccagatgagtatcttgtatccgttgagggttggtatgaaaccgtcatgctaggaatccagttcaaaaccaacttgaacacttatgaggtcagaatgtatgatttcactcctagtactgatactaaatttactcttcaagttcaagacaagaagatcattggatttcacggtttcgccggcaaccatcttaattccattggagcttacttcgttccaaaatcctccaccactcctgttccttcaacccctttgaagctgaccgcagaaggtggtgagacaggagctgtatgggacgatggttctcacgatgatgttaagaaagtttatgtaggacaaggccaagatggtgttgcagctgtcaagtttgaatacaaaaatggttctcaggttgtttttggagatgaacgtggaacgagaacattgctaggattcgaagagttcgagcttgaatcagacgaatatataacatccgtggaaggatactacgaaaaaaactttggagttgatactgtagtgacaacgctgattttcaagactagcaagaacaaaacagctggaccgtttgggattgtatctggcacaaagtttgaattcaagaaggaaggttacaagatcactgggttccacggacgagctggtgagtatgttaatgctattggagcttatttagctccatcaggcaccacccctttgactcctgcaacacaatcccaaaagctagaaggagctggtagtgaggcaggaactttatgggatgatggtgctttcgacggtgtaaggaaagtgtctgtaggacaagcccaagatggtattggagcggtctcgtttgtgtacgacaaagcaggtcaggttgtagaaggaaaagaacatggaaaacccacattgcttggatttgaagagtttgagcgtgtctatccaagtgaatacatcacggcaggggatggcccctacagatccaatctttgggaatgaaccattccgtagatatgacttagggttcccggcctagtaagcgagtatctattccttttggaatagaagttggcacagccttggaattcaagaaggacggtcaaacgatagttggtttccatggaaggcttggtgttttccttcccaattttggagtccatgtcgcgccaataaccatatagttatggaggttcccagttcattatggtgatggttgcccgcctttgactaagcagattcaacttcattactctctgttggtataatgctacagtgtcgtaagtcttctctatgtgtttgttgctgttgtgactttgatggatctttggcggccgcgaattcctgcagcccgggggagcctcgtagtaactagagcgtcccccaccgcggtgcagct

SEQ ID NO: 81953 - DNA, 603 bp, Arabidopsis thaliana columbia
  unsure (1)..(603): unsure at all n locations
aatcgccccttttngnaacttgtccccnaagtcccgtccgaatcccggtcgacccccggtccgaaaccgcgggagtaactatgactctcttaaggtagccaaatgcctcgtcatctaattagtgacgcgcatgaatggattaacgagattcccactgtccctgtctactatccagcgaaaccacagccaagggaacgggcttggcaggatcagcggggaaagaagaccctgttgagcttgactctagtccgactttgtgagatgacttgagaggtgtaggataagtgggagcttcggcgcaagtgaaataccactacttttaacgttattttacttactccgtgaatcggaggcggggtacaacccccgtttttggtcccaaggctcgcttcggcgggtcgatccgggcggaggacatttcagggtggggagtttggctggggcggcacatctttaaaagataacgcaggggtcctaagatggctcaacgggaacagaaatcccctgtggaaaaaaaagggcggcccccctaaagggcccaatttcgancgcgggatccncgcatacactcaatggcnccaaatcaatcactggcgcgtttgc

SEQ ID NO: 81954 - DNA, 626 bp, Arabidopsis thaliana columbia
  unsure (1)..(626): unsure at all n locations
tggaanttntcccntcggtccgnncgaatccnggtnaccccaccgtccggcggacttacgcaatgtgattttctcgcccagtgctctgaatgtcaaagtgaggaaattcacccaagcccgggtaaccggcgggagttaacttatgactctcttaaggtagccaaatgcctcgtcatctaattagtgacgcgcatgaatggattaacgagattcccactgtcccctgtctactatcccagcgaaacccacagcccaagggaacgggctgggcagaatcagcggggaaagaagaccctgttgagcttgactctagtccgactttgtgaaatgacttggagaggtgtaggataagtgggagcttcggcgcaagtgaaataccactacttttaaacgttattttacttaccccgtgaatcggaggcgggggtccaaccccggttttttgggcccaaggctcgcttcggcgggtcgatccggggcgggggacacttgttcagggggggagttttgttgctgggggcggcacatcttgttaaaagataacgcgagggggccctaagatgagcccaaccgagaacagaaatcctcgggggaaaaaaggnggcccncctaaggnncaaactttg

SEQ ID NO: 81955 - DNA, 1355 bp, Arabidopsis thaliana columbia
  unsure (1)..(1355): unsure at all n locations
ctctggttctacttgttcctctgttttggattgtggtggctctctaatggcggcggttattggaaacgtggcgttgttacttgacgttaactctcaccgtacggtggtaactgatcggagaattcgtttaacggtggtcgacgtcgttttgaatttacaaaagagagattcgcacagtcacgtttctcattacgctgctctctcttccaataagcctcttgaatctgacggcgaagctcgggttcgccggtttttaactcgcggaaaagcgaattccagagctaacgccgtcgatttcgacgacgcgggatccagcgacgaagaaagtagtgacggaggcggtggtggtggtgacgaggaggaggaggaggaatatttcgatgtggagaaggagaggaagaggagagctaaggaatttcatgatacgaaggagcttgagaggaaagcagaggagttacagtataagattgatgaagaaggagacgattcagaggagaagaagaggatgagagtgaagagagaactccaaaaggtagctcaggagcaagcagagaggagaaaaactgcagaattgatgtttgaactaggtcaaaaggcttatggtaaaggaatgtatggacgagcgatagagtttcttgaaggagctcttacgattatcccaaggccaacactctttggtggtgagatacaaatttggttagctatggcatatgaggccaataatcgccacgctgattgcattgatctttatcagcaattagagaagaaacatcccagtcctggtattcgtcgtcaagcttctgagcttcggtatatcttgcaagctcctaagcttaagatatctcaggaggaaatggttactattcccatgatcggttcaagttacgacagctatgcagtgacatggagtgataaggaaagggataaggagcggcgaatgaatgcatcgactacgaatcagctcaactcgagtgatgattttctaggaaagctcttggtttggcgaccggtggtcggtatggagaagaaccgagtcttttggcttgctttgacactgtggtttggtttggttggagcagcactcatcttacaaagataagtagaagacatgcaaaatatttttccatcgctttaaattatggtttggtactactgtttcttctacttgtcttgaaattatatttgatttcatgtataaatgtgtaagcaaatgaattcgtcgttgtatataaagtatttgatggaaatatatataactttgtttaaaaaaaaaaaaaaaagnnnnnnnnnnnnnnnnnnnnnnnnnnnnnnnnnnnnnnnnnnnnnnnnnnnnnnnnnnnnnnnnnnnnnnnnnn

SEQ ID NO: 81956 - DNA, 946 bp, Arabidopsis thaliana columbia
  unsure (1)..(946): unsure at all n locations
cgcagtacaggtccggaattcccggatcgacccacgcgttcgcaacgctgattttcaagactagcaagaacaaaacagctggaccgtttgggattgtatctggcacaaagtttgaattcaagaaggaaggttacaagatcactgggttccacggacgagctggtgagtatgttaatgctattggagcttatttagctccatcaggcaccacccctttgactcctgcaacacaatcccaaaagctagaaggagctggtagtgaggcaggaactttatgggatgatggtgctttcgacggtgtaaggaaagtgtctgtaggacaagcccaagatggtattggagcggtctcgtttgtgtacgacaaagcaggtcaggttgtagaaggaaaagaacatggaaaacccacattgcttggatttgaagagtttgagcttgactatccaagtgaatacatcacggcagttgatggcacctacgatgcaatctttgggaatgaaccaatcgtaaatatgcttaggttcacgactaataagcgagtatctattccttttggaataggagctggcacagccttcgaattcaagaaggacggtcaaaagatagttggtttccatggaagagctggtgatctacttcacaaatttggagtccatgtcgcgccaataaccaaataattatggagattttaagtatcttttgatgatagtttacacactttgaataagctgattctactttatttctctctgtttgtttactgcttcagtgttttaagtcttctctttgtgtttgttgctgttgtgtctttgatggatttttgtgatccgatttaataaaagaagtgtgttcaaagtaaaaaaaaaaaaaaaagnnnnnnnnnnnnnnnnnnnnnnnnnnnnnnnnnnnnnnnnnnnnnnnnnnnnnnnnnnnnnnnnnnnnnnnnnnn

SEQ ID NO: 81957 - DNA, 2233 bp, Arabidopsis thaliana columbia
  unsure (1)..(2233): unsure at all n locations
taaacccttagggnttttnaaccnccctccaaattaatttccccnaaaaatttgattcctttaacccnnggcctttttcccgccttcgggaaaagaccaagcctccgatgagttaggaggccgcggcggtcgctgcaaaacctagggcgcgagcccgggcggaccggccgtcggtgcagatcttggtggtagtagcaaatattcaaatgagaactttgaaggccgaagaggggaaaggttccatgtgaacggcacttgcacatgggttagtcgatcctaagagtcgggggaaacccgtctgatagcgcttaagcgcgaacttcgaaaggggatccggttaaaattccggaaccgggacgtggcggttgacggcaacgttagggagtccggagacgtcggcgggggcctcgggaagagttatcttttctgtttaacagcctgcccaccctggaaacggctcagccggaggtagggtccagcggctggaagagcaccgcacgtcgcgtggtgtccggtgcgcccccggcggcccttgaaaatccggaggaccgagtgccgctcacgcccggtcgtactcataaccgcatcaggtctccaaggtgaacagcctctggtcgatggaacaatgtaggcaagggaagtcggcaaaatggatccgtaacttcgggaaaaggattggctctgagggctgggctcgggggtcccagttccgaacccgtcggctgtcagcggactgctcgagctgcttccgcggcgagagcgggtcgccgcgtgccggccgggggacggactgggaacggctctctcgggagctttccccgggcgtcgaacagtcagctcagaactggtacggacaaggggaatccgactgtttaattaaaacaaagcattgcgatggtccctgcggatgctaacgcaatgtgatttctgcccagtgctctgaatgtcaaagtgaagaaattcaaccaagcgcgggtaaacggcgggagtaactatgactctcttaaggtagccaaatgcctcgtcatctaattagtgacgcgcatgaatggattaacgagattcccactgtccctgtctactatccagcgaaaccacagccaagggaacgggcttggcagaatcagcggggaaagaagaccctgttgagcttgactctagtccgactttgtgaaatgacttgagaggtgtaggataagtgggagcttcggcgcaagtagaaataccactacttttaacgttattttacttactccgtgaatcggaggcggggtacaacccctgtttttggtcccaaggctcgcttcggcgggtcgatccgggcggaggacattgtcaggtggggagtttggctggggcggcacatcttgttaaaagataacgcaggttgtcctaagatgagctcaacgagaacagaaatctcgtgtggaacaaaagggtaaaagctcgtttgattctgattttaagtacgaatacgaaccgtgaaagcgtggcctatcgatcctttagaccttcggaatttgaagctagaggtgtcagaaaagttaccacagggataactggcttgtggcagccaagcgttcatagcgacgttgctttttgatccttcgatgtcggctcttcctatcattgtgaagcagaattcaccaagtgttggattgttcacccaccaatagggaacgttgagctgggtttagaccgtcgtgagacaggttagttttaccctactgatgcccgcgtcgcgatagtaattcaacctagtacgagaggaaccgttgattcgcacaattggtcatcgcgcttggttgaaaagccagtggcgcgaagctaccgtgcgctggattatgactgaacgcctctaagtcagaatccgggctagaagcgacgcatgcgcccgccgcccgattgccgaccctcagtaggagcttaggctcccaaaggcacgtgtcgttggctaagtccgttcggcggaagcgtcgttcggaccgccttgaattataattaccaccgagcggcgggtagaatcctttgcagacgacttaaatacgcgacggggtattgtaagtggcagagtggccttgctgccacgatccactgagattcagccctttgtcgctaagattcgaaaaaaaaaaaaagcaaaaaagaacacaaagggcgaccgctctagaggatccaagcttacgtacgcgtgcaggcgacgtcaagatcttctaagttggtcctannnnnn

SEQ ID NO: 81958 - DNA, 604 bp, Arabidopsis thaliana columbia
  unsure (1)..(604): unsure at all n locations
gagaaatgagagaacgttaataatcattgcttttctcgagaaaataatatttttaattgaatcgagaaactcttcaaagttgaattaagaagaatattacctcaattgagatttgagagacacgcatagagagattgattattgcatcgaatcaagcttggtttgttagtaatggcgggaatagctttagttttagatctactgaagaaatctcaatctaagaacactctccactcatcttccttctattccgcctccgccgccgctgtttctgctgccgcctctgctccttttgcgtctaggtttctcttcggttcttttgagcctagagttgcgtattgtgatgctgctgctgcaatagatgatgattaccttggtgctatacggaaaaanntcttcggatgttttgcagcgtnaaccccttgcgnatatttctaggtccaaggaatacaatatccagccaaaaccagtttttntcggccttttgaagttcaagggcactttcaatgncttcagtgagncccctcngnangtttatttnccccttttgngcctaaacggntnaagggtgntgntgattcctannatcttagagaaacncntg

SEQ ID NO: 81959 - DNA, 446 bp, Arabidopsis thaliana columbia
atctctctcttcctttcgtgaattttctctctctagggtttcgatgtcaattttttccactgagcccgcgatttgaactgaaccgtcaccgtccatcaccatctccggtggatttcgtaggcatctacggagcttacttgtttcaaagaaccttggatgttgtttccgattctccgaaagctctgtgttctttagtttgatacctcagatattggatgcccttgatataacttaggtagcttcttacagaggaaggatatgttaggttaagttctgttcatttgcccttggatggttgctacgatggacttaaatgcttcaccccaacccgaagaagatgacgaaccgtatgtgagacatctagaagactattcttctcgggatgaacggatagagtctgctgttgaaatcgctagacggagagaaagaaacgaatgagatatgac

SEQ ID NO: 81960 - DNA, 463 bp, Arabidopsis thaliana columbia
  unsure (1)..(463): unsure at all n locations
aggtncgcacggtcatcgatcaagacttgaatcattcgcaattacgcggccgctgtctctccaagttaaaaagagagttgcagggtgtcttattctcaaggggacaaatatctatttcccactttagttacaaagaggcaatcttctcattcccccaaattcaaaaaaactcaaaagtaaaaaaaaaaaaactgcctaacacactctaaacatggtagtgtccaatctcatcatttctttcattattgaggacaaatatctacattaagctcttttcccggttttaaccgaagtcaggagctcaacaccagacccttattacactcttatgtctttcgcatcagagctttgcctggggattcaagaaggttccaaggttagcaattggctgctccaagagcatttgacgggctggactggggtccgggggtaattttggggggggcatttcggggntcgtttt

SEQ ID NO: 81961 - DNA, 627 bp, Arabidopsis thaliana columbia
actcaggtcttccaaccaagtcacaggatgccaacaatgtgcatagaggatgctgggttaacagagatgaacataatgaatgattggcaagagcagacgaaaaaagccattgaagaagcaaccacctcatggtacaatgataaacctctaagaagaaaagaagaagacgaggaagatgatgatgaagacgaagaagctgtgatgaaagctagagctttcgatgattggaaggatgataatcctcgcggtgcaggtaacaagaaactcacaccttgtggctgagactagagaccgagacacacattatttaacactttctccctctcttttgtttcttatttccaaaacctcttcgttcacttactataatgtctgtaatgtaatcatctttctactcttaagccttagacttacagattttggattcacggattcactttcattttcagttgggaatattatttttaaatacgccggctactaaagataccatgtatatatctagtaaaatatacgtgtggctggatctgagcccaaaaaaaaaaagaaaaaaagaaagggcggccgctctagaggatccaagcttacgtacgcgtgcatgcggcgtcatagctctatctatagtgc

SEQ ID NO: 81962 - DNA, 527 bp, Arabidopsis thaliana columbia
  unsure (1)..(527): unsure at all n locations
gataaagtatgtattttgtatcatttgaaacatacttagagaaaaaatacaattatgtggagatgagaaaaaatacataaacttgtatgcgttctccacttcattattaaccaaagattaaacttaagaacttttcagattttttttttaatttctgtttccaaaaattcaatagcttgcttaaagggtatcatggagagtagaaggaaggagctgggaggaaaggaaacggtgcagcagaggcataagccaccggaggttgagccacacgtttctttcgcctctgagttttgacttcaccagatacagaatttgttaatccggcttcttctacgagttgttgctgattatcattagagacacggtgtagaagaagaccagaccatgaaaacaggaaggaagagaagctggcatggaacatttncctngcttatgcatggccggcncngnagaatgaaatgcngttcaccgatgccagtnganaggttgatccggggaaccactggggtaccccngcaaggngngac

SEQ ID NO: 81963 - DNA, 1012 bp, Arabidopsis thaliana columbia
actcacgttaggggaagcacgtacgcctgcaggtaccggtccggaattcccgggttcgacccacgcgtccgccacaagataacgcagtggtggcgaaagacggatctggcatttttaagacgataaaagaagcgattgatgctgcttcggggagtggtaggttcgttatatatgtgaagcaaggcgtttacagtgagaaccttgagattcggaaaaagaatgtcatgttgagaggtgatggtatagggaagacgattattaccggaagcaaaagtgttggaggaggaacgacaacctttaactcagctactgtcgcggcggtcggagacgggtttatagctcgtgggatcacgtttcgaaacacggcgggtgcaagcaacgaacaagcggtagctctaagatccgggtcggatctgtcagttttttaccaatgcagtttcgaagcttaccaagacacactctacgttcactccaaccgtcagttttaccgcgattgcgacgtttatggaactgtcgattttatcttcggaaacgcagccgcggttctccagaactgcaacattttcgcacgtcgtcctcgtagtaagaccaacacaatcacagctcaaggaagatccgacccgaatccaaacacggggattattatccacaactctcgggtcacggccgcttcggatcttcgacccgttttgggatccacaaagacttatttgggtagaccttggagacaatattctaggacggtttttatgaagacttctcttgatagtttgattgatccacgtggctggctcgagtgggatggtaatttcgctttgaagactttgttctatgctgagtttcaaaatacgggtccgggtgcttcaacttcgggtcgggtcacatggccagggtttcgggtccttggttctgcttcagaggcttccaagtttactgttggtcctttcctcgccggtggctcttggattccttctagcgtgccgttcacttctggtctctagtgaatatatgg

SEQ ID NO: 81964 - DNA, 389 bp, Arabidopsis thaliana columbia
gacgaactgaagaaaaacctctcggaagaagatgagcaattggaaaactcttctccttcgcatcggcgaaaagggacctgagtacggcacttcctccgactacaaagaccacatcgagacttgtttcggtgtcattcgtagagaaatcgagcgttctggagatcaagttttgccttttctactacaatgtgctgaacaattgcctcataagattcctttgtatgggactttgattggtttgttgaacttggagaatgaagattttgtccagaagctagtagaaagtgtccacgctaatttccaggtcgctttagattctggcaactgcaacagtatccgtatattgcttcgctttatgacttccctgttgtgcagtaaggttattcaac

SEQ ID NO: 81965 - DNA, 577 bp, Arabidopsis thaliana columbia
  unsure (1)..(577): unsure at all n locations
accattaaaaaagataaatgttattaaacaagttttatatgtcctttttccttttagagtacaccacagagaatagaaaatacacacattccaccagttaacaatttacaacaaccccaaaggcaaacgtgataaaacaaataaaagaaaacaacgcaaacgtttaaaattcaaggttgagaaaggaacgtcgcgtctgcgttctggtcgctgcagtagagacaagggtgttgatgaaaccctagtctctcaagcacatcccttgccatcatcactagttgcttgttcttcatggcaccttcattttcgttcaacaccctttggaatcgcgttgctaaacgctccgtacgctttcccgttcccaacgccgacgtcagcagacgtctcatccgcctgacanccgntcatcaatatccctgagtccacgngtttttcacgggccgtcataagntccaaaagntccattagntccattgccggnaccggaacttaagccagattngggccnaagggcncagtagatgnggccgtgcggagtnaattccgggnggaccaaggggaaggntncctnaaggng

SEQ ID NO: 81966 - DNA, 680 bp, Arabidopsis thaliana columbia
  unsure (1)..(680): unsure at all n locations
nnnnnnnnnnnnnnnnnnnnnnnnnnnnnnnnnnnnnnnnnnnnnnnnnnnnnnnnnnnnnnnnnnnnnnnnnnnnnnnnnnnnnnnnnnnnnnnnncgttcaataaggtttattttgcaaaaacgtaaaacacaagaaaacaaaattacaaaaatatgctgatattgctctttccttaagttgttacaatatcagttttttcttacttgtaaggtgataataaatccgaaacagagttaacatcttcatcgtcctcaccatcttcaccatcaacatcatcttcatcggagtcaacatcagaaacttgatctaagaagccatggtgatgatgatgcgagctccaatcaggtgggaaagtcttctgcaacgtctcagtgagctcaccacctgaagcttcaatcttacacagacatttagaccagtgaaccgcagttcccatatcaacaatcaagcctgcctccaccatttccttgcagatagtcatcactcctgagtaaatgtaagcttctgcgattgaagcacgcgacagaagcgaagtcagaaggcaatgatacacagctttgtcgggttttatcccccggacgcgtggnnnnnnnnnnnnnnnnnnnnnnnnnnnnnnnnnnnnnnnnnnnnnnnnnnnnnnnnnnnnnnnnnnnnnnnnnnnnnnnnnnnnnnnnnc

SEQ ID NO: 81967 - DNA, 455 bp, Arabidopsis thaliana columbia
acaaaaccattcctctcctcaaaaccattaatctctcttctctctagcataacctctctcagatggcttctaactatgataagcttacttcttcgagagtagccatcatcggtgctggtgttagcggattagcagccgctaagaacttagttcatcacaacccgaccgtattcgaagcctcggattcagtcggaggtgtttggaggagctgcacttacgagacgactaaattacaatcggctcgagtcgattacgagttctccgactttccatggcccaataatagagatgacacaactttcccaccttaccttgagatattagattacttggaatcttatgccaaacattttgatcttctcaaattcatgaagtttggctctaaggtcatcgaagtaaggttcatcggtgatggcgaaactcctcagatggttgaccttggtgcttacggcaac

SEQ ID NO: 81968 - DNA, 537 bp, Arabidopsis thaliana columbia
acgactcactattgggaaagctggcacgcctgcaggtaccggtccggaattcccgggtcgacccacgcgtgcggtaaattaaagtcttctctacttcaccataaaaaatgcttgcgcacaagtctcttctctcctttaccacccaatgggctacactaatgccatctccgtctacttttctcgcctctcgcccccgtggaccggccaagatctcggccgtggcagcaccagtgaggccggctctaaaacaccaaaacaaaatccacaccatgccaccggagaaaatggagatattcaaatctttagatggatgggccaaggatcaaatcttgcctcttctcaaacccgttgaccaatgttggcaacccgcttctttcttacccgacccggccttacccttctccgagtttaccgaccaggttcgtgagctgagggaaagaacggcctcactgccagacgaatacttcgtggtgttggttggagatatgataacggaggacgcgtggcctactaccagaccatgaccaacaccctggt

SEQ ID NO: 81969 - DNA, 569 bp, Arabidopsis thaliana columbia
  unsure (1)..(569): unsure at all n locations
agcgctcgctgttggttgtcctaatctggttaaattgaaggtgaagaaatgtaaagttgtgactggagagattggagattggctgcgtgaacaaaggaggacactagtggtgagtatggatggtgatgaaaccgaagcagtggtggtggtggatggtgaggttgaaaccgttgtggaggagccaagggtggctcaagcaggtggaattgtggcagagattggttcaagtaatggtggtggaggaagtagattagcgatgattaggtcaaagttagggtttcttgctggaagaaacttggtaacttgcacattcagaagatggtctcacaatgataatgctagtagttctacttgatcagctataactatgaaagcggtaattgtcaaaaaaaaaaatctttttaaaagaaagttctatctgtattttgtaatcctcgttcgttttcatgtgtgcaagccttggtgattagggtagtcattacaatggagaccatttattgtagtgactattgatttggtgncatatttgttttctctgtttggaatctcaacattagtcatttgatggc

SEQ ID NO: 81970 - DNA, 391 bp, Arabidopsis thaliana columbia
ctgagaagttatgtgacttaatttcaagaagagaatttgtctattagaattttcaagaacctaaatagaagaacgttctggtgtgaatatccaataatgtttcaggttgcaataactctgaacataacacgacacagattcagggtctcttttgctaggctaacaagaactcacttgatcagatcagataatcgaaagaatctatctactccaagcttttgtaacttttcatcttctcaaagtcggcttaagcttgggaagataaacagacacaatgtagcagaaacaaggactgtgtataagcagggctttgtgttagtagcagaagctgaggttgacctagcaacaatgctcgcaacagactcagtttaaagaccagacccgtaagcaa

SEQ ID NO: 81971 - DNA, 373 bp, Arabidopsis thaliana columbia
aaagagactgtcaattcgtacagatacatagattgaaacaagacataagtatgtgtatccctcccaataagtaagggagggtgtggccgtaaacttcacttaccttacattcttacaatatcttttactttgctttgagctaacaacgaacttacataaaatttacttttgtagactccctcctagtgtcgatctcacaaagagcattcatgtttgttggtggtagatgcttaaattcgcatgtgtttcctcgtaacgctgggtgaggtatgtcgaacatttgatcggtggatatttaggaagctcgctttccgacttgcaggttgggagacactccacgagacagtcatgatttggttccacaaagaatgga

SEQ ID NO: 81972 - DNA, 536 bp, Arabidopsis thaliana columbia
cgtccgaccaaatctgacaaagaggtaaagacgacaggtctcgcgcttatccttaaaggactgtggtgaatggtgagtgtgacttggagggaccccatcaccgcggcagtgacagcttcttagatctcgataaccacaactaacctgtcacagtttcgattagatcttctcaaaaacttcacctttttttgtttttccagtttctcagaggagatcttccttcaaagctcaaatccttttgtctgaattgtgatactgctgtccccatttttctgcaagttgggaaatttctgtcaaagttttgtgggtctgttaaaaagatctgagctttgaacatggggagctcaatggaggagaaagtggtggctgtgatcatggtcggtggtccaaccaaaggcactcgatttcggccattgtcgctgaatattccaaagcctctgtttcctattgcgggacaaccaatggtgcatcatccaatttcagcttgtaaaagaattccaaatttagctcaaatatatcttgttggcttctatgag

SEQ ID NO: 81973 - DNA, 1046 bp, Arabidopsis thaliana columbia
  unsure (1)..(1046): unsure at all n locations
cgtctgcagtaccggtcctgaattcccgggtcgacccacgcgtccgaagctcaaatccttttgtctgaattgtgatactgctgtccccatttttctgcaagttgggaaatttctgtcaaagttttgtgggtctgttaaaaagatctgagctttgaacatggggagctcaatggaggagaaagtggtggctgtgatcatggtcggtggtccaaccaaaggcactcgatttcggccattgtcgctgaatattccaaagcctctgtttcctattgcgggacaaccaatggtgcatcatccaatttcagcttgtaaaagaattccaaatttagctcaaatatatcttgttggcttctatgaggaaagggaatttgcactttatgtttcagccatctctaatgaacttaaagttcctgttagatatctgcgagaagacaaaccacatggttcagctggtgggctgtatcactttagaaatcttattatggaagatagtccgtctcatatcttcctgcttaactgtgatgtttgctgcagtttccccttgcccaaaatgctcgaggctcacaggggatatggtggaattggaactcttcttgtgatcaaggtctctcctgaatcagccagccaatttggagaattggttgcagatccagttactaatgagctgcttcattacaccgagaaacccgaaacttttgtcagtgatcgaattaactgtggtgtttatgtatttacacctgaaatttttaatgccataggagatgtttctactcagaggaaagatagagcaactctaaaacgtgtttccagcttcgaagctcttcaaccggcaacaaggatcccgncagattttntaagactggttcangacatcctttcacctctagctgggaaggaacagctatatacttatgaggctatggatttttggggnaaatcaaatctcctggantgtggttaggtgttcaggacttatcttnccantncggttaaatntcccaactttttggtngtggtgtggnnaagggggnccnttttanttgggg

SEQ ID NO: 81974 - DNA, 507 bp, Arabidopsis thaliana columbia
  unsure (1)..(507): unsure at all n locations
aaaacaacccctgcgccgcttactctctctcagattcctcccgaagcaacctcgtttactctctacgccagtttcagcgcttagacatccctttttgcaatcatggctgatgaaatcaatgagataagggaagagcaagaacagctcgcaccctttgatccttccaagaagaaaaagaagaagaaggttgtgattcaggaacctgtcgaggacttagcagagtcttcacagactgagaaatctgattcattgcctgttaatgatggtcttgagagttcatttactggaatgaagaaaaagaagaagaagccagctgaatcaagcttattgaacaacggaagtgttgatgctggggaagatttggatgagattgctaattccgggcaaaagggggaagaaggatagttctcaggaacgttcccctggggggaagtagggggttccnntnttgnggnctnttggngggctttaactttcccgngaaannncggggtttcttgnnnnagg

SEQ ID NO: 81975 - DNA, 890 bp, Arabidopsis thaliana columbia
  unsure (1)..(890): unsure at all n locations
aggctctaatacggactcatttgagggaaagctggtccgcctgcaggtaccggtccggatttcccggcttcacgaagcaacctcgtttactctctacgccaatttcagcgcttagacatccctttttgcaatcatggctgatgaaatcaatgagataagggaagagcaagaacagctcgcaccctttgatccttccaagaagaaaaagaagaagaaggttgtgattcaggaacctgtcgaggacttagcagagtcttcacagactgagaaatctgattcattgcctgttaatgatggtcttgagagttcatttactggaatgaagaaaaagaagaagaagccaactgaatcaagcttattgaacaacgaaagtgttgatgctggggaagatttggatgagattgctaatgacgagcaagagggggaagaaggaatagttctacagcaacgttacccctgggagggaagtgagagggattacatatatgacgagcttcttggtagagtctttaacattctccgtgaaaataatccggagcttgctggagataggcgtcgtacagttatgaggcctcctcaagttcttcgtgaggggacaaagaagactgtctttgtcaacttcatggacctttgcaagacgatgcatcgtcaaccagatcatgttatgcaatacttgcttgctgagttgggtactagtggttcgcttgatgggcagcaaaggttggttgttaagggaaggtttgcacctaagaattttgaaggaattttgcggcgatatatcactgactacgtcatttgccttggttgcaagagcccagacaccattctctncaaggagaaccntctcttctttcttagatgtgaaaagtgtggatctcaacgatctgtgg

SEQ ID NO: 81976 - DNA, 793 bp, Arabidopsis thaliana columbia
ggaagagctggcccgcctgcaggtaccggtccggaattcccgggtcgacccacgcgtccgcccacgcgtccgcaagttcttcgtgaggggacaaagaagactgtctttgtcaacttcatggacctttgcaagacgatgcatcgtcaaccagatcatgttatgcaatacttgcttgctgagttgggtactagtggttcgcttgatggccaccaaaggttggttgttaagggaaggtttgcacctaagaattttgaaggaattttgcggcgatatatcactgacgacgtcatttgccttggttgcaagagcccagacaccattctctccaaggagaaccgtctcttctttctgagatgtgaaaagtgtggatctcaacgatctgtggctccgatcaaaacagggtttgttgctcgtgttagtcgcaggaagacttgagaaattagaaggtgaagtgaccttggtatggagtttggagctattctactgcttctgtatgagtttatgagttgaagaaatacttgtcttgttttttttattttgttttggaatatgattatgacttgacttttaaaatgggataggatcaaaaccttttactctgtcaggttcatgtggtccccttgaaggttgatttagtaaatccatggacttcttttttgtgttaaaaaaaaaacaaaaaaaacacccacaaaaaaaaaaaaaaaaatataaaaaaaacaaaacccaaagggcggccgctctagaggatccaagcttacgtacgcgtgcatgcgacgtcatagctctcgtatag

SEQ ID NO: 81977 - DNA, 760 bp, Arabidopsis thaliana columbia
actatagaagagctatgacgtcgcatgcacgcgtacgtaaagcttggatcctctagagcgcgcgcccttttgtttttttgttagaagaaactctatcaaagacttataataaccaaaacgaagacctattgtgaccaaatacaaagggtggggcagatcgtttctttgaatactatgatgtcttttagtttatgagttgctttatttctgatacttctcctcccaattcttttatcctatcctcagccattgaagcctctgtgtcccaatttgttttgcaaatcatccatgttaaaactattgtctgaaccaaggtccccgtcaacattccacaccagattcccattacaccatagttaagcttgtaccccaataatagaccaaatgggattccaaacacgtaatagcaggcgatgttaacgtaggccaccactgcttgccatccagctcccacagccacacctgataagacaggttggacattgttgatgacaatggaaagtgcaagtattggtgtgagttctttaacaagaatgatgacttttcgtctttctagaatcattgatacaatgaatccgattagcgtcgatgttatcactgccacaagtagtgagaatttcgcggttcttggatggttagctcctaattcattagacactctctcacacttacggctgtgttcatcccaatagcaatcatagcagtccatcccaaaatattcatgcagatggagagggcagctacagagatttcagcattc

SEQ ID NO: 81978 - DNA, 609 bp, Arabidopsis thaliana columbia
  unsure (1)..(609): unsure at all n locations
gaactggaacccnaatttaactncattgancaagcaacttccgatgcccctaantttncaaactccccccnnaatgaccnccacgagccgttaacacgacgggcancccgccgtgcccactgganccctaaatgcaacccccgtgaggaccacgtgtggaacaagtgcaaccgctgataatcgcagccatcaccatgattttgctttgtgattgcaagaacttagccgttgggtaattaacaccgtaagcaaagatctgagggatcatgtagatggaaaatattcccgtggcgctagagatcgccggcgtttgaccgatgaacgcgaggattggagcggcgaagatgtaaagaagcgagagaataaccgcggtcacggttagtatcacccatgatcggtgcaagtaaacgcccagcattgaccatttccctgctcccaacgcttgtccacatagcggttcttacgcgcctcccattcccagcatgacccccaatgaggatccagccatggccgagttttccacggagacccctgccagagcgatggtgctgatgtggccggcggagaacttagtaacaacccccaacggaacgcttgggtcagcccgga

SEQ ID NO: 81979 - DNA, 1743 bp, Arabidopsis thaliana columbia
acaaaattcctctttttttttatttaattaaaattgcatcaaaatgtttgttttcttgagccgaattattctattaagcgcattaaaaaagaaaaaaaaaaaagaaataggagctaatgtaatttagagaaactctatcaaagacttataataaccaaaacgaagacctattgtgaccaaatacaaagggtggggcagatcgtttctttgaatactatgatgtcttttagtttatgagttgctttatttctgatacttctcctccccattctcttatcctatcctcagccattgaagcctctgtgtcccaatttgttttgcagatcatccatgttaaaactattgtctgaaccacggtccccgtcaacattccacaccagattcccattacaccatagttaagcttgtaccccaataatagaccaaatgggattccaaacacgtaatagcaggcgatgttaacgtaggccaccactgcttgccatccagctcccacagccacacctgataagacaggttggacattgttgatgacaatggaaagtgcaagtattggtgtgagttctttaacaagaatgatgactttttcgtctttcacaaaaagtgatggatattgatctctaaagatgagtagaatcattgatacaatgaatccgattagcgtcgatgttatcactgccacaagtagtgagaatttcgcggttcttggatggttagctcctaattcattagacactctcacacttacggctgtgttcatcccaatagcaatcatagcagtccatcccaaaatattcatgcagatggagagggcagctacagagatttcagcattcttcaaatatccagcaaataatatgattgccataaaataccaaacctccaaacagagcataacagcagaagccaaagataatctaacgaaactccacaaattatgaaaagcctcccacgagaaaccagaccaagcctcaccacacgtaccactaaatatgtacacaagctgagccatgtcaatgaagcaccacgacgcgttaagcactacggctagacctggcataccccactggagcttcacaatgacaaaccacgtgagaggcacgtgtataacaagtgcaacagccgatatcacggccatgaccattatcttgctttgcgattgcaaaaatttagcggttggaaaattgatggcgtaggcaaagatttgagggatcatgtagatggaaaatattccggccgcgctagagattgccgccgtttgaccaatggacgcgaggataggggcggcgaaaatgtaaaggagagagaggataagagcagtcacgtttagtatcacccatgatcgttgcaagtaaacgccaagcattgacaattttcctgctccaaacgcttgtccacatagcgtttctaacgcacttcccattccaagcatgatgccgaatgagaagccggcaacgacggagttttcgacggagacagcggcaagagcgatggtgctgatgtgaccggcgaagacctgagtaatagcgccgagagaatattggttcacggatgtgaaaatggcgggaccggccaagtaccatagctttttggtttccacgttgaattccctaacgaagccaccgacggtggtgatcggaggaatatcgtcgacggataagaaaggaagatcagaacgttcttccgccgcagtgagaagcgtctccgttatatctttgtcttttgccatcttaagagaaagag

SEQ ID NO: 81980 - DNA, 892 bp, Arabidopsis thaliana columbia
  unsure (1)..(892): unsure at all n locations
nnnnnnnnnnnnnnnnnnnnnnnnnnnnnnnnnnnnnnnnnnnnnnnnnnnnnnnnnnnnnnnnnnnnnccacgcgtccgcggacgcgtgggctcgttgttgtctcatggagagcacggagcagccgaggaacatctccggatcgatgcagagccctagatctccgtcttcgcatccgtatctgtcagtctccgtcacagatcctgtcaaattaggcaatggcgtacaagcttatatctcttacagagttatcaccaagactaacttgccggagtaccaaggacccgagaagattgttattagacgatacagtgatttcgtctggttacgggatcggctttttgaaaagtacaagggcattttcattcctcctcttccagagaagagtgctgtagaaaaattccgctttagtgccgaatttattgaaatgaggcgagcagcattggatatatttgttaatcgaatagcattacaccctgagcttcagcagagtgaggatcttaggacctttttgcaagcagatgaagagacaatggacagattcaggtttcaggaaactagtatattcaagaagcctgcagatctaatgcaaatgtttagggatgtccagtcaaaagttagtgatgctgtccttggaaaagaaaaacctgttgaagaaactactgctgactacgagaagcttaaacattacattttcgagcttgagaaccacttgactgaggctcagaagcatgcgtatcgcctagtcaagaggcatagagagttgggtcaatcactgttggattttggcaaggctgtaaaacttcttggggcttgtgagggtgaacctacaggaaaagcattttccgatcttggaactaaatctgaactgttatcgattaagctccaaaaa

SEQ ID NO: 81981 - DNA, 241 bp, Arabidopsis thaliana columbia
acccacgcgtccgctcacgcgtccgcggacgcatgggattggtaactcgggggatatccatcaagctgtggcttcagcaatggttgataaggacttggtggcatccgctgtgttgtcggggaacagttactttgagggacgtgttcacccgttggcagcatctatctatctagcttccacaccgcttgttgtagcctatgctcggtctggtactgttgacattgactttgagacacagccc

SEQ ID NO: 81982 - DNA, 416 bp, Arabidopsis thaliana columbia
ccccaccagaaacaataaatgaattgggatttatagtccataaactttgtcaatcttatagtctcatgaaaattcacatacagttttgcattaagtaaggcacaacaaattccacaacctcctcatccgatatactgaggtggtcccctaacacactttcaaacttcacttttccggcaacatccaatgctttcagaccaatccaatcttctctgtacaacttcgtctgttgagctgacaaaagggtatcgaatccttcatcttcataataaccaaaccatgcagtttctttagggattaacattgtatcgctctcgaacatgacaagaactaaattgtgtaagttagtgaatcggtctttgaaagtagagtttctttcgtcaggtctctcattgttaagctttggtagatacttg

SEQ ID NO: 81983 - DNA, 764 bp, Arabidopsis thaliana columbia
agctggtgctcgcgtacgtaagctcggagcctgtatagcggacacccttcgttctttttttttaattaaaaatttttaaaattataatacttatataatcatatgttaataataagactgggcattgtataccgtgagagctctttgtaaaacatttgagagccgaagtagacatttaacagattcagattacacaaacataagaggaagattattacatttgaagaagcatacgtaggttgagttcttataaccaagttcaagggtttatctaatagccttaccggagaatcattgccggtaaggatcaaactggtgttgggactggtgttgggacattggatatcggcggctgcggtgctacagcaaagtgcagtcctctgcgttgaggcccaccaccgtgtatcatgaaagtaacttctgcggcaactagagccgatgcttcctgtctttgtcttcgacgttgtaatataccgatggccccatgccatgatgtaacatgggaggagaaaaccagcagcacgaataaggaatagagagaaaaaggcagttggatcgtcctcgtcgtctgggttcgctgtgagattttaacgcatctcgtaaccagtaaaaagtgcctattagggatgaagagccacccagaagcgaccaaaaagggccaggttcccgctttggagtttaattttcttcaagaaataattttcaattcattatagtccttgcgctttcccaaaggaaaaatggaaccgatttctttggcaagg

SEQ ID NO: 81984 - DNA, 471 bp, Arabidopsis thaliana columbia
aatttagaaagtagagaaatgagcaaaagcaagaagaagaagattctctctttgatccactttcctccattgtcgtcgcagagagagtggagatattcggattcagtttatgaagtagaacttgggtctaaaggattcagtttcataaaccctaataagtatctgttgtctgattaacttataggaaagatcatttttttttttgtttctcttagtgacggattggtctagaaactagtatgcaaattgtagcttctgggagagaaagtttgtatttttagtaacggatttattttgggagagtttgatttgtaaggattaggatgggttttttcaagaaattagctggtgtgtttggatttggccaggaagtattgaaaaatgaggaagatgatattgatgttcacggtgacggaggtaatcagcagagatttcgtgaaactggattaccaaggaaaggatttggagttc

SEQ ID NO: 81985 - DNA, 470 bp, Arabidopsis thaliana columbia
aaaaaccctcctctcttcatcgacatctctctttcactgcttcaatggcgtcttttgagcgttttgacgacatgtgtgacctgagattgaaacctaagattctccgaaaccttctctccgaatatgttcccaacgagaagcagcctctcaccaactttctatcactctccaaggttgtatcaaccatctccacacacaagctcttatctgagtctcctccagcttcaattgaccagaagcttcatgctaaatcgaaatcagccgttgatgattgggttgctagattatcagctttgatttcttctgatatgccggataaaagctgggtgggtatttgtttgattggagtaacatgtcaagaatgtagctcagatcgtttctttaagtcatactctgtttggtttaacagtttattatcacatcttaagaatccagcaagttctagaattgtccgagtggcttcatgtacc

SEQ ID NO: 81986 - DNA, 515 bp, Arabidopsis thaliana columbia
cggacgcgtgggcggacgcgtgggcaatctctctcttctctctctctgaagaaaaataaataaaagatctaactttgacggctctcttaatcttactcactccggttttaagtcggaatagactgatgggagcttgatggttattgttagatcagatgtggatttaaagccttcgctgaactaacaagtctatggaagaagcaaagacccttgttttacactgtatgttgtgaggaatttgtctgattttgggtgataaaggtgaagtctttgagtttgtaattttgagataagattggatggtgggaagagaggatgcgatggggaatgatgaagctcctcctggttctaagaaaatgttttggcggtctgcctcttggtctgcttcacggactgcatcacaagttcctgagggtgatgagcaaagcctgaacattccgtgtgctattagttctgggccgagtcgaagatgtccagctgctcctttgacacctcgttcacatcataacagcaag

SEQ ID NO: 81987 - DNA, 396 bp, Arabidopsis thaliana columbia
aactaaatccaattgaccgaataaaatccagtaaaccgatccataaaccaaaattggaagaaaacaatgcctgtttaataggtgttgaaactttgctgaaaaaaaacgaagcgagcaccctctaaaatgccttcgatttctctggcgccattgatttagttttctctctctgactacaaagtatccattcgttcaaaccagtttcttcccattttcgatttctgtcaaaattcaccaaccaactccaaaaactctgttattgaataagtttcttgatcttaaaacaaacgatctcaaagaatggcacgacacgatcctaatccatttgctgatgaagagatcaatccttttgcgaatcatacaagtgttcctcctgcgagcaactcttatctcaag

SEQ ID NO: 81988 - DNA, 408 bp, Arabidopsis thaliana columbia
ttttgattcgaagatagccttttgactcaaaagttcaaagttttgtttgatcattagataagaaacaacaaaaaggtggattttctaagtagcacacactcgcaagaactcttttttatcttttgagtcttgatcaaaaactggatatagagaatcatactgcaacaaaacaatgccctacgagcttttcggatttctccttgaaaatgcgagggagaatctcatgtgcgccgatatccagagcttgcgggtccctgcacaaagtttgtcccttttctttcgagctagatatgaaccaaactttccgaagagagggagattcaaactgaacaaagattccatcatttggtccgagtttccatttccttgagcctacacctttccacacctgtgggtaggatatactac

SEQ ID NO: 81989 - DNA, 636 bp, Arabidopsis thaliana columbia
  unsure (1)..(636): unsure at all n locations
atgatatcgccgggcactaatccgactcactttagggaaagcacgtacgcctgcaggtaccggtccggaattcccgggtcgacccacgcttatcattctcttcttctgcatcgtctgcttcatcactattgaaggcactcgcttcaaccgtcgctcttctcagctcactcagagatgtcgttctcgctgagaaagctactggttccgattctggttttggtactgtttctggatctgtgcgttgaatccggattctctcagtcaacgccggcgcgtgacgatcacgtgcatcatcacggtggtgggtgtagtcattctcatgaccacgaccacgaccacgatcatgatcatcatgtgaagaagacgacggcgaaggtggagatgaagttgccggaggagcttgctgaagaggaggatatgagattatgtgggtttgggccttgtcttcatgatcacgatcacgaatcaagttccactcttacgggggttgctctgtggcttaatgcatgtgggatcctccctttaagtaagcttggcccaactaacttccctgntttncttcccataatgtttntcaaaggggagncntcaaaantggtccgttnttctttggcnnntttgggaaganaatttntc

SEQ ID NO: 81990 - DNA, 557 bp, Arabidopsis thaliana columbia
  unsure (1)..(557): unsure at all n locations
tgatacttcnnnnnnnnnnnnnnnnnnnnnnnnnnnnnnnnnnnnnnnnnnnnnnnnnnnnnnnnnnnnnnnnnnnnnnnccacgcgtccggttcctttaatccgtaaaaaaaaacaaaaaaagttttgatttttctctgtgagtttgagtagtagtaattaatagaaacaatggaggttgattcaagcaaggatccgaaagtctaacgggtcaaaaccaaaaaattccggatggagtcggcacgacttgtgggtgactacgcacttggcccgagaattgggtctggttcgtttgcggtggtgtggttagcgaagcatcgatcttctggtttagaagttgccgtcaaagagattgataagaaacttcttagccctaaagtaagagataatcttcttaaagagatttcgatccttagcacaatcgatcatcctaatatcatccgattctacgaagcaatcgagactggagataggatatttcttgtgttggagtattgtagtggaggtgatcttgctggctatatcaatcgccatggcaaagtacctgaagctgttgt

SEQ ID NO: 81991 - DNA, 1760 bp, Arabidopsis thaliana columbia
  unsure (1)..(1760): unsure at all n locations
gggaaagcaacgtacgcctgcaggtaccggtccggaattcccgggtcgacccacgcgtccgaatttggtgatttatcgttaatccatggcggctccgtcgccgtcttcaccaccaaacctcctctctcctccaccattccgatctcccgaagcttcttactttctccgaacttgttcaaatttctctcaattgaaacaaattcacaccaaaatcatcaaacacaatctcaccaacgatcagttactagttcgtcagctcataagtgtttcttcttccttcggagaaacccaatacgcttctctcgtctttaatcaacttcaatctccttctacttttacctggaaccttatgataagatctctctctgttaatcacaaacctcgtgaagctcttcttctctttatccttatgatgatctctcatcaatcccagtttgataaattcactttcccttttgttatcaaagcttgtctcgcttcttcgtcgattcgtttaggtacccaagttcatggtttagctattaaagctgggttttttaatgatgtcttcttccaaaacactctcatggatctttactttaagtgtgggaaaccagatagtggacgtaaggtgtttgataaaatgcctgggagaagtattgtttcatggactactatgctttatggtcttgtctccaattctcagttagattctgcagagattgtattcaatcaaatgccaatgagaaacgttgtttcatggactgcaatgattacggcttacgttaagaaccgtagacccgacgaggcgtttcagctctttaggagaatgcaggttgatgatgtcaagcctaatgagtttacgattgttaatttgttgcaagcttctactcagttaggaagcttgtccttgggaagatgggttcatgactatgctcataaaaacggttttgtgcttgattgtttccttggaaccgctttgatcgatatgtatagcaaatgtggaagcttgcaggacgcaaggaaagtatttgacgtgatgcagggtaagagtttagcgacttggaactcgatgatcactagcttaggggtacatggatgtggtgaagaggctttgtctctgtttgaagagatggaagaagaagcaagcgtagaaccagacgctatcactttcgttggtgtcttatccgcttgtgcgaatactggaaatgtaaaggatggtttgaggtactttactcggatgatccaagtttacggtattctcacctattcgagaacataatgcttgtatgatccaattgttggagcaagcccttgaggtggagaaagcttcaaacttggttgaatccatggattctgatccagacttcaattcttcatttggtaatgaatacacggatggaatgaatgaaacgaacgaaactccgagccaacatcaaattatgttcaccaagtgggatacaggccgattttgaaggttcagtgtctcttgacatatatattttcgtctattaaacagattcattgatcatctttgtaactatacaagaaaagctccttcaaaagtagtgtaatgtcatgtacttgtaaaaggaatgggagcttaagcagggaaaatagtaaattcgatttgtaatagtgtcatgtattttgtaaacagattcatttatctttttacattatgattctcaaaaaaaaaaaaaaagnnnnnnnnnnnnnnnnnnnnnnnnnnnnnnnnnnnnnnnnnnnnnnnnnnnnnnnnnnnnnnnnnntgtacctaa

SEQ ID NO: 81992 - DNA, 464 bp, Arabidopsis thaliana columbia
acttcttctttaacgtttatactttatatacatcgaaagcatttcttctttgtccgttcacatcattttcgaatttgtgttttccctagaaattgtctttttttttttctttcttatagagaaaatcaagaaaatgtaaaaaagattgatatatttatttattctcgttcaaatgaatcactctttatttgactcgttagtccatgtctcgcctcactctcttaatctctatttcctctcacatctctcaaaaagtgtacgttttgtgacagaaactgttttttaaagttagctataagaacatgaggaagatcatacggtttagaatccgcagacgagtctcaagatggatctttcgcaaaacccggatccaacgttcaggatacaaccggatacactcgacccagcaagcttgcatgctgatgacaccattatccaaactcaaaagttggggccaacgtctc

SEQ ID NO: 81993 - DNA, 809 bp, Arabidopsis thaliana columbia
ggtacgcctgcaggtaccggtccggaattccggggtcgaccccacgcgtcggattctcttaatctctatttcctctcaaaaagtgtagttttgtgacaaaaactgttttttaaagttagctataagaagatgaggaagatcatagggtttagaatcgggagacgagtctcaagatggatctttcgcaaaacccggatccaacgttcaggatacaaccggatacactcgacccagcaagcttgcatgctgatgagaccattagccaaactcaaaagttggggccaacgtctcaagcaaagtttcagacgcaggtctacgagaagatccgcatacatacccgttgatcataagaaagccgacccggttccaaggggacacttagctatctacgtgggtcaaaaagacggcgactgtcatagagttttggtacccatcgtttactttaaccatcctttgttcggtgagctgcttcgagaagccgaaaaagagtacggattttgccacgaaggaggtatcactattccttgtctgtattcagatttcgaacgggtcaagacccggatcgcatcggggtcaagttctcgggtatttccatggggccgtcattgccgcaattgaagacaattatggaaatagttcttaggattttcaagcttttattttctttgtagatattgttccctttcatttaccattttctaatcttgttactttttgtcaaaaaaaaaaaaaaaaaaaagggcggccgctctagaggatccaaggcttacgtacgcgtgcatgccacgtcatagtgttctaaggtaacg

SEQ ID NO: 81994 - DNA, 465 bp, Arabidopsis thaliana columbia
agtgtcaaattctgagatctgtaaaagatgagcgacggagacgacgctgctagacgccgtaccgcggcggtgactgattaccggaagaagctccttcatcacaaggagctcgaatcccgtgtccgaacagctagggagaatttaagagcagctaagaaggaattcaacaaaactgaggatgatttgaagtctcttcaaagcgttggccagattattggagaagtactacgtcctcttgataacgagcgattgattgttaaggcaagtagtggccctcgttatgtggtgggttgtcgtagcaaggtggacaaggaaaagcttacttctggaactcgagttgtcctggatatgactacgctgacaattatgcgagcccttcctcgtgaagttgatcctgttgtttataacatgttgcatgaagatccaggcaacattagttactcagctgtgggtggtttaggtgat

SEQ ID NO: 81995 - DNA, 499 bp, Arabidopsis thaliana columbia
  unsure (1)..(499): unsure at all n locations
actcactatagggaaagctgccacgcctgcaggtaccggtccggaattcccgggtcgacccacgcgtccggctgatgcgatttgctctgttttcatggcgggcgcctcatcaccggcgagtttgagagcttctcgtagccgtcggctggggaaggagacgaatcgatccgatctattcaaaaaacctgcagttccattcgcattcgcgctaattcttgctgatgcaatcctagtcgcacttattatcgcctatgttccatacacgaagatcgattgggatgcttacatgtcacagtgggtttctcgggggagagagagactatgggaacttgaaaggcgatacagggccattggtttatccagcaggtttcctctatgtttactctgcagtgcagaacttaactggaggggaagtctaccctgctcagattctttntgggtgttctctacattgtcaatctggggatcgtcttgatcatctacgtgaagactgatgtgg

SEQ ID NO: 81996 - DNA, 996 bp, Arabidopsis thaliana columbia
  unsure (1)..(996): unsure at all n locations
cgcgcnnnnnnnnnnnnnnnnnnnnnnnnnnnnnnnnnnnnnnnnnnnnnnnnnnnnnnnnnnnnnnnnnnnnnnccacgcgtccgcccacgcgtccgcccacgcgtccgcccacgcgtccgctaaacctagaaaaacgaaaacacacgcggagttgttgttcctcctctacggtaacgggaatatcgtagttattgtaattttggaaagctataatggcgaagagagagattagtagcactctgagaaatctaaagtttatgcaaaggtcttctctgaaagtagagaagaagaaggctgatgaagaagagcctaatgggagttttccttcccttaggactgttgcaaagaagtgtgtggtcataacagattgggatcctcagccaggagcattgttaggacgcatgtcttttcagtctttcaatccctctatcgagaaattacatgaagaggcaataaacggtggaaatccctcaagctctagcagtaatggaggaaaaaagtcttttagtgaaccggagagttcaaaggttgagccaagtggggaaacagatggtgacttgaaaagaaaacagtctgaggtagtctccgaggaacaaaaccgtcctaacaagtccccaaggagctttgacaaaccatcaccgagcaataaaaagggcaatggttttaagaaacccaagagcaagaaggtggactggagcgttttgaggccaccaaaacctcaaaccaaatagggtttaaattagctaactacagcaatctatatgctattagttacatcggttcatatgttctagtagatcgtttgttgctctgtctgtatcgtcattcccgtggtgttgcaacccgttggataaattatagccaaaagttttgaatttgtttgggttaaaagtgctcgtgttgtctaaaaaaaaaaaaaaagnnnnnnnnnnnnnnnnnnnnnnnnnnnnnnnnnnnnnnnnnnnnnnntcagctcaatcnnnnnnnnnnnnn

SEQ ID NO: 81997 - DNA, 320 bp, Arabidopsis thaliana columbia
actcctctttgttgtaactgccgtcgctaccgacactcgtgccgttggagaattggcaggtatagccgttggagccacggtcatgctcaatattctagtcgcagggccatcgactggtggatctatgaatcctgtgagaactctaggaccagccgttgcatcaggaaactataggtcactatgggtgtatctggtggctcctacacttggtgccatatctggtgcagcggtctacacaggtgttaagcttaacgatagcgtgactgacccgcctcgtccggttaggagctttcgtcgttaagtgagtgagagacttgttt

SEQ ID NO: 81998 - DNA, 1156 bp, Arabidopsis thaliana columbia
ggtttatgctacattgaagcaaagatggttacgagcagcgatcaaatccaaaatggttctgaagagcaatcaaaaagatcagagatttacacatacgaagcaccatggcagatctacgcaatgaactggagcattcgtcgagacaagaagtatcggctcgcaatcacaagcctcatcgagcaatatccgaatcgcgtcgaaattgttcagcttgatgaatcaaatggtgagattcgttcagatccaaatctctgcttcgaacatccttacccaccaacgaaaaccagtttcatacccgataaagaatgtcaaagacccgatcttttagctacttctagtgatttccttcgtttatggcgaatctctgatgatgaatctcgtgttgagcttaagtcttgtcttagtagtgataagaatagtgagtttagtggtccaatcacttcatttgattggaatgaagctgagcctagacgaattggtacttctagtattgataccacttgtactatttgggatatagagcgtgaagttgttgatacccagcttattgctcatgataaagaggtttatgacattgcttggggtggtgttggtgtctttgcctctgtctcagaggatggttccgttagagtgtttgatctccgtgataaggagcattcgacgattatctacgagagtggtgagcctagtactcctttggtgcgacttagttggaacaagcaggatccgaggtatatggctactgttatcatgggcagtgctaaaattgttgtgttggatattcggtttccggctcttcctgtcgtggagcttcagcgacatcaggctagtgtcaatgctatagcttgggctcctcatagctcttcccatatctgctccgctggagatgattctcaggcgttgatttgggatatatcttccatgggacagcatgttgaaggtggtctggatccgattctagcttacacagccggcgctgaggttgagcagcttcagtggtcatcttctcagcctgattgggttgccattgccttctctaacaagctgcagattctccgggtctgattatgttttacagatttctgttggatacttggatgtaaaaactcgttgctattgttgattaatgatcttttgatctctgactctaagcctc

SEQ ID NO: 81999 - DNA, 538 bp, Arabidopsis thaliana columbia
  unsure (1)..(538): unsure at all n locations
acccacgcgtccgaattcaacaagataagcctctcttctacttttgtgaaattttccgtaatcaaatccgtaatcagatttccccatcaatcgataattttctctcgccgcgttttctatttttctcgctcttcccttttaattttcatcccattttcttgaaggagatttctaattattctgtgatctaaagtctgaagctttgtttggttgcatctcgatgatgatgatgatgatggttgattgtaaatgggtagtttcggtttggttgtagcagaagctaagtttgtcaagttaataagagtattttagttttttttttgttaaatcgatttgtgggttcatcatcctacgatcgaaagtttccatctttgataattttgagattctggggggttttaacctagaatttctaggttttttttttttgggtttgttgatttccgtagcctaggaagaaaaccgtccttaggggggggaaaaaaaaaaccattcaaaccggattttaggganncgantggnggcnttggngngggaa

SEQ ID NO: 82000 - DNA, 473 bp, Arabidopsis thaliana columbia
atcaagatctgacattgttatgtgcttgaattcttcatcaagctcgtcagaaaaacaccaaaaggtttcaaatttatctgaaattcgtgaaaccctaaaaagggttatgtcaaggtagaagagacagaacaaagatagatatggtaaggaagcagaagtacgggaaggtagtgttggtttcttgcatcgcgcttctagcaaccggactcattgccgactttctctgggctacttctcatcgattctcctccgccgcaatctccgccggattatctctaccttcttcacttaccaccgtaatcgttcctggccaggagaaagatacaaagaagaagaacgatagtgtgaaggaaaggaaactgtctaatacgtttcaagatttgcctgctcctgaattgaaatgggagaagatggcagcttcacctgtacctcgtctagacggagctgcaattcagattagggatcttctttat

SEQ ID NO: 82001 - DNA, 770 bp, Arabidopsis thaliana columbia
cgttaattggctgttttcaacgtaatacatatggtcagattgtattactaagaaaataaatagaaaatggagagaaaaatgaagaaaaggtttttcattacatgggtttaatataaagtacaagtagacgtgttcgttgaagcaaatgcttaagaatatatatttagtgtgattttatttctgttcactttctaaaagaggatgaagcgtgaagccattcctggattgcagatcgaagagcaagatttggaactaactttgaatgataaagccccgtgtttggcaatggggaagccccatgccccccctgaagccatggacttagggcttctgcttcatatggaaacccatctgctgctagttggggaaccttcatcacttccagtgaaatgggacagatgaagtactgaggagcttcacggtgctcatcagatcgagagacctcttttcttagctcctctacttctataattgctatgtcgcgtcctttaatcaataaatctcgttcttccttggcttttctcaaaactttcgttgccaagttatacttgtcttgcagcttttgtaccaacatataagactcggttattcggttctcagatatatacctcatcttttcgagtttttctctcactttcttcagctccatctctgtttctttcctttgtttcaactcctccaaataggcactttcccattctttaccccttttgattgcttcatttttctcttttacaacttcttgatgcttgaaagcctccaagcttgct

SEQ ID NO: 82002 - DNA, 512 bp, Arabidopsis thaliana columbia
  unsure (1)..(512): unsure at all n locations
ctttgaatataccactagtggtcgaggtggtccttaagaaacacaaggacatggaccatcatatgagttgaaatcaggagtcaaaccaaaccacaaattaataactacaatcaaaagaaattgtgttttagccacacaaaaacaagcgaaaaaaaaagcaaaataacatgatccgagtaacataattgcccttctcagttccactccaccaccaaataacataacccgagtaaaatttgtatccaaaaaaacaagatcaccatgagaatatctttaaatggnctagccagtgaagcgaaatgaagtctcctatagcanatcatagaaatgnttgatattgattttctctctcccagcatagatagcttctgcagatccancgttttctccttgcggaccatttctatnagcatgtaaatctnctttgntttggantggnaattgggggcnntgaagttgntcancatcatcctcttgggaggggttnaggtnntttaggccttttttnngcc

SEQ ID NO: 82003 - DNA, 471 bp, Arabidopsis thaliana columbia
  unsure (1)..(471): unsure at all n locations
aaaacaaattttttcttctaacacatcaaattaaagaaaacagagagggagggagggagggagtaaaaagtaaaaacctaattttcaccctcttcctaagaaaaaatcaagaagtaattgagcattttaccccaaaaaaagaaggaaacggaaaaccagaatgtgacgggagagtttcattacaccacttattacattcacttttcttagttgacatctctagctcccttcttcccttcactataattcgatcgcaaatcttcatataggccagtttttagctagttccgtacaatatctcttcctcggatggcgccatgttgagatcagggaggacgaagaaactcccctgattttgcgagtcactggttttgcaagattttgatccctgtagccgctcgagttgtgatttacgaatcaatcaacaaggttcntggntgngaaacggccgagttaaagtcagcttaaanc

SEQ ID NO: 82004 - DNA, 574 bp, Arabidopsis thaliana columbia
tgcaatctccagctttttagtactccattcgttacaagtattacatttatatttctgtatccattaaatataaattcaagtaagaaagttccaaacaaaacaaaaatccaagaaatttttttagaagccgtgaattctctggccttcttctacttgacaataccttatctctctgactcttctctgaaattttttaactaacaactgaagaaatctccttttggatcattccaaaagtttcacaaaatccagaagaaaaaaaggaaggaagattatttaggaaaatttcaattgggaaaattatcaaaattccctctaggaaactccatttccaggaccttggacacttaggatcaggactttacacttaggttttttgaggtagctacaatgggggttttacctttgggtatagttccttcaaatccttcacatgtcactttgatctctactccttcactcttgaggttccccattatcatcttcactttaggtctgatctcgatctcatatcctacacgcgcgcgcgtgagatctgatctcagatgcttagcttcatccggatctaactcac

SEQ ID NO: 82005 - DNA, 771 bp, Arabidopsis thaliana columbia
  unsure (1)..(771): unsure at all n locations
agcgtctctacgactcactatttggaaagctggtccgcctgcaggtaccggtccggaattcccgggtcgacccacgcgtccggttctttctatgggtacaagtggagggaatcagtccgcactccctgatatattccagccaaattttggtaatcaggctccaacctcaacaatgaatggttcgaaaaaagaagataccagagccttcgatttcatttctgatcatcttacatcagcccgcgacacaaagagagtatcttgatggttgcttacaaaattccgccttccagtgttaaatgctatttcatgagatgtggacacaagggtgcaggaagctaaaacattaatttatgagagctgtatagacttgaggagaaaatggagatagctttataattcatatggtaagggtttttgcttcttttatctgtttcctcgttttgtctttggtttttcttcttctttggagtccattgttcttggcatgaacatgtagttgtagagttgctttttgtttgttactagatgtgtttattttgttccgttgctatatattatatctgaagagacttgtgtctgtgtatcgaacgtagacaagaaaggaaatgaaactgagaaaggaaatgcatctgaatagtttaaagacttcaagtcaagtcccaaaaaaaaaaaaaaaaaaaaaaccaaaaaaagnnnnnnnnnnnnnnnnnnnnnnnnnnnnnnnnnnnnnnnnnnnnnnnnnnnnnnnnnnnnnnnnnnnnnnngatcaat

SEQ ID NO: 82006 - DNA, 471 bp, Arabidopsis thaliana columbia
ggtcattgagtcatggttgtaatggtcatgagtcattgagtcatggctgtaaacttcttcaacaaggaatagattcccacatttatatgccagtgtatcttatgaaaacaaatattatattatgttcacatattgctgggtgatccaaaaatcctcaagatatctattatcccagaatcatggactgtgtgagtctgtgacttaacacaaatcattgcgtcgtctccttgatgttcttctatgtgcagaccatctttcttttatatctccaggtgtgccaatccgttgctcatcgggcgagtgaccatcctccattactccagctgcacggatcctggcggtctcagccaacaagtcatggataagcatctctgtcgtcttagccgtgattcctctgagataccaagaaatgggcggaggtggaacaatcgctggctgtattagctggtccagcgttaccttagatccgat

SEQ ID NO: 82007 - DNA, 528 bp, Arabidopsis thaliana columbia
acgactcactatagggaaagctggcacgcctgcaggtaccggtccggaattcccgggtcgacccacgcgtgcgaaaagtttggattcctccaataaagaacatgacttcgtcttcttcttctcctatcacgtttactcttcttctgcttctctctcttcttgtggcactaaacccaaatccgtcgttagcctccaccggtagcaacatcaacacaaacgacatcgtgacgcagtacagcacatacgttagaacgcgtgcaacgtaacgcgatacaaccgcctctgcgtccgaacgctatggccgtttgcaatcgtcgctcgaaacaacaccagcaagtgggctcgagctagcgtcgcggttaccataaccgacaccaaacgggtgctgaggctcttgctcaaaacgcagcgttcagcagttggcgaaagcgagcgaaatcgcgtggtcggattgccgagagctcttcgtggactctctcgacaacctatacaagtcgctcgccgttctgcggacactgaacgcggatg

SEQ ID NO: 82008 - DNA, 273 bp, Arabidopsis thaliana columbia
gtaaaaaaaatctctttcttttataatgactatacaaatcatattaatctatccataaccaatttcggagaaagaaaaagttagttataaaaagaacttttttcacggcggccccgggggaggtaaatcactgcacgttgtagacacaattacttttccggcacgttcaccggactttataagcatcaacactacttctcttatcgtcggtcgatcagacggcgaagatttcgtacagagcacggcaattttcgtcactgtgatcatatgatt

SEQ ID NO: 82009 - DNA, 1825 bp, Arabidopsis thaliana columbia
agacactcaatggccaaaaagcaacctttggcgggcgggtcaaaattgactcttttgacctttcattttcattgaacctctatagacagaaaaggatggatttttctgatgaagacgacgacgaaaactgttttggttctcgtttcaacgacggtgtaaatgaagaagaagaagacgaagagggttttgtgtttaacgacgatgttgaagagaatgaagaagaagagggttttgcgtctgatttctataaggctggttctgattggtcttgtttagtggaagatgaagagactgtttcttcttctgtgaagaagatgaaacagtcgaacttgtttcagatttggggtttacaagagaattctcctgatacaacgaagaagatgaaacaaactgatttgtttcagagttggggtttacaaaagccttctcctttcacttcacctgcttcgaattcggcgaagaagacgacgagtgctcttggaaaaaggcgtagagactcttcgtttagcaatgactcgcctcgaccatgtccattttacaagaaacttccaggaacaccgttcactgtggatgcttttcgctatggttgtgttcaaggatgttctgcttatttccttactcattttcacgctgatcattacattggtctcactaaagcttggtctcatggtcctatttactgctcctctctcactagtcgtcttcttagacttagtctctctgttaatccctcgtctattcatccattggagctagacgttgagtacactattaatgggattaaagtcactttaattgaagctaatcattgccctggtgctgctcttattcactttcgtctcttagatggaacatgttatctgcataccggagatttcagggcttctaaacagatgcaaacgcatcctctcctctttaaccaacgagttcatgttctgtatttggatacaacatattgcaatccgagatacaaattcccttctaaagaagatgtgttaagttatgttgtgagaatcacaaaggatttcctcaggaagcaaccgaagactctgattgtggttggttcttacagcattggaaaagaatgtgtttatcttgctattgccaaagctcttggggttaagatatttgcaaatgcttcaagaagacgaatactgcaatcttttggttgggatgatatttcgaagaatctttctacagatgggaaagccacatgtcttcatgttctgcctatgtcgtcattgaaagttgaaagactcgatgaacacttgaagatttatagagaacagtatggagcagttttggcatttaggcccacaggttggacttactccgagaagataggtgaacaccttgatctgataaaaccaacttcaaggggaaaaatcaccatttatggggtgccatatagtgagcattcaagcttcacagagcttcgtgagtttgttcaattcttaaggcctgataagattattcctacggtgaacaatggaaatgctggaactcgcgagaaaatgcaatcatgtttcagagaatggctcagaccctgaggttcaactctaggttgatggatgatatattggtaagaaaatcaatggctttggccattctatttctaatattatttcctttttctgcagtttctgaatcccaatatgttgatcattgaagctttcaaaggatgtgtgatgcttctgtaagatcttggttattgcaattggtgaatacagtagattgaaatacttgaaggattcataatattctttgatctagatgttttattcttagttatttctcttatactaatctagtatatgtttctttt

SEQ ID NO: 82010 - DNA, 518 bp, Arabidopsis thaliana columbia
  unsure (1)..(518): unsure at all n locations
agcttaaaaataaatgtcaattaaagagtaacaacagtttataaaaacagaagaattattcaacaacaaaactaaaaccagagagggacaaaagcaaagcagaaaccagagagaaaaatccaaagctgcaataaccttaaacttgtctttaagaaagctggcgcctcttgtaacgcaccatcacattgcctttaactccaaccaccatagcgttccagtcaatctcagggaacggtgaaactagctcaagctcgaagttcctcaacaaatgactccatttggctttgatctgcaggtaagcaaacggctctccaaggcacccgtgccttccccctccgaatgcaatgtacgagaatgccctgggggtttngtcctcttntcttcnagggggngatntttctgggcgtanggtgtgggggnctttgaanngtgcggtaancggttggnaatgcaggggnngtttnaacgatnngccctttgggtaccgaagttttcctccgggtgtacggngnatatta

SEQ ID NO: 82011 - DNA, 389 bp, Arabidopsis thaliana columbia
acatataagacatttagatttaacttagatataataacttacaacaacgattactctgaatgcttataccagagaatatctatgtcttgcttaaaacaactcgaactcaagatgatcgcctatggctttacattcaagatacctattattactgcctccaggcgaatccgccgctgcctctggtccaccaccatactcatagaaatccggtagctcaggcgggattgcacaccggatcagagcccaattcaatccttcaaaaaaaggatgtcttttgatctctacagaacctttctctgacccgagcctgttctctgggtccttaacaagaagtcccctgatcaagtcttttgcctggaagcttacaagcgggctatcaggaaacttga

SEQ ID NO: 82012 - DNA, 556 bp, Arabidopsis thaliana columbia
gtggggccgtgctgcccacaacaatctccgacttcgtcttcctcatctatcatcgtcgtcgtcaaccttatttatctcttaatttatcattaaaaccaaaaaaccaaaaaaaaagccttagctttcgtttcttcaatcccagcaaaaaaaatggctcaggttcaagctccttcttcacattctcctcctcctcctgctgttgttaacgacggggctgcgacggcttctgctacccctggaatcggcgtcggcggcggtggagacggagtcactcacggtgctctttgttctctctatgtcggagatctggatttcaatgtcaccgattctcagctttatgactatttccaccgaggtgtgtcaggttgtatctgttcgtgtttgtcgtgatgctgctaccaatacttctcttggttatggttatgtcaactacagcaacaccgacgatgcggagaaggcaatgcagaagttgaactacagttatctcaatgggaagatttcgggttactactcttctcgggcctcttctgcccgtagaagtggggttgggaatttg

SEQ ID NO: 82013 - DNA, 399 bp, Arabidopsis thaliana columbia
atcaaaaacatattttttaattatcataagtacgacactcatcagtctcaggattatcattgcaatactcttcttgtccctagcatgactcgccgccgcactcagctcctccacctcgtcccaagccgctacacactccccgctcaccggatcatcagcgcatgtctccttagcttcttgtatactcttctccaccttctccgatatctctccttccgatgtagccttaaccacaaccatccgcttcatcgaaccgaatttccacgggtaattcaaccggaccggacctaatacacgagccacaggtcgaacgaccactcgtggagtcgcgacgttgaggccagctgcagctatggttgtcatcgtcggaggattttgatggaggagaaaagttttttg

SEQ ID NO: 82014 - DNA, 739 bp, Arabidopsis thaliana columbia
  unsure (1)..(739): unsure at all n locations
cctggnctggaattcctgggtcgacccacanagtccgnntccgtcgaaagaagaatgcctggaattagaggtccttcggaatacncgcaggaaccacntcgtcacccttctctcaaggtcaacnccaaggaacctttcaacnccgagcctccccgctcggccttagtctcatcttatntcacnnccgtcgacccacgcgtccgaacaaaccaaaacaccatggagcttaaaaatacaatctttctagtcatacttctatcaataaccattctccaatcttcgtcttgcaaccgccaaaccgggtcggaatcagaccaagtttaattgtggtcttcatgccaaaccacccaatatccatcactatgcgtgcacacactctctgcttacgccaccaagatccgccacaacaatgaccaagatctcgcccagacngctctcatcatcagcttggctcgagccaaatccgttacnatcttcgtcgccaaacnaaccaaagagacaccaaaatttaaacgtagggaatatcnagcaatcaaagattgcatccgaagtgcnaggcaattagcgtggaccggttagctcaatccggttaagggaacttgctccgagcctggtcatggctgtgggctagtnganggacttcatggttggaaaantggngtaccggttccaaaccaatnggggcnngttggccgggtttttnccggggcggngncnaacngggggcctannnatnggg

SEQ ID NO: 82015 - DNA, 655 bp, Arabidopsis thaliana columbia
  unsure (1)..(655): unsure at all n locations
caaaagntcaatagattacaaaaatgcagggagctctgtttatcaaaccaactattcttcttcctcttccttcttcagtttcttctccaaaactcacttttcttcttcctcacgnaaccaaagcttcaagactctcatctctcagatcaaacaactcatcatcatcatcatccttaacgtctgaccctaacaccgtcgnctataactcctccatcctttctgttttcccggctgaagcctcccgaagtaatcccggggatacgcttgttctgctgatatttaccctgaagtcaagctcgatacaaagcccgtctcacgtcccgtggctttcagagcccgttgacagaggaatacgaagggtataacagccccaaaacgtaagtgtttttcacattttttaaaaccctttccttagcttgatttttcatctctgagttttgtgatttttggacttggaaacagggttttccgtgaagaggcctgcgatgatcttggaggagaattctgtgaacctgactttcaaaaagatgccaactagaagaaacaagattttatgtcatgtgaatatgtgtttgtatttctacaagtctttgtaaccactccttaatttatgatatctagcttcactacttaatcaagattgatgttatggttt

SEQ ID NO: 82016 - DNA, 512 bp, Arabidopsis thaliana columbia
  unsure (1)..(512): unsure at all n locations
aaacctatcttcttaaccaaaagatcaatagattacaaaaatgcagggagctctgtttatcaaaccaactattcttcttcctcttccttcttcagtttcttctccaaaactcacttttcttcttcctcacgcaaccaaagcttcaagactctcatctctcagatcaaacaactcatcatcatcatcatccttaacgtctgaccctaacaccgtcgactataactcctccatcctttctgtttttccagctgaagcatgcgaagtaatcagtggatacgcttgtnctgctgatatttaccctgaagtcaaagctcgatacaaaggcccgtcttaacgtcccgtgggctttcagaggcccggttgacaggggatacggggggggtnttaacaggccccaaaaacggggttttccggttaagngggccctccggtggtntttggggggggggggttttgttccancctggtttttaaaaaggggncncntttgggggnanaaaggntttttttng

SEQ ID NO: 82017 - DNA, 678 bp, Arabidopsis thaliana columbia
  unsure (1)..(678): unsure at all n locations
ccnnnnnnnnnnnnnnnnnnnnnnnnnnnnnnnnnnnnnnnnnnnnnnnnnnnnnnnnnnnnnnnnnnnngacccacgcgtccgcggacgcgtgggctcgaaagaagaatgcctggaattagaggtccttcggaatactcgcaggaaccacctcgtcacccttctctcaaggtcaacgccaaggaacctttcaacgccgagcctccccgctcggccttagtctcatcttatgtcactcccgtcgaccttttctacaagcgaaatcatggtcccatccccattgttgatcaccttcaaagctactccgtcacccttactggattgatccagaacccgagaaagctctttatcaaagacatcaggtccctcccaaagtacaatgttactgctactcttcagtgtgccggtaacagaaggactgccatgagcaaagttaggaatgttagaggtgttggatgggatgtttctgcctattgggcaacgctgtctggggtggggcgaaactggccgatgttcttaagctttttggggggtcccaagaggttttctgcttnttcccaatttagggggccaggaaatnttnaggttggttaagngttnatnccctnttaggngggaaattgggggccctntaaaggggnaaattnctttaaggtaagnncaaantctttnaggggg

SEQ ID NO: 82018 - DNA, 895 bp, Arabidopsis thaliana columbia
  unsure (1)..(895): unsure at all n locations
ggantcantcggnttncnccgggnttttagacttttctttcccgggaccncntgggttcgccccaacggngnnccggcttcgggtatcctccctccctcgaaaggaggaatgcttgggaattagaggccctttgggaatactcgcgggaaccaccttggtcaccctttctctcaaggtcaacgccanggaaccttncaacgccgagcctccccgctcggcnttngtctcatcttatgtcactcccgtcgacccacgcgtccgccaaaagatcaatagattacaaaaatgcagggagctctgtttatcaaaccaactattcttcttcctcttccttcttcagtttcttctccaaaactcacttttcttcttcctcacgcaaccaaagcttcaagactctcatctctcagatcaaacaactcatcatcatcatcatccttaacgtctgaccctaacaccgtcgactataacncctccatcctttctgtttttccagctgaagcatgcgaagtaatcagtggatacgcttgttctgctgatatttaccctgaagtcaagctcgatacaaagcccgtctcacgtcccgtggcttcagagcccggttgacaggngaatacggaggagtataacaggccccaaaancggttttncgtgaagggggtccgtgcagaggcctgcaatgatcttggagggaagaatttttgtgaacctgccctttcaaaaaaatgcccactttggaggaacaagggttttatgtcatgggaaaatgggtttgtatttctacaagtctttgtaacccccccttaatttatgatatcaagcttccctccttaatcaagattgatgttatggattagacccgagttcccaaagttaaaaccccctctgttccaagtt

SEQ ID NO: 82019 - DNA, 772 bp, Arabidopsis thaliana columbia
  unsure (1)..(772): unsure at all n locations
gccagctctaattcgactcactatagggaaagctggcacgcctgcaggtacctggtccgcaattcacgggtcgagccacgcgttcgcccacgcgtccgcccacgcgttcgcccacgcgttcgcccacgcgtacgtacggctgcgagaagactacagatgggggaaccaaaaaatatctaaaatcactaaacctatcttcttaccaaaagatcaatagatttccggggtgcagggagctctgtttatcaaaccaactattctccttcctcttccttcttcagtttcttctccaaaactcacttttcttcttcctcacgcaaccaaagcttcaagactctcatctctcagatcaaacaactcatcatcatcatcatccttaacgtctgaccctaacaccggcgactataactcctaccatcctttctgtttttccagctgaagcatgcgaagtaatccaggggatacgcttgttctggctgatatttaccctgaagtcaagctcgatacaaagggccggtctcacggggcccgtggcttcagaggccccgttgacaggaggattacggaggggtgtttaataacaggcgccccaaaacgggttttccgtgaagagggcctgcagtgtgatttttgggggggattttttgaacccgncttttaaaagggtgccccttgggggnacaagtttttttggcaaggganatnggttnnatttcnaaggtttnaaccccccnnattttgnattngggcccnnntnaaaaaaaagggggtc

SEQ ID NO: 82020 - DNA, 627 bp, Arabidopsis thaliana columbia
aaaaattaaataaaatattttttttaatatatgaaacatatgttgtgtattgtactattcatattcatttatcacattacaatcatcaaccaaaccaaaaacacaaacataacaacaagggacaagaagaacaaacattgatccatacctaaagtttcataattcgaacatcaaaaacatattttttaattatcataagtacgacactcatcagtctcaggattatcattgcaatactcttccaaaggatcggagccaccagctttcttcttgtccctagcatgactcgccgccgcactcagctcctccacctcgtcccaagccgctacacactccccgctcaccggatcatcagcgcatgtctccttagcttcttgtatactcttctccaccttctccgatatctctccttccgatgtagccttaaccacaaccatccgcttcatcgaaccgaatttccacgggtaattcaaccggaccggacctaatacacgagccacaggtcgaacgaccactcgtggagtcgcgacgttgaggccagctgcagctatggttgtcatcgtcggaggattttgatggaggagaaaagttttttggtgtgacctgatagctcactgagtgagctcg

SEQ ID NO: 82021 - DNA, 943 bp, Arabidopsis thaliana columbia
  unsure (1)..(943): unsure at all n locations
actnnnnnnnnnnnnnnnnnnnnncaaacactatataancngcatccacttatacacctnctntncattttngagaaccacgcgtccgaaacaaaccaaaacaccatggagcttaaaaatacaatctttctagtcatacttctatcaataaccattctccaatcttcatctgcaaccccaaaccggtcggaatcagaccagtttattgtgtcttcatgccaaaccacccaatatccatcactatgcgtgcacacactctctgcttacgccaccaagatccgccacaacaatgaccaagatctcgcccagactgctctcatcatcagcttggctcgagccaaatccgttactatcttcgtcgccaaactaaccaaagagacaccaaaatttaaacgtagggaatatctagcaatcaaagattgcatcgaagtgctaggcaatagcgtggaccggttagctcaatcggttaaggaacttgctcgagctggtcatgctgtggctagtgaggacttcatgtggaaaatgagtaacgttcaaacatgggtcagtgccgctttgacggacgagacaacgtgtctagatggattctcagaacgagccatgggaggcaaagtcaaaagactgattcggtataaggtggttcacgtggctcaagtcactagcaatgctcttgctttggttaatcagtttgcagagaagcgaagtgtgaagtttccttaaatggacttaaatgtgaaaattttggcttgtaagtgagagtttgaatctaaacttcaattagttgtgtaaattgttatctttttttttcgtcggtcggaaagtaaactcaagattgtgtaacaatctttgttgtgtcctgtataatattgtattttaagataatgatatatagtcaccttttttgggcgcgaattcgatatcaagcttatcgatacaatcgacc

SEQ ID NO: 82022 - DNA, 883 bp, Arabidopsis thaliana columbia
  unsure (1)..(883): unsure at all n locations
gctgggttcagctgctcgggacaaaatctgtcctgttcctacccatgttggtattgcaattcatcatgttctgaccagaaagtgactgttgttgttgcccggagcctcccattgctgtttgccatctgttgccaatatttgatgaatcatttgttgttccaatgtttggttaccgctactacaggaaggtggctgttggtggtattgctgggttgagccattattactggagcttggcatttgccgctgaggagatagattggagaacncgaccgtgggtcgacccacgcgtccgctaaacctatatcttcttaaccaaaagatcaatagattacaaaaatgcagggagctctgtttatcaaaccaactattcttcttcctcttccttcttcagtttcttctccaaaactcacttttcttcttcctcacgcaaccaaagcttcaagactctcatctctcagatcaaacaactcatcatcatcatcatccttaacgtctgaccctaacaccgtcgactataacncctccatcctttctgtttttccagctgaagcatgcgaagtaatcagtggatacgctttgtccctggctgatattttacccctgaaggtcaaagctcggttacaaaggcccgtttcacggtgcccgggggctttcagaggccccgttgacagaggaattacgggggggttttaacaggncccaaaacgggttttccgtgaagaggcctgcgatgatcttggaggngattctgtgaacctgnctttcaaaagntgccaactngaggacaaggttttntggcatgtgatatggggttgattntcaagcntttgnacncgcctaattttgggatctggttactntaaccaggttgggtttggtt

SEQ ID NO: 82023 - DNA, 840 bp, Arabidopsis thaliana columbia
  unsure (1)..(840): unsure at all n locations
atnnnnnnnnnnnnnnnnnnnnnnnnnnnnnnncactcctgcagtaccggtcctgaattcccgggtcgacccacgcgtccgctaaaatcactaaacctatcttcttaaccaaaagatcaatagattacaaaaatgcagggagctctgtttatcaaaccaactattcttcttcctcttccttcttcagtttcttctccaaaactcacttttcttcttcctcacgcaaccaaagcttcaagactctcatctctcagatcaaacaactcatcatcatcatcatccttaacgtctgaccctaacaccgtcgactataactcctccatcctttctgtttttccagctgaagcatgcgaagtaatcagtggatacgcttgttctgctgatatttaccctgaagtcaagctcgatacaaagcccgtctcacgtcccgtggcttcagagcccgttgacagagaatacgaagagtataacagccccaaaacggttttccgtgaagaggcctgcgatgatcttggaggagaattctgtgaacctgactttcaaaaagatgccaactagaagaaacaagattttatgtcatgtgaatatgtgtttgtatttctacaagtctttgtaaccactccttaatttatgatatctagcttcactacttaatcaagattgatggtatggattaaaaaaaaaaaaaaaaggcccgccggtctagaagaatcaaggttacgttcgcgtgcctggcacgtcataactcttttatttggggcaccctaaattcaaattcactgggcccggggttttacaaacctcgtggactggggaaaaaccccgggggttaccccaact

SEQ ID NO: 82024 - DNA, 666 bp, Arabidopsis thaliana columbia
  unsure (1)..(666): unsure at all n locations
nnnnnnnnnnnnnnnnnnnnnnnnnnnnnnnnnnnnnnnnnnnnnnnnnnnnnnnnnnnnnnnnnnncttttttttttttttttttacggaaaaacacacggttttaagtatacaaatttttcacagttgacaacatgtaccaaagcccacacgctttcgattagtacaaaagaagaatatttcactaaaacgtttctactttcttgtacaagtaatttaatttgccaaataccaatcgctagccgctttagccgaaatttattccccatttcaaactaaaccgggttttgtaccatcgtaggcggggggtcactctcagggtagcttcctcggcaagttatagggcctttttcacaaacttagtcgcagggtcaccgcaacgggaacccaataccctaaagagggggtttgggtttgccgggctccccgggcccaaagtgggcggggacggaaacttgcctctgggagaaccatgattctacagacacaatgatttaaaccgttgaataaaaaatttgttcttcggctcagcggggaaggtaatcttgcagtcacaaaaactttttaggcaatccaaaagaatccgtcttcgtttgccggaaaagatatgctagaaacttggaagccccttctaaggcttcaaagtttttatttggggagacacc

SEQ ID NO: 82025 - DNA, 756 bp, Arabidopsis thaliana columbia
  unsure (1)..(756): unsure at all n locations
aggccccggttggatgactttctnnnnnnnnnnnnnnnnnnnnnnnnnnnnnnnnnnnnnnnnnnnnnnnnnnnnnnnnnnnnnnnnnnnnnnctttttttttttttttttttttgaaaaacaaaaggtattaaatatacaaatttataacagttgacaacatgtaacaaagcccacaagctttcgattagtacaaaagaagaatatttcactaaaacgtttctactttcttgtacaagtaatttaatttgccaaataccaatcgctagccgctttaaccaaaatatattccacacttcaaactaaaccgggttttgttccaatgtagtaagtaggtcactctcaggttagcttcctcggcaagttataggtctttttcagaaacttagtcgcaggttcatcgtaacggtaacacaatactcttaaaagtgtgtttggttctgtcggactccacggaccagaagttgggggtaacggaagctttcctttgtcagaaccatgattcttcacacacactggtttaaaccggttaattaaagaaatttgtattcgtggcgcagcaacggaaagtatacttcttggacagtctcgggaaaacctttttctaaataaaatccaaaaagggcaatcccttgcttcccgtttttgaccccggaaaaaggaattccggatttaagaaaaaaccttggaaaagaactctttttttatttatctggggaagacacaggaaaatcctcttggagaaatttgggtaga

SEQ ID NO: 82026 - DNA, 689 bp, Arabidopsis thaliana columbia
  unsure (1)..(689): unsure at all n locations
gtttctnnngaactctattagagctatgacgtcgcatgcacgcgtacgtaagcttggatcctctagagcggccgcccttttttttttttttttttttaagaacaaaccggtctttggatacaaatttttaaaagctaaaccggatatgagattaccggttcttacaaagtcaattacacaccacgaaggttcttgcaagacatcatcatttgagatccccatgaaaaaagaaggaaggagaagaaagtacagatgtggttacacaagtagatatatgatatctcttataatggttgtacaaacacaggtcacaagttagacgcaacaaacaatgtcactgcaccaatcccagtcagtcagacccgggttttttgggatacctttagtttaccaagacaggctattttggtttctcaacttcaaagcaatctgaaaacaatattagacaatctcccagtgcttctctcgacatgtcgacaaactcggtaacaccatcctcgaacataaccgagtgctttcttgaatactcatcaaaatgtctaacgaggccaaaacacctattactcgtggggcgagataacctgatcaccacaccaatgcaagtacgcgaacatgtatccctttgactaagattgttccatgattttcctgcatctatgtgtctatttacaagtccattttgatgcacc

SEQ ID NO: 82027 - DNA, 823 bp, Arabidopsis thaliana columbia
catgacgtcgcatgcacgcgtacgtaagcttggatcctctagagcggccgcccttttttttttttttttttggatacaaatttttaaaagctaaaccggatatgagattaccggttcttacaaagtcaattacacaccacgaaggttcttgcaagacatcatcatttgagatccccatgaaaaaagaaggaaggagaagaaagtacagatgtggttacacaagtagatatatgatatctcttataatggttgtacaaacacaggtcacaagttagacgcaacaaacaatgtcactgcaccaatcccagtcagtcagacccgggttttttgggatacctttagtttaccaagacaggttattttggtttctcaacttcaaagcaatctgaaaacaatattagacaatctcccagtcttctctcgacatgtcgacaaactcggtaacaccatcctcgaacatcaccgagtgctttcttgaatactcatcaaaatgtctaacgaggccaaaacacctatcactcgtggggcgagataacctgatcaccacaccaatgcaattacgcgaacatgtatccctttgactaagattgttccatgattttcctgcatctatgtgtctatttacaagtccattttgatgcacccttgggcagtgtcttgggccaaattaatgtgcccacttagattaaaaaagctttcaatcccgagggcttatctttaaggttttgcttagggttttttaacaccccaaagcttttcctttctttgcaaacccttacaagccccccaccaaattgggccaggtctttggaatcttggcacc

SEQ ID NO: 82028 - DNA, 590 bp, Arabidopsis thaliana columbia
  unsure (1)..(590): unsure at all n locations
ggctaatgaaagtgaagaattactgatacatgataaattaaatccgatgggaacctctcaacagaaccaaaatacaactttgataaacttcaacaaagtttttattaaagtgggggaaaaacatgaactaaaaaccagtaataaaagaaaagatcattctgcagcattcatcagcatatttagtacatgctgtacttgtcgttcgtcgcttcgggtcgaatgctcttgtagatggacatggcaattggaagaatggctgtgagagcgatttgcaactgatccgagctgctggttctgactgtgatctgtccgctcatcttgttgttaagtcctgcacgaagcgcaatctttgagttccttccaacagagacttgagattggagattggctcccaagggctaaatccgcctctccactttaccagagacagccccaaagaagattggtcctgtccaattgggnatcagcttccctaagcctgacctcgaggtccgaccanaggccgatcnccngngatcgattgnccangntgccaaagacacctttccaggnaattggcccggttaccangggggttnccanatgaagca

SEQ ID NO: 82029 - DNA, 701 bp, Arabidopsis thaliana columbia
  unsure (1)..(701): unsure at all n locations
cggcatactaatacgactcactttagggaaagcacgtacgcctgcaggtaccggtccggaattcccgggtcgacccacgcgtccggcgtaaggttagcaatccttctttcattgccgcacagtcgaagtttgaggaactaacttcatctactggttcaaacaaagcaatgacgctgtcttctaaagatgatgttttgggtgaagaaggcaaaacagatatagattcaccagacactacaaacacactaaaggatcactctttggaagatgttactccagctgagcttagtggatccgagtgtggcaccgaactctctgtaacttcttctcttgacacacttgagaagaagtcagacgctgagggtgcagagcccagggtagaagctaagcttttagaggatgacacttttaaaacagaccaagcagagttgatagaaattgatgttaaagacgcaacgtcaatgggtactgtagaggaccctaaggagaaagttgagaatgctaaggacgaagttgaaatttcagcgacacatcatgaaccgggtcattagttcacccgattccaaaaagagacgggctgaagatgaatcagggcctcaagcttacgncttatctnagggagctttaactccgatgacaatcactgnatctnagggcancaccggcaaggcnanggatcttntttnagtgtaagcnaagna

SEQ ID NO: 82030 - DNA, 898 bp, Arabidopsis thaliana columbia
  unsure (1)..(898): unsure at all n locations
ctcacagaaaaacctagaaagctctagagagtaagagagagagagatggaaggtaaagaaggggatgttagagtcggagctagcgggtttccggagaggcaaccgatcggaacttcggctcagagtgacaaggactacaaagagccaccacctgcgccgttgttcgagcccggcgagctagcttcatggtccttctggagagctgggattgctgagtttatagctacgtttttgttcctgtacatcactgttttgactgttacgggtgtgaagaggtcaccgaacatgtgtgcttccgtcggaatccaatggtaccgcttgggctttcggtggtatgatcttcgctctcgtctactgcaccgctggtatctccggtggacacatcaacccaagcggttacgttcggtttgttcttagcttggaagctttcgctcacacgagctgtgtactacatagtgatgcagtgcttaggagctatctgtggagctggtgtggtcaaggggttccagccaaagcaataccaggctttgggaggtggagccaacaccatagctcatggctacaccaaaggaagtggtcttggagctgagattattggaacctttgtccttgtttacaccgtcttctctgccactgatgccaagagaaacgctcgtnactctcatgttcctattctagcaccggtccctatcggattcgctgtgttcttggttcaatttagnaaccatcccattacttgaacttgaataanccagaagaaggnttngggctnaatcatcttaacaaggcaacggttngntgncccttgggcttttgggtngccatcattgnntgacttntnntttnccaggatgcanaggncaccntaagccaaaggaagtgtagntttaaactgntt

SEQ ID NO: 82031 - DNA, 802 bp, Arabidopsis thaliana columbia
  unsure (1)..(802): unsure at all n locations
cgggntcccgggaaaaaccccngntcgtcggtttctagcaaggannttccncccgnnctnntacacangngatccantccttggggctatctgtgnnnctggtttggccaagggntccagcaaaggaattccaggctttgggagntggancaaccaccatagctcatggctccaccaaaaggaagtggtcttggagctgagattattgggaacctttggcccttggtttacaccgtcttctctgcccacttgatgccaagagaaaccgctcgggcctctcatgttcctattctagccccggctccctatcggattcgctgggttcttggttcacttagcacccatcccccttactggaactgggatccacccagccagaagtctgggagctccaatcttcttcaacaaggacaacgcttgggatgccccctgggtcttttgggttggaccattcattggtgcggcacttgctgctctctcccacgttatagtcatcagagcccatcccattcaagtccagaaagctaaagctgattgaggttctatttaaattctggcttttgttcttagtttgctttctcttcgtgaatctataacctgtgtgtaacgggtgtatctgttgtcctcttcttgccctaatggagacttatgtaaaacaaagacatgccccagaaacatctgttatctttcttctccattttatcagaggatttctataaaaaaaaaaaaaaaaaagggcggccgctatagaggatccaagcttacgtacgcgtgcatgggacgtcatagtaagtctagaggt

SEQ ID NO: 82032 - DNA, 528 bp, Arabidopsis thaliana columbia
cccacgcgtccgaacattaacaaaattttatgttattgtcaatttgtcatcatcgtctttattttttatttctcaactttctttgcattacatcttccaactatataattaaccactctactttctcaaatcccacactcagagaagaagaagaagaaaaaaaacagagctttacaatttctctctacagagatcgaagatatggaaggcaaggaagaagacgttagagttggagctaacgagttcccggagagacaaccaatcggaacatcagctcagagtgacaaggactacaaggaaccaccaccagctccgtttttcgaacctggtgagctttcttcatggtctttttggacagctgggatcgctgagttcagcgctacttttgctctttctctacaactccgtcttgatcggttcaggtatatccaagagttcatttggtgttattgggctaagtctcggggtttcgctactctcgtatgggtttggggcctattttactatccttcctggaactgagtggtc

SEQ ID NO: 82033 - DNA, 654 bp, Arabidopsis thaliana columbia
  unsure (1)..(654): unsure at all n locations
atacgactcactttagggaaagctcgtacgcctgcaggtaccggtccggaattcccgggtcgacccacgcgtccgcccacgcgtccgacggctgcgagacgacagaagggtacggctgcgagaaacgacagaagggggcaacacataacccactcacagaaaaacctanaaagatttctctctacagagatcgagagagagagatggaaggcaaggaagaagacgtttgagtcggagctaacaagttcccggagaggcaaccgatcggaacttcggctcagagtgacaaggactacaaggagccaccacctgcgccgttgttcgagcccggcgagcttgcttcatggtccttctggagagctgggatcgctgagttcatcgctacgtttctcgtcctctacatcactgtcttgactgttatgggtgtgaagagggtcaccggacatgtgtgcttcccggcggaatccaagggaatcgcttgggctttcggtggtnatgatatttngccttagtcttactttacccctgggatntcccgggtgggcaaaataaaccccnacgggtancttttgggccttttttttngccccggaaggttgtnggttnnctannggctntttacnancaaaaggtgnttncagtnctttggggggc

SEQ ID NO: 82034 - DNA, 557 bp, Arabidopsis thaliana columbia
ctatacgacttacttagggaaagctggtacgcctgcaggtaccggtccggaattcccgggtcgacccacgcgtccgcactcacagaaaaacctataaagctctatagagaaagagaggagagagagagatggttggtaaagaagaagatgttagagtcggagctaacaagtttccggagaggcagccgatcggaacttcggctcagagtgacaaggactacaaagagccaccacctgcgccgttgttcgagcccggcgagctagcttcatggtccttctggagagctgggattgctgagtttatagctacggtttttgttcctggacatcactgttttgactgttatgggttgtgaagaggtcaccgaacatgtgtgcttccgtcggaatccaaggtatcgcttgggctttccgggggtattgatcttccgctctcggctactgcaccgctggtatctccgggtgagttcacatcgtctctcagcggtctacaacgattcgaatatagatcctgggttagctaggtagcgaaattcaaatttagcatgtttaggatt

SEQ ID NO: 82035 - DNA, 512 bp, Arabidopsis thaliana columbia
ccagctacatacgactcacgttagggaaagctcgtacgcctgcaggtaccggtccggaattcccgggtcgacccacgcgtccgcccacgcgtccgagaaaaaaaacagagctttacaatttctctctacagagatcgaagatatggaaggcaaggaagaagacgttagagttggagctaacaagttcccggagagacaaccaatcggaacatcagctcagagtgacaaggactacaaggaaccaccaccagctccgtttttcgaacctggtgagctttcttcatggtctttttggagagctgggatcgctgagttcatcgctacttttctctttctctacatcactgtcttgactgttatgggagtgaaaaggtcaccgaacatgtgtgcttccgtcggaatccaaggaatcgcttgggctttcggtggtatgatatttgccttagtctactgtaccgctggtatctccggtggacacatcaacccagcggttacttttggtctgttcttag

SEQ ID NO: 82036 - DNA, 768 bp, Arabidopsis thaliana columbia
acgcctgcaggtaccggtccggaattcccggtttcgacccacgcgtccgtacggctgcgagaagacgcagaaaggtacgggtgcgagaagacgacagaagggggtgtctccgttattaggtatttgtgagaatcttcttgattgagtttatacttcagcgagattgtttatctctaagctccaggagaagctaatttgaattgcttctgggtttttagtacgtagctctctataagatatataacaaatggttcgctccaaggctcctgcaaagaagcagcaaaagaaaggaattgatttcaagaaaattaagagaaagctcgggagaaaattaccaccaccaaagaatgcaaccaacactgagattaaatccaaagcaattatacttcctgagcaaagtgtggctgctgaaaagagtggcttagctacaagtaagaaagaccttcctgggatggaccactgggtgttttgggttggccccttcattggagctgcgcttgctgctctttaccatgtggttgtcatcagagccatccccttcaagtccagaagctaagtaaaaacaagacatcaagtcctctggtttctggccttgtccttagttgcttctatagttctattgttgatctactacatgtatgtgtgcaatgtgtttatctatgtgccctcttaatgcaatatttgtaaacaaggaagaagttccaaaggagaattatttgcaaattatgatgtttaacatgtttattacagctccaagatgtttaacat

SEQ ID NO: 82037 - DNA, 634 bp, Arabidopsis thaliana columbia
tgatttcaagaaaattaagagaaagctcgggagaaaattaccaccaccaaagaatgcaaccaacactgagattaaatccaaagcaattatacttcctgagcaaagtgtggctgctgaaaagagtggcttagctacaagtaagaaaggcttgactttgaaggaacttctgccacagacttctcatcacaatgccaaagttcgcaaagatgcattgtatggtatcaaagaccttttcaagaatcatccagaagagctacagtcacataaatatgctatcatacagaaactcagggaacgcattagtgatgatgataagctagtgagagatgttttttatcaactatttgatattgacatctttcctctttgtaaagaggataaccagggccttatggtgtcacttttgatgccatacatatttagcgctatggctcattcagctattgatgttcgtttgatggctttcaaatttttccaccttgttgtggagttctacccgcctaccttttccttggatgctgaaaagattctcgaaaactacaaggatattatacagaaaaatcatttttatgtggaagataaaagcaagctaaaggtggctctttctgggttgtcacattgcctctcggttttg

SEQ ID NO: 82038 - DNA, 557 bp, Arabidopsis thaliana columbia
ccagctccatacgactcacattagggaaagctcgtacgcctgcaggtaccggtccggaattcccgggtcgacccacgcgtccggaagaaaatgggatctataacggtagctccgggaaccaccgtcttattctccagtcggcggctagatctttgcggtcgtcgccatgagaatctatccgtcgtttcgtcctcacaaccgtctctgatgccaaagcagagatggctttatattcccgagacgaggttgaaaagagaggttttaaagctcgatgtcgtcggaagagctgctgattccacgagctcttctccatcagtagcttccggtgatagaaccttaattcctgatgatgaattcactttagccaagatttcatttggtgttattgggctaggtctcggggtttcgctactctcgtatggttttggggcctattttactatccttcctggaactgagtggtctgctataatgctaacatatggatttcccctttctattatcggaatggctcttaagtacgcagaactcaaaccagttccttgcttgagctattc

SEQ ID NO: 82039 - DNA, 1254 bp, Arabidopsis thaliana columbia
gcgggtcgacgcaagcgtctatactgatgcgagacaacagaaggggacactcgagaagaagaagaagaaaaaaaacagagctttacaatttctctctacagagatcgaagatatggaaggcaaggaagaagacgttagagttggagctaacaagttcccggagagacaaccaatcggaacatcagctcagagtgacaaggactacaaggaaccaccaccagctccgtttttcgaacctggtgagctttcttcatggtctttttggagagctgggatcgctgagttcatcgctacttttctctttctctacatcactgtcttgactgttatgggagtgaaaaggtcaccgaacatgtgtgcttccgtcggaatccaaggaatcgcttgggctttcggtggtatgatatttgccttagtctactgtaccgctggtatctccggtggacacatcaacccagcggttacttttggtctgttcttagcccggaagctgtcgcttactagagctctgtactacatagtgatgcagtgcttgggagctatctgtggtgctggagtggttaaagggttccagcctaagcaataccaggctctaggaggaggagctaacactgtggcacatggttacaccaagggaagtggtcttggtagctgagatcattggcacattcgttcttgtatacacagtcttctcagcaactgacgccaagagaaatgctcgtgactctcatgtccctattcttgcaccactcccaatcgggtttgcggttttcttggttcacttggcaaccatcccaatcactggcacaggcatcaacccagctagaagccttggagctgcaatcatctacaacaaagaccattcctgggatgaccactgggtgttttgggttggccccttcattggagctgcacttgctgctctttaccatgtggttgtcatcagagccatccccttcaagtccagaagctaagtaaaaacaagacatcaagtcctctggtttctggccttgtccttagttgcttctatagttctattgttgatctactacatgtatgtgtgcaatgtgtttatctatgtgccctcttaatgcaatatttgtaaacaaggaagaagtcaaaggagaactatttcgaaattatgatgtttaacatgtttattagaaaaaaaaaaaaaaaaaaaaaacaaagggcgaccgctctagaggatccaagcttacgtacgcgtgcgtgcgacgtcatagctcttgctat

SEQ ID NO: 82040 - DNA, 1309 bp, Arabidopsis thaliana columbia
  unsure (1)..(1309): unsure at all n locations
ctctatgnnnnnnnnnnnnnnnnnnnnnnnnnnnnnnnnaaaaagccaccactctctctgcttctctgcaacacataacccactcacagaaaaaaacctagaaagctctagagagaaagagagagagagatggaaggtaaagaagaagatgttagagtcggagctaacaagtttccggagaggcaaccgatcggaacttcggctcagagtgacaaggactacaaagagccaccacctgcgccgttgttcgagcccggcgagctagcttcatggtccttctggagagctgggattgctgagtttatagctacgtttttgttcctgtacatcactgttttgactgttatgggtgtgaagaggtcaccgaacatgtgtgcttccgtcggaatccaaggtatcgcttgggctttcggtggtatgatcttcgctctcgtctactgcaccgctggtatctccggtggacacatcaacccagcggttacgttcggtttgttcttagctaggaagctttcgctcacacgagctgtgtactacatagtgatgcagtgcttaggagctatctgtggagctggtgtggtcaaggggttccagccaaagcaataccaggctttgggaggtggagccaacaccatagctcatggctacaccaaaggaagtggtcttggagctgagattattggaacctttgtccttgtttacaccgtcttctctgccactgatgccaagagaaacgctcgtgactctcatgttcctattctagcaccgctccctatcggattcgctgtgttcttggttcacttagcaaccatccccattactggaactggaatcaacccagcaagaagtcttggagctgcaatcatcttcaacaaggacaacgcttgggatgaccactgggtcttttgggttggaccattcattggtgctgcacttgctgctctctaccacgttatagtcatcagagccatcccattcaagtccagaagctaaagctgattgagttctatttaaaatctggcttttgttcttagtttgctttcttttgtgaatctactacctgtgtgtaacgtgtgtatctgttgtcctcttctttgcctaatggagacttatgtaaaacaaagacatgccccagaaacatctgttatctttcttctccattttatcagaggatttctataattggcccattctgggtttttctccnnnnnnnnnnnnnnnnnnnnnnnnnnnnnnnnnnnnnnnnnnnnnnnnnnnnnnnnnnnnnnnnnnnnnnnnnnnnnnnnnnnnnnnnnnnnnnnnnnnnnnnnnn

SEQ ID NO: 82041 - DNA, 727 bp, Arabidopsis thaliana columbia
  unsure (1)..(727): unsure at all n locations
tcgttnnnnnnnnnnnnnnnnnnnnnnnnnnnnnnnnnnnnnnnnnnnnnnnnnnnnnnnnnnnnnnnnnnnctttttttttttttttttttaatatttgtttagacccgttagtaatcgggtttaaatgggtacccgttcaaacattacaaatagcccgtttagacccgtgggcctaaggtccattttaacaacactacatataacaaacaaccgacccaagtcagaactatgggcagctttattataaaacatggcagtgtgtgtgtagaaatcagattctcatggcttgtatgtcaaatctctcgtcatagagtctccaatgtccatacctctccgtctgcgccacatcccctgaccttggcacatacacatctgggcttctttacctccttaagccatttaaagccttgacacgttgcttgtaatgtcacggcttggacaaattgcacacacccaaacaagtccaagtactctagcttgggacaaccctcacatatcgaagcaagacccttgacagataatctagagaactgaatctccaaatgctctagattgatcatatgtttcccaatcgcgtcagcttctgtgtctccgtcttgaggacaagcgtctaagtattctgtaggaacagagccaatgtgccgagaagaccaatccataagattacgtttcaagancctcagattaggacagtttctaccaatcatnacaagagtgtcgtgag

SEQ ID NO: 82042 - DNA, 393 bp, Arabidopsis thaliana columbia
cgcacacctttcttaaatccctccagccatggcggcagttactcgatttctctcccaaccttcatcaatccgcggaaccctaaatcagtaccaattgaatcagacttcactctcaagaatcccatttttgtctctcaagtcaacattgaagccacttaaacgcctctccgtcaaagccgccgtttcccaaaactccaccaaaaccctcacgaaagaatctgcttcctctttcgaccactgtttcaagaaatcatcagatgggtttctctattgcgaaggaaccaaggttcaagatatcatggaaacagtcgagaaacgacccttttacttatatagcaaacctcagatcacgagaaaccttgaggcttataaagaggctttggaaggagtgag

SEQ ID NO: 82043 - DNA, 436 bp, Arabidopsis thaliana columbia
atcaacacaaactgaagaaccaaacctcacaacgctccagaagcatccctgtcttgtctcttaaatccacattgaagccacttaaacgcctctccgtgaaagccgccgtcgtttctcaaaactcgtccaaaaccgtgacgaagttcgatcactgtttcaagaaatcatcagatgggtttctctattgtgaaggaactaaagttgaggatatcatggagtcagtggagagaagacccttttacttatatagcaaacctcagatcactagaaacctcgaggcttataaagaagcattggaaggagtgagctctgtgattggttacgctatcaaagctaataacaatcttaaaattttggagcatttgagaagtttaggctgtggtgctgtgctcgttagtggaaatgagcttagacttgctcttcgtgctggtttcga

SEQ ID NO: 82044 - DNA, 540 bp, Arabidopsis thaliana columbia
  unsure (1)..(540): unsure at all n locations
cagctannnnnnnnnnnnnnnnnnnnnnnnnnnnnnnnnnnnnnnnnnnnnnnnnnnnnnnnnnnnnnnnnnnccacgcgtccgatcaaatgtttgaattcttccatctctcataattcttaagtggtcgtggtgtgtactatctcctaagctctctgtttttttttttgtttgttcattggctatatttcaggtcttcttcttcttcttcaagaatgagctaatactcacagaagaagaagatttttctttggatttttcactactgaggcattgttgtgaaattggatggtagtagcattggaatggcagaacaaaagagtagtaacggaggaggaggaggaggagatgttgttatcaatgttccagttgaggaagcatcaaggcgttccaaggaaatggcttcaccagagtctgagaaaggagttccctttagtaaaagcccttctcctgaaatctctaagcttgttggtaggcctaacaagcctcctagagctccaaatcagaacaatgtgggtctaactcagaggaaatcttttg

SEQ ID NO: 82045 - DNA, 606 bp, Arabidopsis thaliana columbia
  unsure (1)..(606): unsure at all n locations
ccnccatccccgtcgnagctganctntaggnggccccccttttttttttttttttttgngatccngtttactctggcacttctgccaattgtttagggcgtacaaacatttaaagttgtccgggtaacaacaggtttcacgttttacaagatacacgagtatacagaaacacaaaggcaatctctgttctttgggatttgaatgcctcacaataaagaactatacatcagagtgtgatactgtctggggagtgagaacgtacatatgacagtcgtgtgcgtcaacttgagcttcaaaggagccagaagtattctctgttacatctttgtgctgccacaaatctcttactgaaacgctaatggtagattcaagaccgatcatatcccatgatgctgtaatagttgctggctcagagcaacggttccagagagcaactaccatacggtcaccagataaaggtcctgaccacacctgctgacaatcattttctccattggcttgaattttccttccttgaacaccatgggcttggtaacagggtaatcccctattacccnaatccccaagttcagnggcaggtctaaccaccatcagggggctcacagt

SEQ ID NO: 82046 - DNA, 363 bp, Arabidopsis thaliana columbia
aaaaaagaccacgagaaatttttccgtcgggtcctttagtattgggtcttagcccattaagagttttacatttaaataactttgtcccttctgattttcacgttaggcttggaccaacggatctttaactaacaatggaactacaaatcggagaatgtggcgggggcgaattcaatttcaagtcgaacggccggcggtgaagtacgccaaaggtccgacgaaggcggcgtttatataagtcgccggttccgcgtgactataatcggctctttgatctggatacccatcgttttgattcggaccttctacgattgctccggtgagaatgttagggttagggttttgagtgtaaaacgattggaa

SEQ ID NO: 82047 - DNA, 608 bp, Arabidopsis thaliana columbia
  unsure (1)..(608): unsure at all n locations
acgactcactattgggaaagctggtccgcctgcaggtaccggtccggaattcccgggtcgacccacgcgtccgctttttcaatcaacacacattcaaatttggcgacatgaagttctgcgcgatattcgtgttattcatcgttcttgcaatcaacggctacgattgcaagatagtccaatttatatttggagattcattgtctgatgtaggcaacaataagaatctacctaggagtttagcgacggcgaatctgcccttttacggtattgattttggcaatggtttgcctaatggaaggttcactaatggccgcactgtttcagacattataggtgataaaattggattgccaagaccagtagccttcttggatccatcaatgaatgaagatgtaatacttgaaaatggagtgaactatgcttcaggaggtggtggaatcttgaacgaaactggtggttatttcatccaaagattttccgctgtggaagcaaatagaatttttccaagggccacaagatgtagttttggcaaagtaggggaaaagagcggcaagtctttcaagtcncgangncgccgtttggagaatncctcttacaccttttnancc

SEQ ID NO: 82048 - DNA, 647 bp, Arabidopsis thaliana columbia
cgcgttggcatatctaaacttaaacctaaattagaaaaattaaatggctaactacatgggctccgtggagaagtcgctgcttctgcgtctccatcttgtcttcttgattcagcagcatcgccattctgcctctatcgtcaagtttcttcctccttttgaagggtctcttccctttgagctcgaaaccgcgtatattggtatcggtgaggaagaggaagtgcaactgttctactacttcatcaagtctgagaggaatccaaaagaagaccctcttcttctctggctaagtggaggacctggctgctcttccatctctggccttctttttgagaatgggcctctggctatgaagctcgatgtttacaatggaactctcccttctttggtccctactacatattcttggacaaaggcctcgagcatgatattcttggatcagcccgttggagctggcttctcctactcaagaactcaactttttaataaacctagtgattcaggagaagccaaacggattcatgagtttctgcaaaagtggctaggcaagcatcaagaggtttcctccaaccctttctatgtcgccggtgattcttattccggtatggttgttccagctaccgttcaagaaatctccaaaggaaattatc

SEQ ID NO: 82049 - DNA, 937 bp, Arabidopsis thaliana columbia
acgactcactattgggaaagctggtcacgcctgcaggtaccggtccggaattcccgggtcgacccacgcgtccgtcttgtttacgttcaggacaacgtcgggagaggctggggttacgggatctctgccgcgactatggtggttgcagccattgttttactctgcggaacgaaacggtaccgtttcaagaaacctaaaggaagcccttttacaacaatatggagggttggtttcttggcttggaagaaaagaaaggagagttaccctgcgcatccaagtcttttgaacggttatgacaacaccacggttccacacacagagatgcttaagtgtttagacaaagccgcaatttccaagaacgagagctctcctagctcgaaggacttcgaagagaaggatccgtggatcgtttcgactgttacacaagtcgaagaagtgaaactcgtgatgaaattggtaccgatttgggcaacgaacattcttttctggacgatttactcccaaatgacgactttcacggtcgaacaagcgacgtttatggaccgaaaactcggatctttcactgttcctgcaggctcttactctgctttcctcatactcacaattctcctcttcacttcccttaacgagagagtctttgttcctttaacaagaaggctcacaaaaaagcctcaaggaatcacaagcctacagagaatcggagtagggctagtattctcaatggctgcaatggctgtagccgcggttatagagaacgctagacgcgaggcagcggttaacaacgataagaaaataagcgcgttttggttggttccacaatatttcttagtcggtgcgggtgaggcctttgcttacgttggacagcttgagttctttataagagaagcaccagagaggatgaaatcgatgagcaccggattgtttctaagcacgatat

SEQ ID NO: 82050 - DNA, 400 bp, Arabidopsis thaliana columbia
gggacttgtagacatatttaggagttggcggtggtggagacttgtaaacataagtcggggtaggaggaggcggggacttgtagacgtattttggagttggcggtggtggagacttgtaaacataagtcggggtaggaggaggcggagacttgtagacataggttggagtaggaggaggcggcgacttgtagacgtatgttggagttggcggtggtggggacttgtagacataggttggagccggcggtggcggtgacttgtagtcgtatgccggagccggtggtggtggagacttgtagtagtaaggaggatggtaaggagccggtttgtggcattctccgtaaggcttctttggtgcataagcaaaggacttagcatatagcacaacctcgtactttgt

SEQ ID NO: 82051 - DNA, 641 bp, Arabidopsis thaliana columbia
ttttttaggatcataaatcgaaatatctttctcttgttgtaaataagatgatacagacaataatgagaatacagaaccaaacaaagcaaaacagagcatcctctgtttcgccgcaccaaataacagaaggaccagaataaaacacattcagttatcatgttgaagcaagccagtatctttgaatttctcctccactaagccatcaatacgagcagccatctcaggagtcaaataattagcccaatctccaacctttcctttcctaaaatacgcgctattcgcataaacagcaggacgatcctctctttctttatcacctttgttagcttcaagattcttcaacgtctcaaagctacaaagcttcaccactttctcagcaacaccattctcctcttcctcatcagtgaatccataacccatgaactcagccaatctcttcacaaaaggcaaaggattggccctcatggtctcgtacctaaggaacaaaatcctatctggattctcttggtaagctttccaataacccaaaacatgatccagataaggaccatacacagataaacctttacaaaacatatcaaagctgtcctcaagactcgctaattgaccttcttgagacttctccttgtgtaagaaagtcc

SEQ ID NO: 82052 - DNA, 1305 bp, Arabidopsis thaliana columbia
ctaatacgactttattagggaaagctggtacgcctgcaggtaccggtccggaattcccgggtcgacccacgcgtccgctctttttttttttttggtgtcacgaaaacgaacgaatcagtgtcggctcttgggttccgaacaaaaacaacattgtacgtcggatccaaaaaacgcgcgttatataaacgcttaatttctccaggattcttcttctgcttccgccattgctcgaaaatcgcgtcttctgacaatgtgctgaaactgagtcatcgtccgagttagcaaagtgaaacttcgaagtttctcttacactaatctcaggtttgggattttgtaagaaaccgcgtttacaaaatgttcaagttgaagcaatggttgatttatttggtgtgttcgttagtaataatgaacacagaaggactgtttgtcaatattacatttgttcgaaacgcagtcgctaaaggggccgttggtttagatggaagtccaccagcttatcatttggatagaggttctggaactggaatcatagttggttgatacagcttgagggaggaggatggtgcaataatgtaacaaatggcgtgagtcggatgcatactcgattaggttcatccacgcgtccggtggagaaccttgctttctcagctattcttagcaataagaaacaatataatcctgatttttacaattggaatagagtgaaagttagatactgtgacggggcatcattcacaggagatgtagaagcagtgaaccctgctactaatcttcacttcagaggtgctcgagtttggttagccgttatgcaagagctgctagctaaaggcatgataaacgccgagaatgctgttttgtctggctgttctgctggcgggttagcttcgctgatgcattgtgatagtttccgtgctctattaccgatgggaaccaaagtaaaatgtctttcagatgctggtttttttctcaacacaagagacgtctcaggagttcaatacattaaaacatacttcgaagatgttgttactcttcatggatcagcaaagaacttgccgaggtcatgcacatcaagattaactcctgcaatgtgtttctttccgcaatatgtggctcgccagattagaactcctctgttcattcttaatgccgcttatgactcttggcagataaagaacattttggctccgcgagcagctgatccttacggaaaatggcaaagttgtcaactagacatcaagaattgccatccaagtcagatcaaagttatgcaagatttcaggctagagttcttgagtgcagtgatag

SEQ ID NO: 82053 - DNA, 434 bp, Arabidopsis thaliana columbia
  unsure (1)..(434): unsure at all n locations
ttttnttgaaaataaattttgttcccctttccacgctgggtagaggtctgtaaataaaaggggttgattgcgaatagaaaataaatgcattgtagaatcaaaagataggaaatatttcatcttctggcaacactaataataacacataaagaaacctccatccgaaaggacctttagagttctaagaagatcgaaccattcatttttggtcaacatttggagattgcaccggataatcgcagttaatatgactcaccggtgttatttcttttgcgtgtcagacgatttcttttgctgtcagtgacacgtcctccggcgaccttaacaatgggttcgtctttggactttataagctttaaagccggatgaaccttgaggtctcccattactagcttttgtccgatatccaattggcttagatctacttctatata

SEQ ID NO: 82054 - DNA, 425 bp, Arabidopsis thaliana columbia
gaacttcaatttaattccattaaatatatcatgaaacctcttgattaattacaaaatccattaacaaaaaaataattaatataaatttgattgagattaatgaaaattgtttcagattctttgagagacagtaaagagaaaaatacttcattgacatgttgtggtttaatctcaatcctcgtcctcgtcatggttaactttcgccgaacttaatgttctacacggttgtgacggcagttgctgcggtggtggcgcgtcaacaacaaacgctgacgacatctccatttggcaaactctaacagctccgattaatctctccggcagctcctcttccgtttgtgcctctgctaagaaccccatatcgattgtcacgctcgtcacgtaccctaaagccagccgtagaatcgccgttgcgatcgctgagc

SEQ ID NO: 82055 - DNA, 469 bp, Arabidopsis thaliana columbia
aggacgcgtgaggtgttggtataccaattcttacgtcaacgtcaatgaagaaacgactccatatttacgaataaaaaactgtagtagatctgtactctccctttttctttgtagagaagaagagaactgtgaaagaagatgaagattgaggaggatctaggtttcatcaacatactcaaacgagcaacaaagcttctatgtggtaacatcaatcttgttctcttcctcttcctttgctctctccccctcttttgtttcttgatcttcttcgagctttcactccaaaccactgtctcactcgcttctcaatacctcgttcgacaactcactaattgggattactactacgttcctcaagatgcttccgtcttggagaatctgattccattgcttatccagacatttctactctacttgttcccgtacggcctcatagacctcttcaacaaccacacaatagtctctgcat

SEQ ID NO: 82056 - DNA, 518 bp, Arabidopsis thaliana columbia
aaccacgcgtccgcccacgcgtccgcccacgcgtccgcccacgcgtccggtgaaagaagatgaagattgaggaggatctaggtttcatcaacatactcaaacgagcaacaaagcttctatgtggtaacatcaatcttgttctcttcctcttcctttgctctctccccctcttttgtttcttgatcttcttcgagctttcactccaaaccactgtctcactcgcttctcaatacctcgttcgacaactcactaattgggattactactacgttcctcaagatgcttccgtcttggagaatctgattccattgcttatccagacatttctactctacttgttcccgtacggcctcatagacctcttcaccaccaccacaatagtctctgcatcttggactgttcacacgtcgggggagggaaccgttaaggttcggtcaattggttcggggaacggtagggttttgtcaaaacagacttgaaggttgtctgatcacctctctgtacgtccttctcttgtc

SEQ ID NO: 82057 - DNA, 373 bp, Arabidopsis thaliana columbia
gttattaaaaattcacgatgcatttacatatatcctttgcggggaatagatatttatacaaacagaaaagaaatgaaagaatttgaaatatgcttagacaacaataatttcaaagatctaaagaatatatatttttccgttcacatcttggtcttcacggaatttattccataatcaagttttaacgacctagatgaatatatattcttcaagatcaataccaagataactattctttcgggggcattggcttccaattatgaactttatggatcggaccttgttttaacctaaaatatattccatcttctctagctggccattcatatgggcctccttgagccacacccggtttattttcatacacatcaaa

SEQ ID NO: 82058 - DNA, 991 bp, Arabidopsis thaliana columbia
  unsure (1)..(991): unsure at all n locations
gttnnnnnnnnnnnnnnnnnnnnnnnnnnnnnnnnnnnnnnnnnnnnnnnnnnnnnnnnnnnaaagactccttttttttttttttatatttgtccgtctcaaaacatgtttcatatcccaataagaaaacaacaaacacaaaacgagtaaaatggtaaaattaagaagagtgtactgtttcaaaagtaaagaacaccaacaagtgtaaagttttgcataaaatctaaaaactgacgacgacacctaattatttacatctgacaacgagagaccagtaaacagtaaatcctcgcacaaaatcctaaaggaggatgcacgagtgtggacgttatcatggatggatcttacttgcccccaagagatgggaactgagcagcatctccaattgccggtgcagcttcattacggtaaccaccagattcgccactagaaacacctccacggccacgaccaccacgtccacggccaaccacggcctcctcggtagtagttcccaccctctgctggcttcagaaacccattgatgctcaaagccttcttagccttcccttctttggaacctttgggtttggccttatcagaacccaagcttgatgaagatttcatcatttagactccttgtttgacagttgttgcattgattcaaacaactttcgtatcaactttcctctcagaggtggttaatgattgaagtgccttttttcttcttcctcaaagtattttctcatactcatcaagagtnatttccttatcctcaggctctttctcctcaacaacagtattctccttgttagcatcagcagctacatcatcaacagctggcttctctccaanatccttctcagtctcaacaccagctactgcttcagtctcagcagctatctcttcccctggagttccccaattcccacgaccagatccgtcacgcttgaagtcactccctctgccagttccactacgacgctcaaaggcccttcgaggacgctcccct

SEQ ID NO: 82059 - DNA, 622 bp, Arabidopsis thaliana columbia
  unsure (1)..(622): unsure at all n locations
ttctttttttttttttttttttagaaaaccatatctgcttacacaaaaaaaattcaccttggagtgaataagtgtcgactactacaagcatactgcatcagagtgcggattaaacaagaaccacactcattcataatcatacaagactctagacagatcaacacagtaaagtggcaataaacagcagcatcaacaacaacaaaaacaacgtgcatccacgatttttagcaaccagatgtttggctctgagagaaattacggaaaaggagacacagcgaaacggattatatacacttgacactaatcaccgaactctgcatgctgcaggtccacccggtgaataatttggattggggtgaccgggcaaattgcacctggcccaacgttctttgcaaacctccggtgcattctgtaatccagggaccctcccattgcaaatgcantccactgtagtagttccccagggnttnggggtcaccagtncactggaagggtccaagctttaaccanatggtcatcaatgggctagtttngggtttngggnangaatantcgccagggggcgggattnttnaanccggggggccccngtttngggggcccccgggggggccactttttc

SEQ ID NO: 82060 - DNA, 506 bp, Arabidopsis thaliana columbia
  unsure (1)..(506): unsure at all n locations
attcaaatcaattgtattaagttttccctatacaacacaatatttctcaaatcgaagtgacacaataatttcacgtatagactttattcccaacaaataattcacgatcaaccatacattggataaaagagaatagacgtctaaatttaacaacctactctcagtatagtgatgtgtaatatctttccccatgtgtttaagcaaagcttctttaatgctattccaagatggagcaaggccagtgacgtttccacattgcaatctcttctttacaatttagctttcggattcctccatagaacccgtcttcttcgttaccttcctctttatgatctctcatgatcatcgttcttctccaccttggatccgacggtgtactggttgaattccacactaccggctcactaaganggcatggcatgggtanggtcccatcacagggtccaaggggggacaggccatacaccatccanngggganccttgncctnccacggggtcgggggg

SEQ ID NO: 82061 - DNA, 301 bp, Arabidopsis thaliana columbia
ataaaagcccaatagtttaatatactaaaagatacaaaacttcttctttttgtttttctttaagaaaacaacagatgatatacatacactcacactcacactcacattcacacacaaaagagacccccaaaaatcgagccttaatctcgtcaactaccactacttaactcacatgaccaatctggtctcacatctctaaatagatggatctccatcgagatcatagaccactactggaacatatgattagtattgacggacctctggctttcagtttcttgatccagaaatgttctgatct

SEQ ID NO: 82062 - DNA, 1721 bp, Arabidopsis thaliana columbia
tctaaaacccattcaccgtctctgtttcgttcgccgtgattcatagtcgtctcgtctcaccgtcaccatcaccgtcttcttcttccattgacaggatcttgtttagattctgcaatggctttcaggcaaactttatctataaggtccaggcttttcgctcgtcgtaaccaaccagtttatcatattatccctcgtgagagtgatcatgaaagggattcattctgtcaagaaacatctcagagaagttaccatagctttcttcaccaaagatccgttaacaattctgatttctccaaagtttctggaggaagcttacatttgcctcttgctcctacgtctggttttgctttctatcgttatatgtcaagtgcacctggtgttggttcagagaagattggtgtgatgtctgacattgcagaagtcataaccgactcaacattgcaagatgtgccagctcaggctgctgctgctgtcagtgaagttacacttgcagctgctgactctttcttccctatcgcggcccttcagcagtgcattgatatggtgcatacattcacaggctttgagtggtgggcatccattgttgtagcaaccattttgatccgatcatcaacagttcctctcttgatcaaacaaatgaaagacacaaccaagttagcgctgatgaggccacggttggagtccatccgggaggaaatgcaaaacaagggaatggactcggttacgatggcagaaggtcaaaaaaagatgaagaatttgtttaaagaatatggtgtcactccattcaccccaatgaaagggatgtttattcagggaccgctgttcatctgctttttccttgctattcgaaatatggcagagaaggtaccttcattccaaacaggaggtgcattatggtttaccgatctaacaactcccgacagcttatacatcttgccggttataacaggattgacattcttgataaccgttgagtgtaatgcacaagaaggcatggaagggaatccgatggctggcactgtaaaaactgtttgtcgggtttttgctctcctcacagtcccgatgacaatgagttttccacaggccatattttgttactggatcacatccaacctgttctctctcatgtatggacttgtgataaagcgtcctcaagtgaagaagatgttacgcatacctgatctgcctccacctcctccaggtcaacaaccttcatttgacctgttttcagctctcaagaaaatgaaagccatgacacaggaccatacacagaaccagatagaaccaccttcgccagtaaacccgaggctttcctcaacatcgctgagtcctgttagtaagaggctcaaggctttggagagccaagtaaagggaaggaagaagaatagcagcaagaagaagtgatttaaaacggtgcatactatttttgttaagagggccaaacgaaaaaaataataaagcttttgagtcgaaagtgaacacagaattttctcactgatgaaactactctgtgagctaaaaagctggaggcagctattgtaagtttgttttgaccaattacagaatagaagattgtttttatagaaaaaaaatggataacatatacttttttatcttgttaagtaacagaacttgaacaacattggatcaaaaaaaaaaaaaaaaaagggcggccgctctagaggatccaagcttacgtacgcgtgcatgcgacgtcatag

SEQ ID NO: 82063 - DNA, 464 bp, Arabidopsis thaliana columbia
tttgtttgaatctttcgctctcttttttaatcattctaatattagcaagttgtagcattgtagtagtagtaagatataaattttgttttctataaatattttcaggaatttgacgtccataatgcattttgaggttcaccacaacgttcgtgaacgtcggccatcctctcagccgaccgacagattccgctgcatttccagtcgaacgacgccgcgcaaacatgtcccatcattgcttttagttcacaatcttgagaagtactgcaacaaagtcttttttcatcaacatgttctacattcaatccgatgaaccaagatcccaacgaaacatcttcattcgcatacttatgcagtaaatcctggtttatcagtatgtaagtagctagatctttagatatagcataaaactgtccagtggcgtggcggaaatacttgttcccgacttctccaacttccaatactct

SEQ ID NO: 82064 - DNA, 566 bp, Arabidopsis thaliana columbia
caccaaataactagtatataattgttaaaaaataattatcatatacaacatagaaaaaagtaatacaactgtagtgtaatatgtttttggtgatttaacccaattatcttctaaagaatacaaattgatggctaaatatatacgtgtaataattaaaggatggccaaaattgagaagaagaacaatgaaagtgagatagagagagaataagcagcagaagtcgtcgacgtgtttggtctttgagatggtatgtttgtcgcctctgggtcaaacgaagaagctggcggtctagccgaggaggaggaacggttcgatggaagcgtccgagccgatgtctcaccggtgtaacaatcagattctttccaccccagaatcagtttctcacgatcaaagacaatgcgatagccagtcatgaagttctgtccaatgatgctaatgtcttctatcttcataatggctaaacagtagacatctgtgtccttcatggggattactactaacgggtgataaacgggatacgagctcccgcctttcattgtcagattcacagctggatactggaagct

SEQ ID NO: 82065 - DNA, 735 bp, Arabidopsis thaliana columbia
ctatgacgtcgcatgcacgcgtacgtaagcttggatcctctagagcggccgccctttttttttttttttttttttttttaagaagaagcaatgtgattgaattataacaatttcaagaattacaaatgtaaaagaaatgattttaagcttatccgaagcttaaaaatcctgtttaggttcaaaagaagacataaaacatttcttttgaacctgaaaaataaaattccccaaatgaatgtaataatctgatgatgctttctgcaccaatccaagttttcttaagaatctaaaagaaagccaccaatgctttctcttgattcttttacctaaaatgcaatttgaaacaacaacaaaaaaaaagaaagaatgtgatgatggtttcttcttcttcttcctcctcctaagtactaattaagattctagaatcctaaaaacgatggatgaatgaatgtttctagaacgttgttggagagatttgatgatgagttagtgtacaatgaagtttgtcccttcttctggctattgtagtagttctgaatcaaccctctatcttgatggttgatgttgtcattgcttcattaccatctttgctgctagcttcagtttctgctttctttggtgctggaggtataactactgtttttgttgctgttgttgcacctgaggtggaagttgaagaggacggtgatgatgatgaaggtaaagatagacccacagaggttgggagggagagga

SEQ ID NO: 82066 - DNA, 433 bp, Arabidopsis thaliana columbia
  unsure (1)..(433): unsure at all n locations
anaaataaggagatcttttaatactactttagattaacagaggttatccccaaaggtcctaatcagatatcagattgtaaccaacacaattctcactcttagcaattatacaaagaaaggaaatagctttgcatacacatagtgacataactgtgcctgaagctacctatcaggccttggggcatacgtttccttcacaaacccaaccatctttggactcgtcgccaccaactttcacagcctcatcgccgttttcttttgtgtcctcgtttaaagcacacttggcgtgaagatcaaagtcgcattcgtcgcaatggtaagaccatattgtcccttcttcctcacacttatcgcatgtgtaaacctgnacacgagttagttctagctnatgttcttcatggagaacatgtttcaccttcttaggccaatcttt

SEQ ID NO: 82067 - DNA, 488 bp, Arabidopsis thaliana columbia
atagacattataaaggacttttttcaagataatattgttatatttggttcatttttttcttcctacatcaatcaaccaaatgtaggaacatttgccatgtacaaaatgagaccattacaaacaatgtaccaaccaactgttgtgtgaccaaaaatcttaccctgagagtctgattttgttgtttgcttgagtttctttgatgactttagaagcaaaacctggatcacaattaaactccagcctcttcaatcgcagcagacattgaagctgatgcttcttctagcgttcgcctcttttgaactgcgttaaagggcctcgatgatgtctccttcttatccaaatcatcggtggcatcccttccaattccccattctaatccagcactcacctttttcacgttttctttaacccgtttaagagaatcaagaacaccgacatggacagttttacccttccggaccaccctgatgccacaatctttgacaaat

SEQ ID NO: 82068 - DNA, 396 bp, Arabidopsis thaliana columbia
aaaacgccaaagtttattaattagtggattgatcaaaacaagaatcactgagaaaacatatataaaagaaaatcaaaattttcttaaaccacatatctcaaagaacataagcaaacatacaaggtaacaataacacatactcttaaaaatactcaaagaaaaagttgtggaagacataatcagatgttgatggtggcatcccacagccggagaactccatttcggccaccgctacatatccgtttcctctcgagatctgacgcaacacatctcaccacggcggctgttctttgtggtactctataaagttgccagcctgagactttggttccggcgttagaaggacgatggaaaagagacattgagttatctgctgctccaatgcctaaccaattt

SEQ ID NO: 82069 - DNA, 340 bp, Arabidopsis thaliana columbia
aaccgaagaaaatcatataatccttttcttttttcggagaggtttacaagtttggaatatagaaacataagaatttgttaaatgactggcaaataataataatgatccaataaacaacaacccacaagaaaaggcccacatcttttgacactaaattaaaaaaagggggtttaattaagcagatccaaactcagagagccacttctcgggtttctcgatatcagaggaagacacactcggttgcactttcctaagggcctcttcgaaatcacacattgccactggatcatttgatatatcgtctttcgacatgttctttatctcatctctcggtttcccc

SEQ ID NO: 82070 - DNA, 658 bp, Arabidopsis thaliana columbia
gaagaatcaacgatgacgacggcgacgaacaagcatgttatattgaaagactacgtgagtgggtgccctacggaatccaatttcgatttcactaccaccaccgacgaacttagggttccggaagccaatagaagggtacggagtgtctacagtgatagaatctgcgcattcagattacaaaaaaggagacctactctggggtataggtgcatgggaggagtacagtgtgatcactccaatgcctcacgcgcatttcaagatgcgacatacttgatttccattatcttattacactagacttttaagtattccttttattactacctattcttatatttttgatatttatttatatctcttatatttatttttatcttgatttttctgtaatttaatttttttttattttatttttcaattattttttttctacttttctatattttattttatttcatttttttctaatattttataattttatatttttctttttattatatattttatatattatatttctatttatattattatatttttaaattttttatattattctattttattttttaattttaatttattcaatttcttaaatttcattacttttataaccatttaatttttttcatactttaataatattttttataat

SEQ ID NO: 82071 - DNA, 1330 bp, Arabidopsis thaliana columbia
gccactataaaaagcaggcgcgtcctcgaagaagaagaagaagaagtaacggaatatattgaactcatcagaagctgaatcggagaagaagaattaacgatgacggcgacgaacaagcaggtggtattgaaagactacgtgagtggtttccctaaggaatccgatttcaatttcaaaaccaccaccgtcgaacttagggttccggaaggttctaaatcggttcttgtgaagaatctctacctgtcatgcgatccttatatgcggtctcgcatggggaaacctgatccctcctctgctcttgctcaagcttacgctcccggcaagccaatctatgggtatggagtgtctagagtgatagaatctgggcatccagattacaagaaaggtgatttactctggggaatagttggatgggaggagtatagtgttattacaccaatggctcacatgcatttcaagatccaacatacagatgttccattatcctactatactggacttctcggtatgcctggtatgactgcctatgctgggttttatgaagtttgttctccaaagaaaggagagacagtttatgtgtcagctgcatctggtgcggttggtcagcttgtgggacaatttgctaagatgatgggctgttatgttgttggaagcgctggaagtaaagaaaaggttgatctcctgaagaccaagtttgggtttgatgatgcatttaactacaaggaagaatctgaccttagtgctgccctcaaaaggtgttttcccaagggcatcgacatgtactttgagaacgtaggaggcaaaatgctagatgcagtgctcttaaacatgaacccacacgggcgtatcgctgtctgtggaatgatctcacagtacaatcttgaaaatcaagaaggtgtacacaacctatccaatatcatctacaaacgaatacgcattcaaggctttgtagtggctgatttctacgacaaatacccaaagttcttggagttggtgcttccgcgcattaaagaagggaagataacgtatgtggaagatgtagctgatgggctcgagaaagctcctgaagctcttgtggggcttttccatggtaagaacgttgggaaacaagttgttgttattgctcgtgagtgaagaatacttatttgggagtaatgtcttattgcgcgtgagtgaagaatacttatttgggagaaatgttatatttatccaacaagagttggtatgtctgttgaacccaaccgtgagtttttggtttatgaataatactagtaactataatataaaaaaaaaaaaataaaaaaaaaaaaaaaaaaaaagggcggccgct

SEQ ID NO: 82072 - DNA, 1232 bp, Arabidopsis thaliana columbia
acaacaaatataaaaccagcggccgccagtgtgagtaatttaggcagtaacaaatttggtgaagtcacgagaatcaacgatgacggcgacgaacaagcaagtcatattgaaagactacgtgagtggtttccctacggaatccgatttcgatttcactaccaccaccgtcgaacttagggttccggaaggtactaactctgttctagtgaagaatctctacttgtcatgcgatccttacatgagaattcgcatggggaaacctgatccttccactgctgctcttgctcaagcttacactcccggccagccaatccaagggtatggagtgtctagaataatagaatctggacatccagattacaagaaaggagacttactctggggtatagttgcatgggaggagtacagtgttatcactccaatgactcacgcgcatttcaagatccaacatactgatgttccattatcttattacactggacttttaggtatgcctggtatgactgcctatgctgggttttatgaagtttgttctccaaaggaaggagagacagtttatgtgtcagctgcatctggtgctgttggtcagcttgtgggacaacttgctaagatgatgggctgttatgttgttggaagcgctggaagtaaagagaaggttgatcttctgaagaccaagtttgggtttgatgatgcatttaactacaaggaagaatctgaccttactgctgccctaaaaaggtgtttccctaatggcattgacatatactttgagaatgtaggaggcaaaatgctagatgcagtgcttgtgaacatgaacatgcacgggcgtatcgctgtctgtggaatgatctcacagtacaatcttgagaaccaggaaggtgtacacaacctatccaacataatctacaaaagaatccgcattcaaggctttgtagtgtctgatttctacgacaaatactcaaagttcttggagtttgtgcttccccacattagagaagggaagataacgtacgtggaagatgtagctgatgggcttgagaaagctcccgaagctcttgtgggactcttccatggtaagaatgttgggaaacaagttgttgttgttgctcgtgagtgaaactatgtttgatacttgtactttatccaattagagtttgtgtgggtggtttttgttttatggataaagataatgtttgttatggtttcgaatcaaatagatacaaaattcggtt

SEQ ID NO: 82073 - DNA, 349 bp, Arabidopsis thaliana columbia
ggatgcccaatcaatatatatataaatttattagatacatcaatgaaaaccaaaaaaaaatcccagaaaattaaaatcttatcaaatatgatccaacgataagtaaaacggcctgttccaaaactgaaccgaagccaatctaaaaccatgccacataaatttgcactcttgggatattccaaaaacttaaaaaaaagaggggtaaatttgatatttggggaaaaaatttacaagcagtcatataattatataataaatcccgttttaaacccatcaaataaaaattaaaaaaaccacttcatcgaactttaccttatgggtataaaatatatatttttgggttaagaag

SEQ ID NO: 82074 - DNA, 1126 bp, Arabidopsis thaliana columbia
  unsure (1)..(1126): unsure at all n locations
taagccatgaagaaccaaagcagcttctccattgttgctcttcttctcattttcttttcctcatctgtctttgctcagctgcagacaaatttttaccggaagtcatgtcctaacgtggaaactattgtccgcaatgccgtccgccaaaagttccagcagacttttgttacggctccggccaccctccgccttttcttccatgattgcttcgtccgtggatgtgatgcttcgatattgctggcatcaccatctgagaaggatcaccctgatgacaagtcactagccggagacgggtttgatacggtggcaaaggcaaagcaggcccttgatagggaccccaactgccgtaacaaagtctcatgcgctgacattttggctctcgccactcgtgacgtcgtcgttttgaccggaggaccgaactatccggtagagctagggaggagagacggcagactatcgacagtggctagcgttcaacacagtctaccccagcctagtttcaaattggaccaacttaacactatgttcgctcgtcacggtctatcccaaaccgatatgattgcactctcaggagcacatactataggattcgcacattgtggcaagttttcgaaaagaatttacaattttagtcctaaacgtccaattgatccgactttgaatattcgttacgccttacaattgagacaaatgtgccccattcgggtcgacttgaggatcgcaattaacatggatcctacttctccaaatacatttgacaatgcttatttcaaaaacctccaaaaagggatgggtttgttcacgtcagatcaagttttgttctctgatgaacgatctagatcaactgtcaattcatttgcttctagtgaagcaacttttagacaagcttttatttcggctataacgaagttgggtcgggttggagttaaaaccggtaacgcgggtgagataagacgggattgttcacgtgttaattagtgatttgttgtttcttttatttaagaaattttgcttcttcttttttaagatttgttttctgaattgtatggttctttgacgaaaaaaaaagaaaaaaagaagaattgtttcacccnnnnnnnnnnnnnnnnnnnnnnnnnnnnnnnnn

SEQ ID NO: 82075 - DNA, 496 bp, Arabidopsis thaliana columbia
ctcactatagggaaagctgccacgcctgcaggtaccggtccggaattcccgggtcgacccacgcgtccggaggagaaagaaagatagaagatcatggggaagatagaggagtacaagccggtaatggcgatgacgatgattcaactatgttatgcaggagtgactctctttgcaagagctactttggttcatggattaagccctcgggtttttatcctctataggcaagcctttgccaccattttcatcttcccatttctttacttatccaggagaaaatcaaagatagctatatcttctttggatctaaagagcttttctttaatattcttggtctcgcttataggcattacaatcaatcaaaatctatatcttgaaggtctttacttaacttcatcatcaatgggaagtgcagtgggtaacatcatccctgcaatcaccttcctcatctcatttctcgccggatacgagaaactgaatctccgagatataagag

SEQ ID NO: 82076 - DNA, 519 bp, Arabidopsis thaliana columbia
  unsure (1)..(519): unsure at all n locations
atgannnnnnnnnnnnnnnnnnnnnnnnnnnnnnnnnnnnnnnnnnnnnnnnnnnnnnnnnnnnncccacgcgtccgcattaatccaacctcacgaagaaaaccatttgttttcttagagagagccaagaatattaaaagagatatagagaaaagatttgctttaataatgccaacgtcgatacagtttcagagatcctccaccgccgcagaagcagccaacgccaccgtaagaaactatccccaccaccatcagaaacaggttcaaaaagtgagcctcacgcgcgggatggctgatgtgccggagcacgtggagctttcccacacgcacgtggttggtccttctcagtgcttctccgtcgtggtacaagacgtggaggctccggtttccacagtctggtcgatcctaagccgcttcgaacaccctcaagcgtacaaacacttcgtgaaaagctgccacgtggttatcggagacggtccagaggttgggtcggtgagagaggtcagagtcgtatctggt

SEQ ID NO: 82077 - DNA, 800 bp, Arabidopsis thaliana columbia
  unsure (1)..(800): unsure at all n locations
nnnnntgcttcgccggcctaatacgacttctatagggaacgctggtacgcctgcaggtaccggtccggaattcccgggtcgacccacgcgtccggtgaagagattgtgagaacaaagacgacaaatgggcgattgagcgaagaagaaaccttcgttctctctcggaaatgacgaagaggaagaaggaagtaatagatgtcgattgctccgagaagaaagattttgtgattgattggtcttccgctatggataaggaagacgaagttcccgagctcgagattgttaataccaccaaacctactcctccgccaccgccaacgtttttctccgacgatcaaaccgattctccgaaactcctaaccgatcgtgacctcgacgagcagctagagcgtaaaaaagcgatcctgacattaggtccgggcttacccgacaagggtgagaaaattcgactcaaaatcgctgatctcgaagaggagaagcagcgtagagttttagaaggctcgaaaatggaggtggacagaagttctaaggtcgtgtcttcgactagctcaggttcagatgttttaccgcaaggaaatgcagtttcaaaagatacctctagagggaatgcagactcaaaagacacctctagacaagggaatgcagattcataagaagtctcacggtccaacattttcttgcggttttcagtataccaaaagtatggagcatccgttttttttttttggtcaacacggattctcagtcaaaggaagcctttggtaaagaactagaagatctgggatgtgaaaggaggaaca

SEQ ID NO: 82078 - DNA, 1261 bp, Arabidopsis thaliana columbia
cacacatattttcccaaaatttggatcaaaaagttttccgatagaagaaattaaatatgatgagactcctctttgtattcttcatggttcacaccatctttatcccatgcttttcctttgatacaccggggaaggatcttcctttaaccctagattattacaagtctacttgtccaaccgtatttgacgtcatcaagaaagaaatggaatgcatagtgaaggaagatcctagaaatgcagccataattattcgtcttcacttccacgactgctttgtccaaggatgtgatggatcggtgttgctagacgagacagaaactctacagggagagaagaaagcttctcccaacataaattcattgaaaggatacaaaattgtcgacagaatcaagaacataatcgaatccgaatgtcctggagttgtttcatgcgctgatcttctcacaattggtgctagagatgctacaatcctggtgggtgggccttactgggatgttcctgtgggaagaaaagattcaaaaaccgcaagctacgagcttgccacaacaaaccttccaactccagaagagggtttaatcagcatcattgctaagttctattctcaaggtctctcggttgaagacatggtcgctcttataggagcgcacacgatcggaaaagcacaatgtcgcaacttccgatcccgaatttatggagattttcaagtgacgtcagccctaaatccagtttcggagacgtacttggcaagtcttcgagagatttgtccggcgagtagcggagaaggtgatagtaacgtgacggcgatagacaatgtgacgccgaatctcttcgataactcgatctaccacacactgctaagaggagaagggttactgaattcggaccaggagatgtacacgagcttgttcgggatacaaacgcggcgaatcgtgagcaagtatgcggaggatccagtggctttcttcgagcaattctcgaagtcgatggtaaagatggggaacattttgaactctgaaagcttggctgatggagaagttagaagaaattgcagatttgtgaatacatgattcatcaacaacgaaactaaaaaatggagaaaataatctatttctgatctttatttatataagaaagaaaaaatttaatttgatgttaaaaaaaaaaaaatttatttctacatttttaaaactatagggttcttgaatgtttaaaaccttattctaatgattttcaattgatctgagtctgtagttgtttaaaa

SEQ ID NO: 82079 - DNA, 359 bp, Arabidopsis thaliana columbia
  unsure (1)..(359): unsure at all n locations
nnnnnnnnnnnngagaaagatgaaccactacttgctggaattaaaggtctttcttaattcctcagatgtgtacaagggtttgcttttatgttgtagacatgaataaaccactcaatatgccagtgcaatgcgaagtcttcaaagacgtatgggatctatgagcagagttactatatactccttcagttttccttcactacaattgtgtatatcatcggacttggtgtagaggagttccaataagcgtccaaaattaagtgcttgcttgagtactcgacctggtacgctggttgtcttcagtagctcctcatttatggtcttattgatgtccacgatcattctttgacactcgagaatag

SEQ ID NO: 82080 - DNA, 435 bp, Arabidopsis thaliana columbia
  unsure (1)..(435): unsure at all n locations
taaccgtaattttccaaaattaagctacaggtacagctaaaaagtgtactacagttttctttttctaaaaatagtagagaaattctttcttgaatttttagaaacaagattgacgataagccctggattctattagtttctatgggggcaaaaaaggctacattttctatggaaataaaatgctaagggaaagcgaaaagaaacacaaaacagagaaaagttacctaaccgaactagatctgagaaagagttcctgcgttttttcatccatctgggctatcaaaaccaaacagcaatctcccgtgaaaactgatggtttaaaccgctgatcattggggcgggtaattggctttnnttntagnggtccatacaaaagggccatttccngggtttggggccgntntccgntttccccttttgnncttgggttnccnc

SEQ ID NO: 82081 - DNA, 182 bp, Arabidopsis thaliana columbia
agcaaggtgataaggtatcactcattcatttcaagaatgttgcaaatcaagccaaatcattgtatacaagaatgttgcaaaatcatgccaatcataattttaaactgctggcttctgacacaaagggaaatgtcagacatctacataccattttatcagatagcatctttagtatataatgt

SEQ ID NO: 82082 - DNA, 550 bp, Arabidopsis thaliana columbia
  unsure (1)..(550): unsure at all n locations
gtcaaacaaataattttgtaatttactactcaagttcataatttaaccattacaagaaaaaacagacaagaagggaagtcaagggagaaggaaaaaaaaattaggcaaaatattgttgctgtatggatttgtccctatggtttgtgttttgtgtgtggatgtgagttagagagtgtcccaattagggatagtcgcagtagcttcattcaccatcttcacaagtgtcaccacactttcgggaacaccgggaggcggcaaggacatgttccttggaggaggaccccgcaaatgtggatctcttatcgaatcgccactctcctattttgcccatatgtcagctcccccttccatgttgtagtcgcatccataaagtgtaatggatgataaaccttccccttgggaagacaaatcccccggagggctgaagcatgaaatccttccgaagtatgtgacgcacccctggatagccgatgcaattgggnaccggaaattccagncccaccnatgcctacagttcggngcgnttcatgtnggggatcccntgngggtt

SEQ ID NO: 82083 - DNA, 374 bp, Arabidopsis thaliana columbia
tcccaactaatctcccatccattccctctctgccgactagtctcccatccattccgttcttctctcccccgccttctgcaactacttcgagtccttgaactatcatcacttcatgtgattgatgatgtatattttattataagattgttgtaattagttgtttcattgtggtgtgtttttgtttgtttaattacgcatacccccgtttgatgatttgtattttgtacctttaatttccttttgattattaataatgttgtattttaaatttgtcttgtgggtttgttaaaagtgcttcacttgggtccttttactcatagtaaatatataatatcattggtgacgtatgataaaaaaaaaaaaaaagggcggcc

SEQ ID NO: 82084 - DNA, 519 bp, Arabidopsis thaliana columbia
  unsure (1)..(519): unsure at all n locations
catcagctgtgccgcaaccaaatcttcacaccattcccgcgtcaatgcctccaatgccaactttgccttcatttccaacaacaattccttctcttccgactaatattccatccattccttctcttccaactaatctcccatccattccctctctgccgactagtctcccatccattccgttcttctctcccccgccttctgcaactacttcgagtccttgaactatcatcacttcatgtgattgatgatgtatattttattataagattgttgtaattagttgtttcattgtggtgtgtttttgtttgtttaattacgcatacccccgtttgatgatttgtattttgtacctttaatttccttttgattattaatatgttgtattttaaattaaaaaaaaaaaaaaaggnnnnnnnnnnnnnnnnnnnnnnnnnnnnnnnnnnnnnnnnnnnnnnnnnnnnnnnnnnnnnnnnnnnnnnnnnnnnnnnnnnnnnnnnnnnnnnnnnnnagctgtatcat

SEQ ID NO: 82085 - DNA, 585 bp, Arabidopsis thaliana columbia
  unsure (1)..(585): unsure at all n locations
nnnnnnnnnnnnnnnnnnnnnnnnnnnnnnnnnnnnnnnnnnnnnnnnnnnnnnnnnnnnnnnnacggctcgaggcaatacaagagaagcaattagaaaggcttaaccataattagagattcacaaccaaagcaaaatggcatcatacaagctcttccgcattgcttttctagtgtgcctctcttcctctatgatgatcaacacttgctcagcctcacgccgccttctccaacaacaacctcttcctcaaatcccaaatctgcctattccaacaatgggactacctccattgccatcgacgttgccacaaccgtctttaccaactctccccacaatgcccactgcaatgtctccatttccaatgccatcagctttgccacaaccaaatcttcccaccattcccacggcaatgcctccaatgccaactttgccttcatttccaacaacaattccttctcttccgactaatattccatccattccttctcttccaactaatctcccatccattcccttttttgcgggtaggtttccatcatttngggttttttttcccggcttttnaaaaattnggggccttnnatt

SEQ ID NO: 82086 - DNA, 467 bp, Arabidopsis thaliana columbia
ggagaaagtttatcagtcatacaaatcccgaccaacaacaacaaaaccctaaaatcaagcttcgaaaatgggagagatgatgtacaagctcttcgcttcagcgtcactactaaccctaggattgtatcatctcatctgcactttcttccatctccttaaatctccccaatcctacgccgcgaaacccttttacccttttccacgtctctcctccgtcaccggaaacaaccaccacaatcacaaccgcctccaaaatctaccactgttcatcctcatactctctctattcgtcgctttccttcacgaaaccctaatctccttctactccgatcctctcgtcaaaggaagtactcctgttcaccgattctcatctctcaattccgccgccgtgttcttcctcttcctcatcatcgccatttactatctcctctccgattcaacctcgttaatccctctcccttccgatc

SEQ ID NO: 82087 - DNA, 522 bp, Arabidopsis thaliana columbia
  unsure (1)..(522): unsure at all n locations
ataaaaagaatcaactgttccatcacattaaagctgataaccaaagaaaagaggtaatttgtccaaactgtgtctcactctcacctaaacaaaactacaaaacagaggaaaaaagaaaagaaaagaggatgcctcagtagttcttctctaacaaaaacccaagacgacgaccaaccataaaataaattgaacatatattcctaagcgactctaaacaaaacagaccacaagctaaaacactgtcaatcaatggatagtaaaaaaaaaagaaggggaatgagatacacttatggcaaaccatgtcttcttgatggacagaagaagcaaacatagaaagaaagtgagagaaccagggggatagaaaaaaaacatcccacgaccttgggcttttttcttctttttaggtttgtgtaggagaaacctcactctccaagcagctgcctggactggtgggccctctgatctgttgttgaaaccaccttaccaccacgtctcctctctccnggctnccctcangcangc

SEQ ID NO: 82088 - DNA, 468 bp, Arabidopsis thaliana columbia
aaccgtacatcactcttcatcattgcttgtatcctctaccaaaacatctgccacctccaggtcctccgtcttgatgaattcgcacgctgcttcgcctctgagatcaaagatttcagttccatactcgccgagcatctcaaaatccgtcgtgaactgaagattgtcagtcaccggttcagacgattcattcttttgtcattgtttttcgtcactgccactcagttcatggcattgctgactaccatcagagctagtgttccctttaatatctacgaagttggcgagctcgcgttatgctccacaagcttggtgtcaggactattcatatgcttgaaaagtgcaacacaaatgactcacaaagctcaatcagtaacgagcatcgccacaaagtggaacgtgtgcgcgtctctagatacatttgatgttctttatgacggagagactcctaaatgtccaacaactacacaa

SEQ ID NO: 82089 - DNA, 395 bp, Arabidopsis thaliana columbia
gattgaatcattgtatatatttcgtcattatttggactcgattgacagataatttcatacttgaaaactaaaacaatggaaactgaaatttgatcatctctgtacaccaacaatggatatttgtttttcaacagtctgagtgaaagaacatcatttctatgtacagtaaagcagagaatgaaatgcagaggaaataacaagttcaatagctagaaaaatgagagaacaacaaaagatgaagaacaataacaaaatccaagatgttttagtttttgattgttttgctctcagcgagaagaaccagaagcatctttgagaagaaattgttctcaccagattgagatccagaggttgaagaagacgaagaagaagaagacgagaacaatccactaaac

SEQ ID NO: 82090 - DNA, 783 bp, Arabidopsis thaliana columbia
  unsure (1)..(783): unsure at all n locations
ggaannncccgggnncgaccccacgcccgtccgcggtgattatccaatgtacagggtactcaagattncttctgagtgcttattctgaataccggnnaggctatcctcgggttcagcggagactanntctcttctctgcggcggagttacctgttganntagaggcannagctaaagtcnnttgaaactaatnnatgtttactntncttggcttactaaaatcctggtaccccatccccaagatatttctcttgagaaggaaactcattgaagatgcttaagatcaactaggatttacgtggttctatgaccgaatgcaaaccggaggtttatatgtactggctttggaaagaatattcaccgattgggcttctaactgtttgccggtaggctgctctcattgaccgagaagatcctatgtatgcatggtggattgtcaccggaattggaaaacttggggcagattcgggagattcaaaggcctacagagattccagacaatggtcttctttgtgatttactttggtctgatcctgatcagaagaatgaagggtggactgatagcgatcgaggtatctcctgcacgtttggagccgatgtagtcgctgactttttggataagaatgatctcgatctcatttgcagaggccatcaggttgtggaagatgggtatgagtttttcgcaaaacggaggttagtcacaatattctcagctccaaactatggaggagagtttgacaatgccggtgcattattgagcgtggatcaatctctcgtttgctc

SEQ ID NO: 82091 - DNA, 700 bp, Arabidopsis thaliana columbia
  unsure (1)..(700): unsure at all n locations
atgannnnnnnnnnnnnnnnnnnnnnnnnnnnnnnnnnnnnnnnnnnnnnnnnnnnnnnnnnnnnnnnnnnnnnnnnnnnnnccacgcgtccgagttgatcctgtgcttcttcagttaacgaaaactggcaaggcaacagaagaagcaaaacgtgcaaatgagtttttcctctcactggcagcttgcaatacaattgtgccaattgttagcaatacatctgatcccaatgtgaaactggtagattatcaaggggagtcccctgatgaacaagcattggtctatgcagcagctgcatatggtttcttgctcatagagagaacctctggtcatatagttattaatgtgcgaggagaaacgcaaagtgcagatttaatgttttgggattgcatgagttcgatagtgaccgaaaaagaatgtcagtgatactgggatgccccgacatgtcggtgaaactctttgtaaaaggtgcagactcatccatgtttggtgtcatggatgaatcctacgggtggcgtcatacatgagnccaagntacaaacttcantgcttactcatctgttggtttgggaccactttttgtttgggatnagaganctgaccgnttcaaaaggtttgcnaatggcatntttcatttaggggcaacnnccccttnnttggtggggtnggttcttngaaagttntngannttgggcnnctttc

SEQ ID NO: 82092 - DNA, 640 bp, Arabidopsis thaliana columbia
  unsure (1)..(640): unsure at all n locations
gctcaaaaaataaattttctattagggggggaaattaatacaaaatgcatggaaataaaattttgagactttaatttatatgagcaaatttataactgaaggatagacatttgttgagagtcctctaatttatatgagcaaatttcagctgtgtactgcgcaagcatgtcaaacgagggaacatctgaagcatctcttcacggcttcgtctcttgatgccggtgcagccattgacatcaagagtggtgagtgtagtcgagcatgtctgngaaagggtctccagacatctgtcagacaccccaactatcccaaacaagctgagaaattcgagggaggtacaactattagcaatggtattcacacctgcatctgtgatacgcacacaccatgtcaanttggagagactctaactcgtcgcatnnagctatatgtaccactcccctcgtcagatattttcttgagcgccacatattntctaagnacctcaggtcagctaanagtgatatcttncangnaggccttcgnctgtgaagcctgaaaagagcatagagatttnaggncttggagagagaaacaatttntgggggaacnngaggcaatcccccatcttgtntccttnacaaanccaggcgatnttcag

SEQ ID NO: 82093 - DNA, 491 bp, Arabidopsis thaliana columbia
  unsure (1)..(491): unsure at all n locations
acgcttgtgttccttaatcctccttggatcatcctcctaattactcagtgatcatgcatagattccttgtaaagctatcttcttcttcttcaccattctctaatcaattgagaagcttgaagaaccagcgtctgattctccctctattaccttcttcaaaaccttttacctcctcctctgtgtcaccacctccaagtcccttgaacgcttctaatcgatttgggtatccttattccgccgatttgtttcgaaatttgtcacctttaaacccaaattcgaggattttaggagtcaatgggattactagtagtagatgtatcagcagtgaagcggtcagagaaatcgattgagtacgntgttctgattgtccggagctggacccggccggtttaacntgctgcctatanngnttgaaacaantttctnaggggaggnccatttgacctnacctggntgtgnnccgtttaagaaagggnaanaagtttggnggc

SEQ ID NO: 82094 - DNA, 538 bp, Arabidopsis thaliana columbia
  unsure (1)..(538): unsure at all n locations
agatattgctgcttacacgatcaaggcggtggatgatcctaggactctgaacaaaatcctatacattaagccttctaacaaccctttatcgatgaacgaaatagtctccttgtgggagaaaaagattggcaagtctcttgagaagactctcctcccagaggaacaactacttaaaagcatccaagagtctccgattcccatcaatgttgttctgtcgataaaccacgcggtgtttgtgaatggagataccaatatcagtatagagccttcctttggtgtggaagcctcccacctttaccctgatgtcaagtacacaagtgttgacgagtatctcagttatttcgcttgatgaacttcattataaacgtaatttacccccatgacgcgctagtttcatgttctgtatcaataaaagaatggttcttgtaatggtgaaaaaaaaaaaaaaaacacaagnnnnnnnnnnnnnnnnnnnnnnnnnnnnnnnnnnnnnnnnnnnnnnnnnnnnnnnnnnnnnnnnnnnnnnnnnnnnnnnntt

SEQ ID NO: 82095 - DNA, 1343 bp, Arabidopsis thaliana columbia
  unsure (1)..(1343): unsure at all n locations
ccnnnnnnnnnnnnnnnnnnnnnnnnnnnnnnnnnnnnnnnnnnnnnnnnnnnnnnnnnnnnnnnnnnnnnnccacgcgtccgattttcttaccactcaaagagtgcgcactcattatcatcgtttgaaactaaacatggcgacggagaaaagcaagattctggtgatcggaggaactggttacatcgggaaattcctagtagaagcgagcgccaaagctggccactccacattcgctctcgttagagaagcaactctatccgatcctgtcaagggcaaaaccgtccagagtttcaaagatctcggcgtcacaatactacacggagatttgaatgatcacgagagcttagtgaaggctattaaacaggttgatgtggtgatatctaccgttgggagcatgcaaatcttggatcaaaccaagatcatttccgccatcaaagaagccggtaatgtcaagagattcttgccgtctgagtttggggtggatgtggataggacgagtgcggttgagccagctaaatcggcttttgcagggaagatacagatcaggagaaccatcgaagcggaaggaataccatacacttacgctgttaccggttgctttggtggttactacttgccaacattggttcagttcgagcctggtctcacttctcctcctagagacaaagtcaccattcttggcgatggaaatgccaaagctgtgatcaacaaagaggaagatattgctgcttatacgatcaaggcggtggatgatcctaggactctgaacaaaatcctatacattaagccttctaacaacactttatcgatgaacgaaatagtcaccttgtgggagaaaaagattggcaagtctcttgagaagactcacctcccagaggaacaactacttaaaagcatccaagagtctccgattcccatcaatgttgttctgtcgataaaccacgcggtgtttgtgaatggagataccaatatcagtatagagccttcctttggtgtggaagcctctgagctttaccctgatgtcaagtacacaagtgttgacgagtatctcagttatttcgcttgatgaacttcattataaacgtaatttaccaccatgacgcgctagtttcatgttctgtatcaataaaagaatggttcttgtaatggtgaatgtgtgtgtgtatgtgtgactaatcagtaatcacagtgctttacctctgtttccgagcttcccaagaaatatgaattagtaatatataattcataaaaaaaaaaaaaaaaaaaagnnnnnnnnnnnnnnnnnnnnnnnnnnnnnnnnnnnnnnnnnnnnnnnnnnnnnnnnnnnnnnnnnnnaacga

SEQ ID NO: 82096 - DNA, 563 bp, Arabidopsis thaliana columbia
  unsure (1)..(563): unsure at all n locations
ggaacacagtcgatgaattttcctctccgcctggaagattgtggagctcccagttgttgttaacaacggtctagagattcgtgtctcttgaaattcgatctgagtttcaccttcaaggttttaatcaggaatgaagcattcaaaggatccgtttgaagcagcgattgaggaagagcaagaggaatcgccaccggaatcacccgttggcggaggaggaggaggtgatggtagtgaagacggacgaattgaaatcgaccagactcaagatgaagatgagagacctgtggatgttcgccgtccgatgaagaaagctaaaacctctgttgttgttactgaagctaagaacaaagataaagatgaagatgatgaagaagaggaagagaatatggatgttgagcttactaaatatccaactagtcctgatcccgcctaaaatggccaaattcaaanccntattntcggaatcactgngggtccaatgagtagntatnaatnttttaggggtntccacttaaaggccccagttangagttntttnaaggggnnctgnnngcaaaaaggtt

SEQ ID NO: 82097 - DNA, 538 bp, Arabidopsis thaliana columbia
  unsure (1)..(538): unsure at all n locations
accaaattgaaatttcttcaacttccgtgatattcgacaattacagaaaatatacaacattcgttatatagttgaatcaacacagataacttgaaaatgtaaacagcataaaacaaacaagaaagacaaacaaatttcctttcttggaaatttggtcttcaaaaatttctcttaattgctttattggggttacacttgggtattgttagtcacaccttcgtttacttcactggtaataccaccaccctccacttttgtcgatgtgttggtgatcggcagctcctgcattcctattttctcttccaccggatatcacttcgnccttagctttccccccacacaacgctatatagcccggagacggataaaaatcgcccgggttatacntccaagggggaatcttttcagccaaaactaaacgccgngggaagcagtggnggtcatgcacatagggntaancgtgncgnaaaaccggncncgntcccnatananggnttgatgaacgncanccggaaacccccggggaaagggganngnt

SEQ ID NO: 82098 - DNA, 333 bp, Arabidopsis thaliana columbia
aagaatgtaactcattggagaggctcaaatactttcagaaatgtttctgatgatacatataatgaaatttcatgactccaaaatataataagaaaaaacaaaattaatggtatttgatctaatgtgatcgtcaaaaactttcccagcaaaagctattgtaaggaagaagatcaaaactggttttcttctttcctttcgtaatggaaacaaaataatttctcattcttgtgagaagatccgttcatagaacaagatatacgcttcagaatgcagaaccttttccaatgaaacctgacgaacatatgcatcgcttacgttataccacgcagtgga

SEQ ID NO: 82099 - DNA, 531 bp, Arabidopsis thaliana columbia
  unsure (1)..(531): unsure at all n locations
atgatttnnnnnnnnnnnnnnnnnnnnnnnnnnnnnnnnnnnnnnnnnnnnnnnnnnnnnnnnnnnnnnnnnnnnnnnnnnnnccacgcgtccgcacacttattttctcttgccctcttttctttttccttttgaatatttctgggttactaatatttaatttgttggttcttcggtttctccgactctttccccttgaacctagcttaacagaaaatcaaagagagaggaaaaatgagtggaggtggtggagaaatggaagagagactgttaaatgggtcagagacagaacaaaggagagagagtctctacttgagaaaaaaagatttggagtgaagtaaggaagatgtggagaatagctttaccatcaactttgttcagagttatgtcgtttggatgcgtagtggtggctcaagccttcattggccactccagtgaaacgggtctcgctgcttatgctctccttcaaagcactttcattcgcttcatctacggtattatggcaggtatgtcaagtgcgacagagacgtt

SEQ ID NO: 82100 - DNA, 380 bp, Arabidopsis thaliana columbia
aaaacaaccggaaaaacctgggtactatattggcttacatttgcagaagaccatttcaacagattttggctacaagatcactttagcaaaatatttccctcaaaagttacaccagagaagttcagcaaaagcatgaatacgccaaggggttcttctttgatatatagggagatatgtaattagcgggaagaccggatgtccctgagatctcggctggaacgagaacttgaggcttgcctaaagctatcctttttccaactgtattggcgtaaaacagaccgggaatggctggtacaaatacatcactccttgaacttatgtagaagtcaataacattttcatattcagaattctctaattcaagggtacttcgttttctt

SEQ ID NO: 82101 - DNA, 436 bp, Arabidopsis thaliana columbia
ggaagaacaacattggactattatagaagttacttcaattgtatcaacttctctttattcttgggtttaatttagtttacttactactaaaacgtaagaggctgaatctccacacagttctagaacagtcactttaaagctcatcgttatgtacacaatcgccaggccaaagaactcgtataagtactagacagatccagtggcaaaacagcttcttctctgtttcctcattttctagtttagtgactttgatcagcaacggtttttttaacgaaatgcatccctcaaactctcgtcatgacacttcaacttccttctgcgtgaacgagggaacagtagctggtggatcttcttctctgctgccatttctgttgtagccctggttttgaaagggaaacggtgagtttggacttgtgcacctgcgaaaactctcaca

SEQ ID NO: 82102 - DNA, 617 bp, Arabidopsis thaliana columbia
ttagaaaaactacgacgttgaatgcacgcgtacgtaagcttggatcctctagagcggccgcccttaaattttttttttttttttttttttttaacctaaagaaaaaatttcttttgaagtctataaccaaaaaaattgataaattaaaagaagaaaaaagataagaaaaaaaaaaaaaaaaaagagttctaaacgttacaaaaagtttgagcaaacatcatctcgcttctttaactcatttaaagagaaacgatggattctctcttcctcctcatgatgtctttttggaccataaagttttcaccggggtgaaacttacccgcgacccggtttcctgactggaacattgtcctcatcatcagattggatatctccgtactcccagattccggtcctagatttgcgagcttcgtcttggaacttctcaagagcatcaagagcggcttgcttgtctttcggttcccatctcctgcgtttctccatcctggctattccttcctgaagcattgctgcattgacagagatctcatcatcgacagcgatgagagttacaacgagctcagttccagttccttggcccttcactttgcctcctgaaggatctttttcctttacca

SEQ ID NO: 82103 - DNA, 2193 bp, Arabidopsis thaliana columbia
tcatcatctacctctgctccaatttctctgaaaacaagaaaccttaatcaatcgaaatctcagtgtaactaatcaatggagatcaagcctggtttatccgctctcgtcactggcggcgcctctgggatcggtcgagctctctgcttagctcttgcagagaaaggagtttttgtaaccgtcgctgatttttcggaggagaaaggacaagagactacttcgcttgttcgaaaagcgaatgccaagtttcatcacgggttaaactttccttctgctatctttgtgaaatgtgatgtgactaatagaggagatctcctcgctgctttcgataagcatttagccacatttggaacacttgacatctgtatcaacaatgctgggattagcactcctttaagatttgataaagatgacactgatggatctaaatcatggaaacacaccattaatgtcgatctgattgcagtagttgaaggcacacaacttgcgatcaaagctatgaaagcaaaacaaaagcctggagttatcattaacatgggatcagctgcgggtctttatccaatgcccattgatcctatctatgctgcctctaaagccggtgtcgtattattcactagatcattagcatattacaggcgccaggggattcgcatcaatgtgctttgccctgaatttatcaagacagacttagctgaagctattgatgcttcaatactagagtcaataggcggttacatgtctatggacatgttgattaaaggtgcttttgagcttataaccgatgagaaaaaggtgggggcatgtctatggattaccaaacgcaggggtttggagtattggccaactccaatggaagagacaaagtacttggtgggttcaagttccaggaaaagaccttcttttaaagtttctacaaaaatagaatttcctcaaagcttcgagaaaatgattgtacacaccttgtctcataaattccgcagtgctacccgcatagtccgtgcaccactacaattacccattggaccacaccaagttctcctgaaaatcatctatgctggtgttaacgcaagtgatgtaaacttcagctcaggtcgttactttactggtggctccccgaagcttccctttgatgctggatttgagggagttggactaattgcagcagtgggagaatctgttaagaatttggaagttgggactccagctgctgttatgacgtttggagcatattctgaatacatgatagtatcttctaagcatgtgcttcctgttccaagaccagatccagaagttgttgccatgcttacctcgggattaactgcattaatcgcccttgaaaaggcaggacaaatgaaatcaggtgaaactgtacttgtgactgctgctgcaggagggactggacaatttgcagtccagcttgcaaagttatcaggaaataaagtgattgctacttgcgggggatcagagaaggccaagctattgaaagagcttggggtcgatcgagtcatagactacaaatccgagaatattaagacggtcttgaaaaaggagtttccgaagggtgtaaatatcatctatgaatctgtaggtggtcaaatgtttgacatgtgcttgaatgctcttgctgtttacggacgactcatcgtgattggaatgatctctcagtatcaaggagagaagggatgggaacctgcaaaatatccagggctctgcgagaaaattttagcaaaaagccaaaccgtggctggtttctttctggtgcaatatagtcaactgtggaaacaaaatcttgacaagttgttcaatctttacgctctcggaaagcttaaggttgggattgatcagaaaaagtttataggtctaaatgctgtagcagatgctgttgaatatctgcattcgggtaaaagcaccggaaaggttgtcgtttgcattgatcccgcatatgagcagaaaacgtcgagactgtaaacaaaacatccacaaagcaaaatccaggttgggagtctatacatgagtggagcttttcctttctttttcttctatggaggcatgaaagggtttgtaagtagagagttctttaagcttatgtttacaataaacagaggagaaagttttttaaaatccaagttaaacgtcaaagtaacaattacaccatcacaaaaataaaagaaacgacagaataataggttgcatcgt

SEQ ID NO: 82104 - DNA, 311 bp, Arabidopsis thaliana columbia
gaccttcgaagtttcaatgtgattgcagtaaaaacaaacagtgttttcaaccgtggagattgcaataaactgtaacatatcaaacagaaagcctttttatttttctcataacataaaactcaacatcacttgcaatgttaaagacacgacttaagcttatttggtaaagatggtcctaactttctgaagacagaactcaactcatgtgtcaaagatttgatctttgatgagatgtttttcatttggagaatctgtgtcgatcatgaggcgaggtgcgatcgatgtttggtccatgagggatgatcccaaaa

SEQ ID NO: 82105 - DNA, 720 bp, Arabidopsis thaliana columbia
  unsure (1)..(720): unsure at all n locations
gccnnnnnnnnnnnnnnnnnnnnnnnnnnnnnnnnnnnnnnnnnnnnnnnnnnnnnnnnnnnnnnnnnnnggggccacgcgtgcgcccacacgtccggctacacataaactgctgaccgatcccaaaggttgaaagattctttggcgctaaaaaatccccagttcccaaatcggcgtcctcgtttgaaaccctaattcctgaatcgaagcagatcctgatcgaatcgaaggtgttcgaatgatagctacccagtaaattcagaaccctaattaacaatgggcggtacggacgcgaaggacattctcgggttgccgaagactccactgtctttaactcaggagaagaaatctcgaccccagaaagagtcccatagaaaacccgatggcatttctcgcgaggtttatgcgcttaccgggggcgttgcacctcttatgccttcaattgatttaaagcgccgtcctcctgcagatgagaaggttgcttggaaatggctttccttcacaaattctgctaggaaagatgatttgcagctttaccattgggttagagtggttaatgatgttccaccaacaggtgactattcctttgccaaatataacaagtcagttgatattttgaaatacacagacgaggagtatgagaatcatttaacggattctgtgtggaccaaggaagagacagatcagttgtttgaattctgtcaaaattttgatctccgc

SEQ ID NO: 82106 - DNA, 682 bp, Arabidopsis thaliana columbia
  unsure (1)..(682): unsure at all n locations
gctccacacgactcaattatggaaagctcgcacgcctgcaggtaccggtccggaattcccggttcgacccacgcgtccgacagagagagaagagggaagacaaagggaagagggaggagagagaaggcaccaccctttggccctggagagaccaaagatggtcgaagagagacaactctgagatcatcatcatcatcctgcaaaaactaacgagaaatcgattttcaaaaatataatcaagatcgatttctagggatattttgatctctaaatcctctcaccaacattctcttgcttgccctacccgcttgctggtttcatccagaaacataataatacattgtttgcattataaggaattcctttatacagtatcaagagatccacaagaagctgttagatcccagagattaacactgtgatgaaaagggttttgtgaaaatcaattttcaaacctggaaaatgatgatcaaggacccttatatccgacaattttcttctttcttctgtacattgnaatatatagaaaattaacattttttctctttctttcttttttttctttagatattaggttaggttatatagaagagaaagtttgtttctgggaaatgggttttttggattttggtttgtaatttagggaaaaaaaatctttagtatatagtgtttgctggaaaaa

SEQ ID NO: 82107 - DNA, 531 bp, Arabidopsis thaliana columbia
ctatatcgtatatatggactgcttacagatggtgttcaagttatttccaaactggaaacgtgaggcagaagttaaaaagctcggttacaaggttcatggcgatcctttctccaccaacacaaggcgtgtcctcgctgttctccatgagaaaagactctcttacgagcctattaccgtcaaattgcaaaccggtgaacacaaaaccgaacctttcctctctctcaacccatttggtcaagtccctgttttttgaggatggaagtgttaagctgtatgaatccccgagccatcacacaatacatcgcatattgttcattagctcaagaggcacacagcttcgtgaatcttttggaggtcaccgagacaaatggcaactctaacaatgtggatggaaatcgaagctcatcagtttgatccacccgcatcgaaactcacttgggaacaagtcattaagcctatctacggtctagagactgaccaaacaatcgtcaaagagaacgaggctattctagagaaagttctaaatatcta

SEQ ID NO: 82108 - DNA, 385 bp, Arabidopsis thaliana columbia
agtttggaattttggattaagaatatatatagtctttttatatatttccctagtaataaaataggtgctctttggggaggggatacacagatgctcaagtcttgtaattcgaatcaaagcttgaagtaaagaagaactcataactttatgttaaattctttggcatattgagatgctttcttttcttctctctaaaagaaacttcctgcagaactctattcactactttgggcgttgtagcaataatctcaagcagcaaacacaaaattggttttcctctcctggtatttgccttaatcccgtacagatgtcctctagttaattagctggagttttcgggctccgaaacccttttttaagctcagtaactctcttcatacaagct

SEQ ID NO: 82109 - DNA, 683 bp, Arabidopsis thaliana columbia
  unsure (1)..(683): unsure at all n locations
cctcgnttccgatgttnccggcccggttccggcattttgccnttaanggagccaagaattgttttnnananggaaaggcngattcncncccttgngttagnaacaaccnccgaggtgcntgacgggttcagtgtgggggttaaacttcaggggncgtgtaacagtcgcatcagttaagaactttcagctcattgcagcaaacccaaccacagcctcagcctcaagcctcaaccgcaacctcaacccctaactcagccgcaaccgtctggtcagaccgatggtcccgacaagatcatattgccgtttgggaaagtgggaaaagacatgttcacgatggatttccggtatccgctctctgcgtttcaggctttcgctatctgtttgagcagtttcgacacaaaacttgcttgcgaataagtcaaaaactcagctttgtatgtaatgttatcagatttgctttggagattcttgttttgtggtgttttattttcaccgagaatctcataattagatttgtttcaagctttcattgcttatgctgtttattggtgcaaccaaaaagtttattcgagtttggtttttctccatagtttgatttgtattcataacggtcaaaaacataaaacgaaaataacaataaatcattaagaagcattggttattgaaataaaaaaaaaaaacaa

SEQ ID NO: 82110 - DNA, 341 bp, Arabidopsis thaliana columbia
  unsure (1)..(341): unsure at all n locations
gatgagaacacaccttgaattaaagacacaagtccaccgataagaaatatattactggactggtttgcaaattatacacaataatgtctacactctttgatacatcaactaatgggcgggggatctcaagtcaataatctagtggaattagtaaataacagctactgggtttgcccccccttcccgatggataatttgaattaggggaccatggtaatggtgggggatnggttccttaaccaacccccaaaatgcccaaggggatcntgcncatgnggngtccccaatccgaggggccntcgccaatcctggnacaaaccaaacnttntttgntaaaaant

SEQ ID NO: 82111 - DNA, 529 bp, Arabidopsis thaliana columbia
  unsure (1)..(529): unsure at all n locations
atgannnnnnnnnnnnnnnnnnnnnnnnnnnnnnnnnnnnnnnnnnnnnnnnnnnnnnnnnnnnnnnnnnnnnnnnnnntgacccacgcgtccgcaaacaaaaatcaaccatggtttcgaaaccgctattctccctattgcttctcacggttgcattggttgtgtttcaaaccggaacccttgtcaacgctgaagattccgagccttcgagttcaacgagaaagcctctggtgaagattgtgaaaggtaaaaaattatgcgacaaaggatgggaatgcaaaggatggtccgagtattgttgcaaccatacaatctccgatttttttgagacatatcaattcgagaatctattctctaagcgtaacagtccagtggctcacgccgtcggcttttgggattaccgatcattcattactgcggctgccgagtaccagcctcttggtttcggtactgctggtgagaaacttcaagggatgaaggaagtcgctgcgtttcttggccacgttgggagcaaaacctcatgcgggta

SEQ ID NO: 82112 - DNA, 515 bp, Arabidopsis thaliana columbia
  unsure (1)..(515): unsure at all n locations
gnnnnnnnnnnnnnnnnnnnnnnnnnnnnnnnnnnnnnnnnnnnnnnnnnnnnnnnnnnnnnnnnnnnnnnnnnntcgacccacgcgtccgaggccgcgtggggtgttactcagtgcggtcgttgggtccttgataggatacttggtagtcctcatatgcagaccacctcctgagtttaatagattcaccattgttatgactgcttttggaaatactgggaatcttttgttagctattgttagctcggtgtgtcacacgaagacgaacccttttggaccgaattgtaactcgagaggggtttcgtatgtatcgtttgcgcaatgggttgctgtgattcttgtttatactgttgtgtatcatatgatggagccgcctttggagtactatgaggtcgttgaggaagaaggggttgagatagaggagatcattgtggagaatcatgatgctagtaggcctcttctagtagaagctgattggccagggattgaggacacagagacagagcattgcatga

SEQ ID NO: 82113 - DNA, 998 bp, Arabidopsis thaliana columbia
gatacgttaaactgtttataaaatgaagtgtgtatttttgcattttcttatagcaactcttgccaacaaaggtttagtgtaacctgaaagaaaaaagatgctcacaaaacttgctttattgggatcttaacataagaagaaaacaaaaggcgaaaaacactttgagatcacttggcgctcaaactccggatgacgtatggtagaataccgccgtgatcatagtatgccaattccacctctgtatcaaaacgcagggtgcagacaaaggatttgccactgtcagtggttacagtgacgtcttgaccgggtctaatgtcactaacttttgtaggaaggtggactgtgtagcgttcatgaccagtgagtccaaggggttccgcgtcctccccagccttgaaacacagaggatgatccccataccagccaggttgctgcgatggattccctcaaagctcttggcaattacagctttcactcccaaaagcaagggaccctttgcagcccaatcccgagagctaccacttccatactcagcaccagccaggatgatcgtatcccgttcaagggtcttgaatttacttgctgcaatcgaaaacgctaagcttctctccagtcggaaatgtgaacaagtgttggggccaacttcctcctttcaagagcttgttaacaatacggatattggcaaatgtaccacgagccataacctcgtcgtttccccttcgacttccatatgagttgaaatcttccgaaatcacaccacggtccattagaagctttgcagcaggactagttttttgaatgtttcctgctggagagatgtggtctgttgttacactgtccccaaagttcaacaagcagtaagcatccttcacttcacgaggaccaggtggatttgcggtcatattcttgaaatacggaggttcatgaatgtacgtggagtttggatcccaagaatataacgtggaactcggtgcagagagttcattccacaaggggtt

SEQ ID NO: 82114 - DNA, 662 bp, Arabidopsis thaliana columbia
atctcccttcaacaatggcggaacaatctcaactcaagaatctcaccatcatcctcctcctcctctgcttatccttccaatcactatccttcgccgccgaatctcacctaaccgtcgatttctactccaaatcatgccctaaattcctcgacattatccgcgaaaccatcaccaacaaacagatctcaactccaacaaccgccgccgcagctctccgcctcttcttccacgactgtttccccaacggctgcgacgcctccgtcctcgtttcttccaccgctttcaacaccgccgaacgcgattcatcaatcaatctctctctccccggagacggattcgacgtagtaatccgagctaaaacagctctcgaactcgcttgtcccaacacagtctcttgctccgatatcatcgccgtcgcggtacggtgatctcctcgtaaccgtcgggtggcaccttactacggaatcttcccttcggccgtcggcgattcacgaacttcgaaatcatctctcgtctccgatctcctcccgctcccgtcgatgcagatatcgaagctcatcgatcaattcagctccagaggcttctccgttcaagaaatggttgctttgagtggtgctcacaccatcggattctcacattgcaaggagttcacgaaccgggtc

SEQ ID NO: 82115 - DNA, 524 bp, Arabidopsis thaliana columbia
  unsure (1)..(524): unsure at all n locations
nnnnnnnnnnnnnnnnnnnnnnnnaaacaaatggtgcaagaaggagctttaactgctcttgcttcagtggctgattcatcgacccacgcgtccgctttcaaaagtactatgatactgtcatgccttatctcaaaactattttgatgaatgcaactgacaagtctaagcggatgcttcgtgccaaatccatggagtgcatcagtcttgttggaatggcagttggaaaggacagattcaaggaagatgctagacaggtcatggaagtgctaatgtcattgcaaggttctcagatggaggcagacgatccaataacaagttacatgttacaggcatgggctaggctttgcaagtgtctaggtcaagatttcctcccatacatgaaggttgtgatgcctcctttgcttcagtcagctcaacttaagccagatgtaacaattacatctgctgattcagaagatgaagcagaggattctgatgatgaaagcatggagaccattatcctgtgcgacanacgaatagggatc

SEQ ID NO: 82116 - DNA, 424 bp, Arabidopsis thaliana columbia
aaccacgcgtccgcccacgcgtccgaaattatctccgagcattctcaagttgggtgattcggtacggattactgatttgggagagaaaaaccctagattggaattagattctgggttcttgggctaaaggtttcttcatctccttcgaatcatccttttagggagcaagacgatgagtagaaaccctttcctggatcctactcttcaagaaattcttcaagtgattaaacccacacgagcagatagggatacgaggatcacagtcattgatcagttgcgtgacgtcttacaatccgtagaatgtttaagaggtgctactgttcaaccatttggatcctttgtgtcaaatctcttcacacgatggggagacttagatatctctgttgacttattcagcggttcttccatcttgttcactggaaag

SEQ ID NO: 82117 - DNA, 987 bp, Arabidopsis thaliana columbia
  unsure (1)..(987): unsure at all n locations
catatgggagaatgctcgancacctgctcctcaggaaggctttgagataaagaggaaagggaatcaggagtttcctgctagtatacggttggagatgaactacgtccctgaaaagttcaagctttctactgcattgatggatgtcctcgggattnaggttgaaacccgcccaagaatcatcgctgcaatttggcattacgttaaggcgaggaaactgcagaacccaaatgacccctctttcttcaactggtgttgctgcacttcagaaagtttttggagaagaaaagttgaaattcactatggtctctcagaaaatatctcatcacttgtcgcctccaccacctattcacttagaacacaaaatcaagctctcaggaaataatccggccgtatcagcatgttacgatgtgctagtggatgtacccttcccgatccaaagagatctgaccaatttgctagccaacgcagagaagaacaaagagattgaggcttgtgatgaagcaatatgtgcagccataaggaaaatccatgagcataggaggaggcggggcatttttcttggggttcagccaattcgccagttgaattcataaacgccctgatcgaatctcagagcaaggatctaaaggtcgttgcgggagaagccagtcgaaatgctgagagagaacgtcgatcagacttcttcaaccaaccttgggtcgaagatgcagttatacgttacttgaaccggaggccagcagctgggaacgatgggccagggagttggtgagtttcttgacgatacaagtctcttcatctgtttgagcatttttagtagaagatattgttgagattagtctggtttaaaagtgaactagtgtatctgtaatcttgtgtatgttgaaacattactactttatataattagctttgttttgtaaaaaaaaaaaaaaagggcggccgctctagaggatccaagcttacgtacgcgtgcatgcgacgtcatag

SEQ ID NO: 82118 - DNA, 578 bp, Arabidopsis thaliana columbia
  unsure (1)..(578): unsure at all n locations
ttttgggagccgcccttcggngatatttgtttagggaagctttccccaatntggatccactctggattaactatagggcaatgggattccccccaggattcttcccagtcctgttcgccagtcccgcgtatggctggatacttgtcccactggcgtgagtcgttagatgatcctggacacttgggatccatgagccccctgcaggcctatactgcagtgtggatgaggcattacgagccagtgagagaacgaacgttatcaagtgattcggataaggataagtttggtcaagtttccatttcgaatgcatcaacaaggcgttgagctggatcatctgccctttagtctcaatcctaacactcaccaataaagaagaaaacattgggacacctctgggaaaacaagagagtcttctcaacaacatgtgttgttttctttctcttattcttaaacacttaataatgcaaccctattcctattgtttgtctgttattttaaaatgttatgatttaataaaaaaaaacccaaagggagaccgctctagaggatccaagcttacgtacgcgtgcgtgccacgt

SEQ ID NO: 82119 - DNA, 1924 bp, Arabidopsis thaliana columbia
  unsure (1)..(1924): unsure at all n locations
nnnnnatccgactcatttagggaagagctggtccgcctgcaggtcccggcccggaattcccgggtcgacccacgcgtccgcggacgcgtgggtgattttggttgaatggagatatcagagagagttcgagctcgattagctgttctctcaggtcatttatcggaaggaaaacaggattctccagcgatcgagcgatggtgcacgtcggcggatacgagtgtcgcaccgcttggatctttgaagggaacactgacgatcgtcgacgaacgcaccggaaaaaattataaagttccggtctcagatgatggtaccgttaaagccgttgatttcaaaaagatagtgacggggaaggaagacaaggggcttaagttatacgatccaggttacttgaacacggctcctgttcgatcttcgatttcttacatcgatggagatgaagggatccttcgttaccgtggctaccccattgaggaaatggctgagaacagtacttttctggaggtggcttatcttctcatgtatgggaatctgccctctgaaagtcagctatctgattgggagtttgcagtttctcagcattcagctgtgccacaaggagtattggatatcatacagtccatgcctcatgatgcacacccaatgggagttcttgtgagtgccatgagtgcactttctatctttcaccctgatgcaaatcctgctcttagtggccaagacatttacaagtcaaaacaagttcgtgataaacagattgttcgcattctcggaaaggcaccaacaattgcagcagctgcttacttgaggacggcaggcaggcctcctgttcttccttcggccaacctttcttattcagagaatttcctctatatgctggattcaatgggcaataggtcttacaagcctaatcctcgtttggctcgagtgctggacatcctcttcatactgcatgctgaacatgaaatgaactgctctactgctgctgctcggcatcttgcctctagtggtgttgatgtgtacaccgcatgtgctggagctgttggggcgctttatggtccacttcatggtggcgcggtcgaggccgcgattaacatgttatcagagattgggagatgctaaaatattccagatttcattgaggcgtaaagacagaaaaaggaagatgtcagttttggacatcgtgtttcaaaaactatgacccccgagcaaaagttataaaaaaactggcagatcaagtgttctccattgttggtagggatcctctcatcgaggtagcagttgctctagagaaggcggcactgtctgatgaatattttgttaagagaaagctgtacccaaatgttgatttctactctggattaatctatagggcaatgggattcccaccagaattcttcacagtcctgttcgcagtcccgcgtatggctggatacttgtcacactggcgtgagtcgttagatgatcctgacactaggatcatgagaccccaacaggcctatactggagtgtggatgaggcattacgagccagtgagagaacgaacgttatcaagtgattcggataaggataagtttggtcaagtttccatttcgaatgcatcaagaaggcgtttagctggatcatctgccctttagtctcaatcctaatactcaccaataaagaagaaaacattgggatacctctgggaaaacaagagagtcttctcaacaacatgtgttgttttctttctcttattcttaaacacttaataatacaaccctattcttattgtttgtctgttattttaaaatgttatgatttaataataataatcttgaaaaaaaaaaaaaaaaaaaaaagggcggccgctctagaggatccaagcttacgtacgcgtgcatgcgacgtacatagctgttcgatagtctcacgcgttcattaccgtcgc

SEQ ID NO: 82120 - DNA, 478 bp, Arabidopsis thaliana columbia
  unsure (1)..(478): unsure at all n locations
gacataaacgattcgatttttatcacaaaccaaaaaacgccatttgtttattacaaaaccatttaacaatacaacaatagagacacaacaataccagtagcatgtgggttgaagcaaaagacaaaggaatagtttgcattattacagacactcaaattaattacatgaacatgacatcaatatttcataaaaatcatggacccatctagtcatcatatggacaaaagagtgtgtgtgggtcagagatattttattacccttaggggagattcatagatcacgcgagcttgagatgagactttgaaatatttgccttttgatttcaccatccacactcagccaaaaaaagntgatcattgnccatcaatgaccatgacgacnttggcttttccattcccacccagagnggaagaagaaggtgncccctntcctncnngancgttttggaaattgcnggagcatngaaatncctaanngg

SEQ ID NO: 82121 - DNA, 410 bp, Arabidopsis thaliana columbia
tctctcgaaccatcgagtctcgaacccagagaggactttcctcagtgagtcctccgttccttagcttctcttccagatccaaactctcaccaaactttctcacaacacacacacaattcgattcgatccacactcttaaaatcccaaagatctctctgattttgaaattcgattcttccccagatcaacttgtgaatttttccacaattttggttcatgattttgatttcgtgaaggacttatggattcacacccttccctaatgggaaggtccattaccaattcgaaccgatcgagcttagatcttggtcgtccttcttcgtcttcttcatcttctccttcaccgttaaccaaatcgatctccgatgcaagtagtcaaagtctctcttcgatccttaacaatccacacg

SEQ ID NO: 82122 - DNA, 526 bp, Arabidopsis thaliana columbia
  unsure (1)..(526): unsure at all n locations
acaaaagtttatacatttatttgaaaatgtttattggttaaaagttgtttacattctaaagacaccaaatcgagtatcttctaaaggacggtttaaagcagcagagagacaaagtcccaaaacctttctggtatcacaaggatcaatcactccatcatcccaaagtctcgccgtcgagtagtaaggatttgcctctctctcatacgcatccaccgttttcttcttgaacgcttcttcctcttcctcagtccacttgattccttggctcttcttggtagccctttcaatctgagttaaaacacctgcagcctgagcgcctcccatgatgccaattctggcgtttggccaaatgaacataaaatctggactgtatgcacgcccacacattgcatagtttccagcaccaaagcttgcacccgttatgattgtaatccttgggacctagacaggtatggcacacatttcggccagctttgnangcgtgggcagtnagaccncaaagctggatgttgggaaaangnttaca

SEQ ID NO: 82123 - DNA, 366 bp, Arabidopsis thaliana columbia
tctgaatcgagaaggaatctgactcgtgtagatgagaatcggcggcgtcgaggttacgaaatttgcgtcggagatgatgtcgtcgtcgtcttcgtcggcggtggagatgttgaatctcaaagaagcttcgaattggtggtcagacgtaaacgaatctccgatttggcaggatcgtatcttccatgttctcgctgttctctacggaatcgtttccctcgttgctgtgattcaacttgtgagaatacaattgagagttcctgaatatggttggacgacgcataaggtctttcactttctcaatttcgttgttaatggagttcgtgctgtggtgtttgtcttcaggcgaaatgttcagtttatgcaacc

SEQ ID NO: 82124 - DNA, 505 bp, Arabidopsis thaliana columbia
acaggaaggaacaaaagattaaattatgtacagaaagtaattgaggggtctcaacaacaacaaaggaaaaaataaaaagttaaaaagctctcaaccaacttggcttttgggtcattagttggattgtgtccatgtcacgagcttatctctatccacaatttcttccccacccctactgatattggttggctcttcactctttctgtaattaaattacattttcaaatttaaatacattttaaaaaaaaaactagttatttcattctgaaaatttagcaccaaggaaaaaaagatgatcaggctaagctagagcacggcgaactctaggggtggtactggtaacggcaacacggccacttttgatcatatcttgcctagtttttatcactttgtcttcgaagaatctgctttccggattttcggaagcacggtagagcaacctacgcaggcgtgagccaatgccatagggtccggcctggggcccatgagaagcagtaaaggtggg

SEQ ID NO: 82125 - DNA, 551 bp, Arabidopsis thaliana columbia
  unsure (1)..(551): unsure at all n locations
nnnnnnnnnnnnnnnnnnnnnnnnnnnnnnaccacgcgtccgcccacgcgtccgcccacgcgtccgcaaaaagacaattctttccacgcgttctcttcaattcgtaaatgtcttggcctttgtcgttttcaaacttcaacatcagcatcacgtgattggctaatacaaataaaattttctctttattttattattttgccacaagccgtgaaaagatggagaaaatgaatgtccgttttatgattgtgttgatggtaatgtctctggttctgggtttttcgtcggcagttgatttcagatggaggaaaactgcaggattctcagatagattcaccagagctgtttcttcagtcgtgttcccagttcatggcaacgtttatcctcttgggtactataatgtaaccatcaacataggacaaccaccaagaccttattatcttgatcttgatactggtagtgatctcacttggctccaatgtgatgcttcttgtgttcgatgcttggaggcgcctcatccactgtatcagcctaatagtgatcttattccttgc

SEQ ID NO: 82126 - DNA, 812 bp, Arabidopsis thaliana columbia
  unsure (1)..(812): unsure at all n locations
accactcactatanggaaagctggcacccctgcaggtaccggtccggaattcccgggctctctcctacaaagatattgttgtttcattctcttctccatccacaaaaaccattccctctctcaactctctgaatatttttcttcttacgatttacaaatttccgatgctgtgacattaacgtctgagaacagagaaacacttcaaatctttgaattcgtagtgcgacggagacggaggagccatcagtttcgaaaatggcgtgcgaaggtggaggatctaacgtcagatctagctactacaccattctcgggattcgtaaagatgcctctgtttccgatatccgcactgcttatcgtaagctagctatgaaatggcatccggatagatatgctcgaaatcctggagtcgccggagaagctaaacgtcggtttcaacaaatccaggaagcctattctgttttgaatgatgagaataagaggtcaatgtacgatgttggactatatgatcctcatgaagatgatgacgatgacttctgtgatttcatgcaagagatgatctcaatgatgaacaatgtcaaagacgcgggagagagcttggaagacttgcaacgaatgttcacggatatggttggtggagatggcgtgagctatgactgtaacaataatccaaagggcaacaaaagaccacgtgtcaatatctcgaggagtagtgctgcgatgcgttaaggcttacttcttttgtgtatgagtgtcgtgttgtatcaaaatttcaattccatgttcaattgtctagaccataaaataaattatct

SEQ ID NO: 82127 - DNA, 442 bp, Arabidopsis thaliana columbia
ctgcaagattagatttaggattgacagagagaataaacaaaaagatgagagtttttgtctttgttgagtgagtcacaatctacaaccacagaagggaggaagctaatatgtccacacagttacaagcctaaaagaagctataccttgatcaacaaatcagtgaaaatgcagtgactttactcaatatcgtcgatccaatcaccataaacacgactgattgtatctggtcctttccatttccgttgagttctgactccggtgggtttctgcgtaacagcactagatgtccgttgggatgagactccaggagaaacaaggctggtcactgcgtctacttgtcctctctgctttgtgtccaaagtggcggatgttccgatcttacattctccttcaacgagtcctccgccaaatgtatgcaactctgaaggtccatgagcaaaat

SEQ ID NO: 82128 - DNA, 582 bp, Arabidopsis thaliana columbia
  unsure (1)..(582): unsure at all n locations
ctttactattttcttccttaccaaatatagcaacaacaaaaaaacgttttctgtgatggaggtcccgattataaacagaataggcgattttgacatggggataaactcgataaacgacccgtcgtatttatctcgagctttggcagtctccggtgtcggaaagttacatcaagcttatagtttttggaaatggggcgccttattgctacttgcattttttgcttcatttacatcgttaactacaagaatcaagactttagtctttagattaagaaatgtaaacgtgtctctaccttcccaaactcttttatgtaattacgacagcgactccgattggtctttctcgtcagactcttcagacgaagagaaagatgaggacgataacaaagaagatgactcggtcaatggcgattcacgcgttcaaagatttggttattaccatgatgatgatgataagggtattagtggaagtttcccctggttgcggcggcgcagtggtagcttcggagatttgttagatttaggctcaagcggagtcgtnaagcttttggggacaatccttaatntcaacgngggaaggaa

SEQ ID NO: 82129 - DNA, 416 bp, Arabidopsis thaliana columbia
ttgaaatgtacatgtttatgttcagagactcttagctttacaaaattattaatttctcaaatagtatatatttgaattataaataactttctaggaatacctctttgtatatctaaatattttagtatataaaaatagataatgctttttgtattcattatctgaacagtagttataagatcatatgtgatattatgattaattttcataaaatatgaagacttgataccttttctgtctttcagataactctaatgaacactcaaggtactttagccttttaaaaagttgaaatttagctcatggatgtatttttcagatgagaaaacttggggatgtcttcttttacctagaatgcctctgtttacaagtgccttgaaaacaaacattagctccctttcttcactaataactat

SEQ ID NO: 82130 - DNA, 521 bp, Arabidopsis thaliana columbia
  unsure (1)..(521): unsure at all n locations
nnnnnnnnnnnnnnnnnnnnnnnnnnnnnnnnnnnnnnnnnnnnnnnnnnnnnnnnnnnnnnnnnnnnnnnnnnnnnnnnnnnccacgcggtgcggttcttcaccaccacacacagccacaatcttttgaattttcctcctcatcatcgtctctctccgatccatggcctttaacaatttcacccgcctcgatgctcactccgccgccgagaaagccgtctctgtaatcggattaggttacgatctctgctccgatgttcgtttctccgcttgtaaaaccacacccgacggttccaggttagtcgaaatcgacccgactcggaaccgtgacttaatcttccccggtggtatcgtcgttaacaacgtctcgagctcgattaagtgcgataaaggcgaacgtactcgattacgctccgatatactctcttttaatcagatgtcggagaagtttaatcaagatatgtgtctctccgggaagattccgtcagggatgtttaataatatgtttgcgtttagtaaat

SEQ ID NO: 82131 - DNA, 494 bp, Arabidopsis thaliana columbia
caatacgactcactttagggagaagctggtacgcctgcaggtaccggtccggaattcccgggtcgacccacgcgtgcggcgcagagaaactttgcaatttgcaacacattcattaacccaatctcttctttagctcaaacatatctacacaagaagataagaagcttaagattctctccacaaaacaaaaatagttatcagattcacaaacaaagccatcaaatttcatcattgatttgttcaataagaaatgggaagcaaatggcgaaaagcaaaggtggctttaggtctcaatttatgtctctacgttcccaaaacgcttgaagattcttctcctccaagaagatccgacgacgccgtttcactttctccggttattgttcaaagaccatcaacgccgactccttcctcctctggtctccgattacctcgttccatgagcaaatcctcatcaaagaaaacttgtgcgatatgtttgacggcgatgaaagctg

SEQ ID NO: 82132 - DNA, 818 bp, Arabidopsis thaliana columbia
  unsure (1)..(818): unsure at all n locations
cccacgcgtccgcggacgcgtgggcaacaattcacacaatttctcgtttttttttgtttatcatcaaaagttttaatctaaattacgtatcaaattccgagcaagatgactattcttgttgaacattttgttcctgattcaagagtggatgaaaagaaagtgatagaggagagggataatgaattggtgttggatggaggttttgtggttccaaaatcaaaggaaactgatgcattcgatgctcctgatatgaatttcttgggccattccttcagggattatgagaatggtgaaagcgagagacaacaaggtgttgaggaattttacaggatgcaacacattcaccagacctatgactttgtgaagaagatgaggaaagagtatggaaaacttaacaagatggaaatgagtatatgggaatgttgtgagttattgaacaatgttgttgatgaaagcgatccggatcttgatgagcctcaaattcaacaccttctccaaaccgctgaagccattcgaagggactatcccgacgaagattggctccatctcactgccctaatccatgatcttggcaaggttctccttctgccagaattcggtggtcttccccagtgggctgtcgttggcgatacatttccagttggatgtaccttcgactcagccaatattcaccacaagtatttcaaaggaaaccatgatatcaacaacccagagtccaacacataaaatgggggttcccctgagggatgttggtttagacaatgttctcatgcttggggcatgcggctaatgatttgggggnagagatgncggccntc

SEQ ID NO: 82133 - DNA, 1309 bp, Arabidopsis thaliana columbia
  unsure (1)..(1309): unsure at all n locations
cagctannnnnnnnnnnnnnnnnnnnnnnnnnnnnnnnnnnnnnnnnnnnnnnnnnnnnnnnnnnnnnnnnnnccacgcgtccgcccacgcgtccggaaataactaatcaaaactctgtatcatcgttttcaaaacctaattaatggctgtaacaaatcttcttctacttgtgatggtttgttcattatcagtcttattgtcatcgtttcttcaatatttgggacatcatctgcgcaactaaacgcaacattttactctgggacttgtcccaacgcctctgccatcgtacgcagcactattcagcaagctcttcaatccgatacaagaatcggagccagcctcatccgccttcattttcatgactgttttgttaatggatgtgatgcatcgatcttgcttgacgacactggaagcatccagagcgagaagaacgctggtccgaatgtaaactcagctagaggattcaacgttgttgataatatcaagactgccctcgaaaacgcttgccctggtgttgtctcttgctctgacgttttagcccttgcctctgaggcttctgtgtctttggcaggagggccatcatggactgtattattaggaagaagagatagtctcacggccaacctcgccggtgcaaattcgtccattccttctcccatcgaaagcctaagcaacatcacatttaaattttcggctgtcgggcttaatacaaacgatctggtagccttatctggtgcgcatacgttcgggcgtgctcgatgtggagtattcaacaacagactatttaacttcagcgggacaggaaatcccgatccaactctaaactcaacgcttctgagcactcttcaacagctatgtcctcaaaacggtagcgcatcaacgatcaccaatcttgatttgagcacaccagatgcgttcgataacaattacttcgccaaccttcagagcaacgatggacttcttcagtcagaccaagagctgttctctaccaccggttcatccaccatcgcgattgttacttcgttcgcaagtaaccagactctgttttttcaggcctttgcacagtccatgatcaatatggggaatattagtcccttgactgggagtaatggagagattaggttagactgtaagaaggttaatggaagttgatttccttaaagctcattttctttgaaaaaacattggcaagctttggttgaataatttttgttatcataatcacatcaaatctgtattgcacttaaatcattctaagcaaatttatgataaatgaaattaaatcnnnnnnnnnnnnnnnnnnnnnnn

SEQ ID NO: 82134 - DNA, 712 bp, Arabidopsis thaliana columbia
cggaaacccggggcgccgcacgcgtccgaacgttttcaggcgaccaagggaagacttacatgttgagaatctccaatgttgggttatgaggcactttcaatttcagaatgcaaggccatacaatgaaagtagttgaagttgaaggctctcatgttattcaaactgattatgattctcttgacattcacgttggccagtctttagcagttcttgttactttaaaccaatctcctaaagattattacatcgttgcaagcacccggttcataagaagcaagctttctgttatgggtttgttgcgttattctaactctcgcgtcccagcttctggtgatcctcccgctcttccacctggagagcttgtttggtccatgagacaagctagaaccttcagatggaacttaacagcaaatgcagctagaccaaaccctcaaggatctttccactatggaatgatcagtccaacaaagacatttgtcttctcaaattcagctcctttgattaatgggaagcaaagatatgcagtcaatggagtctcttatgtgaaatcagagacgcctcttaaactcgctgatcactttggcatctcaggagttttcagcaccaatgccattcaaagcgtcccatcaaactctccgccaacagttgcaacatcagttgttcaaacatctcaccatgacttccttgaaattgtatttcagaacaatgagaa

SEQ ID NO: 82135 - DNA, 674 bp, Arabidopsis thaliana columbia
  unsure (1)..(674): unsure at all n locations
ccggcactatacgactcactatagggaaagccggtacgcctgcaggtaccggtccggaattcccgtgtcgacccacgcgtccgcccacgcgtccaaaaatggtgaagatcgaagttggaagtgtgggagactcattcagtgtatcatctcttaaagcttacttgtctgagttcatcgcaactcttctcttcgtattcgcaggcgttggctctgctgttgcgtttgccaaactaacctctgatggagccttggacccagctggtcttgtagcaattgcaattgctcacgcgtttgctcttttcgttggagtttccattgcggctaacatttctggtggtcaccttaacccagccgtgactcttggccttgccatcggcggaaacataacactcatcacaggtttcttctattggattgctcagtgtcttggctccatcgtcgcttgtcttctcctcgtctttggtaactaatggcaagagcgtaccgacccacggggtcttagccggtttaggagcggtcgaaggtntcggcatggagatcggtgtaccctttgaattggcctacaccgtttggcaaagaagttgcccaagaaggtaccgtagggccatggtcaatcgcatgggtcaaagtgggcaaaacctggttgtggccattaagggggccaaancaaatca

SEQ ID NO: 82136 - DNA, 1029 bp, Arabidopsis thaliana columbia
cccacgcggaaagaagtaacaaaaccaaagcaaaaaatggtgaagatcgaagttggaagtgtgggagactcattcagtgtatcatctcttaaagcttacttgtctgagttcatcgcaactcttctcttcgtattcgcaggcgttggctctgctgttgcgtttgccaaactaacctctgatggagccttggacccagctggtcttgtagcaattgcaattgctcacgcgtttgctcttttcgttggagtttccattgcggctaacatttctggtggtcaccttaacccagccgtgactcttggccttgccatcggcggaaacataacactcatcacaggtttcttctattggattgctcagtgtcttggctccatcgtcgcttgtcttctcctcgtctttgttactaatggcaagagcgtaccgacccacggggtctcagccggtttaggagcggtcgaaggtgtcgtcatggagatcgttgtgacctttgcattggtctacaccgtttacgccacagcagctgatccaaagaaaggatcgctagggaccatcgctccaatcgccatcggcttcatagttggtgccaacatcctcggctgctgggtccattcagtggtggctccatgaatccagcaaggtcgttcggaccagctgttgtcagtggtgacttgtcccaaatctggatctattgggtgggaccacttgtgggtggtgcactcgcgggacttatctacggtgatgtgttcatcggttcttatgaagcggtagaaacacgtgagatccgagtgtaattgactgggttttgtgattgcttgatggttggttgatgttttgtttgcgtgtgtatgtttggtgtccactttcttgcaagattgtatgtagagaaaagaaaaaaagttatgtcctgttaataagaaaatgtatatacatttcacttcatctcaaaaaaaaaaaaaaagggcggccgctatagaggatccaagcttacgtacgcgtgcatgcgacgtcatagctattctatagttcgcc

SEQ ID NO: 82137 - DNA, 419 bp, Arabidopsis thaliana columbia
gctagaagaggcgaaagctttgatggaaagaatgccaatggagccaacaaatgtggtatggggagctctgttcggctcttgtttgttacacaaagactatgagttaggtaaatacgcagcctcccgtgtgatcaagctgcaacctagtcatagtgggagatacactctcttggctaatttgtactcggaatcccaaaactgggatgaagtcgctcgggtaagaaagcaaatgaaagatcaacaggtggtgaaatcgccaggatttagttggatcgaagtgaaaggcaagctttgtgaattcatagctttcgatgataagaaaccccttgaatctgatgatttgtacaagactctcgacactgttggggtgcaaatgagattgccagatgaattggaagatgtgactgctgaatcatgac

SEQ ID NO: 82138 - DNA, 568 bp, Arabidopsis thaliana columbia
  unsure (1)..(568): unsure at all n locations
cggacgcgtgggcgtcaatggatagttgagtcggctgttattaacgacggcgacgagttagggttcatacttcctaaagcggccatggagttacatgagatctcaaagctcgacaataagaagcatccagagagaattgttgaatcgaagatgaagaagagaatgaaaccttattctctcacgtctcttaacaatctcgacgatggttgccttatgcatatcctcagcttcctatctccaattccagataggtataacacagcactcgtttgccacagatggagatatctggcgtgtcaccctcgcttgtggctccgtgttgaccgttttgtcaagggatttatctcagcctggagttttcctcaacattgagtcagctgtatctgcagcaagacccggcgataccattttaatagtagccggtgggaactatcgcgtttctaatattcagattaaaaggcctcttttcctgggccggtgggggcgggttcctgtgtgaccccccgggttttctcggggtcaaaaagtccctgggctntnttggcctnaaggttgngattaaaagagc

SEQ ID NO: 82139 - DNA, 439 bp, Arabidopsis thaliana columbia
atgcaaaccattaaaatttgtttttagtataatattgagttctgaaaactcagaactctgcatcacactaatctgttcaatacttcatacaacacaagcaatgtctcaaattttccgaaaacaaaccaaaactaaaaccatccttgattcactccactagacaaaaaccatgagattagaaaacaacaatgtagctcaacaaaaacaagagtgcagaagctaaaagggtcaaggtgaacatgaatggcactccaatgggtaaatttaagagcctcactaccggcggaatccacggtcagcgactcgagcagacggacactcgtacgccctgtgtcctcggccaccacaattgtgacatattatcatagcactaacgccttctctgtctctgctcattctgctcaaaccacctctttgcataccaccatctcgaaccctg

SEQ ID NO: 82140 - DNA, 1146 bp, Arabidopsis thaliana columbia
gtccatcttccaattgatcaaaacacccacacctcttcttcttcttcgcataaaccttaaaaaccatttccacgatcttcttcttcttcttccctcaaatatagcttaggatttccttaatttcctctacccaagctccatggctgctttcaatttcttcctctcttcttaattctctcaggtaggggagatttgagtagtagtagattgttagatttgtaattcagctattggtgaagaggaagggagagagagatgtgttgaattggttgagtttggtggaggaaagaagaagaagaaatgaatgtgagccatgcatcggtacatccagtggaagatcctcctgcagctgcgacggaagtagagaatccgcctcgggtgaggatggatgatatggaaggaatgcctggaacattgcttggtcttgcattgcgtttttttcagttcttgtttgcggctgctgctctttgtgtcatggcttctactagtgattttccttccgttaccgccttctgctacctagttgcagctactggtctgcagagcttgtggagtcttgcactagccatggttgacgtctatgccattatggtcaaacgctctctacagaaccgtcgacttgtgagcttgtttgcaattggtgatggggtgacatcgacgctgacttttgcagcagcttgtgcatcggcaggcataacggttctaatagacaacgatctgaatagcggcgcacaaaaccactgtgttcagtttgaaacatcaacggcattagctttcataagctggttcgctgctttgccttcgtttctcttcaatttctggtctcttgcatccccttgacacgatactgctcagcaagatgtgttttcatggtgtgtttttcggtgtatagtgactgatttttcttcttctttcttgttttgggtttggaaccaactttcttcaaacccaatacttggaaactgggaattgttttgtagacgacgaccttattcattttgttgtacaatgaaactatctggtcggctttgttgtaaaaaaaaaaaaaaaaaaaagggcggccgctctagaggatccaagcttacgtacgcgtgcatgcgacgtcatagctctcgtataggtcacgaaatccaaccggggcgcggc

SEQ ID NO: 82141 - DNA, 1283 bp, Arabidopsis thaliana columbia
  unsure (1)..(1283): unsure at all n locations
ccggaccggaatgcccgacccgccccacgcgtcccgcgcgccattcctgtaaacacaaaaacttgtaatttccaacgaaatggcgcggttcagtctggttgtagtcgtgactcttagtcttgccatctctatgttccctgacacaaccactgctcaactcaaaaccaatttctacggaaactcatgtccgaatgttgaacaaatcgtgaaaaaagtcgtccaagaaaaaatcaaacagaccttcgtcaccatcccagctactctccgcctcttcttccacgattgcttcgtcaatggatgtgatgcgtcggtcatgattcaatcaacgcctaccaacaaagccgagaaggatcatccagacaatatttctttggccggagatggatttgacgttgtgatcaaagccaagaaagctcttgacgctatcccaagttgcaaaaacaaagtctcttgtgctgatattcttgctttagccacccgtgatgttgttgtcgccgccaaaggtccgtcgtacgcagtggaactcggaaggtttgatggtttggtgtcgactgcggctagcgttaacggaaacttgcccggaccaaataacaaagttacagaacttaacaagctttttgccaaaaacaaacttacccaagaggacatgatcgctctttcagcggctcacacacttggattcgcccattgtggcaaagtgttcaacagaatctacaacttcaacctcacacacgccgttgacccaactctaaacaaagcctacgctaaagaacttcagttggcttgtcccaagacagttgacccaagaatcgccatcaacatggacccaaccactccaagacaattcgacaacatttacttcaagaatctgcaacaaggcaaaggactcttcacttccgaccaagttctcttcaccgatggtcgctcaaagcccaccgttaacgattgggccaagaattctgttgctttcaacaaggctttcgtaaccgctatgaccaaactcggccgcgttggcgttaagactagacgcaacggtaacattcgtcgtgactgtggtgcctttaactgatcatcctttttgggttttgttttcgagatttgttctttgacatgttatgagtttttgttttgttgtcttctgtttgtttctgcttcttgtatttttgaaaaacacattaacgaatctataccgttgttttatttctcgtgactgtaatattaataatcttatttctattaaacttgtttnnnnnnnnnnnnnnnnnnnnnnnnnnnnnnnnnnn

SEQ ID NO: 82142 - DNA, 481 bp, Arabidopsis thaliana columbia
  unsure (1)..(481): unsure at all n locations
ctncgccgccgcatnagggaccnggcctgaattcctgggtngcccactgcgtccgactcctccttcaagcaaagcaccttcctcttctttttgctcctctgagattggtttaagattaaaccagacccatctaagggatctggaacaagcttcgtctctggttccactctgatcatcagagtattaaaaatggagtctttcttctccagatccacctccatcgtctccaaattgagtttcttggccttatggatcgtcttcttgatttcttcatcttcttttacttcgacagaagcatatgatgcgcttgatccagaaggcaaccattacaatggaaatggggntgttaatgaggctgggcctcctgatnggctattgttccccgtgggttaacggtgttccaaacttcccggaaatttcagggcacaattnaaattttcccggggttgggaccattaagggttggaantngggcaaagaa

SEQ ID NO: 82143 - DNA, 428 bp, Arabidopsis thaliana columbia
cttataccgttctaaaaaaaatcttgctgctatctctctataagtccactcctccttcaagcaaagcaccttcctcttctttttgctcctctgagattggtttaagattaaaccagacccatctaagggatctggaacaagcttcgtctctggttccactctgatcatcagagtattaaaaatggagtctttcttctccagatccacctccatcgtctccaaattgagtttcttggccttatggatcgtcttcttgatttcttcatcttcttttacttcgacagaagcatatgatgcgcttgatccagaaggcaacattacaatgaaatgggatgttatgagctggactcctgatggctatgttgccgtggttacgatgttcaacttccagaaatacagacacattcaatctccaggatggacatttg

SEQ ID NO: 82144 - DNA, 421 bp, Arabidopsis thaliana columbia
aagaatgtataaaattacaagatccggtgttatggaccgaaattattacacaatgttatcaatgttgaaaaaacaaagatagaacctaaaaatttggttagggacgaatctcatcccagttggagtcatttacagatgccaaagcaaggaaaaaaaaagtgtatgtaggagaaaaaaaaaaaaaaacgagaaataaagacaattaaactttgcagaaattgagttgtccatttattgggttgtttgcttctgtacacccacccaccaatgcgtacctccttttttacactgaaacacctgattcaaaagctccacctctggtcatgtctggatctttggacgctcctctcgcctgatgttttccttggtgctgcgaccaatacccgtatgccctcaagactctgtctagcagttcttgtgg

SEQ ID NO: 82145 - DNA, 530 bp, Arabidopsis thaliana columbia
  unsure (1)..(530): unsure at all n locations
nnnnnnnnnnnnnnnnnnnnnnnnnnnnnnnnnnnnnnnnnnnnnnnnnnnnnnnnnnnnnnnnnnnnnnnnnnnnnnnnnnnccacgcgtccgctctttctcccctctctctctacttctagtttttttttttgtgtgatgatgaacaaagacatgttacttcaccagcatcagcaaccacaacaagacgagaatatgtcgaatctaacatcagcttccggggatcaagcaagtgtctcttctggaaatataactgaagcaagtggttctaattacttccctcatcatcagcaacagcaagaacaacatcaacaacagttagttgttccagattcgcagactcaaaagaagaggagaaaccaaccagcgaatccagacccagaatcagaagtgatagctctatcaccaaatacactaatggcaacaaacagattcgtgtgtgaaatctgcgacaaaggttttcagagagaccagaatctacagcttcatagaagatgtcacaatctgccatggaagctgaaacaaagat

SEQ ID NO: 82146 - DNA, 608 bp, Arabidopsis thaliana columbia
  unsure (1)..(608): unsure at all n locations
ccccccctcgatgtcgacggtatccataagcttgatatcgaattcgcggccgcctcaacttcttgttcatgttctgtgtagtaatttgttgctaccttttattttgttttctgtgagattatttcgtgttgatttcaaacttgaacaagaaaagtggatagatattgtctcttgggttgaagccaaagaaggaaatgataatatatacatacacacacactcacacaaaaatcaaagaaggaagttttataggattatatatatagctagagagtctcatttcttgtatgtttctgtttaatcttctcttttgtctcctttttttatcagtatatgtctgtatgtatttatatatatagatctgaatataggttgtcgatttctaacttattccgcctcttcttattcctttggtttttgctttaagattttttttttgggggatgatgaccaaagacatggtacctcaccagcatcagcaaccacaacaagacgggaatatggcggatctacatcagctncgggggccagnaagggccctcngggaaaaaccgnagcagggggccaatacnccccncaccgnacnggggcacacacacngtggggnc

SEQ ID NO: 82147 - DNA, 724 bp, Arabidopsis thaliana columbia
gctatgacgtcgcatgcacgcgtacgtaagcttggatcctctagagcggccgcccttttttttttttttttttttttttaaaaaagagctttcttgatacttatataaacatgatacattgtatctcaaaatgctcacttctgtgcagtagagaagtctatatcgctcgatgaaagtactttttggggtttacattgcacactgttccacgattagaccatgacaaatcggagagggccgtttctttttggattcgtcgcctcgagtctattgtaaacatgagaagagagctcttgaatttgtggcgtttctcgtggtcctgagtaaacctctcacgttcttatgtactatttccaagggaacttgaatgtatctttccaccatccctgttttgagcagtgtacaaagatcttgtccactctccactataagctcacaaaaatgctggtcctaacaataagtttccgaatccccagccatttccttaaatcaatttctttacaccttcttgggggaccaactttttgggactctgggcttttacaaccgaaaggggccttttctttccctttcttaaaacccccatttaagcctttacacttgggccctcctttaattgggggggtcttctagggcaacggggaaaaggggtttggataccctccccctttccacatctcaatgtcttccaattagttaaataaaccggagatccaccccaata

SEQ ID NO: 82148 - DNA, 569 bp, Arabidopsis thaliana columbia
  unsure (1)..(569): unsure at all n locations
atgannnnnnnnncgnnnnnnctacgactcactatttggaaagctggaccgcctgcaggtaccggtccggaattcccgggtcgacccacgcgtccgctaatttcgttgccgtctctccaagcaagaagaagcctctcagttctcacagcgaagatgcctacagtaagcgtgaagtggcaaaagaaagtgttggatggtatcgagattgacgttagtctgcctccttatgttttcaaggctcagttgtatgatttgactggagttccaccagaacgccaaaagatcatggtcaaaggtggtctcttaaaggatgatggagattgggctgctattggtgtgaaagatggtcaaaaattgatgatgatgggaactgctgatgagatagtgaaagctcctgagaaggccattgtttttgcagaggatctacctgaagaagcgctagccactaatctgggttacagtgctggccttgtcaatcttggcaacacgtgttacatgaactccacggtgcagtgcttaaaatctgtcccagagttgaaatctgcattatccaattactcactcgctgc

SEQ ID NO: 82149 - DNA, 1302 bp, Arabidopsis thaliana columbia
  unsure (1)..(1302): unsure at all n locations
acttcagtgacacaaacccaaagaaaagtagtgagaaacaaaatcgaggtaactactagatgaagacgatgacgcaattaaatattgcggttgtggttgtagtgacggttcttattggaatgttgagatcatcggaggctcaacttcaaatgaatttctacgcgaagagctgtccaaacgcagagaaaatcatttcagatcatattcaaaatcatatccacaatggtccttctcttgcagctcctctcatccgaatgcacttccatgattgcttcgttaggggatgtgacggatcggtgttgataaattcaacatctggtaacgcagagagagatgcaccaccgaatctaacacttagaggattcggtttcgtggaaaggattaaggctcttcttgaaaaagtgtgtcctaagactgtttcttgcgcagatatcattgctttgactgctagagacgcagttgtcgccaccggaggtccttcatggagtgttccaacgggtagaagagacggtaggatctcaaataagacggaggctactaataacattccacctccaacgagtaatttcacgactttacaacgacttttcaaaaaccaaggccttaatctcaaggaccttgttctgctctctggggctcacacgattggtgtctcacattgttcttccatgaatactcgtctctacaacttctcgactacagtcaaacaagatccatctctcgatagccagtacgcagctaatctaaaggctaacaaatgtaagagccttaacgacaatagcaccatcctcgagatggatcccggtagtagcagaagcttcgatctcagttattataggcttgtcttgaagaggagaggcttgtttcagtctgattctgcattaacaacgaactcagcgactttgaaggtgatcaacgacttggtcaacggttctgaaaagaagtttttcaaagcttttgctaagtcaatggagaagatggggagagttaaagtgaagactggctcagctggtgtgatcaggacacggtgttctgtcgctggaagttagtaagcttcagggtcggaatgtggtgtgttatggtcattgttgttttgtgtgactttcggaaaaaacaaatgttgttaatttaattttgttgttgtttgatttgtgtttatgcacccaagaatgatgtgttatggttcaattaatatgtgaatcatttaaatttaaaaaaaaaaaaaaaagnnnnnnnnnnnnnnnnnnnnnnnnnnnnnnnnnnnnnnnnnnnnnnnnnnnnnnnnnnnnnnnnnngttccta

SEQ ID NO: 82150 - DNA, 511 bp, Arabidopsis thaliana columbia
  unsure (1)..(511): unsure at all n locations
taggacgnnnnnnnnnnnnnnnnnnnnnnnnnnnnnnnnnnnnnnnnnnnnnnnnnnnnnnnnnnnnnnnnnncttgggttttttttttttttttttttttttttttttttttttnggagaggcgcaaacttggcatcgggccactgattggcctgaagaattaaagaatcgtttctttgtaatgtattttaaaggacaaagggagacaacaaagtctctcaccatctttattcactgggtttttattcagacgaacctagacaccattccaatggatgagcaggtccaagaacctctttctgatcaggggtttatcaacttccgaggagatgagctgcgcgaaatctttgtcaaccatctagagctgcaattaaaaaacgcagggatcaacgtttttatagaccctaaagagccgaaagggaaaagactacaattttttttcccagggatcaagaagtaaaaattcgccttgctatttttttcaaaaggtcctgtgagtcaaaggggggt

SEQ ID NO: 82151 - DNA, 547 bp, Arabidopsis thaliana columbia
acgactcactattgggaaagctggtccgcctgcaggtaccggtccggaattcccgggtcgacccacgcgtgcgcccacgcgtacgctattttttattcagacgaacctagacaccattccaatggatgagcaggtccaagaacctctttctgatcaggtgtttatcaacttccgaggagatgagctgcgcgaaatctttgtcaaccatctagagctgcaattaagaaacgcagggatcaacgtcttcatagacactaaagagcagaaagggagaagactacattatctcttcacatggatcaagaagtcaaaaatcgcgcttgctatcttctccaagaggtactgtgagtcatagtggcgtttggatgagcttgcgacgatgaatgaacagatgaaggaaatgatactcgtggtgattccaatcttctataacgtaagatcggacgatgtacaaagagcagccaatcccgatggagaaggcactcttgatggagagatatccctttcttttaaagcactgaagcataaccatgcaggggagcctgag

SEQ ID NO: 82152 - DNA, 589 bp, Arabidopsis thaliana columbia
  unsure (1)..(589): unsure at all n locations
cannnnnnnnnnnnnnnnnnnnnnnnnnnnnnnnnnnnnnnnnnnnnnnnnnnnnnnnnnnnnnnnnnnccacgcgtccgatctgaagatgatgaagatacatggtcaggaggagatcctactgtgttgagaggtactgatttgtctgccacagattcttatcctttaaagaaacagaagctggggagcgaagttgctggacgaaaaaagactttgtttaggagtcaaagtgctcaaagtcgttcatttagagtccctcagagtgaaaaagaggatgagtcacttgagggagttaatataaaccgattaaagaagagcgttgcttcatttcaagaagataagtatccacctggaaagaagttttgctcagatgcatctcctcgtggaactagcatgagaaagttttccccaccttttgtaccaaatgcctggagacgactatctatgcctgtggagctaaagaaagctcggttggatttctctgaggaaaaagatgatgaagaaacagggaaatgggaatctgaaatgactcatgaacgtgagctgcgagatgatgattatgtttctggtgatgatggggaaaataatg

SEQ ID NO: 82153 - DNA, 757 bp, Arabidopsis thaliana columbia
  unsure (1)..(757): unsure at all n locations
ancaggatttcgganccccatggatttcncangngcaccagaaccctntnaaatgggcaatccgggaacttagcaggcaaaggagacacggtttacatcatccacactctaccactctctggcgatgaatctcgtaactcccctctggttcaaatccggttctcctctcatacccgttggcagagtttagggaaccggagattatggagaaatacggtgtcaaaaccgacatcgcatgtcttgatatgctcgacactggttcgaggcagaaagaggtgcatgtagttgaccaagttatactggggagatgcaagagagaagcttgttgatgctgttaaagatcttaaactggattctattgtcatgggaagcagaggactcagtgctcttcaaaggataataatgggaagcgtgagcagctttgtgatccaacacgcgccttgccctgtcaccgttgtcaaggataacgaataaacgattctcactacaaaaaaaaaaaaaaaaaaaaactgtctttatcttataagtcctaccaaataatcatcgcaatttatgctttttagtttttattaataaaagaatctttatgttggttttatttgtaatttgactacaacaaaaaaagaacccagagtgttttcatcttctaaaaaaaaaaaaaaaaggnnnnnnnnnnnnnnnnnnnnnnnnnnnnnnnnnnnnnnnnnnnnnnnnnnnnnnnnnnnnnnnnnnnnnnnnnnnnnnnnnnnnnnnnnnn

SEQ ID NO: 82154 - DNA, 631 bp, Arabidopsis thaliana columbia
  unsure (1)..(631): unsure at all n locations
taggtgcaactactagaagagctatgacgtcgcatccccgcgtacgtaagctcggaattcggctcgaggaaaaacaaaaccatctcaaagtttcttgagaagaaaaaaagggtcaagaaagatgcctaaagacaggaatatcggaatcgccatggatttctcagagagcagcaagaacgctctgaaatgggcgatcgagaacttagcagacaaaggagacacgatttacatcatccacactctaccactctctggcgatgaatctcgtaactccctctggttcaaatccggttctcctctcataccgttggcagagtttagggaaccggagattatggagaaatacggtgtcaaaaccgacatcgcatgtcttgatatgctcgacactggttcgaggcagaaagaggtgcatgtagtgaccaagtttatacttggggaggatgcaagagaggaggctttgtttgatccttgttaaaggtctttaaccccggttctttttgtcaatggggagccaggggccccaaggtgccntttaaaagggtttttttggggagggttacaggcttttttgtcccacaagggggctttccccttaaccctttttaaggtttccggntaaccgntttncctt

SEQ ID NO: 82155 - DNA, 710 bp, Arabidopsis thaliana columbia
ttattacgccaggctctaattcggctcgctataggaaaaggtggtactcttcacgggccggtccgaaattcccggttcggcccacgtttcagaaaaacaaaaccatctcaaagtttcttgagaagaaaaaaagggtcaagaaagatgcctaaagacaggaatatcggaatcgccatggatttctcagagagcagcaagaacgctctgaaatgggcgatcgagaacttagcagacaaaggagacacgatttacatcatccacactctaccactctctggcgatgaatctcgtaactccctctggttcaaatccggttctcctctcataccgttggcagagtttagggaaccggagattatggagaaatacggtgtcaaaaccgacatcgcatgtcttgatatgctcgacactggttcgaggcagaaagaggtgcatgtagtgaccaagttatactggggagatgcaagagagaagcttgttgatgctgttaaagatcttaaactcgattctattgtcatgggaagcagaggactcagtgctcttcaaaggataaagatggaaagtgtgagcagctttgtgatgcggcttgtgccttcccctgtcttggttgtcagggttctccgttccttaaaatctaaaaacaaaaaaaaagggcgacgcgctgtccagttatacaggttcccgaggcgcgcgtcacgcgtgcgtcataa

SEQ ID NO: 82156 - DNA, 752 bp, Arabidopsis thaliana columbia
ttttttttttggaaccaaccagtcgttttattccacaagtccaaagaaacgaaatttcattacttcctctaataacaaagccaacaatatcatcataggacgtgaagagctttagaagaaacaaacacacaaagcttatttatcattgctcttcaaatactccttgagaacattccataactgaaccaaactttgccttaaccttcactggtggattcgccaatctacaagccatctcctttatgttcttagaatgataatcaatcttactttgtgtaaacttcaatccatgagctgtactcaccaccacaggccgatcattcgctccaataactcctgactttctcagcttcatcaacgccgtcaatgcaacaccagtatgtggacatataaacataccagtagaatcagcaagagctgttgcatccatcaactcttcctctgtagcttcctcaacaatcccattagatttcttcaacgcatacacagctctatcaatcgaaacagggtcaccaatctgaatagcagaagcaaatgtagtgtttgctttcaatggattgaaatcttctttaaacccagatttgtaatgcaagtaaagtggatttgcattagcagcttgagcacaaacaagcctagggatacgatcaacaagacctaactctttacacatatgaaaccctttgtaaaacgcatagatgttaccaagattgcctccaggaacaatgacccaatcaggaacttgccaattaaac

SEQ ID NO: 82157 - DNA, 513 bp, Arabidopsis thaliana columbia
  unsure (1)..(513): unsure at all n locations
gactcactananggaaagacggtacgcctgcaggtaccggtccggaattcccgggtcgacccacgcgtccgttgggacttgggagggaagaagatctcgttccctctaagccatgaatcgtcgtaatcgtggctcttcttcttcttcttctagggtttcgaatacttatgggaaccgccagttctctgataacccgaggactggatccggcggcggagttaatgaatcctttcagagaagatccgatgcaccgcacaaacgaaacaatgaaaaagacgaatcaaaacataaagacgaagatcctgctgacgtttcattgattgtaggaacttgttcttctatgtgcccagagagggaaagagtcacaagagaacgcctgcgtgatcttgcagtgtttgagaggctttatgggaacccctcaaaatcatccacagagatagctgtcaaaaggtttgcagacccttttcagcgggggttgtccaggcctcggatgtaagaccgctcccagtttag

SEQ ID NO: 82158 - DNA, 463 bp, Arabidopsis thaliana columbia
cccacgcgtcaagctgcttcacattgcctcacaagatcagccacacatcgtcccaatataagacaaatactgaggctactaagagatgaaaacgaagccgggaaatggattatggaagaagaaggaaatgaagattgcttcgatgacgaggtttacccgaattccagcacagaattacacttaaaccttgcgatgcttgaggtggaagacgatgaaactgcatcaatcagcagcatggagagaagtaacaacagccttttttcttctacttgttcatctagggagcttcaaacataaggaattatgcttttagctaatagagaggttaggtacttaggttagaggtttgtttcttagtgtatggagtttacttgataactttatgttagacctgagctccctgctgttatctggaccagaaaattcattcccaagacgaatcattctcaatatcaactatgcc

SEQ ID NO: 82159 - DNA, 1225 bp, Arabidopsis thaliana columbia
aattgaattagccatggagaagaatacttctcaaaccatcttctccaacttttttcttctccttctcctttcttcatgtgtctctgctcagctccggacaggtttctaccagaactcatgtccgaacgtggaaaccattgtacgtaacgctgtccgtcagaaattccagcagactttcgttaccgctccggccactcttcgcctcttcttccacgattgcttcgttcgtggatgtgatgcgtcaataatgatagcatcaccatcggagagagaccatccagatgacatgtcattggccggagacggattcgacacggtggtgaaggcgaagaaagccgttgatagcaatcccaattgccgcaacaaagtctccatgtgctgacattttggctctcgccactcgtgaagtcgtcgttttgaccggaggaccaagctacccggtggagctagggaggagagatggcagaatctccacgaaggccagcgttcaaagccaattgcctcagcccgagtttaacctaaaccagctcaacggcatgtttagccgtcacggcctctctcaaaccgatatgattgccctctcaggagcacacactataggatttgcacattgtggaaaaatgtcaaagagaatatacaattttagccctacaacacgtatcgacccgagtataaaccgtggatacgtggttcagcttaagcaaatgtgcccgatcggtgtcgacgtaagaatcgcaatcaacatggatccgaccagtccacgtactttcgataatgcttatttcaagaatctccaacaaggaaagggtttgttcacgtcagatcaaatcttgttcacagatcaacggtcaagatctacagttaattcgtttgccaatagtgaaggagcttttagacaagctttcatcacagcgatcacgaagttaggtcgggttggtgttttgactggtaatgctggtgagattcgaagggattgttcacgtgtcaattagtgtgatttgaggttttctttcttttattccttaaagaggatttttttttttaataataaaatttaatttcttgttgtcaaaataaggagttcataagtgtgaaacatggaaacttaaattaataagatgggtttattttgttgacaaaaaaaaaaaaaaaaaaaagggcggccgctctagaggatccaagcttacgtacgcgtgcatgcgacgtcatagtgttcgatagtgta

SEQ ID NO: 82160 - DNA, 669 bp, Arabidopsis thaliana columbia
  unsure (1)..(669): unsure at all n locations
atgannnnnnnnnnnnnnnnnnnnnnnnnnnnnnnnnnnnnnnnnnnnnnnnnnnnnnnnnnnnnnnnnnnnnnnnnnntgacccacgcgtccgtctgctcggagcaaaagttgtagcttctatgctcatgtttgcaacagtttgtggtatcttaatggcacttttcctaaacacggcgggaggtgcttgggacaatgcaaagaaatacatagagaccggggcacttgggggcaaaggaagtgaagctcacaaagcagctgtgactggtgataccgtgggagatccgttcaaggacacagccggtccatccattcacgtcctcataaaaatgcttgcgactataactctcgtcatggctccggttttcctctgaaagtgaaccgttacttatccatcccggcttatttactctcttgcacatatacaaatagagagggagagaggttggttataaaatgatttacatggattaatggtttttgtgtttcatttcatctgaataaatgagataattctgtttttgagtttagagacactctttaaggaattctagagacattttaatcaaaaaaaaaaaaaaaacaaaagnnnnnnnnnnnnnnnnnnnnnnnnnnnnnnnnnnnnnnnnnnnnnnnnnnnnnnnnnnnnnnnnnnnnnnnnntcattcg

SEQ ID NO: 82161 - DNA, 600 bp, Arabidopsis thaliana columbia
  unsure (1)..(600): unsure at all n locations
nnnnnnnnnnnnnnnnnnnnnnnnnnnnnnnnnnnnnnnnnnnnnnnnnnnnnnnnnnnnnnnnnnnnnnnnnccacgcgtccggtgagagcagccatattaagcactgatgctttcttaacaaatgctcggggttatccttgcttgtccaaacgccaccaaaagttaatagcaggattttttgatcatgctgcccaggttgtaatttgtggaaagcctgttcataatcttcaaaagcctcttgattctagctcggagggtacagagaagaatcctctgcgcatatatttggactatgttgcttatctgttccaaaagatggaatcactttctgaacaggaacgcatcgagctgggttacagggattttttgcaggcacccctgcagcctcttatggacaacctcgaagcccaaacctatgagacgtttgagagagactctgttaaatacatccaatatcaaagagcagttgagaaagccttggtggacagggtacctgatgaaaaagcatccgagttgactactgtcctgatggttgtgggggcaggaaggggaccccttgtgagggcatcgttacaggcagctgaagaaactgatcgg

SEQ ID NO: 82162 - DNA, 427 bp, Arabidopsis thaliana columbia
  unsure (1)..(427): unsure at all n locations
nnnnnnnnnnnnnnnnnnnnnnnnnnnnnnnnnnnnnnnnnnnnnnnnnnnnnnnnnnnnnnnnnnnnnnnnnnnnnnnnnnnncggccgcaaaaattgatgatattatggttttgtttattgatcagcattatcgttattgtggaaaaaaaaattgaaaagtcaaacaagagagcctgacttgacttggatttgcgaccaactgtgattacattgacccacaggctacaacaggtcaacagcataatatgagagagtttgagagctaaaacagcacgcactttctattcaaaaacgtaaaacaccacagctttcctctgaaatacgtgccgttttcctcgtatgcaatgtttttttccattcgtgttctacgatcaaacacatggttcaaggttcttgacttcttggtaagtaggtattgggacac

SEQ ID NO: 82163 - DNA, 584 bp, Arabidopsis thaliana columbia
  unsure (1)..(584): unsure at all n locations
atgatactctcnnnnnnnnnnnnnnnnnnnnnnnnnnnnnnnnnnnnnnnnnnnnnnnnnnnnnnnnnnnnnnnnnnnnnnccacgcgtccgtacaaatctaagcttctgtcgttgacttcgaaaactgatatctataagtcaaaatccccattctcaatcgctcatcgtcttgtagaactaattgactaaacaatggcggacaacacaggatccgagatgaaatcaggttcgtttatgttagagaaatccgccaagatctttgtcgctggacataggggattggttggatctgccattgtccgcaagctccaggatcagggtttcaccaatttggtccttcgaacccattcagagcttgatctcactagccaatcagatgttgaatctttctttgctacagagaaaccagtttatgtcatcctagctgctgctaaagtcggtgggattcatgctaacaacacatacccagctgatttcattggggtcaatctccaaatccagaccaatgtgatccaactctgttatacacacggtgggaagaaactcctctttcttggttcatcttgcatttaccccaaattt

SEQ ID NO: 82164 - DNA, 511 bp, Arabidopsis thaliana columbia
  unsure (1)..(511): unsure at all n locations
aagttctgtaaaacttaagagtactattgaacttgttcttagaacaaacttttgcatatttaaaacctaaggacaatagagtcatctggtacgaaaacttctctgcacagaaaaaacagcttaaagcataagcagcagagattaataaggaacgtttcctatagagggaccatctcgagatcattgtgttggcttttggcagatgatggggatgaggacgaagaagatgaagcgtctcttctctcctcagtgttcatctcttgaactgggggaggatccatagtagttgatgatgaggcttctgtatcagaaagatgattcttcatctccctgtgttcctggcacaaagcacaccagtgcaagcaacagtgaaccatgcaatggatccacaaggcgcattcttgagatgaaattcctcctggagtcttggcgggaanagcctgaataggttccacacatccccaagcaagaagaggccttcgcagtcacaactgtggttgggggcaatgga

SEQ ID NO: 82165 - DNA, 1693 bp, Arabidopsis thaliana columbia
  unsure (1)..(1693): unsure at all n locations
gtttcaaattctctctctctttctctttctttctcaatttttgtagtttcatactctagcttactaatcaaagatgcgagagattcttcacatacaaggtggccaatgcggaaaccagatcggagctaagttctgggaagtagtttgcgccgagcacgggatcgattcgacgggaagataccaaggagagaacgatttgcaactcgaacgagtcaatgtctactacaacgaagcgagttgcggaagattcgtcccacgcgccgtcctcatggatctagagcctggtactatggatagtgtcagatccggtccgtacggtcagatcttccgtcctgataacttcgtatttggtcaatccggtgccggtaacaattgggctaaaggacactacactgaaggtgctgagcttatcgattccgttctcgatgttgttcgtaaggaacgtgagaattgtgactgcttgcaaggattccaagtgtgtcactcattaggaggaggaactggatctggaatgggaacgttgttgatttcaaagattagggaagagtatccagataggatgatcgtgacgttttctgttattccatcaccgaaagtgtcagacactgttgttgagccttataatgcaactctctctgttcatcagcttgtggagaatgcagatgagtgtatggttcttgacaatgaagctctctatgacatttgcttcagaactcttaagctcaccactccaagctttggagacttgaatcacctcatctctgcaaccatgagtggtgtcacttgctgccttcgtttcccgggtcagctaaactctgacctgcgcaagcttgcagtgaatttaatcccattccctcgtctccacttcttcatggttgggtttgcaccactcacatctcgtggatcacagcaatacagagccttaaccgtccctgagctcactcaacagatgtgggatgccaagaatatgatgtgtgcagctgatccacgccacggcaggtacttgacagcctcagccatgttcagaggcaaaatgagcacgaaagaagttgacgaacagatgatcaacgttcagaacaagaactcgtcatactttgtggaatggatcccaaacaacgtgaaatcaaccgtgtgtgacattccaccaacaggtctgaaaatggcttcgactttcatcgggaactcgacatcgatccaggagatgtttaggcgtgtgagcgaacagttcacagcgatgttcagaagaaaagctttcttgcattggtacacaggtgaaggaatggacgagatggagttcacagaggcagagagcaacatgaatgatttggtatcagagtatcaacagtaccaagacgcaacggctgatgaggaagaagggtatgagtatgaagaagacgaagtggaagtgcaggaggagcaataacaacagcttctctgtttctcttaattccttttttttttttctcttttgtgtgagtttagtgtcttcttattcattttctcttctggttttggttttcttgtgttgacatttggctatgtgtgatggtgcatttatgtctaaggcttaggaaaatatatgtttataagttttttcgggtgaaaaaaaaaaacacaaagnnnnnnnnnnnnnnnnnnnnnnnnnnnnnnnnnnnnnnnnnnnnnnnnnnnnnnnnnnnnnnnnnnnnnnnnn

SEQ ID NO: 82166 - DNA, 3924 bp, Arabidopsis thaliana columbia
ctaaccactttcctcccttaatttctatccctatatttattttcctttcattttcctctccaactaattacacacacttgaagctgaaaaaaatgcagccgtccggtgatccggcgccggaaaaggagaaagagatgacgcagccaaaagtgtcactgcttaagctcttctccttcgcagatttctatgattgtgttctaatgactcttggatccgtaggagcgtgcattcatggcgcctcggttccaatctttttcatcttctttggcaaactcatcaatattatcggtcttgcttatcttttcccaaaacaagcctctcacagagtcgccaagtactcgttggattttgtatacttgagtgtggctatactattttcatcatggttagaggttgcatgttggatgcatacgggagagaggcaagcggcgaagatgaggagagcttatctcaggtcaatgttaagccaagacataagcttattcgacaccgaagcttctacaggagaagtcatctccgccatcacctccgacatcctcgtcgtccaagatgctctctccgagaaggtagggaatttcttgcactacataagccggttcatagccggttttgcaattggattcactagtgtatggcaaataagtcttgtcactctatccatagtccccttaatcgctctagctggcggcatctatgcgttcgtcgccatcggacttattgctcgtgtccggaaatcatacatcaaggctggtgagattgcagaagaggtgatcgggaatgtgaggaccgtacaagcattcaccggtgaagaaagggcggtgagattataccgagaagcgctggagaatacgtataagtacgggagaaaagctggtttaaccaaaggattaggtcttggatcgatgcactgtgtcttgtttctatcttgggccttgctcgtatggttcacaagtgttgtggtccacaaggatatcgccgatggtggcaaatcattcactaccatgctcaacgttgtcatcgccggcctgtctcttggacaagcggcgcccgatatttctgcgtttgtacgggcaaaagccgctgcttatccaattttcaagatgattgaacggaacacggtgacaaaaacaagcgcaaaatctggccgtaaactagggaaagtagacgggcacattcaattcaaagacgcgactttcagttacccatctcgccctgatgtggtgatcttcgacaggttaaacctagctatccctgccgggaaaattgtggcacttgttggaggaagcggatcagggaagagcacggtcatatctttgatagagcggttctacgagcctatttctggagcagtgttgctagacgggaacaatatcagtgagctggatattaagtggttaagaggacagattggtttggttaaccaagaaccagctctgtttgcaacaacgattcgtgagaacattctgtatggcaaagacgacgcaactgctgaggagatcacccgtgccgcaaagctctcggaagccatttctttcatcaacaacctccctgaaggatttgagactcaggttggcgagagagggattcaactatctggcggacagaaacaaaggattgctatatcaagagcaattgtgaagaatccatcgatactcttactcgacgaagcaacaagtgctttagacgcagagtcggagaagagcgtgcaagaagcgctggatcgagtgatggttgggagaacaacggtggtggtggctcacagactctcaacggtaagaaatgctgacatcatagcagttgtacacgaaggtaaaatagttgagtttggaaaccacgagaatctcatatctaatcccgacggagcctactcttctcttcttcgtctccaagagactgcctcattgcagcgtaacccttccttgaatcgcacgctaagcagaccacatagtataaaatactcgcgggaactatcaagaacaagatccagcttctgttcagagagggaatcggtaactcgaccggatggggctgatccatccaaaaaagtgaaagtaacggtgggacgtctttactctatgatccgtccggactggatgtatggcgtgtgtggcacgatatgtgcctttatcgctggatctcaaatgccccttttcgcgcttggcgtctcgcaagccttagtttcctattacagtggttgggatgagactcaaaaagagatcaagaagatcgctatcctcttctgctgcgcgtccgttatcactctaattgtctacaccattgagcatatctgctttggcactatgggcgagcgtctcactctccgtgtccgcgaaaatatgttcagagcaatcttgaagaatgaaatcgggtggtttgatgaggtggacaacacaagctcaatgttggcatcgcggcttgagagcgatgcaactttgcttaaaaccatagtggtcgataggtcaacgattctactgcagaacttaggtctagttgtgacctcttttatcatagcatttatactcaactggcgtctcactcttgtcgtcttggccacatacccattggttataagcggacatatcagcgagaaacttttcatgcaaggatatggaggagacttgaacaaagcatacttaaaggccaacatgttggccggtgagtctgttagcaacatccgcacggtcgctgccttctgtgctgaggaaaagattctagaactttattcaagagagcttttagaaccttccaaaagttctttcaggcgtggacaaattgcaggacttttctacggtgtctctcagttcttcattttctcttcctatggcctcgccctctggtacggatcaactttgatggacaaaggattagcgggcttcaaatcagtgatgaaaacattcatggttttgattgtgacggcgttagcgatgggtgagacattggctctagctccggatctgctgaaaggaaaccagatggttgcgtccgtgtttgagatcttggaccggaaaactcagatcgttggagaaaccagcgaggagctgaacaatgtggaaggcacgattgagctcaaaggcgtccactttagctacccttcgagaccagatgttgtaattttccgggactttgatctgatagttcgtgccggaaagagcatggcgctcgttggacagagtggatctgggaaaagttctgttatttcactcattctccggttctatgacccgactgctggaaaagtcatgatagagggaaaagacatcaagaaactagatttgaaagcattgaggaaacacattggtcttgttcaacaagaaccagcacttttcgccacaacaatctacgagaacattttgtatggaaacgaaggagcatctcaatctgaagtcgtcgaatcagctatgctcgcaaatgctcacagcttcattacctctctcccagaaggttactctaccaaagtcggtgaacgtggagttcaaatgtcaggcgggcagagacagaggatcgctatcgctagagccattctcaagaatccagcaattctattacttgacgaagccacaagcgctttggacgttgaatctgagcgtgtggtacaacaagcattggatcggttaatggctaaccggacgactgtggtagttgctcacaggctatcgacgatcaagaacgctgacacgataagtgtattacacggaggtaagatcgtagagcaaggcagccaccgtaagctcgttctaaacaagagtggtccatattttaaacttatcagtcttcagcagcagcaacaaccttaaattaagtactatactttatttattgaaaaactctttttatttttatttttgtggaaaatattgatcatatactcatttgatgtgattatcttaatcttcttgatttaccgttggtaaaaaaaaagttacg

SEQ ID NO: 82167 - DNA, 464 bp, Arabidopsis thaliana columbia
tttctatttgccctcttgtttcatgtttggtcctgtcaatcttccctttctttcttctcagctatttgcaacaaagaaggcagactctatgtcatgttggacactattggatttgtacctaaaccccagcaccgatgccccattcccgttgattatgaccctgataaggtgctcctaccaagtgataaaaccgcagatacaattgtcagaaatttgacctacgtaacagaggatgaatcctctaagtctcagtttcctctatttggcggaaacataagctggtctgaacgagaagaaagcttcaaactgaaacctgagatgaaggtccattgcggattcatgccacgtggtggtgctgaaatgtcatctctggataaagaatacgtaaagaagtgcagatttgttgttgccacggtgattttcgatgcatatgatgaaccccaccagccatcaaacataagcaa

SEQ ID NO: 82168 - DNA, 495 bp, Arabidopsis thaliana columbia
cggccgcccttttttttttttttttttttttttttttttaattatttttggggaataatcaaactttagggttaaaaactttcagcatgaaaatccagttatttggaagcaaaaaccaaaaggacccatttttttcatagaaagtatgttacactgcaaaacaaaatagatggtttacacaaaaaacaagctaaccacatgctttcagtttcttcgataagacaaacccaaaaaacgaagaaagaagacgggttatataccagagaagacgagataagttcactctcgtctagctagattatctatcagcaagttcgtcgttggagccaaagattgatagcgccgatgtttttttctttttcgatggttggtaatgtgaattgttaagtccagactcggttggcgtacctagctgcaacgatatatgatcatctggagatatccatgccagtggattagcttctttagctacaggggtgtttgcattatcgatgg

SEQ ID NO: 82169 - DNA, 685 bp, Arabidopsis thaliana columbia
  unsure (1)..(685): unsure at all n locations
aagtcatgaacctaattggtgatgtaagagggaaggtggcaataatggtggatgatatgattgatactgctggaaccattgtaaaaggagcagctttgttacaccaggaaggtgctcgggaggtatatgcgtgctgcacacacgctgttttcaggtaaaccactaacctatattttgtttgttcttgaacagtctcaaaatcactacttcctgaagcattatttgttttctttgttacgaacaaatcaatatggaagcccgccagcgatagagcgattatcagggggtttgctgcaagaagtgatagtgacaaacacattacctgtagcagagaagaattacgtcccgcagttaacaatattatcggtgggtaatcttctgggtgagaccctttggcgtggtccatgaagatagcccccgttagtaggattttccttttgaaactgcttggtttttgttaacgcccccccgatcggtataagttcctcttttttgttcnacttcttctcgccagtttctagtctaaccatgtcttgcttctcttactcacctaaagtatgtcacagttctatcttttcttctttttagcataatagagttatgagatatcaatgaaaaaaaaaaaaaacaaaagggcggccgctctagaggatccaagcttacgtacgcgtggatgcgacgtcaa

SEQ ID NO: 82170 - DNA, 542 bp, Arabidopsis thaliana columbia
  unsure (1)..(542): unsure at all n locations
atgattcttccagctgctnnnnnnnnnnnnagaagacccatcgccgcaccgcttgagtcactcttcttcccggagaagaaagaaacaacaacaaacatattcaccattaccttcttcttctcctccttctccttcgtttctcactccaaatttggaaccctaaatcctaatatccttcgattagttctcttctctatcggaattcttaacgttgagaggagtctgatatttgccgtgactcaagagattccaggtgtttccgacgtatatatttacatatggcgtcgttggctctgacttctcctccctccgttaagattccttcgtatctctcctcggcgtcttcgtctctcttctcccgttcctcgatttctttcaggaccactgagtctcgctctcgaatctgcgtttctggttacgcgaaatgcaatttgcctaaggcactaaacgggaacgctcgtgttccaattattaatgagacgacaattcctaagttctttgattcttcacggttggagaaatcgggtagtagaaacaatact

SEQ ID NO: 82171 - DNA, 1724 bp, Arabidopsis thaliana columbia
  unsure (1)..(1724): unsure at all n locations
gagtccaacacaaactcggagacgaagaagaaggagagatgaaaaccattaagccattccttcttccgtatcactctgtcaccttcaaaatcctaaaccataatttttccgaattcgttgtggaagagactgcttgagtgagtcagaggtgggtttacgtgaggtattgctgacaatggcgtctctgggtctatcctttcctcccgccgcaaaaacgccgacgtatctagcctcttcgtcttcaactttcttctctaactcttctctatccgtcagaacctctcagtttcgctcccgaaactctgtcttcgcttgtgttaaatgtgatatgccggagtcattgaatgtgggaaacgggaatccaagtatcccaattattaatgagaggacacttccaaagttcttggaatctgctcgtatggagaaatcagtcaatagaaccaatacaaggttgaagttgttctctggtactgcaaatccagcacttgctcaggaaattgcttggtatatgggcttggatcttggcaaggttaatattaagaggtttgctgatggagagatctatgttcagctacaagagagcgttaggggatgtgacgtctatttggtgcagcctacttgcactcccactaatgagaatctcatggagcttttgattatggtagatgcttgccgaagagcatcagctaagaaagttacagctgtgattccgtattttggatatgcaagagctgacaggaagacacaagggcgtgaatccattgctgccaaattggttgcaaatcttatcactgaagctggtgcagatcgagttcttgcttgtgatcttcattcaggacagtcgatgggttattttgacattccagtcgaccatgtgtactgccagccggtgatacttgattatcttgctagcaagtcaattccctcagaggatttggtagtggtttctcctgatgttggtggagtagccagggcccgcgcttttgcaaagaaattatcagatgcaccacttgccattgtcgataaaaggcgttctggacacaatgttgctgaggtcatgaacctaattggtgatgtaagagggaaggtggcaataatggtggatgatatgattgatactgctggaaccattgtaaaaggagcagctttgttacaccaggaaggtgctcgggaggtatatgcgtgctgcacacacgctgttttcagcccgccagcgatagagcgattatcagggggtttgctgcaagaagtgatagtgacaaacacattacctgtagcagagaagaattacttcccgcagttaacaatattatcagtggctaatctcctgggtgagaccatttggcgtgtgcatgatgatagttccgtcagtagcattttcctttgacctttctcattgcaaccaacaatttgaacgattcttggtttgttagtcggtttagaaagtttatcccggttcatgttctaaccggaaagcttcaacaaaatttgcttgcattgtcttttgatacagcttaggtttttcttatttgctccacatctcaaaattatggatgcacaaatggtgttgaaccgattttttattatggtgtacacaagtttttaacttaatatatagaacatcttgtatcgtatcaaaaaaaaaaaaaaaaaaaagggcggccgctctagaggatccaagcttacgtacgcgtgcatgcgacgtcatagtggtngatagtgta

SEQ ID NO: 82172 - DNA, 1355 bp, Arabidopsis thaliana columbia
gccggacctatacgactttcttagggaaacctggtacgcctgcaggtaccggtccggaattcccgggtcgacccacgcgtccgcgtgttccaattattaatgagacgacaattcctaagttctttgattcttcacggttggagaaatcggttagtagaaacaatactaagctcaagttgttctctggtactgctaatccagctttatctcaggaaattgcttggtatatgggtctggagcttgggaaggttagcataaagagatttgctgatggagagatctatgttcagctcaaagaaagtgttagaggttgcgatgtctttttggtgcagcctacttgcactccaactaatgagaatctcatggagctattgatcatggtggatgcttgccgaagagcatcagctaagaaagtcacagctgtgattccgtattttggatacgcaagagctgatagaaagacacaagggcgtgaatctattgctgccaaattggtagcaaaccttataacagaagccggtgcagatagggttctggcttgtgatcttcattcaggacaatccatgggttattttgacataccagtggatcatgtctattgccagcctgtgatacttgattatcttgctagcaagtcaatttcctctgaggatttggtagtggtttctcctgatgttggtggagtagccagggcacgtgcatttgctaagaaattatctgatgcaccacttgccattgtcgataaaaggcgtcacggccacaatgtcgctgaggtcatgaacctaatcggtgatgttaaagggaaggtggcagtaatggtggatgatattattgatacagctggaaccattgtgaaaggagcagctcttttacacgaggagggtgcacgtgaggtttacgcttgctgtacacacgctgttttcagtcctcctgcgatagagcggttatcaagcggtttgctgcaagaagtgatagtgacgaatactttaccagtagcggagaagaattacttcccgcagttaacgatattatcggtggctaatcttctgggtgagaccatttggcgtgtccatgatgatagctccgttagtagtattttcctttgatacttgttggtttttgttaatcggtttaggatcggtctaagttcctcttttttgttctacttcttctcgacagtttctagtctaaccatgtcttgcttctcttactcacctaaagtatgtcacagttctatcttttcttctttttagcataatagagttatgagatatcaatgacaataaaattttaatattttggtttattgaaaataattacattatggtgtaaacattatttctcaggatttattg

SEQ ID NO: 82173 - DNA, 548 bp, Arabidopsis thaliana columbia
  unsure (1)..(548): unsure at all n locations
taaaaaaaatacaaagtctctctccgccgccggaaaaatggttgagccagctagtccagattccgacgaagggatctcgctgctcgagtttcacggtaacggtgaccgttcctggcagttaaatttcgatgatttccaggtttcaccggaacacaaggagaagaaatctccgagtaaactacacaactgtcttggttgtttgggtccggaagacaatgtggcagattattaccagcagcaagtagagatgcttgagggctttactgaaatggatgaacttgcagaacgtggctttgttcctggaatgtcaaaggaagagcaggataatttggctaaaagcgagacatttggcgattagaatatcaaacatttgcaaacatgcttctttttgctgctaaagtctatgcttctgtcactagtggctcttttgctatcattgcctctacattggcctctcttcttgaacctctttctgggttaaccncgggttnccgccttttnnntnagannccaccngttnagttncnttggagancgggtgnaccnta

SEQ ID NO: 82174 - DNA, 530 bp, Arabidopsis thaliana columbia
  unsure (1)..(530): unsure at all n locations
gttataaattaaatgtcagataattccattaaaacatcaaaattgacaaaaacataaagtcctctatttgcctctaccattttttacttgaattctacaaagtataaagttatacagctgaaaccaggaaataaggcactgaatctacactggtatatcagtaatatttccggtttaccaaaaccgatgtgggtgaagctgctaaagcggacctgccggtttaacttccgtagagaggaagaaaactctacgagatttctattaaaagctagatgatggtcgaggcttaccttgaatggagtttaagtgctgagtaacgaaaataactgccataactactaaggaggcaacccaccaacggactgaagnacagaggcccctggntgtctggttttgnacaaancccgtaaaccccnatttganggtcattaccaatcacnatccggtagngccanccgttcgngnaggcatcaaggtggtaaggtgnattgagtcgggtttnnnccgggaantncgattggnagnccaat

SEQ ID NO: 82175 - DNA, 677 bp, Arabidopsis thaliana columbia
atataagctcccaatctctggattggctcaccagaaatcgaaaccataccgcgcaactcacccatacaccatcgtgccattagaagattattctcagaaacagcttttgcacaagcaacaagtaccaacttcaagtctccccttgatattgcctccactatcaataacaaatctttagcatcatcaggccacatggagagttcatggcagatagcatcatcgatactctcagctatctctggcagtggctgcaacattattgaacctcttacattgtccatcacaaataagcaagtaagaatctttgaacatcaaccattatcctcaaatgaccttttatttatctgatcttcataacaaacaccttgtgtaggttaagaagtgatcttctcggtggaagtcgataagggatttggttttgcaagtgagagcgcacgcctggatccaaccaaagctcgcagctgaagcaaaaggaagaatctttttagttgctgtagtgaagaaaataacacatcacatacgacgtcgttttaggcttaaaccgaataagacccgatcaccgacttgacacatctcgcttaaagtctctggtcaaatgggaaatagtgtaagaagcaatctaagagacatcagaggacgacgatcgatggatcctcggatgtggcacaaagtcgccg

SEQ ID NO: 82176 - DNA, 603 bp, Arabidopsis thaliana columbia
tatactgactcaaatagggaaagctgccacgcctgcaggtaccggtccggaattcccgggtcgacccacgcgtccgcgcacgcgtgggcggacgcgtgggcggacgcgtgggcagaggacgacgatcgatggatcctcggatgtggcacaaagtcgccgctatttccggtatggctgctcttggtttgggaacttatggtgctcatgtctttaaaccagagaacccttcttacaaacaggtgtggcaaacggcttcactttaccatttggttcacactgctgctcttgtttctgctcctagcaccaaatatcccaacatttttggtggcttgttgactgctggaattgtagccttttccggcacgtgttatatggtagcgctgcgggaggacagaaagttttcgacattggcaccattcggaggctttgcgttcattgctgcatgggcaactttacttttctaaacaatctcataaccatctatattgtcaagtttgtgggcaagcttatcctccatatgaactcactggtttttttttgtttacctaagagattgcttaataacaattctgtggcggcaaccattaagcatcttcctttact

SEQ ID NO: 82177 - DNA, 655 bp, Arabidopsis thaliana columbia
  unsure (1)..(655): unsure at all n locations
aacngggcncnacgtgncccgggntggccaaacccnctttccgnaggccccctggttgggacttangggcccangctttaacccngngacccttcttacaaacaggggtggcaaccggttcactttccnattgggtccacactgctgctcttgtttctgctcctagcaccaaactatccccaacatttttggtggcttgttgactgctggaattgtagccttttccggcacgtgttatatggtagcgctgcgggaggacagaaagttttcgacattggcaccattcggaggctttgcgttcattgctgcatgggcaactttacttttctaaacaatctcataaccatctatattgtcaagtttgtggtcaagcttatcctacatatgaactcactgttttttttttgtttacctaagagattgcttaataacaattctgtgtcgacaaccattaagcatcttcctttacttgttcagtttgttgctaaagggattatgtaaatgacgaccatattaatgtaatcttattaccatacaatttatcaaaattctacattacaagaaaaaaaaaaaaaaaacaaaagggcggacgctctagaggatccaagcttacgtacgcgtgcgtgcgacgtcataactcttctatagtgcacct

SEQ ID NO: 82178 - DNA, 372 bp, Arabidopsis thaliana columbia
  unsure (1)..(372): unsure at all n locations
cttattataaaaaactctggtcttatcacagagtgttacaatttacattggcaatggcttgttgtcgcgaaacgactgaacaagaagaaaagctcgacgcgggcggaaaagagggacctcatgtcctgctccatgtattgccaccagagtcagccctttgtaaacttggctccatccaccaacctgttctggccatcatcgttccaagggtaccatttggagagtggctgtaacttgagggctctaatggagtatcgtgttccagtaatgggaaccactgattcantgtntccnctgaaaacccatatcctgagacctgcggcgntgagttctttgtagattggaagcatagacagaggagaatctgcccat

SEQ ID NO: 82179 - DNA, 953 bp, Arabidopsis thaliana columbia
  unsure (1)..(953): unsure at all n locations
nnnnnnnnnnnnnnnnnnnnnnnnnnnnnnnnnnnnnnnnnnnnnnnnnnnnnnnnnnnnnnnnctttttttttttttttttttttctacccttactctctcatgcgtttccttaattaatcaatttaggttcaggttttgagtttatagaaaatgatcaaattacatatatggctggaccaatatattcctatacgagtgagacagatccaaccatgcctacaccaacgttcaatttttttgtaataaaaaactacatttttggttgaagcacaacgaggcctacctttgatccatcttaaagctgttgaaatgtcctcattcaacattcacttgaagaagttcctaagtccactgaagagccgtagagccttcagctcaccacttctgatatctctcagtctcctcctcagaatgtattgagcacggtacagtatcctgcgctcactagtgggacaagtctacagctagctgtttcagaaacgcttttcgggtcaactgttttggagatgttatgtccaaatccattgatccactttcctttagaaatcggctgtactttgatatgcttgtttcgcatgagtccagtatgaactgcaatgcgtcttcctcgatttcaggatattttagatcattctttgttgatgtcttatttgaagcagctttcgccatctcttcaaagttgtttctcatatctggagggctcaccacaagataagcatatgccattagctccattggccaacccgttatccttacgggaaagccattggggtgtcgataatccgtgtttctttaaagcatccagcttttcctcgtaacacttatcgtttttcctaagtgataatgctagttctactgaatcactaggattggttccttctctgggaacaaacccataagataacaatagctctccgttagatttattcccataggatatgaaaacctgg

SEQ ID NO: 82180 - DNA, 513 bp, Arabidopsis thaliana columbia
  unsure (1)..(513): unsure at all n locations
nnnnnnnnnnnnnnnnnnnnnnnnnnnnnnnnnnnnnnnnnnnnnnnnnnnnnnnnnnnaaagaaccacgcgtccgggaggatggtgacgaaagaatccattgaagtgatagctcagagcattggactctccactctttctccggacgtctcagccgctcttgctcccgatgtcgagtatcgcgtccgagaggtcatgcaggaagctatcaaatgcatgcgtcatgctcgacgcaccactttaatggctcatgatgtcgattctgctcttcatttcaggaatttggagcctacctctggctccaaaagtatgcggttcaagagagctcctgagaacagagatctatacttcttcgatgacaaagatgtcgagctcaagaatgttatcgaagctcctctaccaaatgcacctcctgatgcatctgttttctctcattggttggcaattgatggtattcaaccttccattccacagaattctcctctccagccatatctgaccctaaacgatcgg

SEQ ID NO: 82181 - DNA, 671 bp, Arabidopsis thaliana columbia
gaagagagagacggcgatggcggctacaggatctggacggtctcaattcatttccagttccggcggtaaccgaagcttctccaattctccactcatcgagaactctgattctaatcagattattgtctctgagaagaagagctggaagaatttctttgcttacttaggccctggttttcttgtttcaatcgcatatattgatcctggaaactttgagactgatctgcaagctggagcacactacaagtatgaattactttggatcatattggtggcctcatgtgcggctttggtgattcaatctctggctgctaatcttggttctctcgaggaaaatccctcgttccgcttctggtatcaaggaagcttgcaggttttacttgatagaaagtggattggctctaatggtggcctttctcataaacgtctctgtaatatcagtaagcggggctgtttgtaatgcccccaacttaagccctgaagatcgagctaattgtgaggatttggacttaaacaaggcttcgtttctgctacggaacgttgtgggaaaatggagctcaaagctatttgcaatcgcgcttcttgcttctggtcagagctcgacgataaccggaacttatgctggacaatatgtaatgctgggctttcttgatctcagactcgagccatgg

SEQ ID NO: 82182 - DNA, 747 bp, Arabidopsis thaliana columbia
acgactcaactagggagagctacgccgcctgcaggtaccggtccggaatacccgggttgacccacgcgtccgaggacgcgtgggcggacgcgtggggcttgatcataagcaagagcggcttcctcggctttgtcaaatgtcccgagccaaaccctaattccattcctcgttgagtctcttatctccgctgcaaatttcccccacggccttttcctcactcctctgtatgatctttcttcatcaattccaaccttttcttcttcttcggagttagaaacgtcgccgttttgaatttcttccttaatcatcatctccggtgactcaaatgagaaaaagtcatcggagtaatcataattagggcaaaagaaggcttgaggttcagatgattgatccaagaaacagctctcgttccataagagtgattcttgtgatgagctccaagaacttggagatgaatacatggaagattgggaatattccataagtttttttttttttttttttttgcgagttctccttctcctttcaaaagttatctcttcctgttgtggcaataagtttatttcaaaacctaatcctatatatataagaggcccgggatttataagatatatgaaagtgggaagtattttattgttttaaaacaaaaaaaaaaaaaaaaaaaaaaaaaaagaaaaacccaaagggcgaccgctctagaggatccaagcttacgtacgcgtgcgtgcgacgtcataatcttgtata

SEQ ID NO: 82183 - DNA, 811 bp, Arabidopsis thaliana columbia
attccaattctcaaagtgctctctttttaaaccaatctgctctcttccacttactctctctatctctctcccatctcgtttcttttttggtcattaaaagagaaacctttgctctgaatcttgaaaatggattctttgatcaaactcttcttctgcctctttatcttcttatgtacttcgctcttatttggagaaatcaatggagtggagggttcaaatcaaaatcatcacttgtatccatttaggccaacgaagctctttgtgttcggagattcttatgccgataccggaaacattaaaaaggctttctctagctcttggaaattcccttacggtatcactttccccggaaaacccgctggccgtttctccgatggccgtgtggcaacagattttctagctaaatttgtggggataaaatcaccaatcccatacttttggaaagattacgcgggaaagaaacgattacagtacggaatgaattttgcgtacggaggaacaggagtgttcaacactcaaactccattgcctaacatgacaactcaaatcgacatcttccagaacattctcaccaccggcgacatctactatcctcccgagcttacttcatccgtggctctcgtcagtgtcgctggcaacgactactccaatttcatcgccctaaaccgccctgcctctgaattcccagcattcataaagcaagttgtggatcaaacagaggtgaatttgagacggatccacgctttgggagtgaaaaagattgcagtaccatccctgcaaccgcttggttgtctccctcccttcacattcg

SEQ ID NO: 82184 - DNA, 523 bp, Arabidopsis thaliana columbia
aatacgactcactctagggaaagctcgtacgcctgcaggtaccggtccggaattcccgggtcgacccacgcgtccgattctcaaagtgctctctttttaaaccaatctgctctcttccacttactctctctatctcttcccatctcgtttcttttttggtcattaaaagagaaacctttgctctgaatcttgaaaatggattctttgatcaaactcttcttctgcctctttatcttcttatgtacttcgctcttatttggagaaatcaatggagtggagggttcaaatcaaaatcatcacttgtatccatttaggccaacgaagctctttgtgttcggagattcttatgccgataccggaaacattaaaaaggctttctctagctcttggaaattcccttacggtatcactttccccggaaaacccgctggccgtttctccgatggccgtgtggcaacagattttctaggtatctcttcatcttcgaaagtaaaaaaacttatcatccttaaaacttatattg

SEQ ID NO: 82185 - DNA, 561 bp, Arabidopsis thaliana columbia
  unsure (1)..(561): unsure at all n locations
nnnnnnnnncnnnnnnnnnnnnnnnnnnnnnnnnnnnnnnnnnnnnnnnnnnnnnnnnnnnnnnnnnnnnnnnnnacccggccacgcgtccggtgcagagaaatcaagaatggatttgcagagaggctttgtgttcttgtctttggttctatcttttatgataatcgaaacgacggcgtatcgagagagacagctgctgctgctgcaaccaccgcaagaaacggcgatagataccgcaaacgcggtggtgacggttcaagatcgaggtttgaagacgcggcgaccggagcataagaacgcatacgcaacgatgatgtacatggggacgccaagagactacgagttctacgttgcgacacgtgttttgatcagatcgttgagaagtcttcacgtggaagctgatctcgtcgtcatcgcttctctcgacgttcctctccgatgggttcaaaccttggaagaggaagatggagctaaagtggtgagagttgaaaatgtggataatccatacaggagacagaccaacttcaacagtagattcaagcttactctaaacaagctcta

SEQ ID NO: 82186 - DNA, 552 bp, Arabidopsis thaliana columbia
  unsure (1)..(552): unsure at all n locations
atgatacttctcnnnnnnnntacgactcacnatagggagagctgacacgcctgcaggtaccggtccggaattcccgggtcgacccacgcgtccgcgaagcatccttcaaggaagcattaaggaggaatgtggcagcaaatcccggggtgtgttccatatcttctagcttggattccgatactgcggaaatctccacgacgtttaagatcgagctaggggatagtaacgccgttgagagatgcagcgtattgcaacgcttccatagtttcgagaagtggatgtgggataatatgctgcatcctagtgctttatctgcatttaagtatggtgctaagcaaagcagtccgctttttcgcatatgcagaatctgtgcggaactacactttgtcggagatatttgctgtcctagttgcggtcagatgcatgctggtccagatgttggtgagttgtgttttgctgagcaaggggcctcacactcggggataatttgagaagaggagatactggctntatcttgcgtagctcaatcttgtctcctcttagaataagact

SEQ ID NO: 82187 - DNA, 656 bp, Arabidopsis thaliana columbia
  unsure (1)..(656): unsure at all n locations
ctacnnnnnnnnnnnnnnnnnnnnnnnnnnnnnnnnnnnnnnnnnnnnnnnnnnnnnnnnnnnnnnnnnccacgcgtccgatcctctcaaatctcaaactctcttcttcccatcactctctcgctctctcttcaatctcatctcaatcatgacagagcaagagatctgcgtgagggttacaagagcggcggcgaaacgaaaagcttcgacggcgatgggtattgacggagatcgggtcaacaagaagagagttgttctcggtgagcttctaaacgtctccaatgtcaatctcttggctaatctcaatcagaagaaagaaacccagaagccaaaaaggaatcttaaacctcctccggcgaaacagattaagtcagctccggtggctattattgacctagaatcaaaatctgacattgattctcgatctgatgatcctcaaatgtgtggaccttatgttgctgatatctacgagtatcttcggtcaacttttaggtgaagccaaagcaagaggaccttttacccagattacatagagaaagttcagaaagatgtaacaccaagtatgagaggtgttttggttgattggttagtggaagttgctgaagagtataaacttggatctgaaacactttatctcactgtctcacatattgata

SEQ ID NO: 82188 - DNA, 542 bp, Arabidopsis thaliana columbia
  unsure (1)..(542): unsure at all n locations
tcactactaggacgcgttgtacgtcgcaacaccctatagtgagtcgtattatacagaaccgcactcgcagaagatgtgttctcatctgactcctccgatctgccatgtctcggcttttccaacgctaagaagtttcacagacgcggcgaacgagggggaggaaggagatagatctctttttccgtcgcgataataataagaaataaacgtgtctagaggctgtcactgaagagttgattcatacggagagaggatagaagtggcagatgggatatcgagcttttggggtcctgtgacctctactatacagtgttgtgagatgcactacgcctactcatcctacattgctgagttcgacaaacacttttaatccaatgtccctgggnatncccattggcccncaattgggncttgtcaatgcattaaggcnaccgggttttaaaaagnggttttanaatttttcnaatttccgnaaatngaanctttttttnggganaattttttcccatgccnttttnaacnagggnaanaacaggggtttg

SEQ ID NO: 82189 - DNA, 585 bp, Arabidopsis thaliana columbia
ctaattcgataaactatagggcaagctggcacgcctgcaggtaccggtccggtattcccgggtgcgacccgggcgttcgaaaggtcatcacccattctcactcgcagaatatttgttctcatctgattcctccgatctgccatgtctcggcttttctaacgctaagaagtttcacagacgcggcgaaggagagggaggaaggagatagatctctttttccgtcgcgataataataaaaaataaacgtgtctagaggctgttactgaagagttgattcatacggagagaggatagaaatggcagatgggatatcgagcttttggggtcctgtgacttctactatagagtgttgtgagatgaactacgcctactcatcctacattgctgagttctacaacactatatccaatgtccctggaatcctattggctctcattggtcttgtcaatgcattaaggcaacggtttgagaagaggtttagcattcttcacatttcgaatatgatacttgctatcggcagcatgctctaccatgccaatttgtaaaaacgtgcaacaacagagtggtgataccccatgggggggg

SEQ ID NO: 82190 - DNA, 485 bp, Arabidopsis thaliana columbia
aaccctaagatcatctctttaaattaccatccgtcttctgcaattacacaagtgattcgaatcgcaatcaaaccacaaaccctaagatcaacacagatcctaatactctctgatcattcctttaaaccgttctttagttttgctaattaaaatagacttttctaggttttattatttcagacaattaattattatcgaactttgccacaacggatgacatttcccggtatcggattttcatctctaaccggaatagtcgaaggatcttcttctccttcacctttaactctcatataaagctcttgaccaagataccattgctctgctttctgggatctcacgttccacattccttgatgatccatagctatcaatattgctgtccacgaatatggataaacctgaactggtgaccgtgaaacagcatctactaagttatatccagcttttttgctttcagaccaagctccaaatccatatccgac

SEQ ID NO: 82191 - DNA, 3850 bp, Arabidopsis thaliana columbia
gtctccgataactagtggatgatgattcaccctaaatccttccttgtctcaaggtaattctgagaaatttctcaaattcaaaatcaaacggcatggtttccggagtcgggggtagtggcggtggccgtggcggtggccgtggcggagaagaagaaccgtcgtcaagtcacactcctaataaccgaagaggaggagaacaagctcaatcgtcgggaacgaaatctctcagaccaagaagcaacactgaatcaatgagcaaagcaattcaacagtacaccgtcgacgcaagactccacgccgttttcgaacaatccggcgaatcagggaaatcattcgactactcacaatcactcaaaacgacgacgtacggttcctctgtacctgagcaacagatcacagcttatctctctcgaatccagcgaggtggttacattcagcctttcggatgtatgatcgccgtcgatgaatccagtttccggatcatcggttacagtgaaaacgccagagaaatgttagggattatgcctcaatctgttcctactcttgagaaacctgagattctagctatgggaactgatgtgagatctttgttcacttcttcgagctcgattctactcgagcgtgctttcgttgctcgagagattaccttgttaaatccggtttggatccattccaagaatactggtaaaccgttttacgccattcttcataggattgatgttggtgttgttattgatttagagccagctagaactgaagatcctgcgctttctattgctggtgctgttcaatcgcagaaactcgcggttcgtgcgatttctcagttacaggctcttcctggtggagatattaagcttttgtgtgacactgtcgtggaaagtgtgagggacttgactggttatgatcgtgttatggtttataagtttcatgaagatgagcatggagaagttgtagctgagagtaaacgagacgatttagagccttatattggactgcattatcctgctactgatattcctcaagcgtcaaggttcttgtttaagcagaaccgtgtccgaatgatagtagattgcaatgccacacctgttcttgtggtccaggacgataggctaactcagtctatgtgcttggttggttctactcttagggctcctcatggttgtcactctcagtatatggctaacatgggatctattgcgtctttagcaatggcggttataatcaatggaaatgaagatgatgggagcaatgtagctagtggaagaagctcgatgaggctttggggtttggttgtttgccatcacacttcttctcgctgcataccgtttccgctaaggtatgcttgtgagtttttgatgcaggctttcggtttacagttaaacatggaattgcagttagctttgcaaatgtcagagaaacgcgttttgagaacgcagacactgttatgtgatatgcttctgcgtgactcgcctgctggaattgttacacagagtcccagtatcatggacttagtgaaatgtgacggtgcagcatttctttaccacgggaagtattacccgttgggtgttgctcctagtgaagttcagataaaagatgttgtggagtggttgcttgcgaatcatgcggattcaaccggattaagcactgatagtttaggcgatgcggggtatcccggtgcagctgcgttaggggatgctgtgtgcggtatggcagttgcatatatcacaaaaagagactttcttttttggtttcgatctcacactgcgaaagaaatcaaatggggaggcgctaagcatcatccggaggataaagatgatgggcaacgaatgcatcctcgttcgtcctttcaggcttttcttgaagttgttaagagccggagtcagccatgggaaactgcggaaatggatgcgattcactcgctccagcttattctgagagactcttttaaagaatctgaggcggctatgaactctaaagttgtggatggtgtggttcagccatgtagggatatggcgggggaacaggggattgatgagttaggtgcagttgcaagagagatggttaggctcattgagactgcaactgttcctatattcgctgtggatgccggaggctgcatcaatggatggaacgctaagattgcagagttgacaggtctctcagttgaagaagctatggggaagtctctggtttctgatttaatatacaaagagaatgaagcaactgtcaataagcttctttctcgtgctttgagaggggacgaggaaaagaatgtggaggttaagctgaaaactttcagccccgaactacaagggaaagcagtttttgtggttgtgaatgcttgttccagcaaggactacttgaacaacattgtcggcgtttgttttgttggacaagacgttactagtcagaaaatcgtaatggataagttcatcaacatacaaggagattacaaggctattgtacatagcccaaaccctctaatcccgccaatttttgctgctgacgagaacacgtgctgcctggaatggaacatggcgatggaaaagcttacgggttggtctcgcagtgaagtgattgggaaaatgattgtcggggaagtgtttgggagctgttgcatgctaaagggtcctgatgctttaaccaagttcatgattgtattgcataatgcgattggtggccaagatacggataagttccctttcccattctttgaccgcaatgggaagtttgttcaggctctattgactgcaaacaagcgggttagcctcgagggaaaggttattggggctttctgtttcttgcaaatcccgagccctgagctgcagcaagctttagcagtccaacggaggcaggacacagagtgtttcacgaaggcaaaagagttggcttatatttgtcaggtgataaagaatcctttgagcggtatgcgtttcgcaaactcattgttggaggccacagacttgaacgaggaccagaagcagttacttgaaacaagtgtttcttgcgagaaacagatctcaaggatcgtcggggacatggatcttgaaagcattgaagacggttcatttgtgctaaagagggaagagtttttccttggaagtgtcataaacgcgattgtaagtcaagcgatgttcttattaagggacagaggtcttcagctgatccgtgacattcccgaagagatcaaatcaatagaggtttttggagaccagataaggattcaacagctcctggctgagtttctgctgagtataatccggtatgcaccatctcaagagtgggtggagatccatttaagccaactttcaaagcaaatggctgatggattcgccgccatccgcacagaattcagaatggcgtgtccaggtgaaggtctgcctccagagctagtccgagacatgttccatagcagcaggtggacaagccctgaaggtttaggtctaagcgtatgtcgaaagattttaaagctaatgaacggtgaggttcaatacatccgagaatcagaacggtcctatttcctcatcattctggaactccctgtacctcgaaagcgaccattgtcaactgctagtggaagtggtgacatgatgctgatgatgccatattagtcacacttcagttggtatgagagtttgtatcattgtatgagtgtttgtgtgtctaacgacgtcggaggaggatagaaagttttttttttgtttccggtgagattagtagagaagagggagattatttgcgttcagctcagctcgccggaaaaaaaacgtaacagtagttgtagagaatttcaagacttttgtttgtgctgtgtaaattgacaactccgagagaaacaaaacaatgagat

SEQ ID NO: 82192 - DNA, 379 bp, Arabidopsis thaliana columbia
  unsure (1)..(379): unsure at all n locations
nnnnnnnnnnnnnnnnnnnnnnnnnnnnnnnnnnggacgggttattactaataattttcgccgcactaataagggtcattcattccggccaaaaaactatttattatgaaatctatcactataactttcggggacgagctgagatcgttccattcgctataaaaaagtggtttaattagtatcatttcagttattgattttgggacctcgtttcccaactgggccctgacctctcgctctcttccatttctccacattgatcatcctagcgaagatttccctaagcaaagtcaacttccgcgattgctgtgaaatgacgttaacggccgacgagctttggctaagtatgatcccatacccatcttgaaaattatcaatt

SEQ ID NO: 82193 - DNA, 651 bp, Arabidopsis thaliana columbia
  unsure (1)..(651): unsure at all n locations
nnnnnnnnnnnnnnnnnnnnnnnnnnnnnnnnnnnnnnnnnnnnnnnnnnnnnnnnnnnnnnnnnnnnnnnnnnnnnnnnnnnccacgcgtccgcccacgcgtccgcccacgcgtccgcccacgcgtccgccgcctgctcttcgataattccgaggagcttcttcactcttcttatatctcatttctctctatctctctctctctctcgcattgcgattaacgaaattcgaaaaatgtctcgtcttctccaaacacccttcttaccttcagtttccctccccacaaaaacacgatcttccgttacgggtttccgggtaaagcccagaatcatcccaattcaagcaaagatccgagaaatcttcatgcctgcactaagttccacgatgaccgaaggcaaaatcgtctcttgggttaaatcagaaggcgataaactcaacaaaggagagagtgttgttgttgttgaatctgataaagctgatatggatgttgagactttctatgatggttatctagctgcaatcatggttgaagaaggtggtgttgctcctgttggttctgctattgctttgttagctgaaactgaagatgagattgctgatgctaaagctaaagcttctggtggtggtggtggtggtgattctaatgctcct

SEQ ID NO: 82194 - DNA, 265 bp, Arabidopsis thaliana columbia
ggggttcgcaggccttgataaatgtgaccaacaattgccggtatccatgggaaatcacattaacccattaagtaacttgtaacagaagggacagtccctattgcagaaacatggctattgaaaacacaatactgaattaaccatcactaggggaaaaagggccatatacttgatggacaccagagttgaaccgttggcgaatctgtggctggccacccggcatcaggttatcatgatgaaacactggtcttggagggaaatgagc

SEQ ID NO: 82195 - DNA, 512 bp, Arabidopsis thaliana columbia
  unsure (1)..(512): unsure at all n locations
nnnnnnnnnnnnnnnnnnnnnnnnnnnnnnnnnnnnnnnnnnnnnnnnnnnnnnnnnnnnnnnnnnnnnnnnnnnnnnnnnnccacgcgtccgcccacgcgtccgcaaaaattagggcaaaattagcgtattgatgtgtttcacttttcttcttcttcttcttcatcgtgttcgtgtttgatttgcgactttctccaaggaaaatttagggttttcgatgaaggaacctttgcagaagaagaaggtggttgttcgtcacttgccgccttctctttcacagtccgatctcttatctcaaattgatcctcgtttcgctgatcgttacaattgggtttcgtttcgtcctgggaagtccagctataaaaatcagaagtattcacgggcctatgtaagtttcaaggcaccagaagatgtttatgagttcgctgcatttttcaacgggcatgtgtttgttaatgaaaagggtgctcagtttaaggctatagttgaatatgcaccttctcagcgtgttc

SEQ ID NO: 82196 - DNA, 509 bp, Arabidopsis thaliana columbia
  unsure (1)..(509): unsure at all n locations
atgatactgccnnnnnnnnnnnnnnnnnnnnnnnnnnnnnnnnnnnnnnnnnnnnnnnnnnnnnnnnnnnnnnnnnnnnnnnccacgcgtccgaaaaaaaacaaacccgtgacgccattaacgaaggtcgagcttccttgacaccacacaatgcattctcctcgtaagctatttcacgcgcggtcatcactcgccacgcgccgatcaacggctcttgtcgtattaacttccctagctattggaatcgccggtttcacatttggactcgccgtaattcttataccgggtctccgattaaccggtcgtaattgcttgacgaacactcctccgaagacggtgcgagtcgtttgggacgtcgccggaaatagtaatggcgttgttagtggcgaaaagaagaggcataaggttatgggattcgttggtattcaaaccggatttggatctgctggccggagacgatcacttagaaagacatggatgccgtcagatccagaaggtcttcgacgttt

SEQ ID NO: 82197 - DNA, 1233 bp, Arabidopsis thaliana columbia
  unsure (1)..(1233): unsure at all n locations
atgatactgcccaataccgactcacgcttagggcgaagctacgcacgcctgcaggtaccggtccggaattcccgggtctgacccacgagtaaacaaattataaacccattttccttcataaatttctaaaataaaaccccttaaactttcattcacatcatccaacccccaatgggtcgaatcttgaaccgtaccgtgttaatgactcttctagtcgtaacaatggccggaacagcattctccggtagcttcaacgaagagtttgacttaacttggggtgaacacagaggcaaaatcttcagtggaggaaaaatgttgtcactctcactagaccgggtttccgggtcgggttttaaatccaagaaagaatatttgttcggaagaatcgacatgcagcttaaactcgtcgccggtaactccgctggaaccgtcactgcctactacttgtcatcggaaggaccaacacacgacgagatagactttgagtttcttggtaatgaaacagggaagccttatgttcttcacactaatgtatttgctcaaggcaaaggaaacagagaacaacagttttatctctggtttgatccaaccaagaacttccacacttattctcttgtctggagaccacaacacatcatatttatggtagataatgttccaatcagagtattcaacaatgcagagcaacttggtgttccatttcccaagaaccaaccaatgaagatatactcgagtttatggaatgcagatgattgggctacaagaggtggtttggttaagacagattggtctaaagctcctttcacagcttactacagaggctttaacgctgcagcttgtactgtttcttcagggtcatctttctgtgatcctaagtttaagagttcttttactaatggtgaatctcaagtggctaatgagcttaatgcttatgggagaagaagattaagatgggttcagaagtattttatgatttatgattattgttctgatttaaaaaggtttcctcaaggattcccaccagagtgtaggaagtctagagtctaaaaaccaatgattctctctttgttgttgtttagtgcaaattaaattctctttgttgtttctttaataaattgatttgatttttcttcaaaaaaaaaaaaaaagggcagccgctctagaggatccaagcttacgtacgcgtgcgatgcgacgtcntagctcttctatagnnnnnnnnnacaatcnnnn

SEQ ID NO: 82198 - DNA, 394 bp, Arabidopsis thaliana columbia
gcaaatcaatatattcattccattcaagagagtaagatcgcatccatacaagacaatagtcacagtacttacatataaactcttgcaaatttatacttaacagtattttcagaaagataaaaccatttgagattagcttagtttcacgaaaaacctgatcaaatcatttctcaaggatcttgctcataacagttcttgctagatcaatacttccttcttcgtcatctacttctgttccggcttctctgactgatattccatgtccggacaaagagcaacgaagaacagagttaacctgcttccttaatctggcattatcaatcagaacctctgtcagcatcttccttactagatcgtctgttccacgatgccctcctgatgttagcttcagctt

SEQ ID NO: 82199 - DNA, 4349 bp, Arabidopsis thaliana columbia
cgacgaccgtatcttccaccacaaactgcttccggctgagacgacggcgatctactccggctaattctgttacttgattctgctctgaattttaacaagcagaatttctcggatagcaggaagaacgggattaattagctcatcgcttggttctctacgtgagatttagttttggattctggagaaatttccgatcgccttcggtttacggcgattggagtgagtaggatacggagaaatctctattttctgtgtttttttcgcgatttaggaaagttaagcattataaagccaaatttcgtcgatttggcattgagattttgagctttgggtggttatagataggttttttgagttaaggttttacgggtaatcctagggtttagttattggggaagagagaggctccgttaatctggtttgttggaagagtctcctggatctgttgtctcgacggatgatttgggtctgtgagctagggctttttatgcttggctgattaggatgccgatgggacgctttctatctttggtccgaggagactcggctgagtcacctcgtgagattacctcacagagtaatatcatcggcgatactggttctaatggttggcttattaggtttttcgattctgctttcttctgtgagtggattgctgttagttatctgtacaagcaccctcatgctggtgttagggattacttatgcaataggatgtatacgcttcccttatcaggtattgagagttatctcttccagatttgctacatgatggtgcacaaaccaagcccatcgcttgataagtttgttatagacatctgtggaaagtcactgaaaatcgcactgaaagctagttggtttttgttggctgagctggaggatgctgacgataatgaaggcatcagcaggattcaagagaagtgtcaaattgcagctactttgatgggtgagtggtctcctctcatgcgtccacagaacgaggtctcaaccccagggagcaagaatcaggtcctaaatagacttttgtcatcaaaacagaagctcttctccttaaagctatctcctcccacccagaagtctttgtcattctcaccttcgccagggaccaacgtgcaggatgatggtagtcagttacctgctgaggacaataagatttttaagaaacttatcccaagtcctaaagtcagagatgctttaatgtttagaaagtcagctgacaaagatgatgaagagagtgaaaaggaaggattcttcaagaggctcttgagggacagcaaaggtgagggtgatgaaccaatacctaactcagagggtttctttaagcgccttttgaaagacaataaatcagaagatgaggacataacaaacagttccgaggggttcttcaagaggctcttgagtagtaaaggagaaagcgaggaattgacatcgagttcagatgggctgtttaaaaggttgttacgagataataagggagatgaagaggaattgggtgcaaattcagacagtttcttcaagagattgttacgggagagtaaaaacgaggacgaggagtcaaacccaaactcagaaggtttttttaagaaattattccgtgacagcaaacctgaagatgataaagttcctaaagaagtggatgatgaggacaaagatgggttccttaagaaacttttcagggaaaaaaatgatgacaaaagacatggtagtgaaaagaatgaagccaatggaacagtgtatgccgataagaaatctggtgaagaggatgagagggaggggtttttcaaaaaattctttaaggaaaaatctgatgacaagaaagacattgtcaaggttgatgacgggaatgaaagtgagggtgatgaatctccagaattttctcttttcaaaagattattccgtatacatcccgaagatgcaaaacctacttcagaaaatgaaaatagcagcaatggcttagttgaaagcagtcctgggacagaaaactttttccgcaagttgttcagagatcgtgaccaatctgttgaagattctgaactgtttggatcaaagaaacacaaggagaaacggccaggctcacctaaacagcgggatgatactccatctggtaagcccccgctaccaaacaatactgcatcacaattcaggaaaggggcttaccacgagtcgttggagtttgtacaagcgttatgtgaaacgtcatatggtttggtagatatctttcccatcgaagatcggaagattggtcttcgggagtctcttgcagagatcaattttcatttatcggaagctgaaatcactggaggaatttgttttccaatggggagaggagtttttcgtgtggtccatattcctgaagacgaatgcattcttttgaattctagggaaaaggcgccatacatgatctccgtagaagttttgaaagcagaaacacccagtgctaaagaatcatcgaactcccagaagctttctaaaggggggattccattggcaaacggggacgcattcttgcaaaagccacctccatgggcttatccactatggactactcaggaggtttatcgcaacagtgctgaccgaatgtcgttatccactgctcaagcaattgatcaagcgatgactcctaagtcagaggtgaaggtgaaacttgtcaatgtaagtctctcagtggaggatcgtacttcagctcttgaatcatttggcgatccaattgatgatgttctgggggaagccccaaggactgggctgaacaatgatcttgaatgggtaagggtggtcgtaacggctgacccaggacttagaatggaaagcattcctgatccatcagtcccacgtaaaaaggaacatcgtcgtgttccaagtactgttgccatggaggaagttagggctgctgcagcgaagggagaggcacctccaggccttcctctcaaaggggcgggtcaggattcgtcggatgcacaaccaagggccaatggtggaatgctgaaggaaggtgatgccttatcaggtgaactttgggagggaaagcgagacagaatacgtaaagcttcaatatatggaaagttacctggttgggacctgcgttctatcattgtgaagagcggtgacgactgtaggcaggagcatcttgctgtgcaactcatttctcacttttatgatatattccaggaagcaggtctacccctctggttacgtccttatgaagtcttggttacatcttcttatactgcccttatagaaacaattccagatacggcttctattcattctatcaaaagtagatatcccaacataacgagcctacgtgatttctttgttgcaaagtataaagaaaactctccaagttttaagctcgcccagaggaatttcgtggaaagtatggccggatattctttggtctgttaccttctgcaggtaaaagatcgtcataatggaaatcttctcttggatgaagagggtcacattatacacattgattttggttttatgctttcgaattctcctggtggcgtaaactttgagagtgccccgtttaagttaacccgtgaacttcttgaggtcatggactctgatgctgatggggttccaagtgagttctttgactatttcaaggtgctatgcattcaaggattccttacatgtagaaagcacgcggaacggattattctcttagttgaaatgttacaggattcgggtttcccttgcttcaaaggtggtccacgaaccattcaaaacctaagaaaaagattccatctaagtttaactgaagagcaatgtgtctcgttggtcctctctctcatcagcagtagcttagatgcttggcggacacgacaatatgattactaccaacgggtcttaaatggaatattgtgatgttccaaagaaccaacctaataagggtaaaaaactcacaacatacattggtatgttgggttagctcataaaacaatacgttttttgaggaacccttttcatagtagcaatcagaatccttccaaaggtgggggaagatgcctgaagagatcgtgtgtgcacgcatgggagaagaaaccggtcacacgtggaggagaaaactacagtttgtgtacagagtatgatttttgcagaggtttgattgttatctttacttacttgctctacttgcaggagaaaagaaggcaaaagcctgaaattttcttcctcccaaaagctcaaaacaaagcccttttacagaggttaaaaagggtaatgttttgttttaaatttgtttctagtcaaaactcatgatgtgatattgttgtataaattgtgtatcatgcggccgcgaattcgatatcaagcttatcgataccgtcgacctcgagggggggccc

SEQ ID NO: 82200 - DNA, 672 bp, Arabidopsis thaliana columbia
  unsure (1)..(672): unsure at all n locations
aacaagaacaatatggaggatccgacttatcaacacatagacgctcgttccaaagccaggtttgatggtactgctccagaaccccgtaagggaataagaagcggtcatatacctggaagcaaatgtatcccttttcctcagatgtttgattcttgtaacacattgttaccagcagaggagctgaagaaacgatttgaccaagaagatatctcactggacaatcctattatggcctcgtgtgggactggtgtaacagcttgcatcttggcaatggggcttcaccggctggggaaaaccgacgtgccgatctatgatgggtcgtggactgaatgggcgacacaaccagacttgcccatagagagtgttgaatcttcttcatgaaagtctccaccgtaaaggctagcgacaagattacaagccacagacggaaataattatcatgtttaagttgagggatttgtttgaagttaatcataatcctggctttaaatttgcctcaaccctcaagccgaagaggactgtatctatagaacttggaacttttccttttcgtttctggattcatcttctcagataacaaaaggttgttttctgtgttttctttctaataaaatcaagaaccgccccaggggatttcctcnaacgggtncttnaaccaggggtnccntgnaa

SEQ ID NO: 82201 - DNA, 704 bp, Arabidopsis thaliana columbia
  unsure (1)..(704): unsure at all n locations
ctcttagaccaagctacgactatgacggcacgcgtacgcaagcttgaaccctctaaagcggccgcccttttttttttttttttttacttcaacattatggggtggattggttttcactataccagcaaataacaatttattgccttaccaaacatcagctagtgttactacatttgtactagatagtatcaaatctaaaacagaggagttttacttgggttcttctgtccatcgtctcttcatttcggatttggatcgaacttctttaagattcccatccaaaccataatctctctccatcacaagattgattccttcatctgaataccatccaactccaatgcacaacactccatctttcttcacatccacggatgcactcacaccacctgggaggccacatcacagacacatcttgcatatctatcatctcttcctccccaaacgaaaccaaagtttccggtaagttccttctctttagagcttctgtgcagaggtacacaactggagtgctttcacctggctgttcgaattcggcttcttctccgtagagtggagttgcatttacttcaaatactttccatgatcctgttagttctgatggttgcgtgcgtttcctctgtgagaatggttttaactccaatggtgcgtcgntgtcactttgctcttcataatttgaaggactaacccacagttcttcataa

SEQ ID NO: 82202 - DNA, 516 bp, Arabidopsis thaliana columbia
gggcgaccacgcgtgcgaacacttatttccaactctgtctctctcaattttctttctctttctccaaacatgaagttctctatgcgtttgatctcagccgttcttttcttggtgatgatattcgtcgccacagggatgggtccagtcacggtcgaggcacgcacgtgtgcgtcgcagagccaaagattcaagggtaaatgcgtgagcgatacaaactgcgaaaacgtgtgccacaacgaaggcttccccggaggtgattgccgtggattccgtcgtcgttgcttctgcaccagaaattgctgatccatcaatcgattctcatgcatgactcaatcgtcgatctattgtgttttgttacttctttccgtcgtctaatattccgtacgacaacatatcgtaacgtgtatgcgtgtttagtgtgttcttgaataagtctttggtttgtgtgttttcagttttaacgcaacgttacatcaaataatggcttttataaaagaaaataaagggttcgaatat

SEQ ID NO: 82203 - DNA, 586 bp, Arabidopsis thaliana columbia
  unsure (1)..(586): unsure at all n locations
gacacttgaacactactttcgaactctctctttatctctcttgcaatgaagctctctatgcgtttgatctcagctgttctcatcatgttcatgatattcgtcgccactgggatgggaccagtcactgtggaggcacgcacttgtgagtcgcagagccataggttcaagggtacatgcgtgagtgcatcaaactgcgccaacgtgtgccacaacgaaggctttgtcggaggtaactgccgtggattccgtcgtcgttgcttctgcaccagacattgctgatctacccattctcatgcataattcaagctttgatccatcgtcgtgtgtcacttctttcttatctaatcttccgtacagtaccatgaagtaccgtacattagtgtgttctcaaataagtctttggatttgtgtgtttccggtttaaatgtaatgttaaatcaactaatgactttgagcctttgactagtaataatcaaaatctatgttctgataaaaaaaagcttgatgcatatgctatagtgtcacctaaatctgcggccgagcttnnnnnnnnnnnnnnnnnnnnnnnnnnnnnnnnnnnnnnnnn

SEQ ID NO: 82204 - DNA, 415 bp, Arabidopsis thaliana columbia
aacaagcatccataactcgatccaaattcttataagaatgtaactacatatataaggatacaacattagtcaaacatgtaatctgaaatggtatgattataccaccaccatcttgttcctctataaccgaaatcgccacggacacataccggtttagagtttctattttgttattccctttctgttttaagatatcatccaaaacgctccgacaatctctgatatgtacacaattaaaccagagaacatcagcttccgatgttttacgggagaagaaggcgggagcggaattactcctctggggcatggggcatccatcgcctttacatgccctcgtacagtacccggggctcgagaagatcaggacagaacatctctcatgttgtctagggaacggggtttggcaaaaaaccgg

SEQ ID NO: 82205 - DNA, 474 bp, Arabidopsis thaliana columbia
tttagaatcaagaaaccgacgtctctctcttcctcacctcctctttcttctctgcttcggatctctctcttctctctctctctctccctgattaaacctctaaaatcagggagtttttttcttctggtttcggattctcagaaaaattagcaagtctttgtcttttgctgctggttgcatagcccccattgaagctttttcctctcaatcttaatgttctcaagagggcttctgcagcaagcgaaatgggacaaagaaataggaatgttgatttagaaatggagcagcagcaatctcaagcttctctccaagcagagccttgcatccttttaggcagctttccgcaacaaccggataataataatatgcctgctatggttgcacacgttcctaatttagaacctcattctcttcaagacccaacttatgacaactcggccatgttctacgggcttcctcagtatcatcatcatc

SEQ ID NO: 82206 - DNA, 534 bp, Arabidopsis thaliana columbia
  unsure (1)..(534): unsure at all n locations
atcacaagaagattttgaatcgaatgttttagtttattaggttttttttttttcatttgagaaatcaaacttagaaacattgcaagactcactaagtctagttgtttatagcattcaacttatatgcaagaacagatttctagcaggggagttgatccttgtagatgttcaaacccgaggtggatgcagtaattgggcatagcctgagagaaaacgaatactgtgcaggcggaatcagaaacttatcgtgaacacatggagtccagctatcatctcccccaagacccatgtgtttgtggtccagatgcacctcgatggttttggtcctttggataagatcctcttcatgcgttgcacggtggaagctcaccggttgtataataacnaagcattccatttgcattagggaagngnaccctatgttgaagctatatnccaaaccaccttggttcngaatgtacccccnaanantgtctaccccatttccccngganaaanagggnatgatgnnccaaatgggtcnaatcgccaggg

SEQ ID NO: 82207 - DNA, 283 bp, Arabidopsis thaliana columbia
aagaaataaaatcgtaatcgaattttttcttttgggataaataaaacatgacatattttacaatttaacattccattggacaatacatataactccacacaatattcttaggggaaaacacatccctaatcataaaacaatctcacagacatatctatataaaatatacttaattaaccattctgcactttttgcgaactttcccaacctgacccggtaaaactccaatccgacccatttttaccatggagacaccaaagtctttaaagaaaggagacccatc

SEQ ID NO: 82208 - DNA, 464 bp, Arabidopsis thaliana columbia
  unsure (1)..(464): unsure at all n locations
nnnnnnnnnnnnnnnnnnnnnnnnnnnnnnnnnnnnnnnnnnnnnnnnnnnnnnnnnnnnnnnccacgcgtccgtgatgcttgtgaagctaatggtgttcagattatggatggtacctatgtgggttcataatcctagaactgctttgcttaaagagtttctttctgattctgaacgttttggtcagcttaaaactgtacagagttgtttctcatttgctggagatgaagggggtcttaaaaacgatatcgcgtgtgaaacctaggtcttgacgggcttggtgcgctaggagatgcggggtggtacgcgatcagagcaactcttttagctaataactgtgagcttccgaaaactgtgactgctttcccccggtgcttgggttgaatgaagcatgagtgatactttcctgtggagcatctttgagttgggaagatggacgaactgcaactatatattgttcattc

SEQ ID NO: 82209 - DNA, 576 bp, Arabidopsis thaliana columbia
  unsure (1)..(576): unsure at all n locations
ctttatcaacaacactctctctcttctctatcaacactttctttcatctctcgccggaaaaacccataaccacaacaatggccaccgaaacccaaatccgaatcggagtaatgggttgcgccgatatcgctcgaaaagtctctcgagcaatccacctcgctcccaacgccacaatctccggcgtagcaagccggtctttagaaaaagccaaagcctttgccaccgccaataactacccagaatcaaccaaaatccacggctcttacgaatctcttctcgaagatccagagatcgatgcgctctatgttcctctccccactagtctccacgttgagtgggctattaaagcagctgagaaagggaaacatatccttttggagaagcctgttgctatgaacgtaactgagtttgataagattgttgatgcttgtgaagctaatggtgttcagattatggatggtactatgtgggttcataatcctagaactgctttgcttaaagagtttttctgatctnaacggtttggcanttaaactgaagtttctgaagttttgnttttnatgttggtgnttggta

SEQ ID NO: 82210 - DNA, 659 bp, Arabidopsis thaliana columbia
  unsure (1)..(659): unsure at all n locations
ccagcactaatcgactcttatagggaaagctggcacgcctgcaggtaccggtccggaattcccgggtcgacccacggcgtgcggccacgcgtccggaagacgacagaaggggactcttcattgttttcttctctctatccctcttcatttcctctctgatcgccagtgatttaggcttctgcaacgaagagatggctttagtcggaggtgttggcgatgtccctgctaatcagaacagtggtgaggttgagagcctcgctcgtttcgctgtcgatgaacacaacaagaaagagaatgcacttcttgagtttgcgagagttgtgaaggcgaaagaacaagttgtagccggaacactgcatcacctgactctggagattctcgaggcaggacagaagaagctttacgaagccaaagtgtgggtcaagccgtggttgaactttaaagagttacaggagttcaagcctgccagtgatgcccctgctatcacttcctccgatcttggctgcaagcaacggtgaacatgaatctggatggagggaagttcccggagatgatccagaagtgaagcattttncttagcaggcttttcaagaccattcagcagaggtctaactccttgtnccttatnaacttnttgangtttntncattcnnaaantt

SEQ ID NO: 82211 - DNA, 554 bp, Arabidopsis thaliana columbia
ttttttttttatgaacaaatatgaagatacataacatacaaatgaggacaacaaaatgttacaaatgaattgaatcagtaaacacacagttaagaaaaaaagaagataaaaaaaaaacatttgtaaactgtaatcattacattacaataccaactatatacagtagcattataaatcaaacgatttttaaaaaatttggcaaaaaaatgaagcagaagtttcgatttaagaaacctctcaaacaaaaacaaaaaatgaagtggtggtttacttgttagaccactggaattctatctcaaggtttctgggaccacttttgctttctggtaacaaactatattcacctgcgactgctcccagcatcaccaccctatcgatttggatcgttactttcccaaaggaactctttcccattttgcttttgttcttgcatgaaatgtggagtttttgacctttgggagggctctcaaatgaccatgagaagctctcgtcccactctggattaggacctgtcgatatcaccttggtctgtctaggaggattgttgccgagtg

SEQ ID NO: 82212 - DNA, 710 bp, Arabidopsis thaliana columbia
gctgtacgtacttctggaagatacataattgatacaattggagaaatgctggaaaagattcaattccattatcagcagcatcatcagccatgctttctatacttatccagtgaagttataaagatttttggttctgatccatcgtgtgctgtctacttgaagaacctgattgaaaccctctttgcacatacaacatgtcttatgacaagtatcaaggaagtcactgcgagaccagatatagccgatgactgctttttgttggcgtctagatgtcttcgctactgtccacatttattcattccgtctcctatatttccagctcttgtaaactgcgcaatgattggaatcacagtgcagcacagagaagcctgccactcgatattgacctttctaaccgacatttttgacctcgagaagtctgtgaatgaagaacagttcgtacggatcagggacaatatcattattcctcggggagctacaatcaccagaatattgatagcctcattagctggggcacttcccagttctcggctagatacggtaacatattcgctgctagctctgacaagaacatacaggttacaagcagtgagttgggctaaggaaagtgtaagcctgatacctcgaacagccttgacagataccgaatctaccaagttcttacaagcattgtccgatattgcttatggagcagatgtgaattctctgat

SEQ ID NO: 82213 - DNA, 480 bp, Arabidopsis thaliana columbia
aacaatgatgaaggtgatggccggtcagctcccctagttaaacttggggatgcatcaatggcatcccccttcacagctaaacatgcgtcagttgccccagtgacagacataatccggcagggtcgtagcacacttgtgacgactcttcagatgttcaaaattctcggtctgaactgtctcgccacagcatatgtcctaagtgttatgtacttagacggtgtaaagcttggtgatgtccaggctacaatcagcggagtgttaacagctgcgtttttcctcttcatttctcatgcccgaccgcttcaaaccctctctgcagaacggccccacccgagtgtcttctccgtgtacctcttcctctctctgataggacagtttgctgttcacttgaccttcttggtctactctgtgaaagaagctgagaaacacatgcccgaggaatgcatcgaaccagacgcaagtttccatcctaacctggtg

SEQ ID NO: 82214 - DNA, 725 bp, Arabidopsis thaliana columbia
  unsure (1)..(725): unsure at all n locations
acnnnnnnnnnnnnnnnnnnnnnnnnnnnnnnnnnnnnnnnnnnnnnnnnnnnnnnnnnnnnnnnncttnnnttttttttttttttttttagaaacaggggtggttaatagaatgtttaaacagagaagaaggaacagaacagagtctctgtctccaaaaattctgaagacacatcaattgccacaagtcttgggctctgccgtttcacgagcaaatgaccaaaaaaacaagtagaagaagaaaccattaggcttcaataccgaagatgaaccagtaaaaacaaaaaaagaaaaaaacccctaattaggttttttaaaaaaggagatgaatttttcttattaatgttattgaagcttctctcttatctgtcttcttcaaaatctgagaatggtgtgtcagccaaactccaatctcattccacattcatccttcctttccttttttaccatccttcccttgctgacgatgacctgtcgaagtttctgttgttgaagaatccacgttccttgcttccttggaagtttcttcgatcatctactggtcttggccaattatcgcctgtgccatgtgatctaggtctttccatggattcaacactcctagactcatcgattgatccagcccgtgaatgtggtctttctgaataggaaccgcctctgcttgcactggatccaggcctctcaactgctcgtggcctgaacctgactttgtcgtccagctcacg

SEQ ID NO: 82215 - DNA, 521 bp, Arabidopsis thaliana columbia
taggtacatcggctcagacggggcaaagcctacaagggagccaccaccaggctccaatttttcgagccaggcgagctgagtccgtggtccttcctacagagcccggaatcgcccgagttcaatagccaccttcctgtttcctatacataacaggtattgacagtgatggggagtgaagagagcaccaaacatgtgtgcctctgttggaatccaaggcattgcttgggctttcggtggcatgatctttgcccttgtctactgtactgctggaatctctggtgggcacataaacccagcggtgacatttggtctgttcttggctcgtaagctgtcattgacgagagctgtcttttacatcgtgatgcaatgtctcggagccatctgcggcgccggagttgtcaaaggcttccagccaaatccttaccaaactctcggcggagaagaccgtgtagacaaggacgaaggttccgattatatctcagcacccaaaccagagcccttagtgtagccgtgagcgactg

SEQ ID NO: 82216 - DNA, 571 bp, Arabidopsis thaliana columbia
  unsure (1)..(571): unsure at all n locations
gagaaaacagtgtagtccacaggataagttccaacaatctctgcaccagtacctgaaccctttgttcatggtttacactgttttctcagctactgatgctaagagaagtgccagagagctctcacgtcccgatcttggctccgcttcccaatcgggttcgctgtcttcctggtgcacttggctaccatccccatcaccgggactggcattaacccggccaggagtctcggagctgccatcatcgacaacagggaccacgcttgggacgaccgctggatcttctgggtcggtccattcattggtgctgcgcttgcggctctgtaccagcagcttgtcatcagagccattccattcaagtcctgatcctgctttantatcaatctttataacgcttcattgttgcatcttggtttgtaattgagcttgatcatattttagaggtctggatcatgtggttattttaactaatggacgtgtctttttcaaatttgctgtggatggcggccgcgaattcctgcagaccgggggatccactagatctagagcggccgcccccgcggtggagctccag

SEQ ID NO: 82217 - DNA, 413 bp, Arabidopsis thaliana columbia
ccacctcattcaaaacttgtgtcgatcctataaagacttcctataaataagtatctatttatcttgatgtttctgtgtgctttacttaagatgcgtaatcttcttgttgatcaattcctatcatcttgtaatttgtattactctattaataagcgcttgcggctctttgccaccagcttgtcatcagagcccattccattcaagtccacctcctgagttgatttctttctttataaaacttcattgttgcatcttggtttgtaattgagcttgaaaatatttgagagatctggatcatgtgtttattttaattaatgcacttgtctttttcttaaaaaaaaaaaaaaagggcggccgccgacgtagtgagctcgtcgacccaggaattaattccggcccggtacctgcaggcg

SEQ ID NO: 82218 - DNA, 693 bp, Arabidopsis thaliana columbia
  unsure (1)..(693): unsure at all n locations
gctttttctattctctctctctctcgcctctataaaaccattctttctctatctcagccactctcattacccattgtagaaaagaagaaaaaaagcaaagaacacttgaacgttttctagatagagatggaagggaaagaagaggatgttcgagtgggagctaacaagttcccggagaggcaaccgataggtacatcggctcagacggacaaagactacaaggagccaccaccagctccatttttcgagccaggcgagctgagttcgtggtccttctacagagccggaatcgccgagttcatagccaccttcctgtttctatacataacagtattgacagtgatgggagttaagagagcaccaaacatgtgtgcctctttttgggaatccaaggcattgcttgggctttcggtggcatgatctttgcccttgtctactgtactgctggaattctctgggtgggcacataaacccagccggtgacattttgggcctgttcttgggctcgtaagctgtcattgacgggagctgttctttttcatcgggatgaaatgtctntggggccatntttggcgcccgagttttaaaaggttccagccaaatcctttccaaattttgggggggggcccaaagtggttgggtagctaagagaggggttttgttttgggcctgnnaattgaccttgnccttnta

SEQ ID NO: 82219 - DNA, 1316 bp, Arabidopsis thaliana columbia
  unsure (1)..(1316): unsure at all n locations
tcgccacnnnnnnnnnnnnnnnnnnnnnnnnnnnnnnnnnnnnnnnnnnnnnnnnnnnnnnnnnnnnnnnnnnnnccacgcgtccgtacggctgcggaagacgacagaaggggacagagacaacaaactaaagttggtggtgatagagtgagagagaaacatggaaggcaaagaagaagacgtcaatgttggagccaacaagttcccagagagacagccgatcggtacggcggctcagacggagagcaaggactataaggaaccaccaccggcgccgtttttcgaacccggcgagctcaaatcttggtctttctacagagcagggatagctgagttcatagccactttccttttcctctacgtcaccgttttgacagtcatgggtgttaagagagctcccaatatgtgtgcctctgttggaatccaaggcatcgcttgggcttttggtggcatgatctttgctcttgtttactgtactgctggaatctcaggaggacatattaatccggcggtgacttttggtttgttcttggcgaggaagctatctttaaccagagctctgttctacatagtaatgcagtgccttggagctatatgtggtgctggtgtggttaaagggtttcaaccagggctgtaccagacgaatggcggtggagctaatgtggtggctcatggttacacaaagggttcaggtcttggtgcagagattgttggaacttttgttctggttacactgttttctcagctactgatgctaagagaagccgcagagactcttatgttcctatcttggctccgcttccaattgggtttgctgtcttcttggtgcacttggctaccatcccaattaccggaactggcattaacccggccaggagtctcggagctgccatcatctacaacaaggatcatgcttgggatgaccattggatcttctgggtcggtccattcattggtgctgcgcttgctgctctgtaccatcagatagtcatcagagctattcctttcaagtccaagacataaagtttcctacatattctctgatcatcatcaagctaagaatatatcaatctttaattctatatgctttcttcttgtttcctatgtcatgtgtgatgatctctatatgtaccactagagctttgatcttgtaacagtgtaaatgtgtaatctattatgtatcaatggcattgtatcttgtaacattaattatgtcaatggaagaatacattgtgtacnnnnnnnnnnnnnnnnnnnnnnnnnnnnnnnnnnnnnnnnnnnnnnnnnnnnnnnnnnnnnnnnnnnnnnnnnnnnnn

SEQ ID NO: 82220 - DNA, 1053 bp, Arabidopsis thaliana columbia
  unsure (1)..(1053): unsure at all n locations
attctttctctgatcatcacattattctctctttttcttcacttttctatcgacaaataccaataccccttccgataacatgggtcatgaatggatcgatgcagagagggagttcaaatggagcgaggatgtcaaagttgaaagtgaagtgactgagatcgttcttgttcgccatggagaaaccacttggaatgctgccggaagaatccagggacaaattgaatcagaccttaacgaggttggactaaagcaggctgttgcaatcgctgagaggttgggaaaagaggaaagacctgtagctgtgtattcatcagacctcaaacgagccaaagacactgctcttatgatcgccaaaacttgtttctgtcccgaggtgatcgaagtacctgacttaaaggagaggcacgtgggtagtctccaaggcctgtattggaaagaaggagcagagaaagaacctgaagcttactctgcctttttctcttcccaaaacgacctcgagattccgggaggaggagagagctttgaccaacttgctgatagatccatggatgctcttgagcaaattgctaagaagcacaaaggagagagagtgatagtggtgactcatggaggagtgttgagggcaatttacttaaggatcacacaagcttcctctgccggaaaactcttgaatgcttcagtgaatgtggttcatctccgtgatcaaaaatggatcatcgattcgtggagcgatgtatcacatctatcatccgttggatttcttcaacgtggctttgatggagacgccaagccctagagaacctcctcattcatatcttgtgtcgatctataaagacttctataaataagtatctatttatcttgatgtttctgtgtgctttacttaagatgcgtaatcttcttgttgatcaattcctatcatcttgtaatttgtattactctattaataagagattttcatctttacttaaaaaaaaaaaaaaagnnnnnnnnnnnnnnnnnnnnnnnnnnnnnnnnnnnnnnnnnnnnnnnnnnnnnnnnnnnnnnnnnnna

SEQ ID NO: 82221 - DNA, 1232 bp, Arabidopsis thaliana columbia
  unsure (1)..(1232): unsure at all n locations
cggattggatttagtgtgacactatagaagaactatgacgtcgcatgcacgcgtacgtgacccatccgccgaaagaagaaaaaaagcaaagaacacttgaacgttttctagatagagatggaagggaaagaagaggatgttcgagtgggagctaacaagttcccggagaggcaaccgataggtacatcggctcagacggacaaagactacaaggagccaccaccagctccatttttcgagccaggcgagctgagttcgtggtccttctacagagccggaatcgccgagttcatagccaccttcctgtttctatacataacagtattgacagtgatgggagtgaagagagcaccaaacatgtgtgcctctgttggaatccaaggcattgcttgggctttcggtggcatgatctttgcccttgtctactgtactgctggaatctctggtgggcacataaacccagcggtgacatttggtctgttcttggctcgtaagctgtcattgacgagagctgtcttttacatcgtgatgcaatgtctcggagccatctgcggcgccggagttgtcaaaggcttccagccaaatccttaccaaactctcggcggaggagccaacacagtcgctcacggctacactaagggctctggtttgggtgctgagataatcggaaccttcgtccttgtctacacggtcttctccgccactgacgccaagagaagcgctcgtgactcccacgttccgattttggcaccactcccaatcggattcgctgtgttcttggttcacttggcgacgattccaatcaccggaacaggaattaacccagctaggagtcttggagctgcaatcatctacaacaaggaccacgcttgggacgaccactggatattctgggtcggaccattcattggagcagctcttgcggctctttaccaccaacttgtcatcagagccattccattcaagtccagatcctgatttgatttctttctttataaaacttcattgttgcatcttggtttgtaattgagcttgaaaatatttgagagatctggatcatgtgtttattttaattaatggacttgtctttttcttatttgctgtggatgatctggttttatcgttaaatggagtttgatattatgattgatttggtacgataaaaagnnnnnnnnnnnnnnnnnnnnnnnnnnnnnnnnnnnnnggagctgnnnnnnnnnnnnnnnnnnnnn

SEQ ID NO: 82222 - DNA, 799 bp, Arabidopsis thaliana columbia
  unsure (1)..(799): unsure at all n locations
cnnnnnnnnnnnnnnnnnnnnnnnnnnnnnnnnnnnnnnnnnnnnnnnnnnnnnnnnnnnnnnnnnnnnnnccacgcgtccgcgcatatacatacacttatatacgttatcaatatattttatttttaataagtccagtttttgtctgtgcatcgagtttaacaggcaatgctcgtgtctctctctctttatatgtttagattctttatctggaacttggaagctcttttgttagctatatctaatcggtgatctcgaagcttattcaatccctctttcttttttcgaatggcttcaaagtcggatgtgaatataatagagacatcctcaaaggttcatttctcaggatttcatcaaatggatggtttagcttcaaatagaccagagcaaatggctgaggaagaagaacatggtcaaccttttgtgatcggagttgctggaggtgcagcatccgggaaaacaactgtctgtgatatgattatgcagcaactgcatgatcagagagctgttgttgtaaatcaggattctttctaccataatgtaaatgaagtggagcttgtaagagttcatgattacaattttgaccatcctgacgntttcggtactggagcaattatttgttttccatggggaagttanggaaaggccaagcagtagntattccnatttatgncttcaaaaggttccaagnccaatgtttttccccctggngggnggatccttctncggtataattnttggaggatncctnatttncttgcccncgggngcggggttttttgcnctnagnntttttntc

SEQ ID NO: 82223 - DNA, 462 bp, Arabidopsis thaliana columbia
cggacgcgtgggcggacgcgtgggcagtagcagatctgagttttggagagttcaaaggaagaagataactccaataccagagtgaaagcattcaggaaacatgcctcctcagaagattgaaactggtcatagcgacactattcatgatgtggtcatggattactatggaaagcgagtagcaactgcctcgtctgactgcacgatcaagataaccggagtaagcaacagcggtggatctcagcatctagctaccttaaccggtcatcgaggtcctgtctggcaagtcgcttgggcgcacccaaagtttggttcacttctcgcttcatgttcctatgatgggcaaattatattatggaaagaaggtaaccaaaaccaatggacacaagctcatgtcttcacagaccacaaagtatctgtcaactctatcgcttgggctcctcatgaacttggactctccttagc

SEQ ID NO: 82224 - DNA, 558 bp, Arabidopsis thaliana columbia
  unsure (1)..(558): unsure at all n locations
tccttttttttttttttttttttgactttaagatagttttctattgaaattggatgacttacaaacaaaaagtacaaaacacagattcatatttggaagtagtatctcagactttaaactcccaaaagaaaaatctcaaaatagtcataagattaagagtacatcgtaaaataataacaagaacttcaaaaggcatatcaagtagtagtccattcctcaccaagaccataagcatccgagtaaccagcatgggcatgcccgtggccatgatgatggtcatggtcatcaccagcctttgcttcttctaacactttctgtacttcctcagggataggttcttcagcaacccgtctgatggatttagggaggagagagacaaattctgatatgtaatctgcaagctcgccggatttgctttcctgaggccaccggctgcctgaatgtgtgacaaactttgctttccggaaggcctagcaaacgtgncccccggaanccattctttagnggtcncngncaatccttgnacgggaaccttacccnccgatnccntgggganga

SEQ ID NO: 82225 - DNA, 336 bp, Arabidopsis thaliana columbia
gatagaattggatcattggatggtgaaagaaatataaatacattatgtgattagagtttgatttgcgagtcaaaagatagaaacaatgaaacgaatcagtgttgtaaaatcactcaaggaggtggtgaatccagtcctttacaataaccggtgagccataccaaggtctggtttcatcgtctgaaccaacaggtgaatggtaaacaccgtcggagctaacattaagtgcaccttcaaagatgagctgaaacctcagggactactccatcaccccacacatcagctcttccacatacttgcttgtatccttgccctacaaaacggagcacgggaagt

SEQ ID NO: 82226 - DNA, 639 bp, Arabidopsis thaliana columbia
  unsure (1)..(639): unsure at all n locations
gcgtttgaacatatatatatctaaacgtctgagaaaagaaacaacacaaacatagcttcaagtatggacctcaagctaaggcctagcttcttcatctcttttctgattctcattttacttctcaaaaatcttaattacggatctgcagctagtccgaaatgcatatccaccgagcggcaagctcttctcaccttcagagcagcactaactgatctttcgagtaggctcttttcttggtccggacctgactgctgcaactggcccggtgttctttgcgatgctcggaccagccacgttgtcaagattgatctcagaaacccgagtcaagatgttccgctctgatgagtataaaaagagggtccttgcgagggaagatacatccggcctttgactcaactccaacgtccttgagcctatctgggcttgagttcaaatgaatttcaatgnacctagnagattccctgaggttattgggccaaattggtaaggccnaaggggcctggaacctttcttcccccaacgggtttccnggggaaaancccaaacngnggccttggnaaatttgccgaacctggnggcccctttnaccngnatcnaaaancggtttgggncccccnggnaaatntncantngggggaa

SEQ ID NO: 82227 - DNA, 1040 bp, Arabidopsis thaliana columbia
  unsure (1)..(1040): unsure at all n locations
nnnnnnnnnnnnnnnnnnnnnnnnnnnnnnnnnnnnnnnnnnnnnnnnnnnnnnnnnnnnnnnnnnnnnnnnnnnnnnccacgcgtccgtacggctgcgagaagacgacagaagggtacggctgcgagaagacgacagaaggggagaccaacaaataaacattaaacccaaatgatatattttggtagatcaatcgacaatcattatacaacaatgatgacaaaaacattggagattgatttgagatcagcagaagggcttaagctaaaccggagacccatcaagaaaaagactttcgccgtcgtaaaaatcgacgagaaatgtcgaaaatctaatcttgacgaatcgagaagaagcaatcctacatggaactataaatcagagatgcccatcaatggtaatgaacagtttatcttcattgaggtattttatcgaacaggttctgggcatgataaaaaaatcggagaagctaaaatcccaacgaatgatttcatgggaaggtattcacctgaaggtcacttaaacttcttgagctatagattgagagatgagtttggtgataagtgtgggatcgtcaatctttcgattttggttaaatcggatcccaccagagattacggcgcgtgttcgtcccaagcggcggttactggtttgtggaggccgagattagagacggcatcgattgatggatacggtggccggactgttaccggagttccggtttggggtctgtatcaacgccaattttaaaatcttttttttggggggggatgcacatattattaattcttcgtctttgttccatagattttcccaatttggaattgaggaacaaagatgtgtgattaatttttgttataatactcccgaaaccaaaattgaaaatagaaaagtcaaatttgttcgacgatgatatctaagaacttgttgttagnnnnnnnnnnnnnnnnnnnnnnnnnnnnnnnnnnnnnnnnnnnnnnnnnnnnnnnnnnnnnnnnnnnnnnnnnnnnnnnnnnnnnnnnnnnnnnnnnnnnnnnnnn

SEQ ID NO: 82228 - DNA, 415 bp, Arabidopsis thaliana columbia
ctcttctctgcttccttcttccatcacattccccaaaaagtctcaacacagagcgagaagaagactcaggttttgcgagaggagagatagagagacttagaaagctcggtaagtccgaactttggtggttcggcggctctacgtcgtctgtaggtcagagtcgtcctggagctcgcccgttgtttctcgacggcggaggtggaagacaacgaccgacctgccatggacattggcggtccaaccaatatccgccacgtggctcacgttaccttcgatcgcttcgatggcttcctcggccttccctctgagttcgagcctgatgtccccagaaatagctcccagtgcaagtgcaacggtgtttggggtatcgacagagtcaatgcagttatcatacgactcgagagggaactgtgtt

SEQ ID NO: 82229 - DNA, 536 bp, Arabidopsis thaliana columbia
agctctctacgactcactattgggaaagctggcacgcctgcaggtaccggtccggaattcccgggtcgacccacgcgtccgcaacgaccgaccagccatggacattggcggtccaaccaatatccgccacgtggctcacgttaccttcgatcgcttcgatggcttcctcggccttccctctgagttcgagcctgatgtccccagaaaagctcccagtgcaagtgcaacggtgtttggggtatcgacagagtcaatgcagttatcatacgactcgagagggaactgtgttcctgtgatactgttgctattgcagagccggctttatgatcaaggaggcttgcaggcagaaggagtattcagaatcactggagagaacagcgaggaagagtttgctagggagcagcttaataaagggatcatacctgatgggattgatgtccattgtttagccggtcttattaaggcttggttcagagagctgccgagaggggtactggatcctctgccatcggagcaagtgatgcaagtgtgagtca

SEQ ID NO: 82230 - DNA, 374 bp, Arabidopsis thaliana columbia
  unsure (1)..(374): unsure at all n locations
attcaatctttggaagttatngcaacttttgtgaccntctgcacatttcnggcaaatggaacaactctttttacttctctaaatacacttttgaatgtaaagaagctatctggattctggaccaaaacaacacacaaacccgaaacaaaatcgaattgaagaaatcgaacgaacaccttaagatgggtttgaagggttggctgattttgattcagctactacacatagagggtatgcaaacaccagaatctggattctggtgctctttccagcattcttccagggactctaagtttcagttctttcttggctccaccggaaaagcagagtgccatgtttcttttggtgtnatanacnggcatgantgtctcctt

SEQ ID NO: 82231 - DNA, 460 bp, Arabidopsis thaliana columbia
  unsure (1)..(460): unsure at all n locations
gagaaaaattcacgtgttggtagattactggattgttattagagagttgtttgaagtatagtgagcgaattaaaaatttactgtgttgcttgctgcactaaaattacgatgtcgtttttgaatctaaaacatgtgagattataggaattttctttgatacaaatctcatttgaagaaggttttaaaatattttcagtccccgccggcgtaaaagattcatattccggcagatcggagagcgtactcttgcaccagcgccgcaaacagagacggcctctccagcaagcgagccgggctatcgaactctttcgctttcccagcatcaatgacaaggactcgatcgccgtccatcactgtaggaatccggtgggcgatgctgatgatggtgcacgacgcaaagtcttccctgatgatctcctgaacacggngncggtttgggancaacnggncaanttnctnc

SEQ ID NO: 82232 - DNA, 501 bp, Arabidopsis thaliana columbia
  unsure (1)..(501): unsure at all n locations
aggtaattttcaaaaggaagtgtagaatccatgataaacgaatgcatagtgaatgggcgatgttatctggaagaaaacactctattgatatcacaatcactcaaggtaaagctcgtgctagaaattggtgcacaagctgaaaacagcttacagagagagcctgatgaaggaaaaaactagagagagatataaaagctaggagcttgcagttacctccgaaaagccaaacttctcatggaatttctttgtgttacagtccagcatttctctaaggctgcagtcaatgttgttctttttgacaagtttaaacctcgattcgaccttcttcttcaatccatggtgaaagaattcaggataagaagccacttcatccatgcctcttcccatcacctggacgagggatctgatcctaggcggtagggaattcttaacacccttaatcaagatggggggaccgtgacaggtgcaccngggacnccaaccaacccttcaaaaacaaat

SEQ ID NO: 82233 - DNA, 402 bp, Arabidopsis thaliana columbia
ctctgacatctccgtgcaatcgggagagaactttttttgtgttggtggtggttggctttcgtacatgcaggatcagtatataaatcacattatgaatgaaacaggagcaactgttgtattaagagggcgcggttcaggaagccttgagaatcaacatggagatgaagcacagctaccgctgcatctattattatccggcagcaacccaaagagcatcgacgatccaaaacgtttagctgagaatcttatggatacaatcagtgtagaatttggggcttcaagggtttcctcaagcaaggtgtatggtgcacgtccaccaccacagcaactgatttctggagctccgggttctgaccaggagaaccaaaatttgatttcaacgtatggtttgatgacatcgat

SEQ ID NO: 82234 - DNA, 551 bp, Arabidopsis thaliana columbia
  unsure (1)..(551): unsure at all n locations
gcatctttcttcaagctgcgccgctttctcactcttttttatctctcaaatttgaccttctccgttgttctttcgcatcgctcaggagcagaagcttcaatctttgataatgtcgaggaacaagggtttggctgagcaagatcttaaaaaattggatgtaactgtgctacatcctctgtctcctgaggtcatttctcgccaggccactattaatataggaaccattggtcatgtcgctcatggaaagtccactgttgttaaagctatttctggtgtccagactgtccgttttaaaaatgaattggagcgtaacattaccattaagcttggatatgcaaacgccaagatttacaaatgtgaggatgagaaatgccctagaccaatgtgctacaaggcctacggaagtggaaaggaagacactcccaattgtgatgtccccggatttgaaaactccaagatgaaactattgggggatggctcattcgttgattcccgggcacggtttttattgganaatgttattgggngcctcatggtggcctcttatnntt

SEQ ID NO: 82235 - DNA, 421 bp, Arabidopsis thaliana columbia
aactcttttaccttctctccaagaaatcttcactttctctctagaaaaaagttggaagctgactcgataaagactctctttttcttcttcttcctgcaaatggcgatcgaggatcaagagaacacaatccgtgaaatcaaacctaagaacagaagaatcatgggagctggtggtccggaggaagaggagaaccggtggccgccatggttgaaacctttgcttaaagagcaattctttgttcattgcaagtttcatggagactctcataagagtgaatgcaatatgtattgcttagactgcaccaatggcccactttgctctctttgtcttgctcatcacaaggatcatcgcaccattcagataaggagatcttcttatcatgatgttataagggtgaatgagatacaaaagtatcttgata

SEQ ID NO: 82236 - DNA, 389 bp, Arabidopsis thaliana columbia
aacacgcgttgttagggcttctatacatcaccggcgatattggtttacgcgtcggagagatggttggtgagtgttattgatgacacgagatttcaattctcggcggtgtaacgtgaagtcttaacaatttcattgtccaatggtggaatttacagagagagaggaccgagtttctttggaactcagcgaagaaattatacagagcatggaacctggcgccgttttcagagactataattgcaggatcagctcaattgactttcacaaaacttcgacttgtatggtgacagctagcgacgatgactcaattcgtctctatgatgttgccagcgccacatgtctgaagacaattaatagcaaaaagtatggtgttgatcttgtttgcttca

SEQ ID NO: 82237 - DNA, 1232 bp, Arabidopsis thaliana columbia
gggcttctatacatcaccggcgatattggtttacgcgtcggagagatggttgagagagaggaccgagtttctttggaactcagcgaagaaattatacagagcatggaacctggcgccgttttcagagactataattgcaggatcagctcaattgactttcacaaaacttcgacttgtatggtgacagctagcgacgatgactcaattcgtctctatgatgttgccagcgccacatgtctgaagacaattaatagcaaaaagtatggtgttgatcttgtttgcttcacttctcatcctactactgtcatctactcttccagaaacggatgggacgactctctgaggcttctctctttgcacgataataagtacttgcgctacttcaaaggacatcatgacagagttgtttcgcttagcttgtgttctggtggggaatgcttcatctccggttcccttgatcgtactgttttgctttgggatcaaagggtcgagaaatgccagggtctcttacgagtccaaggaaggcctgctgcagcatatgatgatcaagggttaatttttgcaattgcctttggtggctacataagaatgtttgatgcccgtatgtacgaaaagggtccttttgaaatattttccgttggtggtgatctttctgaggcaaacgttgtgaaatttagtaatgatggaaggctcatgctgcttacaaccatggatggttttattcatgtgcttgactcgtttcgtggaactcttctgtccacatttaagtgtgaaaccaagtagctggagaatctacattggatgcaagcctttaggtcctgaaggggatgtttgttgtttcaggttcaggtgatggtagtacccatgcatggggtgtaaggagcggaaaacaggtacatagttggatgggtttagggagtgagcccccagtattaaatggggcccaggaagtcccatgtttgtgacaggctcttccgaacttgcttttgttatacccgacttatcgaaattgccagcttatgccattcggaaataggacgactatcacgtctgtgccatgtaaatgaggcctcatttggccttttggtttcagactttgttgtgggttatgccggtaacttatcccttgcactctgattaatatatatttgggtcttgtaacatgaagataaaccccaagtctttctaatgttgtaattcgtgtaatttacaagtttgactgtttctgactg

SEQ ID NO: 82238 - DNA, 552 bp, Arabidopsis thaliana columbia
attctcttcccaaaacattccgtgaagaagatctttttaaagatcctaattttctagatcaagaacccggttcaagatcacctaaaccgggatccgaagctcctgatcaagatccgggttcgacccggtcaagaacacaaaatatgataccgccgatgtgggcactagcgccaacgccagcctccacaaacggaggtagtgctttttggatgttaccagtcggaggaggaggaggtccggctcacgttcaggatccatcacagcacatgtgggcgtttaatccgggtcattacccgggtcgaatcgggtcggttcagctagggtctatgttagtgggaggtcaacagttagggttaggtgttgcagaaaataacaatttggggatattttccggcggaggaggagacggtggtcgggttggtctcggaatgagtcttgagcaaaagcctcaacatcaagtgagtgatcaccctcctagagaaaaaaaccctcctatagatggttctccttgaaagaaatcatgatttctttggtttttaaaaagtgtgaatg

SEQ ID NO: 82239 - DNA, 441 bp, Arabidopsis thaliana columbia
ccaagaaagaacaaaggtgtaaccggttcatgtcagaatcataggcgctgttgtttctgaaagttacaatggtgattggtgacacttttacatattttgttgtcaacagaggaaacatagggaatttgatctcgtcgtgtcacgacggtcttctagacctttcaagaaccatctcaccgcgaggtgctctgaagcataagtcatgaaggcagctagaattatggctagacccaccattagacccaacctcgtgaataaagcagtgatccccaaaatgtaaggtaaagaaactgcagcaatagccagaaaagccatccctaatccataatacaatgtagtaacgtcacaagacccacctgctcgctgatgaacttttgcggaatcatccaaggaagatgattctgattgtatcgctattctctttccatgttgatgcacaaa

SEQ ID NO: 82240 - DNA, 533 bp, Arabidopsis thaliana columbia
agaaggaaggatacgttgcaatctggcagaagcctttcaacaacgactgctatttgagtcgtgaggctgggactaaacctcctctttgtgatgaatcagatgatcccgataatgtttggtacacaaatctgtccccttgcatcagtcgcatacctgagaaagggtacggaggaaacgtccccttatggcctgcccgtctgcatactccacctgataggctgcagacgataaaatttgattcccacattgctaggaaagagctattcaaggcagaatcaaaatattggaatgaaataattgggggctatgttcgcgccttaaaatgggaaaaagatgaaactaagaaatgttttggacatgagagcaggctttggcggatttgcagctgcactaaatgatcataaactcgattgctgggttcttagcgtggttcctgtcagtgggcctaacacattgcctgtcatttatgaccgtggactgttaggagtgatgcacgattggtgtgaaccatttgatacatacccacggacata

SEQ ID NO: 82241 - DNA, 431 bp, Arabidopsis thaliana columbia
cccacccgtccgttcttttactgagattcttttggcgactttgattactttcatcatctgagcttaaggttttggctgacatatatgggcggttgtgatttgaataaagacggcaccaagcagagaagacaccgggattcttggacattgcctggatatctcataaacatggccgctctaaaagtgcgccggcagagcgggatcttcacacttgtggtaatggagcttcacaatctgcaaacaacttgactagagtgcatgcatactctgttcaaacaacagcagacaagagaccaaaaccactgcataattgtcagatgttaactaaaaacaatgtgacttctaacgacagagcatccttggaacgcgatgttgagcagcttcaccttcgtcttcaacaggagaaatctatgagaatggtgttagagaga

SEQ ID NO: 82242 - DNA, 423 bp, Arabidopsis thaliana columbia
  unsure (1)..(423): unsure at all n locations
aatgatttctctaccactcactacaccgattttacccagccggtgtctcctccacaaaacccgccggcaaaactcgactcgccgccgcttattgattcgatcatcatcgagcttacaagaccaattcaccgtggagacgacgaagcgagtggttcttgtgagacatggacagagcacgtggaacgaagaagggaggattcaaggaagctccgatttctccgttttgacgaagaaaggcgagtctcaggctgaaatttctcgtcagatgctcatcgacgactccttcgatgtctgcttcaccagtccattgaagagatcaaagaaaacagctgaaatcatatggggaagtagagaaagtgagatgattttcgattacgatctcagagaaatcgatctctactcttttcaangtctacttaagaa

SEQ ID NO: 82243 - DNA, 1061 bp, Arabidopsis thaliana columbia
tgagaatatttcgtccgtcgttgaaacttgagaatagaggcgaatctggttcgagttagggttccaattgaaaagtttgaagctccttttgactctctctctcttctagatctcgacaactctaacctcttcgatttggtggatcttgagaaattgattttagttcaaagcttctgatggctaaaaaggagagacctagacctgagaagttgtctgtgtatctttatatacctaatattgttgggtatatgagagttctcttgaactgtgttgcttttgctgtgtgtttctccaacaagccacttttctctgtcctttatttcttcagcttttgttgtgatgctgtggatggctgggtggctcgtagattcaaccaagtttcaacatttggagctgttcttgacatggtcacagatagagttagcacggcttgtcttctcgtgattctctctcaaatctacaggcctagtttggtcttcctctcattgctggctttagatattgctagtcattggctgcagatgtacagtacgtttctagcagggaagagcagccataaggatgtgaaagacagcacaagctggctttttagactctactatggaaaccggatatttatgtgttactgctgtgtttcttgcgaggttctgtatatcatccttcttctcattgcaaagaaccaatctgaaaatctcctgaatgtcgtagttgctacattaacacagatttcaccactctcttttctcctggctttgacattgttcggttggtcgatgaagcagaccattaatgtcattcagatgaaaactgctgcagacgtttgtgtactgtatgatatagagaagcagcagaagccttgatcatcttcctttgtctcaacctgaaactcttttttttctttcattgtttgttctcttttcactgtggatgtagataattgtttttaatgaaatgaagaaatattgatttgccttttgacaaaaaaaaaaaaaaaagggcggccgctctagaggatccaagcttacgcacgcgtgcatgccaagtcatagctggtctatagt

SEQ ID NO: 82244 - DNA, 1080 bp, Arabidopsis thaliana columbia
ctgcaagtctgacaaatgtcgattaacaatacatcatgctgttctttgcagtgagatgggagcccatttttctccatgtgggagatatttagcagcctgtgttgcatgcgttattcctcatgctgagacagatccaagtttgcagacactggtccaacaagactcagggcttgcaacttcccctactcgacatcctgtcacagcacatcaagtcatgtatgaacttcgtgtgtattctctggaaaaagaatcatttggttcggtacttgtgtcccgggcaattagggctgcacattgcttaacctctatccagttctcaccaacctccgagcacattctgcttgcatatggtcgtcgtcatggttctcttttgaagagcattgtgagtgatggagaaacaacatcacattttttcacagttttggagatttacagagtttcagatatggaactggtgagagtacttccaagctcagaggatgaagttaatgttgcttgctttcatccttctcctgggggaggtcttgtctatggaacaaaggagggaaaactaagggtcttccggtacaacacagctgctgcgtccaatctcactgcaccaaatagctctcccgatgagaacttggccgaggtgcagacctatgcgttagaatgctagacagggaagaatttgggtctcaaccattctatatacacactctcatagacagatcttgcattgcgggactatttaccttcctttgtttcttttcgggttattcttcccgttctgtttgctcgcggtgcttttagttgtcctacccgctgtgcgattccaaacctgagaagcttttttccattcacgagctggtggtatctttttcttattttcttatatactgttgagggccgtaggttgggatggcctatcttccatttgcaaacccttttctttaaaaaaacaaaaaagaaatgaagcaggtttctgagtttgttgtttaaaatgacttcagaaaaatgtaaaaaaaaaagatgtttttttgtttgataaattgatgttgtagtttgtaactaagattgtaaccacgttttttcctctgt

SEQ ID NO: 82245 - DNA, 468 bp, Arabidopsis thaliana columbia
gataatataattaccttttagtattctatattagattattgttgcctggaagttgaagaaatgaagattaatgtcttgtataatttatattttgtttcagacctatatatacattgtcatgcaaggaatagctgaaagcagattttttttcttttgagaaaattactactcaaattatctgccaaaccgattaaaattacttaatttcaccatcggtttacttatttcaagctgtctgaagtaatttatcgttgttactctcattcttcctcgtcgatttcggagttttcctgattactttcaccctaaacgccgccttcttatctgaaccaaactcgatgatgtcggacgatctaaaccgcgcgggaaaattcggtgttgctctatatcttcttccttcgttatcggtcacataggttccgtgttcgcttcgaagatccatcaagaagaaagctccgtctttgtaaa

SEQ ID NO: 82246 - DNA, 1947 bp, Arabidopsis thaliana columbia
ggcacgagagaaacaaaagtttcctccacttgttgtttcaacaaaacaaaatcctcccctttcatatgttagttacgaggcgatgggaatcgcatccggcgaactcgccggacctcatcttacagttttttgggaatgaattccacggctacggtgacgatatgcctgagacattgcggaggttgacggagttgctgggttatgagaaggaagaagacggcgccggaatgaatgcagccaagaaaatcgcggcggaattgaatcgccgaaaagatgatataccggcgttcagacgcttgcggtgtctcaagcttgatcagttgaacgagtttcttttttctacgaagctcaatcccccgatcggtgaccaggttcatcatgacatgcatgctccgctgtcgcattacttcattcacaccagcctcaattcctacttcaccgggaatgtctttgggaaatacagcattttgcccatcattgaagcacttgaacagggtgtgagggtggttgaactagatctgtggccggatggtagaggcagcatctgcgttaggcctagctggaacttcgagaagcctctgaaattgcaagagtgtttggattctattaaagaacatgcctttaccaaatgtacatatcccttgataattacgttcaaggacggcttgaaaccggaacttcaatccaaagctactcagatgatacaacagacatttaatcatatggtatatcaccatgatcctcatagtttggaggtttttccttcgccacaacaactgcgaaataagatactaatatcaagaagacccccaaaagagttgttatatgctaatgatgatgatggaaaggttggggtacggaatggggttgagataagacaacacccggcagatccaaattaccagagtttagtttccttccatgtagtggagccaagaggcatgctacaaaacgtattaacaggcaaggctaacaaaatccaacgaccaggatggtacgaaacagatattataagcttcacccaaaagagattcttgcggacacgtccacaacggaaattgttgatctatgccccctataaaccccaaagagcgtggatgcacggtgctcaattgattgcactaagcaggaaggaggacaaagaaaaactttggttgatgcaagggatgtttagagcaaatggagggtgcggttatgtcaagaagccggatttccttttgaatgctggtcctagtggagttttctatccaacagtgaatccggtggtggtgaagacattaaaggtcaaaatctacatgggagatggatggattgtggacttcaagaagcggataggtcgactgtctaagccggacttatacgttaggatcagtattgccggtgtaccccatgatgagaagattatgaacacgacagtgaaaaacaacgaatggaaacctacttggggagaagaattcacatttcccttgacctatcctgaccttgctttgattagttttgaagtttatgactacgaagtatcgactgcagatgcattttgtggtcagacttgtctaccggtttctgaactaatagaaggaattcgtgctgttccgctctatgatgaaagaggtaaggcgtgcagctcgacaatgctgctcacacgttttaagtggtcttagcctacaagtttctttctcattaccaagtggctcttggtctagtggtgtttcttaaaacctttcaaagttacgctttctaggacccctagttcaagttccatttggaagggggaaagagtttaggcaagcttagattgtgatacggaaataaggtcttggtccagaactagtttgcattgccattttacttttggaacgaaaacaattattcgccattcaagtttctttcacttttattgctgaatttcttttactatcctttcactttaaaaactgtttttccttt

SEQ ID NO: 82247 - DNA, 695 bp, Arabidopsis thaliana columbia
  unsure (1)..(695): unsure at all n locations
acaattaggggaaaagtcaagacaagtatggctaggtgtacaggcagacccactggcgcagtcagatgatctgctggcaaaagcatacaaccgaccctcagaggaagcagtagcaaagccatcttcataatggttcatctcaaagaatgcaattgtctcagggctactcgggaagaagcaagaagattcagtttcagattctccacctccaaaggctcggcgaaaaaggatagtgaggaagaaggtggctgcatctgcctcttaaataaccaacaaaacctctaaaatgtcacaattttcagagtccatggaagaacaacagtgaggttttgttgttcatttgaggcacacatgaaaaaggttttgttgccagaggaaggaagaagggatcccccaacttggaggaattgaaaaaaagctctatagcttctttttttttttttttactttatgactcgttctctctagttttaagtgcttttggaaagacatttctatttttaggtgtggtgataaagatgcttatctctggttaaaattctgtattttctcaatgtttctaataaatagccccatcttatacgttcgttgaaaaaaaaaaaaaaaggannnnnnnnnnnnnnnnnnnnnnnnnnnnnnnnnnnnnnnnnnnnnnnnnnnnnnnnnnnnnnnnnnnnnnnnnctaattcnnnnnn

SEQ ID NO: 82248 - DNA, 974 bp, Arabidopsis thaliana columbia
aacgaaacgaactagagacagtttgattcgaaaatcttgtcggaaaatggaggatatcggcgaccaagaattaagcaattactgggaacctagctccttcctccaaaacgaagacttcgaatacgacaggttctttctttcgtccttttttttttccttactttgctttccatcttgagattttgatatttgtttctttaaaaaaaaagaagctggcctttggaagaagccatttctgggtcgtatgattcgagttcgccggatggagctgcttcgtcgccggcttctaagaatattgtgtcggagagaaacagaagacagaaacttaaccagagactcttcgctcttcgatcagttgttcccaatatcactaagatggataaagcctcaataatcaaagatgctattagttacatagaaggattacaatatgaagaaaagaagctcgaagctgagatcagagaacttgaatctacaccaaagagtagccttagtttcagcaaagattttgatcgtgatttacttgttcctgtcacatccaagaagatgaagcagcttgattctggttcttccacttctctcatcgaagttctcgaattgaaggtaacattcatgggagagaggacaatggtggtgagtgtaacatgtaataagaggacagatacaatggtgaaactgtgtgaagtctttgagtcattgaatctcaaaatcctcacttccaatctcacctctttctctggcatgatcttccacactgtctttattgaggcggatgaagaagaacaagaggtgttgcggttaaaaatagaaacaggaataggagcttataatgaaactcaaagccctactttgagcatcgactctctttactaataatactttttttcttccttttttggttcattttggcttctctctttacaataatgtatgtctctcttttcatttttatgatcaaaaacgtttgtttgtcc

SEQ ID NO: 82249 - DNA, 734 bp, Arabidopsis thaliana columbia
  unsure (1)..(734): unsure at all n locations
gttgttggancttttataagaagaaacagataaaaatgaaacccagatctggttcttacagtaacagatcttaacacaatctctctctctttttaatcgtcatcatcttcgntgatgataaaatcatcacgctcaatcttttttttgtgntcttcctttttttctctttcaatatgatatcaaaggaaaatggaaaaacaaaagagcataaagttatcattttgtaaaatttgagaattttttttgtgtgtaatcaacggattttttttgtgaagcagcaaatcagagacgtagatcggtacagtggagatcatctatcccgccagcgaataagtcaacgccatccaaccgggcgggaaattaagatcaaactgaaacgggcgttttccggcgggaagacgaagatgcgatatcatctccgtcgtcaataacagacgacgaagaatcgcagtcgctatgacaatcctccggagctaccggtggagttctcggatatctcttaatcgcatgtaacggtttcgccaccgacgaagacgccgccgcggcttccatcggtctcggtccgctacaagatttaacggtgctgctcatgctgctactcgccggccgactaataatctgctgctgctgctgctcctggaaattacctccgccgtataaccgatggtccataaacggatcgatctggttctgaatcaccggaggagaacagaggttttgattgtggaggtagg

SEQ ID NO: 82250 - DNA, 499 bp, Arabidopsis thaliana columbia
  unsure (1)..(499): unsure at all n locations
cagtcaaagtaaatatttggacccgcacaagggtaaaattggagaggttactaagattttcactcacaacagtaccattgtgatcaaagatgtgaacctcaaaacaaaacacatgaagagccgagaagagggagagcctggtcaaattgtcacaaggtacttgaagatggacagaaggtaagatatctgatcaaaacaggggaactcatcgacaccattgagaagtggaagctacttaaggaggctaaggataaggaaaccacccaagttgcagttacctccgcatcttagcgtctcatttctttcttcttcagtgcacttttgatataatagacctatgcattggatggatgtattgaatcccttttaaggtaaattataatatttctgctccctnnnnnnnnnnnnnnnnnnnnnnnnnnnnnnnnnnnnnnnnnnnnnnnnnnnnnnnnnnnnnnnnnnnnnnnnnnnnnnnnnnnnnnnnnnnnnnnnnnnnnnn

SEQ ID NO: 82251 - DNA, 613 bp, Arabidopsis thaliana columbia
  unsure (1)..(613): unsure at all n locations
gaagagtgaaagttgcagagcgagaaaaaatggcaaccatgtctgctcttcagagctcttttacttctctttctctatctcccagctcttccttcctcggccagcgtttaatttccccgatttccctctccgtcacttctccggtcaagcccgctgagaacccatgtcttgttcttgcaaagctcaagcgttgggaacgaaaagaatgcaaaccaaacagtcttccgattctccacaaaatgcatgtcaagtttggagatacagtcaaagtaatatctggacgcgacaagggtaaaatcggagaggttactaagattttcactcacaacagtaccattgtgatcaaagatgtgaacctcaacaacaaaacacatggaggggccggggaagagggngggcctggtcaaaatttgtcaaggttggagcaccttttccccagcttnaaaatgtggtgttgtattcaaaggcaaaaagccgtcgtaagccgggtggggcacaaggtcctttaggttggccggagggtaggttttttncaaccagggggccttttggcccctttggaggggggntcttnggggttnggttggacncccgntngttcccngtntgggtt

SEQ ID NO: 82252 - DNA, 855 bp, Arabidopsis thaliana columbia
  unsure (1)..(855): unsure at all n locations
nnnnnnnnnnnnnnnnnnnnnnnnnnnnnnnnnnnnnnnnnnnnnnnnnnnnnnnnnnnnnnnnncggaccacgcgtccgctgcgacgcgacgggataggacgaaggaaaaagaagaagagtgaaagttgcagagcgagaaaaaatggcaaccatgtctgctcttcagagctcttttacttctctttctctatctcccagctcttccttcctcggccagcgtttaatttccccgatttccctctccgtcacttctccggtcaagcccgctgagaacccatgtcttgttcttgcaaagctcaagcgttgggaacgaaaagaatgcaaaccaaacagtcttccgattctccacaaaatgcatgtcaagtttggagatacagtcaaagtaatatctggacgcgacaagggtaaaatcggagaggttactaagattttcactcacaacagtaccattgtgatcaaagatgtgaacctcaaaacaaaacacatgaagagccgagaagagggagagcctggtcaaattgtcaagatagaagcacctatccacagctcaaatgtgatgttgtattcaaaagaaaaagacgtagtaagccgggtgggtcacaaggtacttgaagatggacagaaggtaagatatctgatcaaaacaggggaactcatcgacaccattgagaagtggaagctacttaaggaggctaaggataaggaaaccacccaagttgcagttacctccgcatcttagcgtctcatttctttcttcttcagtgcacttttgatataatagacctatgcattggatggatgtattgaatcccttttaaggtaaattataatatttctgctaaactactcacac

SEQ ID NO: 82253 - DNA, 745 bp, Arabidopsis thaliana columbia
  unsure (1)..(745): unsure at all n locations
nnnnnnnnnnnnnnnnnnnnnnnnnnnnnnnnnnnnnnnnnnnnnnnnnnnnnnnnnnnnnnnnnnnnnnnnnnnnnnctcgccacgcgtccggacttgatcttcttgccgttaccaaaaccaaaatccctaaatttgccctcatttccctctgattagatcccttaccccgacaaagacaccaaaattcttgagggcgagagagctgattgatgtctttggtatctggagccagggacatggggttcgacgacaacaacaacaacaagaacaacaaggatggagatgatgagaactcctcctccagaacaagagccgacgacgatgctcttagtcgacagatgagcgaatcttctctttgtgctaccgaggaggaagaagacgacgattccaaattgcaattgggtcctcagtacactatcaaagaacatctcgagaaggacaaggatgatgagagtctgaggaaatggaaggaacagcttctcggaagtgttgatgtcaccaacattggagagactcttgatccggaagtgaggattgatagcctcgccatcatatctcctggaagacccgacattgttctcttggttcctgagaatggaattccaaagggcatgttggtttacttttgaaagaagggagccaagtccaccttgaaattcacttttcatgtttacaccaacattgtctctggtcttaggtacaccaatacagtttggaagaccggtgtcaaagtggacagagc

SEQ ID NO: 82254 - DNA, 554 bp, Arabidopsis thaliana columbia
  unsure (1)..(554): unsure at all n locations
gggtgaaaaatgtcaaatttataagtaggaacagctctcaggttctaatcatacataaactcgaacgcaatccaaattaatgttacaacagttttatttcccactctttgtgttttgtttggtgggttttcttcttcagaaactctcttggatgtgtttataagagcaaaactggagggatgtgtccttaatggcggaaatgtctaacgttggtgaagagcagagagactccatactttttgcagcaatcaatagcgtcttggtctctaatactgcctccaggttctgctatcactcctattcccatctggcacgcctcttccaccgcatctttccaagcgaatggggagaatgcggcactggccaaggcagccctttaagcttcctccccagctttccttgnaagcaattctcagncncnnnnaccgggtttggtngccggttnccatccccagnaaaaaatggtnctatgnggcaacccagnatcggataaacaccnnggaaacaggtcggaaagggnccnggnaaggggctggggggaancaccttggaat

SEQ ID NO: 82255 - DNA, 669 bp, Arabidopsis thaliana columbia
aaaaattctttgctttgcaacaaaggcagacagacaaaaggctaattcggagctctcctccacatcttcttccaaaacacaaacaaacccccaaatttccagaaaaatcagatcattctttcatcaatctcgtcttctttaatcttaggtgggaattcatcagctcaaaaacgctgcacccgatcgttttacgactcaaatcagagaagctgattcttttccaatcattccaatttccatttcttccttgggaggttttacaccaaattagccgtcgaaaggggtgcttctttgatctaatttcgatggcgggattagagaaaaacgctgatttctcagggaagacgacgaaatcggctacaacgacgtcgttcttcaacaggtcgcttacaattcacggaagaacactggtggattcgggccccaaatcccacaatctcaatccttctctcaatcgtaccacctccattaccaaattctacacccccgtagaatcgatgggaacttctcttaaaggcaaagtcaaagacctttgtagattattcgagacttccaaacccgttaaacctgccttagctgagattcctcagaagcagaaatccggtaaatcccttttacccgaatcgcggatatcgcctttttcgagcttaaacaactcggtcatccgtc

SEQ ID NO: 82256 - DNA, 509 bp, Arabidopsis thaliana columbia
acctaatcatcactcggctgcttcctgacgcagcaggaactgcttgtggtcaacgtctagagaaagtgtacggatctcagtattgtgatatcctccgtgtgccttttagaacagagaaaggaatcgttcgcaaatggatatcaaggtttgaggtctggccgtatctagagacttttaccgaggatgttgccgctgaaatctcgaaagagttgcaggggaagcctgacttgatcattggaaactacagtgatggtaatcttgttgcatccttgttagcacacaaacttggtgtcactcagtgcaccatcgctcatgctttggagaagactaagtacccggattctgatatctactggaagaagctcgacgagaagtatcacttttcttgccagttcacggctgatcttatcgccatgaaccacacagatttcatcatcacaagtactttccaagaaattgctggaagcaaggacactgttggtcaatatgagagccacagatctttcaca

SEQ ID NO: 82257 - DNA, 1441 bp, Arabidopsis thaliana columbia
cacgcctgcaggtaccggtccggaatacccgggtcgacccacgcgtccgcccacgcgtccggagaaagagagagagagagagagagagagagagagttatcagagatagcaaaaatggaggctttggtttgccggaaattgggagatccaactgcgacgaatccaggtagtccagaatctccggtagaagtaagcaagactcatccgatcccgtctttgaattcagacacgtcggtgagagtcagagttattgctacgagcttgaattacgcaaattaccttcagattctcgggaaataccaggagaaacctccgttacctttcattccgggctctgattactccggaatcgtcgacgcgattggtcccgccgtcaccaaattccgcgttggagatcgtgtctgttctttcgccgatctcggttccttcgctcagtttatcgtcgctgatcaatctcgtttgttccttgtaccggaaagatgtgacatggttgctgcagctgcgcttcctgttgcgtttgggacttctcatgtagcacttgttcatagagctcgtttaacatctggtcaggtcttattggttctaggtgctgctgggggcgttggccttgcagctgttcaaatcggtaaggtttgtggagccattgtcattgcagttgctagaggaactgagaagattcaactgttgaagtcaatgggagtggatcatgttgttgatctaggccctgagaatgttatttcaagtgtgaaagagtttttcaaggcaagaaagcttaaaggagttgatgttctgtatgatcctgctggaggggaactaaccaaggagtccatgaaagttctgaaatggggagcccagattctggtgataggtttcgccagcggcgaaatacctgtcattcctgctaatatagcacttgttaagaactggacggttcatggtctttactggggtagctacaggatccatcagcccaatgtccttgaagattccatcaaagagttattgtcatggctttcccgaggattgatcactattcacatctctcatacctatagcctctcccaggccaatcttgcattcggggacctcaaagacaggaaggcaattggaaaagtgatgattgctctcgaccacaagactgccctgtcttcaaaactatagactctttatggccgtaggagaaaacagcttatgtattctagaaataaggttattgcaatggccatgtaagctgaaccatcttgcatttatatctggcatataatccacattctgatttgaaatttcaataaacgttatcgaattgcagtttgattttctctagaaattagtgtagttataaatcctttttgtataaaaaaaaaaccaaagggcgaccgctctagaggatccaagcttacgtacgcgtgcatgcgacgtcatagtcttctatagtgtacct

SEQ ID NO: 82258 - DNA, 557 bp, Arabidopsis thaliana columbia
gcgattgggtaccgggcccccccctcggggtcgcgggatcgataagcttgatatcgaattcgcggccccccggcgaaaagatggctgaattccaagatcacgagggaaacgggacggttgctgacgcgatttacgacgaagagaatgggtggcccgcgacggcgaaatcgaggatcaatttggactcgaaacccaaggagagaaatcgcgtgaccatgaaaggagagacatcaagaagttaagatagagaaagagagagggtcgtgatagggacagagaaagagactctgaagtctctcgccgaagcagggttagagatggagagaaaagcagggagaggggttgagccaaggacagagatcatcgtgagcgtcatcacaagaagtagtcgtcacagggatcatagcagggaccgtggtgaaagaaaagaacgtggtggtagggatgatgatgattaccgtcgaagccgggatcgtgaccatgataggcggagagatgatagaggaggaagacgcagtcgtcgatctcgatctcgttcaaaggatagatctgagcgc

SEQ ID NO: 82259 - DNA, 1033 bp, Arabidopsis thaliana columbia
gggccccccctcgtggtcgacggtatcgataagaccccttgctatcgaattcgcggccgcctgaaacagattctaaatttatctccggtgagaaagagatagagagcgttgattccggcgaaaagatgtctgaattcgaagatcacgagggaaacggtacggttgctgacgcgatttacgacgaagagaatggtggccgcgacggcgaaatcgaggatcaattggactcgaaacccaagagagaatcgcgtgaccatgaaagagagacatcaagaagtaaagatagagaaagagagaagggtcgtgataaggacagagaaagagactctgaagtctctcgccgaagcagggatagagatggagagaaaagcaaggagaggagtagagacaaagacagagatcatcgtgagcgtcatcacagaagtagtcgtcacaagggatcatagcagggagcgtggtgaaagaagagaacgtggttggtagggatgatgatgattaccgtcgaagccgtgatcgtgaccattataggcggagagatgattagaggaggaagacgcagtcgtcgatctcgatctcgttcaaaggatagatctgagcgcagaacaaggtcacgatctccatcgaaaagtaagcagcgagtcagtggattcgatatggcacctccagcctctgcaatgttagctgctggtgctgctgttacaggccaagttcctcccgctccaccaactcttcctggggctggaatgtttcccaacatgtttccattgccgactggacagtcatttgggggactctctatgatgccaattcaggctatgacacagcaggcaactaggcatgctcgcagagtctatgtcggtgggctttcccctacggcaaatgaacagtctgtggctacattttttagtcaagttatggctgctggtggtggaaacactgctggtccaggtgatgcacgttgttaatggctacataaaccacggggaagaagtttccctttgtggggaggcgccgtacttttgtagcggcaagt

SEQ ID NO: 82260 - DNA, 551 bp, Arabidopsis thaliana columbia
atgatgaaaagatatgatcgtacaaaatatttataatagtatcaaaatgttatcaatgagaatgtataaaactgtttctatatagatgaaacatgatgttacatccgaatagaaagataccatacgaggtctcctgttcccaagtttaacatttcaaagccaaaaaaaaaacccattgatgttacatatcataagcacaagttgacgtctgaggacaaacaatttgatgaccatttctggttttagaaacaagttgactttacatatcaggatactcaaaaggagggctttaataaatcatcacttgcagatgaactaaccaaactcactcagatcactggggaaatctctctccattccttttggcgatacattgagttaaccgaggaactcttagcggctagccccagcgcctggtaacatgcttgtgagcgaaggcacgccttgtccccccttcccctcggccgcttgcttcatctactgtggatctatgttttccattaatccgggcattaggaacacaacaactaccatgaatcccaccatgagac

SEQ ID NO: 82261 - DNA, 579 bp, Arabidopsis thaliana columbia
  unsure (1)..(579): unsure at all n locations
attttcttatcttattggggtgtactagtatggatagcaaatatcaactactaatatttgagagtttgcaactatttcaaaagatttttgatatacaaaatcctaaggggacagagagaaaccctaataataaatagactaatactaacataatatggacagacaaaaatagccacttgcgatttctattcattctgcagtcttaatcaaaagctctttctccttatcctgcctgaaaatcttcgagatatgtacagaggagtcaaaagaatgaaggattgatgggttttcactgattcttaaggtgacgggggcttggtttcgacaagctttcttcaagcaaacccaaaaccttcactggcttcgtgaattgggagtagcaggcgttcctgaagctgttccttaagattgatacncagggnnggcnaagttgggtaaaacatgtatgagctgatggcagccgctctgggggnccaaatgctttgngggattgnaaaccttttgaggggcagnaataccctgaagngccttgaancttccaaaggacccttgatgtccngggcaaatgagaatcccnca

SEQ ID NO: 82262 - DNA, 547 bp, Arabidopsis thaliana columbia
agctctctacgactcactattgggaaagctggcacgcctgcaggtaccggtccggaattcccgggtcgtcttcttcttcttctttgtacccagaaagaaagagagctccaacaatggctgcttgcgctactcactcctctctcatgctagcatacgccgccgcatccactcgttcccaggaccttacccctactccatctcttttctcttttgccagctccagacccaaccacttgagcttcccgcttcttctccttgggggttccagggaccggagatgtgctgctattgacagagcttccaaccacaagtttattgtctccgccgtggccgctgaggctgacctcgacacggaggaggacctggagcagaccgccaccgccgtccttgatccgcccaagcctaagaaaggaaaagccgctttggttctcaagagagatagaacaaggtctaagaggtttttggaaatccaaaagctaagggaaaccaaaaaggagtatgatgtcaacactgctatctctttgcttaaacaaactgccaacacaag

SEQ ID NO: 82263 - DNA, 394 bp, Arabidopsis thaliana columbia
aaaacgaaacaagtccaaaacataaataaaaataaatatcttgccatacataggggcatatttgattaaagagattatcatcagaatttttccatattacatatagagttatggactctctaattcaacaaaccttagccaaaaacaacatcccctaacttttaatatctaacataaccaaccttttccttcatcaaacaaacgaccaactaacgagggtaaaagccaagcagtggtttgattcgttggtcatcaacaactttccacaccgtcgcttgctcatacgaaaccggtctgcccatgctcgacacacatattcctgccggaaagattcgcatatccctgctgcatgatcttggcgaactcggagcaaagagctctccgaccagagtca

SEQ ID NO: 82264 - DNA, 567 bp, Arabidopsis thaliana columbia
acaaaagctgcagctccaccggggtggcggacgctctataactagtggatcccccggtttgtttttattgcacaaaattttacataggaacgcttaaccaaccaacgatattgtcaaacaagtcagtcaaaaatctttggatatttcttctgaagaactaaggaaagagcggtttactatgcactatttcgctcacaaaccggtgactttatagtttttgattatatcgatgtccgtccagtacattaacccaatcctgtgatccaccgcgcacaatattgtcccgggtacagtctcagaccagtttgctagagtgttcatttacgatggcgcctgtggggggatcttgatctggaccttgaccgcttcgacctggatttgtcatgagaagagtagagagtgttcttgtgctgagaatgcttgctatgtggtgaccgcgaagaaacatgtccattccaatcaaaacaatatatggaaaacttttttgggggtggagatctttctttaactaggcctaacttcccgccttggggcgttttaccccacaatatgcgggccttttcttat

SEQ ID NO: 82265 - DNA, 431 bp, Arabidopsis thaliana columbia
cacgagagtttcggcatctctgatattctccccctctcgcgtttcagattcattcgttaagaaagcagatcgacatggcagctcaaggaggtgattcatatgaggaagcgttggctgctttgtcgtctttgatcacgaaacgaagtcgtgctgataagagcaataaaggggatcgctttgagttagtctttgattatctcaagctacttgacctggaagaagacattttaaagatgaatgttattcatgtcgctggtaccaaaggcaagggatccacatgtacctttacagagtctattattcgaaactatggctttcgaactggactcttcacttcacctcacctcattgatgtccgggaaagatttcgtttggatggtgtggacataagtgaagagaaatttttgggatatttctggtggtgctataac

SEQ ID NO: 82266 - DNA, 425 bp, Arabidopsis thaliana columbia
  unsure (1)..(425): unsure at all n locations
aaaccaagcaacaatctcatgtgtatttttacatctagagattctaaattcgatttttctaatttatacacttacataataaaatcaaaggcaaaagaagtgtgaccaagaaattcactcttcacctcactcgtagaacccaaacccaacaaaaaaaaacccaaaacgaagccacacaaagtccaaaatagaagctcactctatgtacatcctattttgttagcgcccttaccggaagttctcttttcaaaaaaganaaaaacctcccaaggccatttgtgactctaaaattttcnganacaaaaaatggnaaatccttggtctntttctcaggntcagtgactcntggnaaagcnctttcctcatccgttggnttaaacagctgnaggngtcntaccnaggttcntgggtggcgaaggggcccg

SEQ ID NO: 82267 - DNA, 1358 bp, Arabidopsis thaliana columbia
  unsure (1)..(1358): unsure at all n locations
cnnnnnnnnnnnnnnnnnnnnnnnnnnnnnnnnnnnnnnnnnnnnnnnnnnnnnnnnnnnnnnnnggcggttccacgcgtccgccgtctcatcacaatcacatcatcatcgtcttcgtcttcttcttcgtcggcacatactttgtcttctcatctcctccattattttgatcttatcgcaacagatctctcatctccttcacttgttgactgtttataccacaggacaatggctgacaaagatgaagcagcgacgcgtggaaatgattgggaagttgtttctcttactgcttcagcttacgctgctgctcctggtcctaaaccagtagtggactcgaaagatgatgatcacaaggaagttactccttgttacgaagctgagacatctcatcccttatacatgtctcgccactttgttttcccaccaactggtcagcttgagaatactagtgaccttaccgaggctagcttaacggggtctcattgcaaggaagggagtgatttgagtctgaaagggttggatttatcagatgatttcggaggacttgagttttccgaggataaaggcaagaaagaagaaaacatttacacgacagctttgagttctctggacgatgaaagagctatcggtggctcacacgtgtatgaacctgttgaagaaccgaccgagcctgtttctccttctgatgttacacttgatctgaatcctattaaagatgatgaggtagcaaactcgccacctagcgaagaagcttggtggaaaagaagcgttgcctctttgattgcccaagcgaaagaaactaatacagtttggtccatctgcatagccgcagctgtaatgggaattgtgattcttggccaacattggcaacaggagaggtggcagattttgcagcaaaagtgggaatcaagcattggaaacgagaaagctggaagattgatggggccaatctctcgactaaaacaagcatttgtcgggggacagcggcgggattcattcatccgagccagcgcccaaaacgaccgttaaatcaaaacaaaaaggtgaattactttgatgatgacgataagaacaagagtagcttctttggggtcgaaaaacatggatgtctggtgtgtgaatgtgtttggtacttctcttcaggtcatggtttttgtacatatttctttggtgtgaaacaatcatttacccatttcattatctcaatgccctattactctctttctctgtttatatcataatcagatactcagtgtctcctgttatgtttttgttggtcgaattgaaaactctttattttggttaaaaaaaaaaaaaaaagggcgaacgctctagagggtatcagctttcgtgcgcgg

SEQ ID NO: 82268 - DNA, 533 bp, Arabidopsis thaliana columbia
  unsure (1)..(533): unsure at all n locations
ggnccaanggnatgngnaaattcccanggtacaaaccacccatnatanttttataaaatacctttactacattacctacacattcacaatgacataaatatgaacatataaaaaaaaatcatagttttgtagaaaattctataaaacacaaaaagaaagagaataagatgaaacctaaaaagttatctaaaaatggaatggcctaacaagtaattgaagactctttctttgtgatatgcgggatctctttgttatatatatatcgtgtgcatcaagaaacacacatcaatatctgtttgcaattttcagaggaagtaagtgagctgttcctttttccttgagcctccttctccatacaaatcattccattgctttagctcattcattcctgctccttctgatgcaaaactcgcagctacctgggttttagcttttctcatgtcttccatgttcaaaggtctcaaatgtaataactctttcctcagaagcttctgcttctccttcttttggattcttctgtgccttttcctgct

SEQ ID NO: 82269 - DNA, 596 bp, Arabidopsis thaliana columbia
  unsure (1)..(596): unsure at all n locations
atcggttaagtccggtttttatttttaagtgtttaggatagactacaattgaaagccttttttcacaacaagcaagagaagataaaaatgaaaagagtcatattccgattacacttttagttattgaaaaataacaacaaggtaataacaagaatcagatttgtgaatcttcaagcaacaacaagaaaaaaaaaaaaaaaaagtcgagacatatgaggctttttgtcacaactccaagaagaaagattcaaactgaactcattcatcaccggcaaatctgacatgttttcctgtcggtgtaggaaagcctttcaaacgcaacactcctggagattgatctttggcctccacaatctcttcatcttcactgtcatacacaaatctagtgtgtttccctgcaaagtcagtctctacgctcatcttcctaattcccctcacacaacccatccacaatccctccctcttcttcctcctcttcctcggcggggtattccccatcatattcctcaccgtaagaataggcgtcttcctcttcatcatcatactcgcttgggattgatnggcggatcggcaccggngggtaancncggggtngg

SEQ ID NO: 82270 - DNA, 501 bp, Arabidopsis thaliana columbia
  unsure (1)..(501): unsure at all n locations
cccagcggggcccaaaaaaaaaaaagcttcttccgggtaacnnnnnnnnnnnnnnnnnnnnnnnnnnnnnnnnnnnnnnnnnnnnnnnnnnnnnnnnnnnnnngacccacgcgtccgctaagagtagggcggaggctaaaaggactaaatatatgtttacaccaagtgaatctaatgatgtttcagacctacatgagaatttgctaagccacagggacgcaatgcattcctcctttgccggtggggatactcgttattcagattatgacccccctaatatttttggaagatatggtatcagatcattctgaaatctgcaactgattcttctgatatgcaggaggatactccctgatgacattcccttgctgtcaggagctgggcgtcattccgagcgacgcaatactttttgttgacatacgtcctggagaagatgaaagaacacccaccagcgaagaacattattaagaagtcaatttattggcgacttttcttcccttt

SEQ ID NO: 82271 - DNA, 596 bp, Arabidopsis thaliana columbia
gcgtccggattttgtttagtttctgttgaagagatctgagatatttgaacgaagcagagtgtatatgaaatcaaatctgtgaaaatttctttgaatttgaattgactttggacttgtgagagaagttagatcttcttcttcgtgagctatgccatttacgatgaagatccaaccgattgatatcgattcttcaccaaccgtagctagagctgaatcaggaaacaaaccggtgctcaaatctcgtctcaaacgtttgtttgatcggccgtttacaaacgtattgagaaactcaacaactacaaccaccgagaaaccattcgttgtcaccggtggtgaagttcaatgcggcggagtagtgacggagttcgagccgagttctgtttgcttagcgaagatggtacagaacttcattgaagaaaacaacgagaaacaagctaaatgtggacgtaatcgttgtaattgctttaacggcaacaacgatggttcttccgatgatgaatcagatctattcggtggttcaatcgagggttgccacgcttctgatcatctcaagagtttgattccgtgcaccatcttccgagagaggaatctgttaa

SEQ ID NO: 82272 - DNA, 569 bp, Arabidopsis thaliana columbia
  unsure (1)..(569): unsure at all n locations
gatgtacaataaacagaataatctcatttccaaaacttctggcaaaacattatattttctcaagggaacaccccacacagacaagtcgaaactttatgggtttgtagcaagtttgttgaaggcggcgtgaactctctcttccgtgaacagtctatggttttcatagaaatctaatatctccattgcaatattcttcacaatgttcatgtcgacagaaagctcttcaaaccatgtctttatgtctttctctttgtgtacagaagcaatgtaaatgcaagcgagtgttatgagaaacggcggatgtataaggatgaggtccattctatatgtgtcgttgacaagaccccaagttagatgggtcatactagtgtcattgattccagaatcctgcaagaactcaggcagagatcgatatgggtggaatacaaccaaggttggaggtccaatgcttcccagaccttcacctccatttccaggatacctttaaccccataccgaaccttttcatccgctccaacagggggggaaggccccgacngggggcncccgggatccngccggaccgaant

SEQ ID NO: 82273 - DNA, 917 bp, Arabidopsis thaliana columbia
  unsure (1)..(917): unsure at all n locations
nnnnnnnnnnnnnnnnnnnnnnnnnnnnnnnnnnnnnnnnnnnnnnnnnnnnnnnnnnnnnnnnnnnnnnnnnnnnnnnnnnccacgcgtccgcgattatgttcggatactcaccagtccagctccctatgctagataaggacggttcaggagggattgtcgcactttctcaatctccatttgctggaagagttccatcaaactcagctactgcaaaaggcgaaggcaaacaacctgttgcagaagaaggttcatccgaggatgcatcagaacgaccaacgggagacaacagcaacctcaataccgctttctctttcgacttttctgccataaaacctggaatggcagcagatgtgaagtttggaggatccggggcacgtcccaacttaccgtgggtctcaaccactggttcaggcccacacggacggacaatctcaggtgtcacataccggtacaacgcaaaccagatcaaaatcgtatgcgcttgccacggctcgcacatgtcaccggaggagtttgtacggcacgcaagcgaggagtacgttagcccagaatcatccatgggaatgactgcagcgtcagctcacacctgaaaagtcaccaccggaaaaaaagatgtctgaaatcttgtaaacaaatggaagggtttgtaatgagtttctttttggaacatacattttattatgtttagtcggatcaaactctcaagccaaagttttttaactgagctttctgttatgttgttgtaatctctctacttcatcacaattccttatgtaatcctcttctttcctttttgttttttggttgaaaggaaattatatataaaaaaaaaaaaaaaagnnnnnnnnnnnnnnnnnnnnnnnnnnnnnnnnnnnnnnnnnnnnnnnnnnnnnnnnnnnnnnnnnnnnnnnnnn

SEQ ID NO: 82274 - DNA, 537 bp, Arabidopsis thaliana columbia
  unsure (1)..(537): unsure at all n locations
ttttctcgtaatctccatacaacttcatttatttttttcttatggcaatgactttgtaccttattttccaatttgggtctatgcaaaatgattgaatcaaaagagttcactctaggtaaaccaaggtatgctacatcaacagattaactgaaacatagaagacacttttggcacatgagattgtaccaccatctcgtattaaaaatacttgtgagaacttcacggaaaggttccagcgtttctatcttctgatactactacttcagtagctgctgcctgtgagtatgctcggtcgtgttagagttttactgatgagatctctcagctcgatctctcctgggaatctaccttctttcaatttagagaacaccggttcgccgttgcagtgaacttcaaaggcgcctganctttgaaggtaaggctgcagaaagtttccgataaaccaagtggaagccatggatccaaatctgttggccctccaggagtggaaccaagcaggtgggttcgtaattccaatcatgggaaggatacgatcac

SEQ ID NO: 82275 - DNA, 458 bp, Arabidopsis thaliana columbia
aacataaactaaaacttcattaaaactcgattcctaattgcaaaacccggctttatgtcttaagatcttactacaatccggaacacacacttttgtatgtcttaaattactaaagcataaacgaaaaaacaaaacactcttctcacttaacattactaagcaagatcctatgaagctgcaaaactttttaatgggcaagagatgttgataggagcaagttgatcaaggaaaccgaaactagagtcagctagctgaagatcttcaacatccgcaaagtcgaaatctggtaacgcacttggaccgttatcttcgaatccttgaatgtcatcaagcaagccgaaatcatcaaactgatcatccgcgaggaaacaatcgaagtctaggtcttgttgctcctctgccaagaaaccaaaatcagggatctgtagattagtaaaagtcgaaaatccgaacaacgt

SEQ ID NO: 82276 - DNA, 1508 bp, Arabidopsis thaliana columbia
  unsure (1)..(1508): unsure at all n locations
gcaaaatccacgagagaaacagatagaaagttgcaaaagtgcgttcgatttttgcttcttcttctgtttcggattcggatttggatttggaatctgctcctttagcagaaccagaggaaatggtgacgtacgtaagcccgttgttctacggattcggagggatagtcgtcgccggagtggcgctgctcgtggctttccaggagaagcttgtgtacgtcccagtgcttccgggtttaagcaagtcttatccgatcactcccgctaggctcaatctcatctacggagatatttggcttcaatcatccgatggtgtacggctccacgcttggttcatcaagatgttccctggaatgtcgaggtccaaccattttatttttccaggggaacgctggaaacatcgctcatcgtctggagatggtccgcatcatggtacaaaaattgaagtgcaatgtattcatgctttcatatcccgcccgtccggcaagtgaaggctatccttcacaacaaggtatcataaaagatgctcaggctgcattggatcacctttctggaaggactgacattgatacatctagaatagttgtatttggaaggtcccttgggggagctgttggagctgtgcttaccaaaaacaatccagataaggtatctgcattgattctggaaaatactttcacatccattcttgatatggctggcgttttgctgccgttcttgaagtggtttattggaggaagtggtacgaaaagcctgaagcttcttaattttgttgtacgttctccctggaaaacaattgatgctattgctgagatcaaacaaccagtgcttttcctctctggactgcaagatgagatggtccctccatttcacatgaaaatgctgtatgcgaaagcggctgcccgtaaccctcagtgcacatttgtggagtttccaagtgggatgcatatggatacatggctgtctggtggtgaagtttactggaaaacaaacttgcaatttctcgaaaagtatgcgcctgagaaaaggaaagaagatacaggaaggtaacgatcaacgatgctgtgtttagaggaagattcgactcacttatttcctattgcaacctgaaacgacggtattgtttgttataagcatgtgtatacgtatgttgcatttgggagtgacagatacaacttgttcagagagtgagatattggacaggaacttttgtaagcagaaccagctagtggagatggcaagtgtaagctaatcagatgcatttgcttcgtctcagttttccttcttttttttgggttatttttttttccaattgttgttggtgtttctcatctgatcgtaactatttcctctggatgatcatggctttgtagatgattgagaaaagtgaaaaaagacatggttatatgattatatctaaaaaaaaaaaaaaaaagaannnnnnnnnnnnnnnnnnnnnnnnnnnnnnnnnnnnnnnnnnnnnnnnnnnnnnnnnnnnnnnnnnnnnnnnt

SEQ ID NO: 82277 - DNA, 792 bp, Arabidopsis thaliana columbia
  unsure (1)..(792): unsure at all n locations
gccgtgagttcctttggcaggaaggtcacactgcattcgccacaaaagcagaagcagatggagaggtccttcaaattgtggagctttaccgtcncatatatgaagaatatcttgcagttccagttgtgaaaggtatgaagagtgaaaatgagaagtttgctggtggactttacactacaagtgtagaggctttcattccaaacactggtcgtggtgtacaaggtgcaacctctcattgtttgggacaaaactttgcgaagatgtttgagatcaactttgagaatgagaaagcagagacagaaatggtgtggcagaattcttgggcctacagtaccaggacgattggagtgatgattatgactcatggagatgacaaaggcctggtactccctcctaaagtcgcatctgtgcaagttgttgtgattcctgttccctacaaagatgctaatacccaaggaatttatgatgcttgtactgctactgcatctgccttgtgtgaagccggtatccgtgctgaagaagatttaagggacaactactctcctggntggaagtattcagactgggnaatgaagggtgttccatttgaggattgagattggtcccagaggcctagnaaaatgatcaggtcaganctntgagacgtgacacggagntaaaggagntatcccagaggnanttagngaccatgtaaggactcttnaaaantccccaaacatgttnaagtctanaaaanggganatttcagggnagnttggtggttcaagnttncgaagacnatttggcccnggg

SEQ ID NO: 82278 - DNA, 779 bp, Arabidopsis thaliana columbia
  unsure (1)..(779): unsure at all n locations
tgatacttcnnnnnnnnnnnnnnnnnnnnnnnnnnnnnnnnnnnnnnnnnnntaaggcaactctctctgatgaagtatcacctcgcgtccggggtgttccattgaggattgagattggtcccagagacctagaaaatgatcaggtcagaactgtgagacgtgacaacggagttaaggaagatatcccaagaggtagcttagtcgaacatgttaaggaactgcttgaaaagatccagcaaaacatgtatgaagttgctaagcaaaagagggaagcatgtgttcaagaggtaaagacttgggatgagtttatcaaagctcttaacgaaaagaaactcattttggctccctggtgtgatgaagaggaagtggaaagagatgttaaggcacgtacgaaaggtgaaacaggagcagctaaaaccctttgttctccatttgatcagcctgaactccctgaaggcactctctgctttgcttcaggaaaacctgcaaagaaatggacctattggggcaggagttactaagtgttcatcatgttttgattcaattcatgaaaatttacttttggcttgtaaagactctctcaagtgcattgtgctttgatctgatattttgaccaaaagctatttgagttattttgactgtgattgcactaagaattataaagagttgtttgattcaaaaaaaaaaaaaaagaaggannnnnnnnnnnnnnnnnnnnnnnnnnnnnnnnnnnnnnnnnnnnnnnnnnnnnnnnnnnnnnaacgnnnnnnnnnnnnnnn

SEQ ID NO: 82279 - DNA, 2195 bp, Arabidopsis thaliana columbia
atcatcaagcttgaagaagagagagaagaagaagaaggaaaccagaatgtctacgacgactactgaggcgagatcaccgttgccgttgttgttgagaagaggaaggtcttcgacggcgttatcggcgtcgacggcggaagcaagatcgccgttatcgatactgcagttcagaagaagatcgagcaaagatgtgaggaacataacgtcagtttcgagcagtctcttgcctgcttttgggactttcatcgaagatgataatccttcttccaaacctttcatcgttcttcactttgatcgtcgttacaggttgtgggaattgtttttggtgatattggttgggtattcggcgtgggcatctttgttcgagttggctttcgagaaagctgccgaaggagcgttattgaccattgatctcgtcgttgacttcttcttcgccgttgatatcatcctcaccttttttgtttcctacttggataatactacttacctcaatgtcaccgaccacaagctcatcgccaaacggtacttgaagagcgtggcttttgtgatggacgtagcatcaacgttacccattcaattcatttataaaactattaccggagatgtcggacgaggccaagctttcggcttccttaatttactccgcctctggcgtctccgtcgtgtagccgaactctttaaaagactagagaaagacgcacatttcaactatttcgtgatccgagtcatcaaacttctatgtgtaacgatattttggatacatttggcgggttgcattttatactggatagcctaccattatccaaggcctacggatacatggataggatcgcaagttgaggattttaaggaaagaagtgtatggttagggtacacttactcaatgtactggtccattgtcacactcactaccgtgggttacggtgatttgcatgcagttaatagccgtgagaagacattcaacatgttctacatgcttttcaacattggcctcacttcttatatcatcggtatcatgaccaatctagttgtccatggcgctcttcgtacattcgccatgaggagtgcgatcaatgatatattgcgatacacaagcaagaacaggttaccggatacaatgagggaacagatgcttgcacatatgcagctcaagttcaagaccgcggagttaaggcaagaagaggttcttcaagacttacctaaggccataagatcaagcattaaccaacatctattccgctccatcatcgaagaagcttatctttttaaaggattccccgaaggcctcctcgtccagctggtttcgcaaatacaagcagaatattttccgccgaaaatggagataatcttgcagaatgagattccaacggatttctacgtaattgtatctggaggagtggatataattgcttccaagggtgtgagtgaacaggtattagcgaagttaggtcccggaagtatggcaggagagataggagtagtgttcaacattcctcagcctttcacagtgaggacacgtcgactttcacaagttatcagaattggtcatcataagttcaaagaaatggtgcagtctgataatgacgtcgacgccaaaatgatcattgccaatttcatgacatatcttaagggattgaatgatgagttaaaaaaagaaattccttttcttagagatttattagatgacgcagatgctcaggttcaggaaacagttcagtcagaggaaacaccacaaagtaacgatgaggaaatagttacggtctcaagacatgaaaatggacagatagaagagagaagaagagagggagttccaaaaagagtgataattcatggacaagctcctcctaatcaagataacaaaaacaatggtgattccaacggtaggcttatcattttacctgactctatccaacttctattcgacttagctgagaagaagttggggaaacgaggaagcacgattgcaatggcagatggtgcacatgttgaacaaattgatgctcttcgagaaaacgatcatttatatattttctaattcgtttataaatatatatattcacaattatcacttcccacacaaataatgatacaaaaaaaactatatttttgttagcgtaaggtgcttatgaaaagatgcaaagtcagatatatgaaaatataaggtgaagatcgaattcccaattccactaaaaaaa

SEQ ID NO: 82280 - DNA, 1024 bp, Arabidopsis thaliana columbia
  unsure (1)..(1024): unsure at all n locations
caggtacccggttccggatttccggggtcgaccacgcgtncgcacacagggctacgcagctcctgaatacatcatgaccggtcatttaacagcaagaagtgacgtatacagctttgggagttgtgttgctagagcttttgaccggacggagatcagtagacaaaaagagatcatcgagggaacaaaaccttgtggactgggctcgtccaatgctcaatgacccacgtaaactatctcgaatcatgggacccgagacttgaaggtcagtactcagagacaggagcaagaaaagcagcaacattggcttacccatgcttaagccatcgacccaagaaccggccatgtatgagtgccgtcgtctctatactcaatgatcttaaaggcctatattgatattcctatggggactttcactttacacgggccaaccactccggccaataaaggaagatgatgggcgtgttggtaataagcccacgtaagagtagtcatcatcatcatcatcaacaacaacaaagtaatcatccccggtcgtctcccatctccgacaaccaagtctccatctcccacggccaagtcgccgaggaattcaacggaaaatcaccggagaacgttgagaaatggagtgaattcgccgttgagaagtgaggcaggtggggaacggtactaagtttttctagtcacaccaactcttaaaattcattttttttcctttaatctaatgtaaataattcatacgtttcgtcttttcgtaactgtaagaatatataattatatcctttttttttgtgaaaaattttgagcttactttgggtttttttggtaagttctttttgttttgttttgtnnttntgttttgtttgatcaaattcaaaagccaagaacaagaagagcggttccaantatgatattcttttgtttatgaacaaaaaaaaaaaaaaagggcggccgctctagaggatccaagcttacgtacgcgtgcatgcgacgtcatagttttttataggtcacctaaaattatccg

SEQ ID NO: 82281 - DNA, 418 bp, Arabidopsis thaliana columbia
  unsure (1)..(418): unsure at all n locations
agnccctcagggaaaaaggttccttccctgcctgttgattcgttaggccaacgtaagccatggcgccgaaaggacggtgttttcatgtactttgaagataatgctggagtgattgtgaaccctaagggagaaatgaaaggttctgcaattactggacctattgggaaagagtgtgcggatctctggccaaggattgctagtgctgctaacgccattgtctgaagatcatttatcacttttgctggttatgtatctgtcttcaacgaaacgcgaaatagttggtgttttgagtgttttaagtagagacgacaatcttttgtgagcttcagacatatttccagtttctaagagattttgcttagatttttccagtttctgattttgtgaaaatcaattgctcagaggtgactattaatag

SEQ ID NO: 82282 - DNA, 641 bp, Arabidopsis thaliana columbia
  unsure (1)..(641): unsure at all n locations
accaaacatcagaagccctagagcttgagccgtcgaaaatgtcgaagcgaggacgtggaggaacctctggtaacaaattcaggatgtcactgggtcttccggtggcggcgacggtgaactgtgccgataacaccggtgctaagaatctctacatcatttccgtgaaaggtatcaaaggtcgtcttaatcgattaccttctgcttgcgtcggagacatggtgatggccaccgtcaaaaagggtaagcctgatctcaggaaaaaggttcttcctgccgtcatcgttaggcaacgcaaaccatggcgccgaaaggatggtgttttcatgtacttcgaagataatgctggagtcattgtcaaccccaagggagaaatgaaaggttctgcaattactggtcctattgggaaagagtgtgctgatctttggccaaggattgctagtgctgccaatgccattgtctaatgatcagatcaatcaattgcttgtatttgatggatatgtctagatacaaattttgagaattttgggagcaagatatttttattttctggcaatatgtatccggcattcaaatggtttgggaattttgcaacggccggaatcctgacccngggggcccaagtctaaanggcccacccgggg

SEQ ID NO: 82283 - DNA, 393 bp, Arabidopsis thaliana columbia
agattctatacatcctttgtttcctcaactttcgagatactcatttgtcaaatagtgacacttggcccatcatttgtttattcaatgaattaaccaaataaagttctattttctaactttttcattaatggcagaagcttgtttgctgctcttgtctactgacttatttattcaatctcatgttgctaattttgtaggtgttaactttctaagaaaaggagtttgttgaaacaatgaagtattaagatgagaagtacgagaaagctgagaagggttcaaggattttgcccaagacaggtttactgattcttctttgtggactttcgttctatcttggagggttgtattgtgggaagaacataattgaagttagtgatgttgcaaaagctgaat

SEQ ID NO: 82284 - DNA, 887 bp, Arabidopsis thaliana columbia
  unsure (1)..(887): unsure at all n locations
atgatactgccnnnnnnnncacgactcactttagggaaagctcggccgcctgcaggtaccggtccggaattcccgggtcgacccacgcgtccgcgcgtccatttttttttctcaattcgtcttcaaaaattcgttagatagagaagaatctaaaagtctctctcggtcatcggaatatcttcttctcaggaattcgacgagactattcgaaatcggaaatcgcgctttgaatctgaaactcagaatttagaggacgcttactccaaagaatctagggtgttaactttctaagaaaaggagtttgttaaaacaatgaagtataaagatgagaagtacgagaaagctgagaagggttcaaggattttgcccaagacagttttactgattcttctttgtggactttcgttctatcttggagggttgtattgtgggaagaacataattgaagttagtgatgttgcaaaagctgaatcttcttccttagatgttgatgactctcttcaagtcaaatctgtttctttctcggaatgtagcagtgactaccaagattacactccttgcactgatccaaggaaatggaagaagtatggtactcacaggcttactttcatggagcgacattgtcctcctgtgtttgatagaaagcagtgtctggttcctcctcctgatggctataagccaccgataagatggccaaagagcaaagacgaatgttggtacaggaatgtgccatatgattggattaacaagcagaaatctaaccagaattggctaaggaaagagggtgaaaagttcatttttcctggtgggggtacaatgtttccacatggagtcagtgcctatgtcgatctgatgcaagatttgatccctgaaatgaaagatgggac

SEQ ID NO: 82285 - DNA, 544 bp, Arabidopsis thaliana columbia
  unsure (1)..(544): unsure at all n locations
nnnnnnnnnnnnnnnnnnnnnnnnnnnnnnnnnnnnnnnnnnnnnnnnnnnnnnnnnnnnnnnnnnnnnnnnnnnnnnnattgccacgcgtccggtttcaggtcacctgttgcacaatctctgctcagccctaaaagcttactcctttcaactttctggaggccttctcgtagcctagcgtcatagatggatttgatggagaagaacttggagttagtggagattcagaaactagaaggccacaccgatcgtgtttggagcgtagcttggaaccccgtttcttctcacgccgacggtgtttcaccgattcttgcttcttgcagtggcgataacactgttcgaatctgggaacaaagctctctctctcgctcctggacttgcaagacagttttggaagagacgcatacaagaactgtgaggtcgtgcgcttggtcaccctcaggacagttattggccactgcaagttttgatggtaccactggcatttggaagaattacggttctgagtttgagtgtatttccactttggagggacatgaaaacg

SEQ ID NO: 82286 - DNA, 781 bp, Arabidopsis thaliana columbia
  unsure (1)..(781): unsure at all n locations
atgannnnnnnnnnnnnnnnnnnnnnnnnnnnnnnnnnnnnnnnnnnnnnnnnnnnnnnnnnnnnnnnnnnnnnnnnnnnnnccacgcgtccgcggacgcgtgggaagtcctctcttttccgaaggatctgactttatcccggaattctgacgccgaagcttaaatggaaaaagaagatgagctccagaagttaaacggtcaagtttcagctccacgagacggagatgtagaagatgacgatccactagtgttgagttctcaagctttggcggcgcttcgggaatttctagcagaccagaacaagactgttgcgagcacgccaccggcgtcttccgtcgccggaggagaagaatccgataaagtggagctggttacggaggattggagactcagccagttctggtacgaacctgaaactgcagagactgtagcagatgaagtggtcactctctctcaaagaattccaggctgcagagtcgcttgcattgcttgccctactctctacgtttttctcaagaaaaaagatccgagtgtccaggtgcaattgctggagtacgatatgagattcgagagatatggaaaanagttcactttctatgattacaacgnaccagaagatctgccgtttaactggaanattncttccatataatcgttgcagntccccctacttgagtagggatncctggaaanggtngtcaaacaattttnttccctgaaacccngtaggtttaattnttgttctnntccaggggggtcnaagggcatncantgngtttt

SEQ ID NO: 82287 - DNA, 395 bp, Arabidopsis thaliana columbia
gttatcgatgatgaatattttaaatgtgtcaggggcatctgacactcaattgatgggtcccacactttcacaaaagtatacatagattcatagtgatgatacagacacagacactgattttgagggttttaaaaacaaaatatcatataatggaacagaggtggttccttagttgacttgtgagagaggcgaccgtgttagctgttgcggttttgtttccttggtcgcaaaggattcataagagttgttttcacggaactcttcaactaatgtctcaattggcatggctcgtagtgattcaatggtggctttggttgggatctctggttcattctttgttggagttgcacctgtgggctcatactccatgtattgttgttgaaaagtttcttgag

SEQ ID NO: 82288 - DNA, 507 bp, Arabidopsis thaliana columbia
  unsure (1)..(507): unsure at all n locations
atgannnnnnnnnnnnnnnnnnnnnnnnnnnnnnnnnnnnnnnnnnnnnnnnnnnnnnnnnnnnnnnnnnnnnnnnnnnnnnccacgcgtccgaaaaatggaagaagaaaagagattggagctaaggctagctcctccttgtcaccaattcacttccaacaacaacatcaatggatctaaacaaaaaagctcgaccaaagaaacatcattcctttccaataacagggttgaggtagctccagtggtgggatggccgccggtgagatcatcccggagaaacctaacggcacaactaaaggaggagatgaagaagaaggagagtgatgaagagaaggaattgtacgttaagatcaacatggaaggagttccaataggaagaaaagtcaacctttcagcttataacaactaccaacagctttcacatgccgttgaccaactcttctctaagaaagattcgtgggatctaaacagacaatacactttggtctacgaagacactgaaggaga

SEQ ID NO: 82289 - DNA, 545 bp, Arabidopsis thaliana columbia
  unsure (1)..(545): unsure at all n locations
aatacgacttctatagggaaagctggtacgcctgcaggtaccggtccggaattcccgggtcgacccacgcgtccggttgcaagtcgccagtccacgacacaattcaggatactcactcttgttacaatgattgtatgacattcctgatggagaaagcatcanacggttctggtttcggtgtcgttctcgcaacacataacgcttattcggggagacttgcgtcgaggaaagcgagtgacctcgggatcgataaacagaacgggaagatagagtttgcacagctatatgggatgtcagatgcattggccttcgggttaaagagagcagggttcaatgttagcaagtacatgccgtttggacccgtcgcaaccgctataccgtatcttctccgacgcgcttatgagaaccggggaatgatggccaccggagctcatgaccgtcaactcatgaggtagttaacacccttgattagttctttaaccatatagtttagttaatagattttggatttggtttactaatgttggtattggttattgcaggat

SEQ ID NO: 82290 - DNA, 1982 bp, Arabidopsis thaliana columbia
  unsure (1)..(1982): unsure at all n locations
aacggacgcgtgggcggacgcgtgggcggacgcgtgggcggataaaccaaagcgtttagaaaaaaaacagcgataaaaccgaaacatcaagcaaacaaaaaaaaaagagaagagaaattatttttttttgttttcgttttcaaaaacaaaatctttgaattttatggcaacccgtcttctccgaacaaactttatccggcgatcttaccgtttacccgcttttagcccggtgggtcctcccaccgtgactgcttccaccgccgtcgtcccggagattctctcctttggacaacaagcaccggaaccacctcttcaccacccaaaacccaccgagcaatctcacgatggtctcgatctctccgatcaagcccgtcttttctcctctatcccaacctctgatctcctccgttccaccgccgtgttgcatgcggcggcgataggtcctatggtcgacctagggacgtgggtcatgagctctaaacttatggacgcttcggtgacgcgtggcatggttttagggcttgtgaaaagtacgttttatgaccatttttgcgccggtgaagatgccgacgcagccgctgagcgcgtgagaagcgtttatgaagctactggtcttaaagggatgcttgtctatggcgtcgaacacgccgatgacgctgtatcttgtgatgataacatgcaacaattcattcgaaccattgaagctgccaaatctttaccaacatctcactttagctcagtggttgtgaagataactgccatttgtccaattagtcttctgaaacgagtgagcgatctgctgcggtgggaatacaaaagtccgaacttcaaactctcatggaagctcaaatcgtttccggttttctccgaatcgagtcctctctaccacacaaactcagaaccggaaccgttaaccgcggaagaagaaagggagctcgaagcagctcatggaaggattcaagaaatctgtaggaaatgccaagagtccaatgtaccattgttgattgatgcggaagacacaatcctccaacccgcgatcgattacatggcttattcatcggcgatcatgttcaatgctgacaaagaccgaccaatcgtttacaacacgattcaggcgtacttgagagacgccggtgagagactgcatttggcagtacaaaatgctgagaaagagaatgttcctatggggttcaagttggtgagaggggcttacatgtctagcgaagctagcttggcggattccctgggttgcaagtcgccagtccacgacacaattcaggatactcactcttgttacaatgattgtatgacattcctgatggagaaagcatcaaacggttctggtttcggtgtcgttctcgcaacacataacgctgattcggggagacttgcgtcgaggaaagcgagtgacctcgggatcgataaacagaacgggaagatagagtttgcacagctatatggtatgtcagatgcattgtccttcgggttaaagagagcagggttcaatgttagcaagtacatgccgtttggacccgtcgcaaccgctataccgtatcttctccgacgcgcttatgagaaccggggaatgatggccaccggagctcatgaccgtcaactcatgaggatggaacttaagaggagattaatcgccgggattgcgtaaagagagagtatggagccattaaatgaaattgggaaatgtagatgaataaatttcttctatgtagtttaagaaattgaaaacaaaaaattataatataagaaatggagtaggtaagaacatttcctgtggctaaatatttttcatgagggactatgtttttactatcaatatatcattcacaaatgtatattcaccttatcaataaaaatgctttttacttttttaaaaaaaaaaaaaaaaaaagggcggccgctctagatttggatccaagcttacgtacgcgtgcatgcgaagtcagagctnnnnnnnnnnnnnnnnn

SEQ ID NO: 82291 - DNA, 528 bp, Arabidopsis thaliana columbia
  unsure (1)..(528): unsure at all n locations
gtcattcaaagttgataaacactgctcattgggggacaaaatttttctaatgggagtgagttcaaaagtctggcatttaagcgtaagaggattcgctacatttaacttttctagatctcatcaatgaatcctagaagatcttcaattccttgcctcaaagctatgaccttttgctgctgagaagcgatccggttttcgatatcacgccctgaggatttcttttcgtacccttcaacaacagtggtatgtttggccattaacttctcttgaagttctttctctttcacaactagctcctcgacctttggagatatgtgagaggctgatgggaaagactgtaagaaacccagcaacggtttcagtcctttcgaagatctttcagaaactggcagtggatttgcgagctgctttgcngtttgaatggcaccagtcctgagantcacgcangatgctcagctaacatgngggcaagcatttnggngaggttgnctcngngngngnaggcccaccatgaggtcgcaaaaccgt

SEQ ID NO: 82292 - DNA, 510 bp, Arabidopsis thaliana columbia
  unsure (1)..(510): unsure at all n locations
aagataattccaatatagaacttaaaaaaatatccaaaacatatttatttatcagaaaagagagagagacataagcaaactacgataagaacaacgagatagcaaatcctatgtatatctaacgagatgtaacaggacgttacatgtaatacgcaaaaagaacagagcgcgccgtgtcggctatacttaacactttgcgcatttattaccaaagatccagcgtttaaagcggctgagacgcagccatatgctgttgctgtttgccgccgtcaagagccatttgcttggacatatcggctagagctgctgcggctgctgctggtgtcatgctttgggtatggagacgctaatggaatggccagtgtttgccagcaggagcttgtgtgtgggtaatacactgtctcgtttggagagtttgtgtatccaaagggccccgcagttgcgtttccgttntgcaangttgngngncccnaccgaattggggttnngttgnncannttnggggncccc

SEQ ID NO: 82293 - DNA, 529 bp, Arabidopsis thaliana columbia
  unsure (1)..(529): unsure at all n locations
aacacagaaagtttcagctattattatactcatgaatgaataattgatttgatagtagatagaatagtttgttgtagttccagagattgttaaataaactcctgacaaaaacagaaagcaatatgtaagaagatttccataactagcttaacttaagagtgcagcttcaaatttacttcttttggctctctgttgcatctgaaatgttctaaggcttgttggaatccttcccgggacctttcgggattgcccattcaggccaattacgaggcagcttaagcacaatctcagcgccgtctgaagatgatgatgatgaagatgacgatgaaggagaaaaaaggcggtggatgattagcagataccggagtaaaaggtttctcccgaagctcggttctcagtcgctgagtttccnctggtnctgccttcttcttcttgggtntatcaccagaccgttgagagcttntgtacccccaaaaggggntattatcatttcacacnctatcatancnnctgccanatgtccatctgt

SEQ ID NO: 82294 - DNA, 600 bp, Arabidopsis thaliana columbia
  unsure (1)..(600): unsure at all n locations
aattataattaagtcatttcattaaatccaagtcaaaccaggacaaacattcatgaaagcagaatgaaatccatttgctatgtttttaacattagcttaactatatgtaacaacaaagactcgacagatccgtaaacacataatctcatctcatcgacaggggcttccgcttcttcgtcgatgaaggactctcacttgcttgtcttcctaaaggtcgctttgatggtgttgcactcttcgcgagcttcttctctttgcgggcttgcctctctctttcatcaaactcctggttctctttctcgatcagtcgaatcagagtgtcgcatcttcttggcaagttcctgactcgggcgggatttcacaaaccagtcaaacctgaaaacagacgatgtcctaaatgctgcctttagctcatcccaattcccataaccaagtttgtgaatcatgcagatcatgaaacggtcacactcttcattgtacagcttgcctttgttctgaccatattgaatcttcagttccagccaagggtttctgtagcganccagtttcttccctatggccttcatgattncgtctttcctagagaaccttgcctctccc

SEQ ID NO: 82295 - DNA, 795 bp, Arabidopsis thaliana columbia
  unsure (1)..(795): unsure at all n locations
nnnnnnnnnnnnnnnnnnnnnnnnnnnnnnnnnnnnnnnnnnnnnnnnnnnnnnnnnnnnnnnnnnnnnnnnnnnnnnnnnnnccacgcgtccggccctaatcccggctgctcgtcgggggaaaataacccggcagggattgagcaacagcgtgagtcccaaagtgagagacagtgtgaatcccaaagtgagagagtgagtgttttagcgacagagagatatggccggattaacgagaacggccggtgcttttgcggtaactccacacaagatctccgtttgcattctcctgcagatatacgctccttccgctcagatgtctcttccttttcctttctcttccgttgctcagcacaaccgcctcggcctctacttgctctctcttactaagtcttgcgatgatatatttgagccgaagctggaaaagctcatcaaccagttgagggaagttggtgaagagatggacgcgtggctaactgaccatttaactaatagattttcctctttggcttcaccagatgatctattaaatttctttaatgacatgcgaggaatacttgggagccttgattcaggagtcgtgcaagatgatcagattattttggatcccaacagcaacttgggaatgtttgttcgtcgttgcattttggcattcaaccttttatcgttcgagggagtttgtcatcttttttcaagtattgaagattactgcaaagaagcccattcaagctttgctcagtttggtgcacctaataataatctggagtcattaatacaatatgatcagatggatat

SEQ ID NO: 82296 - DNA, 465 bp, Arabidopsis thaliana columbia
ttttttttttttttgattttaagatcagatgaaataatcggttacattaagttgcagagttaggtacattaaacaatagaatgagagatgaatatcccaaaagaagcttatagctatgtctaaaatgcttcaggccttcttgttcttggccatggcagcactgatatcagatgcagtgtgacagcgaaggacgagatcagagagtgagagcttgagatcaatggtgagtttctggaacaccttagataagagtaacacatctgacaaggccctgtgagcatcaccctcccttgtaagactatagtagtccgcaagcgcttccaacgatgaacttagcttaaccgttggctctacagacttcatgttctctctagcgagtgggagcgagtcgagtaacaaccaattatgaggaatctcataagaacaacggttaaactcgttgatcaaaaactggaagtcaaatga

SEQ ID NO: 82297 - DNA, 567 bp, Arabidopsis thaliana columbia
  unsure (1)..(567): unsure at all n locations
ttttttgatgtaatcagaattttcaaggataatggtaaaaggatgagacgaagaagattcatcaatacaagtatctttgtttatgggctaatttacaaaagttatctttatgaatcaatgttaataaaaagtaactttaaagactaattcacttataaaagtaacatagagatcttgatgccaatgtcctaaaagagtaagcgtttcaatttcacttggaaatgtttaagacctacgaccgtgaacctaagaagagtcattcctcattgtgacaagctactttctaagagggtctcagactcagagagctgctttcttcacctcgaaaaaatttggagcgttctctgtttgctgcatcaatgtcttcttgtgatgccacggccactgcaacggctttatcactaacagagnctattgcctctgcgnattccttgaagtccttcaaacttgtaggtaatattctttacggctattttgcnctcttcggcgggtacattaggaaaatgcncaacaaactggatancnttggatnagggggttggatgatcgcatcgccaatgnccatnt

SEQ ID NO: 82298 - DNA, 521 bp, Arabidopsis thaliana columbia
  unsure (1)..(521): unsure at all n locations
atgannnnnnnnnnnnnnnnnnnnnnnnnnnnnnnnnnnnnnnnnnnnnnnnnnnnnnnnnnnnnnnnnnnnnnnnnnnnnnccacgcgtccgaatccctaaagtctcaatctttaagcaaataaacaaaaaagctcctatcttttttattccaatggctccaacactcttgacaacccaattctcaaatccagctgaagtaaccgactttgtagtctacaaaggaaatggtgttaagggtttatcagaaacaggaatcaaagctcttccagaacaatacattcagccacttgaagaacgactcatcaacaaattcgtcaacgaaacagatgaagccattccagttatcgatatgtcgaaccctgatgaggacagagtcgctgaagctgtttgtgatgctgctgagaaatgggggttctttcaagtgatcaatcatggagttcctttggaagttcttgatgacgtcaaggctgcgactcacaagttcttcaatctccctgttgaagagaagcgcaagttca

SEQ ID NO: 82299 - DNA, 629 bp, Arabidopsis thaliana columbia
gatgcattgcaggtttaagcataaactttctattccctggacagcgataacaccgtgggtgttagttctggttattacgttggttgttggttatattttatatgaagccatcaaccgaattgcgacagttgaagaggattgtcagaagatgagggaactcaaagctcgtgctgaggccgctgacattgcaaagtcacaccacgcgtccgctgtttctcatgagatacggactccgatgaatggagttttaggaatgctgaaaatgctgatggacaccgatcttgatgcgaagcagatggactatgcgcaaactgctcatggcagtgggaaggatcttacatcactaataaatgaggttcttgatcaggcaaagattgaatccggaaggctcgagcttgaaaatgtgccttttgatatgcgttttattcttgataatgtttcatctctcctctctggcaaggcaaatgaaaaaggaattgagttggccgtttatgtttctagtcaagttcctgatgttgtagtcggtgatccgagtcggttccggcagatcattacaaacctggttggaaactcaatcaaattcacacaggaaaggggacacatatttatctcagtgcaccttgcagatg

SEQ ID NO: 82300 - DNA, 648 bp, Arabidopsis thaliana columbia
  unsure (1)..(648): unsure at all n locations
nnnnnnnnnnnnnnnnnnnnnnnnnnnnnnnnnnnnnnnnnnnnnnnnnnnnnnnnnnnnnnnnnnnnnnnnnnnnnnnnnnnccacgcgtccgaaaaaaaaagtttctagaggcttcgttagcctaattcattaactaggttctcctagtttctgctgctaattcccaaatctcagcgaaatcaaacttctctgctctgcttagctctcagctagctgaaatctctctcaatccgtgtagcttagcttccctaatccaaccatggcaaagttcggtgaaggtgacaagagatggatcgtagaagacagacctgacggcaccaacgtccataactggcactggtccgaaaccaattgccttgaatggtctcgcaacttcttcaccaaacaattctccggcgttgatatcctctccggcgaaggtaatcttttcatcaaggtcagtaagatcgagaaagtcgaaggcgaggcttatgtgaatgtgaggaaggggaagattatccctggctacgagcttaacgtctctttatcttgggaaggtgaggctaaagattccgatgggaagacgcttttgaaagctgatggattggtcgatatgccttatatctccgatgagaatgctgatgaagatccggagattaggttttc

SEQ ID NO: 82301 - DNA, 525 bp, Arabidopsis thaliana columbia
  unsure (1)..(525): unsure at all n locations
atataactaaatttgcaaatcatatatacatggggatatatagtcttattacattcattcacattacattcaaataaataaatttaaaccttcttctacatgaaattatttttaactctatccaatttattttctcaagttctaaaaggactttcaagacgaatatagtcatacataataccttgaaatggtgttctacttctggtttgagttaaaaatattgtattatcaccaacacttagtaaatttccagcaacgtcgatactatacaatctatataatccatgaattccatgtcttgcgatcgcattgtcctttccgataaaaccggttgtgaaaatccgcatcggatttcggatcgttgattcggattttgtagttccgaatcagctgctgatgctagagctattcggagtgtgtagcggccgatacggttcacgtttttagggtgaaatgattgccatgtgttggtggatgancgtaccaangttcncgcacatgggaagaccatcttnggggggaaat

SEQ ID NO: 82302 - DNA, 544 bp, Arabidopsis thaliana columbia
agctctctacgactcactattgggaaagctggcacgcctgcaggtaccggtccggaattcccgggtcgacccacgcgtccgggatcataaaagcaaagcaaaggattagttcaattgcaattctctaattcaaagtttggatccctaactgtaaaatccctaattcgagagagagagagagagagagagagagagaatgggaagtaaccgtcctaagaatttccggcggcgaggggacgacggcggcgatgaaattgacggtaaagttgctaccccctcgtcaaaaccgacttcgactctttcctcctcgaaacctaaaacactctcagcctcggccccgaagaagaaactcctaagtttcgccgacgacgaggaggaggaagaagatggagctccccgtgtgacgataaagcctaagaacggcagagaccgtgtcaaatcctcttcccgtctcggcgtttcgggatcttctcacagacactcttcaaccaaggaacgtcgtcccgcttcttctaacgtgcttcctcaggccggctcttattcg

SEQ ID NO: 82303 - DNA, 333 bp, Arabidopsis thaliana columbia
tttattttcttttttttatttgaaactgaaaatttttattcggggtgtatggtaaaaaaaggttacattctacaaggcatacagatagtggttgtgtcagttaacaaaaacatcatcaacacctgacaaaagtcaaagttgcaaaactaagtatactaaagcttagattttggaatcgaagctttactctcgtgaagcaaaagggcatcgtaatgaccaaaaccatggtataggactcggattgggtcgtctttaccgtattcttgaccatattctgcattacttataagtcctccagctttatcgtctttcatatacactgtgattggcatc

SEQ ID NO: 82304 - DNA, 403 bp, Arabidopsis thaliana columbia
aacgataacctgcctctcaattatctctagtactttattttacaatcgtaattattttagctgcgctattgcagatagtcatacagagagcattgttatccaaaaggaaaaggttctaacgcttatggagattcatggactcactgcaagggatagcttgccatcatagcaataccacatttacccgtgtcttcacttacaccacgctccatccgtatgtagccttcttcaccccagccagttccccatgaattctttacgatccagtacttttgatcgccttctactccatatccaacaacagtcactccatggttgagatttgttccacagtaatttgtgaaaacaccggaggagtagagctgaaagataaacccaccaacatcgattccaactgatactg

SEQ ID NO: 82305 - DNA, 704 bp, Arabidopsis thaliana columbia
  unsure (1)..(704): unsure at all n locations
acccacgcgtccggaataaagaaaaagaggctagaatgggtccaatctcaagttcttggagcgttaacaaattcttctcaatagttttcgttgttttcgccatctccggcgagttcgtcgctggatactatcgaccaggcccatggagatatgctcacgccactttctacggtgacgagaccggtggtgaaaccatgggtggtgcatgtgggtacggaaacctttttaacagcggctacggactgtccacggtggcgctaagcacgacattgttcaatgatggttacggatgcggccaatgttttcagataacatgttcgaaatcaccgcattgttactctggaaaatcaacagtggtcacagccaccaatctttgccctcctaattggtaccaagactccaacgctggtggttggtgcaatcctcctagaacccatttggatatggctaaaccagctttnatgaaactggcttactggagggccggtatcatcccagttgcataccgaagagtgccatgccaaaggagtggaggtatgaggtttcaattccaaggtaattctnatnggcttctnatcttcgtaatgaacggttggtggcgccggagccatcaagagcattggccgttaaaggtagccggncggatttgggtaagcatgggccacaattgggggngccttttaccaaggtttttccccnnctct

SEQ ID NO: 82306 - DNA, 451 bp, Arabidopsis thaliana columbia
tcgtccacgcgtccggaagttttatgaggaccgagagaactaagtttaagaaaaatgttgaaaaaagcgtattagcagagggacaaacgctttttagggttttagatttcctctgagagagaattttcgaaagcttgagagagatttccaactacgttagccatggcgagcaccaaagttcaaaagattatgacccaacctatcaacttgatttttaggtttcttcaaagtaaagctaggatccagatttggctatttgagcagaaagatttgaggattgaaggaagaatcactggttttgacgaatacatgaatctagttttggatgaggctgaagaagtgagcatcaagaagaacaccagggaaaccacttggaaggattttactcaaaggagacaacataactctgatgatgaacacgggaaagtgatgtctgtctcaaacaactttt

SEQ ID NO: 82307 - DNA, 757 bp, Arabidopsis thaliana columbia
  unsure (1)..(757): unsure at all n locations
nnnnnnnnnnnnnnnnnnnnnnnnnnnnnnnnnnnnnnnnnnnnnnnnnnnnnnnnnnnnnnnnnnnnnnnnnnnnnnnnnnnccacgcgtccgcagagaatgaaatactgcatactctttcattcttggctggtgttatgacatggtcacagatcactgatttgccattttctttgtactcaactttcgtgatcgagtctcggcatgggttcaacaaacaaacaatatggatgttcattagggacatgatcaaaggaacattcctctctgtcatactaggcccacccattgttgctgcgataattttcatagtccagaaaggaggtccttatcttgccatctatctgtgggcattcatgtttatcctgtctctagtgatgatgactatatacccggtcttgatagcaccgctcttcaacaagttcactcctcttccagatggagacctccgggagaagattgagaaacttgcttcttctctaaagtttcctttgaagaagctgtttgttgtcgatggatctacaaggtcaagccatagcaatgcttacatgtatggtttctttaagaacaaaaggattgttctttatgatacgttgattcagcagtgcaagaatgaggatgaaattgtggcggttattgcacacgagcttggacattggaaactgaatcacactacatactcgttcattgcagttcaaatccttgccttcttacaatttggaggatacactcttgtcagaaactccactgatctct

SEQ ID NO: 82308 - DNA, 653 bp, Arabidopsis thaliana columbia
  unsure (1)..(653): unsure at all n locations
cacacttcacccaaaactccagaaccctagaattcgaaatctcccaagaacccgacaaagcgccatgtcgctcactatcccggcgaatctcgttctcaacccgagatctaacaaatctntcactcaatccgtacctaaatcctccgcaagattcgtctgctccgatgacaaatcctcctcctccgcacctcaatccatgaaagctttctccgccgccgtcgccctctcttccatcctcctctctgctcctatgccagctcgtcgctgatatctcaggtttgactccttgcaaggcctcaaaacaagttcgcttaaagggggggaggcaacagcttcaaggaggctttaattcttctttttaaggtttttaagggttccctgcaactttggcccctggttttgtgctcttaagtgctcagttgtggggaaaacccaaagggcaggttcgacaactacgggaagtacggattgttatgcgggtcagacggtttaccgcacttgatagtgaacggagaccagcggcattggggagagttcattactccagggattcttttcctctacattgctggatggatcgggtgggttgttagtaccttctttcttatctaacccgattcatatgatactctcctcttatctcttttttttct

SEQ ID NO: 82309 - DNA, 492 bp, Arabidopsis thaliana columbia
  unsure (1)..(492): unsure at all n locations
ttgaacatacggatgtagctgtcctcttggataacgaagccatctatgacatttgccgcagatccctagatatcgagaggccaacctacacaaacttgaacaggttgatatcacagatcatttcatccttgacaacatctttgaggtttgatggtgccatcaacgtggatatcactgagttccagaccaatcttgtcccatatccccgtatccatttcatgctgtcatcttatgcaccagtcatctcagccgccaaggtttaccacgagcagctatcagtccctgagatcaccaatgccgtttttgagccagctagcatgatggcaaagtgtgaccccgagacacgggaaagtacatgggcctgttggtttgatgtaccggggcgatttttttcccaaaagggtgtaanncctgttttttgggccccttnaggccaagggggctttttaagttttttttnntngtncccanctggggtaaaaatggggnaca

SEQ ID NO: 82310 - DNA, 507 bp, Arabidopsis thaliana columbia
ttaggacacactatagaagagtctatgacgtcgcatgcacgcgtacgtaagctcggaattcggctcgagtctcgctcaccgctctcatttcctcaattctccgtccgtcgaagaagcgaatcgctcgaaattagggtttctactgagagaagatgcgagaaatcataagcattcacatcggacaagctgggatccaggtcggaaattcgtgttgggagctttactgtctcgaacatggaatccagccggacggaatgatgccgagtgatactacagttggtgttgcacacgatgcgttcaatactttctttagcgagactggtgctgggaagcatgtccctagggctgtcttcgttgatctcgagcctaccgttatcgacgaagttcgtactggtacttaccgtcaacttttccatccagagcagctcatttctgggaaagaagatgctgctaacaacttcgctagaggacattacactgttgggaaggaaattgtggatctatgtc

SEQ ID NO: 82311 - DNA, 1057 bp, Arabidopsis thaliana columbia
  unsure (1)..(1057): unsure at all n locations
cagctctcctacgactcactattgggaaagcatcgcccgcctgcaggtaccggtccggaattcccgggtcgacccacgcgtccgccaaaactccagaaccctagaattcgaaatctccaaagaacccgacaaagcgccatgtcgctcactatcccggcgaatctcgttctcaacccgagatctaacaaatctctcactcaatccgtacctaaatcctccgcaagattcgtctgctccgatgacaaatcctcctcctccacacctcaatccatgaaagctttctccgccgccgtcgccctctcttccatcctcctctctgctcctatgccagctgtcgctgatatctcaggtttgactccttgcaaggactcaaaacagttcgctaaaagagagaagcaacagatcaagaagcttgaatcttctcttaagctctacgctcctgaatctgcccctgctcttgctctcaatgctcagatcgagaaaaccaaacgcaggttcgacaactacgggaagtacggattgttatgcgggtcagacggtttaccgcacttgatagtgaacggagaccagcggcattggggagagttcattactccagggattcttttcctctacattgctggatggatcgggtgggttggaagaagctacttaatagctattagtggtgagaagaaacccgcgatgaaagagatcatcatcgatgttcctttggctagtcggatcatcttccgtggtttcatttggcccgttgctgcctacagagagtttctcaatggtgatctcattgctaaggatgtttaaaaagggaacttgttttctgcttttgtgttactctctctaatctctttgttttccattgtacttattgaaaaacaatgcattgtcgaaaaccttataaaatttggattgcgccagttaaaaaaaaaaaaaaaaaaaagaaaaaaaacaaaaaaaggacggccgctctagaggatccaagcttacgtacgcggtcatgcgacgtcaaagctcttctatnnnnnnnnnnnnnnnnnnnnnnnnnnnnnnnnnnnnn

SEQ ID NO: 82312 - DNA, 1927 bp, Arabidopsis thaliana columbia
  unsure (1)..(1927): unsure at all n locations
nnnnnnnnnnnnnnnnnnnnnnnnnnnnnnnnnnnnnnnnnnnnnnnnnnnnnnnnnnnnnnnnnnnnnnnnnnnnnnnnnncccacgcgtccgcgaagttgaaccaaaaaaagaagatctcactctcaccgccttcatttcctcgatctccgtcttcctccttctccgtctgtcgcagagcatcgctcgaattagggtttctgctgagagaagatgagggaaatcattagcattcatatcggacaagccgggatccaagtcggaaattcctgctgggagctttactgtctcgaacatggaatccagcccgacggaatgatgccgagtgatactacagttggtgttgcacacgatgcgttcaatactttctttagcgagactggtgctgggaagcatgttcctagggctgtcttcgttgatctcgagcctaccgttatcgacgaagttcgtactggtacttaccgtcaacttttccatccagagcagctcatttctgggaaagaagatgctgctaacaacttcgctagaggacattacactgttgggaaggaaattgtggatctatgtcttgaccgtgtgaggaaacttgccgacaactgtactggcttacaagggtttttggtgttcaatgctgttggtggtggaactggttctggattgggttctctgttgctagagcgtttgtctgtagattatggaaagaagtctaagcttggttttaccatatacccttctcctcaggtttctactgctgttgtagaaccttacaacagtgttctctcaacgcattcccttcttgaacatacggatgtagctgtcctcttggataacgaagccatctatgacatttgccgcagatccctagatatcgagaggccaacctacacaaacttgaacaggttgatatcacagatcatttcatccttgacaacatctttgaggtttgatggtgccatcaacgtggatatcactgagttccagaccaatcttgtcccatatccccgtatccatttcatgctgtcatcttatgcaccagtcatctcagccgccaaggcttaccacgagcagctatcagtccctgagatcaccaatgccgtttttgagccagctagcatgatggcaaagtgtgacccgagacacggaaagtacatggcctgttgtttgatgtaccgaggagatgttgttcccaaagatgttaatgctgctgttggcaccatcaagacaaagaggactgttcagtttgttgactggtgcccaactgggttcaaatgtggaatcaactaccaacctccaacagttgttccaggtggtgacctcgctaaggttcagagagctgtatgtatgatcagtaacaacacagcagttgcagaggtgttctcacggatcgaccacaagtttgatctcatgtatgcgaagagggcatttgtccactggtacgttggtgaaggaatggaggaaggtgaattctctgaggcacgtgaagacttggccgcactggagaaagattacgaagaagttggtgctgaaggtggagacgatgaagaagatgaaggtgaagactattgacaccttttctcaaaaaaactgcaaccaaaaaaagttttttcgtttatctgttttcactttatgattcttgttgattgtttaaatcctgtaaaatattcgttcggtcttcgtgttttatctcggttggatacattttcattggtagagcgaccattgcgagttcccgagttcattatcaagcttttgttgtaccaaactttgataatcttcttacaactgtccatttttccttgaagtaaaaaaaaaaaaaggnnnnnnnnnnnnnnnnnnnnnnnnnnnnnnnnnnnnnnnnnnnnnnnnnnnnnnnnnnnnnnnnnnnnnnnnnnnnnnnnnnnnnnnnnnnnnnnnnggcagtatcat

SEQ ID NO: 82313 - DNA, 1957 bp, Arabidopsis thaliana columbia
  unsure (1)..(1957): unsure at all n locations
gaatctcccatctgttgattctgaggtcagtttaaaatctgaatacaaggattcatcttcactggcaaagatccagggtcagctggagaatttcccaacttcttgaaccaaccaagaactcggtgttcggctgtggggtcatcatgggccacaactacgctaatccattcatcttcagctcctatgttaaatgctactacccatgtctctcgttcttatgttgaagctgattcgaatgcaaatcctcatgctgttcaaagtcaagggaacttgccttcttgttgtccgtcttccaaggtcagcaacatactacatcccaataaggatgccactgcgtctgagatgccagcttcaactaatgatccagaagtaagagtcaaagagacagatacgtccaagcagcaacagatcaccacaggacttgaagctccagtgggatcttccatttatgggagcgacggacaagcgaatcgtcgtctgcctgaggagttgcataccagtgttagctcacagccacaaaaatcagataagcatgaaaaggttgcaagtagcaaagggccatcagcgcctcgtaaaagaaattatgatccagacttgttctttaaagtcaatgggaagctgtatcagaggcttggcaagataggaagtggaggaagcagtgaagtccacaaggttatttcttcagattgtaccatatatgcgctaaaaaagatcaagctcaagggtcgtgactatgctacagcatatggattttgccaggaaattggatatctaaaaaaactgaaagggaaaaccaacatcattcagcttatagactatgaggtcacggataagactttactccaggaggttttgaatggcacaatgagtaacaaagatggaagagttaaggaagatggatttatatatatggtactagaatatggagaaatcgatctggctcacatgttatcccaaaaatggagggaaatcgaaggatctgaccggacaattgatgaaaattggcttcggttctactggcagcaaatacttcaagctgtgaacaccatacatgaggagcgtattgtgcactctgatttaaaacctgcaaatttccttcttgttcgaggctttctaaaacttattgattttggtatcgctaaggccatcaatagcgacactacaaatattcaacgagattcacaggtggggactttgagttacatgtcaccagaagcattcatgtgtaacgaaagcgacgagaatgggaacactataaaatgtggaagaccatcagatatttggtcacttggttgcatactataccaaatggtatatggaagaacaccttttgcagattataagaccttctgggcaaagttcaaagtcataactgatccaaaccacgagattacttacaatcaactctcaaacccgtggcttatcgacctaatgaagaaatgtctagcttgggaccgtaaccaaagatggagaatccctgagcttctccaacatcctttccttgcgccacccatcccacacgagcctcaagtgaaaaccattaaattgttcagtctcatagctgaatcttgtggtagtgatgacgataaagcaaattccatgatttctcagcttgagcaactgctttcaaatcctgctcctcgtccaagaaatgatgtgttagattcaagagatcaaaatcagcaacttctctctcgagtttcagaactttgtattcaactccaggatcggttacaaggtcttgaaggagaaaattagtaagcagtgctgatatgattctacggcttttggatcttgtaaattggtatgttaattgttagatttggaaaaacgacgtttgcttataatgtcttgtttgatttcttgtattggaatgtatcattttgggtgctcgtctaaaaaaaaaaaaaaannnnnnnnnnnnnnnnnnnnnnnnnnnnnnnnnnnnnnnnnnnnn

SEQ ID NO: 82314 - DNA, 397 bp, Arabidopsis thaliana columbia
acccacgcgtccgttttttttttttttttaaacaaaacaagaaagacagcacgtataataataacatccagaagaggttcaggttaaagtgcatcaaaaccactaaaattaccaaagtgacattcactttcacaagaaaatgtttccaaaatggaaaaaggaaaaaaaaaacaatggaagtgtaaacaacatcagaagatataccttgaaagaacataagccaatggcaatcatgataatggctaacttgataagagcaatacgagactaataatgatgtaggatcatcatcatgaatcacaggaaataaggaacacctgtccttggccctctcatttgattgttctcttctgtctccgtgaagaacttcactttccctttccatgttgtcattgaa

SEQ ID NO: 82315 - DNA, 553 bp, Arabidopsis thaliana columbia
  unsure (1)..(553): unsure at all n locations
tgatactctcnnnnnnnnnnnnnnnnnnncagcacatccctactaggaactctccctcggaccgtccggaattcccggtcaccccgcgtccgcccacgcgtccgttcaacacctgaggtgcgcgaagatagacacttcttcatcctctccgtaattctcaaaattagggttttcttccggcagctctctcagttgtactgcaagcattcttttctagatatttaagatgtcaaggacgaggactgctgcttctgaggctcatgactccatggaatctgaggaaagggtagaccttgatggtgacaatgatcctgaggagattctggaggaggaagttgaatacgaagaagttgaagaggaggagattgaagagatagaagaggagatagaggaggaggttgaagtcgaagaagaggaggaggaggaggatgctgttgcaacggaagaggaagaagaaaagaaaaggcatgttgaacttcttgcacttcctccacatggttcagaggtttatcttggagggattcctactgatgctactgaaggggacttaaag

SEQ ID NO: 82316 - DNA, 443 bp, Arabidopsis thaliana columbia
ataagattaagaattgggatctgtttgacttataaccaaaactttgaaagccaacaagtatgagacctggtgtaataccacaagcaacagactacttactatacagtgtattataacatgatggaaccagagataaataaaaaatgtacatcagacaaactcctacatagtttctctccagccccataaccggaattacattaaaccgtaccaaatgtactcggtttacagtccaaccagatttcaccggagttacagcccttatgatgttcctctccttttgcacctccaaatgcactttttacccggtttgtgaaagccgtctccagttcagtatttcatggtgattctgcaagtagctagacgttgtacttcctcctccaataccattttcttcactagggaactgctctgagtaccctggagaccactcggggactatg

SEQ ID NO: 82317 - DNA, 426 bp, Arabidopsis thaliana columbia
caaaggttcatcaacatgattctctacctgtctgtttttatataatccatattcatagaactaacaaagaacgattcttttgggtataacatcagacagagacagaggtcagagtacaaaaaggatggcttgtaaaatacacttgaacctatgttgtagtaggaataggaaatgaagttgattgaagtctctgcaaccatgcgattctcaaactgggcttcttcagctctaagaagatctctctatactctctcttcagaaacaggtccaacgcaaacatgtagagctcactaccttgttcgacctcttcaattgcgttgaggcttttaatgcattctccaatgctgtacatcggctttgccgattcaatctcaacgaataccggactttcctgcaacataacgtcattcattaacttcatatcat

SEQ ID NO: 82318 - DNA, 490 bp, Arabidopsis thaliana columbia
  unsure (1)..(490): unsure at all n locations
aaagtctaaagtaaagatcgtattcaataaagcaaaaagtacacaactctttttctcttcaaattggctcttgcaaaaagcctttcacaaaacatgtctcacaaagtacaacaaaagcgggaaaattttacatctacatagagagagcctaagacacaagaaagggagaataataagacgagattagaacttccttggtttagctaaggacttgcagaaagaagaaaaggctcctttgatttcttcagggatcgggagagcaagagagagtggtaaagcacgatgatgatcttggaacagtccggtttggtgtctcaacgagaccgagtgtgccaaagctgtttgtcttttgttgagtccctccagaataaaagagaatgccccaacgtgagacaactctgtagaagagcctgtggagcaccagggaactaagagcaagaccagtgcanacccgntactccacattatggggcacntgcncggtttgntt

SEQ ID NO: 82319 - DNA, 551 bp, Arabidopsis thaliana columbia
  unsure (1)..(551): unsure at all n locations
aacacaagtttttactcttaaagtttgcgcaaaatttcattccacaggttttgtgtattcatactcacatatgactacgagatttaacacattgacaaaattaaaagcacaaaaggagaaaattgtagtttcagaaagagtagtctttcaaatctgctctagagtcgtccatgtcaatctcagacatgcattcgtcagcactaataggagggagtttccgagtcttaccgcttaaggttgtgtttgtgccaatcactcttacagtgctctctgtattgccttagcctctccaacgaacgtgttgccaagtgctgcacttgggcccccttccttttcctcccccaccttcctngctttaanggaacctgnaggacttnatcncttgngtctggaagnttcnttgccaaggtcaacgacgggancggcnaatcctnggnccagcccagnaggaaaaacggnttgtggggttgaatgccaatcatcaaggccancgaangnccaagctnggaccntngnatgacggaaangggaatccagctcccggaacccca

SEQ ID NO: 82320 - DNA, 715 bp, Arabidopsis thaliana columbia
  unsure (1)..(715): unsure at all n locations
cagctannnnnnnnnnnnnnnnnnnnnnnnnnnnnnnnnnnnnnnnnnnnnnnnnnnnnnnnnnnnnnnnnnnccacgcgtccgatctcctgtccttttttcatatataataattcatcataaatatttattgatttgattctatctcttatatatattttcgatctctcctgaaaagagaaaaaagttggaaacttcgacgaatgtgtttataaatctttttattttctatctgtcttgatttagttttatcttttttggaatcggtctgaagttggacaaaagaatccgccattttctcctcggtctctctgctcttctcttcagtatcggatctgggtctccttcgctttcgtttcaagattattttgggagacgaggaggcgttagctgtaattcattgtatacttgctttggctattaaagccgtcacacaaaaaaagtaaaagcaacacacacacataaatagacacacttttttacgtatatgtgtgtcttctttcgtctctgttgggaatagatcttgtcctaagagatcacttcgaggctggtctaaagtgagaaactttggttcttgttttggtttctggcttctcgtctattctgcttcagttaatgtcgtggtagttcctcttcctttttcttatttctatattattatccttctttctttctttttttatttatcttttttcacttatgcctttttttcttt

SEQ ID NO: 82321 - DNA, 474 bp, Arabidopsis thaliana columbia
acgagcgttgatgaacttgatttcgcaaaaatgcattacaaaaatctcaaacgtctgtatgaaaaaattcgctttctttcgtaccaaaccaaaatttagcacgagaatcataaattaagctaataaaaaaacaactcaaaaacagagacgtaactatgtgatgttcctgataatatactacttactactaggctttgtcttcgttgtcgtcagaatccgaagcagctccgagtttctgttgacgggtagttggaagagaatagtttcgtcgctctttgcctcctggcttcgaagaggcattaccgtaccagatcatacccagtactgcaattatcattccaacaaccacgtgcaagttaagaccttctctaccaaagaagaagaagcccattatcagcaccaggatcgtcttcatgtgtcccagcacttggaacgatacagctgtgaatcttccgatgcagatgaactggctta

SEQ ID NO: 82322 - DNA, 422 bp, Arabidopsis thaliana columbia
ggtagattatggatacaaatagagagttacattaccaaagcaaaagtcaacaaaaaaaaattccataattatgatgtcatacagcataaaaataaaatattacataaagcataaagctcatatctatgaattattgatacatataacgtacatatataactatcaataacagcacacacatcatcgcaacactttcagattttctttgaggccaatttgcggtacatttcgtcgatttgcacctgataatatttgagaagattgttcctccgattcttgagcgtcgcagtcactaagtctctctctacgtcgaaaggttttgtctccactgtcaccgctttgatgtactcaaactttcttggcttgttcttttctgccgtggacttcagttctgaaatgatgtgttcttttagttccgggaa

SEQ ID NO: 82323 - DNA, 786 bp, Arabidopsis thaliana columbia
accatggccttcttccaaatggaagttttacgtagcgttgtccttatttgggggtggctccaatctaccaaggggtgtgcagtaaatggttaatggggaagctttctgccgggaaaaaagcgcgaaaaccaggggttcaagctaattaacttgtaaagtctgccttgggttatattgcacgtgaaaatgttcttccaaaacaccctccatctgttcaaagaaacgtgtctccgtcgtatgaaagccttgtggatggaagcgggagattcatccccaacagaaaagtattggagttaaggcagaagttgatcaagtttatggaaactcatatctacccaatggaaaacgagttctccaaacttgctcaatcagatatgcgatggaccgttcaccctcaggaggaaaagttaaaggaaatggcaaagagagaaggcctatggaacttatttgttcctgtagatagtgctgctagagctagaagagaactggcggctaccgagaataaacataacctctcgggcaagtcttttgatcaattgtttggtgagggcctcacgaacctggagtatggttacctttgtgagatcatgggtcgttctgtttgggctccacaggtgtttaactgtggtgcaccagatactggaaacatggaggtgatactgcggtatggtaacaaaagaacaaatttctgaatggcttattccgttgctcgagggaagaattcgttctggatttgctatgactgagccacaagttgcatcgtctgatgcaaccaatattgaatgc

SEQ ID NO: 82324 - DNA, 605 bp, Arabidopsis thaliana columbia
  unsure (1)..(605): unsure at all n locations
agcaaaaacaaaaatgggtgagaaagatattccaaggaacttgaaggaagaagaagaagaagaagaagagaaccaaagtgaagaaaccaaaagtttgatctcttcacttccttcagacatagattgctcagggaccaagttgtacaagtaccaaggatgttggtacgacaaagatattctccaagcaatcctcaatttcaacaaaaactttcagccacaagaaacggatataattgttgcttctttccccaaatcgggtacgacttggctcaaggcactcacattcgcactcgcgcaaagatcaaaacacacttcagacaatcatcctctgctaactcataatcctcatgagctagtgccgtacctcgagctcgatctttatctcaaaagctcgaaaccggatttgaccaagttgccatcatcatctccgagattgttctcaacccacatgtcctttgatgcgcttaaaagtaccgttgaagagtctccttgcaagatcgtgtacgtgtgcaggaaccgtgaagacgtattggtatcacttttggtgtttcgaaaactccatgagtggagaanacantttaagtctcgaggctttgttcgagtct

SEQ ID NO: 82325 - DNA, 585 bp, Arabidopsis thaliana columbia
aaataaattcatatatattggatcaagcaaaaaaacatacagaatcgttatccggccatttattgaaaactacttagctcgtgctacggaggacaaggattttttactcgttctcttaactcccaaagatacgcacaaggtccaaaaagataaagttgtaaacatttaggcaaaaaggttaaacacacaaaaacttcgggttaaaaagtaaaaacataactaaagttacggtctcttttcctaattttttaaaacatttattgtttttcccggtttcaggcgagtcatctctaccgccgcgactcaggcgagtttccacgccgaggttgtgatgagtggtcgcgtctgccaccctatcattaaacatccgtcattttcttcaactctgtatccatctccggtagcgtaaagcgataaaagcatactcgcttgtttaaacgcgctagatccgagatgaatcgggtcaaacccagcggatttcatccgaatcctccactgtgcagccgtctcgtgccgctcgacccgatcggacccttccgccgcaacaacgttgagtatctgtctccctaagtacacttctgacat

SEQ ID NO: 82326 - DNA, 1094 bp, Arabidopsis thaliana columbia
gtccgtttccaaccaattctcttctttcttgtgtgttcacattcaaagaaaatggataatcacacagctaaagacattggtatgaagagaagtgcttctgagctggctctacaagagtatctcactacaagccctctagacccttgtttcgacctcatgaaccgggattacacttgtgagttaagagatagtcttttgtggtctgagggattgtttccggctggaccttttcgcgatgcacagtcctcaatctgcgagaatctgtcagctgatagtccagtgtcagccaataaacctgaggtaagaggaggagttaggagaaccacaagtggatcttctcatgttaactctgatgacgaagatgccgagacagaagcagggcaatctgaaatgactaatgatcccaatgatctgaaacgtattagaaggatgaactcaaacagggaatcagcaaagaggtcgaggagaaggaagcaagagtacttggtagatcttgagactcaggttgattctttgaaaggcgataactcaacactgtacaagcagctcatagacgcaacacaacagtttcgtagcgctggaacaaataacagagttctcaaatcagatgttgaaactctgagagtcaaggtgaaactagcagaagatttggtagcgagagggtcactcactagcagcttgaatcaacttctacaaactcatctaagtccaccatcacactccatcagcagtttgcactacacgggaaatacctcgcccgccattacagtccacagtgaccaatctttgttccctggaatgacactttttggacagaactcaagccctggacttggtaatgtatccagtgaagctgttagctgcgtctcagacatctggccatgactctctttcttcagaacatgtaatgatccctcagcgaatttcctggatgtggttcgctatagaactaggaacctataatgaaagcagcatgttcggttaaataaatcaagttttgtccaccaaacaaaaaacaaaagggcggccggtttaaaagaacccagctaacgtacgggtgcctgcgacgtcatagctcttctatagtgtcacct

SEQ ID NO: 82327 - DNA, 645 bp, Arabidopsis thaliana columbia
aactaaaccaagccaaaataaaattatctctgaaacagagctttgatacaaaatccacctcaatctatagccaaatgaatatttcaatatccacctttccaattcgaagtcacaccataactatgcttatacaaaattcactaccaaaacctcgaaagtcaatagagatgaagaagagtatttcacctatcagttcctagtttcaatctcttcctcctcctgctctgccttgaagctttgcgagtaatgataagaagagtcttctttagttttgtggtcttttagtttccacttttgtatttgtaaaactctaacatctcttcttccacgggatgagtctcgcctactatcacaagacaatgcaacggtgctccaaaatcaacgctttcgagttgcttcatcgtccctgcaactatcgtctggtcctcagagccaagccgggcaaagcccacacactgtgtgtcttcaccataaacagaatctccatgcttttgctcaacttccagaagctgctcgattgctgtattaacactcatatacctcggcggttcatactgtttcttccctcctctgcatagagattcaaaagtaggctccttcactcggatatctagcaaacagagagtgtgaagtccaagagagcgg

SEQ ID NO: 82328 - DNA, 740 bp, Arabidopsis thaliana columbia
cagaggcaagcaacatcgaattaaccaattaagaagaacttgtaagctattaattcatttaccttgttagaatgctttcttccccccacacaaacaaaacaataataaatcggaaaagatctaaaacccccacaaaaaaaacagagtaagaaactgaagcagatcatctctgaggctggtcagaggcagaagctccaacggaaggtgtagccgtgacagcgctggctgagccattttcaggcggtggagctactccccatttaccttctgactcaagcggctcgaatatatggacccctccgtctgacagacccactgcaaacatgttggattcttgcggatgagccgctatcaccagtggatggacattcgagttgctgagagaagctggcaaatatgcagagggattgactctgcaacgcaatcgaaggtttgcagagctgaagacgcatattgtaccgcccatgaaaacttgggtatatccaatgggctaccacatgagaatgtggcatgtgttattggagctgctgattcacgcacaggccactgtttcatgcattcaagcttggttgttccgtatatagcgagctgagtttcatggaccacaaggaagtgtacttgatcttgatgaaactgaacacgcgtgtctgacaaagaagacgtggatcttccctgtggaatttgcagaaccttgcttttctgcttctcccatccatccgtgttccatacgcaaagctgag

SEQ ID NO: 82329 - DNA, 1584 bp, Arabidopsis thaliana columbia
  unsure (1)..(1584): unsure at all n locations
cccacgcgtccgtcatcttcttcttttcttcttcttcggttgctaaatcgaagatggcgactgctctggtttctcctcttacttcacaactcaaccatgaagctgtctgttccaagtttgtgttacccaaatcgccgttcatgtcgggatctaagctcttttcatcgaacatgccttgctctactgttcctagacgcacaagaagatcacactgctttgcttctgctaaagatatgagctttgaccatatccctaaacaatttcgtggagacaatctcaaagacggagtgatgcagaacttcaagaacgtaccacaatatttttacgggcttaattcagctcaaatggatatgttcatgacagaagatagccctgtccgtaggcaagcggaaaaagttacagaggaaagcatctcgtctagaaataactatttgaacaatggaggaatatggagtatgtccggtatgaatgcagcagatgctagaagatatagcatgagtgtccagatgtacagaggtggaggtggcggcggaggatctgaaagaccaagaactgctcctccagatttgccttctttgctattggatgctcgcatatgctaccttggcatgccaatcgtacctgcagttactgagttactcgttgctcaatttatgtggttagactatgataacccaacaaagcccatctacttatatataaattcacccgggacccagaatgagaagatggaaactgttggatcagaaacagaggcttatgccatagccgatactatttcttattgcaaatcagatgtatacactatcaattgtggcatggcttttggtcaagcagcaatgcttctttctctcgggaaaaaaggttatcgtgccgtacaaccacattcatcaacaaaattatatctgccaaaagtaaacagatcgagtggagctgccatagacatgtggataaaggccaaggaacttgatgcaaataccgagtactacatcgagctgttagctaagggaacagggaaatccaaagagcagatcaacgaggacatcaagcgacctaaatatctccaagctcaagcagccattgactatggaattgcagacaagatagctgactcgcaggacagttctttcgagaaacgggattacgatgggacccttgcccagagagctatgagacctggaggaggcagtccagcagctccagccggactaagatgatcaattcccaccagaaagaaagagggttgaatcctaatttcctagtcactctggaatatgtagctcttacaatctataagcaaacacatgtggtagtaacatacaaaaaagtgttggcaaaaagggaaataacatcaaaagttatctaggtggaaagttatttgtattatacatgtatctctctagatgcaggtttctcacactctgaaaaaaccgagttttgggttttcgggattttcagaatgaagggnagaatcggttgaggttgtaaggcaatgcgtnaaattcttctgttcgagtatcagtgtggtagactctgaatttctcccaccaatgtcttccgctgtctctcctcaccgaggcatgt

SEQ ID NO: 82330 - DNA, 616 bp, Arabidopsis thaliana columbia
  unsure (1)..(616): unsure at all n locations
ttacgtttatttcatcaattattgtatcgaaagtagacaaaactcaaaagcaaagagatcatcaacatttgtctaaaaagtaaaaacaattgaacatgaagaaaaaaaaaaaactctcgttattggaactataatcaataatcgattaaaacgccgctcgggaaaataaacagagagctgagaatttgaagcaaacaaaaaaaaaactcatatttgaatttcgaaatcgttcttacaaaggcgtcgttgggacgttgcttctggctgcttcaatctcttctcttcttctcataccaattccaagacctgaaacaggcctagccaaattcctctccatcttctcccactcccaatctccatctgctccatgacgacggagccaggtcttctcaacgcgggttctgattccaaggccaatcatcttccacatcatcaccaatctggaggaatcggnggcagatccggtaatctgnntcncatncaggccntgnggcancgnttccaccttngcggnggtggggggccaatctncaagggggccgggtttggccggggncaggggggtggatngnggggntttggctccggnacncgggagttccgnnggggggatntg

SEQ ID NO: 82331 - DNA, 2449 bp, Arabidopsis thaliana columbia
  unsure (1)..(2449): unsure at all n locations
gtaaaccctagcaattgtcgtcctcttttgtcgtctctccctgctttcgcacttcatagcctcaatctctcaacaagcagaagagattcgattctccattatcttccttctaaatgccttccctaatgttatctgataagaaagaggagaagaagatgaagaagaagatggctttggataccccagagcttgattctaagaaggggaagaaggagcagaagctgaaactatctgattcggatgaagaagagtcggagaagaagaagagtaagaagaaggataagaagcgtaaggcttccgaggaggaggatgaagtgaagagcgattcaagctcggagaagaagaagagcagcaagaaggttaagttgggcgttgaggatgttgaagttgataaccctaatgctgtttctaagtttcggatttctgcgcctttgagggagaagcttaaggcgaatggtattgaagctcttttcccgattcaggcttccacgtttgatatggttctcgatggtgctgatttagttggacgggctcgtactggtcagggtaaaacattggcttttgtgttgcctatattggaatctttggttaatggacctgccaaaagcaaaaggaagatgggatatggcaggtcaccaagtgttttggtccttttaccgaccagagaattggccaagcaggtggctgctgactttgatgcatatggaggatcacttgggttaagttcatgttgtctctatggaggtgatagcataccagtccaggagggtaaattaaagagaggtgttgacattgtagttggaacccctggtcgtattaaggatcatattgaaagacaaaaccttgatttcagctatttcaaattccgtgttcttgatgaagctgatgaaatgttgaggatgggatttgttgaggatgttgaacttattttagggaaagtggaggattctactaaagtccagactcttctcttcagtgctactttgccatcatgggtgaaaaatatctctaacaggtttcttaaaagagaccagaagactattgatcttgttggtaatgataaaatgaaggccagtaatagtgttcgacacattgctattccttgtaataaggcagccatggctcggttgattcctgatattatcagttgctatagcagtggaggccaaactattattttcgctgaaactaaagttcaagtttctgagctttctggtttgttggatggatcaagagccttgcatggtgaaatacctcaatcacaacgtgaggttactcttgctggatttaggaatggcaagtttgcaacattggtggctacaaatgttgctgctcgtggtctagatatcaatgatgtgcagttaattatccagtgtgagcctccacgtgaagttgaagcatatattcatcgttcaggccgaacaggaagagctggcaacacaggagttgcggttacactctacgattctagaaagtcgagtgtatccaggatcgaaaaagaagctggtatcaaatttgagcaccttgctgcacctcaacctgatgaaattgccagatctggtggtatggaagctgctgagaaagttaaacaagtgtgtgacagtgtggttcctgcattccttgaagctgccaaggaattattagaaacttctggtttatcagctgaagtactcctcgcaaaagctcttgcaaaaactgcgggcttcactgagataaagaaaaggtcacttcttacatcaatggagaactatgtgacactacatcttgaagcagggaaaccaatatactcgccatcatttgtttatggactgctaaggagagttttaccggatgacaaggtggaaatgattgaagggttatctctaacagcagataaaacaggagctgtgttcgatgttaagcaatcagatctagacttgttcattgcaggagcacaaaagagtgctggaagtatgagtttggaagtggttaaggtgatgcctaaactccaggagagagaaccattgccacaaaaaagattcggtggtggtggcagaggaaatcggtttggtggtggtggaggaaatcggtttggcggtggtggtggcagaggaagaggaggcagtggtggtagaggccagagatattgaaaactggaacccaacttctcctttctatataaaaagaaactaaactccgtcttataatttcattactatcttcttccgctgatgttttctacactataataggtggcttttctgtgttttccattttctttccttgaacaaacttatggaggctctcttgtaccctcttatcaattttgtgtaatgttggatgataatgatgattaaattataacttaaaaaaaaaaaaaaaaaagnnnnnnnnnnnnnnnnnnnnnnnnnnnnnnnnnnnnnnnnnnnnnnnnnnnnnnnnnnnnnnnnnnnnnnnnnnnnnnnnttcc

SEQ ID NO: 82332 - DNA, 561 bp, Arabidopsis thaliana columbia
  unsure (1)..(561): unsure at all n locations
ggaaaggccggccctatccaggcaagttgatgaggcattaaattacataaaactcatatgattacagaaaaaaaagaaaggaggaaaaagtcaaaaaggcacagagaaggcatccccttgtgactctgttacgtccgttaatttcggctccccaaccaaaaaaaaaaaaaaaagaaacaaaaactacttttacaacggtaccatgtcacccaccatgtgactagacttataatgtaaggttgtgtggggttgttagaacacgcgccgtctacaacaacacaaaagagaccaaaattgttccagctaatccacactgggcccaaaacagggcctgtctgctggctcccataggaactcctctttcccatttcagaatgtttcttctnancttttaattttaaggngccatctcttncagctgttgcttccagtactttgggntcttaactccggcctaaggggatttttttttccannggncgnacaaccacggggttccaaagtggggggttngngnaaaggggagnagttttttntggggcggattnggtttggtttcct

SEQ ID NO: 82333 - DNA, 634 bp, Arabidopsis thaliana columbia
  unsure (1)..(634): unsure at all n locations
acgagaaggcttccttctcctcagaaatctcattgaggaccagacgggcggttcgagtggttatgtcgattggattctacaacttcaccgccaagttcaacaaaactaagatagctcacaatgacaactcgggtgctaggatgccacctctttgtaaccattgaagaactcttgagctcaaaaatcttctacttaagcaggatcatggcggccttcttccttgggccataatgtgttgttttggataaagaagtgctactttttgatttttcttcatttgtttttctatatagaccttttttctcaagattaggcttttatttgcctaaccagaatggttatctccgtaagattagtcgttttttaaatcttttgttgcctttttttttttgtcctcattcgattttttgttgatgtgcgtctgttctagatttattttgggagttgcagttcatgaatctgtcctaattagggttattaacaagaagatgctactgttaaaattttaaaatatttttatgaataaataatgttgtgaaaaaaaaaaaaaaaaagnnnnnnnnnnnnnnnnnnnnnnnnnnnnnnnnnnnnnnnnnnnnnnnnnnnnnnnnnnnnnnnnnnnnnnnnnnnnnnt

SEQ ID NO: 82334 - DNA, 285 bp, Arabidopsis thaliana columbia
  unsure (1)..(285): unsure at all n locations
ttctttttttttttttttttcaacaaaaagggttatcacttatcactgttgaaataacatttccagtgtcagttcacgatgtgaagtaggttcaagcttatcttgcttgtgtctagctgcattcctttttatctacgaatattctttactgtctgactgtcattctttgtggtgtgtatgatcagaaggttgtttgaattccttttgctttcggatgctttggcaaagcacacgtagcctccgattctcaccaagaggcaggccttcaggttcttgcnatgattc

SEQ ID NO: 82335 - DNA, 739 bp, Arabidopsis thaliana columbia
ctacgacgtcgcatgcacgcgtacgtaagcttggatcctctagagcggccgcccttttcttttttttttttttttaacttcaaaatcatataatttctaattacttccacgattgtaatcaaggtacatagatagttcgagaatctattcgcgcggttgtttcgttcgatgatagcgcatacacgcttctcagatgtggtaaaaacataaaccacatcttgtttcttccaagtctttagtttgtggtaaaagaaaaagatgtgaaattttctgaaactcatctaacatacttgagtaacatacatgtagacagaaaaaagtttcggtgatagatcctaaaaccatttgtaacttgtaaaccctgttagacagcaagaccgatcgatctagtagcggttgtgacgcctgtggcgatcatagtcccttggtctatctcttgacctggaccgtgagcgtgacctacgtttgcttcttgagtgtgaccgatcatagtctctgtcttgtccacgatcacggtcatggtgcctatctcgatctctactcctgcgatcataatctcttcgatgttcacgactagcttcttggtctttctttcggcctttacttgattctctctccttactgttccggtcctttgatctttccttgcgaatattgggctttttattccagaacttctgttaatttggtcccggactagcatgtattcctaaattaaactttcccccccaaaatgaat

SEQ ID NO: 82336 - DNA, 399 bp, Arabidopsis thaliana columbia
cccacgatctctcctctcctctcgtttgattccaaaaaaaaaagctcatcgacgaacgaacgatggcggaaagtggcggtggcggtggctgttgtccgccgatggatctgatgcgttcagagacgatgcaacttgttcagctcattgttcccatggaatctgctcatctcaccgtctcttaccttggagatcttggcctcgtccaattcaaagaccttaattcagagaagagcccatttcaacgtacttacgcagcacagattaaaagatgtggagaaatggcacggaaaatacgtttcttcaggggatcaaatgtcaaaagcaggagttccagccaaggaaatgcaagggaaagaaaatgacattgacttggttgatgtttgagggtaaaagcttggg

SEQ ID NO: 82337 - DNA, 670 bp, Arabidopsis thaliana columbia
  unsure (1)..(670): unsure at all n locations
ttttttttataaataaaatagtgtttactaatcaaagaaaattgcggttaaatacaacttgctctgaagaatatactttttagaaacgaagacaaaaaaaaaactaaagtgaaaaagttatacttaaaaaacagcactttctgcttttgcttatgcttatttccccattgtacacaacaaaatgcttctacaaacactttaaaacatggttgcatctttcatccgaggtggtgtgaccgtagacaaactctaacctcgtgttcttcctccactcctcctctcaattttggaaccacaatctctaaaactggtccagtcccatcaaagtatgcttcaatatttgcttcttccggaatccgattcggcaattgtatctccctcatgaattcccctggaggacaatgctcagccatctggtcaaccagctttgaaagtccggtcccgtctcttcacaaacggggccctcgaagtgcttaggtccccgtgacctttagggttcctttgtgtgatattgttcctccatgaaacctttaagggtgttnaaatncacaaattggnggngttttncggcccagataaggtttttnggcctaatagacggtttttnagcagttaaagggncgaggttttttntaanantccccggnggnggttncccaattgggggggc

SEQ ID NO: 82338 - DNA, 851 bp, Arabidopsis thaliana columbia
  unsure (1)..(851): unsure at all n locations
tcactatcaacaactataacgtcgcatgcacccgtacgtaagcttggatcctctagagcggccgccctttttttttttttttttttttaacttaaaaaacagcactttctgcttttgcttatgcttatttccccattgtacacaacaaaatgcttctacaaacactttaaaacatggttgcatctttcatccgaggtggtgtgaccgtaaacaaactctaacctcgtgttcttcctccactcctcctctcaattttggaaccacaatctctaaaactggtccagtcccatcaaaggatgcttcaatatttgcttcttccggaatccgattcggcaattgtatctccctcatgaattcccctggaggacaatgctcagccatctgatcaaccagcttgaaagtccggtcccgtctcttcacaaacgaagccctcgaagtgcttagtcccgtgaccttcacgattccatttgtgatattgttcctccatgaaaccttcacggtgttcaaatccacaaatggtagagttattacgacccgataagcttctttcgtccctcattaaacgcgttttttggcagacagtttaccagggtccccgcaaccttaatttccttttcattcaaccttcccccggagggaaaaggtccgttnttttacccccccaaactttggggccccgggggttcaccttttttgggcattttggtggggggttctcttctccaaaggttttgttttaaaccacggttcccgaaaaacaaggccattttccttttctttttccggttgggctttcccccggggaggaattaaaaaacaccccctttttccctctttccttggggaggggg

SEQ ID NO: 82339 - DNA, 553 bp, Arabidopsis thaliana columbia
  unsure (1)..(553): unsure at all n locations
gcacctctggtgtaccagttatcgtgcccacggtaaacgctgggtagccaagtgcgganggantaactgctgaaaaatccaaattcactcttccatacaatacaacatttttttcaatatatcattctcacttctcaatattttctcttacaaaaatagatgtacattggcatccttctcttcactctaaccccctcagaaaacaatcgattttccaattcattaatcaagagattcgcatatctcttgaataactaactagggttttatccatttaaaaatcattttggggaaaaccaaaaattatttatataattgatctttgaatctccccaagctaattttttcttttttttggaaaaaaaatcaatttatttattttattgcttaagaagcggagatgtgtcctcccactgggccaatcgtctcgaagccttctccacccctttatcccaatgggtcgggatgggcatggccaggtaaaggttgctgnggggcncaatatcccggccaaatccccangnccantccngggggcnagannaccannggg

SEQ ID NO: 82340 - DNA, 491 bp, Arabidopsis thaliana columbia
gaaggcgggcacccctgcaggacccggcccggaattcccgggtcgacccacgcgtccgcccacgcgtccgaccaaaatgaaccaaacgagacgtaagagacgacctgattcatctctctctagactcgattctctttcgccggaaatgctctttccggccaaatctccgtcgctaacttcttctcgcatcagaaacatcttcttattactcatcttttgtttcatcatctacatcatcttctcctacggcaccaatttccgccgtgaacagatttcatcaatcgctcgatcgttatctgtgttctccactcgtcgccgtcacttactcttctcgatcgccgcttctcacgactcttggctccgtcgtagctcgtacgttcgtctctggtactctcctgaatctacacgcgccgtcgtgtttctcgatcgcggtggattggagtccgatctaacttctcctcctgggattgtctctaaagacgtttctaggt

SEQ ID NO: 82341 - DNA, 1710 bp, Arabidopsis thaliana columbia
tctaaaccctaaaagaagaacgatgccggctccgacgacggagatcgaacccatcgaagcacagtcactgaaaaagctcagtctcaaatccctcaaacgatcacttgaactcttctctcccgtccatggccaattccctcctcctgacccggaagccaagcagattcgtctcagccataagatgaaagttgcgtttggaggtgtagaacctgttgtgagtcaacctccacgtcaacctgaccgcatcaatgagcagccaggaccttcaaatgctctttccctcgcagctcctgaagggtctaagagtacgcaaaagggtgcgacagagagtgctattgttgttggtccaactttactgcgtccaatactgcctaaaggcttgaactatacaggttcctcagggaagagcaccaccattatacctgcaaatgtatcttcatatcaaagaaatctgtcaactgctgcattaatggagagaataccaagtagatggccccggccagagtggcatgcaccatggaagaattacagggtcattcaggggcacttgggttgggtcagatctgttgcgtttgacccgagtaatgaatggttttgtactggttcagctgatcgtaccatcaagatatgggatgtagcaactggagttctgaagctaacacttactgggcatatcgagcaagtacgaggcctcgctgtaagcaatcgacatacctatatgttctctgctggtgatgacaagcaagtcaaatgctgggaccttgagcagaataaggttatccgatcttatcatggtcacttgagtggtgtctattgcttagctctgcacccaactttggatgttttattaactggggggcgagactctgtctgcagggtgtgggatattcgtaccaagatgcaaatttttgcactctcaggacatgacaacaccgtttgttctgtatttactcgtccaacagacccacaagttgtcaccggatcccatgacacgaccattaaattttgggaccttcgatatggaaaaacaatgtcaacgctaacacatcataagaaatctgtccgagcaatgaccctccatcctaaagagaatgcctttgcttctgcatcagctgacaacaccaagaaatttagccttccaaagggagagttctgccacaacatgctttcgcaacagaaaaccataattaatgcaatggctgtaaacgaggatggtgtgatggtcactggaggtgataatggaagtatatggttctgggactggaagagtggtcacagtttccaacagtcagaaactatcgtacagcctggttccctggagagtgaagcgggtatatatgcagcgtgttatgataatacaggttcaagattggtaacatgcgaggctgataagacgataaagatgtggaaagaagatgagaatgcaactccagaaactcatcctatcaatttcaaaccaccaaaggagattaggcgcttctaaataacttgtatctgtaactcaaagctcttgttggaatctcactaatctcttcatgattctgtttcctagatcaacttttgagaggggacctttgttttgtggtggggaggaaacaaaaggccatgtactttatgtattttaagggcatttgtaattttttctatcaacaataatagatcatgtattgttgtttatgttgagagaactttgttacttttaaaaaaaaa

SEQ ID NO: 82342 - DNA, 546 bp, Arabidopsis thaliana columbia
  unsure (1)..(546): unsure at all n locations
ccacgcgnccgaagagaatggggaaagagtgctactacttgtcatgtttactcaagtttcatcttctacttggtgggattcagcttgttgattcaggatctaccatcagatttcttcctggtttccaaggccctcttcctttcgagctcgagaccgggtacattggtgtgggtgaggcagaggaagatcaaatgttctactacttcatcaaatctgagagtaatccagagaaagaccctcttcttctctggttaagtggaggtcctttctgttcttcgttcactgctcttatttatgagaatgggccaattgctttcaaggctgaggaatacaatggaagtatcccctctttggtctctaccacatatgcatggactaaggtggcgagcattctctatttggatcagcctgttgggactggcttctcctactccagaaatccacttgctgatttaccaagcgacacaggggtagctaagccggtcaacgagtttcttcataagtggctagacaaacatcctgagttcttatccaatccgctctatg

SEQ ID NO: 82343 - DNA, 569 bp, Arabidopsis thaliana columbia
gactcactattgggaaagctggcccgcctgcaggtaccggtccggaattcccgggtcgacccacgcgtccgattcagaaaccctagagttcttcagcgagcgaactctgtctgcgatttcttgttgattctaaatggatctctcgcgagaagtcgatgactttatcaaagagacaatcgatcactctttagggcttccgatatccatggacgttctccagaaaaagctctacacggcggaagaatctcagcgtcgtctccgtgaacagtatctatctctggtttcgagattgaaagagaaagaaaaagtaatcgatctcgttagatccgaagcgagtatgaatgcccagtcgctgaagaaattcgtcgaagagaatcagaaattgggaagcgagcgcgaggatttggtgaatcagtgtaagaagtgggaaaaagaatgctttctttatcatcaagatcgtgaatcactcatggagttcgggaacgaaactgacgaaagggctagagaagcagaatctagggttcgtgaattggaggaagaagttagaaaaatgtctgatgaaatcaaga

SEQ ID NO: 82344 - DNA, 982 bp, Arabidopsis thaliana columbia
agcttatcactacttaggagctgtccctgcggtccgtccgattccggtcgccaccgtcgcagaataactgtgagttagaaacagttgcttatgagttcttcacaaaggcatatcttctgtatgaagaagaaatttcagattcaaaggcacaagtaacagcactacgtttaataatagggacactccagaggatgcgtgtatttaatgttgagaacagagatactctgactcacaaggcgacagggtattctgcaagactcctaaggaagccagatcagtgtagagctgtttatgaatgtgcgcatctcttctgggctgacgaatgcgagaacctgaaagatggagagagggttgtgctttgcctgaagagggcacaaaggattgcagatgctgttcaacaaatggccaacgcatcccgtggtaccagtagcactgggtcggtgtctctatatgtcgaactgctgaacaagtatctctacttcctggagaaaggaaaccaacaagtaacaggcgatacaatcaagagcttagctgaattaatcaaaagcgagacaaagaaggttgagtcaggcgcagagccattcataaatagtactctacgttacatcgagtttcagagacagcaagaagatggtggcatgaatgagaaatacgagaaaatcaaaatggaatggtttgaatgaatttatttcttgcattctgttaggcaaatcatcaataatcaatggcttctcgtcttgttgcagaagcatgaagagtaatcttgagaaataaaacttgtatcattacttttcatttcctagttacacgctctaccaataaacatgtttgcaaagtttaaaacagtaacatacaaaatatggtcagctgaagaaatggtgggaatgaaaactgattcaaaacaaaaaaacaaaaaaaagggcggccgctctagaggatccaagcttacgtacgcgtgcatgcgacgtaatagctcttctat

SEQ ID NO: 82345 - DNA, 481 bp, Arabidopsis thaliana columbia
agcatggtgatttgttatgagtatttaatgagtattttttatggtatacaattacataaattctatatttaggtttgtccaaaaaagaaaaaagaaggcaagcttagaaaaagttgaagcaaatacacaaactaaaagagaggctacagattcaacaaatatatacatagacgctaagacaagtttgatgacagagtttagagttaaatacaacatagcaaaattaaataagctaaaatctggtctcgctctctctctctctcttgctaacttcatccaatgctactactaggcataacccatccagcatcatgaccaacaaccacactattctccatttccaaacactcctcgttgtctcttcttcatcaacgcagctgataccggacttcctacagtgctggaagtcagagagctctctgctgaacagttgttcttgtgctctattgctactgcaagctcggataaggatggaatcatc

SEQ ID NO: 82346 - DNA, 578 bp, Arabidopsis thaliana columbia
  unsure (1)..(578): unsure at all n locations
caagcccaangcagttntgcagggtngnggtaatcacnttggaaaattaaaaanctaaaccgggccggttttctctctcccttgctaccttcacccaatgctaccactaggcataacccatccagcttcatgcccaacaaccacactaacccccatttccaaacactccccgttgtctctccttcatcaacgcagctgataccggacttccctacagtgctggaagtcagagagctctctgctgaacagttgttcttgtgctctattgctactgcaagctcggataaggatggaatcatcattttggttgtgtcgaaggtgcttgttgttccttggcacccattggtgatggaggcctttatggctagctctgaaagctcttctctagctgcctctaacccagcaaatgcaacagcttgctcctctatagccttgcaagctttctctagaattgattgcaggtacttcccttgtgcctcgatccttaactggagtcgcctttgcacctctagttgctcgtgtagtcttctttggacttccatctgggcacgcaaagcttcagtgacctggtaactcct

SEQ ID NO: 82347 - DNA, 311 bp, Arabidopsis thaliana columbia
cccccctcgagggcgactgctatcgataagctagctagcgcatccgcggccgcggtggggcaagagatgggaaattgccaagcggctgacgcggctgcgttggttctacaacatcctgatggcaagatcgatagatattacggtcctgtatccgttagtgagatcatgcgtatgtatcctggtcactacgtttctcttattattcctttgccggagaagaatattccggcgacaacaacaacaacagatgataagagtgagagaaaggttgtgaggttcacgcgcgtgaaagttctccgattttttttttt

SEQ ID NO: 82348 - DNA, 1099 bp, Arabidopsis thaliana columbia
  unsure (1)..(1099): unsure at all n locations
ccnnnnnnnnnngctctatacgactcatataggaagctggtcgcctgcagtaccggtccggattcccggtcgaccacgcgtccgcccacgcgtccgaaaagactcttctcttctctcttcctctttccttcacacaactctctcattctactctctgttttttttctttaatcataacatttttttgaagaacagagattctttttgtttgtgtaagagatgggaaattgtcaagcggttgatgcggctgcgttggttctacaacatcctgatggcaagatcgatagatattacggtcctgtatccgttagtgagatcatgcgtatgtatcctggtcactacgtttctcttattattcctttgccggagaagaatattccggcgacaacaacaacaacagatgataagagtgagagaaaggttgtgaggttcacgcgcgtgaaacttctccgaccaacggagaatcttgtacttggtcatgcttatcgtctcatcacttcacaagaggttatgaaggttttaagagccaagaagtacgcgaaaacaaagaaacaccaaagtgaaacgagtaaggagaagaagaagccatcatcggagaagaagattgatgaagaatccgacaagaatcagaatctggaaacgaaagatgagaagcaacgttcagtgttaacgaattcagcttcatcgagatcaaaaacatggaggccatcattgcagagcatctctgaagctacgagttgatgtttgggttttacgtgagggacaagaaacgtagtctctgtgtgtgaatcattcagaagatggaatctgaagaagaaagagatataaacattattgaataaactcttctcttatgttcctttctggttataatttacataggagatgaaaattttatagattaagatgtaaaaagaactatgcagagattaagaactaagtcccttttttgtcctgttaatgtatatatgtgctccatgtgaagaaatcaatcaaaaaatagattgtaaaaaaaaaaaaaaaaaaagggcggccgctctagaggatccaagcttacgtacgcgtgcatgcgacgtcataagttttttataggttacct

SEQ ID NO: 82349 - DNA, 656 bp, Arabidopsis thaliana columbia
  unsure (1)..(656): unsure at all n locations
nnnnnnnnnnnnnnnnnnnnnnnnnnnnnnnnnnnnnnnnnnnnnnnnnnnnnnnnnnnnnnnnnnnnnnnnnnnnnnnnnnccacgcgtccgcccacgcgtccggaaaaggcttcacgcccgatttcttttttccccagaaaaaggcttcacttccgttcgttgttcttcatcggtctgcgccgcctcgcacatcgtttcacctttctcagaatctctcttcccgtcgattagtttcctcagaggttgcgatttgttgagaaccttgatttagactatgaagtctcttaatgatcttcctgcgcccaaatcaaccactaccacgtattatgatcattctaatgatgcttggttcaaaaaccgagtcactgaatccgagacggtgaaatcctccagtatcaaatttaaagtggtgcctgcttacctgaatcgtcaaggtttacgtccgaagaatccagaggattttggcgatggtggtgctttcccggagattcatcttcctcagtatcctcttcttatgggtaagaataaatccaataagcctggagctaagactctccctgttactgtcgatgctcagggaaacgtggtctttgacgctatagtgaggcagaatgagaactcgaggaagattgtttattctcagcataaggata

SEQ ID NO: 82350 - DNA, 895 bp, Arabidopsis thaliana columbia
  unsure (1)..(895): unsure at all n locations
nnatgatatnnnnnnnnnnnnnnnnnnnnnnnnnnnnnnnnnnnnnnnnnnnnnnnnnnnnnnnnnnnnncaagaacacaacaccacgcgtccgcggacgcgtgggttttcccgtgtaaccaaaaaaatcaaaaagattactctctctttaatatctgggtttatactacagtccttctttggtgcaaagatcccaaaaaatcaaaatcgaaagagagaataaatcaaaaggaagaatctttatctgctttctctcgatgaggatccggaaacgacaagtgcctcttcctttatcgtctctattaccagttcctctatcagatctctactttaaccgctcaccgacggccaccgcgagatactttcgcggtggttataaagacggcggtgatgattttggttctcttcagctttcgcttccgccgccgtcgcagatttctgatcggcttattcaaagagatttgataaagaagaaggaggaggtcaaggctttggatgatgataatggtgatgtagacgtcaagagtcgtactgatgcatcgggcagcaagaatgttaatccccgaggagaatccgtctcttcaatacaagttgtcgagaagaatgaaaaggttgtgtctttgaggaagagaagaggctttatcaactttgaggattacgaagatgaggaagatgaagaagctagtggcggtggaggccgtattaataaagggaaaaaagaaagcgaaaaagagcggtgggtgggttagaggaaggatcacggtgcagccgtgttaacggtagaggatggagatgttgtcagcaaacgctggtggggtattctcttttggaacctcatctcgggaagggaggggtagggccttgaccaagagtgggggggggttggggggagaaa

SEQ ID NO: 82351 - DNA, 506 bp, Arabidopsis thaliana columbia
  unsure (1)..(506): unsure at all n locations
tcccggctggggccaatctntgagaggggttaancatgcaatgcagcaactttggccttcnggatgtgtatcnctaaggccatcaccagggcaatactgatcagtgatgcaatggagacaggacccgttcagatcaactctgcgccagctcgtggaccggaccacttccctttccagggacttaaggacagtggaatagggtcacaaggtgtgacaaatagcatcaatttgatgactaaagtgaagaccactgtcattaacttgcctacaccttcttactctatgggttagtttcccttttttttttatgttcttcatcttagaatcaaaatcaatcatgtcatgtttgtattggattcaatcgaatactgcgaataaagggagtgattagcgtaactattatggtttgtaatctctatgtaaccaataagaggatattatgaaagatgagtgagaggtttggttgtgttgtgttaaaaaaaaaaaaaaaaaaaaaaagggcggct

SEQ ID NO: 82352 - DNA, 532 bp, Arabidopsis thaliana columbia
  unsure (1)..(532): unsure at all n locations
cttcctctcgatcggaaaatagtcaaaagtttctataaattgttgaatcaaagcagagaagaagaagaagacgatcatgaatccagattccgattatcctcatctccctaacatcaagatccaccatccttcatctcctcgtcactctcaccaccactcttcctccactccttccgccgctactcctaccccaaccgccggtgctcgccgtaagatcggagtcgccgttgacctttccgaagaaagcgctttcgctgttcgctgggctgtcgatcattacatccgtcccggagacgccgtcgtcattctccacgtttctccaacctccgttctcttcggcggcgattgggggactctccctctccaaaatcctcctcctccttccggcggtaacggttccggagtcagcggagctagtaaggagatttcgtgngttantttttcaaagnagggattaggaanggtgaaggantggggttccnaaaantcanaagggaagtcggtntggaaaggttgttanntgaaggtaatc

SEQ ID NO: 82353 - DNA, 618 bp, Arabidopsis thaliana columbia
caggtctactacgactcactattgggaaagctggcacgcctgcaggtaccggtccggaattcccgggtcgtacccacgcgtgcgcttcctctcgatcggaaaatagtcaaaagtttctataaattgttgaatcaaagcagagaagaagaagaagacgatcatgaatccagattccgattatcctcatctccctaacatcaagatccaccatccttcatctcctcgtcactctcaccaccactcttcctccactccttccgccgctactcctaccccaaccgccggtgctcgccgtaagatcggagtcgccgttgacctttccgaagaaagcgctttcgctgttcgctgggctgtcgatcattacatccgtcccggagacgccgtcgtcattctccacgtttctccaacctccgttctcttcggcgccgattggggacctctccctctccaaactcctcctcctccttccgccgctaccgatcccggagctcagccgaagcctagtcaggaagatttcgatgcgtttacttcttccaaagtagcggatctagcgaagccgatgaaggaagctgggtttcctcataagatccatatagtgaaagatcacgatatgagaga

SEQ ID NO: 82354 - DNA, 757 bp, Arabidopsis thaliana columbia
tgtacacgactgagtatagggaaagctggtacgcctgcaggtaccggtccggaattcccgggtcgacccacgcgtccgcccacgcgtgcgaaattgttgaatcaaagcagagaagaagaagaagacgatcatgaatccagattccgattatcctcatctccctaacatcaagatccaccatccttcatctcctcgtcactctcaccaccactcttcctccactccttccgccgctactcctaccccaaccgccggtgctcgccgtaagatcggagtcgccgttgacctttccgaagaaagcgctttcgctgttcgctgggctgtcgatcattacatccgtcccggagacgccgtcgtcattctccacgtttctccaacctccgttctcttcggcgccgattggggacctctccctctccaaactcctcctcctccttccgccgctaccgatcccggagctcagccgaagcctagtcaggaagatttcgatgcgtttacttcttccaaagtagcggatctagcgaagccgttgaaggaagctgggtttcctcataagagccatatagtgaaagatcacgatatgagagagaggccttgcttagagactgaaaggcttaatctaagcgccgggataatgggaagcagaggatttggtgctgagaagagaggaagtgatggccagccttgctctggtagggaatattgtggtcaccattggggttggcccggtggtggtggtagatatcctgatgatcgg

SEQ ID NO: 82355 - DNA, 535 bp, Arabidopsis thaliana columbia
  unsure (1)..(535): unsure at all n locations
nnnnnnnnnnnnnnnnnnnnnnnnnnnnnnnnnnnnnnnnnnnnnnnnnnnnnnnnnnnnnnnnnnnnnnnccacgcgtagcgacacatcccaagaatccgccggcgtcgacaatcttcgccggagccatcgtcctcttccatcatctgcttaatcattttttgccctaacaccaaaaattatcgatctttttttttgtctactatatacctagatatataggtttttttgtccttctctttggatcatttccacgacgaaacggagaagaggggacgattttgccagccaagaaacaaagaattgttaaggaactgaagattataaccttctgaaggataatgaagtctaagaagaagcttagcttgagacaaagcaaagcttccaataggaacgttaacgaaaccaaacctcttcatcatctcttcccaaatctcaaacctccgatgtctttgctttctctccgtctcttccgccgccacaacatccaaaatctccttaccgaaccaccgtagctctagggttagtctctctc

SEQ ID NO: 82356 - DNA, 1441 bp, Arabidopsis thaliana columbia
aatcacttcctctctctctctctttttcttatacaacactcaagaagcgagacacagaggagagagttagtcttcttctctgtttttgtctctttggctatatatattcaaacattgtgtgaacagaacacaaatcaacacaacacacacaactttgtgttctttaagttttgtttcagagatcaatggccgggactggattgtttgctgagattcttgatggagaagtatacaaatactacgctgatggtgagtggaaaacttcttcctcaggtaagagtgttgccatcatgaacccggccacgaggaagacacagtacaaggttcaagcatgcacgcaagaagaagtgaacgcggtgatggaactggcgaaatcagctcagaaatcgtgggcgaaaactcctctttggaaaagagctgagcttcttcacaaggctgcagcaatccttaaggacaacaaagctcccatggctgagtctcttgttaaagaaatcgctaaacccgccaaagattctgttactgaggttgtgaggtctggagatttgatctcttattgtgctgaagaaggtgttaggatcttaggtgaagggaagtttcttctctccgatagcttccccggtaatgaccgtactaagtactgcctcacttccaagattccactcggtgtggttttggctattcctccattcaattatccagttaatctcgctgtatcggagatcgctcctcctttgatcgccggaaactcccttgtcctcaaacctccaactcaaggagctgtttcttgccttcacatggtacattgctttcacttagccggtttcccaaaaggtcttatcagctgcatcaccggaaaaggatctgagatcggcgatttcctcactatgcaccctgctgttaactgcattagtttcacgggtggtgataccggaatctcaatctcaaagaaagctggtatgatccctcttcaaatggaacttggaggtaaagatgcatgcattgttctagatgatgctgatcttgatttagttgcttccaatatcatcaaaggaggattctcttacagcgggcagagatgcactgcggttaaggtagtcctagtgatggaatcagtagcggatgagcttgttgagaaagtgaaagctaaagtggccaaactcacggtgggaccgcccgaagagaactccgatatcacggcagtggtgtcggaatcttcagctaatttcattgaaggattggtgatggatgctaaggagaaaggagcaacgttttgtcaagagtataaaagagagggtaacttgatttggccgttgcttttggataatgttagaccggacatgaggatcgcgtgggaggaaccattcggtcctgttgtgccggtcttgaggatcaattctgttgaagaagggattaatcattgcaatgcaagcaactttggcct

SEQ ID NO: 82357 - DNA, 600 bp, Arabidopsis thaliana columbia
  unsure (1)..(600): unsure at all n locations
cgnnnnnnnnnnnnnnnnnnnnnnnnnnnnnnnnnnnnnnnnnnnnnnnnnnnnnnnnnnnnnnnnnnnnnnccacgcgtccgtacggctgcgagaagacgcagaagggggctgaagcagtaagcactcaaccaaaaaaccaattgcgtaaacactttcccttgaatacagagatcacattcgatcagcgagctgatttctcacaagggatatcaaaatttctggtgaagtgggattgtaaaattcggcgttgaaagatatataaagagtggaaggttctggagtcgtttcaattcatggatgatggtactcctaagaagctaaacatattacctgatcactttagtgctcctagtcccacagcagaatcttctcagcacgatactccatcatcttcgcagccaaaggacgatagttctctgagagtaggccttatagccagtcacggactcgcagaaacctgaaaagagcagcaactatgttgaatttgttcactcttcgccgtctgccttgggtttcagatggtcaagagaaggtcgagctatcagcagcggagttagaatcacttagatcagaactttctgatatggaagaaagaga

SEQ ID NO: 82358 - DNA, 521 bp, Arabidopsis thaliana columbia
aaaaaaacttatcggaaacagaaaaaagaagagagtgagctatcaatcgatcattgattgattgcagagaagcagcgaaagagacatttccaaatctaatctcaatccaatccaattcagggttgttgctaccttcacgaatgacgacgacttctgtttgcccgttctcgaaagctgctcgtcctgacgatgggtcgactcgaaaacaaggcgaaattaccgcttctggttgtcctttttctaaagctgctcgtcccgacgatgcctctgctcgaaagcaaggggaaacgacggcttctggttgccctttttctaaatctgctcgtcctgacgaaaatgggagtaaaggatgtcctgaacaagaaggaaacttgaataaggactctactgattctgcaacggtacctgccaagtgcccttttggctatgactctcaaacattcaagcttgggccttttagctgtatgttatgtcaagcacttctatatgagagcagtagatgtgtgccttgcacacatgtg

SEQ ID NO: 82359 - DNA, 770 bp, Arabidopsis thaliana columbia
  unsure (1)..(770): unsure at all n locations
tactcactctagggaaagctggtccgcctgcaggtaccggtccgcaattcccctgaaggccgcatcttcatcgctttcactccaacactctccgccactcagcctatccttccgccgacgctggcggtggccttgtcgtctatcccacgtatggtcgtcaccgttgctccgcgattgcgatcgacgctccgtcgtctctgactggcgtgacgccgattcgttggggttacacgagtgttcaaggattccgagatgagatggaagacgacatcgtaatccgttctgatgctgtcgatagcttctcctacgcagcggtcttcgacggccacgctgggtcgtcctctgtcaaattcctcagggaagagctgtataaagagtgtgttggtgcattgcaagctggatcgttgttgaatggaggcgatttcgcagcaatcaaggaagctttgattaaggcctttgaaagcgttgaccgcaatttgctcaaatggctagaagctaacggtgacgaagaagatgaatcaggttcaacagccactgtaatgatcatcagaaatgatgtttccttcattgctcatattggtgattcgtgtgcagtcttatctcgatcttgggaaatccgagggatttgacctgattatcaccgtccctatggaagcagtagggcagctttttcaggaagtgaaaaggggcaaagaagcaggttggatggggtttncaattgaaaggatttttggggcaaaanctnnatnccggnncttttgggncacccg

SEQ ID NO: 82360 - DNA, 505 bp, Arabidopsis thaliana columbia
  unsure (1)..(505): unsure at all n locations
atgatcttnnnnnnnnnnnnnnnnnnnnnnnnnnnnnnnnnnnnnnnnnnnnnnnnnnnnnnnnnnnnnnnnnnnnnnnnnnnccacgcgtccgcccacgcgtccgcccacgcgtccgcggacgcgtgggacgtctcttcttttcttgtcgattttccccagataatcagttgaaaacacacccaaattcatcttcgaatcaataatggatataagtaatgaggctagtgtcgatcccttttcgattggaccatcatctatcatgggtcgaaccattgctttcagagtcttgttctgtagatcaatgtcacagcttaggcgtgatctctttcggttcttgttgcattggtttcttagatttaagctgaccgtttcaccgtttgtgtcgtggtttcatcctcggaaccctcaagggattttagcggggggttacaatcattgcctttgggttgaaacgatacacgaatgtgaaaataaaggcggaaatggcttaccggaaaaagtt

SEQ ID NO: 82361 - DNA, 672 bp, Arabidopsis thaliana columbia
tcgtcctcgcgtccggttttaggttttttttttcttcttctcggaggtttgtagaatcaacaaaaatggtggaagaccacaagcacgaggaatcgatcttggagaagattgttgagaagatccatggccacggtgactcgtcttctctgtccgattccgacgacgataagaaatctacatcgtcttcgtcgtcgtccttcaagtcaaagatttaccgacttttcggaagggagaaacctgttcacaaggttctcggtggtggaaaacctgctgatatattcctttggaggaacaagaaggtatctggtggagtcttgggtgctgtaactgcgtcttgggtcttattcgagttattcgaataccatctcctcgcttttctctgtcactttgcgatttttgctcttgcagcattgttcttgtggtctaatgcttgtacattcatccacaagtcaactcctcacatcccggaagttcacatccctgaagatcctattcttcaacttgtttctggattaaggattgaaatcaatcgtggtttgacccttcttaggaacattgcatcaggaaaagatgtcaagaattttatcctggtaattgctggcttgtgggtttttgccattattggcagctgctacaacttcttgacattgttctacactgctactgtccttc

SEQ ID NO: 82362 - DNA, 1574 bp, Arabidopsis thaliana columbia
  unsure (1)..(1574): unsure at all n locations
ttcttcgtttactccttcctagatcgatattatacacacatgcgtgtgtattggatctcacgatttcttatcaatggaactcgcttctctttctcagatccccatccaaatcgttttataggtagattagatagataaactacggatatactcgaactctatccatttacggtattgatttggaaatatggacaagtatgacgttgtcaaggatctgggagctggaaatttcggtgtggctcgccttctcaggcacaaggacaccaaagagcttgttgccatgaaatacatcgagagaggtcgcaagatagatgagaacgtggcgagagagattattaatcacagatcacttaaacatcctaatatcatccggttcaaggaggtgatcctgacacctactcatcttgctattgtgatggagtatgcttctggaggagagctctttgatcgaatctgtactgccggtagatttagtgaagctgaggctaggtacttctttcaacagctgatttgtggtgttgattactgccattccttgcaaatatgtcatagagacctgaagcttgagaacacactgctcgatggagcccctgctccgcttttgaaaatctgtgattttggttactctaagtcatctatactacattctaggcctaaatcaactgttggaactccagcttacatagcacctgaagttctttcacggagagaatatgatggcaagcacgcggatgtgtggtcatgtggagtaaccctttatgtgatgctggtgggagcttacccgtttgaggaccctaatgatccaaaaaacttcaggaaaacaatccagcgcataatggctgtacaatacaagatcccggactatgttcacatatctcaggaatgcaaacatcttctctctcgcatattcgtcactaactctgctaagagaatcacacttaaggagatcaagaatcatccgtggtacttgaagaatttgccaaaggagctgctagagtcggctcaagcggcgtattacaagagagacacaagcttctctcttcaaagcgtagaggacataatgaagatagttggagaagcaaggaatccagctccatcaactagtgctgtcaaaagctcgggctcaggagctgatgaagaagaggaagaggacgttgaagctgaagtggaagaggaagaagatgatgaagacgaatacgagaagcatgtcaaagaggcacagtcttgtcaagagtctgacaaagcttaaaaagaaaaatgctctctgtttctcttactttatttcttcttcaagaacactccttggtgagttggtgacttgcttctggtaaaaagaaaaacacatttgtcaaacgcaaaggctgtaaactacgtgctggttgtttcacttttagattgatgtcgttgtactgagtaatgggcatgaaacagaaggtttatattattatatgatactatactataggttttcgtctaaaaaaaaaaaaaaaggnnnnnnnnnnnnnnnnnnnnnnnnnnnnnnnnnnnnnnnnnnnnnnnnnnnnnnnnnnnnnnnnnnnnnnnnnnnnnnnnnn

SEQ ID NO: 82363 - DNA, 504 bp, Arabidopsis thaliana columbia
  unsure (1)..(504): unsure at all n locations
nnnnnnnnnnnnnnnnnnnnnnnnnnnnncaagacaatccgaaacagagacattgtattccatttacatggggaaactactgttgcgacatctgattttactactacaagcaccccaggttaggtgtagcaaagaatgcagaacagttacacgatatccatgtcctaaggcacaacaggaatttagaggcataaagaatgataatatatgtgggtgtaaacctctttttttcaatggtacagttttaggagaaagaagactctctccatcatttctcttcattgggggtattctgtgactaagtgcatatagatgatgaagaaataagaatgtaacttaaatgtagtcaagaaaaagacctaaaattcggtctaagggatctaactccgcatcttttttcctctgactaccctcttccatatcacccccattggactctggcngcacttgcatgccnnaagggccaactgngctggccaaccgnngtgatctccnggnatcatg

SEQ ID NO: 82364 - DNA, 470 bp, Arabidopsis thaliana columbia
  unsure (1)..(470): unsure at all n locations
gttcaggagagtgagtaggaggaggattttagaggttgttttttttttgggagagaatattttctgtatcattaaacacacaaaccgttgctacaaattacatactgaaaaatatgaatgaagacattatacaaacgaccaaacacacctctctatgatacataaataccccaaaactaaaacaacctctaaaatcctcctcctactcactctcctgtttgtgtccctcaccaaaagtccaataccacatatataatcaatactaagaaaaaaagcaaagtgaagaaaatcaaatatatgaataaaaatgagaaagccccttttacaaaacaaatactcttcctcctcactactactacaaattctttaccctttcatcatctgacttgaatgaacttaacctgtgaaattcttcgataactcaaaaccctcattgatccattctgntggtaaatagcaatcgataattg

SEQ ID NO: 82365 - DNA, 487 bp, Arabidopsis thaliana columbia
  unsure (1)..(487): unsure at all n locations
ttcctcaaatatttctttcatataaagcaaatgaattcataacataacagagatacagtaggaaaccaatacagagacaaactttacaaattacaaatagactaacgctagtgtctcatccaaaaccagaatttggtgaaaaaattataattatgaaacaagcacaagttcatcaagcgaggaaaaaggattataaaagggaacgatagtaaccgaggctagaaggagttccagttatctgaccttttcgtagggctttcatccgaagagactttaaagggacctgtggggaaccaaacgggtctgcatcatcaaacgagtatccatgggctacactgaaaccctttgtactattcatagggtcgatcttgatagcgngggggncaccaagcttngncaccgttgatgggatcaaccncgaatttccagnccggacnggggggcgccggggatccggacggacngagggganagttcccnaggggng

SEQ ID NO: 82366 - DNA, 415 bp, Arabidopsis thaliana columbia
actgaaaccttatcttctccgcccatggccgccttctccgtcaacgggcagcttatcccgacggcaacaagctccactgcttccacctctctctcttcccgtcggaaatttctctctccttcctcgtctcgtctccctcgcatctccactcaatctcctcgtgtcccatcgataaaatgcagcagaagcttacctaaccgagatacagagacttcctcaaaggattctctccttaaaaacctagctaaacctctagccgtagcctcagtctcctccgctgcttcattctttctgttccgaatctcgaatcttccgtcggttctgaccggtggtggaggaggaggagatgggaatttcggtggatttggtggtggacgtggtggtggagatggaaatgatggtggattttggggga

SEQ ID NO: 82367 - DNA, 1369 bp, Arabidopsis thaliana columbia
acccacacgtccggtttgggtgagaaaacaccccttcggagaggagcaaagcctctcctggggaagaagaagaagaacacgactttttgcttcttctttttaatgcagattttctaaaggtcttcgtaaattttgcgtctgattatcaaattaggttttttttgttgtttccattagttgtctcattgtctgtgaagagaaaggaacagaggaaaatgtcagacctagacaagcaaatagagcagcttaaacgctgcgaggctttgaaggaatcagaagtgaaggctctttgtcttaaagctatggagattctagttgaagagagcaatgttcaaagagtcgatgctcctgtcactatatgtggcgacattcatggacagttctatgacatgaaagagcttttcaaagttgggggtgattgccctaagacccattatttgtttcttggagattttgttgaccgaggtttttattcggttgagacatttctacttcttctagctctcaaggttagatatccagaccgtataactctcattagagggaaccacgagagccggcagattacgcaggtatatggattttatgatgagtgtctgcgtaaatatggctctgtaaatgtttggagatactgcacagatatctttgactacttgagtctttcagctcttgtcgagaacaagatattttgtgttcatggaggtctctctccagctattatgactctagaccagatcagggctattgatcgaaagcaagaagtaccacatgatggtgctatgtgtgatcttttatggtctgatccagaagatattgtcgatggttggggattgagtccccgtggtgccggattccttttcggcggcagtgttgttacgtcttttaaccacttaaacaacattgattacatatgtcgagctcatcagctagtgatggaaggttacaaatggatgttcaatagccagatagtcactgtttggtctgccccaaattactgttatagatgcggtaatgtagctgcaattctagagctcgatgagaatctaaacaaagagtttcgtgtcttcgatgcagccccacaagaatcgagaggagctctagccaagaaacctgcacctgattatttcctgtgagacgcaagtgaatacagaaactggttccttcttctcattgcagagcaagaaagctacccaaaatcatcggtgtataggttgtaaaaatgcaaaagaatctacaatccatgtgttgccaaagagatctctactcaagggtccgtttgagtagaatctttgtgtcttaaaaaaagctttttttttttttttccttctcttttgtttgtaatgctacttttacaaaaagaaaattgttt

SEQ ID NO: 82368 - DNA, 817 bp, Arabidopsis thaliana columbia
  unsure (1)..(817): unsure at all n locations
ctccttctctctttctctcttcctccaatggcgaaactaacaacagactctcctctctgccggaaaatcgtccgttctttcttaaattttcttgattccgttgaggttgctccaggtgttgacgaagaaggtcttgaggttgctagagaatgtttaagagaagcttttaaacttaattcagattcttcaagagatgatgatgatgatagctttaaacctatttcacttgttaatttgtttacttcattggacaacaatgaaaccataccaccaccaccaccaccacctgttgctgctactactcaggatcctagttcctccggttctcatgtctccgtggatacgtgtaaagagcctagttttactgggacttctagagatgaactgtttggtcaactctttggtgcgcttgagaaagtacggtattttaggaatacacctgatggagatgatgatcctgctcagctggagaaagctacaaggatatttcatgattgtgtcaatgaaatggaaaagtctggatgtcagacgtttgatgtgaatagcttggcggaaacactcaagtgtcaaggtaacaaagctatgcagtccaatctttatcttgaggcagtcgagctttattcttttgcaattgcactgacggataagaacgctgttttctactgcaacagggctgctgcatatacacagatcaacatgtgctcagaagcaatcaaggnctgtnttaaatccattgagattgatccaaattatagtaaggcgtatagtcgtcttngggntagcatatttatgctcaaggggaantatgnccgaggct

SEQ ID NO: 82369 - DNA, 529 bp, Arabidopsis thaliana columbia
cccacgcgtccggaatttggtaccgacactattattcaggattttcagtttgaagagattgatgaagttctgaaatattacccgcacggttatcacagtgtagataaagaaggcaggcctgtgtatattgcgccgcccgggaaaggttgatctctaaccaaactgatgcaatgttacttacgcttgatcgatatacttagagatcatgtgtaaggtagttcgagaggaggttttattgctcaagtttccctgcctgcacttattgctgccaagacagtattattgattcaagcacacactatttttggacgtccaaggatgtgggacctgaagaacttcacaaatgtctgctcgtgagcttattacaaggttgcagaagattgatggagacaattatcctgagaccctccaccaaatgtttatcatcaatgcagggcccggattccgtctgctttggagcactgtcaagagttttctagaccccaaaacgacttctaagattcatgtactcggctgcaagtttcagagt

SEQ ID NO: 82370 - DNA, 585 bp, Arabidopsis thaliana columbia
  unsure (1)..(585): unsure at all n locations
nnnnnnnnnnnnnnnnnnnnnnnnnnnnnnnnnnnnnnnnnnnnnnnnnnnnnnnnnnnnnnnnnnnnnnnnnccacgcgtccgctttcatccataaacttctatttttctcatcgcaaacttgaaccgtcgtaaccctaaatcgccatcttcatcatcggcaaatcgaatctccgattatatatcaaatagcttaccaaatccgacatgacccaggccctcgttttcggaggactataatgatcggactcttcgtgtcccgtctcgattgcatggggtttgagctatgccggagcttcgccgtggagtccgccgtggccgtgttactgatgctgtagctcccaatcagcttccgcaaacacctacagaaaagaaaccgaagaagagtaccgttaaagctccaaaaccggttgccggcggagttacaggagttgcagagaggccgaggactagattagcggcgaggaaattaaaggaggaagataaagagatacctcaggagattccggttgttgtgccgtctaaggatagcgatatcgataaaaccagggttaaaaggtagtccgttgagaagagaaagaagat

SEQ ID NO: 82371 - DNA, 602 bp, Arabidopsis thaliana columbia
  unsure (1)..(602): unsure at all n locations
nnnnnnnnnnnnnnnnnnnnnnnnnnnnnnnnnnnnnnnnnnnnnnnnnnnnnnnnnnnnnnnnnnnnnnnccacgcgtccgggattttgagtctttctccgaagtcgccggaatcgtattcgccgatccaattgtcgcatagaaactgtcatctccggcgagagactgatctctgggattgatacagaactcgtaggatgatcgatttacgctataaagaatgctacttgctcatctgtcttatcgtcttcataaattttgtgacttgttatagcgatgagagactgtttggtggaaaaactttatatgctgggaaggaactttggaaagagacactgccattgaaatctggatctcgagtttacaaattacaagggcttaagtcgaactcttggtatgaagtcaagatatcatacccagcttctataccggctctattttcgctgcaattactgaagaacggtgtaatgggtttgaaggttaaccatatgaggagattactaaacactgagaagttgatcttcaaaacagaaagtattgaagaagttgataacaaggagggattgtatgttttggtgacggtggaacctgaaggaatcgt

SEQ ID NO: 82372 - DNA, 949 bp, Arabidopsis thaliana columbia
  unsure (1)..(949): unsure at all n locations
ctcgtgggtcgacacaagactctatactgagtcgaaataacgacagaagggggaagaccaaaaactagtggacaaagaaaaagaacaaaaacctaatttcaggaaattcaataaatatcatcctccggataagttgttattgtacgtttaccaaattcaagaacaagaaaaaacttttcctttgaaacaaagaaacatggatttcttcaccgatcaagtaaagaagaaattctccgacaagaaaccggagagctctgatccggagccaaaccacaacaaaaacaaacccggtcacacggagccaacaacacataaacccggtcacggcgagccaacaacacataaaccggtctccaacaccgatccgacaacacacagaccggctacgaacgctgagctcatggctagtgccaagatcgtagccgaagctgctcaagccgctgctcgtcacgagtcagccagctagccaagctaaagtcgccggagccaccgctgatatccttnacgccgcttctagatacggtaagctcgatgaaaagagcggtgttggtcagtaccttgaaaaggctgaacaatatcttcacaagtacgaaacttcccactctcactcctccagcggtggaactggaagccacggtactgccggcgccgctggaacccacggtaatgttggaggacacggtgctggagctggagcaccggcggctaagaaagaagatgagaagtccggaggtggtcatgggtttggagattatgctaagatggctcaaggttttatgaagtgagtaatgttttagtttctaaaaataattatgttagtaattatcttctataattactgttttagtaagctgttgttttttctgaattattattaactgttggatttgtcatttgtgtatgatggaggaaattatgatgttaaagatcatgtatcatgttgttgacc

SEQ ID NO: 82373 - DNA, 872 bp, Arabidopsis thaliana columbia
cactatagggaaagctggtacgcctgcaggtaccggtccggaattcccgggtcgacccacgcgtccgagaaaaagaacaaaaacctaatttcaagaaattcaataaatatcatcctccggataagttgttattgtacgtttaccaaattcaagaacaagaaaaaacttttcctttgaaacaaagaaacatggatttcttcaccgatcaagtaaagaagaaattctccgacaagaaaccggagagctctgatccggagccaaaccacaacaaaaacaaacccggtcacacggagccaacaacacataaacccggtcacggcgagccaacaacacataaaccggtctccaacaccgatccaacaacacacagaccggctacgaacgctgagctcatggctagtgccaagatcgtagccgaagctgctcaagccgctgctcgtcacgagtcagacaagcttgacaaagccaaagtcgccggagccaccgctgatatcttagacgccgcttctagatacggtaagctcgatgaaaagagcggtgttggtcagtaccttgaaaaggctgaacaatatcttcacaagtacgaaacttcccactctcactcctccaccggtggaactggaagccacggtaatgttggaggacacggtggtggagctggagcaccggcggctaagaaagaagatgagaagtccggaggtggtcatgggtttggagattatgctaagatggctcaaggttttatgaagtgagtaatgttttagtttctaaaaataattatgttagtaattatcttctataattactgttttagtaagctgttgttttttctgaattattattaactgttggatttgtcatttgtgtatgat

SEQ ID NO: 82374 - DNA, 1435 bp, Arabidopsis thaliana columbia
gagctaaatctctctccttgggaagaagacgacgagcttaatacattcgacagtggagaatatcagattctttttggcgagggttggttgattccttcttattcatcagattaaggatcgtttccggtggctgaagagtaatagaaggaggaagaagaggagaggagaggtaaaaatgtcagacctagatcggcaaatagggcagcttaagcgatgcgaaccattgagcgaatcggaggtgaaggctctttgcctcaaagccatggaaattcttgttgaagagagtaatgttcagagagttgatgcccctgtcactttatgtggtgacatccatgggcagttctatgatatgatggagcttttcaaagttgggggtgattgtcctaagaccaactatttgtttatgggagattttgttgatcgtggatattattcggttgagacatttctacttctactcgcactcaaggttagatatccagaccgcataactctcatcagaggaaaccatgaaagcaggcaaatcacacaggtttatggattttatgatgagtgtttgcgtaaatatggctcttcaaatgtctggagatactgcaccgacatttttgactacatgagtctttcagctgttgtggagaacaagatattctgtgttcatggtggtctttctccagctattatgactcttgatcagattaggacaattgaccggaagcaagaagtaccacatgatggtgccatgtgtgatctcctatggtctgatcctgaagatattgttgatggctggggattgagccctcgtggtgccggattcctttttggtggcagtgttgtcacgtcttttaaccactcaaacaacatagactacatagcccgtgcccatcaactagttatggagggttacaaatggatgtttgatagccagattgtgacagtgtggtcagccccaaattactgttacagatgcggtaatgtggcttcaattctagagcttgacgagaatctaaataaagaattccgtgtgtttgatgcagcccagcaggactcgagagggcctcccgccaaaaagccggcccctgattacttcctataatgggcaaaacttcgaaaaccttattcccaaagtcgaactagcgtcaatattcaactccgttgaagaggaagagaattactattcgttcagtgtttaggttgcagtgcagaagaatatacaatagagttgtttcaggcgagctctacctaggccacaaagactgatcgaactggggttgtctaaaaaagatattgttgttgttgtttccggttttggtgtaactgtagtcaaaagagtgtttgtgtattggtagttaaagagtgattttgtcctgattcaagtttgcactttcttaggaggataagacctcaaacagttttggagctcacagttatatcaata

SEQ ID NO: 82375 - DNA, 813 bp, Arabidopsis thaliana columbia
  unsure (1)..(813): unsure at all n locations
gtcgtcggttaaaatggaaaagaaggagacgatgagaaggatcggatcccattggttttcacggaggagcagcagaaatacgtcgatgagcttggccgaaaagcgacaaacctcagccgttcgatccaagatctgcggctcagattgcctccaccggatatctcccagcgtctacctgaccttcatgctcactcccttgcgtccaatgccgctctcactcttcagcttgattcgcactccgctactcgtgaacaggcacacatgagagagcagacactgctggaagaaaatagtgcatatgagaatgcaatatcaacctgtgagacaaaaatagaagagaagaggaatgaagcagattctcttcttagaaagttgaaggagctagaagctgtagaggaaaacttgaaaactgagcaggataatgcacaagcttctctagatgtaaggcagtccaaaagctctagtgaaactnttattcagcctgatgggaatggaaaagatggagcagatacagaggccatgaagtcctttatgctagagaagttggagagcaaaaagaccgatatgagtttaatggaagaaaaagttcaggatttagagaggagttnggctgttatacaggaaagagcactgaagcagccttctccagctcagaggagaagaagncacnggaataaacaaccttcatagncttatcgagcaattagcttcaaaagnaggcaccaagcagagggggttttttngtgnagantcatcctaaatnagnntggagttngngnggcttnaaccaanttntttggggaggttttgaaa

SEQ ID NO: 82376 - DNA, 564 bp, Arabidopsis thaliana columbia
  unsure (1)..(564): unsure at all n locations
nnnnnnnnnnnnnnnnnnnnnnnnnnnnnnnnnnnnnnnnnnnnnnnnnnnnnnnnnnnnnnnnnnnnnnnnnccacgcgtccgcggacgcgtgggcggacgcgtggggaaaattcaagaaaagagtgggatattctgtcaaatggaggtatggttcaggaaatggctcatatagccaatggtcatgaacctggaaactgtgtctccttgctccgagtcaatagtggaaactcgagccagagcaacatgttgattctacaagagagctgtacagatgcatcaggatcgtatgtgatttacgcgccagtggatatagtggcgatgaatgtggttctaagcggtggagatcctgattacgtggcgttgttgccgtctggttttgctattttaccggatggttcggttggaggaggagatgggaatcagcatcaggaaatggtttctactacttcttctgggagttgtggtggttcgcttttaaccgttgcgtttcagattcttgttgactctgttcctacagctaaactctcacttggctcggtggctacggttaatagtctgatc

SEQ ID NO: 82377 - DNA, 689 bp, Arabidopsis thaliana columbia
cccacgcgtccgttttcatggtagacccaactctctcatttcttactctctgattcatctctctctctctcttcatttccatggaaggaaggtgatgagctttctcaatctctctttactgattcttaatgaaagtcatctcctttctctttggtatcccttttcttcttctctgcttaattcctgaccaaaaattgtgacaagatctttcaatccaaaagctatatacattaagagctcaggtcactatctgacgggatccgtgacaatagtggttactggagtcaaaagcagctccttgaatcttgagtgttaagtagataggtaaggtaaccgttcatggcctcgaagtatggttctggagttctcccagaaaataagaaggaaaagggcgataaggaaaccccggaaacatcttattccagtcaaagtgtctcagtaaacactttggcagatcaagtatcttcaactttgtcttttgctccaagcagcgacagtaaaactggaggtgaagttaaatttaatgaaaagtctgatcagagcgggaagagtaacacatgtagaccaagcacaagcagtgatatcagtgatgagagcacatgtagcagctttagtggtaacaacaagcctcacaaggcgaatgacgtgagatgggaagcaattcaagctgtccgaacgaaacatggcgt

SEQ ID NO: 82378 - DNA, 591 bp, Arabidopsis thaliana columbia
  unsure (1)..(591): unsure at all n locations
gattccgggtcgaccacgccgtcgcacttcactctctctcttcaaaaagaaaaacaaaaatacaaaagccaaggaaagccattattacaaaagcaataacacactgtaaaaaagccactcacgaacactcctcagtaaccagagagagaagaagaagaacaacaagccatgtcttaactcttaactaatctcttcttctccctccatttcaccaaccaaaaaccctaaaatccttaaaatcacaagtttcttcagcaatgatgcttcaaagaagctgcattgtacttttcttctctctttttctgttggttccacaaatggttttctcgatgctcaacagaactcttcttctcataccacatcctgacccggaactagtcgcttatcaagttcagtggaaagtaaatgcatctataacaaggcgtcaagctctagacacgacggaccaggccggttcgaccccgtgtatcaccggtaacccaatcgatgacttgtggaaatgtgacccaaactggcccaataacagnacaggtctagcagattgtggtatcgggttcggacagtacgcgttgtgaggcaaaggtgtcagtt

SEQ ID NO: 82379 - DNA, 780 bp, Arabidopsis thaliana columbia
  unsure (1)..(780): unsure at all n locations
nnnnnnnnnnnnnnnnnnnnnnnnnnnnnnnnnnnnnnnnnnnnnnnnnnnnnnnnnnnnnnnnnnnnnnnnnnccacgcgtccgcggacgcgtgggcaagaaacaaaatgggatacgaaaggctcggaccatccggagcaactggttcggtcaccacctccactactacagctccaatccttaaccaagtctccacgtcagagcaaccggagaacaacaaccgaagaagcaaaaagaagcttgtcgtatcatcaatcgtcttagccatctcacttatcctcgccgccgcgatcttcgccggagtcagatcacgtctcaagttaaaccaatcagtcccaggcctagctcgtaaaccgagtcaagcaatctctaaagcttgtgagttaactcgtttccccgagttatgcgttgactcactcatggactttcccggctcactcgccgcttcctcctctaaagatctcatccacgtgactgtgaacatgacgctccaccacttcagccacgctctctactcctctgcttccctctccttcgtcgacatgccgccacgtgctcgctcagcttacgactcttgcgtcgggctacttgacgattccgttgacgggctatcacgcgctctttcctccgtcgtatcctcctccgctaagccgcaagatgttacaacgtggcttagcgcggctttaacaaaccatgacacgtgtactgaaggattcgacggcgtcgacgacggtggagtgaaggatcatatgacggcggcgttacagaatctttctgag

SEQ ID NO: 82380 - DNA, 1907 bp, Arabidopsis thaliana columbia
  unsure (1)..(1907): unsure at all n locations
ggtctctacgactcactattnggaaagctggcccgcctgcaggtaccggtccggaattcccgggtcgacccacgcctgcgcccacgcgttcgcggacacgtgggcggctcagacccaccaataccaattttttaaagagatttctgtcacaagtaagaaagaagcactaattacaaaaaaaaagaaaaagaatcaatcttttgttcttcgattcgatttctaatcaattagattgtttttgttttgtttaacatcagttgcgaatcgagctggattcttgggctcgctttttctttcaatcaaaagtttcgatattagtgaaggataaaattcgctaaaaaaagagaattttttttgttaaaaaaattataaaagctggctttctcaaaatttctccatgtggtcgacgaagaagacgaagaagacgaagaagaaagagaaagtctcttagcaaacatgaccgccaccgaagctaagaatcgcaaaatcaatgtcggagatggagatgacgttgttgatatcgaaatccctgacactgctcatcaaattagcagcgattcatggtttcaggtggcgttcgttttgaccaccggtataaacagcgcgtatgtgttgggatattcaggaacaattatggttcctttaggttggattggtggtgtggttggtcttcttattgctactgcaatctctctttatgcaaacactctcatagctaagcttcatgagtttggtggcagaagacatattcgctatagagaccttgctggattcatttacggtaggaaggcttatcatcttacatggggattgcaatatgttaatcttttcatgattaattgtggattcattatcctagctggttccgccttaaaggctgtttatgtgcttttcagggatgatcataccatgaaactacctcattttatagccattgctggtttgatttgtgcgattttcgctattgggattcctcatttatcggctcttggggtctggcttggagtttcgaccttcctcagtctcatctatattgttgtggcaatcgtgctatcggttagagatggagtaaaaacaccttcaagagattacgagatacaaggatcatcattgagcaaactttttaccatcacaggagcagccgcaaatctggttttcgcattcaacaccgggatgcttccagaaattcaggcaacagtgaggcaaccagttgttaaaaacatgatgaaggctctatactttcaattcacagcgggtgttttaccgatgtacgcagttacattcatcggatattgggcttacggatcctcaacctcgacctatctactaaacagtgttaatggcccactctgggtcaaagcccttgctaacgtctctgctatccttcaatctgttatctctttgcacatatttgcgagtccaacatatgagtacatggacacaaagtatgggatcaaaggaaacccatttgcgataaagaacttgctgtttaggatcatggcgagaggcgggtacatagcggtaagcacgcttatctcagcgctgctgccgttcctcggtgacttcatgagcctaactggtgcagtgagcacattccctctcacattcattctagccaaccatatgtactataaggcaaagaacaataagctgaatgctatgcaaaagctatggcattggcttaacgttgtcttctttagtttgatgtctgttgctgcagccattgcagctgtcagactcatcgccgttgattccaaaaatttccatgtttttgcagatttgtaattcattatattatatagtcaattgtgtatccttcattcttaggcaggtttatttctcctgtaagcttgtattctctctctctttgtcttaccattagagcctaaataaataaatcaagttct

SEQ ID NO: 82381 - DNA, 536 bp, Arabidopsis thaliana columbia
  unsure (1)..(536): unsure at all n locations
gaactcaggagatgaagcagtagtaggctctgcaggcgctccaggaccaagccaggcttcattccagnncccgacaccatctccaattgcaatgcagagatttccaagtgtagacaacatcagaagaagtggatcaggaacaagccttaatggtgatcttcctcagtcagtatcaagaagaacagcttcatggagcggaagtgtcaaacagctcgtcgtttatgtctccaacgagtgcatcaacattcagaccaagcccactgaacagtagcagtagcagcttaggagaggagcttcaggaagttgaactgtaagttgaaaaatctgtaatatcacaaaaggaaaaaaaagttttgctcactgtcacaacaggttagntcggtcaatcaatcaaatgttaatccatgggttnccccaaattncatgnngnactttctctgttctgtcaatgcagggggaaatatgtttatgccgttgnatttttttttaatttctccnaanataantccttaatnnttttnnnnagctttgggntt

SEQ ID NO: 82382 - DNA, 543 bp, Arabidopsis thaliana columbia
cagctctatacgactcatatatggaaagctggtacgcctgcaggtaccggtccggatttccggggctcgtgctcgtgcagctgaatatccctgctctgattcgtcaaatccatggaagatgaggatgatccaaccacaaagaacagcaacaacacagatgattttgctatagagcctcgtgaagggattatatttgaatccgaggatgcagctaagatgttctatgatgattactctagacgattagggtttgtaatgcgtgtaatgtcttgccgaagatccgagaaagacggaagaattcttgcccggagattcggttgtaacaaagaaggtcattgtgttagtattcgtggtaagtttggatcagttaggaaacctagaccgagtacaagagaaggttgcaaagctatgattcatgttaagtatgaccggtctggcaaatgggtcattaccaaattcgtcaaagaacataaccatccactcgttgtttcacctcgcgaggcttgccataccctggacgagaagggatagagaatttaagaa

SEQ ID NO: 82383 - DNA, 360 bp, Arabidopsis thaliana columbia
tcttttgctctgaaataaaaagagtgagagaagaaggaagaagaagataaaggattcaaaaaaccctaaacactccaatgtcttcttctactcttcaagcttctctttttcttcgtcctcctctccatacttcttcgtttaagctttacccttgtctattctcttcttcttcattgagtttttgtccacaatctctctcaagtttctaccgtctttcttcagttcttcacaactctcgatttcgtccccttccttgctcattgcgtcaagacaatgtcgcttccgattctgatttcattcccaaagactccgcttttgaggttacggattcagctgagagtaatagattggtttccgata

SEQ ID NO: 82384 - DNA, 799 bp, Arabidopsis thaliana columbia
  unsure (1)..(799): unsure at all n locations
nnnnnnnnnnnnnnnnnnnnnnnnnnnnnnnntgggacgcctgcaggtaccggtccgcctacccggggcgaccacccgtccggtttctaccgtctttcttcagttcttcacaactctcgatttcgtccccttccttgctcattgcgtcaagacaatgtcgcttccgattctgatttcattcccaaagactccgcttttgaggttacggattcagctgagagtaatagattggtttccgatacggaggtttcggaattagagacgaatgatagatttgtgggtggtgaggagacgaaaagtggaggagaagaagcggaggttagtaatggagtaacggaaggtaaggaggaagatcagaagaagagcaagtttaggattgtggtgttgatgatggcactatgggcggctataaagagagctatagagaaggtaatggagtgggaatggttaagctggtggcctttctctcgccaggagaagcggctcgagaaacttattgctgaggctgatgctaatccaaaggacgcagctttgcagggtgctttattggctgagctcaataagcatattcctgaggctgtagttcaacggtttgaacaaagggaacacacagtggatagtagaggagttgctgaatatattcgagctcttgtcattacaaatgctatctcggagtatcttcctgatgaacaaacggggaagccatctagtcttcccgcactgctgcaagagctgaagcatcgtgcatcaggcaatatggacgaatcatttgtgaaccctggtatatctgagaagcaac

SEQ ID NO: 82385 - DNA, 704 bp, Arabidopsis thaliana columbia
  unsure (1)..(704): unsure at all n locations
gaaggccgnagtcctgttgtggtatcggaaggagctaatacaatggatgtaggaagatctgttttggttcagaaagagccaaggacaaggcttgatgcaggaacttggggaactatgggtgttggtttaggttattgtattgctgctgctgttgcttctcctgatcggcttgttgtcgctgttgaaggagactctggttttggcttcagcgccatggaagtcgagacattggttcgatacaatcttgctgtggtgattatagtcttcaacaatggtggtgtctacggcggtgatcgaaggggacctgaagaaatctccggtcctcataaagaagatccagcaccaacatcatttgttcctaatgcaggctaccacaagctcattgaagcctttggaggcaaaggttatattgtggaaacacccgatgagcttaaatccgctctcgctgagtcgttcgccgcaagaaaacccgcggtggtaaatgttattattgatccttttgctggtgctgagagtgggagattacagcacaagaactaaaaagctttgtggagagtccctttaaataatgttgaagttgtttgttgtgaacaaaaaggatatacgttttagttttctgtttttcactattgtaaaccggatcataaaccggtccattttaaaccataattgaataaaaacacgtttccggttcaaaaaaaaaa

SEQ ID NO: 82386 - DNA, 1791 bp, Arabidopsis thaliana columbia
cccccccgtccggacgtatcgatcttgctgacccatcaattaaattttgacccaaaaggtcaaattcactataagaaaaacagaattcatttcatcaaaattccatttcacactttttctgtctgttacgattcttgcttgatttctttctaaacaaagcaaaagttgtctttttggagttgtgagcaactaattctctgaaattgaggaagagaaagcgagaaggtttttttggagtcagagacagaagaagaatttaacagattcttgtcggaaacatggatacgagtgaagcaaggaaccgtaaagttgttgcagttgaacaattcgatctcgaagtccctgagactgctcatcagattagcagcgattcatggtttcaggtagcttttgttctaacgaccggtataaacagtgcctatgtgttgggatattccgggacagtcatggttcctttgggttggattggtggtgtggttggtctcattcttgctaccgcaatctctctttacgcaaacactcttatcgccaaacttcatgagtttggtggcaaaagacacattcgttacagagatcttgcaggcttcatctatggtaaaaagatgtatcgtgttacatggggattgcaatatgtcaatcttttcatgattaattgtggcttcatcatacttgctggttcggccttaaaggctgtttatgtactttttagagatgatagtctcatgaaactgcctcacttcatcgccatcgcgggtgttgtatgcgcgattttcgcaatcggtattcctcatttatcagctcttggaatctggctaggagtttcaacaatcctcagcataatctacattattgttgcaatagttctatcagctaaagatggagtaaacaagcctgaaagagattacaacatacaaggatcatcaataaacaaactctttaccataacaggagcagctgcaaatctagttttcgcattcaacacgggaatgctcccggaaatacaggccacggtgaagcaaccggtcgttaaaaacatgatgaaggctctgtattttcaattcactgttggtgttttacctatgtacgcggttacattcatcggatattgggcttacgggtcctcgacatcgacttatctcttaaacagcgtcagtggacctgtttgggtcaaagcactcgctaacatttcagcttttctccaatctgttatctctttacatatttttgcaagtccgacttatgagtatatggacacaaagtatggagtcaaaggaagtccattggcaatgaagaatctgttgtttagaacagtagcaagaggaagctacattgcggtgagcactcttctctctgcgcttttaccgtttctcggagatttcatgagccttaccggagcgataagcacgttccctctcacattcatattagcgaatcacatgtatcttgttgctatgaatgatgagcttagtcttgtgcaaaagctatggcattggctcaatgtttgcttctttggattaatgtctcttgctgctgctattgctgctgttagactcatctctgttgactccaagaacttccatgtttttgctgatgtttgattaaaatgtcttcgacatttttaacgatgtaatctttataccaattagaaaaaatttgtaatccttttgttgttacttttattatttcaaatgaaagaaattttttataacataatatataaaaaaaagggcggccgctctagaggatccaagcttacgtacgcgtgcatgtgacgtcatagatcttctatag

SEQ ID NO: 82387 - DNA, 502 bp, Arabidopsis thaliana columbia
  unsure (1)..(502): unsure at all n locations
agaagaagaacatgttcaagccttttccaagttggtaactcaggaaggtgcacaaagccaagcgaaagagaagaagagtgtagatgatctttttgagaaccaaagcaagagtagtggatggtggagaaaaacctactgggcgttcttgaatgagccgagggaggaagagggtcgaccgaacaactacgtgtcgcaattcaaagttgctcacatcgccaaaattgcgggctcgtaatgacgctataatcaccggctaatcacatatatatctcgtgtgaaatgcgattagtcgtctgccgttgtggtttaatcaccggctaatcacatatatagtatgttggccgtgttagtatgtgaatgtgtgagtagagcatgtaacaaagggtgtacgattttaatgtaagaatgtgttttactttatatgtgtcatgtatgtatttttttggttgtgtgagggtgtaatttacttttcaatggatctccttaagtctttnccttgatg

SEQ ID NO: 82388 - DNA, 719 bp, Arabidopsis thaliana columbia
  unsure (1)..(719): unsure at all n locations
ctctatacgactcatatatggaagctgtacgcctgcagtaccggtccggattccgggtcgaccacgcgtccggacttggaaaagattaatagcaaatgggttctttaatgtcaggatgggactctcgagtaagggatcccaaatcagtgagaaggtgcaagtcgctcacaagagaagaaatcgacactttttggaaaacgaagaagaagaatgaagaagaagaacatgttcaagccttttccaagttggtaactcaggaaggtgcacaaagccaagcgaaagagaagaagagtgtagatgatctttttgagaaccaaagcaagagtagtggatggtggagaaaaacctactgggcgttcttgaatgagccgagggaggaagagggtcgaccgaacaactacgtgtcgcaattcaaagttgctcacatcgccaaaattgcgggctcgtaatgacgctataatcaccggctaatcacatatatatctcgtgtgaaatgcgattagtcgtctgccgttgtggtttaatcaccggctaatcacatatatagtatgttggccgtgttagtatgtgaatgtgtaagtagccatgtancaanggggaccggtttaatgaaaaatggggtttccttaaaagggcccgaagnattttttggtnnaagggggantccttntcnggcggaatcccnancccgggggcccaattttaangggccccccngg

SEQ ID NO: 82389 - DNA, 556 bp, Arabidopsis thaliana columbia
cggacgcgtgcgcgtacgcccacgcgtccggaagattatcaatggcgtctccatcatcgtcaccgacaacaagaatctggttccgtacagtgatcttaatcgctttaatggtggttctcttctacgttggccgtcctctctactggaagatctctgccacaatccacgacatccgccacaacaaacaatccgtcagagaaggtatttctcagatcgtacacgaagcgcagagatcagtgggatggtatcacgacgaatcggattcagggttccgagaaggtcacaacaagaaatcgggaatcgccgtctctcggaggcttcttttcgccggagatcagtgagaaattttctccgatccaaattttcgaaatatcaagttctgatggagtctcttgttataaattatatatttcatgtttttaggtcaacaattagcgtatcgttttgtgatgataatgttaaatcggttaaacaagttatggattttgtttggcataaaaaaaaaaaaaaaaaaaagggcgaccgctctagaggatccaagcttacgtacgcgtgc

SEQ ID NO: 82390 - DNA, 495 bp, Arabidopsis thaliana columbia
cggatggatcgttcttcaagcgtttgcagaaattgttagatccgttgcagcagagacttgcagatggatgccatttggcaagaaacacgagagagtgcatcttggaagctggttttagtggaggagttgaagtacagaccttttctatgtatagcttcccttggatgacaagacctcatatctatggactagcttacaactaaaactatcatctttattcaattacactaaaatgattggctttgaatgttttgattcgctgattgctgttattactaaataatatggagaaaaaatgctaattatgtgtaattaaaaagatttgattttgtggacagaatctgaagtagagaaaaacatatcttcatgttactcttatgctctgttttggtatatgagtaatttgagcttttgataagttaaaaaaaaaaaaaaaaaaaaaaaaaaaaagggcgaccgctctagaggatccaagcttacgtacgcgtgcagtcg

SEQ ID NO: 82391 - DNA, 401 bp, Arabidopsis thaliana columbia
  unsure (1)..(401): unsure at all n locations
tttttttataaactttgttttagctttaatcttcttcaaaaggtgcacaagtaggcactcgttaggacaacacacaagacaacaaagttcgaaacacacaaagattacacttctctactcagaaaacaaacttactttgttattattattaaaaaaaaagacctgatttcactcatctctaaagccaattaagaagaaaactacaagagttatattgtagtgggcaacagcttctggatgatgaaggtagtatctgatgagccggtgggggacattgttccttccgacttggtttagcttacacggcctttgctccttgaattcccttccacccgggtgtttccccttctttaattccaaagaactcccggccaaaaaaccttccccccccccncccgttt

SEQ ID NO: 82392 - DNA, 607 bp, Arabidopsis thaliana columbia
  unsure (1)..(607): unsure at all n locations
nnnnnnnnnnnnnnnnnnnnnnnnnnnnnnnnnnnnnnnnnnnnnnnnnnnnnnnnnnnnnnnnnnnnnnnccacgcgttcgcggacgcgtgggatcaagatcaccaccacaaggcaaaatctaaactctctctgcaaaatttctgctaacttcttcctcccattttcttgccatggaaatcgattccgccaccaacggaaactctgacaccgtcatgacggaatccgccgctacgatcactccgtcgccggtcgtcgtctcgtcttcgagatcgaatcaatttacggaatctctcaagcttgagcaccagctcctccgcgttcctttcgagcattacaagaagacgatccgtaccaatcaccgttctttcgagaaagaggtctcaaccattgttaacggcgtcggagaattggctgattccgattggtctaaagacgataccgtttcgcgtcttacttgccttgttactcgattacaaggcctcaaacgaaagttggaagaagggagcaatgtggagaatttgcaagcccagaggatgtcgtgctcgcatcgatcattggattcagagatgtggaaaatattactgaatggaataataccaaactg

SEQ ID NO: 82393 - DNA, 459 bp, Arabidopsis thaliana columbia
  unsure (1)..(459): unsure at all n locations
ganttgctaaagcccgggngctttttncatgnccnaacncgcccatttnctgaggtgttcccccgtttgatcacaagttgatcttatgtacccccaaacgtgctttcgttcactggtatgtgggtgagggtatggaagaaggagaattctcagaggcacgtgaggatcttgccagcattggagaaggattatgaagaggtcggtgctgaaggtggtgacgatgaagatgatgaaggagaggaatactaagaagaatgtttctaaaaactttggatttgtgtgggtttctctataatctcgtcttgtgagaatgggctcaaaactcttgggagtctttaatcgtgtgtgttttaaaacctacttctctatcttttcgtagccatgttatctctctattatctatttcctttgtgtgttaaatcgtttctgcctttctggtaatatcttatcactactatc

SEQ ID NO: 82394 - DNA, 510 bp, Arabidopsis thaliana columbia
agtccagagagctgtttgtatgatctcaaactcaaccagtgttgctgaggtgttctcccgtattgatcacaagtttgatcttatgtacgccaaacgtgctttcgttcactggtatgttggtgagggtatggaagaaggagaattctcagaggctcgtgaggatcttgcagcattggagaaggattatgaagaggtcggtgctgaaggtggtgacgatgaggatgatgaaggagaggaatactaagaagaatgtttcttaaaaattggattttgtgttgggttttctctattatctcgtgttgtgatgaatgggctcgaaactcttacgagtcttagttgtgtgtttttctaaacctatatatttctatctcttgctggtggtttgatttctattatctagttcgtttgtgtattgactcatgtttctggtaatatctttcttactatgtgataaagtaatctcaaaaactgaattttagctgggtggaaaggaaggaaaaaaaaaaagga

SEQ ID NO: 82395 - DNA, 686 bp, Arabidopsis thaliana columbia
  unsure (1)..(686): unsure at all n locations
nnnnnnnnnnnnnnnnnnnnnnnnnnnnnnnnnnnnnnnnnncggtccgggattcccggcacgccccacgcgtccgatcagatctagatctaaaagaagagcgtcttcataaacgcccttcttcttcttcgtcttcttccctgcaaatctagtttctagatcttttctttcttccgcgaaacgaaaatgagagagtgcatttcgatccacattggtcaggccggtatccaggtcggaaatgcttgctgggagctttactgtcttgaacatggcattcagcctgatggccagatgccgagtgacaagactgttggcggaggtgacgatgctttcaacaccttcttcagtgagaccggtgcagggaagcacgtcccacgtgctgtctttgttgatcttgagccaactgtgatcgacgaggtcaggactggtacttaccgtcagcttttccaccctgaacaactcatcagcggtaaagaagacgctgctaacaatttcgcccgtgggcattacaccattgggaaagagattgttgatctctgcttggaccgtatcagaaagctcgctggtaactgtacttgggctccaagggttcctgggtttaaacgtgtttggtggggggcttgacctgggnttggctttcccccctgagggtttttttcncgggaaaaccagttggttaaagttcc

SEQ ID NO: 82396 - DNA, 1761 bp, Arabidopsis thaliana columbia
  unsure (1)..(1761): unsure at all n locations
attcctttgtcgacccgcgcgatcagatctagattcagtttttttcatcaaaaaagagcgtcttcataaacgcccttcgtcttcttccctggaaatctagtttctttcttccacgaaaatgagagagtgcatttcgatccacattggtcaggctggtatccaggtcggaaatgcttgctgggagctgtactgtcttgaacatggcattcagcctgatggccagatgccgagtgacaagactgttggtggaggtgacgatgctttcaacaccttcttcagtgaaaccggtgcaggtaagcacgtcccacgtgctgtctttgttgatcttgagccaactgtgatcgacgaggtcaggactggtacttaccgtcagcttttccaccctgaacaactcatcagcggtaaagaagatgcagctaacaatttcgcccgtggtcattacaccattgggaaagagattgttgatctgtgcttggaccgtatcagaaagctcgctgataactgtactggtctccaaggattcctcgtcttcaacgctgttggtggagggactggatctggtcttggatctctcctccttgagagactttctgttgactacgggaaaaagtccaagttgggtttcacagtttacccatctccacaggtgtctacctctgtggttgagccttacaacagtgtcctctccactcactctctcttggaacacactgatgtctccatcctcctcgacaatgaagctatctatgacatctgtagacgctcccttaacattgagagacctacctacaccaacctcaaccgtctcgtctctcaggttatttcttccttgactgcttctctgaggttcgatggtgccttgaatgttgatgtaactgagttccaaaccaacttggtcccatacccaagaatccacttcatgctttccgtcctatgcaccagtcatctccgcagagaaggccttccatgagcaactctcagttgctgagatcacaaacagtgcctttgaacctgcttccatgatggcaaagtgtgacccgcgtcacggaaagtacatggcttgctgtttgatgtaccgtggtgatgtagtccccaaggatgtgaacgcagctgttggcaccatcaagaccaagcgaactattcagtttgttgactggtgtcctactggattcaagtgtggtatcaactaccagccaccaactgttgttccaggaggtgatcttgctaaagtccagagagctgtttgtatgatctcaaactccaccagtgttgctgaggtgttctcccgtattgatcacaagtttgatcttatgtacgccaaacgtgctttcgttcactggtatgtgggtgagggtatggaagaaggagaattttcagaggctcgtgaggatcttgcagcattggagaaggattatgaagaggtcggtgctgaaggtggtgacgatgaggatgatgaaggagaggaatactaagaaggttgtcggttttatgtgggatttctattatctcgtgtttgtgtgaataggctcgaaactcttacgagtcgtacttgtgttttcaaaaaccatatttctatctcttgcttgtggcggtagccatttgttctagttcgtttgtttctgataatattttcatctccaagaactgaatttaagctgggtttggtttaaaaaaaaaatataaaaaaaaacaaagggcggccgctctagaggatccaagcttacgtacgcgtgcatgcgacgtcatagtntagctatagtg

SEQ ID NO: 82397 - DNA, 695 bp, Arabidopsis thaliana columbia
  unsure (1)..(695): unsure at all n locations
aagaccgaactcatggacctgaggaaagacttaagctcctttagtgcatttagccaaccttatcggtttgttatttcacttcaacatcgagcttcctgagttgtagaactcgtatgaaatgctactgggtttgatattttacagttaaaatcatgactcgtgtttgaagtttctccaaaactgtttccttatgtatgagaatcactcgaatccttgtcttaaatcaatgtttctctcactatttatggcaatgtttttacatagatcacattaagatatttaatagacaagaatagaatctggaaactcttttcttcagaagctgttctctgatacccatcccttcttctctagctcttgtcgcaatgcctttattcgctttctattgacatcaaagtcgaagttccctttacgggatgcagatcgatattccactttcgagttcttcccaggagtgaacaagaattcaacatcgtctacnaaccccaagattggactttcatattccacatgaacgtagtcatccttcttctccacaatccgcggtgtaaatttatccgggttcaccgacttaatcacattaagaagcncttcatgnnactggcnggtcacagggggtttccttccnccaatanagtccatgggggngataaggacncgntcacnggtatcccagagnggggtacagtataggg

SEQ ID NO: 82398 - DNA, 1137 bp, Arabidopsis thaliana columbia
  unsure (1)..(1137): unsure at all n locations
ttttttagtgagagaaacattgatttaagacaaggattcgagtgattctcatacataaggaaacagttttggagaaacttcaaacacgagtcatgattttgacatcaaaacacaaacccggaaagcttcgtctgccatttttcattcttctaagccctagctcaaagctttctctctcaaatccgccatgactaaacagcacgcgaactggtctccttacgataacaatggaggaacatgtgtggccatcgctggatcggattactgtgttatcgccgccgatactcggatgtctactggttacagtattcttagtcgcgattactccaaaatccataaactagcggacagagctgttttgtcttcctctggcttccaggctgatgtgaaagctttgcagaaggttctcaaatccagacacttgatctatcaacatcagcataacaagcagatgagctgtcctgcaatggcccagcttctctccaacacgctttatttcaagcggtttttcccctactatgcctttaatgttctaggagggcttgacgaggaaggaaaagggtgtgtctttacttacgacgctgttggctcatacgagagagttggatacggtgctcaaggttctggttccacactcatcatgcctttccttgacaatcagctcaagtctccaagtcctcttttgctacctaaacaggattcaaacacgcccctttccgaagctgaagcagttgacttggttaaaactgttttcgcatctgccacagagagggatatctacactggagacaagcttgagattatgatacttaaggccgacggtatcaagaccgaactcatggacctgaggaaagactaagctcctttagtgcatttagccaaccttatcggtttgttatttcacttcaacatcgagcttcctgagttgtagaactcgtatgaaatgctactgggtttgatattttacagttaaaatcatgactcgtgtttgaagtttctccaaaactgtttccttatgtatgagaatcactcgaatccttgtcttaaatcaatgtttctctcactatttaatggcaatgtttttacataaaaaaaaaaaaaaaaaaaggccgctntagaggatccaagcttaggtag

SEQ ID NO: 82399 - DNA, 509 bp, Arabidopsis thaliana columbia
cagctctatacgactcactataggaagctggtacgcctgcaggtaccggtcccggaattcccggggccgcccacgcctccgcggtcttgaaagcattccctagctttttggaggaaactgatatctacaaacgacgtgagctactcgaggagacaagtaatttagcgggctgagcctgctccttcagctcctagtccttctcccgggattataactgaagcttcccctcgaagcggcggggctttccctgcaggaaccaaggcaaagaagagaagaccaccttgaggccctccgggaccttctcctgataagggcagtactagtcctgatatctctaagaatcagccacaagataataaacagtcaaaaggatcaaaacatgtatggctgtatgtggttatcgcggttgcttctttcgtcggtttactgattatagtagcggttatcttcttctgccggaaaagagctgtcaagagcataggtccttggaaaactggtcttagtggaca

SEQ ID NO: 82400 - DNA, 773 bp, Arabidopsis thaliana columbia
  unsure (1)..(773): unsure at all n locations
tgcnnnnnnnnnnnnnnnnnnnnnnnnnnnnnnnnnnnnnnnnnnnnnnnnnnnnnnnnnnnnnnnnnnnnnnnnnnnnnnccacgcgtccgaagatcgtgagacttcaatcttcgtatgaagttcggttaaagaagagtccaaagttatcacctttggctgttctcggctgtattaacagaaaacttggacactgtgtttcaagaaaccgtatcattcaagtaaaaaaggtagaagctattgtattccggatcaaagcaacctccagacgtttcttgaaagcattccctagctttttggaggaaactgatatctacaaacgacgtgagctactcgaggagacaagtaatttagcggctgagcctgctccttcagctcctagtccttctcccgggattataactgaagcttcacctcgaagcagcgggtctttccctgcagtaaccaatgcaaagaagagaagaccacctttagtccctcctgtaccttctcctgataagggcagtactagtcctgatatctctaagaatcagccacaagataataaacagtcaaaaggatcaaaacatgtatggctgtatgtggttatcgcggttgcttctttcgtcggtttactgattatagtagcggttatcttcttctgccggaaaagagctgtcaagagcataggtccttggaaaactggtcttagtggacaattgcagaaagcttttgttaccggggtacccaagctcaatcggtctgagcttgaaacagcgtgtgaagatttcagc

SEQ ID NO: 82401 - DNA, 613 bp, Arabidopsis thaliana columbia
  unsure (1)..(613): unsure at all n locations
nnnnnnnnnnnnnnnnnnnnnnnnnnnnnnnnnnnnnnnnnnnnnnnnnnnnnnnnnnnnnnnnnnnnnnnnnccacgcgtgcgcccacgcgtgcgcccacgcgtccggtgtattcaatgagtttatcgagattataaattaaattgttccccgggttttttgataataaaaagttacacgcttttggttaaaaatccattgcattataaaattcaattatgatacaatgccacgtcactggaccacaatgttgccgtacgttatattgttgccggagtaaggtacacgtcgtcacggtgtcaggccgtttctttaaagagttgtcacgcatttaacggcgcgtgcgtctcacgtgacactctccttgtttgttggtgatttgttcattgattacagaaccaatcgtcggtacctaccaataaccgggcgatgtggatgggcaatctcttttggattactaagcggctcaccccggtggctccactggttacccttcatcacctcgacgggggcgaaccgattttcccaaacatgacacgtgttgatgccttgaagcatctacaagtcccggcaaagctagactctgctggacttatgcaacagtcgatatgc

SEQ ID NO: 82402 - DNA, 579 bp, Arabidopsis thaliana columbia
cagctctacttcgactcactctagggaaagctggcacgcctgcaggtaccggtccggaattccacgggtcgacccacgcgttcgtccaatctgaagatcaatcataaccttaaaccatctctcataattttagtatttctattctcaccaccaaaactcgttgatacatcacaccccaactgttgttactcatgtcctacagatcgatttaccgcactcttcgaccggtactatcatcttcggtacaatcctccggtttaggaattggaggattcaggggacatctcattagccacttgcccaatgttcggctattgagctctgacacgtcatctccggtaagtgggaataaccagccagaaaatcctatccgaacggccgatggtaaagttatatccacttattggggtatacctcctactaagatcactaaaccggacggttcagcttggaagtggaattgttttcagccatgggattcatacaaaccggatgtgtccattgatgtaactaaacatcatacacccttcaatttcactgacaaattcgcatattggaccgttcaaactctgaaaatac

SEQ ID NO: 82403 - DNA, 489 bp, Arabidopsis thaliana columbia
  unsure (1)..(489): unsure at all n locations
ttgatttgaaatcaactttattttattttcccgcaagttttccaagagttaaagaccttacaatgggtataaaaatgcttacaccaagaaatttagcacccaagtctatatgcaaaacagtatactcaaccgaacttggtgacgcacctaataattggacactgaaacaatgttgtttactcaaggtgaattgatgaaacgcctgaagtaatacatgtggttcgtggatcaccactttctaggcaaacgccatgtggatcttctctcaccaacaaggccaaaacattgtgcggactccatgcctgggtcagtttggtgccggaatcccctaaagtggttgcaaatatggcatcaanccaccaagctccaggacaccagcaagttagaancccttcaggaacncatggttgaatccaaaagttgagttgngattcanggnctttngggacgttgccgcttanccnntgncgcnnaganctggncccaana

SEQ ID NO: 82404 - DNA, 609 bp, Arabidopsis thaliana columbia
  unsure (1)..(609): unsure at all n locations
nnnnnnnnnnnnnnnnnnnnnnnnnnnnnnnnnnnnnnnnnnnnnnnnnnnnnnnnnnnnnnnnnnnnnnnccacgcggtgcgagggaaaatttagtagcaaacttctcgattccttgattcgtgggaaaaagaaagtctagatttttgtggattttgattttgtgattccgtgattgtatgaacttgagccgttttgcttcgagattaagaatggcggaagaaatctcaaagacgaaggtgggatcttcttctactgcttcggtggctgattcatctgctgctgcgtcggctgcaacgaatgcggccaaatcaagatggaaaattttgtggcctaattcgctccggtggattcctacgtccaccgattacatcatcgccgccgagaaacgtcttctctccatcctcaagacgccttatgtacaagagcaagtcagtattggttcaggaccaccaggttctaaaatcaggtggtttaggtctacgagcaatgagtcacgttacatcaacactgttacatttgatgccaaggagggagctcctacactcgtcatggttcatggttatggtgcttctcaagggtttttcttccgtaattttgatgctcttg

SEQ ID NO: 82405 - DNA, 520 bp, Arabidopsis thaliana columbia
  unsure (1)..(520): unsure at all n locations
ttttttgacaacctttcaacgtaggtatagattacataaatcccccaataaatgtctgttccaaaaaaaattggggttacaatattctctcagaactagagttccaaactcccttttttttcctctgtacaaaatatcatcaaatggttctaccacacttgatcgcataaatgtttagtaagaataatatatgcaatccaatctcttgcccaacctacccaactttgcaacttcacatcaaatccctttcacgcactttctttaagcttccaccagagaaatagagaccagaaccgaccaccagaattaccgtacctaacctggagcaatacggtttcttttgggaagtttggggtaatggccccaaatacatcacaacacaactcccataatttcagngggaggccccgggttanagggnnccnccangggggaattacanatcaaccccngggaataangggtnaaaagncccatttccaancttcccggncncagaangnttggggcttgaagnngg

SEQ ID NO: 82406 - DNA, 481 bp, Arabidopsis thaliana columbia
cggacgcgtgggctctctttggtcaaaaaccctagatctctccctctctctctctctctctctccatctcttgtctttgccttttacgaagcttcccttcccttagtttatacattactctcagctctctttatttcactcagcttcacgttgaagacgagtttctctatttgccagatctgttatctttcacatttctgatctgtttgaagaaagctatgacttgtgtttgataaagagagaagcaaaagaaggaacagtttttatataaagatatttgctttatttgtttgttcttaattgttgccacgaaaatggcaatgccaccacctggaaatgttactactccgtctgagaaattgcagtttcctcctccggcaaattggatcccagacgagcgagatgggtttatctcctggcttcgtgcggagttcgctgcggctaacgcgatcatcgattcgctttgtcagcatctacaagc

SEQ ID NO: 82407 - DNA, 500 bp, Arabidopsis thaliana columbia
gggacccggcccccccctgcggtaggcgggatccctaagcaggggccgcccttgggggccgcggcttccttcccctaagttaatccattactctcagctctctttatttcactcagcttcacgttgaagacgagtttctctatttgccagatctgttatctttcacatttctgatctgtttgaagaaagctatgacttgtgtttgataaagagagaagcaaaaaaaggaacagtttttatataaagatatttgctttatttgtttgttcttaattgttgccacgaaaatggcaatgccaccacctggaaatgttactactccgtctgagaaattgcagtttcctcctccggcaaattggatcccagacgagcgagatgggtttatctcctggcttcgtgcggagttcgctgcggctaacgcgatcatcgattcgctttgtcagcatctacaagcggttggggatcacaacgagtacgaatccgtgatcggaagcattcat

SEQ ID NO: 82408 - DNA, 979 bp, Arabidopsis thaliana columbia
ctctctctctctctctccatctcttgtctttgccttttacgaagcttcccttcccttagtttatacattactctcagctctctttatttcactcagcttcacgttgaagacgagtttctctatttgccagatctgttatctttcacatttctggtgattgcttctctaatttcgttctgggttttactgcggccgcctgaaatttacctcatttcttcgtgggttttatctgaattccgttaattcccaagttctagtgtatgatctcgttgaaatcgagttaaaaatctgatctttactcttgattctgcagatctgtttgaagaaagctatgacttgtgtttgataaagagagaagcaaaaaaaggaacagtttttatataaagatatttgctttatttgtttgttcttaattgttgccacgaaaatggcaatgccaccacctggaaatgttactactccgtctgagaaattgcagtttcctcctccggcaaattggatcccagacgagcgagatgggtttatctcctggcttcgtgcggagttcgctgcggctaacgcgatcatcgattcgctttgtcagcatctacaagcggttggggatcacaacgagtacgaatccgtgatcggaagcattcatcatcgtcgcttagcctggtctcaagtgcttactatgcagcagtttttcccagttgcagatgtttcttacaatcttcagcagattgcttggaaaaggcaacagcaaatgccacctcaaaggcattacaattctgatcaagttgggaaatttggagcaaggagatcagggcctgggtttaacaagcatcatggtggtggtgggggttacagaggagctgattcgatggcgagaaatgggcataatttcaatggcgttaacagtgatcgtgttgagcatcgggaggaagctaagttggcaagtgatgttaaggcattgtctgttgcagaagagaagagagat

SEQ ID NO: 82409 - DNA, 528 bp, Arabidopsis thaliana columbia
  unsure (1)..(528): unsure at all n locations
nnnnnnnnnnnnnnnnnnnnnnnnnnnnnnnnnnnnnnnnnnnnnnnnnnnnnnnnnnnnnnnnnnnnncccacgcgtccgcgccacgcggccgatcaagatgggagtgatgagtttgagcaagacgatggtggtggtggtattacaggtgatgatattgttgggacaagagattggtaaagtgtcgtcgactctatacaaagttggggacttggacgcttggggcatcccaattgatgctaaagtctattccaaatggcccaaatctcactctttcaagatcggtgactccctcttgttcttgtacccaccaagcgaagactcactgattcaagtgacgccctccaatttcaagagctgcaacaccaaagacccaatcttgtacatgaacgacggcaactctctcttcaacctcacccaaaacggaaccctatacttcacaagtgcaaaccccggccactgtaccaagtaccagaagctcctagtctccgtcggcacctactccgccgaagcagaggccttgtctcc

SEQ ID NO: 82410 - DNA, 657 bp, Arabidopsis thaliana columbia
  unsure (1)..(657): unsure at all n locations
aaaagtggggttggccttggggcncaatggngaaagtnttcaanngcnaatttacttttnanganggnncccctttggtntggnccaccaagggaggcttactgnttaagnncgccnccaaattnaaggggtgaacaccaaaggcccaatcttggacatggacgacggcaactctctcttcaacctcacccaaaacggaaccctatacttcacaagtgcaaaccccggccactgtaccaagtaccagaagctcctagtctccgtcggcacctactccgccgaagcagaggccttgtctccgtcttctgccgccgacgctccctcttaccaaaacgccttcgggtccattcctctctctcagaaatcgtctgcttcctcctcgctcatttctgctttctccactgtcgctgcttcgctggcttgcgctgtcgtcggtgcaatcatgtgatggaatttttgaatatctttatttattaaagcaaacagtcattgcttcttttttgttttgtttttgttatcatctcttaattatttattcttcttcattggctcccaaaaaaaaaaaaaaaaaaaaaaccaaagnnnnnnnnnnnnnnnnnnnnnnnnnnnnnnnnnnnnnnnnnnnnnnnnnnnnnnnnnnnnnnnnnnnnnnnnnnn

SEQ ID NO: 82411 - DNA, 686 bp, Arabidopsis thaliana columbia
  unsure (1)..(686): unsure at all n locations
aggttaaaggtagattttngtagcgatnttggcatttntnttttaagcctaaggccctgtcttttgttatagatatccaagcttataaaacggaaaaggttcaggtttactaaatggattctctcccctttatctctgttggtgttatctactcatgctacatctatattagtgatggcttgtttttatgtatgtgaagtgctccgctcccctatataggtatgttgaggatgcaaaggtggcaagttctactttgatctatttttctcgaaattttcatctacagtcctcttttcattggagatgtctctatttctggttctatgctctgcattttcctatggtttaaatgctaatcacttcggctcgagatctactctttctacatgaattcattatcttcatataggaatttggatgatgctaggacgattctgtttcgacctgttcgcctagatttattggcaacgagggatggatgtaatcagcttttcttcccttatctgttttccctttctggttatgtaatctgcatcttctctatggtaatctcttctgcttcagatgaaatcattatcttcacataggagtttgtcttcacataggagtttggatgttgcagtggaagttctgtttcggcctgcttgcctacatcgccctatatctgttacatcatgagtttatga

SEQ ID NO: 82412 - DNA, 753 bp, Arabidopsis thaliana columbia
  unsure (1)..(753): unsure at all n locations
tccnnnnnnnnnnnnnnnnnnnnnnnnnnnnnnnnnnnnnnnnnnnnnnnnnnnnnnnnnnnnnnnnnnnnnnnccacgcgtccgggctggtaaaggtgggaaagggcttctagctgcgaagacgacggcagcagctgcaaacaaagacagtgttaagaagaaatccatctctcgctcttctcgtgctggtattcagtttccagtgggtcgtattcatcgtcaactcaagcaaagagtttcagcacatggaagagttggtgccactgctgctgtttacactgcatcaattctagaatacttgactgctgaagtactcgagttagctggaaatgcgagcaaggatctcaaagtgaagagaattacaccaagacatttgcagcttgcaatcagaggagatgaggaacttgacactctcatcaaaggaaccattgcaggaggaggtgtgatccctcacatccacaagtcccttgtcaacaaagtcaccaaggattgagtttcgctctctgagtcctaagtctctattatactatgtgctcttttctagacgccctcatgtgtatatgggttcattgtatctcttaggtctctcgttttagactcatactcttgttattttgctaatgcttacatgattgaggataaaaaaaaaaaaaaaaaaaaaaacaaaaagnnnnnnnnnnnnnnnnnnnnnnnnnnnnnnnnnnnnnnnnnnnnnnnnnnnnnnnnnnnnnnnnnnnnnnnnnntacaatcc

SEQ ID NO: 82413 - DNA, 1033 bp, Arabidopsis thaliana columbia
  unsure (1)..(1033): unsure at all n locations
cnnnnnnnnnnnnnnnnnnnnnnnnnnnnnnnnnnnnnnnnnnnnnnnnnnnnnnnnnnnnnnnnnnnnnnnnccacgcgtccgcctctctctccaatggcttccttatccttcgtttcctcttctcaccttacgctacgcactccttctattgccctacgcagcactggctcttctcctcgaacctccgtttcattctccgtcaaggctcaatccgtcgcgctntcacaggacgatttgaagaagctcgcggcggagaaagctgtggaggcaattaaacctgggatggttctagggctcggaaccggatccaccgcangctntcgctgggttgatcagatcggggaaaactactctctttccggtgaactctacgatanttgtcggtatcccaacgtcgaaacgaacggagggaacaagcacgggtcgttagggaattcctcttgttgggttagatacacatccgagaatcgatctcgctattgacggagcagacgaggactcggtggaagtggattagctatgccggtggaagttgttcaattctgctggaactttaatttgattagattgcaagacctcttcaaggaatttggatgtgaatcaaagcttagagttgatggtgatggcaagccttatgtgactgataacagtaattacattattgatttgtattttaagactcctttgaaggatggattcgctgcggctaaagagattgggaagtttcaaggagtggtggagcatggtctgtttctcggaatggctacttctgtcattatcgctggaaagaatggcgttgaagttatgaccaagtgaggttaaaagttcaatctttctcttcttctttgattgacaaatttttctcctttgtaaaattatcaattgagtttttatgtgagatcatttccttttcgtgaattcgacaaaatcagnnnnnnnnnnnnnnnnnnnnnnnnnnnnnnnnnnnnnnnnnnnnnnnnnnnnnnnnnnnnnnnnnnnnnnnnnnnnnnnnnnnnnnnnnnnnnnnnnn

SEQ ID NO: 82414 - DNA, 1032 bp, Arabidopsis thaliana columbia
tctcaatcctctctctccaatggcttccttatccttcgtttcctcttctcaccttacgctacgcactccttctattgccctacgcagcactggctcttctcctcgaacctccgtttcattctccgtcaaggctcaatccgtcgcgctttcacaggacgatttgaagaagctcgcggcggagaaagctgtggaggcaattaaacctgggatggttctagggctcggaaccggatccaccgcagctttcgctgttgatcagatcgggaaactactctcttccggtgaactctacgatattgtcggtatcccaacgtcgaaacgaacggaggaacaagcacgggtcgttagggattcctcttgttgggttagatacacatccgagaatcgatctcgctattgacggagcagacgaggtagatccgaatcttgatttagtcaaaggtcgtggaggggctcttctccgtgagaaaatggtggaagctgtggctgacaagtttattgttgtggctgatgataccaaactcgttacagggactcggtggaagtggattagctatgccggtggaagttgtccaattcggctggaactttaatttgattagattgcaagacctcttcaaggaatttggatgtgaatcaaagcttagagttggtggtgatggcaagccttatgtggctgataacagtgattacattattggtttgtattttaagactcctttgaaggatggattcgttgcggctaaagagattggaaagtttcaaggagtggtggagcatggtctgtttctcggaatggctacttctgtcattatcgctggaaagaatggcgttgaagttatgtccaagtgaggttaaaagttcgatctgtctcttcttctttgattggcgaatttttctccccccaaaatttccagggggttttgtggaaaaaaaaaaaaaaacaaatagggttggcgctttagattataggatccgggccaggtacgcgtaaatgcaaagtcggagtgttcaaaggaacgaaattcaccc

SEQ ID NO: 82415 - DNA, 994 bp, Arabidopsis thaliana columbia
  unsure (1)..(994): unsure at all n locations
nnnnnnnnnnnnnnnnnnnnnnnnnnnnnnnnnnnnnnnnnnnnnnnnnnnnnnnnnnnnnnnnnnnnnctcgcgggtcgacgccacgcgcccgtccgctgcgagatgacgacagaaggggatcgaaacaaaaaataattaagagagaaaaaaacaaaaaacattttccatctctctctctctctctctcgcctgcttcaagaaatggatcggcaaagttccgatgacatcatgaaatttctcgacggcatggctagttccgacgatgttctttttggcttcctcgacgaaggaaaccactcaccgaagtatctagcctcctccgagaagctggctatgattgcgtcatttccaaatctaagtggagaagctctcatgagatccctgcaggtgagcatgaatacttggaggtcgtggacaaatcggtttcaaagaaaggcgagatccgggtggtgatcgaactatgttttagggcggagtttgagatggcgagaggcagtgaagagtacaagcgactcatcggaatgttaccggaagtgtatgtcgggaaaacggagaggctaaaatcattaataaagatattgtgcaccgcagcgaagaagtgtatgaaagacaagaagatgcacatgggtccttggagaaaacacaaatacatgcaggctaaatggtttggaacttgtgagagaaaatctgtgtcgccagtatccgaaactgaggagaatatgtttccggtggcaaagcagagggtttctatgttgaattatggtctttttggtgctggaataggccgtccgaccgttgtagcggttgtgtgaaacatctatatagacgtacgaatacgataagttaggaggaaataaagtgaaatgagtttcactttgaaattttgcatgatattgtctcagttagaattttgtgtgtccaaaacagggtaatttctgggactattatggtatacaaagcggtattttaatnnnnnnnnnnnnnnnnnnnn

SEQ ID NO: 82416 - DNA, 476 bp, Arabidopsis thaliana columbia
gtccgaaaaaataattaagagagaaaaaaacaaaaaacattttccatctctctctctctctctctcgcctgcttcaagaaatggatcggcaaagttccgatgacatcatgaaatttctcgacggcatggctagctccgacgatgttctttttggcttcctcgacgaaggaaaccactcaccggaggattataacttcgccgccggcgacgaatccgaagttgacaacgataccaccgattgtaattcagaagagaacagaaaattttggcaagaacacgaacaacttctccaggcgacactgtataggacaagttcaattgagacaaagataagacaagcaactaaggaagcgttgaaagtagttagatcaaagggtttggtatgtgtctgccggagaccggttaccgacggttgtcgtagctgtttacgcggcgaagtatctagcctcctccgagaagctggctatgattgcgtc

SEQ ID NO: 82417 - DNA, 643 bp, Arabidopsis thaliana columbia
  unsure (1)..(643): unsure at all n locations
aaaaagggggcgggggacgcgtaacattctctctctatctgtaattttttttgtttttggatcgaaacctgaaaagagcgaaagtggctggatgattgagcggggttgcgtcacgaatcatgggtggaaacggcgtcgttgcccgatccgtcggttcttctcctccgtcaacgcgccggaatgggtctccccgtcggcaaacacatcctccccgataagccgctatcggtaaacgacgagctgatgtgggacaacgggactgcgtttccagagccttgcatagatcggattgctgattccgtcggaaagtatgaagcattggcatggttgagtggcggattagggttctttgttggtctcggtctgctcgctgttttgaacggcaaagcttctaaggttcctttacaccgagagtgtatccatntgacaacctgagagttgagctttgnngaganccattagagnccccatctaaagtaatcttcttatnaaaaacaggaagcgtgtttcttcaactgnttttgnccttaaaaatgtttgtngtntcctnctaaaacctttaaggcaaaagggttaaaaanaggcttttttttanaaaatcgngttgncccgaaaaaanaagtncccgtnggnnnnccctnaa

SEQ ID NO: 82418 - DNA, 780 bp, Arabidopsis thaliana columbia
ggggttccgggaaatttacccggggggtcgcaccccaacggggtccaggtttttgatttggacttgtgggattgggacacctgtaaaaagagcccaaaacgaaaatggctggaagattgagcggtgttgcgtcacgaatcatgggtggaaacggcgtcgttgcccgatccgtcggttcttctctccgtcaacgcgccggaatgggtctccccgtcggcaaacacatcgtccccgataagccgctatcggtaaacgacgagctgatgtgggacaacgggactgcgtttccagagccttgcatagatcggattgctgataccgtcggaaagtatgaagcattggcatggttgagtggcggattagggttctttgttggtctcggtctgctcgctgttttgaacgacaaagcttctaaggttccatttacaccgagagtgtatccatatgacaacctgagagttgagcttggaggagagccatagagacccatctaagtgatctgctcatcaaaacaggaagcgtgttttcttcactgctttgttctttaaaatgtttgttgtttcctgcttagaacttgaagacaaaagaataaaaagaagactttgtttttattatatgcgttgtctgtgtaattaacagtgtccagtgagagagatccataatataagacctctggttcaggaaatcatgagttgtgatttgtaaaaaacaaatcgaaagagtaggtcggccgctctagaggatcccagcttacgtacgcgtgcatgcgacgtggtagct

SEQ ID NO: 82419 - DNA, 895 bp, Arabidopsis thaliana columbia
ctgcaggaaccgggccggccgggtcggcccacgccgtccgtttactcttctccatcaggggtccgatcccatctccaattttaaaccctagaaatcaatctcaaaagcaagcgtgcttcattaatggcgagcttcattctctccaggtcattactcgttctactcctgtctctcaccgcattactctccagcatctcgatttcggaagctacctcatcgttctcgttcacaagctccggtaaaaatgcgagctttgagtccgaagactttgccctgtacggcgacgctaagctcgtcgacggcggatcttcgattcagctgactgactcagtgagtcacggtggtgggcgagtcatctataagaaacccattgagtccatgaacaatataaaattcgagtatttcaccggattctctactttcttctctttctcgatttctcctagtcgtggtgggagactcggatttgtagtgtttcctgttaatgaaacgtttaatccctcttttttcaagaaaattccatcctttaacgtttccccaaattggaaatttctatttccccgtatttgttgagggccctccgtgtcctaaaagatttcaatttccccatccccaaacttgaaaaaaccagaaaggtttttttcccccttaaattaataccacactgtggccaactcctaaaaccccgtaaaaaaacaaaaagcttaaaccgttctccttgatggcgacccattttctccccacattttaaaaagaaaaattcttgtcctctactccgtagggaaattaattcctttttgaattaaaaagaacctccctttgacctcttcccccctcttagaccccttaaaaggacacttaagagagccctaaaaacacattgggtggggggttc

SEQ ID NO: 82420 - DNA, 499 bp, Arabidopsis thaliana columbia
  unsure (1)..(499): unsure at all n locations
nnnnnnnnnnnnnnnnnnnnnnnnnnnnnnnnnnnnnnnnnnnnnnnnnnnnnnnnnnnnnnnnnnnnnnnccacgcgtgcgcccacgcgtccgccgcaattagctcagattgcgaaacaggttcagaagttaaccggagctaagaatgttcgggttaagacggttattgatgcgagtcttgtggctggttttacgattcggtatggtgaatccggttcgaagcttattgatatgagtgtgaagaaacagcttgaagatattgcttctcagcttgaacttggtgagattcaattagctacttgagatttgggaaaaattgtataagagaaaaatttgagaatcttttttttttgtgcaagtttaattttttttctcctcatcttctttctctattaatcaatcatataatatacagtactgatgatataataatgattctgagtttattatctttgtaattgttaaatttagtgaattcgaatagtatgtttgcggatt

SEQ ID NO: 82421 - DNA, 1039 bp, Arabidopsis thaliana columbia
  unsure (1)..(1039): unsure at all n locations
tggtcacgcctgcaggtaccgggccggaatacccgggtcgagccacgcgctccgcaaatctctctttctctcaaactctctcaacaacaacaatggcgtctcttcaacaaactctattctctcttcaatccaaactcccaccatcctccttccaaatcgccagatctctcccactccgaaaaaccttcccaatccgaatcaacaacggtggaaacgccgccggagcaagaatgtcagccaccgcagcatcaagctacgcgatggcattagcagacgtcgcgaaaagaaacgacacaatggaattaacagtcacagacatcgagaagctcgaacaagtcttctcagatccacaagtactaaacttcttcgcgaatccaacaatcaccgtcgagaagaaacgtcaagtcatcgacgacatagtgaaatcgtcgtctcttcaatctcacacatctaacttcctcaacgtcctcgtcgacgcgaatcggatcaatatcgtgacggagatcgttaaggagtttgagttggtttacaataagctaacggatacacaattggcggaggttaggtcggtggtgaaattggaagcgccgcaattagctcagattgcgaaacaggttcagaagttaaccggagctaagaatgttcgggttaagacggttattgatgcgagtcttgtggctggttttacgattcggtatggtgaatccggttcgaagcttattgatatgagtgtgaagaaacagcttgaagatattgcttctcagcttgaacttggtgagattcaattagctacttgagatttgggaaaaattgtataagagaaaaatttgagaatcttttttttttgtgcaagtttaattttttttctcctcatcttctttctctattaatcaatcatataatatacagtactgatgatataataatgattctgagtttattatcaaaaaaaaaaaaaaaaagnnnnnnnnnnnnnnnnnnnnnnnnnnnnnnnnnnnnnnnnnnnnnnnnnnnnnnnnnnnnnnnnnncagctcaatt

SEQ ID NO: 82422 - DNA, 769 bp, Arabidopsis thaliana columbia
  unsure (1)..(769): unsure at all n locations
nnnnnnnnnnnnnnnnnnnnnnnnnnnnnnnnnnnnnnnnnnnnnnnnnnnnnnnnnnnnnnnnnnnnnnnnnnnnnnnnnnnccacgcgtgcggccacgcgtccgatcgtgatcttaaagctagcaacattcttttggaccaagaaatgaatccgaaaatcgcagattttggattagctaaactctttgactcaggccaaaccatgacacatcgattcacaagcaggattgcaggaacttacggatatatggctccggaatacgcaatgcatggacaattctctgtgaaaacagatgttttcagcttcggtgtattagtcattgagatcattacaggtaaaagaaacaacaatggtggatcgaatggtgacgaagatgcagaagatcttcttagttgggtgtggagaagctggagagaagacactatactaagcgtgatcgatccgagtttaaccgcaggatcaagaaatgagatcttgagatgcatacacattggtcttttatgtgtgcaagaaagtgcagcgactagaccaacaatggctacggtttctctcatgctcaatagctattcttttaccctcccgacgcctttgaggcctgcgtttgtgttggagagtgtcgtcataccttcaaatgtttcttcttcaacggaagggttacaaatgtcgtcaaatgatgttactgtttctgagttttctcctcgttaatctgtaaatgttttgattcttctctgaaaacctttgaaatgggttttgtttgtgtgatttt

SEQ ID NO: 82423 - DNA, 838 bp, Arabidopsis thaliana columbia
  unsure (1)..(838): unsure at all n locations
ctttatagctcctctctatcgtctcgtctctataaataaacgagaagctcacaaattccacaaaaatccactctaactatgaaacaattagggttttgaaatttacctaaatctctccgtaatcatcgatcaaaacgatgctcgagtgtcaatcaatgatggagaaattatcaccgttcgtagacgtcgcctctctggaaatcgagtctctgcgaagaatcaaacgcccgaaacgcttctctgaagaagaatcagaagaaaccgagaatacgacgaattcatcaaacgcggtattcggattccctaacttaccagaagaaccgaatcgcgatatggatcaaagcgttttgtgcagaatctgcgttcgattaccagatgggagaagaatacagagaagtttcttaaagagtgaatctgttcagcttctttggtcgttttgttattcgcagattggtgatgaatcttctgagagaaagcggcgttttaaattgattcaagggtttcctggggattataagaatctttattttggatctaatactacttttgaacaatctgggcttgctaattccttggtttctgttacttggctctgaagaatcttctttcgatctgtaattagaaaaataatttctttcttctaccaagtttatgtttactcaatttctcgaatttgtacttggaaattgcaaatttcatttggttttcttgaatcgttgttagatatttccgatcaaatcgtttttaaaaaaaaaaaaaaaaagnnnnnnnnnnnnnnnnnnnnnnnnnnnnnnnnnnnnnnnnnnnnnnnnnnnnnnnnnnnnnnnnnnnnnnnnnn

SEQ ID NO: 82424 - DNA, 549 bp, Arabidopsis thaliana columbia
gttaataacattttcaatctctattatgaacaagaatcacatcacaacttggacgatcaccggtaactaaaaccatcaccaggctatgttacacagtgtggcttttgtaaagacacagaaacatatgatttattttaaaaaaacacttcacagttccaaagattcctacacatagtaaacgatcgaaaaacatgaacaaaccaaaaaaggataacttacaatctacattgagatcgaatcagaatcagtttctttcatcagaagccgaaatgcttgaagttgtggtacctgaaactttaaacattgatttcacctagacgcatcagcttcttgcttaactttagccaattgtgttgccggattctgtttctctgtacctccattgttcttagtcgtagtcgtcgtagggagtagtagtagtatcagagctctctgtttctttcacagttaggcaccatttgatgcaggactcagttttgggtttctgatcaacgggagcttctttaaggttaggggacaaccgatcttgccttctccttgggcatcaag

SEQ ID NO: 82425 - DNA, 445 bp, Arabidopsis thaliana columbia
gacaccaaaccaaattaacaaagactacatgatttcgtttatgcttttgggtctaagctacagtgtttcgtttccacacgtctaaaatcacatcaacttgttgactagtctttaaagtcgaaacaaaactgagcaatactgtcaaatagtgtgtgggaaatggaacgaacatgtttttggacaaaacggtgatgcgggacttaggagggaactggttcaagcgtggcctgctcattgccactcaccgtttaagtttgactgccacaatttgaccattccatcacttccagtgctagctaaagtcatgccactcatgtcccattccatttgccaaacctcgccttgatggccagaaagcgaggagaccttctttactggaagccttccttcaagatcaggagctagaccaacatgccatattcctatgcctttatgagttgcaacg

SEQ ID NO: 82426 - DNA, 558 bp, Arabidopsis thaliana columbia
tgatacgtcagctctatacgactcactatagggaaagctggtacgcctgcaggtacccggtccgaatttccggggtcgacccacgcgtgccgcagcggcaaaaaagttctgaaaatgcagtttctcgagtatcatttggtgcagatcataaaagagctgaggtgatgggtaaaccaatggagaacagagaccaggtgaggcaaacagaatcagctgagaagagtcaccgcaaggaaaatgtgaccaagagtgagaaaccaagggatcaagaaggggtaaagaagactgaagcaaaggataaagacagaaataaagagaagaaagaggaaaaaacagagtcgataaataaaactcgtcaggagaaaccaaaattgatacgagggcccaagttagaggaaagagaaaaggactctccggatttaagaaattgcaagctgcctgacgtttcacggacaagcatcaagaaccttcacaccgagggaaatcttggcaaacggaaggatcatatgacaaatggattcctgtatgaaaatggaaccacgccacacaagttacaga

SEQ ID NO: 82427 - DNA, 537 bp, Arabidopsis thaliana columbia
cggatcgagatgtatggatccatggatctatgtgtctatatagatcctgttcctggattaacgaaaatgtgcaaaagctctatttgcctctgccattctatgagtctcttcctttttgcgtatggcatcgccactccctttggcagcatccactaattcggaacttaatttgaaagccatatttcgacccggacgttttcgggatgcccctaataaccaacgaatggcaagtgcttttccttgcgtggatcctatttcaatgggaacttgatgagttgacccgcctacacgtcttgcttttactgctatatcgggagttactccacgtattgcttgacgtaaaacagatagtggatttgtttctgtcttttgttgaatctttttcaaggctcgatagataattttgataagccaatgatttttttccgtggtttcagaatacgggtaaccaacatgttaactaatcggttacgataaattggatcggattttgcagttttttctcctgcagcaccggcgcgaatcatcgtcaagggg

SEQ ID NO: 82428 - DNA, 351 bp, Arabidopsis thaliana columbia
attgaaagcgattttaatctttttactctggtggcttcttgtattgccaactccttaacacgagctagagtttgttaattctgtttattcataaacggacaaagcgaaacaagtgagtagagccacacgacgactttggcattgtccagtgatggctgcttcaagtcttagtctgttgtgaaggtttccacattcctggtatctcaacaccatgaggaccaattctgttacgtgatatgaaattcagaactagattcgcaaactccttcggtacatcttcctgtatggcatgtccggtgtgtttgaccaccaatcatctgaaactttccttgcatttgaccaattgtgagg

SEQ ID NO: 82429 - DNA, 558 bp, Arabidopsis thaliana columbia
  unsure (1)..(558): unsure at all n locations
atgacgtntnatgaaancgancgnaacttggaaccttcaagagcggccgctacaacagcttctattccttccaggttatacacgttaaatgctccaactgcatatccacctttttctgcattcagaagcagctcttttgtcgaccgtcctgctaccactgaccaagacttcacaacttctgcaagcgctgtgctgttaccaacattaccagggaaaacaatgtaggggacccctggatgtctactttctggacctaacttccatactggaacaccagcaagggcttgaccaatcacaagtgcacgtcgtgctttcagggctttcgttgctgtgtctgatgacgtaattccacccttagcaagaatataacgaggtctgggtcgatatctggctcactactttcaaccagagcggagtcacttttgctggtaaaatcaagactttccgaagatgttttnccgggaagggttaaggatggccaaattagggnccctgaancccgnggaaanattgggnaannaaaagggcttnnggnttnnnaanccccncnnanggntt

SEQ ID NO: 82430 - DNA, 574 bp, Arabidopsis thaliana columbia
  unsure (1)..(574): unsure at all n locations
nnnnnnnnnncnnnnnnnnnnnnnnnnnnnnnnnnnnnnnnnnnnnnnnnnnnnnnnnnnnnnnnnnnnnnnnnnnnnnnnnccacgcgtccgcccacgcgtccgcggacgcgtgggattgatttgtctactccaaattcgcaagaaaacgtgaataaatttgagaaatcacagaattatttgatattttgtaaattaactaattattgatatagaagaacaaattaatacaatggactaatgtcatagagcaatttttttttgctaaacttcaggatttaactcattcttcttcttgttcaagtggttgctgattctgaaatctcttcttcaataacttaggtcttggtttcataggcttcaagtacttagattgaaatctaaccatctctttcaaaacactaatcagcttcctctctatttcttcaccgtcaggttcaatagctcctaagcaccgtgccacagcctccgccgtagttacacatcctccgaatggttccttccttagcacaagctctgaatcgtagatggttcctccactcactgatgcgtctatttccgtatccaaacacac

SEQ ID NO: 82431 - DNA, 470 bp, Arabidopsis thaliana columbia
ataccttgaagacctccttccaagcaaacttgaatggcttcttcgagcgagtttcttctctcgtcattgtgaatctcgtttcccgcatcagtcagaaagaaaacagggtaagtgctctgcagttccctaacaagcttagctgcatctggttggaaacttgagaagattactggtctggcttttagcataattagagaccacctgtagtactgatctcaggatatggacaagaaactctcgttcatagacggtctgatcatcaaatttcaactcgatattgaacccaagagtttgttcaacttgttcaaaagcttcttgcaacgtacaaagagaatcatccaaatcaacgtcccatttcaaaaccttcccttctttagatttcctcatcagtgtcttccctattttctcagtttccttctgaggtccataaaggagaaactcagacagactcagatccgtcactctactct

SEQ ID NO: 82432 - DNA, 739 bp, Arabidopsis thaliana columbia
  unsure (1)..(739): unsure at all n locations
gctttcgttnnnnnnnnnnnnnnnnnnnnnnnnnnnnnnnnnnnnnnnnnnnnnnnnnnnnnnnnnnnnnnnnnnncttttttttttttttttttgtaaaaagaaataaatttataattatttacaattccaactattgggtaatacacccagaataataattaaatcaataagaaaatcaaaccctaaaaagaaacttgggataaaagaaaacgaaaaaacagagatatcaatgttgtatcaactgagagagaagcttgagaagaaaagaaatctccttctgtgaaaactcaggtcttgtaatggcaacatcatcatccttggaaggtgatggtaatggtgatgatgatggtggtggtcttatcatcatgcgtgtcgtggactctataatctcctcaacaaaatctacaatcactccatcgatccccatcacatattgcatgtacactgcctctccgacattgttgagtttgccgtatgtgaggagagagaggttagattctttgatcttgctaatggctgctgggttcctgaacactccttttacctctgaaacaataccttgaagacctccttccaagcaaacttgaatggcttcttcgagcgagtttcttctctcgtcattgtgaatctcgtttcccgcatcagtcacaaagcggacgcttgggtcgacccgggaaatttggaccggtccctgcaagcgtaccaacttttcctatacgaggtcgtttttaacttg

SEQ ID NO: 82433 - DNA, 546 bp, Arabidopsis thaliana columbia
  unsure (1)..(546): unsure at all n locations
atgatctnnnnnnnnnnnnnnnnnnnnnnnnnnnnnnnnnnnnnnnnnnnnnnnnnnnnnnnnnnnnnnnnnnnnnnnnnnnccacgcgtccgggacaatgatcggcatgctcattcgatttgacagtaacccaggagtaactccagaatggctaggcagtgcattgatcgctgttgctattgctactttcataagtctgtccatggtatacctgctggcctatattcatctctccggtgcaaaaaagtcgattgtcacagcattatgcattatcactgccctctctcttgctcttgtatcttctggtgttcttcctgcatttactgaggatactgcaagagcagtaaatgtagtacatgttgtggatacaagcgggcaagatcaagtggcgtttatatcactattctcaaacactcctggaaacctaaacatggaagcagagcaaatcaaagaagggttcagatgtggtagagagaataagattgattttgtcagttttaaacctaaatccaatggggtgacaaaaaggacccagaggtggttgg

SEQ ID NO: 82434 - DNA, 1298 bp, Arabidopsis thaliana columbia
acaagaagttataaaccaatacatagaagaaaacttccaaccccaaaaaatgatgaagggtgccaagttttcatctcttcttgtgcttttctttatttttccgatcgcatttgctcaactgagagtcgggttttatagtcaatcatgccctcaagccgagactatcgtacgcaatctggtgcgccaacggtttggtgttaccccaaccgttaccgccgctttgctccgtatgcatttccacgactgtttcgttaagggctgtgacgcttctctcctcattgattcaaccaattccgagaaaactgctggaccaaacggaagcgtcagggaatttgacctgatagaccggatcaaggctcagctagaagctgcatgcccttccacagtctcatgtgctgacatcgtcacattggccacacgtgactcggtggccttagccggaggcccaagctacagcatccccacgggaaggcgtgacggtagggtctcaaacaatcttgatgtaaccttaccgggtccaacgatctccgtctctggagccgtgagtttattcacgaacaaagggatgaacacgttcgatgcagtagctcttttgggtgcacacactgttggtcaaggaaattgtggtctctttagtgacagaatcactagcttccaaggaactggacgaccggacccgtccatggaccccgctttggttaccagcctaaggaacacatgcagaaatagcgcgacggcggcactagaccagtcgagtccattgagattcgacaaccagttcttcaagcaaatccgtaaaaggagaggagtgttgcaagttgaccaacgcctcgcatccgacccacagactcgtgggattgtggctcggtatgctaataacaacgccttcttcaagcgtcagttcgttagagcaatggtgaagatgggagcagttgatgtgcttactggtcgtaacggtgagatcagaaggaactgcaggagattcaactaatgaactacagaagcgtggatataatattacatttgatacaatatatttcaaatcttctttatatttttactaattcatttttggttttggttggggttttcttgcataaataaggcttttcttaaattggatggtttcgattttcgagaaagattactatatattatattgttggtctgcatttggtggatgtatcttaagtttacaaataatttgtgatattgaaatattgatatgtatctttatcatggttaatcatatatatatatatatgaatattgtttttcataggacgaccgctataaag

SEQ ID NO: 82435 - DNA, 755 bp, Arabidopsis thaliana columbia
  unsure (1)..(755): unsure at all n locations
atgatcctgccnnnnnnnnnnnnnnnnnnnnnnnnnnnnnnnnnnnnnnnnnnnnnnnnnnnnnnnnnnnnnnnnnnnnnnnccacgcgtccgtggcaagaagaaccttagcctctctttcttctttctctctctctctctctgtgttactgttctgtttcaactttactccctcagtttcagaacaattccctatctagaagagagataaaaccgagaaggttttggagatagaatcttttgttcttcttttgtccctccttgctcgatttttgttacgtgtgaagcaataaaaaaaaactgatatagctaaatcttccatccattcagaggcttctaaatctgatctgacatggaacaagtgtttgctgattggaattttgaagataattttcacatgtccactaataaaagatcaatcagaccagaagatgaattagtggagctattgtggagagatggtcaagtggttttacaaagccaagctcgtagagaaccgtcagtccaagtccaaacccacaaacaagacaaccctaagaaaacccaacaatattttttcttgacaaccaaggaaccagttcataagcctaacctaccggtgctcttggttgttcaagaaacccgtntcctgggtacaatnnccnncggttgcgggattgcccctttggatccgggtttccctcatttttcttnnntcggcatttggggcnttgggcngncgtcgnggcantaggttgggtagcntggctnagttt

SEQ ID NO: 82436 - DNA, 779 bp, Arabidopsis thaliana columbia
  unsure (1)..(779): unsure at all n locations
cgtctgcagtaccggtccggaattcccgggtcgacccacgcgtccgcagaacaattccctatctagaagagagataaaaccgagatggttttggagatagaatcttttgttcttcttttgtccctccttgctcgatttttgttgcgtgtcacgcgataacaaaaaactgatatagctaaatcttccatccattcagaggcttctaaatctgatctgacatggaacaagtgtttgctgattggaattttgaagataattttcacatgtccactaataaaagatcaatcagaccagaagatgaattagtggagctattgtggagagatggtcaagtggttttacaaagccaagctcgtagagaaccgtcagtccaagtccaaacccacaaacaagaaaccctaagaaaacccaacaatatttttcttgacaaccaagaaacagtacaaaagcctaactacgctgctctagatgatcaagaaaccgtctcctggatacaataccctccggatgacgtcatcgaccctttcgaatccgagttctcctctcatttcttctcttcgatcgatcacctcggaggtcctgagaagccacgaacgatcgaagagacagttaagcatgaggctcaagccatggctccttctaagtttagatcctcggttataacagtcggacccgagtcattgcgggcagcaacccagtccaacaaatatttcatcanggccacctacacttttccggttttctaatgaagtgataggaagccaagaaacgttcgaaaa

SEQ ID NO: 82437 - DNA, 514 bp, Arabidopsis thaliana columbia
  unsure (1)..(514): unsure at all n locations
aggccgaaaatcaaagatgcttttcttgaacaagaccagccctaaatcgttttaaaaaggtactcaagtttcaactattacacttgctactgcttccttcactatcaaactacgaatcttaaagataaaacatgcgactaaccacacgcatgagggcaatcccaaaaggtaaacgtcactgggaaagttaagaacaaatccagagagcctatccactcaatttatatagaccgtgtcactctgtcttgggggtctatcacgaaccgtacctggtttgaatctggacccttcatgtctcgccagctcaggaggcaccgcactgttgctctgaacaagcatctgcttcagatcatagaagacttcgggatcatgaagtgtcaagaacgaagcgcaacaccacttttccagacgncctgtacgtccgaacgtgggngaaancccanatgttagggtgncgaagttatgnatgggccanccggaataatcccgccaaaantgtgananagggttnttt

SEQ ID NO: 82438 - DNA, 381 bp, Arabidopsis thaliana columbia
gattgttttcacagatccatcgtctccatgagatctctgtgaataacattacttctctttctcaaactcagactctcaataacacaaaaacccagatctttctctctcttcaccacagaaaaaaatcgaaactttatttttgcttgatgaagagcaaaatccaccaccagcccaatggtagcaacaatggtgttgtttcaagtaacgataatggctgccgaagtgagtctccaagcccacctttatctccaaaccgccgtgtcctccgtcgtcaacggcggcaaactttactcagagcttcttctttctctctccggagaaatcttcgttacttgcttctccttcctatgatttacgcttctgggcttctcatgtgtgttg

SEQ ID NO: 82439 - DNA, 536 bp, Arabidopsis thaliana columbia
  unsure (1)..(536): unsure at all n locations
ctttctctctctgtctttccttgttcaaccctcgagagattacggatagtgaaagagaagctacaaaatttcccaatttatcaaaaaatagaaatttcttacttttttcaaaattcatttctccccaaaaaaaatatcttgtgaaaactgcaactgtgatccatggcggaggatatggctgccgacgaagttacggctcctcctcgtaaggttcttatcatctccgctggtgctagccactccgtcgctcttctctctggtgacattgtttgttcttggggtcgaggagaggatggacagttaggtcatggcgatgcagaggatcgaccttctccgactcagcttagcgctttagatggccaccaaattgtttccgttacctgtggtgctgatcacactgttgcttattcacaatcaggcatggaagtctacagttggggatggggtgattttgggagattaggccatggtaactcaagcgacttgtttactccgctaaagaattcacggtttcgcncaagagntctttggggngt

SEQ ID NO: 82440 - DNA, 761 bp, Arabidopsis thaliana columbia
  unsure (1)..(761): unsure at all n locations
atgatttgccnnnnnnnnnnnnnnnnnnnnnnnnnnnnnnnnnnnnnnnnnnnnnnnnnnnnnnnnnnnnnnnnnnnnnccacgcgtccggatgctttggtcattcttactagcgctgttccgcagatgaagcccggttttgatcctagtaaaggaggaagacctgagttcttctttgatgatggagcttatccagaacaggttgactggattggtcagaagaatcagatagacgctgctaaggctgcaggagttaagcagattgttttggttgggtcgatgggaggaacaaacattaatcaccctctcaatagtattggcaatgctaacattctggtctggaagagaaaggctgagcaatacttggctgattccggtattccatacaccatcatcagggctggaggtctgcaggacaaggacggtggcattcgagaattacttgtgggaaaagatgacgagctacttgagacagaaacaagaacaatcgcaagagctgatgttgcagaagtctgtgttcaggcattgcagcttgaggaggcaaaattcaaagctcttgacctggcctcaaagcccgagggaacaggcaccccaacaaaggatttcaaggcgcttttcactcaagtaaccactaagttctgattaagtatttttttgttccctttgtcattgtagcaaagtcctagaattgacactgagagggatgagttctttatgtgtctgaaccggctctttctatttctaaagatgtcttgccctag

SEQ ID NO: 82441 - DNA, 641 bp, Arabidopsis thaliana columbia
  unsure (1)..(641): unsure at all n locations
atttctcactctctcgtcttcttcgtctgagctatcaaactccagtcaatggcgatgatgacgacgacgacgacaacattcttccatccactacttcctgctaacacttacaaatccggagctgtagcttcttcctttgtctcagttcctcgttcgtcgtctctccaatttcgctcacttgtgtcagattctacgtcgatttgtggtccaagtaagttcaccggaaaaaacagaagagtatcggttaccgtttccgccgccgcaacaactgaacctctcaccgtcctcgttaccggtgccggtggaagaacaggacaaattgtgtataagaaattgaaggagaggtcggagcagttcgtggcaaggggtttagtgaggacaaaggagagtaaggagaagatcaatggagaggatgaagtattcattggagatattagagatactgcatcaattgctcctgctgttgaagggattgatgctttggtcattcttactagcgctgttccgcagatgaagcccggttttgatcctagttagaggagggagaccctgaggtcttttttttaaatgatgggcgttttnnagnaccanggtttcctnggtttggccanaagattccggtagccggtgcttaggcttca

SEQ ID NO: 82442 - DNA, 757 bp, Arabidopsis thaliana columbia
  unsure (1)..(757): unsure at all n locations
nngcctgcggtaccggnccggaattcccgggttgacccacgcgtccgccacgcgtccggctgcgagaagacgacagaagaggaaaggagatcagtttgggagaaagcagcaaagaagaaaaatggcagcaacatttgcaacaccatcgacggtgataggcctcggaggatcatccatcaccaccaaacccttctcttcatcctttttaaaaccaacattaagcgccaagaaccctttgagactcgccggtgcatcgggaggaagagtcacttgctttgagaggaactggttgaggagagatttgaacgtggtaggatttgggctgatcggatggctagctccgtcgagcattccagcgataaatgggaagagcctgacgggtctcttcttcgatagcatcggaactgagctcgctcacttcccgactcctccagctctcacttcacagttctggttgtggttggttacgtggcacttaggcctcttcctctgcctcactttcggacaaatcggattcaagggcaggactgaagattacttctaaggataactattcttgttttcgtttgtactatatgctctctcttggttatgtgtaatattatcaatcaaaacaaagctttctttgctatttgatgtttcattctaaaaaaaaaaaaaaaaaaaaaaaaaaaaaaagggcgggcgctctagaggatccaagcttacgtacgcgtgcattgcacgtcatagctcttttnnnnnnnnnnnnnnnnnn

SEQ ID NO: 82443 - DNA, 423 bp, Arabidopsis thaliana columbia
aaaagacgccgctcgtctcttcagagaatttcaccttctagggtttgttcaagagaagtcttgggaaaatgagtcgtggaggtgcagctgttgccaagggaaagaagaagggagtttccttcaccattgattgttcaaagcctgtcgatgacaagatcatggagattgcttcccttgagaagtttcttcaggagaggatcaaggtcggtggcaaagctggtgcacttggtgattctgtcacaatcacacgtgagaagagcaagatcactgtcactgcagatggccaattctccaagaggtatttgaagtacttgacaaagaagtacctgaagaagcacaatgtaagggattggctcacagtgattgcagcaaacaaggaccgtaacccctatgagttgaggtacttcaacattgctgagaacg

SEQ ID NO: 82444 - DNA, 784 bp, Arabidopsis thaliana columbia
caaagatcaaaaaacgccgctcctcttcacacagttccatcttcttcaacttcagaggtgaaaaatgagtcgtggtaacgcagcagcagctaagggaaagaagaagggagtttccttcactatcgattgttctaaacctgtggatgataagattatggagattgcttctttagagaagtttcttcaggagaggattaaggttggtggtaaagctggtgctcttggtgattctgtttctatcactcgtgagaagagcaagatcactgtcactgctgatggtcaattctccaagaggtatcttaagtacttgacaaagaagtacttgaagaagcacaacgtgagggattggcttagagtgattgcggcgaacaaggaccgtaacctctatgagttgaggtacttcaacattgccgagaacgaagctgaggaagaagattaaaaccggttttggtctagtgctatatcctctgttcctctatttctgttggtttggttttgattcttcagttttgtgttagatattattatgtagtttgattgaagtaatactctttgcttttgttgttgcgtacttgagattttctatggagtctatttcttccaaacagtaatgatgtgaaattggactaatatgatttagggtttgattaaaaaaaaaaaaacaaaacccaagggcggccgctctataggatccaagcttacgtacgcgtgcaggtgacgtcaagatactctataggtgtccccttatttcccccccccgcgcgcccgaggcggccgactaagg

SEQ ID NO: 82445 - DNA, 900 bp, Arabidopsis thaliana columbia
  unsure (1)..(900): unsure at all n locations
aggtgacactatagaaagactatgacgtcgcatgcacgcgtacgtaaggctgggatccctctagagcgggccgcccttttgttttttgggcggcaaaatggggtaaagaaattaggggaaaccggggtggtcaaacctggcttaccattaaattttttggcagaaccagcaaaggcttatctaattggcttaggaaacgagcttggacctaccctaagtcggggagaatggatttgtctgagcacagtaaatccaaccgacctatggcgagacgccacttcgccggaaacctaaggatttagagagagaaccgcatatcgttgactctcctcctttttcactctcttcatttattcttcccctcatcatcatcatcatcttcttctttaaccaaaaacacaacttacaagaaaactgttgaatctttgtatttatttacatctcctttgacctttaataagaatctgagtggttggtctctgatttgatgagatgactgttgagctgatgatgagcagctacagcggcggcggaggaggaggtgatggttttcctgcaatcgccgcggcggcgaaaatggaagataccgctttgagagaagctgcttctgcagggattcacggtgtggaggagtttcttaaactgatcggtcaaagtcaacaaccaacggagaagagtcagacggagataaccgcggtgactgacgtcgccgttaacagcttcaagaaggtcatttctctactcggtagatctagaaccggcacgctagattcanacgngctcccggtcaacgnaaacgccgttaagcaaacgccgttggttaggaggagttgaggttnggagagagccgaacaagtccgtttacaacagaacaggcatttacggtggtggnctcgttgc

SEQ ID NO: 82446 - DNA, 621 bp, Arabidopsis thaliana columbia
  unsure (1)..(621): unsure at all n locations
nnnnnnnnnnnnnnnnnnnnnnnnnnnnnnnnnnnnnnnnnnnnnnnnnnnnnnnnnnnnnnnnnnnnnnnnnnnnnnnnnnnccacgcgtgcgcccacgcgtccgaaactgttgaatctttgtatttatttacatctcctttgacctttaataagaatctgagtggttggtctctgatttgatgagatgactgttgagctgatgatgagcagctacagcggcggcggaggaggaggtgatggttttcctgcaatcgccgcggcggcgaaaatggaagataccgctttgagagaagctgcttctgcagggattcacggtgtggaggagtttcttaaactgatcggtcaaagtcaacaaccaacggagaagagtcagacggagataaccgcggtgactgacgtcgccgttaacagcttcaagaaggtcatttctctactcggtagatctagaaccggacacgctagattcagacgagctcccgcgtcaacgcaaacgccgtttaagcaaacgccggtggttgaggaggaggtggaggtggaggaaaaagaagccagaaacaagctccgtgttaacataacagaaaacagagcaatatcacggtggtggatctgcgtttagag

SEQ ID NO: 82447 - DNA, 464 bp, Arabidopsis thaliana columbia
tcttctttttattttttttttccgtacggcctcctaaacaaactcttgtgaattgtcataattagcatgcggctttgctcgagaatattcaccagattcgatttcacagcttcaatggaacaattaggtcttccataagagaatttcagccatggaaataaatacttggggcatctgctcctataacagggaataagggattcctctgtttatggctccgaaagcaaacagtcaaagattgagattgttgaacagatgatgcagagactgatcaagatcttatcaacaaacctcagtaaatcgtctgtgattgtattcacatcatgtattgttgagaaccgccttagcccttaggcttaaatctccatattcttagtgttgatcccttctaatagaaagtggttacttgggtaagacagagatcttggcttcaaccttaagcataccagtatcacaagctgtct

SEQ ID NO: 82448 - DNA, 549 bp, Arabidopsis thaliana columbia
  unsure (1)..(549): unsure at all n locations
cgnnnnnnnnnnnnnnnnnnnnnnnnnnnnnnnnnnnnnnnnnnnnnnnnnnnnnnnnnnnnnnnnnnnnccacgcgtccgcccacgcgtccgcccacgcgtccgctgagcagcacaagtctgcgagatttggattagatctgattcaggttggattgatcatcgttcggagctccgggaaacatggcggcgacgagacaattacgaactctccaatctcagcctgaaaacaaggtatgtgtcgattgcgctcagaagaatcctcaatgggcgtcggtttcgtacggaatcttcatgtgtttggaatgctccgggaaacaccgaggcttaggcgttcacatatccttcgtcagatccgtaaccatggattcatggtctgcgatccagattaagaaaatggaagctggtggtaacgaacggctcaacaaattcttcgcgcaatacggaatcgctaaggagacagatattatctccaagtacaattcgaacgctgcttctgtgtatcgtgaccggatccaagctttagctgaaggtagaccatggaatgat

SEQ ID NO: 82449 - DNA, 1018 bp, Arabidopsis thaliana columbia
  unsure (1)..(1018): unsure at all n locations
agggaccaaagccggaacctccaccgggggggcggccgttttaaacttgggggatcccccggcctgaaggatttcgcggccgccaaaggggtgatgatggtggcgatcctttgccttggggcactctctgcaccatctgaagcagtaccagaggctgagccaggttggatgatgaacttctacaaggacacgtgtcctcaggccttttacatcgtccgtgaacaagtcaaactcctctacaaacgccacaagaacaccgctttctcttggctccgtaacatcttccatgactgcgccgttgagtcatgtgatgcgtcgcttttgctggattcgacaagaagagagctaggagagaaagaacacgacaggagcttcggacttagaaactttaggtacatcgaggagatcaaggaagctctcgagagggagtgtcctggtgttgtctcatgttctgacattctcgtcttgtccgcaagagaaggcatcgaagcagtaggaggaccttatattcctttgaagacaggaaggagagatggacttaaaagcaggacggatatnctcgagtcatatcttcccgaccacaacgagagtatctccgtcgttcttgaaaagttcaaatccatcggtatcgacactcccggcctcgtcgccctcctagggtcacacagcgtgggaagaactcactgtgtcaagctggtccatcgtttgtaccctgaggtggacccgtccttaaacccggaccacgtccctcacatgctacacaagtgtcctgactcgatccctgacccaaaggcggtncagtacgtgcgtaacggccgtgggaaccccatggtgttagncaacaatttntncccgaaaantcttggcaaaaaangggtttttncctttngggccntaatttgnaaaagggaaagggcccagnccattttttangggttggtttggnccgggtttttttttaagggttttttggggntncnnttttttngggaaaaaccttttttggtttaggggnntt

SEQ ID NO: 82450 - DNA, 729 bp, Arabidopsis thaliana columbia
tacacgactcactatatggaaagctggcacgcctgcaggtaccggtccggaattcccgggtcgacccacgcgtcgggatggacttaaaagcaggacggatatgctcgagtcatatcttcccgaccacaacgagagtatctccgtcgttcttgaaaagttcaaatccatcggtatcgacactcccggcctcgtcgccctcctagggtcacacagcgtgggaagaactcactgtgtcaagctggtccatcgtttgtaccctgaggtggacccgtccttaaacccggaccacgtgcctcacatgctacacaagtgtcctgactcgatccctgacccaaaggcggtccagtacgtgcgtaacgaccgtggcacccccatggtgctagacaacaattactaccgtaacatcctagacaacaagggtttgctccttggggaccatcagctcgcacacgacaaacgaaccagaccaatcgttaagaggatggctaaaggaccaggcctacttctttcaaggagttcactagggcaatccagatcttatccgagaacaaccccttgactggctctaagggtgagatcaggaagcaatgtaatctcgcaaacaagaaccattgaagttggaaaaagtgagaaaagacaggggcaccttgtcaccccttgggttacctctgtcgctagtggctacacattgatgcgtgatccgagatacaacaagggacttgcgtttac

SEQ ID NO: 82451 - DNA, 556 bp, Arabidopsis thaliana columbia
  unsure (1)..(556): unsure at all n locations
acgnccngnccacccnttanaagtgcctagggccnngccncntcttccaggggtnccctnggcaacccaaancttacccgngaccaccccnttnnctggccctaagggtgagaccnggacccattttaancccgcaaccaggacccatngaagttggaaaaaagtgagaaagaccagggcctctggtgtgtggagtcccctgcttggtaccgacccaggatgaataaaaaaaatcttttaagttaaatcaatgaaagggtgatgatgaatacatcatggtagtgaccacctccttcttttgtgtgttcagccttaatgctttaattatgatgttagtggctttgagttatttaatctaaatgttggctcttcgttgattttgggtttgtggtgggggtgatataatgataatggaaaggatgtatgatatgatggatggtgttgggtatcatgtatgacgatgtaatgataagtaaacatgtccgcctcaaatttaattcactatctaaaattgggtgtgggggtggggtgttgaattattaaataaaagggtggc

SEQ ID NO: 82452 - DNA, 708 bp, Arabidopsis thaliana columbia
  unsure (1)..(708): unsure at all n locations
gtccccgcgtggnagactccttttcaantgtccacgttnncccctgggtggcccccntcttaacccgnccagnccntcaatgcttcacaagtgccctgctcgatccctgccccaaagcgtccagtacgtgcgtaacgaccgtggcaccccccatgtgctagacaacaattactaccgtaacatcctagacaacaagggtttgctccttgtggaccatcagctcgcccccgacaaacggacccagaccaatcgttaagaagatggtaaaggaccaggcctacttcttcaaggagttcactagggcaatccagatcttatccgagaacaaccccttgactggctctaagggtgagatcaggaagcaatgtaatctcgcaaacaagaaccattgaagttggaaaaagtgagaaagacaggggctctggtgtgttgagttctctgcttggtacgaaccaagatgaataaaaaaatcttttaagttaaatcaaagaaagggtgatgatgaatacatcatggtagtgaccacctccttcttttgtgtgttcagccttaatgctttaattatgatgttagtggctttgagttatttaatctaaatgttggctcttcgttgaaaaaaaaaaaaaaaaagggcggccgctctagaggatccaagcttacgtacgcgtgcatggtacgtcatagnnnnnnnnnnnnnnnnnnnnnnna

SEQ ID NO: 82453 - DNA, 552 bp, Arabidopsis thaliana columbia
  unsure (1)..(552): unsure at all n locations
tccggggggggtgtattcatgcggngtttttagagtatgaaagagttagagaaaaaaaatgggaggcaaaggtgtgatgatggtggcgatacttttcccgtttgggcactctctgcaacatctgaagcagtaacagagactgagccaggtttgatgatgaacttctacaaggacacgtgtcctcaggccgaagacatcatccgtgaacaagtcaaactcctctacaaacgccacaagaacaccgctttctcttggctccgtaacatcttccatgactgcgccgttgagtcatgtgatgcgggtcggcttttgctggatttcgccaagaagggagcgctttggggagaaagaacacggcaggggctttcgggccttaggaacttttggggcataccatcgggggggttccaagggaggctttttgcaggggggggtttnccccggtgttcgcctcaatgtttttgacatttttggtttttnccnnaananaagncttcgagnctttagggggcctttnnttcctttnaagccaggngggggnttggctttaaa

SEQ ID NO: 82454 - DNA, 739 bp, Arabidopsis thaliana columbia
ttaatgtgtcgtaggagattcataaattttctttccccccgcccccccccagggggaggagggtttttgtccatttcgtttgtgtaaaaaaagttcaaaatccctttgggtatttgaacacttccgggccccggtgcccctcctaggggcaacaaagcggtgggaaagaactcaacttgtgtcaaaactgggcccctccggtttggacccctggagggtggccccggtccttaaaacccggacccacgtcccctctacatgctacaacaagttgccctggctcggttccctgacccaaaggcggtccagtacgggcgtaccgtccgtggccacccccatggtgctagacaacaattactgccgtatcttcctagacaacaagggtttgctccttgtggaccatcagctcgcacacgacaaacgaaccagaccaatcgttaaagaagatggctaaggaccaggcctacttcttcaaggagttcactagggcaatccagatcttatccgagagcaaccccttgactggctctaagggtgagatcaggaagcaatgtaatctcgcatacaagaaccattgaagttggaaaaagtgagaaaaacaggggctcgggtgtgatgagttctctgcttggtacgaaccaagatgaataaaaaaatacttttaaattaaaaaaaaaaaaaaaaagggcggccgctctagaggatccaagcttacgacgcgtgcatgcgacggcaagtg

SEQ ID NO: 82455 - DNA, 1020 bp, Arabidopsis thaliana columbia
cagctctatacgactcactataggaagctggtcgcctgcagtaccgtccgggatttccgggtcgaccagcgtccggagagaagatgaaaaaaaatgggagcaaagggtgatgatggggcgatactttgccttgggcacctttttgcacaatctgagccaataccaaaggctgacccaggtttgatgataaacttctaaaaggccacgtgtcctcggaccggcattccgggtcgacccacgcgtccgctcctctacaaacgccacaagaacaccgctttctcttggctccgtaacatctttcatgactgcgccgttgagtcatgtgatgcgttgcttttgctggattcgacaagaagagagctaggagagaaagaacacgacaggagcttcggacttagaaactttaggtacatcgaggagatcaaggaagctctcgagagggagtgtcctggtgttgactcatgttctgacattctcgtcttgtccgcaagagaaggcatcgaagcagtaggaggaccttatattcctttgaagacaggaaggagagatggacttaaaagcaggacggatatgctcgagtcatatcttcccgaccacaacgagagtatttccgtcgttcttgaaaagttcaaatccatcggtatcgacacttccgggctcgtcgccctcctaggggcacacagcgggggaagaactcactgtggcaagctgggccatcgtttgaccctggggtggacccgtccttaaacccggaccacgttccttacatgctacacaagggttcctgacttgaatccctggcccaaaggcgggtcccagtccctgccgttaacgcccggggggccctcccccagggtgggctaggaccaaccaattttacctcccggggaaccattccttaagaaccaaccaaagggggttttggcatctccttttgttggggcacccatattaaggcttctggtgacacactcctatcaagaaccgggaacctccatgaaccctcagtattgtgtttat

SEQ ID NO: 82456 - DNA, 1614 bp, Arabidopsis thaliana columbia
  unsure (1)..(1614): unsure at all n locations
atgatacttccnnnnnnnnnnnnnnnnnnnnnnnnnnnnatttactataaccttcaaattaagcttcttttattttatgaaacctcgcgtccggaaaactccatttccctttatttaaggaggctgcattgcttgctcactgactcaactcaagagtggtgtagtgagagaagaaagatagagaaaaaaaatgggaggcaaaggtgtgatgatggtggcgatactttgcctttgggcactctctgcaacatctgaagcagtaacagaggctgagccaggtttgatgatgaacttctacaaggacacgtgtcctcaggccgaagacatcgtccgtgaacaagtcaaactcctctacaaacgccacaagaacaccgctttctcttggctccgtaacatcttccatgactgcgccgttgagtcatgtgatgcgtcgcttttgctggattcgacaagaagagagctaggagagaaagaacacgacaggagcttcggacttagaaactttaggtacatcgaggagatcaaggaagctctcgagagggagtgtcctggtgttgtctcatgttctgacattctcgtcttgtccgcaagagaaggcatcgaagcagtaggaggaccttatattcctttgaagacaggaaggagagatggacttaaaagcaggacggatatgctcgagtcatatcttcccgaccacaacgagagtatctccgtcgttcttgaaaagttcaaatccatcggtatcgacactcccggcctcgtcgccctcctagggtcacacagcgtgggaagaactcactgtgtcaagctggtccatcgtttgtaccctgaggtggacccgtccttaaacccggaccacgtccctcacatgctacacaagtgtcctgactcgatccctgacccaaaggcggtccagtacgtgcgtaacgaccgtggcacccccatggtgctagacaacaattactaccgtaacatcctagacaacaagggtttgctccttgtggaccatcagctcgcacacgacaaacgaaccagaccaatcgttaagaagatggctaaggaccaggcctacttcttcaaggagttcactagggcaatccagatcttatccgagaacaaccccttgactggctctaagggtgagatcaggaagcaatgtaatctcgcaaacaagaaccattgaagttggaaaaagtgagaaagacaggggctctggtgtgttgagttctctgcttggtacgaaccaagatgaataaaaaaatcttttaagttaaatcaaagaaagggtgatgatgaatacatcatggtagtgaccacctccttcttttgtgtgttcagccttaatgctttaattatgatgttagtggctttgagttatttaatctaaatgttggctcttcgttgattttgggtttgtggtgggggtgatataatgataatggaaaggatgtatgatatgatggatggtgttgggtatcatgtatgacgatgtaatgataagtaaacatgtccgaatcttttgataaaaaaaaaaaaaaagggcgaccgctctagaggatccaagcttacgtacgcgtgcgtgcgacgtcataaatcttgctatagttgcaccta

SEQ ID NO: 82457 - DNA, 421 bp, Arabidopsis thaliana columbia
aaaaatgggattcgcacttaagaatgaagggaaagtcataggcatattacaagattaagaaaacactttgtactcatgcggcaacagagcctttattacagacacactcataacgatgatgcttagagatacctaacgcctaaaacggacccaaacaaacaaaaatttgaaatggaaacaaatcaaacaacagacccatttttatatataaacctctctctttggacatgtctctaaatcggacaaataaaaacggccccatttctttgtgatttcgagggggttcttaggcccacatctaatacattaaagcatcagaagacgccatgagaggctggttcataatataagacatgttcatctgattcacgaagaaattatcacactccaaaccaaccagagggttcgaacacatgcccat

SEQ ID NO: 82458 - DNA, 563 bp, Arabidopsis thaliana columbia
cgtttattccaattattttagggaaggctggtccccttgcaggacccggcccggatttccggggtcgacccaggcgtccgaaaccatcattttctgaatctgtcaaaccaaaagagttcatggagactttgctgcagaagcttaaagactcactagccatagcacttgtccatttctatcctcttgcaggtcgtctctctactttgaaaaccgacaattcaagatctcactctgtgtttgtggattgtaataatagtcctggtgctagatttatccatgctgaatcagatctaagtgtgtcagacattcttggatccacatatgttcctttggttgttcaatctctctttgatcatcacaaagcattgaatcgtgatggttacaccatgagtctcttatcaatcaaggtaacagaactggtagatggagtgttcataggattgtctatgaatcattcccttggagatggaagttccttctggcagttcttcaactctttgtctgagatcttcaattcacaagaagaaaccattgggaataacaaccacaacaacaacaacgca

SEQ ID NO: 82459 - DNA, 510 bp, Arabidopsis thaliana columbia
  unsure (1)..(510): unsure at all n locations
cagaacaaaccaaccttctagattcttctccttccttcttcaactctctctcacttctccagatatggttacatctccgacgaactcaacaatcaaatttntctgtagctatggcggcaaaatcctacctcgttatcccgacggcaaactccgttacaacggtggtcacactcgcgtcctcgccgttcctcgctccgtctcattttccgagttagcgtcgaagatggcggagatgtgcggcggcgtcggcggatctataaccgtaacgatccgatgtcaagcttcccgacggaagatctcgacgggntcgtttcaattaactttccgatgaaaggattctagctggaatcttaattcgaaggggtaccgatctccgttttccttcttcaatcttcctccggtggaaaatcaagaggtgtttcttaaaatcccccccaaaaatcccgccgccgggttttaaaaaaaaantccntccccccggttaggnggtancccgtnattaaacccacc

SEQ ID NO: 82460 - DNA, 839 bp, Arabidopsis thaliana columbia
gctctctacaactcacttagggaaagctggtccgcctgcaggtaccggtccggaattcccgggtcgacccacgcgtccgcagaacaaaccaaccttctagattcttctccttccttcttcaactctctctcacttctccagatatggttacatctccgacgaactcaacaatcaaatttctctgtagctatggcggcaaaatcctacctcgttatcccgacggtaaactccgttacaacggtggtcacactcgcgtcctcgccgttcctcgctccgtctcattttccgagttagcgtcgaagatggcggagatgtgcggcggcgtcggcggatctataaccgtaacgatccgatgtcagcttccgacggaagatctcgacgcgctcgtttcaattacttccgatgaagatctagtgaatctaatcgaagagtacgatctcgtttcctcttcatctccgatgaaaatcagagtcttcttaaatccaccaaaatccgccgccggatctaaaaaatctcctcctccgttagcgttaccgtcatcaaccaccacgtcatcatcttccacaacttcctctacttcatcaagtcctagatctccgtctctatcaaaaccaccgctacctccgtctccaccgagaataacgacggttacgaagaatccgtgttatggttgttatgttcaccgtaattccagaaatatctaccttgttcacaacggcaatcactggcaataacgtgaagaatcttcgaatatccgattaaaaaaaaaaagaatcttcgttttttttttctaatgtaaaaaagagcgagagattataatagaagggtgaacgtgatct

SEQ ID NO: 82461 - DNA, 527 bp, Arabidopsis thaliana columbia
cctgcaggacccggcccggatttcccgggtcgacccaggcgtccgcccacccgtccggattctgattctgatgaatcgctgggagactgggcaaatttggaaacaatgaggagttgtcatcccatgttttttgcaaagagaatgactgaggttgcttcaaatgatcctgttgattggatggatcagccgtctgctggccttgctatccagggacttttgagtcatatcttagtggaagattattcagatatccaaaagaaacttgctgatagcaattctacaactaacggaaacaaggatgcagaaaacttagtggacaagcttgaagacaatagtaaggcaggtggtgacgaatctgagatagattcatcacaggatgaaaaagcaagaaatgtggtggcgttttacaagctggagatgataagaattcagcttatcacagcacaaggggatcagactgaagttgaggtggaagatgtcagaaaagcacaacctgatgctattgctcatgcatcagctgaaatcat

SEQ ID NO: 82462 - DNA, 593 bp, Arabidopsis thaliana columbia
  unsure (1)..(593): unsure at all n locations
accggtatttaatggctcggacccacgcgtgcgactctccgcaaaaatgacacagttgcagcngcgtgcgctccctccgtcttgagcgggaaagcttccgcaaccactggcgatatcaaggatattcttggatcagttggtgctgagacagaggattctcagattgagcttttgttgaaggaagtgaaagggaaagacttggctgagctaattgctgctggaagggagaagttagcttcagtgccgtctggtggcggaggtggtgttgcggttgcttctgctacatctggaggtggagtaggtggtggtgcttctgctgctgagtccaagaaagaagagaagaaggaagaaaaggaagaatccgatgatgacatgggtttcagtctattcgagtaagctggtagtagcatgaaaagtccggttttgttgtcctcttttaatattgtaaccttttgaaatctatatgttgttgttgtttagtttgtattcgatcatcttttttagacattgctgaaattctcaagagtttttgacccgaatgtcatttgcactttgttgttagcgattaagcttctatctcaatcgcctttgtc

SEQ ID NO: 82463 - DNA, 554 bp, Arabidopsis thaliana columbia
  unsure (1)..(554): unsure at all n locations
aaggacgggccagagcgacccgtacacacatatggaacaacaaaccacgagactgacctccctccacgaagatgaaggttgttgccgcgtacttgctcgcggttttgagcgccaaacccttcaccaaccagtgccgatatcaagactatccttggatcagttggtgctgagacagaggattctcagattgagcttttgttgaaggaagtgaaaggaaaagatttggctgagttgattgctgctggaagggagaagttagcttcagtgccgtctggtggcggaggtggtgttgcggttgcttctgctacatctggaggtggaggaggtggtggtgcccctgctgctgagtccaagaaagaagagangaaggaagaaaanggangnatccgatgattgacatgggtttcagtctattcgagtaagctggtagtagcataaaaagtccggttttnttgnccncttttaaaattgnaaccctttnaaanncntatgttggtgtngttaagtttgaatncgncanctttttagcattctgaaatcnaaaggttttnccc

SEQ ID NO: 82464 - DNA, 689 bp, Arabidopsis thaliana columbia
cggacgcgtggggtctaaaaaccctaatctcactccgcctcctgcgagatccatcaacacttccgcaaaaatgaaggttgttgctgcgtttttgcttgccgtcttgagcgggaaagcttccccaaccactggcgatatcaaggatattcttggatcagttggtgctgagacagaggattctcagattgagcttttgttgaaggaagtgaaagggaaagacttggctgagctaattgctgctggaagggagaagttagcttcagtaccatcaggaggtggtggtggtgttgcggttgcttctgctacatctggaggtggaggaggtggtggtgctcctgctgctgagtccaagaaagaagagaagaaagaagagaaagaagaatccgatgatgacatgggtttcagtttgttcgagtaatgcggtatacttggcatttggttttgctgtaccctttcgaaatctttatgtcgttgtttagtttgttgtattcgactatcttcttagactttgctgaaattctcaagagatttttttactcaaacatcagtccacttgtgattggcatttatatttcaaactatcgccttagttacatcttcaaaacacaaaacacaaagggcggccgctctagaggatccaagcttacgtacgcgtgcatgcgacgtcaagatcttgtagagtgcaccta

SEQ ID NO: 82465 - DNA, 825 bp, Arabidopsis thaliana columbia
  unsure (1)..(825): unsure at all n locations
nnnnnnnnnnnnnnnnnnnnnnnnnnnnnnnnnnnnnnnnnnnnnnnnnncccgatcttagtttcgacccacgcgtccggtctgcacaacaccctaatctcacaatctcctacgagatctatcagtctccacgatgatgttggttgttgccgcatacttgctcgctgttttgagcggaaaagcttcaccaaccagtgccgatatcaagactatccttggatcagttggtgctgagacagaggattctcagattgagcttttgttgaaggaagtgaaaggaaaaagatttggctgagttgattgctgctggaagggagaagttagcttcagtgcccgcctggtggccggacgtggtgttgccggttgcttctgctacatctggaggtggaggaggtggtggtgcttctgctgctgagtccaagaaagaggagaagaaggaggaaagggaggaaccccatgatgacatggggttccagtctattccaagtaacctggtagtaccatgaaaagtcccggctttgctggccctcttttaatattgtaaccttttgaaatctatatgttgttgttgtttagtttgtattcgatcatcttttttagacattgctgaaattctcaagagtttttgacccgtatcaaataacacgtcggcaaaagggggcggcgatttagaggatccaagcttacgtacgcgtgcatgcgactgcataactttttctatagtgccaccctaaatttaaattccactggcccggcggtttttaccaacgttctttgaactgggcaaaaacccctggggggtttacccccaaccttaaattcgcc

SEQ ID NO: 82466 - DNA, 821 bp, Arabidopsis thaliana columbia
gaaaacaatttcccccaggaaccagctatgccctggttacgccaagttctaaaaggccccacataaggaaaagctggtacgcctccaggtaccggtccgaaattcccgggttcgacccacgggtccgccctaatctcacaatctcctacgagatctatcagtctccacgaagatgaaggttgttgccgcatacttgctcgctgttttgagcggaaaagcttcaccaaccagtgccgatatcaagactatccttggatcagttggtgctgagacagaggattctcagattgagcttttgttgaaggaagtgaaaggaaaagatttggctgagttgattgctgctggaagggagaagttagcttcagtgccgtctggtggcggaggtggtgttgcggttgcttctgctacatctggaggtggaggaggtggtggtgcttctgctgctgagtccaagaaagaagagaagaaggaagaaaaggaagaatccgatgatgacatgggtttcagtctattcgagtaagctggtagtagcatgaaaagtccggttttgttgtcctcttttaatattgtaaccttttgaaatctatatgttgttgttgtttagtttgtattcgatcatcttttttagacattgctgaaattctcaagagtttttgacccgaaaaaaaaaaaaaaaaaaaaaaaagggcggccgctctagaggatccaagcttacgtacgcgtgcatgcgacggcaaagcttcttctatagtggccaccctaaatttcaaattaaactgggccggctgttttaacaaacggatcttgaaactggggaaaaa

SEQ ID NO: 82467 - DNA, 308 bp, Arabidopsis thaliana columbia
gatcccaaaagaagatatctaattctggggtgcatttgtttagaagacatgttcaggtgttattcttacagtttaaacatttcttctacccacatgatgggttttactatcttctactctttttcttcttctttctaaaacaaaacgcaaaagaataacattgcacgagatgcaacgcatgagcttctatggccaaacaaagtcaatgtcactgttatcaacattccacactccaagaccgatctcatcaaacaactgctcataactccagcttgagtatcccaagaaaaaccagttctcacttggat

SEQ ID NO: 82468 - DNA, 436 bp, Arabidopsis thaliana columbia
aggatatcaacatatcttgatttaaatatatggatctaaaccgaaatccataactaatcataaacttttggatacattccgctaaaccacataaaatgggaaggaaaaatcaagaagtggagtttacgacagttgtgaaccaatgaacagagtctttaggatatctcttgagggtgtctctcgtaatcaacgaagtagagaccaaatcttgaactataacctgctgcccattcccaattgtccaatagcgaccatacgaagtaccctttgacattacatccatcctcttttatcgaagcttgtaagctagaaaggtaatcatgatggtatttgatcctctttgcatctttgagagcgtcttttcttgagatcagaatgctgcttgggtcgtccattccattttcagtgatgaagactggagggtttccatatctat

SEQ ID NO: 82469 - DNA, 520 bp, Arabidopsis thaliana columbia
cctaaattacttaaaaagatctctcttatttgaattcttcttattgtttagattccaggtcaaactgtgatccattatctttgctactaaactaagttcttttctctgatcgaatcaaaaagttttcaactttctaaatttttttagttctaaggaaaaaacctctccgagaatggttttatcggtgaagcaaacactctctccgaaaatcggacttttccgacgaaacccttcatcctcactaggaagatctcctgtttctctctcgtttccatcgacggagcttccaaaacgcaccgttttagccgtgtcaaagccgcttcatctctcttcttctctgagagctaagtctccggtagtgagatgtgaagcttatgaagctgaccgatcagagcctcatccgatcggtgatgatgctgcggcggcggaaacgaaatcagaggcggctaagaaattgaagatcgggatttactttgctacttggtgggctttgaacgttgtgttcaatatctacaacaag

SEQ ID NO: 82470 - DNA, 677 bp, Arabidopsis thaliana columbia
  unsure (1)..(677): unsure at all n locations
atctctctctatctctatcttcttccattgatcctttcctctctctggcttgtttcagagctcttcgatcttcttcttgatcgatctacgtgccactgtttataccattcacgatctaatccggtttcaattattactcacgaaatcgaaggaagatgagatcggttcaagcaccagttgtttgtcctgcaattcgaccaagacaagtaggtgcatgtgcttcactagtcaactacactggtctgaaacctagaagccaattttggggtaatcggacaaaaggtgtcaagtctcagggcactaccacaacaatcactcttagattgtgcaacaagagtatcaagtgtgttttcagctctcactctgatggtaatggaagcactgctgaaaatttcaatgaaaatgatgaggaatatgttaactctagtgtagtggaagctgttgaagtaaaaagtggagcagatggttttatggtgaagatgagggatggtaggcaactacgatgtgtccataacaatcctcaaggagggcatttaccacattatgctccacaacctgctattgtcgtgaaaatgggagatgggactgggcttctcctttccgattattgtctttggngnatncctagtggngttacttnntggcnncaattcccnattnnccaaattnnaaggccc

SEQ ID NO: 82471 - DNA, 567 bp, Arabidopsis thaliana columbia
  unsure (1)..(567): unsure at all n locations
ggatctctcaagtgaagaatctctctctatctctatcttcttccattgatcctttcctctctctggcttgtttcagagctcttcgatcttcttcttgatcgatctacgtgccactgtttataccattcacgatctaatccggtttcaattattactcacgaaatcgaaggaagatgagatcggttcaagcaccagttgtttgtcctgcaattcgaccaagacaagtaggtgcatgtgcttcactagtcaactacactggtctgaaacctagaagccaattttggggtaatcggacaaaaggtgtcaagtctcagggcactaccacaacaatcactcttagattgtgcaacaagagtatcaagtgtgttttcagctctcactctgatggtaatggaagcactgctgaaaatttcaatgaaaatgatgaggaatatgttaactctagtgtagtggaagctggnaagttagttggggnttagtaggngtttccnnnnttttggtttgatttagnccttttaggtttncaaaggttgggngcttttttgggggnttttaaaatgntnaggt

SEQ ID NO: 82472 - DNA, 1067 bp, Arabidopsis thaliana columbia
  unsure (1)..(1067): unsure at all n locations
tgcttcgcgcacggtccatacgactcactttagggaaagctggtacgcctgcaggtaccggtccggaattcccgggtcgacccacgcgtccgcccacgcgtccgcaaggagggcatttaccagattatgctccacaccctgctattgtcttgaaaatggaagatggaactggtcttctccttccgattatcgtcttggagatgcctagtgtgttacttatggcagcaatgaccaatgtccaaattgcaagaccaaccatgtatcaagtggtgaaggaaatggtggacaagatgggttacgaagttagacttgttagagtcaccaaaagagttcacgaggcatattttgcccagttattcctttcaaaggtgggtaatgcctcggagtgtgtcagctttgatcttaggccttcagatgcaatcaatatagctgttagatgcaagatacctatccaagtgaacaagtaccttgcatatagtgatggaatgagagtcattgagtcagggaagatatcaacaccggcaccagcttcagatggtttattatttactgaacaagaccgaccaaatggtcaggcttgtcttgatacgaaagagttcaatattttgagcaaaatgatgcaagccgttgatgaagagcgatatgatgaagccgctgagtggagagacaagcttggtcagtttcgggccaaacgtaacttgaggaaatacacatgagagagctcgatcaacaattattggctgtgtacataaactaagaagaaagtcattggtcggaatcaaagtggaggaagaagcctgaagtgtcgtctctgtatgatggagatcgaagaatgcttctgcactttacccatttccctaaaaaataaacaaaaaaaaatgtataatgtatgtatgtagcgtgatgtgctacatatcacttattaatctatgcaaacttaagctcactctaattactttttaagtttccttttaaaaaaaaaaaaaaagnnnnnnnnnnnnnnnnnnnnnnnnnnnnnnnnnnnnnnnnnnnnnnnnnnnnnnnnnnnnnnnnnnnnnnnnntcaat

SEQ ID NO: 82473 - DNA, 580 bp, Arabidopsis thaliana columbia
gatacgtcagctctatacgactcactatatgggaagctggtacgcctgcaggtaccggtccgggatttcccggggtcgacccacgcgtcccgtgcaggagccaccaccgaagattactccctttgtggaatacgaagaagagcttgaagatgatgacgatgatctctcgctttcgtcagattccgatatcgctgaagctcttgattggctagacggtaaagacgatgacgagctaattggtggtggcttttctcttcatgctcgtcgtcctaatgctcacggtggacatggttcacgccctaactctagtgctcttcagcctatttcaaataaggcccagaagcttactagtcacgttcgtgcttctcctttggagggatgggaaggaagagttaaagttgggatgtcgaattctgtgacaactgcgattcgtggaagtcttagagatacagaaattgggagaagtaggaatactgataaagcggaccgggcaactgttgaacaggctcttgatccaaggacgcgtatggtattgtttagaatgcttaaccggggtgtgtttaacgatgttcatggatgt

SEQ ID NO: 82474 - DNA, 227 bp, Arabidopsis thaliana columbia
  unsure (1)..(227): unsure at all n locations
cccacgcgtccgcagaaagaaataaaacgagatgggaagtggcatgataaggacattggttattctagcaatagctttattcatgatcggttccgacaacgtccacgtggcaaaagcccaggtctgtggagctaacttgtcgggactgatgaacgaatgtcaacgctacgtcagcaacgtccggaccaaanttctcagccgccgttctcggttcttgttgtgctcta

SEQ ID NO: 82475 - DNA, 831 bp, Arabidopsis thaliana columbia
  unsure (1)..(831): unsure at all n locations
cgcggnnnnnnnnnnnnnnnnnnnnnnnnnnnnnnnnnnnnnnnnnnnnnnnnnnnnnncggaatggaagggtcgaccacgcgtccgcatgaactcttcctttactctcttcatctttaccttcgtcatcttcctccaatgtctaaatcccaccggagctgccacgtgtcatcctgatgatgaagcgggtcttctagctttcaaagcgggtataacccgagatccttcgggtattctcagttcttggaagaaaggtaccgcttgttgttcttggaacggtgtcacttgtctcaccactgaccgtgtctctgcactctctgtcgctggacaagccgatgttgctggaagcttcctctccggcactctctcgccgtcgttggctaaactcaagcaccttgatgggatttacttcaccgatctcaagaacatcactggttcttttcctcaattccttttccaattaccaaatcttaagtacgtatacattgagaataaccgtctctctggtactcttccggctaacatcggtgcgctaagccagcttgaagcgttcagcctcgagggaaaccggttcaccggtccgatcccgagctcgatatctaatttgactctgttaactcaactcaaactcggcaataatctcctaaccggaactataccgttaggggtcgctaatctcaagctcatgtcgtatcttaaccttggaggtaaccgtctcactggaaccattccagatattttcaaatccatgccagagctccgatctttaactctctcccgcaacggattcttcgggaatcttcctccgtccattgcatcactcgcaccgat

SEQ ID NO: 82476 - DNA, 1330 bp, Arabidopsis thaliana columbia
aggtctctacgactcacatattgggaaagctggcacgcctgcaggtaccggtccggaattcccgggtcgacccacgcgtccgctaagccagcttgaagcgttcagcctcgagggaaaccggttcaccggtccgatcccgagctcgatatctaatttgactctgttaactcaactcaaactcggcaataatctcctaaccggaactataccgctaggggtcgctaatctcaagctcatgtcgtatctcaaccttggaggtaaccgtctcactggaaccattccagatattttcaaatccatgccagagctccgatctttaactctctcccgcaacggattctccgggaatcttcctccgtccattgcatcactcgcaccgattcttaggttcctcgagttaggccataacaaactctccgggacgattccaaactttttatcacacttcaaggcgctcgacacattggatctctccaagaatcggctctcgggtgtcataccgaagagtttcgccaatctgaccaagatattcaatcttgatctctcccataatcttctaccgatccaattccctgtcttgaacgttaaaggcattgaatctttggatctcttcttcaacccagtttcacttgaatacgatcccgaaatgggtgacttcgtcgccgatcatcttctcgttgaagctagcaaaatgcgggatcaagatgagcttagacgattggaagccagcgcaaacattctactatgatttcatcgatctgtcggaaaacgagatcacagggagtccagcaaggttcttgaaccaaacagagtatctagtggagttcaaggcagcgggtaacaaactacgattcgatatggggaagctaacgtttgcaaagacgctgacaactttagatatatcaaggaacttggtatttgggaaggtgccggcaatggtggctggactaaagacattgaacgtgagtcacaaccatctttgtggaaagcttccagtaacaaagttcccggccagtgcgtttgtgggtaatgactgtctttgcggctctcctctttctccttgtaaagcttaagcggcaagaaagctacaactggtagttggatatttaccgtgaccaataaagtttagctccaaataaaatttgtattaaaaagattacaacaaataaagtagttttatgttatgaagaagcttcattctaacaatatgtattagtgaaagtactcaaagtagtatttaagttctcaaaaaaaaaaaaaaaagggcggccgctctagaggatccaagcttacgtacgcgtgcatgcggtttcatagctcagctatagtg

SEQ ID NO: 82477 - DNA, 735 bp, Arabidopsis thaliana columbia
  unsure (1)..(735): unsure at all n locations
ggatagactatacaactttagcaacactggtttacccgaccctacttttaatactacatacctccagacacttggtggacaatgtccccgcaatggtaaccagaccgtcttagttgatttcgatctacgcacaccgacggtttttgacaataaatactatgtgaatctgaaagagctaaagggacttatccagacggatcaagagttgttttccagccctaatgccactgacacaatccccttggtgagagaatacgctgatggcactcaaaaattcttcaatgcttttgtggaagcaatgaatagaatgggaaacattacacctctcactggaactcaaggacaaatcagacagaattgtagggtggttaactccaactcgctgctacatgatgtggtcgaaatcgttgactttgtcagctctatgtaacataacgttgtctcgatatatgtggcaaccaaaaatatgttttatgaaataaagtgttctcaaaatgtttatgaagaacatttcgtcttaaatcttttctgtccttcatgtttttcttattactttttcaaagtaatctatctaccctcgattgatggaaaatagaactgaaacgaatagcatggttaatttacttaagnaataatatgtagtgttttattttataaaaaaaaaaggaaaggccgctctataggataggatgctaacgtaagggtgcattgcacgtaatagctgtgtctgatagt

SEQ ID NO: 82478 - DNA, 1271 bp, Arabidopsis thaliana columbia
  unsure (1)..(1271): unsure at all n locations
cacgcgtccgcccacgcgtccgcccaactaaagaggtttcttcttatagaaatgaatttctcttattcttccttgtcaacttggacaaccctaatgacattgggttgtcttctgcttcattcatccatttccagtgctcagctaaccccaactttctatgacaatacatgtccaagcgtctttaccatcgtacgggataccatagtaaacgagctaagatcggatcctcgtatcgctgcaagcatccttcgtcttcacttccacgactgtttcgtcaatggctgtgatgcatcgatcctgttagacaacacaacatcctttcgaacagagaaagatgcggctccaaacgcaaactcggctcgaggatttccagtgatcgatagaatgaaagcagcagtagagacagcatgtccaaggactgtttcatgcgcagatatacttaccatcgcagctcaacaagctgtaaatttggcaggaggtccttcttggagggttcctttggggagaagagacagcttacaagcattctttgctctcgctaatacaaatcttcccgctccattcttcactctcccacaacttaaggccagttttcaaaatgttggacttgaccgtccctctgatctcgttgcactctctggtggtcacacatttggtaaaaaccagtgccaatttattatggatagactatacaactttagcaacactggtttacccgaccctactcttaatactacatacctccagacacttcgtggacaatgtccccgcaatggtaaccagaccgtcttagttgatttcgatctacgcacaccgacggtttttgacaataaatactatgtgaatctgaaagagctaaagggacttatccagacggatcaagagttgttttccagccctaatgccactgacacaatccccttggtgagagaatacgctgatggcactcaaaaattcttcaatgcttttgtggaagcaatgaatagaatgggaaacattacacctctcactggaactcaaggacaaatcagacagaattgtagggtggttaactccaactcgctgctacatgatgtggtcgaaatcgttgactttgtcagctctatgtaacataacgttgtctcgatatatgtggcaaccaaaaatatgttttatgaaataaagtgttctcaaaatgtttatgaagaacatttcgtcttaaaaaaaaaaaaaaaaaaannaagggcggccgctctagaggatccaagcttacgtacgcgtgcatgcgaagt

SEQ ID NO: 82479 - DNA, 615 bp, Arabidopsis thaliana columbia
  unsure (1)..(615): unsure at all n locations
atgatactccagctcccnnnnnnnnnnnnnnnnnnnnnnnnnnnnnnnnnnnnnnnnnnnnnnnnnnnnnnnnnngtcgaccacgcgtccgagcaatttctgaaacttttagtcatcatcagctcaatttcggatctccggagttgtatttttactcctttgtcggaggtaaaatggctcagtcgtcgttggtggcggcggcggggagaagcggaagggttatcggcgattatgcggtgggtcgacaaatcgggtcggggtcgttttccgtggtttgggaagggaggcatcttgttcatggcaccgtcgttgctatcaaggagatcgctatggctcggcttaataagaagttgcaagagagtctcatgtcggagattatcatcttaaggaagattaatcatcctaacatcattcgctttatcgacatgatcgaggctcccgggaagataaatttggtgttggagtactgtaaaggtggtgatctgtctatgtatattcacaaacatggaagtgttcctgaagctactgctaagcattttatgctgcagttagcggctggcttacaagttcttcgtgacaataatatcattcaccgcgatttaaagcctcagaatc

SEQ ID NO: 82480 - DNA, 595 bp, Arabidopsis thaliana columbia
  unsure (1)..(595): unsure at all n locations
gggtccgaaaagggatattattttgtcaagaatcttacatatttttgttttgttttttttggttcttcttgctacagttgcataatgaagaatatggtaattaaataaaatacagtcgcaaacaaaatctacaacaatggatccgacaaaggatgacagcgatcctacaaggatctctatcttatgtattcctttaatcatgaataaatgttttgtcaaccctcttatgaacaggtcccaagtttatctctgtagtttaaccggcaatacaatgccatcatgctgccagttcattgcattctgcatcctctttctactgatcggagatatatcaacccgcgctttattctctcgccagtatcctgaagccgaagtaagttccaatctttctggaagggctcctaatctggcagtggtagcaacacggtatccatccttggatcccaagcttttacaatgcggcaccttctatggctttccagctccaggacaaaacgtccatccgggagtggatcacactctgtgatttnaactttgcaagcaacatccactggagaacctgtcgccgaatnaagagctaccattcccatccgat

SEQ ID NO: 82481 - DNA, 546 bp, Arabidopsis thaliana columbia
cccacgcgtccgataatcggcgccaagtacttcaagcacgacggcaatgtgcctgccggcgaagtccgatcaccgatcgatatcgacggacatgggacgcacacgtcatccaccgtagccggcgttttagtcgcaaacgcgagtctctatggcatagcaaacggcaccgcccgcggcgcggttccgtcggcgaggttagcgatgtacaaggtttgttgggcgagatccggctgtgctgacatggacatactcgccggattcgaagcagcgattcacgacggcgtagaaattatctccatctctatcggcggtccaatcgccgattactcttccgattcgatatccgtcgggtcgtttcacgcgatgaggaaaggaatcctcacggtggcgtccgccggtaacgacgggcctagctcaggaactgtaacgaaccatgagccgtggatattgacggttgctgcaagtggaatcgatcggacgttcaagagcaaaatagatctcggcaacggcaaatccttctctgggatgggaataagcatgtttagt

SEQ ID NO: 82482 - DNA, 573 bp, Arabidopsis thaliana columbia
tttttttttttttttttttatagggaacaagggttacgtatccttcaccattaaaatactcaaaacgtctctacaacactatcacaaactacaaaagacaatacgaaacaaacttatgtggatagtttcacacaacagttccaaacacacagacaacacttgtctccttatctaacaaaacaaccaaagatagtagagagacaaagaaactaagaagcagcatcaaaagcagaggagcagtagcttctccaggtctctggtaagcagattaggcatgatcacaaaactccaacgtgacaaaggtgttctaggtaagaacctgaggaatgtcttttcttcacaagaagtggattaatgttgagactgaaatggcttgaatctggatgaacctttaccagcagagatagtctaagactctaagagggtcagtaaacttcccctcccttttccattccaaaacaggagcgggcgagagggagtccttgccgggggagtagttagatttacatcatttaaggcttgacagaaatgaataagaaggaagagaagaagacttaaaaaagagagttaaag

SEQ ID NO: 82483 - DNA, 1314 bp, Arabidopsis thaliana columbia
  unsure (1)..(1314): unsure at all n locations
acaaattcattctaaatacatttcttttcactcaagaaattaaaatttcgaaaagtttgttaaaatgaatgcacacatgctcaatctccttgtcatagtcatttttgtagtttctttcgatgtccaagcactcagtcctcactactacgaccatacttgtccacaagccgaccacattgtaaccaatgcagtcaagaaagccatgtcaaacgaccaaactgtccctgctgcgcttttgaggatgcatttccacgactgtttcgtcagaggatgtgatggctcagttctcttagactctaaggggaagaacaaagcagagaaagatggacctcctaacatctcactccatgcattttatgtgattgacaatgcaaagaaggcattagaagaacaatgtcccggtatcgtctcttgcgccgacattctttcacttgcggcaagagatgctgtcgctctctcaggagggcctacatgggcagtgccaaaagggagaaaagatggaagaatatcaaaggcaatagaaacaagacaactaccagctcctactttcaacatttctcaattgcgtcaaaattttggccaaagaggcctctctatgcatgatcttgttgctctctctggaggtcatacactaggattcgcccactgttcatcgttccagaataggctccataaattcaacacacaaaaggaggttgacccaacactaaacccctcattcgcagccaggttggagggagtgtgcccggcccataacacggtgaagaatgctggatcgaacatggatggaaccgtgacgtcattcgacaatatctactacaagatgcttatccaaggcaagtcactattctcatccgacgaatcgcttcttgcagtaccctctactaagaaactcgtggccaaatatgcaaattccaacgaagagttcgagagggcttttgtgaaatcgatgatcaagatgagtagtatcagtgggaatggcaatgaggtcagacttaactgcagaagggttcgctagaatctcaatctacgcttccaacatcacgttactactacatttttatgtctttcgttttctttcgtcacattgattacttgtgaatgggcctttctaaagattaaggcagaggttcttgtatcaggattatctatcaatctctcgtgtgtgcttggataggcatttatttacaagtaataagatcttttctctttcctnnnnnnnnnnnnnnnnnnnnnnnnnnnnnnnnnnnnnnnnnnnnnnnnnnnnnnnnnnnnnnnnnnnnnnnnnnnnnnnnnnnnnnnnnnnnnnnnnnn

SEQ ID NO: 82484 - DNA, 539 bp, Arabidopsis thaliana columbia
  unsure (1)..(539): unsure at all n locations
nnnnnnnnnnnnnnnnnnnnnnnnnnnnnnnactagataaagatatgagtggatcgctgtgcaaacaagaacttaaagaatatgctgatgggaccctaactgagattttcattgaaagagtgttcgatgagcatgtccgccgtggtaaaatcgtggcaggcaattcccgggaaatggactttgacagtttcctcgattttgttcttgctttggagaacaaagatactccagagggtttgacgtatttattccgttgccttgatctccaagggagaggctttctcactactgctgatattcactctcttttcagagatgttcaccagaaatggatagaaggtgggaactatgaactgtgcatagaagatgttcgagacgagatctgggacatggtgaaaccggctgacccattaaagaatcactctgggggatctcttgggatgtaaacaagggggaaccggtgcaagcttcttattaatgtgcggggttttgggcttatgcaaccgggaaaacctttttaaaaaaaacaaaaacccgtt

SEQ ID NO: 82485 - DNA, 604 bp, Arabidopsis thaliana columbia
  unsure (1)..(604): unsure at all n locations
tctcccnatttgtctncttgngccaaggtccccggggnttgccgatttanccgttccctgaccccagggagaggctttcncactactgctgatattcactcccttttcagagatgttcaccagaaatggatagaaggtgggaactatgaactgtgcatagaagatgttcgagacgagatctgggacatggtgaaaccgtctgacccattaaagatcactctgggtgatctcttgggatgtaaacaaggtggaaccgttgcgagcatgcttatagatgtgcgtggcttctgggctcatgacaaccgtgagaaccttcttcaagaagaagaagaaccacctgaggaagagtctcagtgataatgttattttctatgtctacctaaaaaaaatgctaaatcattgagatcaaaagtctcgcactagtaaacagtctcatctcatgtgtgtgtatctttgtaagcttattagttggtgacgtttaatgaaatggctgtttatatccaaacttgtcttaaaaaaaaaaaaaaaaaaaaaaaaaaaaaaaaaaaaaaagggcggccgctctagaggatccaagcttacgtacgcgtgcatgcgacgtcat

SEQ ID NO: 82486 - DNA, 428 bp, Arabidopsis thaliana columbia
gtttaggagccgtacaaattataatctcgccggaatccaccgtgagtgatttaatctacgccgccgttcgtcagtacgttaaagaagctcgccggccaatttttaccggaatctgaaccgtcacgatttgatcttcattgctcgcagtttagtcttgagagtattgtaagagacgagaagttgatatcgctagggtcgagaaactttttcttatgtggtcggaaagagaccggagggtttatcggctgtggtttatcgtcggaatcttgttctaaggaagcagagaaagtggctaaaactggttttcattggctcaaatttatgggcttctagaagtttttatcattttgaatgattgctttttcaaattagttccattctttagaaaaaggatataaaaaacatctgtgtatatcatttctatgtag

SEQ ID NO: 82487 - DNA, 939 bp, Arabidopsis thaliana columbia
  unsure (1)..(939): unsure at all n locations
cccacgcgtccgcccacgcgtccgctcttatccttttaccctcatcatcctccactatttacagttttgccactctgactttatgctagcttcttccggtgactggcgataacacgagagagccttcgccttctccaagcttcatactcttccgacgataaagattagaagacatgaagaacggtaaccggaaaacaacgccggaaacagagaagtctcaccggagaaagttatcagagaaagcgatgtcgtttcacggcagaggaacaacgccgttatcaaatccaggcgagcttcgaagaccgaaaacgttaccggagttattctccaccggtcaaagcatcaccgtaccggagacggtttcacttacgccacgtttgacgaaacttttacttaacgtgacggtacatggaagtttaggagccgtacaaattataatctcgccggaatccaccgtgagtgatttaatcgacgccgccgttcgtcagtacgttaaagaagctcgccggccatttttaccggaatctgaaccgtcacgatttgatcttcattactcgcagtttagtcttgagagtattgtaagagacgagaagttgatatcgctagggtcgagaaactttttcttatgtggtcggaaagagaccggagggtttatcggctgtggtttatcgtcggaatcttgttctaaggaagcagagaaagtggctaaaactggttttcattggctcaaatttatgggcttctagaagtttttatcattttgaattattgctttttcaaattagttccattctttagaaaaaggatataaaaaacatctgtgtatattatttctatgtagaaatgaaaatcattaaaaaaaaaaaaaaaagnnnnnnnnnnnnnnnnnnnnnnnnnnnnnnnnnnnnnnnnnnnnnnnnnnnnnnnnnnnnnnnnnng

SEQ ID NO: 82488 - DNA, 917 bp, Arabidopsis thaliana columbia
gccgagcctaatacgacttacttagggaaagctggtacgcctgcaggtaccggtccggaattcccgggtcgacccacgcgtccgcccacgcgtccgcggacgcgtgggttatccttttaccctcatcatcctccactatttacagttttgccactctgactttatgctagcttcttccggtgactggcgataacacgagagagccttcgccttctccaagcttcatactcttccgacgatgaagattagaagacatgaagaacggtacccggagaaagttatcagagaaagcgatgtcgtttcacggcagaggaccaacgccggtatcaaatccaggcgagcttcgaagaccgaaaacgttaccggagttattctccaccggtcaaagcatcaccggaccggaaacggtttcacttccgccacgtttgacgaaccttttacttaccgggaccggacaaggaagttaaggagccgaacaaataataatctcgccggaatccaccgtgggtgattaaatcgacgccgccgttcgtcagtacgttaaagaagctcgccggccatttttaccggaatctgaaccgcacgatttgatcttattactcgcagtttagtctggaaagtattgaaagagacgagaagttgatatcgctagggtcgaaaactttttcttatgtgggcggaagagaccggagggtttatcgctggggttaatcgtcgaatctggtctaaggagcagagaaggtgctaaactggtttcatggctcaatttatggctttagaagttttatcattgaattatgcttttaaattagtccatcttagaaaggatataaaactctggttatattcttttgaatgaatcttaatagggggtaaggtttaccatttttccagatgttttgaaaaataaaaaaaaa

SEQ ID NO: 82489 - DNA, 1023 bp, Arabidopsis thaliana columbia
  unsure (1)..(1023): unsure at all n locations
nnnnnnnnnnnnnnnnnnnnnnnnnnnnnnnnnnnnnnnnnnnnnnnnnnnnnnnnnnnnnnnccacgcgtccgcccacgcgtccgaaacctctcttcctctcgccgcctccttcctcctcctcatctccttctcctccgccgtagacacttcccgtctcttcctcaccgtcgtcaacaactgtcccttcactgtctggccagccattcaacccaacgccggccaccccgtcctagagaaaggtggcttcgctctcccaactttcactcaccgctccttcaacgttccaaccacacactggtccggtcgcatctgggccagaacctggtgtgcccactacaacggaaaattctcctgcctcaccggagactgcggaaaccgcctggaatgcaacggtctcggcggggcaccaccagcttctctagctcagttcgacctccaccacggtggtcaccacgacttctcctcttacggtgtctctctcgttgacggttacaatgttccgatgaccgtgactcctcacgaaggccatggtgtctgtcctgtcgttggttgtcgtgaagatctaataaaaacgtgtccggctcatcttcaggtccggtcacacagtggacacgtggtggcttgtaagantnggtgtgaggctttccatacagacgagctgtgttgtcgtggtcatggcaatagccctaacacgtgtaaagcttcgagccattcgctgttctttaagcatgcgtgtccttcgagtttcactttttgctcatgcatagtccttcgcttatgcatgactgtgcttctcctagagagctcaaagtcatcttctgccactaatgtttcggccatgttctagggttattgtcgtaacatcggactgatcttctaatgcttttgtttggttagtctgattttgattggtttagtatgcgatttcccggttcagttatgtagtccaactatgaaattatgtattatcttgaaattgctctctttaattctctttttttatttcgattctgtaatgct

SEQ ID NO: 82490 - DNA, 754 bp, Arabidopsis thaliana columbia
  unsure (1)..(754): unsure at all n locations
cgaaacnnnnnnnnnnnnnnnnnnnnnnnnnnnnnnnnnnnnnnnnnnnnnnnnnnnnnnnnnnnnnnnnnnnnnnnnnnnnnnnnnnnnnnnnncggccgccttaagttatatttttttttttttgctttacagctcaaattagtcatcttcttcttcctctgtctcaattcttcctcctctcggatccatttttagaggagtctagtttcttacttgaacatagacatggaatcaactaataactgacaaccaagaggctgttcttttcaaatgattggtagtagttatattatgcttggacagtgccatgatgggcatctgtgagatgaaaagctgctgctcatggcttcttttgatctcgttgctttgctcactatctaatgaaagtcaagcgattagtcctgacggcgaggcgcttctgagcttcagaaatgcagttactagatcagatagtttcatccatcagtggagaccggaagatccagatccatgtaactggaacggagtgacatgtgatgcaaaaaccaaaagagttataaccttgaatcttacttattacaaaataatgggacctttacctcctgatattggaaagttggaccatctaaggcttttaaatgcttcacaacaatgccttttatggaggcataccctacagccttggggaaaatggacaccattggaacgaaatttcacttgccaaagtgacctacttcccttgggcccaaatcccagcctgaaaagggggaga

SEQ ID NO: 82491 - DNA, 656 bp, Arabidopsis thaliana columbia
ctcactattgggaaagctggtacgcctgcaggtaccggtccggaattcccgggtcgacccacgcgtccgatttgaacaagtgtgattgtttgtgacacagatttggatcggcgaatcttttgatgataaagattacttcatttctggttattctcgaagagtagaggtctcaaaagaaatggagtctaaggaaattagatcctcctctgtctttgagagatcgatgcgttttaatggactctttcaagataagctgagagttgttgagaaacagaatcaaccaccaaaacggtttaaccaaaaggagtctaattctggtttcacagtgattccaacgaagcaactttgtcgagtttatctccagaaaccgaatttgttggcttccaagggtataattgatgcactagctaagcctcctcataggatttttggtaggagatatgatcagcaaaacttcaagtcaaagctgagacatcttcacacaacaagtattgatcctctgaaacacaaatttggcaaggaagagaattctctgagatatttcactcctcttggtttcagtagtggttctcgtttaggagataggaagaaagggaaagacctttcctttcaggaggagaaaccaaaggaaatgaagaaactttgtgatcagaaaa

SEQ ID NO: 82492 - DNA, 558 bp, Arabidopsis thaliana columbia
  unsure (1)..(558): unsure at all n locations
attagacaaaagataagagagaatagagagagagcaatggccaatgcgaagccttttgtctcctcggcttcttttgtctgttattacagttattctccatcttccatatcggaaatggggaattggagatgaactattacaaagagagttgtcccaaagcggaagagataataagacaacaagtggagacgctttactacaaacacggcaacacagccgtatcctggctccgtaatctcttccatgactgtgtcgtcaagtcgtgtgatgcgtcgctgctgctagagacagcgagaggtgtggaatctgagcagaaatcgaagaggagtttcggtatgagaaactttaagtacgttaaggttttcaaagacgcactcgaggaagagtgtccttccacaagtctcttgtgcctgatattgtcgctctttcttcgagcagacggtattntcatgttgtaagggccaaaggtngggttttaaggcaggaagggggggttttggaggggcctctttggggattttgggctttacccaccctaccctaatatttttttcnnga

SEQ ID NO: 82493 - DNA, 665 bp, Arabidopsis thaliana columbia
  unsure (1)..(665): unsure at all n locations
actacggtngcccctaagggccaaagntggnttncacccgngggccnttagacttnggacccccgggnttcaaggaattcccgccccctcatctgttatccccaccttttaccccatttggcatcgatgtcgaacccaccggcgctcatcttaggtgctcactccagtgggtagggtcccctgcgttaaccttgttgcaccggcttatacccaacggattgcccctactctcgacccaagtttacgccctttacttaaaaaaacgttgcccaagtccaacaccggacccgaacgccgtccttgtactcccgtaacgatcgtgagactccgatggttgtggacaacatgtattataagaacatcatggcccataaggggcttcttgtcattgatgatgagctagccaccgatcccaggaccgcaccgtttgtggccaagatggctgcggacaataattacttccatgagcagttctcacgtggcgtcaggctcttgtccgagaccaacccgctcacgggagaccaaggggagatcaggaaggattgtcgttatgtgaactaatattgatggtccttgcataaaggatatatattgtggaaaagtaataataatagcggccgcgaattcgatatcaagcttatcgataccgtcgacctcgagggggg

SEQ ID NO: 82494 - DNA, 1394 bp, Arabidopsis thaliana columbia
  unsure (1)..(1394): unsure at all n locations
nnnnnnnnnnnnnnnnnnnnnnnnnnnnnnnnnnnnnnnnnnnnnnnnnnnnnnnnnnnnnnnnnnnnnnnnnnnnnnnnnnccacgcgtgcgcccacgcgtccgtacggctgcggacgacagaaggggcacacaccaataattaattagacaaaagataagagagaatagagagagagagagcaatggccaatgcgaagcccttttgtctcctcggcttcttttgtctgttattacagttattctccatcttccatatcggaaatggggaattggagatgaactattacaaagagagttgtccaaaagcggaagagataataagacaacaagtggagacgctttactacaaacacggtaacacagccgtatcttggctccgtaatctcttccatgactgtgtcgtcaagtcgtgtgatgcgtcgctgctgctagagacagcgagaggtgtggaatctgagcagaaatcgaagaggagtttcggtatgagaaactttaagtacgttaagattatcaaagacgcactcgagaaagagtgtccttccacagtctcttgtgctgatattgtcgctctttctgcgagagacggtattgtcatgttgaaagggccaaagatagagatgataaagacaggaaggagagatagtagagggagctacttgggagatgttgagactctaatccctaaccacaatgactctctttcctctgttctctccacctttaactccattggcatcgatgtcgaagccaccgtcgctctcttaggtgctcactcagtgggtagggtccactgcgttaacctagtgcaccggctatacccaacgattgacccgactcttgacccaagttacgccctttacttaaaaaaacgttgcccaagtccaacaccggacccgaacgccgtcttgtactcccgtaacgatcgtgagactccgatggttgtggacaacatgtattataagaacatcatggcccataaggggcttcttgtcattgatgatgagctagccaccgatcccaggaccgcaccgtttgtggccaagatggctgcggacaataattacttccatgagcagttctcacgtggcgtcaggctcttgtccgagaccaacccgctcacgggagaccaaggggagatcaggaaggattgtcgttatgtgaactaatattgatggtccttgcataaaggatatatattgtggaaaagtaataataataatatatatgtgtatgaatgtctgtcaatgttttggattcaataagaagaaataccaaaaccgttgtggatcagaaagagatgtttggatcgtcccaaggtttcgatgggannnnnnnnnnnnnnnnnnnnnnnnnnnnnnnnnnnnnnnnnnnnnnnnnnnnnnnnnnnnnnn

SEQ ID NO: 82495 - DNA, 433 bp, Arabidopsis thaliana columbia
ccccgccctccttcccttccttggtgtttttccaaagattacgattatggccacagcagcggtatccaacaatcctcctgggcgccggccaaacggctctcaagccctccagcgacctcatccaaaaaaggctgggcggcgtctttggggccggtggccgtgtggccatgaccatgtctttgtaccgtcaagtctactcccccaaagcatctggtatggtatggaccagaccgtcccaagtacttgggaccattctcggagaacacaccgtcttacttaactggagaataccccggagactacgtgctgggacaccgctggactctcggctgacccggagacattcgctaagaaccgtgagcttgaagtaatccacagcagatgggctatgttgggtgctctcggcggcacgctccctgaaattctctccaag

SEQ ID NO: 82496 - DNA, 412 bp, Arabidopsis thaliana columbia
cccacgcgtccgcggacgcgtgggcggacgcgtgggctttgattctttctgcgccgagaaacagagagagagaacagcaaccaaacactcatttctccacatcttgagagaaagaaaacagagcaagtatattagagatctcatgggcgatggcggtctccggagctgtcctcagtgggcttggttcttcgttcctcaccggaggcaagagacgtgccaccgcattggcaagcggcgtaggcactggagctcagagagttggcaggaaaactcttagttgtcgctgctgcggctgctcagcctaagaaatcttggatccctgccgttaaaggtggtggcaacttccttgaccctgaatggctcgatggctcgctaccaggagatttcgggttcgacccattgggtttgggga

SEQ ID NO: 82497 - DNA, 465 bp, Arabidopsis thaliana columbia
  unsure (1)..(465): unsure at all n locations
atcctttcctttcattgttgttataacaaagattacgattatggccacatcagctatccaacaatcctccttcgccggccaaacggctctcaagccctccagcgacctcatccaaaaggtgggcgtcttgggcggtggccgtgtgaccatgcgtcgtaccgtcaagtctactccccaaagcatctggtaccaaatttatcctctctccctcttatatgtcttaagtaatccttagttgtttagatctgtctaatcaccaaatgcaatataattttgtaacaggtatggaccagaccgtcccaagtacttgggaccattctcggagaacacaccgtcttacttaactgggnggaatancccggngnctncggcttggncaccgctggactttttggtgacccggggcatttgntaagaccntgagntttangaatcccagcanatgggnnatttttggggcttngg

SEQ ID NO: 82498 - DNA, 480 bp, Arabidopsis thaliana columbia
  unsure (1)..(480): unsure at all n locations
ctctcttcaatcctttcctttcattgtagtttaaccataagattacgattatggccacatcagctatccagcaatcctccttcgccggccaaacggctctcaagccctccagcgacctcctccgcaaggttgggcgtctccggcggtggccgtgtgaccatgcgtcgtaccgtcaagtctactccccaaagcatctggtacggaccagaccgtcccaagtacttgggaccattctcggagaacacaccgtcctacctaaccggagaataccccggagactacggctgggacaccgctggactctccggcctgacccggagacatttcgctaaggaccgtgagcttcgaagtaattccacagcagatcgggctatgttggggtgctctcggatgcacattcccctgagattctcttccaagaacggggttaaattcggggnaagcccttttggtttnaaaggnngttttntaaattttttt

SEQ ID NO: 82499 - DNA, 532 bp, Arabidopsis thaliana columbia
ggctctatacgactcacttagggaaagctggcccgcctgcaggtaccggtccggaattcccgggtcgacccacgcgtccgcccacgcgtacgaaacactcatttctccacatcttgagagaaaaaaacagagcaagtatattagagatctcatggcgatggcggtctccggagctgtcctcagtgggcttggttcttcgttcctcaccggaggcaagagaggtgccaccccattggcaagcggcgtacgcactggagctcacagagttggcaggaaaactcttattgtcgctgctgcggctgctcagcctaagaaatcttggatccctgccgtaaagggggggggcaacttccttgaccctgaatggctcgatggctcgctaccaggagatttcgggttcgacccattgagtttggggaaagacccggcttttctgaattggtacagaagaggctgagctgatccatggccgatgggcgatggcagcggttcttgagatcttcgtcggccaggcctgaagcggtgtggcatg

SEQ ID NO: 82500 - DNA, 585 bp, Arabidopsis thaliana columbia
agcagacatgttgctcttcatcgtagttatcgtcgctgattcaccaacaacaacaacatcacaagaaagcgtcctcttttataggaccctctgtccctgtttctctctccagttttattgtagaattcgctgtcattttcacaacgactcacttctttcagctctctccattcggcgctctcttctggaattgaagaatcaagattagcaatggcccatacatcagaatctgtgaatcctagagatgtttgcattgtgggtgttgcacgtactccaatgggtggctttctcggatctctttcatctttacctgccacaaagcttggatctttagctattgcagctgctttgaagagagcaaatgttgatccagctcttgttcaagaagttgtctttggcaatgttcttagtgctaatttgggtcaagctcctgctcgtcaagctgctttaggtgcaggaatccctaactctgttatctgtactacagttaacaaggtttgtgcatcaggcatgaaagcggtaatgattgctgctcaaagtatccagttagggatcaatgatgtagttgtggcgggtggtatggaa

SEQ ID NO: 82501 - DNA, 565 bp, Arabidopsis thaliana columbia
  unsure (1)..(565): unsure at all n locations
ctctatacgactcactatatgggaaagctggtccgccttgcaggtcccggtccgaatttccgggtcaaccacgcgtccgtccggaaaaaaaaacaaaaggttccggttgcaaaagccacccgccggtgccgctgcgagagacgacagaagggggaaaaacagagagagagaacaacacccaaccactcatttctccacatcttgagagaaaaaaacagagcaagtatattagagatctcatggcgatggcggtctccggagctgtcctcagtgggcttggctcttcgttcctcaccggaggcaagagaggtgccaccgcattggcaagcggcgtaggcactggagctcagagagttggcaggaaaactcttattgtcgctgctgcggctgctcagcctaagaaatcttggatccctgccgttaaaggtggtggcaacttccttgaccctgaatggctcgatggctcgctaccaggagatttcgggttcgacccattgggtttggggaaagacccagctnttctgaaatggtacagagaggctgacctgatccatggccgatgggc

SEQ ID NO: 82502 - DNA, 546 bp, Arabidopsis thaliana columbia
acaggtccggaattgaccgcacccgtccaggcacaacaaccatatcactcatttctccacatcttgtgtttactaaaaacagagcaagtatattagagatctcagcggcgatggcggtctcccgagctgtcctcactgggcttggttcttcgttcctcaccggaggcaagagaggtgccaccgcattggcaagcggcgtaggcactggagctcagagagttggcaggaaaactcttatttgtcgctgctgcggctgctcagcctaagaaatcttggatccctgccgttaaaggtggtggcaacttccttgaccctgaatggctcgatggctcgtaagtctattctcttttatatctgagttactagcatgaacaatgctgaattttcattcatatctctcataaactagcttggacaatagattatgataattcaaggtcctgattactcatttggttctaatttgttagctgaatctcaagagagcatgaaaagcccgaattgtttgttacccagttattgagtcaaatgtgtgtgatattcgca

SEQ ID NO: 82503 - DNA, 933 bp, Arabidopsis thaliana columbia
  unsure (1)..(933): unsure at all n locations
nnnnnnnnnnnnnnnnnnnnnnnnnnnnnnnnnnnnnnnnnnnnnnnnnnnnnnnnnnnnnnnnnnnnnnnnnnnccacgcgtccggaagacgacagaagggatggctcgatggctcgctaccaggagatttcgggttcgacccattgggtttggggaaagacccggcttttctgaaatggtacagagaggctgagctgatccatggccgatgggcgatggcagcggttcttgggatcttcgtcggccaggcctggagcggtgtggcatggtttgaagctggagcccagccagacgcgatcgctccctcctcgttcgggtcgcttcttggaacccaattgcttctcatgggttgggtggagagcaaacgatgggtcgatttcttcaacccggattctcaatcggttgagtgggcaacgccatggtcgaagaccgccgagaatttcgcgaactgtaccggcgatcagggaaaccccggggggagatttttgaacccgctggggttccccgggaaaaaccccccccgtgtttattacccggccttttaaaaactggagaggcttaaattgcaaagattaagcactcaaggctcccaaaggttgccatgttgattttttacttttaggccgggcaggggaaaacccctctcggggctcttggtttgtgagaaaacggcaggatgtttttgatcccccccagacaattttttttccaaaaacctaatgtttctctttttcaatgtgacatttgggaaaagatcatcaaaccattgctataaatgtaaaatgaaatcatgaggcttgttcgtagataactttattatcccacctcccaaaaaaaaaaaaaaacaaaaccaaannannnnnnnnnnnnnnnnnnnnnnnnnnnnnnnnnnnnnnnnnnnnnnnnnnnnnnnnnnnnnnnnnngctccta

SEQ ID NO: 82504 - DNA, 1055 bp, Arabidopsis thaliana columbia
gaaaaaccggcccacactctctcttcactcctttcctttcattgtagttaacgaaaagattacgataatggcaacatcagctatccagcaatcctccttcgccggccaaacggctctcaagccctccaacgaactcctccgcaaggttggtgtctccggtggtggccgtgtgaccatgcgtcgtaccgtcaagtctactcctcaaagcatctggtacggaccagaccgtcccaagtacttgggaccattctcggagaacacaccgtcctacctaaccggagaataccccggagactacggctgggacaccgctggactctcggctgacccggagacattcgctaagaaccgtgagcttgaagtaatccacagcagatgggctatgttgggtgctctcggatgcacattccctgagattctctccaagaacggtgttaaattcggagaagccgtgtggttcaaggcaggttttcagattttctcagaaggaggtcttgattacctcggaaaccctaacttgatccacgcgcaaagcatcttagccatctgggctgttcaagttgtgctcatggggttcattgaaggctacagaatcggaggtggaccactcggagaaggacttgacccgctttatcccggaggtgcgttcgacccattgaacttggctgaggatccagaggctttctctgagctgaaggtgaaggagctcaagaacggtcgtcttgccatgttctctatgtttggattctttgtccaagccattgttactggtaaaggtcccattgagaacttatttgatcatttggctgatcctgtggctaacaacgcctggtcttacgctactaactttgtccccggaaagtaattatcttatggatttgcttcaaaatctctctgctttgtaaactcgggaatggacttattggtgttccatgggaatttggcccttaatgcttaaaaaaacaaaaaaaaaaaaaaaaaaaaaagggcggccgctttagaggatcccagcttacggaaggcgtgcatgcgaacgtcatagctgttctatagtg

SEQ ID NO: 82505 - DNA, 1083 bp, Arabidopsis thaliana columbia
  unsure (1)..(1083): unsure at all n locations
nnnnnnnnnnnnnnnnnnnnnnnnnnnnnnnnnnnnnnnnnnnnnnnnnnnnnnnnnnnnnnnnnnnnnnnnnnnnnccacgcgtccgctttttttgtgttcttgtttagaagaagcaatggccacttcagcaatccaacactcttctttcgctggccaaacgaccctaaagccatccaacgatctcctccgcaaaatcggagcctccaatggcggtggccgcatcatcatgcgtcgtaccgtcaagtctactcctcagagcatctggtacggaccagaccgtcccaaatacctaggaccattttccgaaaacacaccatcatacctaaccggagaataccctggagactacggttgggacaccgctggtctctcagccgatccagaaacattcgcaaagaatcgtgagctcgaagtgatccacagtagatgggcaatgttgggagctttaggctgcaccttccctgaaattctctcaaaaaacggagtcaaattcggtgaagccgtgtggttcaaggcaggatctcaaatcttctcagaaggagggcttgactacctcggaaaccctaacttgatccacgcgcaaagcatattagctatatgggcgtgtcaagttgtgctaatgggattcattgaagggtacagaatcggaggtggtcctcttggggaagggcttgacccgctttacccgggcggggccttcgacccgttgaacttagcggaggatccagaagcgttttcagagttgaaagtgaaggagcttaaaaacggtcgtcttgctatgttctcaatgtttggattctttgtccaagccatagttaccggtaaaggtccgatcgaaaatctgttcgatcacattgcagaccctgtggctaacaatgcttgggcttacgccaccaacttcgtccccggaaaatagagtttgatcggataatttatgtaaattatatcttttaaacatttatcaatgcattaaagttatccctaaaaaaaaaaaaaaaaagannnnnnnnnnnnnnnnnnnnnnnnnnnnnnnnnnnnnnnnnnnnnnnnnnnnnnnnnnnnnnnnnnnnggcctcaatt

SEQ ID NO: 82506 - DNA, 1100 bp, Arabidopsis thaliana columbia
taggtacacactatagaagagttatgacgtcgcttgctcgttctgctccgaaaaacagagagagagaacaacaaccaaacactcatttctccacatcttgagagaaaaaaacagagcaagtatattagagatctcatggcgatggcggtctccggagctgtcctcagtgggcttggttcttcgttcctcaccggaggcaagagaggtgccaccgcattggcaagcggcgtaggcactggagctcagagagttggcaggaaaactcttattgtcgctgctgcggctgctcagcctaagaaatcttggatccctgccgttaaaggtggtggcaacttccttgaccctgaatggctcgatggctcgctaccaggagatttcgggttcgacccattgggtttggggaaagacccggcttttctgaaatggtacagagaggctgagctgatccatggccgatgggcgatggcagcggttcttgggatcttcgtcggccaggcctggagcggtgtggcatggtttgaagctggagcccagccagacgcgatcgctcccttctcgttcgggtcgcttcttggaacccaattgcttctcatgggttgggtggagagcaaacgatgggtcgatttcttcaacccggattctcaatcggttgagtgggcaacgccatggtcgaagaccgccgagaatttcgcgaactataccggcgatcagggataccccggtgggagattcttcgatccgttgggtctcgccgggaaaaaccgcgacggtgtttattaaccggacttttagaaactggagaggcttaaattggcagagattaagcactcgaggctcgccaagggtgccatgttgatcttttactttgaggccgggcaagggaaaacgccttaaggtggttttggtttgtgaaaaaacggcataaaggttttgaatctggagaaaccaatttttttcccaaaacctaaaggttttttttttccaaggaccatttggggaaagatccaccaacccttgcttttaaaaaaataaaaaaaaaaaaacccacaaaacggccggtttaaaagaatccaggctaaggaaggggggcatgcaacgtc

SEQ ID NO: 82507 - DNA, 1042 bp, Arabidopsis thaliana columbia
  unsure (1)..(1042): unsure at all n locations
ccgcaatcctttcctttcattgtagttaaacaaagattacgattatggccacatcagctatccaacaatcctccttcgccggccaaacggctctcaagccctccagcgacctcatccaaaaggtgggcgtcttgggcggtggccgtgtgaccatgcgtcgtaccgtcaagtctactccccaaagcatttggtatggaccagaccgtcccaagtacttgggaccattctcggagaacacaccgtcttacttaactggagaataccccggagactacggctgggacaccgctggactctcggctgacccggagacattcgctaagaaccgtgagcttgaagtaatccacagcagatgggctatgttgggtgctctcggatgcacattccctgagattctctccaagaacggtgttaaattcggagaagccgtgtggttcaaggcaggttttcagattttctcagaaggaggtcttgattacctcggaaaccctaacttgatccacgcgcaaagcatcttagccatctgggctgttcaagttgtgctcatggggttcattgaaggctacagaatcggaggtggacctctcggagaagggcttgacccgctttaccccggaggtgcgttcgacccattgaacttggctgaggatccagaggctttctctgagctgaaggtgaaggagctcaagaacggtcgtcttgccatgttctctatgtttggattctttgtccaagccattgttactggtaaaggtcccattgagaacttatttgatcatttggctgatcctgtggctaacaacgcctggtcttacgctactaactttgtccccggaaagtaattatcttatgtatttgcttcataatctctctgctttgtaaactcgtgaatgtgtaatattgacgtttgatgtgaatttggcacttaatgatgtttcttgggtgggtacttttttttgaatcgtgatgaaagattttgtttcacagatgcaggtgagtttgttttggcaccnnnnnnnnnnnnnnnnnnnnnnnnnnnnnn

SEQ ID NO: 82508 - DNA, 820 bp, Arabidopsis thaliana columbia
  unsure (1)..(820): unsure at all n locations
cgggccggaattcccggatcgaccacgcgtccgggaaagacccggcttttttctgaaatggtacagagaggctgagctgatccatggccgatgggcgatggcagcggttcttgggatcttcgtcggccaggcctggagcggtgtggcatggtttgaagctggagcccagccagacgcgatcgctcccttctcgttcgggtcgcttcttggaacccaattgcttctcatgggttgggtggagagcaaacgatgggtcgatttcttcaacccggattctcaatcggttgagtgggcaacgccatggtcgaagaccgccgagaatttcgcgaactataccggcgatcagggataccccggtgggagattcttcgatccgttgggtctcgccgggaaaaaccgcgacggtgtttatgagccggactttgagaagctggagaggctgaaattggcagagattaagcactcgaggctcgcaatggttgccatgttgatcttttactttgaggccgggcaggggaaaacgcctctcggtgctcttggtttgtgagaaaacggcatgatgtttttgattctgtagatacaatttctcttccaaaaacctaatgtttctcttcttcaatgtgacatttgggaaaagatcatcaaaccattgctataaatgtaaaatgaaatcatgaggcttgttcgtagataaaaaaaaaaaagggcggccgctctagaggatccaagcttacgtacgcgtgcatgcgacgtcnnnnnnnnnnnnnnnnnnnnnnnnggcaatcgnnnnnnnnnnnnnnnnnnnnnnnnaaagtatcat

SEQ ID NO: 82509 - DNA, 389 bp, Arabidopsis thaliana columbia
aaagagaagaagaaatctaaaccaaccaatacaatagttttatgtaattctattttaatacaaaactggcttccgttttaaaaatctactgtcgttggttacattttgtatacggggatcttgacttttaagtaagggtttaggaagtgaagatatcttgaaagaaggcatggatgtcacctttactgatgtcaagctccgcaaacttgtcaacagcatccttgaatgcttgatcttgagacgatattttgtcaaggcttagtttatcgacgttgttgttactctcaaaggcgtccaacacgatggctgctctcttcacgacttcctccgggacaccagcgagtagcgcacagtgaaggccatagctcagcaaagtttgtcccggaatt

SEQ ID NO: 82510 - DNA, 510 bp, Arabidopsis thaliana columbia
taatcgactcactattgggaaagctggtacgcctgcaggtaccggtccggaattcccgggtcgacccacgcgtccgccaacgcgtccgatcgcgtaaaattgaaattcaaattctcgccggagctccgcccgataaaacaataagcgacgtgcggcgatggaatctcacggctccggtctccggcgagttctggtattggtcgatctgtgtcgctgggatctgggcagcttacatataccaaggcattcttcaagagacccttgtcgacgaagagtttgggtgaagatgggaagagattcgagcatcttgcatttctgaatttggctcagaatggtatctgcttcggcttggtccttatataatgattaagctctggtccaacggaggttctggtggagccccatggtggacgtattggagtgctggcattactaataccattggtcctgctatgggcattgaagctgcaaagcatattagttacccagctcaggtgcttgcagaatctt

SEQ ID NO: 82511 - DNA, 699 bp, Arabidopsis thaliana columbia
  unsure (1)..(699): unsure at all n locations
gccnnnnnnnnnnnnnnnnnnncgccccctttgacgttgcacttgcagttctgcagcaccggtccggaattcccccacgcgtccgcgcaactgatcaaatagcgtaaaattgaaattcaaattttcgccggagctccgtcggataaaacaataagcgacgtgcggcgatggaatctcacggttccggtctccggcgagttctgttattgtcgttctgtgtcgctgggatctgggcagcttacatataccaaggcattcttcaagagaccttgtcgacgaagaaatttggtgaagatgggaagagattcgagcatcttgcatttctgaatttggctcagaatgtaatctgcttggtttggtcttatataatgattaagctctggtccaacggaggttctggtggagccccatggtggacgtattggagtgctggcattactaataccattggtcctgctatgggcattgaagctttaaagtatattagttacccagctcaggtccttgcaaaatcttccaaaatgattccagttatgctgatgggctccttagtttatggcataagatacactttgcctgagtatctttgcacctttcttggttgccggaggagtatctatgtgtgccctttttaagacaagctctaaaaccatcagctagctagcacatcccaatgcaccccttaggtacgggctttgc

SEQ ID NO: 82512 - DNA, 781 bp, Arabidopsis thaliana columbia
aaaagccataaccaagattcgtcaagaaatcaacacacaactatctccaagaaccaatgattttgattcattcaatgctcaagagttaaacaagttggtgtatgtacatggagcattgtgtgaagcccttaggctatatccaccggttccatttcagcacaagtctcctacaaaatccgacgttcttccaagtggacacagagtcgatgcgagttcgaagattgtgttctgtctttactcattagggagaatgaaatcagtttggggagaagatgcatcggaatttaaaccggagagatggatttctgagagtggaaggtcggttcacgtgccttcttttaagttcctatcgtttaacgccggtccaaggacttgtttggggaaagaagtggctatgacgcaaatgaagacagtggctgtgaaaatcatacaaaattatgacattaatgtcgttgaagggcacaagatcaagccagctccttcggttattctccacatgaagcatggtcttaaagtcactgtctctaaaagatgtttgtcttgaatgttttaactagaatgtagaaactgtggcagttgacgaagatgatttctatgatatgaagacatctcaaatcatgcatcctgaaatataatgttattgttaaacataatttctaaaatttaagtaaaatatataaatgttggtaagaaaaaaaaaaaaaacaaaaagggcgaccgctctagaggatccaagcttacgtacgcgtgcgtgcgacgtcatagctctctagtagtgtca

SEQ ID NO: 82513 - DNA, 1000 bp, Arabidopsis thaliana columbia
  unsure (1)..(1000): unsure at all n locations
nnnnnnnnnnnnnnnnnnnnnnnnnnnnnnnnnnnnnnnnnnnnnnnnnnnnnnnnnnnnnnnnnnnnnnnccacgcgtccgctctgcgtcgttctagggtttttgttactctttgcttcgaagatgggaaaggcaaagaaacctcaaaagtttgctgtcgtgaagaagatgattagccacaaagctttgaagcattacaaggaagaggttctgaatccaaacaagaaggacctcacggaacttccgagaaacgtaccgagtgttcctgcagggcttttcttttcttacaactctacattggttcctccttaccgtgttttggtggatactaacttcatcaacttctctatccagaataagatcgatcttgagaagggaatgagagactgtctgtacgcaaattgcactccttgtatcacggattgtgtcatggctgagttagagaagttaggtcagaagtatcgtgtagctctaaggattgcgaagatcctcacttcgaaagactaccttgtatacacaaagggacatatgctgatgactgtctcgttgacagagttactcagcataaatgcttcatagtggctacatgtgatagagacttaaagcgaaggattcgaaagattcctggtgtgcccatcatgtatgtgactaatcgcaaggactcaatagaaaagttgcctgaagctacacttggtggagctcccaggtactgataatttattaaagaccctattaattccatgaagcccttaagcctccagccttaattgggatcgggttacgcgcttaatccacttaattggaaagggtaaggtgttaacccatttggtccccaaggtgggttccccggtggtaaattgaaaccaaggttatttaaaaccccaccagaattcttatttaaaaaaaaaaaaaaaaaacccaagggcggcccgtttaaaagaatccaggctaaggaaggggtgcatgcgacgtcataactcttctattagtgtcacccta

SEQ ID NO: 82514 - DNA, 1377 bp, Arabidopsis thaliana columbia
ggaccaaaattgcctataaaagcaaagtccatctattccacaagaacaagaaaaggcagagaagagagaggctctgataaaaaaaaaaacaaaaaaaaatgacaaaggcttattcaacacgtgtcctcacgtttctgatattgatctcgctaatggcggtgacactgaacctttttcccacggtagaggcaaagaagcggagtagagatgctcctatagtgaaaggtctctcatggaacttttaccagaaagcatgtccgaaagtcgaaaacatcatcagaaaagagctcaagaaagtcttcaagagagatattggtttagccgcagccatccttcgtatacatttccatgattgctttgttcagggatgtgaagcatcagtgctgctagctggatcagccagtggaccaggagaacaatcatcaatcccaaatctgacactacgtcaacaagcctttgtcgtcattaataaccttcgtgccctcgtccaaaagaagtgcggtcaagtcgtctcttgctcagatatcctcgctctcgccgctcgcgattccgtcgtcctatcaggagggccagactatgctgtcccacttggccgacgtgactctctagcgttcgcgagccaggaaacgacgttaaataacttaccaccaccgttcttcaacgcgagccagctcatcgccgacttcgccaacagaaacctcaacatcaccgacttagtagcactttccggtggtcacaccatcggaatcgcgcattgtccgtctttcacagaccgactctacccgaaccaagacccaaccatgaaccagttcttcgccaacagcctcaaacgcacttgtcccaccgcaaactcgagcaacacgcaaggtaatgacataaggagtcctgacgtgttcgacaacaagtactacgttgatctcatgaaccgacaagggctattcacttctgaccaggatctcttcgtggataagaggacacgtggcattgtggaaagctttgcgatcgaccagcagctgttttttgattattttactgtggcgatgatcaagatgggtcagatgagtgtcttaactggaacacaaggagagattcgttccaattgttcagccagaaacacccaaagtttcatgtccgttttggaagaaggcatagaggaagctatttccatgatctaaataaccataaatctcgacctttcctttgtcaactctgtttttatttagttcatgcacttgtggttgggttgtcgaatgcgtaaaactatctgataaataagaacgtcgcttcatcttaaaaaaaaaaaaaaaaggcggcccgctctagaggacccagctacgtacgcgtgcatgcgacgtcatagttcttctatagtgtcac

SEQ ID NO: 82515 - DNA, 473 bp, Arabidopsis thaliana columbia
cccacgcgtccggtcagtttgactaataaatttcagatggctgtttctctgacagcttgtaatcgttggctattgacaggaacaccaacccctaacacaccaaatagccagctttcacatatccaacctcttttaaagtttcttcacgaggaagtctatggagaaaatccaaagttttgggaagctggcatccttagaccatttgaagcagaaatggaggagggtcgtttgcgtttacttcagctgcttcagagatgcatgataagctctagaaagaaagatctgcagatgattcctccgtgtatcaagaaggtgacataccttaatttccttccagggcatgcaagaagctacaatgaactagtggagacagttaggcgtaatatcttattagctgattggaatgatgcgtctcatgtagaaagtctgcttaactctaaacagtggaaatttcggagcattaccattagtaa

SEQ ID NO: 82516 - DNA, 685 bp, Arabidopsis thaliana columbia
  unsure (1)..(685): unsure at all n locations
aaaagtaatttgccgcctgctattatgacactgtctgacgactacacattctcctttgtattgtcagaattaaaaattattcatatttctggacgaaacaaaaaaaataacatttaaaacctagcgttttcgaagccgtgcaagtcgctcttcttcatcatagctaacttagccagtttctcagccgctctccacgctgatgctggagtcaacggctcaccgttttcatccatcaacgtcatcgtcgtcgtggtctctctctcgcttcctctccgccgttgattatgttgctgctggtgctgactttgatactccattagttgttgtcctctccattgaacttccaccagctctgcctccacgacctttatgtactcagccgcttccaccgttcccgactgggccaagcaacgcacgcgctgatgttagcaagtggtatgcgcttgtgcattctccgtattccactagcctccgcgactcggcaacagcccgagtcgctataaagaggcttctaagccgctcgattctaggagaagagatgatcgacggcttnagggacgcggagagatggtctcggccataacanttctggggngatgggcctnaagagactctaatgacaaactggaaggccaatgngggtacggggnccaagccaacaagagccntttcccnctgggaaagg

SEQ ID NO: 82517 - DNA, 383 bp, Arabidopsis thaliana columbia
cattagattaaatatagcgggaaatcgaaaattcaatgttacaacattggaaaaacattttccttttcatggttcggatcaatctgttggtgtgatacacaaaatccaatatgcttttataggatttaattgaagaatcccatgaagaatcatcaggggtctagtatgagtgttacagattgtgtgttatggcatggggctccaagttttctttgctgttcattcctgctaatctactgagggttctgtcttttgcgaaacctaattcgttatccacgcagagctcagtaacatcgttctttcttgatcttgatgatgttcttggacccatcgatttcgcctctgagattgttataatcttttccaaaagttcttgaggattt

SEQ ID NO: 82518 - DNA, 733 bp, Arabidopsis thaliana columbia
gaagaacgataaacacagagctttctgttctttcgacatatcaaccgtttccttccttaatttgcgttcgttgtgaaaccatagatccaggtgaattctggaaaacatcttgaagcgaaatcgagacatcgttggaggatcaaaacgttaattcgattgatcgatgaatcctagaagggagcctcgtggtggtagaagttctctctttgatggcatcgaagagggaggaattagagctgcttcttcttactctcatgagatcaatgaacatgagaatgagcgtgccttggagggattgcaagatagagtcattctcttaaaacgactatctggcgatataaatgaagaggtcgatactcataaccgcatgcttgacagaatgggcaatgatatggattcatcaaggggatttctctcaggaaccatggaccgctttaaaacggtgtttgagacaaagtcaagccgaagaatgctgacgctcgtggcatcgtttgttggtttatttctagtcatatactatcttactcggtaaaattggcaaacccggagtattcctgaacattcatccatgatctcatgatattcccagtctctctctgttggctcctacgatctaattgtcaccaaccagtgtaatgatgtatgcctccagtgttatagtgtgctctagtgcttgggatgaggacacatttcataaaacttataaaaagtttaatatatttggattttatag

SEQ ID NO: 82519 - DNA, 749 bp, Arabidopsis thaliana columbia
  unsure (1)..(749): unsure at all n locations
gttnnnnnnnnnnnnnnnnnnnnnnnnnnnnnnnnnnnnnnnnnnnnnnnnnnnnnnnnnnnnnnnnnnnctttttttttttttttaacaaaaattaccattgacattgaagcaaaacatgaagaatacaaaaaggttacaaactataaaaatactgcaagaatggcatctgagaaaatacagattcagatggggctctgtaaatactaatatgcccagcttctgctatttcttcaatgtgtggtcaagaagaaataattttacgtaaagaatacaaaaaaagaggccgcaaaaatacaatactgtacacagtacacacacttccctgtaaaaagcttgtaatcttttcatctatttacacaaattctcaaaccaaacctcttctccttctccttctcaaacctgaaaactcaccaacaaaacagagttgagagtggctcgctatactctctttcggagacaacactatgttcagactttggtctgcttcctcctacgtggtcctgtccttaagttccctggccagctctttcgattctagtcagagaaaccaaaaggggatttactggtctctgctttggattctaaaccgatgaagcctgtttcagtgaagcctgttttaatgaagcctgttttaatgaagcttgtttcattgaagctcttaatgtctcatctggtactgtccatgaaagtaactgtccagctgcggacgcgtgggtcgacccgggaattccggaccggtacctgca

SEQ ID NO: 82520 - DNA, 318 bp, Arabidopsis thaliana columbia
gcgtccgaaaacaaaaaatgttgtcgagattgttcaaggcaggtgaaaaggttttgtcgaatctcgttagcaagaaagacatttacatggcgtcgaggaatcaggagaaatctcccagagtgcgagagctttacgacctctgcaaagcagactttcactggcaaagctccttctcctgcttccatggctatccaaaagctatgctctgctgttggcctcagctctagctcctgcagatgtctggctcttgaagaggtatctcaagacgatgatcgaggctatggagtttctggggttagccgtttcaatagagtagga

SEQ ID NO: 82521 - DNA, 520 bp, Arabidopsis thaliana columbia
  unsure (1)..(520): unsure at all n locations
cgcgtccgccccggacatatcttgaaacacatggcagcgatttctccatggttatcttctcctcagagcttttcgaatccccgcgttaccattacagattccagaagatgttcatcaatttctgcggcaatctctgttcttgacagctccaacgaggaacaacatcgaatttcgtctagagatcatgttgggatgaagagaagagacgtcatgttacagatagcttcctctgttttcttccttccattggccatttcacctgcatttgcagagacaaatgcatcagaagctttccgtgtgtacacagatgaaacgaacaaattcgggatatcaatcccacaagattggcaagtcgggcaagcaggacctaatgggttcaagtcaatcacagcttttttacccacaagaaacttcaacttccaatgtgagtatagcgatcactggactagggcccgactttaccagggttgggtttnttcgggaaggnngnngtttncncggaaaatttgccaggggttng

SEQ ID NO: 82522 - DNA, 1441 bp, Arabidopsis thaliana columbia
aataccgactcactatagggaaagcctggacgcctgcaggtaccggtccggaattcccgtgtcgacccacgcgtccgaagcggacatatcttgaaacacatggcagcgatttctccatggttatcttctcctcagagcttttcgaatccccgcgttaccattacaggtcctctcaatctctctcactctcacagtcttcactgattcatcgtagtttacaaaattcatattcttggagctaattctttccagattccagaagatgttcatcaatttctgcggcaatctctgttcttgacagctccaacgaggaacaacatcgaatttcgtctagagatcatgttgggatgaagagaagagacgtcatgttacagatagcttcctctgttttcttccttccattggccatttcacctgcatttgcagagacaaatgcatcagaagctttccgtgtgtacacagatgaaacgaacaaattcgagatatcaatcccacaagattggcaagtcgggcaagcagaacctaatggattcaagtcaatcacagctttttacccacaagatacttcaacttccaatgtgagtatagcgatccctggactaggtccagacttcaccaggatggaatcattcggaaaggttgaagctttcgcccaaacattggtcagtggattggataaaagctggcaaaaaccagtaggagtgactgcaaagctaatcgatagcagagcttttaagggattctattacatcgagtaccccttacaaaaccctggagaagctcgcaagcatttgtactctgcaattggaatggcaacaaacggatggtacaaccgtttatacactgtcccaggccagtttacagatgaagaatctgctgaacaaagctctaagatccagaagccagtcaagtctttcagattcatctgagaatgtcattcatatctatcagcggaactaaattatagaattgatcaaacaatttgtttactgaacaattacttttttgcaatgaaattctgagaaaagagcctactccatactttgaagtaagcttcagtaaacaatcccagtgtgttcagatggaagaagagagaaccctaaatatgcacaatcacagaaaaggacatgatgaacatgttttacttacaatgcaggacttaaagacaaaggctatatacctatcaatgttactcactacactcctgcacctgaaggaagtgtagtggtattacgacttcagacttgaaaagaatcagattttgattctaccatatgtatatgcttgtgtatgtgtgtataaatatatgcatattgtacaccaacttattactactggtcttcccctccaagggaaaccagctatggtgccttcaaactcaacccaagctcgagccagcagcttttttgtggctgtgttttatacacattgatggatgggt

SEQ ID NO: 82523 - DNA, 602 bp, Arabidopsis thaliana columbia
  unsure (1)..(602): unsure at all n locations
aaccctgacaaacgcatttttatttttcacaaaaaaagattgaaaacaacacaatgtgttttgaagtaaatgctgggagaatctctgtgaacaacataatgctaagagctgcttgaatcagaaccggcccttcaacgaaattgtttgaaattctacaatctgctggggatatcatcagttggggatgtcaggaacaggtaagcccttcaactgcaactgtttgtgcatccattgccagttttctggggttacttctccaccgagagcacggatgacagatccaccactgcatgatcccactttgcaacattcttccaaagacaatccctttattagtccggtacagaaacccgcttgcgaatagggcaccgggctcctgtgggcatcagttggctactggcccncccaaagggcggaaaaatggancacccctttaacnaaggtttggaangganccctttnggccccaaaagttaccaaaggncctctggaantttcgcctaggacncaanggtgccccggganccggttttggnnnccccaaggggcctgggggttcncccggtaaaaanaangttttntacccgccccaaggggggggg

SEQ ID NO: 82524 - DNA, 396 bp, Arabidopsis thaliana columbia
tccttttgatgaagacaatctcatcccttgtttcggctttggcgattcaacaactcatgacgaggaagtgttcggtttccatagcgacaattctccatgtcatggcttcgaagaggtcttagcatgttacaagagaattgcacccaacttgcgtctatcagggccaacgtcgtatggaccgctcatcgatgctgctgtcgacattgtggagaagaacaacggacaattccatgttctggtgattgttgcagatggacaggtaacgagaggtacggatatggccgagggagaactcagtcaacaagagaaaacaaccatcgacgcgattgtaaatgcaagctcgtatgctttgtcgattgttttagtcggtgttggagacggaccatgggaagacat

SEQ ID NO: 82525 - DNA, 523 bp, Arabidopsis thaliana columbia
  unsure (1)..(523): unsure at all n locations
cccacgcgtccgcgcggccgcgtcgaccccacgcgtccgcccacgcgtccgattgcaaacgaacataaaacactacctaagagatccaaatatggctggagtgatgaagttggcatgcttgctcttggcctgcatgattgtggccggtccaatcacatcgaacgctgcgctaagctgtggctcagttaacagcaacttggcagcgtgcattggctacgtgctccaaggtggtgtcattcccccagcgtgttgctccggcgttaaaaacctcaacagcatagccaagacggccccagaccgtcagcaagcttgcaattgcattcaaggtgccgctagagccttaggctctgggtctcaacgctggccgtgcagctgggaatttctaaggcatgtggggtcaatattccttncaaaattaggaccggaccactngaaaaancgtgggnnnttnggcttcaacggtgggntgttntccttnccggagtttgganccttntttnnatggggggggtttttttaaaaa

SEQ ID NO: 82526 - DNA, 675 bp, Arabidopsis thaliana columbia
  unsure (1)..(675): unsure at all n locations
atgatacttcagctctctacgactcactatatggaaagctggtccgcctgcaggtaccggtccggaattcccgacccgacccgcgtatggcaaacgaacataaaacactacctaagagatcaatatggctggagtgatgaagttggcatgcttgctcttggcctgcatgattgtggccggtccaatcacatcgaacgctgcgctaagctgtggctcagttaacagcaacttggcagcgtgcattggctacgtgctccaaggtggtgtcattcccccagcgtgttgctccggcgttaaaaacctcaacagcatagccaagacgaccccagaccgtcagcaagcttgcaattgcattcaaggtgccgctagagccttaggctctggtctcaacgctggccgtgcagctggaattcctaaggcatgtggagtcaatattccttacaaaatcagcaccagcaccaactgcaaaaccgtgaggtgatgagcttgcaacggtgagatgatgcttcttccggaagtttggaatccttattatataatgggtggggttaatattaaataaggtgttcggatgttttttttttgggggtttaaattcctgctttttctttgtgggggcctgtaaatggggttnctttaccttttcggggaaaacggttttgattcgggtttggt

SEQ ID NO: 82527 - DNA, 834 bp, Arabidopsis thaliana columbia
  unsure (1)..(834): unsure at all n locations
gccggcannnnnnnnnnnnnnnnnnngggtaaccgccccttgacgaggggcaccccgggttcccgagaattttcccacgcgtccgcccacgcgtccgcacacatctcctattgcaaacgaacataaaacactacctaagagatcaatatggctggagtgatgaagttggcatgcttgctcttggcctgcatgattgtggccggtccaatcacatcgaacgctgcgctaagctgtggctcagttaacagcaacttggcagcgtgcattggctacgtgctccaaggtggtgtcattcccccagcgtgttgctccggcgttaaaaacctcaacagcatagccaagacgaccccagaccgtcagcaagcttgcaattgcattcaaggtgccgctagagccttaggctctggtctcaacgctggccgtgcagctggaattcctaaggcatgtggagtcaatattccttacaaaatcagcaccagcaccaactgcaaaaccgtgaggtgatgagctagcaacggtgagatgatgctactaccggaagtttcgaatccttattatataatggatgagattaatattaaataagatgttcgaatgtttgtttttagagtttttaatttcttgtctttttctattgtggtgttcttgttatatgggtttgtctgtactatgttcgcaggcaacaacgttatatgaaattttcagagtacttgaagttaaaaaaaaaaaaaaaaaaaaccaagggcggccgctctacaggatccaagcttacgtacgcgtgcatgtgacgtcaagatcttctatagtgtcgtccnnnnnnnnnnnnnnnnnnnn

SEQ ID NO: 82528 - DNA, 1332 bp, Arabidopsis thaliana columbia
  unsure (1)..(1332): unsure at all n locations
nnnnnnnnnnnnnnnnnnnnnnnnnnnnnnnnnnnnnnnnnnnnnnnnnnnnnnnnnnnnnnnnccacgcgtccaaaagctaagagcaacaaactaaagattttttaagaaaatggcagcttctaagcgactagttgtctcttgcttgttcttagttttgttgtttgctcaagccaattcgcaaggtttgaaagtaggtttctacagcaaaacatgcccacaactcgagggtatagttaaaaaggtcgtgttcgatgcgatgaacaaagcaccaacacttggtgctcctttgcttagaatgttcttccacgactgcttcgttcggggatgtgacggatcagttttgttagataaaccaaacaatcaaggtgagaagagtgcagttcctaacctaagtcttcgagggtttggcatcatagacgattccaaggcggctctagaaaaagtgtgtccgggaattgtttcttgctctgatatcttggcacttgtcgctagagacgcaatggttgcacttgaaggaccatcatgggaagttgaaacgggaagaagagacggtagggtttctaacatcaacgaagtcaacttgccatcaccttttgataacatcaccaagcttatcagcgattttcgctcaaagggcctcaacgagaaggatctagtcattctctcaggtggtcacacaattggaatgggacattgtcctttattgacaaaccggctttacaacttcaccggaaaaggagacagcgacccaagtttggactcggagtaccccgctaagctcaggaagaaatgcaagcccaccgaatacgacgacggctctagagatggatccggggagtttcaaaacatttgacttgagctacttcacgctagtggctaagagaagaggacttttccagtcggatgctgctctactcgacaactccaagactagggcttatgtcttgcaacagataagaactcatgggtcaatgttctttaacgactttggtgtctctatggtgaaaatgggtcggactggagttcttacgggtaaggccggggagatccgtaagacgtgtcggtctgctaattaagagatatagaaatgaaaatatctcaatatatgtgagtttgattattattgtttgcttcttttattttgttgtcatccctatattaaatgtgattgttttcttgggtattgtttcttgggaataagctgtatctaaaatttataaaagtcttgaaagttcagaatgtttaaaaaaaaaaaaaaaaagnnnnnnnnnnnnnnnnnnnnnnnnnnnnnnnnnnnnnnnnnnnnnnnnnnnnnnnnnnnnnnnnnnc

SEQ ID NO: 82529 - DNA, 620 bp, Arabidopsis thaliana columbia
gctccctacgactcactattagggaaagctggcacgcctgcaggtaccggtccggaattcccgggtcgacccacgcctgcgccgaataataatttttcatttgctgcgtccttttggtgcttgaagcgatgaccatggcagcaaatctagcgcgacggctgatcggaaaccgatcgactcagatccttggagccgtgaactctagctcaggtgcggctagttctgtcgctagggctttctgctcctccaccactccgatcaccgcaactctcttccctggcgatgggatcggtcccgagatcgccgaatctgtcaaaaaggtgtttacaacagctggtgtaccaattgagtgggaagaacactatgttgggactgagatagatccgagaacacagagtttcttgacatgggaaagtctcgaatctgtgcgtagaaacaaagttggtttgaaaggtccaatggctactccaattgggaaaggtcaccgttctttgaacctgactcttaggaaagagcttaatctatatgccaatgttagaccttgttacagtcttcctggttacaaaactcgttacgatgatgttgatctcattaccctcaggaaaccggcgggggttgta

SEQ ID NO: 82530 - DNA, 567 bp, Arabidopsis thaliana columbia
  unsure (1)..(567): unsure at all n locations
agttggacgcgcattatcttctcgttatcctcctctagtatcgccgnnnnnnnnnnnnnnnnnnnnnnnnnnnnnnnnnnnnnnnnnnnnnnnnnnnnnnnnnnnnnnnnnnnnnccacgcgttcgtacggctgagaagacgacagaagggggagctctgtttttgaaagaagttttacagagtcgatcgtctaaagcgttgttgaagcacttgttagtggtgctctgtttcaagctggataaacccaatcctattgggatttggctggattttataccatattttagcatgattgtttgataaacgcttgataaattgcctcttgttgtcacctttgctacgaaaatgtctctggtttgctctttatcttgtgtagctcccttgccacagactaaacagtcgcgtccaagttttctgaaactcgaaacatgtaccttaagtttatcttctcccgctggctatcctaattttaccaccggtattaggaagcatatcagttacttgttcactgaaccgatcaagcttcctaggctagcagagagtcggatattagttagtcaggagtc

SEQ ID NO: 82531 - DNA, 665 bp, Arabidopsis thaliana columbia
gagagagaagaagaagcaaagatataacccccaaaagtatcaattagtttccattttcgccgctaagattctgttttcgaacatttacaccctcaagaatcgccgccatgtgtggaggagctataatatccgatttcattccaccgccgaggtctcgccgtgttactagcgagtttatttggccggatctgaagaagaatttgaaaggatcgaagaaaagctcgaagaatcgttcgaatttcttcgattttgacgctgagttcgaagctgatttccaaggtttcaaagatgattcgtctatcgattgcgatgatgatttcgacgtcggtgatgttttcgccgatgtgaaaccattcgttttcacttcgactccaaaacccgccgtctccgccgctgcggaaggttcagtttttggtaagaaagttactggcttggatggggacgctgagaaatctgcaaataggaagaggaagaatcagtaccgagggattaggcaacgtccttggggaaaatgggctgctgagatacgtgatccaagggaaggtgctagaatctggcttggaaccgttcaagacagctgaggaagctcctagagcttaacggttgctgcagcgcggagaatccgtggttctaaagctaaggtgaatttccctgaagaaaacatg

SEQ ID NO: 82532 - DNA, 813 bp, Arabidopsis thaliana columbia
  unsure (1)..(813): unsure at all n locations
nnnnnnnnnnnnnnnnnnnnnnnnnnnnnnnnnnnnnnnnnnnnnnnnnnnnnnnnnnnnnnnnnnnnnnnnnnnnnnnnnnnnnnnnnnnnnnnnnnnnnnnnnaaaacaaatttatttgattcttaaattattaatttaagatgaacaaattttaagggaaacctattttattttttttacacaaatgcagaaaagaaaaacacttttttgtttctggcattaattccctccctctatatatatatatttaaatctattatgacaaaacaatccaatactggattctttttacaacaacatgcacagacaaagctgagatctcaccttaagaaactaatgaaattgagttatgttcgtcttcatcagaccaagaggttgaagaccacgacgaagaaaaaaaagattgtttttatccaacgagtccaggaagagggtggggcattattggattcactggaacaggaaacttattgagcagaactaaccattggtctttcagttatcatccctacttctttggaaactttgtctacttctccaaggaagtttttaacccccaaaaatattttaaacggatggcgctttttttttacccgagtttccatggaaaaacctctgggatttctttttacaaggagataaccccttccgcctctttttgagcttgggactccttgaagaaaatttttttccttctagattcttttttcaggaaaacaggttttttaatttggatattcccgaaaaaaaccctcttggaactggggggggctttttttttttttggggaatgtggtgtgaatatggaga

SEQ ID NO: 82533 - DNA, 684 bp, Arabidopsis thaliana columbia
  unsure (1)..(684): unsure at all n locations
nnnnnnnnnnnnnnnnnnnnnnnnnnnnnnnnnnnnnnnnnnnnnnnnnnnnnnnnnnnnnnnnnnnnnnnnnnnnnnnnnnnnnnnnnnnnnnnccacgcgtccgctttccgtcacgaatcgttctctcgtcgtcatcaaaatctgttagccgaatcagatagagaaaagaagaaagaatggtgggaagtggagctccacagagaggaagtgcagctgcaactgcaagcatgcgtaggaggaagccgaccagcggtgctggtggaggaggtgcctctggtggtgcagccggatccatgcttcagttctacaccgatgacgcacctggtctcaagatctcccccaatgttgttcttatcatgagcatcggtttcattgctttcgtcgctgtgcttcatgttatgggcaagctctactttgtcaaatgatgacaaagataatagttgaagacaatgccaccctaagtgactgctagtgatccaaatattatacagtggtttcaagttaatgttttaattttgtggtttattaccagagtataaacgatctttcacaattccagtttctttacattcaaattttcaatattcttcacacatattaaaaaaaaaaagnnnnnnnnnnnnnnnnnnnnnnnnnnnnnnnnnnnnnnnnnnnnnnnnnnnnnnnnnnnnnnnnntcacg

SEQ ID NO: 82534 - DNA, 613 bp, Arabidopsis thaliana columbia
  unsure (1)..(613): unsure at all n locations
gagtttcttttgtcaaattagagagaagctcttatgaccttaggagaagcagtcgtcaaagcaccggtgcatcaataacgagctcgagcctagagatctctgtcccattctcttcgtcattcatcactctatctgcgtttcgttgagcgataatggatgccgcttgctctacccagcttatcgatggggatggtgtctttaatgtttctggggttgatcatttcatcaaggaggttaaattggacgaatgtggtctttcatacgcggttgtctcgattatgggtccacaaagtagtgggaagagtacgctcttgaatcatttgtttggaaccaactttagagaaatggatgcatttagaggaaggtctcagacggctaaggggatttggattgctagatgcgctggtattgagccttgcaccgttgtgatggatttagagggtaccgctgggagaaaaccgtgttaaggattatacctcttttcgggaacanagtcctcttttttnctttcagtcnaanaaaaagtctttaaanantgngggcaagnaattggcgggacaagcgnaaaaaaccntttaaagctntttcccggnanaattngtttttncccggg

SEQ ID NO: 82535 - DNA, 1207 bp, Arabidopsis thaliana columbia
agttaaccgagttatatacaacgagtcatcaagagaaagaatccccccaaaaaatggccaagtcattgaacatccttattgcagctctctcgctcattgcattttctcctttttgtttgtgttccaaagcctatggaagtggcggctatctctttcctcagttttatgaccaatcgtgtcctaaagctcaagagattgttcagtccattgtcgctaaagcattcgaacatgatcctcgcatgcctgcctccttgctcagactccatttccacgactgtttcgtcaagggatgtgatgcttccatactattggacagcagtggaaccataatcagcgagaaacgatcaaaccctaacagaaactcagcccgtggtttcgaactcatcgaggaaatcaaacatgccttagaacaagagtgtcctgaaacagtttcttgcgctgatatcttggctctagccgctagagactcaactgttattacgggtggaccgagctgggaagtacgtctaggaagaagagacgcgagaggagcaagcttgagtggttccaacaacgacattcctgctccaaacaacactttccaaaccatcctcactaagttcaagcgtcaaggccttgatctcgtcgatcttgtctccctctcaggaagtcacaccattggaaactcgaggtgcacaagtttccgacagaggttatacaatcaatccggcaacggaaagcctgatatgactcttagccaatactatgcaacactattgcgtcaacgatgtccgagatccggaggtgaccagaccctattcttcctcgacttcgcgacaccgttcaagtttgacaaccactacttcaagaacctgataatgtacaaaggtctattgagctctgatgagattctgttcacgaagaacaaacagtccaaggagctggtggagctatacgctgagaatcaagaggccttctttgagcagtttgctatatcgatggtaaagatgggaaatatctctccgttgacaggcgccaagggagagatcaggcgcatctgtcggagggttaaccatgcttattaatacaaatccatctttataattatgtgcaatataatgctttcgtttctcattgagttttcaatttcttttggctttgtttgcatgagtgtgtatcatatgtttattactcaaatctgattttgtttcggaaaaaaaaaaaaaaa

SEQ ID NO: 82536 - DNA, 713 bp, Arabidopsis thaliana columbia
gagaattgaatctgtagtcgaaagaaaagagttgggaaaaaaatggacgcaagcatgatggctggacttgatggtcttcctgaagaagacaaagccaaaatggcctccatgatcgatcagcttcagctccgtgatagtttgaggatgtacaattcattggtggagaggtgtttcgtggactgtgttgatagcttcacacgcaaatctctgcagaaacaagaggagacttgtgtgatgcgttgcgctgagaagttccttaagcatacgatgcgtgttggtatgcggtttgctgagctcaatcagaacgcaccaacccaagactgatatagtctgctttttctgtttggttttttcgtacggtttacgagtccgaaaccagaataaaccggttgtttagttgttcaggttactactccgatactgttttttgaacttcttgtactgtgaaattcttttgaatatatccagttcttatattgatgttgatctgcattccaatggagtctagaaaacatcatattatatcatttaaataaatacattacctttactgggcggccgttttagaggatccaaccttaccttcccatgcttgcgacgccatagctctttttttactggaacctaaaattcaatttactggcccgtctttttttcaaaccttccagacctgggaaaaacccctgtccgttaccccccctttaattggactt

SEQ ID NO: 82537 - DNA, 460 bp, Arabidopsis thaliana columbia
  unsure (1)..(460): unsure at all n locations
cgtcacttaatctccgacggaggaaaagtagccaccgcttgacgaatcattcatcaacacacgcagagagctctgaatctcgaggaagaagatggtgaggatcattcctatggctgcttcctccattcgaccttccctcgcctgcttctctgattctcctcgcttccccatctccctcctctccagaaatctctctcgcactctccatgttcctcaatcacagctttttggtttaacttctcataagcttttgagaagaagtgtaaactgtttaggagttgctgaatctggtaaagcagctcaagctactacacaagatgatcttctcacctgggttaagaatgataagagaagaatgcttcatgttgtttatcgtgttggcgatatggaccggacgataaagttttatactgaatgtcttgggatgaggttttaacgaaggggggatttcccannggtg

SEQ ID NO: 82538 - DNA, 1062 bp, Arabidopsis thaliana columbia
  unsure (1)..(1062): unsure at all n locations
tgatactccnnnnnnnnnnnnnnnnnnnnnnnnnnnnnnnnnnnnnnnnnnnnnnnnnnnnnnnnnnnnnnnnnnnnnccacgcgtccgtgcggctgcnanaanaccacanaaggggaaaaccaacacaactagataattaatatctgaatgatttttttaaaaaaatatgggaataaaaagagctaaagcttctctctctcttctctctcacaaaaccttcagagagggaaagctttttgtctccacctacaagaattttccgatgatagccgttccaaataatttgggcttttgcccggtatcttctagctcttttagtggagatgaccggttcccgtacggcaaatcctgctttcataagaggttttggccgcttgtatccttgctcgtagtcaatcagttttatgctgattgctttgatattttagttttgtttttcaataaatctcaacagatttgagatggtaattagttttaggtgctagttacttaagattaatttctgtcttgtgtctttagaaacttcgatttgcagaaatctatcaagcgattatgtcttcgggttgaaagattgaagaatattccgatgcttattatgattcctttttgctgtgtcttttaaatggagcaccgttcagttttatttcggtggttacaaggattcattgtgcgatgtttcggcgatgcattcctcaccggattcggtgttcatcggcggcgaaggttgatgtcggtacacttccgatgactcttcatcttgtgttgcagttgtaatatcacgtggacacgtgtattggatagagtccaaatgtcaaaacatctttatgccgtagatgttaatcttatgggctatgttgggcctaacttttctttctgcacatatcgttgtaagctttaatgctttgtttcctcttttggtggttaatataatacacttatgagaagnnnnnnnnnnnnnnnnnnnnnnnnnnnnnnnctaattcccttannnnnnnnnnnnnnnnnnnnnnnnnnnnnnnnnnnnnnnnnnnnnnnnnnnnnnnnnnnnnnnnnnnnnnnn

SEQ ID NO: 82539 - DNA, 309 bp, Arabidopsis thaliana columbia
gctcaggagagtttaccattatcctcaagccaacgcattctctgatttctcttctttgaaacggcgcctttgtttttgagctattccgatcgattttgaaatcgattttgagctgaaaaaaagttgctctgctttttaagtcagatggaagtaaatgtgttggaagttgcttcgagatcgacgatcatactgatgatttagttgataccgttaatgccacataggccgtcgaatttctatttttcgccttttagcttgagcaagtgtggatttcgtcgaggtttttgattgatggagggtttcgattct

SEQ ID NO: 82540 - DNA, 1158 bp, Arabidopsis thaliana columbia
  unsure (1)..(1158): unsure at all n locations
aaaacgagagagagtttttgaagatgaagaaagaacactcacaagatccagaaaaaggtaaaagatggcgagatacgatcgagcaatcactgtattctcccccgatggtcacctcttccaagtagagtatgccctagaagccgtccgaaagggtaacgccgccgtcggagtccgcggcacagatactgtcgtcctcgccgtcgaaaagaaatccacccctaagctccaggattccagatcagcaaggaagatagtgagccttgataatcacattgcattggcctgtgctggactgaaagcagatgctcgtgtcttgataaacaaggcgaggatagagtgtcaaagccacaggcttacgttggaggacccagttactgttgagtacattactcggtacatagcagggcttcaacagaagtatactcaaagtggtggtgtgaggccttttggtctttccactcttattgttgggtttgatccctacactcgtatacccgcgctttatcagaccgatccatctggtacattctctgcttggaaagctaatgcaactgggagaaactctaactcaattagggagtttctggagaaaaactacaaagaaagcgctggccaagaaactgttaagcttgctatccgtgctctgcttgaggttgttgagagtgggggaaagaacattgaggttgctgtaatgacacgagaggaaggtgttctgaagcaactagaagaagaagaaattgatatcattgtggctgagatcgaagcagagaaggctgcagctgaagcagccaagaaaggccctgcgaaggaaacatgaaccagatcttaaagtagcggtctcagattatgagttgtaatgctggttcaaagtcagggatattcaagggttgaatagaaaatctagaccgcatgaaatggtttgttggattactagcctatttgacactgttgctttaaatcttaaatgacattttagcggagtttcgatacttgtcagttggaactatggcatgttcagtattctagatgactttgcatttgcgctcaagagttgtagattttgattttggaaacgttgtttcttactaaacatgtctctcttcttattatctccattgtgtaacttaccgtttttttnnnnnnnnnnnnnnnnnnnnn

SEQ ID NO: 82541 - DNA, 547 bp, Arabidopsis thaliana columbia
  unsure (1)..(547): unsure at all n locations
cnnnnnnnnnnnnnnnnnnnnnnnnnnnnnnnnnnnnnnctgcaggtaccgggccggaattcccgggcaaaagaagccaaaacttctttttgcagatgacctacaaaacgaaactttagaagctgtcccaaatataggtgagattcactgatcgatctccttttttttttgtcacttatatccaccaatttgcaaactcttatggtttattcagaagaagccaacaatgaaagaaaggcaccaacagagataaagaagaatggagaaagtagtgagaagaagagcccagaactggtttgtatggaggaggaacttcaaaagtggtcagctgaatcatttattgatttaactgcttctggtgagcctctcagatctcaaataatattggattgattgcaatatttttgaatttagatacatacatatatgcaaatgttttaggttacataagattccagttctgctttgtcataggtgatctttgagttatggtatcaattatgggaaacatgttgtttctaatcccattcttggtctattatggtat

SEQ ID NO: 82542 - DNA, 706 bp, Arabidopsis thaliana columbia
  unsure (1)..(706): unsure at all n locations
tacggtacgacccacgcgtccgctcaaattacccaacttcttaaacacattcccatcacctcacaaaccattaaccgagagccaactagcgagtagaatcaactatcaagcaatggcatcgatgaccatgaccgctaccttcttcccggccgtcgccaaggttccctcagccaccggcggacgaaggctctccgtagtcagagcctccacgagcgacaacacacccagcttagaagtcaaggaacagagcagcaccacaatgaggagggacctcatgttcacggctgcagctgcagcggtttgttctttggctaaggtagccatggctgaagaagaagagcccaagcgagggacagaggcggccaagaagaaatacgcacaagtttgtgtcacaatgcctacggccaagatctgccgctactgattcaacaacccaccttctgcatgtctatctctctctttcaatttcggtaaattttctcaattaagtttggtctgtaatcgtatatttgatcatcaatttaccaaaagcccttttatctttctaaaaaaaaaaaaaaagaannnnnnnnnnnnnnnnnnnnnnnnnnnnnnnnnnnnnnnnnnnnnnnnnnnnnnnnnnnnnnnnnnnnnnnnnnnnnnnnnnnnnnnnnnnnnnnnnnnnnnnnnnnnnnnnnnnnnnnnnnnnnnnnnnnnnnnnnnnnca

SEQ ID NO: 82543 - DNA, 918 bp, Arabidopsis thaliana columbia
  unsure (1)..(918): unsure at all n locations
cattccgttnnnnnnnnnnnnnnnnnnnnnnnnnnnnnnnnnnnnnnnnnnnnnnnnnnnnnnnnnnnnnnnnnnnctttttttttttttttttgttgttagggattatattctacaattgctctgcaaaatagtggacaacatagaaagctggtatacgttatggctcatccatgctaaacatttggaccgtgattgttaagttagactgattctatcactggtcttctttgttctttttgcttgcttgcggttgcttgtgctaagtcatcatctatttgcggcgtgctaggatattcataatctttggctttgccccatatcacaaggtattgacctacacatatgaccgtggcaccaagagcccttccgaggtacatctgctcatcaaagatgatgctcgacataatcgccacaacgatcatacaaagaggtttgaaagctgttacaaacacaggacctctggttttcatcaccactcctccaatgtagtaaccaagcgctgagcacactatcccactataggtgattgtaagaagtttagtgtcccaaccaatggcccacacgctaggatttcctttctccatcactaatgctacaactactccctctattgtacctattaggcatatccatgttgcgagagagagctctgcagggtaagtcttcaatgtgattgcttgtagtatcatgaaacatgcatagctgaagcaaccaattgtgactaaaactgcacctttgatggagctatgaatatcggtcccacctgtgttctgtgccgagggtcctttagtccagaagaggtcaagagctggacctttttcaagtgtcatgaccatcactcctccaactgtagttactgttccaaccaccttagcggnactcctgatactttgaaacttcangctttcgagcctg

SEQ ID NO: 82544 - DNA, 727 bp, Arabidopsis thaliana columbia
ggggcggaccacaggcgtccgttttgttaaagctaagtgcctctttgcagcgaaagctcaaccaacaagacgatgattatctcagagaacaatcgcagagagatctgcaaataccttttcaaagagggagtatgctttgctaagaaggatttcaatctcccaaagcatccgttgattgatgtaccaaacctgcaagtgattaagctcatgcagagtttcaagtccaaggagtacgttagggagacatttgcgtggatgcattattattggtttctgactaatgaaggaattgagttcttgagaacttatcttaaccttccttccgatgttgtccctgctactttgaagaagtctgctaagcccggtggtcgtccctttggtggcccacctggtgatcgccaaagaggaccacctcgctctgatggagaccgtcccagatttggtgaccgtgatggataccgtggaggcccacgtggtggtgatgagaagggtggagctccagctgatttccagccgtctttccaaggaggtggtggtaggcctggttttggccgtggtgcaaggcggttacagtgcagcagcaccatcttggttcaagggttcccttgcaaaaaatttgttgtcatattgcgacgatggaaggacagttttgttttttgttctagttctgtttgtgtaatgcaaatctggaatctataatctatctattaccttcaccttggtttaa

SEQ ID NO: 82545 - DNA, 588 bp, Arabidopsis thaliana columbia
  unsure (1)..(588): unsure at all n locations
atgatactccagctctctacgactcactatanggaaagctggcacgcctgcaggtaccggtccggaattcccgggtctgacccacgcgtccgctctcgtaacagtagaagcagagtgcaaatctcactgactactaccaaggcaccaatcaccatgaccatgatgatcattacagtgttcttaacagtgattgcagcggttctcgcaatccttgtcaagaattctcaaaccggttctggcatcttcgcaccgcctgaaatctccggttcgcgtgatgttttcccgtcggcgaaagtggttaacttaaccggagcctctggtcctgagagtatagctttcgatccagcaggtgaaggtccgtacgttggtgtctcagatggtcgtatcttgaaatggcgcggtgaaccgcttggatggtcagatttcgctcacacatcgtctaacaggcaggagtgtgctcgcccatttgcaccagagtgtggagcatgtctctggaaggccattacggtcagcggtttcgatcaggtaaccggagatctctacatagcggatgcctactttggccttcatgttgttggtcctgctggt

SEQ ID NO: 82546 - DNA, 749 bp, Arabidopsis thaliana columbia
cattcttctccccaagctgcctctctggcttttccccatcttcctgggttctccggattgcgatcttggtaactagatattgaatttagggtgccaatcaaatcgcagctgctagggggggatattaggcggagaagaaaatgggggttatgtccagacgggttttgcccgcctgtggtaacctctgtttcttctgtccttctttgagggcaacgtctaggcatcccgttaaacgctacaagaaaatgctcgctgaaatcttccctcgtaatcaggaagctgagcctaatgatagaaaaatcggcaagctgtgtgagtatgcgtctaggaatcctttacgaattccaaagattacagagtaccttgagcaaaaatgttacaaagaattgcgaaatggaaatattggttcagtgaaagtcgtcttatgcatttataagaaactgctttcatcatgtaaggagcagatgcctcttttttcgtgtagtttgctaagcattgtcagaactcttttggagcaaacaaaagaggaagaagttcagatcttgggttgcaatactcttgtcgactttataagtttacagactgtgaattcgcacatgttcaacttagaaggtctaatccctaaactttgtcaacttgctcaagaaatgggtgatgatgaaagatcactccaattacggtcagcaggaatgcaggctttggcattcatggtatctttcattggtgagcattcgcaactatcaatggac

SEQ ID NO: 82547 - DNA, 734 bp, Arabidopsis thaliana columbia
cggacgcgtggggaaaaatttgatatttgaagcgaatcaacaacaacagtcgggttcgtgaaaaaaaaagatttgatcggctaaacttggtcgctttcaggtttatcgtggaaggacttgtcaatggcagacgtacctggatacctgcgcacttgtttggatatggggaagatagctttcttagcaatccttgtatctacagggattgtgttgcagattctggcttgtgctctgttcaataactggtggccaatgctaagtgttataatgtatgtgctcctcccaatgcctttgctcttctttggtggatcagacagtacatctctattcaacgagtcagataatagttggatcaatgcagccaagttcttgactggtgcatcagcagttggaagcgtcgcgataccatcgattctaaaacacgccggactcatcggttggggcgcattagcccttgatctctcatcctacgttgtcttcctcgtggctattttgggttacatttgcataggagatgccagtgacaactattacagctacatttaaaaagacacacacaaattcatcatcatttgtttaaacctcaacaaagtctcagccttttatcacttccccgttcgattgatgcttcgaaacgaaaacatcttgtttctatggaatgactcactgattggattttcacaagttaagaagttgtgtgtcaagtgtatgtatgaatgattttttttttgggg

SEQ ID NO: 82548 - DNA, 435 bp, Arabidopsis thaliana columbia
cccacgcgtccggaggaaagaaaaataagataccactcaccaaaaacttcctcaaaactaacaaatggatactaataaagcaaaaaagcttaaagttatgaaccaactcgttgaaggccatgacttaacaactcagcttcagcaactcctctctcaacccgggtccggtctagaggatctagtggctaaaatcttagtgtgtttcaataacaccatctccgttcttgataccttcgaacccatctcctcctcctcatccctcgccgccgttgagggatctcaaaatgcttcatgtgataacgacggcaagtttgaagattccggcgatagtcggaaaagattgggacccgttaagggtaaaagaggatgctacaaaagaaaaaagagatcggagacgtgtactatagagtcgactatacttgaggacgcattttc

SEQ ID NO: 82549 - DNA, 472 bp, Arabidopsis thaliana columbia
aaaaaaaacattccggaattattaaccaaaggactaactactaaggatcagtagatgatacaaaaagttttactacttaaatcagttctaagagaataataatcacaagtttaacaacacattgttacactctaatcaaatttcacaaatgtttttcttcttttcatctcaaatttcacatttccactaatcagacaccaattgtttaagcagagattggttcgtatggatatgaaagccaagggtgcttcagagcctctgctgcagaaggacgcttctttgggtttatctcaagaagatggagccacaaagtctgtgaatccttggtctcccattggcagccgatggtctcaacgaggtccttttgggtatcagggactccaatcggttgcttccctgggtccgctcatagagcatccggttttgggtggagtggttgtgggaatcacgtcccttggtaagcatttcatta

SEQ ID NO: 82550 - DNA, 604 bp, Arabidopsis thaliana columbia
  unsure (1)..(604): unsure at all n locations
gaagataagagtgtggcacagagctttatcctctctcagagtttcttctcctctgtgaatctccgacaatggcgatagctatggcggttgtttctttcccatctctgctcaacaaaacaaccttatcctcttcactcttcactcccactttcctcccggcgaaatcctcttcacttctcatcaaatcatcaccaaaaaccagattcgtggtttcatcatccatggaagctggaatcggagtaatggggtcaaaactcgggatgatgagtttcttcgaagaagacggcacagtagttccagtaacagtcgtcggattccgcgaaggtaacatcgtaacccaaatcaaaaccctagccacagacggttacgacgcggttcaaatcggttaccgtcgtgtacgcgacaaaaagctaactaaacccgggaacccggtcattttccaaaaagccggtacaatcccctttggggcatttccaagggttcaggttttacaaacatccggggggttggnccccgacccnaggttttttttcggtggggttttttaagngggggtttctgtggtttgntggccccattgggaagggtttntggggggtnaagc

SEQ ID NO: 82551 - DNA, 1160 bp, Arabidopsis thaliana columbia
  unsure (1)..(1160): unsure at all n locations
cccacgcgtccgcccacgcgtccgcccacgcgtccgcccacgcgtccgcggacgcccggccgccgccaatggcgatagctatggcggttgtttctttcccatctctgctcaacataacaaccttatcctcttcactcttcactcccactttcctcccggcgaaatcctcttcacttctcatcaaatcatcaccaaaaaccagattcgtggtttcatcatccatggaagctggaatcggagtaatggggtcaaaactcgggatgatgagtttcttcgaagaagacggcacagtagttccagtaacagtcgtcggattccgcgaaggtaacatcgtaacccaaatcaaaaccctagccacagacggttacgacgcggttcaaatcggttaccgtcgtgtacgcgacaaaaagctaactaaaccggaaaccggtcatctccaaaaagccggtacaatcccaatgagacatctccaagagttcagattaacaaacatcgaagggattcgaaccgaaccagaagcttgtgttcgatgagatattcaaagaaggtgatctcgttgatgtagctggaaccacaattggtaaagggtttcaaggaggaatcaaaaggcatcatttcaagagaggtcagatgactcatggttccaagagtcatcgagctttgggttcgattggtgctggtactactccgggaagagtttataaagggaagaagatgcctggaagaatgggagggacgaggacaaagattaggaagcttaagattgttaaagttgataaggagcttaatgttgtcatgatcaaaggtgctttgcctggtaagcctgggaatcttcttcgtattactcccgctaaaatcgtcggagttaacattcccaagaactagtagagaagagactctgttttgttttgtaatgttgacttgtgtttatccattccttgaaaatttgtatcgaattttcaaggaatggataaatcacagtttctttcttagaattggagtttttgtataagtcggaagtatttctatgctaatgttcttgaattgtgnaaaaaaaaaaaaaacaaaaaaaaaaaaaaaaaaaaaaaaaaaaaagggcggccgccctaaaaaaaaaaaaaaataaaaaagggggggccccctttttttttttttttttt

SEQ ID NO: 82552 - DNA, 808 bp, Arabidopsis thaliana columbia
ccggcccccattggacggccttggcagtacccttccggaattcccgggtcgacttcacgcgtccgccgacaatggcgatagctatggcggttgtttctttcccatctctgctcaacaaaacaaccttatcctcttcactcttcactcccactttcctcccggcgaaatcctcttcacttctcatcaaatcatcaccaaaaaccagattcgtggtttcatcatccatggaagctggaatcggagtaatggggtcaaaactcgggatgatgagtttcttcgaagaagacggcacagtagttccagtaacagtcgtcggattccgcgaaggtaacatcgtaacccaaatcaaaaccctagccacagacggttacgacgcggttcaaatcggttaccgtcgtgtacgcgacaaaaagctaactaaaccggaaaccggtcatctccaaaaagccggtacaatcccaatgagacatctccaagagttcagattaacaaacatcgaaggattcgaaccgaaccagaagcttgtgttcgatgagatattcaaagaaggtgatctcgttgatgtagctggaaccacaattggtaaagggtttcaaggaggaatcaaaaggcatcatttcaagagaggtcagatgactcatgggtccaagagtcatcgagctttgggttcgaatggtgctgggactactccgggaaagagtttataaagggaaaaaagatgccctggaagaaatgggaaggggacccagggaccccaggaattagggaagcccttaagaaatggttaaaaggctggattaaggggggc

SEQ ID NO: 82553 - DNA, 1361 bp, Arabidopsis thaliana columbia
  unsure (1)..(1361): unsure at all n locations
nnnnnnnnnnnnnnnnnnnnnnnnnnnnnnnnnnnnnnnnnnnnnnnnnnnnnnnnnnnnnnnnnnnnnccacgcgtccgctctgctaaagtttcagatcttggtcttcggtctattggtcgtagctgcccttctctcgggtctctttcactgtggaacgtttctaccattactgacaatggacttttggagattgctgagggttgtgctcaacttgagaagcttgagctgaaccgctgctctacaatcactgacaagggtttggtagctattgctaagagctgccccaacttgactgagctgacattggaggcttgttcaagaattggagatgagggtttgctagccattgcaagatcctgctccaagctgaagtcagtctcgatcaagaactgtcctcttgtcagggatcaaggaatcgcctctctactgtctaacaccacctgttccttggcaaaacttaagcttcagatgctgaatgtcactgatgtgtctcttgctgttgtgggtcattacggcttgtcgatcactgatcttgtgctcgctggattatcacacgtgagcgagaagggattctgggtcatgggaaatggtgtcgggctgcaaaaattaaactctctgaccatcacagcctgccaaggagtgactgacatggggcttgaatctgttggaaagggctgcccgaacatgaaaaaggcgatcatcagtaaatcccctttgttatctgacaacgggttggtctcttttgcaaaagcttctttatcacttgagagtcttcagcttgaagaatgccacagggttacccaatttgggttttttggttcccttttgaactgtggtgaaaagttgaaggctttctctctggtgaactgtttgagtattagagatctcaccacaggattgcctgcttcatctcattgcagcgctctgcgctctttgtctattcgtaactgccctggctttggtgatgcaaatcttgcagccatcgggaagttgtgccctcagctcgaggatattgatctgtgtgggctcaaggggataacagagtctggtttcctacatctgattcagagctctcttgtgaagatcaacttcagtggttgtcccaatttgaactgatagagtgatctctgccatcactgctcgtaacggggtggactcttgaagtcttaaacatcgatggatgttccaatatcactgacggcagcctgggctcccattgcagnaacngccagattctcagtgatttggntatttcggaaatgngaaatctcagntcaaggggtcaaagnattggccnccnntgnnaagcnaaactngagncccntnanttcagggtgccttttggtnagcaagngttc

SEQ ID NO: 82554 - DNA, 545 bp, Arabidopsis thaliana columbia
aatatccaaaaacaatatctattgaacttttataaaacataaacgtattaaacctatgatattagtatcttctcttttttattcaagagaggggaaacaaaaacacatggttataattaaagtctaaaacccatggaataacggaagggaagaaaaacccccagggagttttagaggaaccttaacaataccacagcaaaaaaaacccttattcccgtgttataaaaccatcatcattatcatctcttaaacaaaaggatcttcttcttccttaatcatcttcttgttaaatctttattaaacggtgtagtgaccagctgtctcaatgtctagtccctttagcttcaccactgactctacatgtcctttaagcgtatgaagttccctaagccttgcgatctcagctcgtctcttggcttgatttgcaatctcagacagttctctgtaaccacctctctccgggacaacgttggctgtttcagtgttctgaagaccgtgtaaagtcctttgtgcatgagcccattgtgcttccctctcctctattc

SEQ ID NO: 82555 - DNA, 634 bp, Arabidopsis thaliana columbia
  unsure (1)..(634): unsure at all n locations
ctcaatacgactcactttagggaaagctcgtacgcctgcaggtaccggtccggaattcccgggtcgacccacgcgtgcaaaagaccggcgataattatgaacaaaggcggtggatccggtggcggatccggtggaggaagcggtccaacggccgccgccgccgccgcggctttacagaagcaaaaggcgttgttacagagagtggagactgacatcacatctgtcgtcgataacttcacgcagatcgtcaatgtttcaagggtgagtgatccgccggtgaagaactcgcaggagacatacatgatggagatgcgagcttctagaatggttcaagcagctgattctcttttgaaactcgtatcagaacttaagcaaacagcgatattttcaggatttgcatcactaaacgatcatgtagaacaaagaatagaagagtttgatcaagaggccgagaagacaaatcgattgttggctagaattgctgatgatgcatctgccaatctttaagggctcggggcncactattancnttcttnctcagagnttggctctnggcatctggtattagnattcctggggcacccggggacnggtaaacaattgtnntancccgggancgcctcgaggntcntgc

SEQ ID NO: 82556 - DNA, 640 bp, Arabidopsis thaliana columbia
  unsure (1)..(640): unsure at all n locations
angccccggggcntcctngggggccggnctctgnangtccacccggngnttcctttggaacccggttcggnacttnggcaaacccgcgatatttccgggattgccacccctaaccgatcatgtggacccaaggattagaagagtttgatcaagaggccgagaagacaaatcgattgttggctagaattgctgatgatgcatctgccaatcttaaagagctcgagtctcactattactcttctgctcagagattgactctagacatctgatattagaatgcctggagacaccagaggaaacagataaaacaattggttcataaaccagaggaaacggccatcgaaggatatgcagtttgaagtcatggacaacgttttggactatcctttcccacattgatcatatttcctctctcaattcgcatattacttagcaatcttaaatgttccagtctgatgaacaagcgtttgatgttttcatcaatcattagtgatttttttgctgttatcctcttgtatgttttgataattacgtgaaattacattctcttaaaaaaaaaaaaaaaagggcgaccgctctagaggatccaagcttacgtacgcgtgcgtgcgacgtcataactcttctatagttgtaccta

SEQ ID NO: 82557 - DNA, 660 bp, Arabidopsis thaliana columbia
  unsure (1)..(660): unsure at all n locations
nnnnnnnnnnnnnnnnnnnnnnnnnnnnnnnnnnnnnnnnnnnnnnnnnnnnnnnnnnnnnnnnnnnngatccacgcgtccgaaaaaaactctcttccaaaaatggcaattagggtttcccacaagtctttcctcgtcgcacttcttctcatactcttcatttcctctcctactcaagcacgaagcttacgagaagtagtaaggaatataacgctattggttgtggagaagagtcaagagagtcggaaaataaggcacgaaggtggaggaagtgatgttgatggattgatggatatggattataattctgcgaacaagaaaagaccgatacacaatcgctaataaacacacatgaacttatcgaattcttgtgagatatcctgagatccaaagatatcccgagattttatcttttactaaacataaattataagaagtgagaatgtattttatataagaaaagaagtgagaatgtaaactattattatttataggaacatataaatataaacgactttgtatgcatgtgtacagtattatctcgagggaaaacagttctatacaataatcatagcttgtgtgtgctagctttatgtatggattgcatcatggttttctgtttgtgaaataaaactctataatatattatgtgtaaaaaaa

SEQ ID NO: 82558 - DNA, 694 bp, Arabidopsis thaliana columbia
taggtgacactatagaagagtctatgacgtcgcatgcacgcgtacgtaagctcggaattcggctcgaggcactctcacccttccgttcatcgtatggtgagtctcccttcttgatgttcgctctcgacaaggtctatgactctccgcttggtaacttcatggatcaaagagacgctcccatcaaagagaagctcgcgagtgttaaggacacttcgactgaagtaaaggagctcgatgagcaagccgccgccgtgatgagagcagctagggctgagatcgccgccgcgcttaacaagatgaagaaggagactcaggttgaagtcgaggagaagctagcggagggaaggaagaaggtggaggaagagctaaaagaagctttggcgagcttggagagtcagaaagaagaaaccattaaagctttggattctcagattgctgctcttagtgaagacattgtcaagaaggttcttccttcttaaattatatttttgttaactgtgtaattctctgtctctctatctcaaaacttatttacaagaaattactgtaaatctcttcttcttcttcttctctgtttcttggattgttcgtcgttcaaagaagaacaatttttattttgtaagtttataaataattagctcccctttgtccctttagatgattaaagtacaaaaaaaaaaaaaaaaagggcggc

SEQ ID NO: 82559 - DNA, 634 bp, Arabidopsis thaliana columbia
  unsure (1)..(634): unsure at all n locations
caaagagattacagttttaagcatttntaatctctcgaagctcttctctgtgtgtgtggcgatggctgctaattcgataatggcttcctccaaacccctaatctccctgtcatccaaccaacaaccaaaccgagtccaaattcccaaattcgccaaacttccccaaattcccaaatccctcacttcctccaccgatctccgtagcaaagcactatcactctcctccgccaccgccaaatccttagctttaatcgccgctttcgctcctccgtcgatggcggaggcgatggagaaagcacagctcttcgatttcaatctcacgcttccgatcatcgcttcgttggggttcctcttcctttgatgttcgctctcggccaagggcttttacctctccgcttgggaacttcatgggtcaaagggggcgcttccctcaaaggggaggctcgcgggtgtttagggcacttcggctgaaggaaagnagtcgatgagaagccgcgcgggntganacagctngggtgaaatngccggcggggtaaaaagatgaaaaggggncncggttaaatcgggnaancntcgggggnagnaaaagggggggangnnaaaaantttggngcttgnggcaaaannacctngc

SEQ ID NO: 82560 - DNA, 1051 bp, Arabidopsis thaliana columbia
  unsure (1)..(1051): unsure at all n locations
acgactcactatagggaaagctggcacgcctgcaggtaccggtccggaattcccgggtcgacccacgcgtgcgcttatttgtgtggcgaagagaagagataacattcctaagcaaatctcttctctctcccattcgtctccaaagagattacagttttgagcatttctcatctctcgaagctcttctctgtgtgtgtggcgatggctgctaattcgataatggcttcctccaaacccctaatctccctgtcatccaaccaacaaccaaaccgagtccaaattcccaaattcgccaaacttccccaaattcccaaatccctcacttcctccaccgatctccgtagcaaagcactatcactctcctccgccaccgccaaatccttagctttaatcgccgctttcgctcctccgtcgatggcggaggcgatggagaaagcacagctcttcgatttcaatctcacgcttccgatcatcgttgttgagtttctcttcttgatgttcgctctcgacaaggtctattactctccgcttggtaacttcatggatcaaagagacgcttccatcaaagagaagctcgcgagtgttaaggacacttcgactgaagtaaaggagctcgatgagcaagccgccgccgtgatgagagcagctagggctgagatcgccgccgcgcttaacaagatgaagaaggagactcaggttgaagtcgaggagaagctagcggagggaaggaagaaggtggaggaagagctaaaagaagctttggcgagcttggagagtcagaaagaagaaaccattaaagctttggattctcagattgctgctcttagtgaagacattgtcaagaaggttcttccttcttaaattatattttttgttaaactgtcggtaattcctctggccttctctctatcctcaaaaactttaatttaaccaagaaaattaacctgggaaaaacctctttctttccttccttctctgtttcttggattgtncgtcggtcaaagnaggacaattttttattttgnaggttataaaaattagcncnctctgc

SEQ ID NO: 82561 - DNA, 496 bp, Arabidopsis thaliana columbia
aggtttttgctttatcgtaggcttccttcatttgcacgaacaacaacaacaacccttctctgcaaatctatggagcctgcgataacagcgacttcttcttcttctttcggtggtggctcttctcgtctcgccgctttagcccagcaacttcgccaatacaagcccccaccttcttcatcgttcgatgactccgaggagatgcagacagatcaggagaccgctgggaaagtcgtttctcaggttgggtttcaggaatctattgctcctctttcgaaagaccctgataggtttaaacccaagagagccgctgtgttgatctgtctctttgaaggagatgatggtgatttgcgtgttattcttactaagagatcttccaaattgtctactcactctggagaagtttcattgccaggtggtaaagcggaggaggatgataaagatgatgggatgactgctaccagagaggctgaggaagagattggattggacccttctc

SEQ ID NO: 82562 - DNA, 1352 bp, Arabidopsis thaliana columbia
  unsure (1)..(1352): unsure at all n locations
acccacgcgtccgggtttagtcacactctcattctcgtttgtgtttttgattggcggagaattggtgatagataagcttcttcttccctcttctcaacttggtggatctgtcatcgatggcctctttgatgctcaacggggccattaccttccccaaaggtttaggttcccctggttccaatttgcatgccagatcgattcctcggccgaccttactctcagttacccgaacctccacacctagactctcggtggctactagatgcagcagcagcagcgtgtcgtcttcccggccatcggcgcaacctaggttcattcagcacaagaaggaggcttactggttctacaggttcttatccatcgtatacgaccatgtcatcaatcctgggcattggaccgaggatatgagagacgacgctcttgagccagcggatctcagccatccggacatgcgagtggtcgatgtcggcggcggaactggtttcactactctgggcatagtcaagacagtgaaggccaagaatgtgaccattctggaccagtcgccacatcagctggccaaagcaaagcaaaaggagccgttgaaagaatgcaagatcgtcgagggagatgctgaggatcttccttttccaaccgattttgctgacagatacgtttctgctggaagcattgagtactggccggacccgcagaggggaataagggaagcgtacagggttctcaagatcggtggcaaagcgtgtctcatcggccctgtctacccaaccttctggctctntcgcttctttnctnatgtntggatgctcttccccaaggaggaagagtacattgagtggttcaagaatgccggtttcaaggacgttcagctcaagaggatttggccccacagtggtcccgtggtgttcgcaggcccggcctttatcatgggatgttctgtcactggtgttaaacctgcctccggtgactctcctctccagcttggtccaaaggaagaggacgtagagaagcctgtcaacaaccccttctccttcttgggacgcttcctcctgggaactctagcagctgcctggtttgtgttaatccctatctacatgtggatcaaggatcagatcgttcccaaagaccaacccatctgatccttctcttctaggacatgatcattgtatcattgtaaacccctcttgtggtaaagaaagattcgagtcctatctatgaacatgcggaatatcattaaccttctttctttacatgtattactagattttcatgttgagatatctatgctacttgttaaaaccctatgggccaccgctctagaggatccaagcttacgtacgcgtgcaggcgacgtc

SEQ ID NO: 82563 - DNA, 657 bp, Arabidopsis thaliana columbia
  unsure (1)..(657): unsure at all n locations
aatcattttaatctgcagatgcgaactctgtggagtttgatcctagcggatcttatctcggtattgctgcatcagatatcaaagtataccagacggcaagtgtgaaagctgaatggatccttatcaagacactcccagatctctccggcactggtaaagctacgtgtgtgaagtttggttcagatgcacagtacgttgcagtcggttcgatggaccgtaacctacggatatttggtcttcctggtgatgaaaaagccaacgtcgatgatgactctgcgcaagactcgtgaacaatcctatttgcagcaatgggggagaatttcataggtgcgggtcatgagtgagtggtgattgtgatcatcctcgctacctcttggaattcaagcaatgacactcgcaaaccctcgagttttcttataggctcttttaatcgctttgtaccttcaatatatgtaccaaaaaatgtgttctttctgttgcctaatgaattcagacactaatgaagatcccaatccgatggtgctaaaccgcatttggtattatttaatctgttctagacaaaaaaaacaaaaaaagnnnnnnnnnnnnnnnnnnnnnnnnnnnnnnnnnnnnnnnnnnnnnnnnnnnnnnnnnnnnnnnnnnnnnnnnnnnnaatcg

SEQ ID NO: 82564 - DNA, 892 bp, Arabidopsis thaliana columbia
  unsure (1)..(892): unsure at all n locations
nnnnnnnnnnnnnnnnnnnnnnnnnnnnnnnnnnnnnnnnnnnnnnnnnnnnnnnnnnnnnnnnnnnnccacgcgtccgcccacgcgtccgcccacgcgtccgccgcgtttttgctttgtagcgccggaccggagaagataaaacccttgctccgccccactcacaggaagttctacatcgacctgagttctcgtacttcgtcgtatcactcgttcttcctacgatgaactgtgcaatttcaggagaagttcccgtggagccagtggtttcgacgaagtcaggattactcttcgagagacgactaatcgaaagacatatatcggattatgggaagtgcccggttactggcgaaccacttaccattgatgacattgttcccatcaaaactggggagatcataaagccgaaaacattgcatacagctagtatccctggattgctcggaacgttccagaatgaatgggacggtttgatgctatcaaattttgcactggagcaacaactacatactgcaaggcaagagctaagtcatgccttgtatcagcatgattctgcttgtcgtgtgattgctagacttaaaaaagaaagagacgaagcacgccaattactggccgaggttgagagacatatacctgcggcccctgaagctgtgacagctaatgctgctctgagtaatggtaaacgagctgccgttgacgaggaactgggtcctgatgcaaagaaattgtgtcctggaatttcagctggaattattacggatttgactgattggaatgctgctctttcccagaagcgaaaaaagcggcagattcctcaaacattgggcaatagatctttggggggtcncnagntttaagccnccntttaaagcccacaaccngggtttttgtc

SEQ ID NO: 82565 - DNA, 1868 bp, Arabidopsis thaliana columbia
  unsure (1)..(1868): unsure at all n locations
nnnnnnnnnnnnnnnnnnnnnnnnnnnnnnnnnnnnnnnnnnnnnnnnnnnnnnnnnnnnnnnnnnnnnnnnnnnnnnnnnnnccacgcgtccgcccacgcgtccgcggacgcgtgggcaactacatactgcaaggcaagagctaagtcatgccttgtatcagcatgattctgcttgtcgtgtgattgctagacttaaaaaagaaagagacgaagcacgccaattactggccgaggttgagagacatatacctgcggcccctgaagctgtgacagctaatgctgctctgagtaatggtaaacgagctgccgttgacgaggaactgggtcctgatgcaaagaaattgtgtcctggaatttcagctgaaattattacggaattgactgattgtaatgctgctctttcccagaagcgataaaagcgacagattcctcatacattggcgtcaatagatactttccacgcgtccgctcagctatcaagccacccacttcacaagaccaacaaaccaggcatttgttcgatggacattctacattctaaggatgtcattgctactggaggagttgatgcaactgctgttctctttgatcgcccttctggacaaatcttgtcaacactgactggtcactcgaagaaggttacaagcgtaaaatttgtaggcgactctgatcttgttttgactgcttctgctgacaagacagtccgtatctggcggaatcctggggatgggaattatgcttgtgggtatacattgaatgatcattctgcggaggtgcgagctgtaactgtgcatcccacaaataaatactttgtctcggcatctcttgatggtacatggtgcttctacgatctgtcctctggctcatgccttgcacaggtatcagatgattcaaagaatgtagattacacggctgctgcttttcatcccgatggtctcattctcggaaccggaacttctcaatctgttgttaagatttgggacgttgaaagtcaggcaaatgtggctaagtttgatggacacattggggaagctacagctatatctttctctgaaaatggttacttcctcgcgacagctgcagaggatggtgttaggttgtgggatctgcgcaagttaaggaacttcaaatcatttttatctgcagatgcgaactctgtggagtttgatcctagcggatcttatctcggtattgctgcatcagatatcaaagtataccagacggcaagtgtgaaagctgaatggaaccttatcaagacactcccagatctctccggcactggtaaagctacgtgtgtgaagtttggttcagatgcacagtacgttgcagtcggttcgatggaccgtaacctacggatatttggtcttcctggtgatgaaaaagccaacgtcgatgatgactctgcgcaagactcgtgaacaatccgtaaaaaactcagacagaacattccaaatgtccatctccagtgttatctcgctcaaatttctcaagttctgttgtatcttacagtatttgcagcaatgggggagaatttcataggtgcgggtcatgagtgagtggtgattgtgatcatcctcgctacctcttggaattcaaacaatgacactcacaaaccctcgagttttcttataggctcttttaatcgctttgtaccttcaatatatgtaccaaaaaatgtgttctttctgttgccaaatgaattcagacactaatgaagatcccaaaccgatggtgctaaaccgcatttggtattatttaatctgttctagacaaaaaaaaaaaaaaaaaagnnnnnnnnnnnnnnnnnnnnnnnnnnnnnnnnnnnnnnnnnnnnnnnnnnnnnnnnnnnnnnnnnnnnnnnnnnnn

SEQ ID NO: 82566 - DNA, 915 bp, Arabidopsis thaliana columbia
  unsure (1)..(915): unsure at all n locations
nnnnnnnncgcgnnnnnnnnnnnnnnnnnnnnnnnnnnnnnnnnnnnnnnnnnnnnnnnnnnnnnnnnnnnnnnnnnnnnnnnccacgcgtccgtggcgattgcgatgttaccggcgctcttctcttctccttcgattctaaccagcagaatcagatgcggagccaccgcaaacagcggcggcgcaatctcatctacttcttctaattccgatcctaggagaggtgttcccttgtataagcccaaatcatacgaggttctagccactgacgccgccaattctctagctttcgctctccaggattcaaaatctcgtttggaaatcgattttccacctttacccagtagcatttcttcttacaagggttcttcagacgactttattgatgctaatatacaactggccgtgactgttgttcgcaaacttcaggagaaaatcgagaccagagcatgcattgtttttcctgacaagcctgagaagcgcagggcttcgcaacgcttcaaagcggcatttgattcggttgatggcataagtattggctctctagatgatatacctggtacttctgtcaccaatttctttaggtccataaggagtaccctggactttgattttgaagatgaaaacgaaggaacttgggagcccaaggagccaccgaccctttatatatttatcaattgcagcactcgggaactctctttcatagagaagtttgtggaaacctttgccagttcaaccccagctcttctgttcaatcttgagctagatacttttgcgtgctgacctagaggcttcttggctttccccctaaagatctgcactaccaggctctttctcatttattcccgtctttatacccccaagagtttcaagaagtgggagggaccattggttgactcacgggcactttcaaat

SEQ ID NO: 82567 - DNA, 1846 bp, Arabidopsis thaliana columbia
  unsure (1)..(1846): unsure at all n locations
caagaagggaggaaccactttaaacccttgtctacgctggtccgagtccagagtcctctactttgacagtctccctccatgtcgtcgttgtgtgcatctaattgctatccttcatcttcttctatcaatctcttctccaacaacaacaacccaactaaaccctttcttctctccctcagattcgcctcctccaattctcttccatttgttgctcctctcaaattctctactaccaatcacgtccttagtaactctcgtttctcttcgaaccgaatccaaagacgcctttttttgctccgatgcgtttcagaagaatctcagccgtctctttctatcggtaacggcggctctgaagagagagtgaatgttcttgtaattggtggaggagggagagaacacgccctttgccacgccttgaagcggtctccttcttgtgattctgtgttatgcgcacctggaaacgccggtatatccagttccggagatgccacttgtgtacctgaccttgacatatcagacagtttagctgtcatctctttctgtcagaaatggaatgttggtttagtggttgttggccctgaagtgcctcttgttgctggtctcgctaatgaccttgttaaggccggtatcctcacctttggcccttcttctcaagctgctgctttggaaggttccaagaactttatgaagaatctttgccacaagtacaatatccctactgctaagtataaaacattttctgatgcatctgccgcgaaagaatacattcaagaacaaggggcaccgattgtgattaaagcggatggattagcagctggaaaaggagtcactgttgccatggaactagaggaggcttttgaagctgttgattctatgctggtcaaaggtgtgtttggttctgcaggatgtcaggtggtcgttgaggagtttctcgagggagaagaagcgtccttcttcgcacttgtggatggagaaaacgccattcctctagaatctgctcaggaccacaagcgtgttggagatggagataccggtcctaacacaggcggcatgggagcgtattctcctgcaccggtcttgaccaaggagcttcaggattttgtgatggagtctataatccatcccactgttaaaggaatggctgaagaaggatgtaagtttgtcggcgttctgtttgcgggtctcatgatcgagaagaaatccggtttcctaagctttattgagttcaatgtacggtttggagatccagaatgtcaggtattgatgatgcgtctagagtctgacctagcaaaagttttgctagcggcttgtaaaggcgagctaagtggtgtatcacttgattggtcaaaagattcagcaatggtggttgtaatggcaagcaatggttatcctggttcttatgagaaaggatcaatcatcaaaaaccttgaagaagctgaaagagttgctcctggagtgaaggttttccacgcaggaacgggtctagattcagaggggaatgttgtagcaactgggggacgtgttcttggggtcacggcgaagggtaaagacttggaagaggcgcgtgaaagagcgtactcggcagtacaacagatcaactggcctgggaggtttctttaggcatgatattggttggagagctcttcgccagaaacaagtggcgaccaaagaagagtgatgagaaggaattttgttgtaatggcttgtaaaccaagaatccaaaaacttaaaactcactccaatctgttaagagatgattcaaaataaccatttttgtttnnnnnnnnnnnnnnnnnnnnnnnnnnnnnnnnnnnnnnnnnnnnnnnnnnnnnnnnnnnnnnnnnnn

SEQ ID NO: 82568 - DNA, 655 bp, Arabidopsis thaliana columbia
ctatgacggccgccctttttttttttttttttttaaactgaaagtaatatcgaccaaatataatcataatctaaagaaacaaaagcttataatctcatccgtacatgacagattcaaaattaagttcaggtgcgagcaaagtcatattcatatataaagctcgaaatggagggacgacctcggcatcatctctgtcatagttcttcttattccggtacggtttctattggtaaggcatgtaccgcattggccttctgaacctaggagccttcccgtatccatatggggaataaaaatacggaggcacaaagggtctgcgaaagcggtatcccattgaagggttgaaacgcccaggatgatactgtttcattccaggaacattggttcgcttaggcgagaccttcagttgacgaccatgaagctctgattcattcagctgcagagcttcttgcacggcttccacttctacaaactccacataagcaaatccctttggctgtccaaacttgtccattagaatggttacccggttgactgttccgcatgtttggaaatgtagttgcacttcttcaggtgtacaggcatagtcgacctgtattagctccaagtatcctccctgcggagctttgggtcttgtttagaaagcatccagcat

SEQ ID NO: 82569 - DNA, 660 bp, Arabidopsis thaliana columbia
cgttccggaattcccggttcacacccaccgtccgaaaatcgtctcatatattactactttttcacctacaatatcattggagatgtggagtctatggcctttaatgatggaagcactcgtggattgggctattgactttttcccaaatatattggtcccgttgcacaactatatatccagggggactgggcattatcttacttgcaaggaaccagattaccagcaaaatctttggaatgtgatatctgtgcttatggcgaataaaaatattgatgacagtgacctcgagccagctccgaagctattagggatagtgcttcagacatgcaagggccaggtggatcaatgggtagaaccctacctgagaatcacacttgatcggctacgcggtgctgagaaatcttccttcaagtgccttctggttgaagtggttgcacatgccttttactacaatacccctttggcacttggcatactgcaacgatttggtatcgcaacagaaatttttactctatggttccaaatgctgcaagagaagaagaagagtggtgcacgttctaacttcaagagagaacatgataagaaagtttgcatcttggggttgacatcacttttcagccttccagctggtcaagtgcctggagaggtcttgccacatgt

SEQ ID NO: 82570 - DNA, 1306 bp, Arabidopsis thaliana columbia
  unsure (1)..(1306): unsure at all n locations
tttatcttcattccggaaattgctccggtgaaacagcagccaccgccacatctttctccttctccggcaagcaacttcattccggattttcgtctgaacttcattcttgtctccctcttcgaccaaactgacacttattccgacaaaaccctctgattagaccgtcggaatggaatcacgggtttttctctagtcaattcaacttcccggtgaattcaccgtttaagacccgtgaaacctcgattgctccgctcacaccttcccggaatgttctctccttctctttccgtagtcccgcagagagatgtgcgatgaggattgtaccgcttgtaaaagctgcttcgtctactccacagatagtagcggaggtcgatggttcgtctcacgaacaagaaggaagaagcttgctgtgtttgtgtcgggaggtggttcaaatttcaggaagattcatgagggatgcagtgatggttctgttaatggtgatgttgttttgttggtcactaacaaaaaagattgtggaggtgctgagtatgcaagaagtaatggaattcctgttttagtattcccaaaagcgaaacgagaaccatctgatggactctctccttcagaacttgtagatgtactaaggaaatatggtgtagactttgttcttttagctggatatttgaaacttataccggtcgagctggtccaagcttttcctaaacggattctaaatattcatcctgctcttcttccggctttcggaggcaaaggtctttatggtataaaagtgcataaagctgttctagaatcgggagctagatattcgggtccgacaattcacttcgtcaatgaggagtacgatacaggtcggatacttgctcaaagtgcagtccgtgtgattgctaatgatacaccagaagaattggccaaaagggttcttcatgaggaccacaaactgtatgtcgaggtggtgggtgcgatttgcgaagaagcggattaaatggaggagaagacggtgtccctctcattcaaaacaaacaaaaccctgacgagtactattagattctcaccaaatgaagttattcattggatgttagattagtcacattttcaaaacaaagtgtttcaacataggttatgtagaagaagtttttttgcccgaagtatagattgagacatgtttctgatactaaattttgtttcggttgggtcagaatcatatggaaggagatgaaattcgagtcaggagacagcattttaatgcttgtgttgtataataccnnnnnnnnnnnnnnnnnnnnnnnnnnnnnnnnnnnnnnnn

SEQ ID NO: 82571 - DNA, 430 bp, Arabidopsis thaliana columbia
aactgcatcatctgctgactcgatacattctgctgctgcagaaattgatgaggccattgaatcacatcgagcttcaatgcgcttatcaggacgcttggcgtgtttgtcaccccaattttaaacaacccttctcttctctcgaagatgcttgcgagagattattaccttatcatgtcgtagcagattacgaagcagaagaggatgatagaatccttgattcagacccaacaggccaggccttgtcccgctctcaacaatgggataacaacattgctgcgaaagttgctgaattcacggcaacgtttgagaagcaagcactagcttttaacataataactcgaaagagagctatgggagaattcagatctgaggaaaggttgatggtagaacaagctttgctacaagatgaaaggaaagcgttgattgaact

SEQ ID NO: 82572 - DNA, 454 bp, Arabidopsis thaliana columbia
gggtaaaaatccaatttggtttcctgggttctgatatataaaccttgatttaaacatacaacaatcacagaatgtttggaagaatgccattaagacaagaaatcaaatgaaaatagattctctttcgcgaagataagtcttcatatctaaaatcacaactgccttaaagacatcaagccaagaccacaccatacgagtctctttgagttctctttacggttgccatccatattgttggtttctagcaccacccatagggttctgacctcttccagagccaccagatccaccatactgaccaccaccttgtgagtagttgggtggtccaacaccatagccaccgctaggtcctctaggaccggcgccatatggtgcaccacgaccttgtggaggatatgctccgctgctgtaacctccacggctctgattattataaccaccagtctggtttccg

SEQ ID NO: 82573 - DNA, 541 bp, Arabidopsis thaliana columbia
taatgattttccaggaggaccagatgggtttgagctggtttcaaggttctgttaccacaacggagaaatcttaatcgacgtctcaaacgtctcgactttgtactgctgctctgtttttctaggcatgtcggagaagttctgtttctctaatctcttccttcagacagagaagtttctagaagaagtgttctatgggtcttggagcgacatcgtttcgtgtctcaagaactgcgagcaagtgttcttccaagcagattcgtatggtcttgtagataaactcattttcgcagctttgaacaaaatctctcagaattcagacgatttttcttcttcttcgctttcttccttcgcctcttctctttctcctgagatggccaagaacacgtcagaatcagacggtaggtatatttcgcggtctgttgcttgcggaagaagcaacgagtggtggttcgaagatatgacaaatctttccccgaagatcatattgaagctagttatgatcattggagcttacaaaaccaacataaaaagcttagtccta

SEQ ID NO: 82574 - DNA, 510 bp, Arabidopsis thaliana columbia
cagacgcgtggggtttcgagattcggagatctgcaagggagaagatgatcgtttgcgtcgccgtcgtcggccaccagaacaatccgctttacatacaaagcttcacggatgctgacgatgctctcaagctccaccacattgttcattgctcccttgatgtcatcgaagagcgagtgaacaatccgaaaaagtctggtacaacactgaacgaggcttttcttggcttgctctatcctactgtgaactacaaagtgtatggttacttgactaataccaaggttaaatttatattggtcactactgatttggatgttagagacaccgatgtgagaagtttcttcaggaagttccatgctgcttacgttgatgcagtctcaaacccctttcatgtccctggcaaaaagataacctcgagaacctttgcgcaaactgtaagcaacatcgttggatcgtacggtttgaactgaccttctcttataagttgctttttgtacctcaaacttgtgtttt

SEQ ID NO: 82575 - DNA, 463 bp, Arabidopsis thaliana columbia
gactaaggtgaatccatggcgtccaagattgtctcagccatagtatttgtgtttaacctcattgcctttggtttagccgttgctgctgaacaaagaagaagcactgcaagggttgtgcaggacactgaggtgcaatataactactgtgtgtatgactcggacagagctacagggtatggagttggagcctttttgttctcagtggctagtcaaatccttatcatgctcgttagccgttgcttctgttgtggaaagcctctcaagcctggcggttcacgcgctcttgccctcattctcttcattgttagctggatgttcttcttgatagcggagatatgtctattagctggatcggtagagaatgcataccacacaaagtacaggacaatgttcatggacaatcctcctgattgtcaaactctacgtaaaggcgtctttgcagcaggcgccttattcgtcttct

SEQ ID NO: 82576 - DNA, 436 bp, Arabidopsis thaliana columbia
agaactattcgccggtttaaggtagttacacataaactacacgcgatgcatccatacaaaatcataaagaattctatggggtatacaagagttcaaggctaccaaagaactagcttttgcaatttgcaaacttgttaagacaagtctcgcgaatcatattcaaaccctgcaagtcttggcaagaggttcacagtctttatagatctccaagccagactgatcaagttggtcttcctcaaagcaagcacagcgtttgctcatcgagccagttattgctatctccaaaggtctttgtaccagtcttggcactccaacatcacaccaaacctttccaccttcatcttgactccatcgtgagttgcaattcgattgcttggcttcttcagtcttctgtttctccatgagttgtgcacctctggaggcttttgcttcagct

SEQ ID NO: 82577 - DNA, 449 bp, Arabidopsis thaliana columbia
ggctcaacaatactataatattgggtgcgacctcaaagaaaaaaacgtctatctccagagaatcgactgtgttcaactcgatgactattccccatcaaagtaaatattgtacacgcagacatgtccatgtaaaagagactcagaaagcttagagagttcaccttttgaacacatttgtatattttgaagaacatactcatccccaaattcatgttgtattctataacaacacattcatcttgttctcgtcttgacgacttgccctctcgaagctttcctctccatcttctctctctttttacgagacttttcatcttccacacctccctctgaaccttgtgacatgaatcctcgaataagaccagaagctttatacactccaaacgcatgaatcacaagatacgtgtaccaaaacttcccagtgatgatggaagctagctgaacaaagc

SEQ ID NO: 82578 - DNA, 485 bp, Arabidopsis thaliana columbia
  unsure (1)..(485): unsure at all n locations
ggatataaattgttctttccatctgcggtctcagagacataactttgaactagtaaaacgaataacccccaaagacatgattctgagagactacaaagttattaattgatgcaagacttaatttcaaagatcactttgggctccacgactggagtaaagtagttaatgcggtatgagacgaaccagtttctgtcaaggctaattcggctgcgttcttcatagccatggttcgctccctaaccggacactccccaattatctcttggactcgtttctccacctctgtagagctcacgaaacccgtctctgattcattcatcgaaatcgcaatcttgatctcatccacaatcatcactctattaaacctctgctcagcgtacaacggccaagccgccatagggacgcctgcacaaacagcttcaggaattgaattcaaccgnaatgagtgngatccgcgacggttatgattagaccgnatggggctt

SEQ ID NO: 82579 - DNA, 495 bp, Arabidopsis thaliana columbia
  unsure (1)..(495): unsure at all n locations
nnnnnnnnnnnnnnnnnnnnnnnnnnnnnncaagccacttaatcatgtaatagtatttgtaatgtttccaagacctaaaaggaatgataatagaaacatacatcttaaacattctatctacaaataatgcgttgtgaaacaaactcactggtacaatgaatatcgattctagaacaagaaccaaaaccatgaactgaatgaacaacacactaattctcattctccaatccttccttccgacatgacataacaggttcatgtatacttcatctcaactatgagctttaccatttccaagcgtgtgctctagatcctccatagccacatcatggatcctctccccttcccatggcttaacttggctgttctcaaacttaaactcggagctttgaccaatctcttggattgctgctgtgtttggagacaattgctgtggtgcaggtttcacgagattgaaggtaggcgaggttggcaccatagaggcagagaatggct

SEQ ID NO: 82580 - DNA, 740 bp, Arabidopsis thaliana columbia
  unsure (1)..(740): unsure at all n locations
aaancagaannacaaacaaaaanggtttttcaaaagcnnccncncaaagggctggggntggcttctttccatagtcgggtgtccagcaaatgcagatggacctgtttgcccgccgtctaacaaactaagccgggcaagtttccctgaaggttttttatttggcacggctactgcggcataccaggtcgaaggtgcgattaatgaaacttgtcgtggaccagccttatgggacatctactgtagaagatatccagagaggtgcaataacgataacggcgatgttgccgttgatttctttcatcgttataaggaagatatccaactaatgaagaatctaaacacagacgcctttataatgtctatcgcatggccaagaatatttcctcatgggagaaaggagaaaggagtgagtcaagctggtgtgcaattctaccacgacctcatcgacgagctcataaaaaatggttacatatattaatcacttaaaaacgaaaaaaaaaacatttataatctcttacgtattaaacttctctaattttttatttttttctgtaattaggtataactccattcgttactgtttttcactgggacactccacaagatttagaagatgaatatggcggctttttaagcgaaaggattgtgtaagtttttctgttggaaaacgaaccccaatcactttttgttttctttgatatgcgaatataaatggtataattcaacaattttttgcaata

SEQ ID NO: 82581 - DNA, 392 bp, Arabidopsis thaliana columbia
taaatcttgtggagtgtcccagtgaaaagcagtaccgaatgaagttataccattttttatgagctcgtcgatgaggtcgtggtagaattgcacaccagcttgactcactcctttctcctttctcccatgaggaaatattcttggccatgcgatagacattctaaaggcgtctgtgtttagattcttcattagttggatatcttccttataacgatggaagaatccggcaagtattacaaggatttcctcagtcaaggtgttcgtccatccgcgctcaagaaggatgagctttaagctatttctgtttcaatgtgtctctcctctgttttactttgtgcgtgaccaagattcatgaggtcttggttctaataaaaagagtttatttttcttct

SEQ ID NO: 82582 - DNA, 441 bp, Arabidopsis thaliana columbia
  unsure (1)..(441): unsure at all n locations
gaaaaatgtattcagaggaaaagaaaagcaaattatggttcaatctttgtctactgctgcgctgtttcgtactcattgtttaggccacaagacccccacaacccnatatcaaccgtcaaaacctaaacgcaactgcagcaggagtacaagcacggatcatgaaagacattgtcgcacatagattgcctaaagttacaactgagcagaaagcaaaactgaaagcttctaccgatttcgttgggctcaactactatacttcagtgttttcaaaccatttggagaaaccctgatccttcataaccaagatggttgcaagattctcttattacatgggagtgtaagtttgttttgcccttacttgaaaccgaaccaagaaaaccaatggcaacaaatcaaagggaaaatgtttgtttttggtactaatcgaaacctatctcttct

SEQ ID NO: 82583 - DNA, 412 bp, Arabidopsis thaliana columbia
cccacgcgtccgcccacgcgtccgcaaaaattagcaaaaatggcattgcaaaagtttcctctcatggggctgcttttgctcctaaccatcctcgtctctgtgacaacagcggttgatgatcctgtttgcccggcgacttccaagctaagccgagcaagtttccctaatgggtttttgtttggcacggctactgctgcgtttcaggtcgaaggtgcaattaatgaaacttgtcgtggaccggctctatgggatatctactgtagaagaaatccagagagatgtagtggcgaccacgccgatgtggccgttgatttcttccatcgttataaggaagatattcagctaatgaagaatctaaacacagatgcattcagactctcaatcgcatggtcaagaatatttcctcatggga

SEQ ID NO: 82584 - DNA, 516 bp, Arabidopsis thaliana columbia
caggttcccggaaggaccgggggggcccaccccttccgttaaattcggatttccaaccaaaaatggttttgcaaatcctgccctctcattggggcggcttttgcttccggaccatcggcgcctctccagcaaatgcagatggccctgtttgccccccgtccaaacaaactaagccgggcaagtttccctgaaggttttttatttggcacggctactgcggcataccaggtcgaaggtgcgattaaatgaaacttgtcgtggaccagccttatgggacatctactgtagaagatatccagagaggttgcaatgacgattacggcgatcgtggccgttgacgtcgtccataagtatcagcgaggaataagatgactgtgggatttatgggcaacatctggtagataatccatctattgggcaagaattttttctcaattctgttagatggcttgagattgagaaactctgtagctgttttgtatacttgattgactactgttttttttatattatttt

SEQ ID NO: 82585 - DNA, 804 bp, Arabidopsis thaliana columbia
  unsure (1)..(804): unsure at all n locations
gcgaatcaagaattaccaaacannaaaatggttttgcaataagctttctctctcaattgggcatgcattttgactccgtgacggatcataacacctatggcgagcgagagtgcannnatagacaactgttttgcccnngccgtcgaacaaaacctaagctcgggcaatgtttcctctgaaggtgtttttattttggcgacggctacctgcggcatactcaggtcgaagggtgccgattaaattgaaactttgtcgtggaccaagccttatgggacaatctacttgtagaagatatcctagagaggtgcaataacgataacggcgatgtggccgttgatttcttccatcgttataaggaagatatccaactaatgaagaatctaaacacagacgcctttagaatgtctatcgcatggccaagaatatttcctcatgggagaaaggagaaaggagtgagtcaagctcgtgtgcaattctaccacgacctcatcgacgagctcataaaaaatggtataactccattcgttactgtttttcactgggacactccacaagatttagaagatgaatatggcggctttttaagcgnaaggattgtgaaggatttccgagagtatgcagattttnttttccaagaatacggtgggaaaantgaacattgggtccactttcaattgngccatgggttttttcggacggtnggtttttnccgggggnaaaaagggncctgggccggttccctttttncgggaattntnaaanccccaaagggggcngtcncaagtttcgggggtttccctttna

SEQ ID NO: 82586 - DNA, 689 bp, Arabidopsis thaliana columbia
  unsure (1)..(689): unsure at all n locations
gaccaagagggcaggtaatttggctcgcgcgcggatgtatcgccgnnnnnnnnnnnnnnnnnnnnnnnnnnnnnnnnnnnnnnnnnnnnnnnnnnnnnnnnnnnnnnnnnnnnccacgcgtccgcccacgcgtccggttataaggaagatattcaactaatgaagaatctaaacacagacgcattcagactctcaatcgcatggtcaagaatatttcctcatgggagaaaggagaagggagtgagtcaagctggtgtgaaattctaccacgacctgagcgatgagctccttaaaaatggtataattccgtttgtgactgtttcccattgggacactccacaagatttagaagacgaatatggcgggttcttaagcgagatcgtttgtgaaggatttccgagagtatgcagatgttgttttccactgaatacgggggaaaagtcaaacactggatcactttcaacgagccatgggttcttcgcgcacgctggctacgacgtaggcaagaaggcgcctggtcgttgtgctcgttttacgtcaatgctaaatgccaagactgactatcagcatacgaggcttaccttagtactcacaattctcttatttctcacgcataatcatttgtagtttacctcaatttcttaaagtttaaaacgtttatggtacgtttttacacataattttttttg

SEQ ID NO: 82587 - DNA, 522 bp, Arabidopsis thaliana columbia
  unsure (1)..(522): unsure at all n locations
nnnnnnnnnnnnnnnnnnnnnnnnnnnnnnnnnnnnnnnnnnnnnnnnnnnnnnnnnnnnnnnnnnnnnnnnnnnnnnnnnnnccacgcgtccgcccacgcgtccgaggatactttgtatggtcattgttggataacttcgagtggcaagatggttacaaaaacaggaaatattatcttcagaggcatcttttgagtatgcaagaagctgtttgcatcgacaaagtgaatgttacaggatactttgtatggtcattgttggataacttcgagtggcaagatggttacaaaaacagatttggactctactacgttgatttcaaaaataacctcacacgttacgagaaagaatccggcaagtattacaaggatttcctcagtcaaggtgttcgtccatccgcgctcaagaaggatgagctttaagctatttctgtttcaatgtgtttttcctatgttttactttgtgagtgaccaagattcatgagggtcttggttctaataaaaagagtttatttttcttctc

SEQ ID NO: 82588 - DNA, 495 bp, Arabidopsis thaliana columbia
gcaagatggttacaaaaacagattcggactctacgctacaggacactttggatggtcattgttggataacttcgagtggcaagatggttacaaaaacagatttggactctactacgttgatttcaaaaataacctcccacgtttccgggaaagaatccggcaagtattccaaggatttcctcagtcaaggtgtttcggtccatccgcggctcaagaaggatgagctttaagctattttctggttcaatgtgtttttcccatgttttactttgtgagtgccccagattcatcaggttcttggttctaataaaaagaggttatttttcttctcatttttcattgtctacatgatttcccaaattttccagggtttggttaaaataaaatgatcctttgtgcccccaagagacaaaaaaaaaaaaaaaaaaaaaaaaaaaaaaaaagggcggccgctttaaaggaatccagcttacggaagggtgcaagccacgttaa

SEQ ID NO: 82589 - DNA, 580 bp, Arabidopsis thaliana columbia
  unsure (1)..(580): unsure at all n locations
ggnagattatgataatggaaaatggatatggagataaacttgggaccacagattcggttgacgttggtactgctgatcagaagcagagcaaaggacttgcccatcttctggctatgaacgaggctatttgcatcgataaggtgagagttacgggatactttgtatggtcattgttggataacttcgaatggcaagatggttacaaaaacagattcggactctattacgtcgatttcaaaaataacctcacccgttatgagaaagaatcagccaagtattccaaagatttcctcgctcaaggtgtttgtccatccgccctcaagagggatgagctttaagttatattttgaggaattcgttttctattcgatgtttttcctatgttttagtttgtgattgcccacgcccgattcatgagtcgtggttaataataataaaagtgtttcgttttccttccaaaaaaaaaaaaaaaaaaaaaaaaaaaaaaaaaaaaaaaaaaaaaaaaaaaaaaaaaaagggcggccgctctagaggatccaagcttacgtacgcgtgcatgcgacgtcaaagctctnctata

SEQ ID NO: 82590 - DNA, 757 bp, Arabidopsis thaliana columbia
  unsure (1)..(757): unsure at all n locations
atctaaacacaactacatttttatattatccacanatcatnaaanacgttggttnacatagattgcctgaagttacaactaancanaaatcaaaactnaaagcttctaccnatttncttgncctcaactactatacttcagtgttttcaaactatttttagaaacctgatccttcaaaaccaatattgatgcaagattctcttattacatggtagtctaagaatgcgcaaaattacgccattggtagcaagcctttgaccgctgcattgaacgtttactcgagaggttttagaagtctgttgaagtacattaacgacaaatacccaaatccggaaattatgatcctggaaaacggatatggagaagaactaggggcctcagattctgttgctgttggtaccgctgatcataacaggaaatattatcttcagaggcatcttttgagtatgcaagaagctgtttgcatcgacaaagtgaatgttacaggatactttgtatggtcattgttggataacttcgagtggcaagatggttacaaaaacagatttggactctactacgttgatttcaaaaataacctcacacgtaccgagaagaatccggcaagtatnccangnttccncagtcaaggngtcggccaccgngnccaagaaggntggnttaancattccggtcaangggtttcccaggttanctttgnggggccantcctgggctggccaaaaaaggtattcccccattcnagcccagtccggnc

SEQ ID NO: 82591 - DNA, 1142 bp, Arabidopsis thaliana columbia
  unsure (1)..(1142): unsure at all n locations
cccacgcgtccggtttcttaagcgagaacattgtgaaaccgccatattcgtcttctaaatcttgtggagtgtcccaatggaaaacagtcacaagatttagaagacgaatatggcggtttcttaagcgagaacattgtgaaagatttccgagaatatgcagattatgttttcactgaatacggtggaaaagtgaaaaactggatcactttcaacgagccatgggtcttcgctcatgcaggttacgacttaggaaagaaagcaccaggacgttgttctcgctacgttccaggttgcgaagaccgagagggacaatctggtaaagaggcttatctagtcagtcacaatctcctcaacgctcacgcagaagctgttgaagttttccgccaaaaggttaaaggtgggaaaatcggaatcgcacatagtccggcttggttcgaaccacatgatcttaaagattcaaatgacgctccaactgtcagccgtgtacttgactttatgttgggatggcatctggagccaactacttcgggagattatccacaaatcatgaaagaccttcttggttacagattgcctcaatttactgctgcacaaaaagcaaaattgaaagattcgaccgatttcgtagggcttaactactatacttcgacattttcaaattataatgagaagccagatccgtctaaaccaagttggaagcaagattctcttgtttcctgggaacctaagaatgtagatcacagcgccattggtagcatgcctcttactgctgcattgcccgtctacgctaaaggatttagaaagcttttaaagtacatcaaggacaaatacgcaaacccggagattatgataatggaaaatggatatggagataaacttgggaccacagattcggttgacgttggtactgctgatcataacaggaaatattatcttcagagggcatcttcttggctatgaacgagggctatttgcatcgataagggtgagagttacggggtacttttgtatggtcattgttggtacctcgnatgnaagtggttcaaaaccagttcggccttttcggggttcaaaaaacccncccgtttggnaggtncccagttcaaggtcctgccagggtcgccnccncnanggtggttttc

SEQ ID NO: 82592 - DNA, 1104 bp, Arabidopsis thaliana columbia
  unsure (1)..(1104): unsure at all n locations
gcagtacccgnccggaatttccgggtcgacccaccccttccggctttgaccgtcggcaaaaaggccccgggacgtggttctccttctttcaatcctaacggccattacggccaataaggattccaggcttacctggtaacttacaatctccttatttgtcacgcgcaggcggttgatccttaccggaaatgctaaaagtgtcagggcggcaagatcggaattgcacatatgcctgcttggttcgactcacatgaccttgctgatgcacaagacggcgcgtccatcgaccgtgcacttgactgtattttgggatggcatctacacacaactacatatggagattatgcacagatcatgaaagacattgctggacattgatagcctaaatgtacaactgagcagaaagcataactgagagcttctaccgatttcggtgggctcaactactatacttcagtgttttcaaaccatttggagaaacctgatccttcaaaaccaagatggatgcaagattctcttattacatgggagtctaagaatgcgcaaaattacgccattggtagcaagcctttgaccgctgcattgaacgtttactcgagaggttttagaagtctgttgaagtacattaaggacaaatacgcaaatccggaaattatgatcatggaaaacggatatggagaagaactaggggcctcagattctgttgctgttggtaccgctgatcataacaggaaatattatcttcagaggcatcttttgagtatgcaagaagctgtttgcatcgacaaagtgaatgttaccagggtacctttgtatggtccattgttgggtaacttccgagtgccaagatggttacaaaaccagntttgggcctctcctccggggctttcaaaaatacccccacacggttcggggaaagaatcccggcaaggtcttccaagggtttccccagccaaggggtccgccctccggcctcaagagggtggctttaggctattcctgttccaagggttcctgttcctagggcactttgtggncccaggttttnggcttggttataaaggggttttncccntttcatgcnnagttncgctcaggctggga

SEQ ID NO: 82593 - DNA, 791 bp, Arabidopsis thaliana columbia
  unsure (1)..(791): unsure at all n locations
gcaggtaccggtctcggattcccggctcgacccacgcgtccgaatgcgcaaaattacgccattggtaccaagcctcttaccgctgcattgcccgtctacgctaaaggttttagaagtcttttaaagtacatcaaggacaaatacgcaaacccggaaattatgatcatggaaaatggatatggagataaacttgggaccacagattcggttgacgttggtactgctgatcataacaggaaatattatcttcagaggcatcttctggctatgaacgaggctatttgcatcgataaggtgagagttacgggatactttgtatggtcattgttggataacttcgaatggcaagatggttacaaaaacagattcggactctattacgtcgatttcaaaaataacctcacacgttatgagaaagaatcagccaagtattacaaagatttcctcgctcaaggtgttcgtccatccgcgctcaagagggatgagctttaagttatattttgaggatttcgttttctgttcgatgcttctttcctatgttttagtttgtgattgaccacgcacgattcatgagtcgtggttaataataataaaagtgtttcgttttccttcagtttctagcttatttgacatggtcaagaatgctttagtataaatatattatccttatatggaggtatctttgccttccgaacatgaaaaaaaaaaaaaaaagcnnnnnnnnnnnnnnnnnnnnnnnnnnnnnnnnnnnnnnnnnnnnnnnnnnnnnnnnnnnnnnnnnnnnnnnnnna

SEQ ID NO: 82594 - DNA, 1952 bp, Arabidopsis thaliana columbia
  unsure (1)..(1952): unsure at all n locations
nnnnnnnnnnnnnnacgactcacttttagggaagctgcccgcctgcagtaccgtccggaataattcccggttcgctcgaataaaatcagaattacaaacaaaaatggttttgcaaaagcttcctctcattgggctgcttttgctcctgaccatcgtcgcctctccagcaaatgcagatggacctgtttgcccgccgtcgaacaaactaagccgggcaagtttccctgaaggttttttatttggcacggctactgcggcataccaggtcgaaggtgcgattaatgaaacttgtcgtggaccagccttatgggacatctactgtagaagatatccagagaggtgcaataacgataacggcgatgtggccgttgatttcttccatcgttataaggaagatatccaactaatgaagaatctaaacacagacgcctttagaatgtctatcgcatggccaagaatatttcctcatgggagaaaggagaaaggagtgagtcaagctggtgtgcaattctaccacgacctcatcgacgagctcataaaaaatggtataactccattcgttactgtttttcactgggacactccacaagatttagaagatgaatatggcggctttttaagcgaaaggattgtgaaggatttccgagagtatgcagattttgttttccaagaatacggtggaaaagtgaaacattggatcactttcaatgagccatgggttttctcgcacgctggctatgacgtaggcaaaaaggcacctggtcgttgctcttcttacgtcaatgctaaatgccaagacggacgatcaggatacgaggcttaccttgtcactcacaatctccttatctctcacgcagaagcagttgaagcttaccggaaatgcgaaaagtgtaaaggtgggaagatcggaattgcacatagtcctgcttggttcgaagcacatgaccttgctgattcacaagacggtgcgtccatcgaccgtgcacttgactttattttgggatggcatctagacacaactacatttggagattatccacagatcatgaaagacattgttggacatagattgcctaaatttacaactgagcagaaagcaaaactgaaagcttctaccgatttcgttgggctcaactactatacttcagtgttttcaaaccatttggagaaacctgatccttcaaaaccaagatggatgcaagattctcttattacatgggagtctaagaatgcgcaaaattacgccattggtagcaagcctttgaccgctgcattgaacgtttactcgagaggttttagaagtctgttgaagtacattaaggacaaatacgcaaatccggaaattatgatcatggaaaacggatatggagaagaactaggggcctcagattctgttgctgttggtaccgctgatcataacaggaaatattatcttcagaggcatcttttgagtatgcaagaagctgtttgcatcgacaaagtgaatgttacaggatactttgtatggtcattgttggataacttcgagtggcaagatggttacaaaaacagatttggactctactacgttgatttcaaaaataacctcacacgttacgagaaagaatccggcaagtattacaaggatttcctcagtcaaggtgttcgtccatccgcgctcaagaaggatgagctttaagctatttctgtttcaatgtgtttttcctatgttttactttgtgagtgaccaagattcatgaggtcttggttctaataaaaagagtttatttttcttctcatttttcattgtctacatgatttgccagatctacaaggctctggttataataaaatgatcctttgtgcctctaacagttcgttgtaatctatctcgcacgcaannnnnnnnnnnnnnnnnnnnnnnnnnnnnnnnnnnnnnnnnnnnnnnnnnnnnnnnnnnnnnnnnnnnnnnn

SEQ ID NO: 82595 - DNA, 862 bp, Arabidopsis thaliana columbia
gctctatacgactcatatatggaagctggtacgcctgcagtaccggtccggattccgggtcgaccacgcgtgcgaaaaaaaggaaggcgaatcgtagacgggaaattgttcttttgccgctctcggacgaatcgtctgtttccatttttggtgatataatacaaatagtgtattagtagtttgattctcttcaccacggtgtcggtacgattgaagctcctccctccaagagccttcgtacagagacgtttctgctgaaatttcaagcaagtgtgtttgtcagatggagcggtatgaagtcttggagcagatcgggaaagggtcctttggctctgctcttcttgttagacacaaacaagaacgcaagaaatacgttttgaaaaagattcgtctcgcccgccagtctgatagggctcgacgatcagctcatcaggagatggagctcatttctactgtccgcaatccatttgttgtcgagtacaaagattcatgggttgaaaagggttgctatgtgtgcattgttattggatattgccaaggcggggacatgacagataccatcaaaagagcatgtggtgttcattttcctgaggagaaattatgccaatggcttgtccaactattaatggccctcgattatcttcactccaaccatattcttcaccgcgatgtcaagtgttctaacatattcttgacaaaagagcaagacatacggcttggtgactttggactcgctaagattctaacttctgatgaccttacatcctctgttgttggaactccaagctacatgtgtcctgagcttcttgctgacataccttacggatcaaagtcagacatttggtcgttgggatgctgcatg

SEQ ID NO: 82596 - DNA, 379 bp, Arabidopsis thaliana columbia
aaggaagaactaagaaataagtttgaacctttatgaagatccattttagaacacgtttgattgtatccactccaaatacattttcatcaaaatattattcaacagaaattgccagcgattgccaatagatggtcacttagtagttgaggtttgcaaaacattggcatatgatcaggctcttccatctcaatcactaaattcgccggataattatggatcatccatcgttggtggtcttccgggatcatgtggtcctctttgcacacaatgtaagctcgaggaacagatccataccctttctcagaaaagttctccatcttcgataattcattaataaacaatgaactaggcctctttagaagcaatccaagctcaagat

SEQ ID NO: 82597 - DNA, 390 bp, Arabidopsis thaliana columbia
cttcaaaagagaataatactattatatgactaacatataccaatggtacaatagccggcttaatcactcatcaaggaaggaatctaatacatacgtaccacattcaagcatggccctcatgtgggttttggttctaaagggatccaggatgtatgattggatttcatctagattcagatgagagctgattcgaagcgctttatctttcaattggggctttatcaccaactggtgctcctttattttgactagatccgaattcaaagcttcttttgatttctcacccggtggcttgaacatcgacagagttccaacgaaccacgcgtgattctcctccaacttcttcgcgatgggttgaggaaggtcatcggagagagatgcattctcgag

SEQ ID NO: 82598 - DNA, 618 bp, Arabidopsis thaliana columbia
  unsure (1)..(618): unsure at all n locations
tttntggtcacgntgccgtcctttggntcaancggtnccaccgtagggtagtcccgcaaaaccaactggccgtagcntntccntggatgggaagaccncattttgtngtccagggattctccgagcggaccaaggaaggatttgcaaggcaacgacctccggtgcctaattttcctcctccaccaccttcgccgcctccacccgttttaatcagcagcgatttgcctagaaaaatgtcaagtggaagagcaacgccgcctagaagacgaggaagagacagacggtctggtcaaaggggtcacaggaaagctaacttgccagtaagattaccagattcagcttaagagttggcgtccgtcttcttcttcttcttcatggtcactctcatcaccaacatcacattccaattttaccacacagtatgtttattttttttgtttctctatttgattctaaggattcaaaatcaattttctaatgtatatatatacacgaacattttgtacttggataataaattatagtttcgaattaaaaaaaaaaaaaaaaaaaaaaacaaaacccaaagggcggccgctctagaggatccaagcttacgtacgcgtgcatgcgacgtca

SEQ ID NO: 82599 - DNA, 709 bp, Arabidopsis thaliana columbia
cccgaagggggttgttgtcaatttttaaaaaagagccattgtttccaataaaagcaaaccttttcgactgttctttagttttaacggaagttgaccgatttccttttaagagatcaaatcagtttctcgacggttaaagaataagttcgcagcaaaagcaaactgggacaagtaagcatgttccttgattgtgaaagccgcaattttggagttcaaagataatccccgagcagaccaagaaaagatttgcaaggcaaccgacgtccggtgcctaattttcctcctccaccaccttcggccgcctccaccagttttaatcagcagcgatttgcctagaaaaaatgtcaagtggaagagcaacgccgcctagaagacgaggaagagacagacggtctggtcaaaggggtcacaggaaagctaacttgccagtaagattaccagattcagcttaagagttggcgtccgtcttcttcttcttcttcatggtcactctcatcaccaacatcacattccggtttgaccacacagtatggttattttttttgtttctctatttgattctaaggattcaaaatcaattttctgatgtatatagatacaccaacattttgtacttggataataatttatagtaaaaaaaaaagaaaaaaaaaagggcggccgctctagaggatccaagcttacgtacgcgtgcatgcgaagataatag

SEQ ID NO: 82600 - DNA, 430 bp, Arabidopsis thaliana columbia
  unsure (1)..(430): unsure at all n locations
aacaacaccaaaaccatgggtccgtatcaataatttatttggtttaaataacaatgggaaatattcgcaaacgcaatgatcaaacaagattcattcacactgtttaacaacggttgaggtaagtctcgggaacaagttgtgcggttaagagatctacggtccccgaaccgacggacttaaacactgttatgtctgtggaactctttctcccttctttgtcacctttgatcaactccaccaaattcccacaaaggtcttcttttttaatcactcctctctcaaacgctcccggagcatcatcctgcttctatcatcgcagtgtcattatcgacaaacacactccctctctgtatcgcattgtcgtcacattccttcaatttcatgggctaaangntcccaaccaaggtcaaggatgaggttccggggtttt

SEQ ID NO: 82601 - DNA, 1732 bp, Arabidopsis thaliana columbia
cgaattctccgattccaaaagcagcagaagaaaaaatgtcagccatggaagcactgattctccagctgcatgaaatcggcgccgtgaaattcggcaatttcaagctcaaatctggaatcttttctccggtttacatcgaccttcgtctcatcgtctcttatccatccctcttaacacagatctctcaaactctcatctcttctcttccaccttctgcaaccttcgacgtcgtctgtggtgttccttacactgctctccctatcgccactgttgtctctgtttccaatggtatccctatgcttatgcggcgtaaggagattaaagactatggaacatctaaagctattgaaggaatcttcgaaaaggatcaaacttgtttgataattgaagatcttgtaactagtggtgcttctgttctcgagactgctgctcctcttcgtgctgtggggttaaaggttagtgacgcggtggttttgattgataggcaacaagggggtagggagaatctagcggagaatgggattaagttacattcgatgattatgttgacggatatggttagggttttgaaggaaaaggggaaaattgaagaggaggttgaagtgaatttgcttaagtttttggaagagaatcgtagggttagtgttccaagtgtggagaaacctaagcctaagcctagggttttggggttcaaggaaaggtctgagctttctaagaatccgacagggaagaagctgtttgatattatgttgaagaaggaaaccaatctttgtttagctgctgatgttggaactgctgctgaattgcttgacatcgcagataaggtgggaccagagatttgtctcttgaagactcatgttgatatactgcctgatttcacccctgactttggctctaagctccgtgcgattgcagacaagcacaaatttctcatatttgaggatcgcaagtttgcagacattggtaacactgtcactatgcagtatgaaggaggcatctttaaaatattggagtgggctgatattatcaacgctcatgtaatatcggggccaggaatcgtggatggcctgaaattgaagggtatgcctcgtggtagaggtttgcttttgcttgctgaaatgagctctgcaggtaacctggctacaggagactacactgcagcagctgtgaaaatcgcagacgctcattctgattttgtgatgggattcatctcggtgaatccagcatcttggaaatgcgggtatgtgtatccgtctatgattcatgcaacacctggtgttcaaatggtgaaaggtggtgatgcacttggtcagcagtataacactccacactctgtgattactgagaggggaagtgatattataatcgtgggacggggaatcataaaggcggaaaacccagcagagacggctcatgagtatagagttcaaggatggaatgcatacttggagaaatgctctcagtagattcgatcctgagagatggctgaggttttttgtttttgtgttctagtgctataagattgtgctagtttttgtgtgatttatgtgaggatggattttaagactcatgtctcgttgattgtttacttgattgagtgattctcagttctcaataataataaagtgaagctggcgagtagttgatctccaaaaaataaaaaaaaaaaaaaaaaaaaacaaggcgagccgctttagaggatcccagcttacggacgggtgcatgcaccgtc

SEQ ID NO: 82602 - DNA, 392 bp, Arabidopsis thaliana columbia
atcagaaaccaaaaaagagtgtgtgattcttacaagtcacatatgcgcccatgtctgagtagaagtccgggtttccagaaatagaaggtttgaatttgatgtttgtgacagaagccgcaaactaatgattgattcctatgaagtcaggtgagcctttaacttgttctgattcttcctctgagaaaactggcagtcttgacccaatggttcttttcattgtatctggataggctccaaatataagagggccaaggaaccaaccgaaatagaaaatctttggctctttgagttgcaatggcatcatccttggagcttgtagaaggagtcaaccccattaaatataagccaaagcctatggaaccaccctgcttatccttgtacttttgcttata

SEQ ID NO: 82603 - DNA, 280 bp, Arabidopsis thaliana columbia
cgagaatattgtttttgttttacaaaacaaagaagggaagtgctttcaatttcaaaatccaaaataccaaacttgggaacaaacccagggcggttaaattataagtttaagccattttggcattgcttaatatgtaactgggatacatgaagactttaactttgtttcccatggacttgggaggaaggttggatgtaaatttggcacggacaacaccgttgttaccggggggccgggaaacctttccccaaaaacaggggggggggctaccgtttttttt

SEQ ID NO: 82604 - DNA, 763 bp, Arabidopsis thaliana columbia
ggtgcgcctgcaggtaccggtccggaattcccgggtcgacccacgcgtccgtagatctctctttcttatacatccatatcaccgatgatgcctcgccgtgacgtcctcttcctctcactcctcctcgtcatcgccaccgtctccgctgtcgcattagccgacgatgaagcagattgtgtctacacattcttccttagaaccggatcaaccttcaaagccggtacagattcgatcataagcgctagagtctacgacaaatacggagactacatcgggatccgaaacctagaagcatggggtggtttaatgggaccaggttacaactactacgagaggggtaatctcgacattttcagtgggaaagcaccatgtcttccgagcccagtctgttcattaaatctgacctctgacggctccggtgaccaccacggttggtatgttaactacgtggaagtcacgacagccggagttcatgcaaagtgctcgtaccaaagctttgatgttgagcaatggcttgcgtccgatacatcgccgtatgagctcagtgctgttcggaataactgtccagtttcgcttagggaaagtgtcggtcgggtcgggtctgagatccggaagactctctcttggatcgtgtgagagtagtgaatgaaatgtcaaatgtgtatgtgtgtgtgtaacttggagagttgttctttgttgtcttgtgaacgtgtgatggcaataatgaaaatgattcgatcgaataaaagttccgttctttgtt

SEQ ID NO: 82605 - DNA, 421 bp, Arabidopsis thaliana columbia
acctgtaaatagcatgggctgctgtacaatcagcagacgcacactcttcatttataaatatgtttgtacatgcaggggaatagaaaccgtactccttatatactcaagcctcaaatcacacatttatgatacagtttcacagagaaaatgccatatcattaactaggaacctgtggggtgtgactcttcaatcatggacttggcaatccacaagagacctgggtcattccgtttcagtaccaaatatggatcttgtgctcctgtgcttgctgataccatctcatcgacaaagccaacgacggaaagtatctcaaccgcagctggaaagttgagaatgttgcgcttaattgcaggatttcccttacgcgagcctttagaatttcatttcattgggttgttcaatgatgctcctgactatttt

SEQ ID NO: 82606 - DNA, 592 bp, Arabidopsis thaliana columbia
ccgtccgaccacgcgatccgcataaacaaaaaaaagattctctcgatcaaacttgccggcgtccatggaagatttcggccgtcaacgaccatacggagacggagggatgcagatccagccttaccacggtaatcaaggcggtgatttcaggagctatagcgcatcgtacgggacgagggagaacaatatatacgatgtgaaaaaggagaaatcgatagcaagatccaagtcttggggaataacggatccggagctccagaggaagaaacgggtcgcgagttataagatgtatggtgttgaaggcaaagtcaaaggctcttttagaaacagtttcagatggcttaagcagaggtacacacaggtcgtctatggttggtggtgattcttttttcatctttttctataatttttacttttttactttgtttttcttcttcttgagctttgttttgaattttgattttctcaagtaattatgattgtgctctctctctctctttcttatgtatctttgtgtttgtgtgttgtaatcttgaatgtaactgtggtggcttcatcgcaacaaaattatatatgatcatttattagtatc

SEQ ID NO: 82607 - DNA, 1725 bp, Arabidopsis thaliana columbia
  unsure (1)..(1725): unsure at all n locations
ccaaaacgtcttgaattcatcattactagtttcctttccttagtaaaaccctacatttctccgcccgcctttgatttctccccggccgttcccgccgccggtctccgatttaaccagggttgagtctaattccttctttttgtgctcattgctgtcggattctctaccggcgttacatcgaccagccagactcttccccatttgactgctttactgattcaatcgctcttttagattctggaagttgtgactcagtatctccccttcaacgaattagcatcctgcgcaagaatgtctattgcatcatcacttacttcagccacactttgcggcgcctcagtttttcctaaagcattagcctgcagctctgagttccctatcaatcttcccagcccttttgaaagttcaaagatttgtttgacttcgtttcctgcctctagggatctcaagaaaaatgctactttgaatctgactcgaaatgttggtccagtcaggtgtcatgctatgcaagctgggacgagggagttgaagaaatttgaacttagtgatgtgattgaagggaaacagtttgatagagagatgctaagcgctatattcgatgttgcacgcgaaatggaaaagatagaaaagagctcttcacaaagtgaaatcctcaagggttatttaatggctaccctcttttatgagccttctacccgtaccaggctttcatttgaatctgctatgaaacgccttggaggtgaagtcttaactactgagaacgctagagagttttcgtctgccgcgaaaggggaaacacttgaagacacaataagaacagtggagggttattcagatataattgtgatgcgacattttgaaagcggtgctgcaagaaaagctgcagctactgccaatatacctgtcattaatgcaggtgatggtcctggagagcatcctactcaggctctattggacgtctataccatccaaagtgaaattggaaaattagatggcatcagtgtagccttagttggagaccttgccaacggaaggactgtgcggtctcttgcatacttgcttgccaagttcaaagacgtgaagatctactttgtttcccctgaaattgtgaaaatgaaggatgatataaaagactatttgacatcaagcggggttgaatgggaagaaagttcagatttaatggaagtagcatccaagtgtgatgtagtttatcaaacacgaatccaaagagagaggtttggagaaaggctggacctttacgaagcagctcgtgggaagtttatcgtagacaaagatctgttaggagtgatgcagaaaaaagctattatcatgcatcctttaccgagattggatgaaatcaccgcagatgttgatgctgatccaagagctgcctacttcagacaagcaaagaacggtttgttcattagaatggctcttctaaagctactgcttgtcggttggtgattggatagttcatggtcgttaagttaaatcctttaatggactgattctcaagcctaccatgagctcaaggaatctgcaataataaaatccgaagctttagtgatttttgagtgttaagcacaaaagctgtgatcttgatgttaattaaaagaaggatctgttggtttgttggttaaaagactgatatgaggaagagttgttgaacttaatgaataaattgatttgagctnnnnnnnnnnnnnnnnnnnnnnnnnnnnnnnn

SEQ ID NO: 82608 - DNA, 1007 bp, Arabidopsis thaliana columbia
  unsure (1)..(1007): unsure at all n locations
ttcattgatcttctccgatttgaaatcgccggcgaaaatggaatcctccggcgacaagcaaacttcttctctttaccctactgttgacacatccaatcccgaagctcctataaaccctagctcatcatcttctactaacaatctctatccttctctcgatatgaatgatctcgctcgtaatctcttccctgaacaaccagagacgagttctattccggtttcagctcctcccgctgcgacggaggaagtaattttgaaaatctccggcgcgattcttcatttaatcgacaaatcttacagcgtcgagctcgcttgcggtgatcttgagatcatccgtattgttcaaggagagaatgttgtcgctgttctcgctagtgtctccgatgagattcaatggccgttgactaaggatgagaactctgtcaaggtcgatgagtctcattacttcttcacgcttcgtcctaccaaagagatctcacatgattcaagcgacgaagaagacggagatggagggaaaaacactaacgagatgttgaactacggacttacaattgcttctaaaggtcaagagcatttactggtggagcttgagaagatcttggaggattatagtagtttctctgtgcaggaggtgtcagaggaagcgaaggaagcaggtgaaaaggttttggatgtgacggtggcgagagagacgtctccggtggagcttactggggaaaggaaagagattgtggagaggcaatgttctgcttattggactactttggctccgaatgtggaggattatagcgggaaggcggcgaagctgattgcaactggctcaggacatttgataaaagggattctttggtgtggagatgtgactatggataggcttatttggggaaatggtttcatgaaaaggaggttgtcaaaggctgagaaggagagtgaagttcaccctgacaccttgaaaagattcagaagagttaagaggntncccaaaatnccaggganttttagcaaac

SEQ ID NO: 82609 - DNA, 1039 bp, Arabidopsis thaliana columbia
  unsure (1)..(1039): unsure at all n locations
tgatacgctagctctatacgactcactatatggaaagctggtacgcctgcaggtaccggtccggattcccgggtcgacccacgcgtccgcccacgcgtncgtacggctgcgagaagacgacagaaggggggaaggcggcgaagctgattgcaactggctcaggacatttgataaaagggattctttggtgtggagatgtgactatggataggcttatttggggaaatggtttcatgaaaaggaggttgtcaaaggctgagaaggagagtgaagttcaccctgacaccttgaaaagaatcagaagagtgaagaggatgaccaaaatgacagagagtgtagcaaacagcatactgtctggagtccttaaagtttctggattcttcacaagttcagtggcaaacaccaaagtaggaaagaaattcttcagccttcttcctggagaagtcatccttgcatctcttgacggattcaataaggtctgtgacgctgttgaagtagctgggaggaatgtaatgtcaacctcttccactgttacaaccgaactcgttgatcacaagtatggtggtaaatcgggtgaggcgtcaaactaagggctcggtgcagcaggatatgcgcttggcacagcctgggttgctttcaaaataagaaaggctattaacccgaagagtgtactcaagccttcgacgcttgcaaaaaccgccattagatttgcagcttctcaaaaaaaagcctagtaaggctgcctgatgaagcaaaacagactcattggtcctgtttgtttggatcgtcttgttgtcttttgctccccccgttaaaattcaaggaggtgtggcttagtagttgttgtgaagtgtttatgtttctctatgagaatcatgtaatgtctctgatttgattcggaatatgtgctgtatgtgtaagtggtctaatccacattcctttaagtagtattataacaacagaacgaacccatagagcggccgctctagaggatccaagcttacgtacgcgtgcatgcgacgtcatagtcttgtatagt

SEQ ID NO: 82610 - DNA, 842 bp, Arabidopsis thaliana columbia
  unsure (1)..(842): unsure at all n locations
tacgactcactatanggagagctggcacgcctgcaggtaccggtccggaattcccgggtctacccacgcgtgcgtgcggctgcgagaagacgacagaaggggaagaggatgaccaaaatgacagagagtgtagcaaacagcatactgtctggagtccttaaagtttctggattcttcacaagttcagtggcaaacaccaaagtaggaaagaaattcttcagcctgcttgctggagaagccatccttgcatctctcgacggatttaataaggtctgtgacgctgttgaagtagctgggaggaatgtaatgtcaacctcttccactgttacaaccgaactcgttgatcacaagtatggtggtaaagcggctgaggcgacaaacgaagggctcggtgcagcaggatatgcgcttggcacagcctgggttgctttcaaaataagaaaggctattaacccgaagagtgtactcaagccttcgacgcttgcaaaaaccgccattagatctgcagcttcacaaaaaaaagcctagtaaggctgcctgatgaagcaaaacagactcattggtcctgtttgtttggatcgtcctgttgtcttttgataaataagttaaactaaaaaaaggtgtggattagtagttgttgtgaagtgtttatgtttctctatgagaatcatgtaatgtctctgatttgattcggaatatgtgctgtatgtgtaagtggtcaaatcaagattcccttgaaaaaaaaaaaaaaaaaaaaaaaaaaaaaaaaaaaagcggccgctctagaggatcccagcttacgtacgcgtgcatgcgacgtcataacttcttctatagtgtcc

SEQ ID NO: 82611 - DNA, 449 bp, Arabidopsis thaliana columbia
gaagagataatcacatcataggacctgaagccactgggccagtcttgggtcatgaactactacacaatggtgaggctaattttacacaaatgcaaatcttgtccaaacttatttcatgaaacaaaggtcttacatctcctaattaggagtcttctgtcagaactccaagtgctgatactcttttgtcagacacatctgatcttcaaacattcttgatcgagccacggtttgaatgcatcatctcgaaccacattcgttatataaaagataaacccgcgcaacaggttcagagctttacgctcatccttttcacgcaaagagtcaaggtactgctttttgaagtctggatacctatcgagatatgaaggtttctttttgttcgttggaaagctaaactctgttccatctcgtagttctatatgtctggatgacactccatgcactgatgc

SEQ ID NO: 82612 - DNA, 661 bp, Arabidopsis thaliana columbia
acccacgcgtccggcactcttcttcttccctgtcgccgcatcaaagagaactgaagcaataggcttttgaagctctctgcataaacatgactttcaagcgcaggaatggtggcaggaacaagcataaccgtggtcatgtgaaaccaatcaggtgttccaactgtggaaagtgttgccccaaggacaaggcgattaagagatttatcgtaaggaacattgttgagcaggctgctattagagatgttcaagaagctagcgtctacgaaggttacactctcccaaagctttacgctaagacgcagtactgtgtctcgtgtgctatccattctcacgttgtgagagtccgatcccgcaccaaccgtagagttcgtaccccaccacctcgttttgccagacgcaaggaggatacacccaagcctgcacaacctggtcaggctcctcgccctgccggtggtgctcctgctgctcctcgtgcctgaagacttcaagaagctggcaatccgaaacttcttatattctaggttcaatctctcttttgtctgaaatttttgaagatggttttctacatttggtaaagatgatttcgccatattggagctttaaacgtttcagaccattttaccagttgatttgaccaagatttttcctcttaaaaaaaaaa

SEQ ID NO: 82613 - DNA, 373 bp, Arabidopsis thaliana columbia
caaagcctttctctttaaattcgttatcgttttttttattttatcaatggaatctttttatttgttctgttcttcctcgattcaacactcgatgctgtgacaaagcccagattttggccggaaagttttgtgtgtttccggcgaacaatgcgaagaaaccggaagaatctgtaacggaatctaagctaaaagttaaagtacgatgtcggtgtacgacgctgctttccttaatacagagctttcgaaaccgacatcgatttttggtctccggctatgggtcgtgatcggaatcttacttggatctctaattgtcatcgcactctttcttctctccctctgcttaacttctcgccggaaaaatcgaaagccgaga

SEQ ID NO: 82614 - DNA, 550 bp, Arabidopsis thaliana columbia
aggtgcactatagaagagctatgacgtcgcatgcacgcgtacgtaagctcggttttcggctggtttgttcttcctcgattcaacactcgatgctgtgacaaagcccagattttggccggaaagttttgtgtgtttccggcgaagaatgcgaagaaaccggaagaatctgtaacggaatctaagctaaaagttaaagtacgatgtcggtgtacgacgctgctttccttaatacagagctttcgaaaccgacatcgatttttggtctccggctatgggtcgtgatcggaatcttacttggatctctaattgtcatcgcactctttcttctctccctctgcttaacttctcgccggaaaaatcgaaagccgagagccgatttcgcctccgccgccatcgctacaccgccgatttcaaaggagattaaagagatcgttccggcgcagaatcagtctgttccggcggagatccaggtcgatatcgggaagatcgagcatcgagtggtgttttcagatcgagtgtctagtggtgagagtagaggaacagcgagtgc

SEQ ID NO: 82615 - DNA, 509 bp, Arabidopsis thaliana columbia
  unsure (1)..(509): unsure at all n locations
nnnnnnnnnnnnnnnnnnnnnnnnnnnnnnnnnnnnnnnnnnnnnnnnnnnnnnnnnnnnnnnnnnnnnnnnnnnccacgcgtccgagcgtattaccctgggttgtgtgagccagtttctcaaggtggacttggatttgattattatgtgaatctttctgcgtcagaaatgtgggtttctctcctcgacaatgtaccggataatgaatggagcatgagcaagattgtcagtacattggtggctaacaaagagtatgcagacaagatgctcagctatgccgaaaatcacaaccaatccatatcaggagggcgttcatttgctgaaatcttattcggtggagtcgataatggttctcctggaggaaaagaattgctagacaggggaatttcactacataagatgattagactgattacttttacaagtggtggccgtgcatacctcaatttcatgggaaatgaatttggacttcctgagagggttgagtttccaacgcagagcaataactt

SEQ ID NO: 82616 - DNA, 620 bp, Arabidopsis thaliana columbia
ggactggattttctatgctagcgtttcggtacctctatggatttgtcaaactttccttagcctctgctcttatgctttgtttggagttttggtacttgatggttctggttgttgttaccggtctccttcctaacccgttgataccagtcgatgccatctccatttgcatgaatatagaagggtggactgccatgatttcgatcgggtttaacgctgcgattagtgtgagagtatcgaatgagctgggtgcaggaaacgcagcgttagccaaattctcagtgatagtcgtctccataacttcaactcttatcgggatagtgtgcatgattgttgtcttagccacaaaagacagcttcccttatcttttcacttcaagcgaagctgtggcagcagaaaccacgagaatagccgtcttgttgggcttcactgtcctcttgaacagcctccagcccgtcttgtcaggggttgcggttggagcggggtggcaggctctggttgcatacgtgaacattgcgtgttattacattatcggactacctgctggtcttgttcttggattcacactagacctcggcgttcagggaatatggtgaggtatggtagctggaatatgcttgcag

SEQ ID NO: 82617 - DNA, 623 bp, Arabidopsis thaliana columbia
acccacgcgtccggcaagaactggcatattccattgactttccctagtgaggctgttatatcagcctacttaaatccgcaagtggatctgtcgactgagaaattctcatggggcaaacctgatctttcagtacttagaaagctatgctgggaaaagtttaattggaacggcaagaaaacagatgatctactactaccagtcttgaaggagtatgaaaagcgcgagacgcaacttcggattgaagctttctattcctttaatgaaagatttgcaaagatccgtagtaaaagaatcaacaaagctgtcaaaggaattggtggaggtctgtcgtcagatgtggccgatcatactctccaggaaggtccaagaacacgaaataagaaaagagttgctcctcatgaaactgaagataacaacacctcagacaaagatacacctatagccaatgagaaagtgaaaaacaaaaggaagcgcgtagaaaaaccatctagtagtagaggtagaggcagagcccagaaaagaggacgaggaagaggaagagtccaaaaacatctccttgagctatccgacggcagttctgatgatgatgatgatgacaaggtagttggaatggaggcaaaact

SEQ ID NO: 82618 - DNA, 1672 bp, Arabidopsis thaliana columbia
aggtcacactatagaagattatgacgtcgcctgcacgcgtacgtaagctcggaattcggctcgaggccgtgagcctagaagcttaaaaccctcttcttatagatttcaaagcaaccattttcgaactctgtttgattccactgtcgatttaatcatcttacctaatggccggaagggctgcgacgtcgtcggcgaaatgggcgagagagtttttgttcagaagggtttcgtctaatcctcttggagctacccgtaactgttcttcggttcctggagcttcttctgcaccgaaagtccctcatttttccaagagaggaaggatattgacaggagctaccattggtctggccatagctggaggagcttatgttagtactgcagatgaagcaaccttctgtgggtggctattcaacgcaacaaaggttgtgaatcctttctttgctcttctggatgctgagtttgcgcataagctggctgtttcagctgcagctcgcgggtgggtacctagagaaaagaggcctgatccagcaatcttgggacttgaagtttggggaaggaaattctcaaacccaattgggcttgctgctggatttgacaaaaacgctgaggctactgagggactgctagggatgggatttggctttgttgaggtaggctctgtaactcctgttccacaagaaggcaatccgaaaccacgtatcttcagactaagccaagaaggagctattatcaataggtgtggatttaatagcgaagggattgttgtcgttgcaaagcggttgggtgctcaacatggtaaaagaatgttggctgaaacatcagctacttcgtcatctccaagtgatgatgtaaaaccagggggaaaatctggacctggtattcttggggtcaaccttggaaagaacaagacgagtgaggatgctgctgctgactatgtccaaggagttcataacttatcccagtatgctgattacttggtgatcaatgtttcatcacccaatactgcaggactgcgcatgcttcaaggaaggaaacagttgaaggaccttgtaaagaaggttcaagctgctcgggatgagatgcaatggggtgatgaaggtcctcctcctcttcttgtgaagattgctcctgatctgtccagaggagagcttgaagatattgcagcggtggctcttgctctgcacttagatgggctgatcatatcaaatacaacagtctcaaggcctgatgctgtaagcaacaaccccgtggcaacagaaacaggtggtttgagcgggaaaccgctctttgctctctccaccaacatgttgagagatatgtacactttgacacgaggaaagattccattgataggctgtggcggggttagtagtggtgaggatgcttacaagaaaataagagctggagctactcttgttcagctgtacacgggatttgcctatggaggacctgccccatcccacaaataaaggaggaactggtgaaatgcttagaaagggatggcttcaagtcgatccatgaagcaattggtgctgatcacagatgataaaactcaaagagcaatacgctgcggaaagatcccttttcttaaaacaacaaaacaagttgtatttaaagttcattgattcagttgtctctttctacccccaacaataacatcatcgtttttgcc

SEQ ID NO: 82619 - DNA, 545 bp, Arabidopsis thaliana columbia
aggttcatcaaaaatcattcccaacacatttcttcttcgttgtcaaaaatacatcagaacgttctgatttcgccgcgtgactcttatctccgtcaacgccgataaattctccggtaaagtaaccgccgcgatgtcgtttcttttccgtaagaacggtagtagttcacggaggaagatcaaagaaaaactccgtggtcgtcactcagatcgaggtgggaagagagaagaagatgagagatacggcggctccggctccgatttacctccaccaccgtctccttggggatttctcttcccggaggattttgtaagaatcgacgggaatctcaaagctattttccaactctagaagcttcttccagtaaatcacatctaatccttcatcatctacaataacagctttgagagttggaaaatagcgggaaaattagaaaaaaccctaaacctagaagaagaggagacaaatccggtgacggatttagaagaactggagcagatcaagacgataacgatgatggtgatgatgaagtaggagatgaatctat

SEQ ID NO: 82620 - DNA, 419 bp, Arabidopsis thaliana columbia
actcttatccaaagagggacacacagaaggagagtgatagagagcgagacgcgaagctctaaaaaatggcgataacacctctgcgaatcacgaacccattcccatctctccgctttattcccgccggaaagcccaatgctttaagaatcttcaccgtccacgctaccgacgttgagtccacggaggatactcaacccgacccggaaactacacagtccgaatccggcactgatccggaccaattcgagtctcgtctctcaaacatcagactcagataccgaagcgggacgggtaagaaagcagaagtgagaaaatcgaagaaagggtcaagtgggtctccgtcgaaaggtacgggaatatatttgccgccggtaagcttaaaagaagcggtttcaggtggtttgaaagtggaaccaggg

SEQ ID NO: 82621 - DNA, 446 bp, Arabidopsis thaliana columbia
accacgcgtccgctgaatcaaatctcctagctcttctacgcaaaatcgagtgcatcgacaatggcggaacgtggtgtcgaacgtggtggagatcgcggcgatttcggacgtggattcggtggtcgcggcggtggaagaggtggtccgagaggtcgtggtcgccgtgcaggtcgtgctccagaggaggagaaatgggtgccagtgactaagcttggtcgtctcgtaaaggaaggtaagatcacaaagattgagcagatctacctccattctctcccagtcaaggagtaccagatcatagatttactcgtcggtccttcattgaaagacgaagtgatgaaaatcatgccggttcaaaaacaaaccagagccggtcagagaacgagattcaaggccttcatcgtcgtcggagatagtaacggtcacgtcggattaggagtcaaatgctc

SEQ ID NO: 82622 - DNA, 835 bp, Arabidopsis thaliana columbia
  unsure (1)..(835): unsure at all n locations
atgattttnnnnnnnnnnnnnnnnnnnnnnnnnnnnnnnnnnnnnnnnnnnnnnnnnnnnnnnnnnnnnnnnnnnnnnnnnnnnccacgcgtccgcccacgcgtccggacgaagtgatgaaaatcatgccggttcaaaaacaaaccagagccggtcagagaacgagattcaaggccttcatcgtcgtcggagatagtaacggtcacgtcggattaggagtcaaatgctccaaggaagttgcgacggcgatcagaggcgcgatcattctcgcgaaattgtctgtggttccgatacgaagaggttattggggtaacaagattggaaaaccacatacggttccgtgtaaggtaaccgggaaatgtggatctgttactgtacgtatggttccagctccgagaggttctggtattgtggcggctagagttcctaagaaggttcttcaattcgctggaattgatgatgtctttacttcttctagaggatccaccaaaactcttgggaaacttcgtcaaggcaacatttgattgtcttgcagaagacatacggattccttacaccggaattcttgaaagagacgagattctcaaaatcaccatacgcaagagcacactgatttcttgcttatacctcctggcgtcaagatcagcgaggttgttgtagacaaaagcgtagagtaataccactttatcttgttacatgagacttgagtgttgtcaaaagctcaagtcagattttgttccaaccttggttttttgatttgtcggttataatgtctttagtaatctagatacgtatctgttttacactttgaattcaatcatacgaatcttcttat

SEQ ID NO: 82623 - DNA, 247 bp, Arabidopsis thaliana columbia
  unsure (1)..(247): unsure at all n locations
nttttagaaactccagtcatagtttttttgccataaatctttcaaacatatatatctttttcattatagtattgctctatacaatctatgtacatacatgtacaaaccaaagagtaatgttcttcttgactcttgatcttccatctcaatgcgttctagtttctttttcagccgccttgattgctttctcaacagaatcccatccaaaccggtcaacgtagtcttgaaccgattttttagccccttt

SEQ ID NO: 82624 - DNA, 480 bp, Arabidopsis thaliana columbia
aagacaaaactccattgtattgataacgttgtataaagcttttggaacaacataacaattctaggtttcccaagaattaagtcaaccagatctactcatatatatgaaacctttaatgtaaaaactatatacacctgagaagtgtgaccttgagtgtctatatcgcaactctacttccactatgagcatgtgactaaacagtctgttgttacaaacatatcctctgtctccaatgtccctctcaccgcttgataaaacttaacccatgaagatgaataagagtccacaggactgaaaaagaacgtaggattaggactgcttgcaggggaagcagtcaccaaatccaaaaccgaagctgcaggtttgagctgttgagggaaattgaaggccaagttatcgactttatgctcatagattttgccattacggtcgagtttataccgagaagtgccttgaaactctcctttagcttcccatgga

SEQ ID NO: 82625 - DNA, 514 bp, Arabidopsis thaliana columbia
  unsure (1)..(514): unsure at all n locations
nnnnnnnnnnnnnnnnnnnnnnnnnnnnnnnnnnnnnnnnnnnnnnnnnnnnnnnnnnnnnnnnnnnnnntacccacgcgtgcgggggagagagagtgactttttttgtttgcctttgttaatggcttgtgtgtgagattcattgaattttttgaaaattctgacgaataaaaaccatatctaccaatcacaaaccctagatttttgttatcttcttcatccgaagattctctttgatctgtgtctccttccttctgattctcccatttcatttcattgattcttttgattcgattctattcgagctcaattttgtagatcagaacccagaatcgaatttgggataacttgaacaatatccttggtaacttgttgatctgaatttgagtgaagaagacatcgaattcaagtttggtgtgggagattttttttaatggagtgatgatgatttaaaggggaaggtaaagggaacgatgactggattgggtgttcgatccagtagctatggttcctt

SEQ ID NO: 82626 - DNA, 453 bp, Arabidopsis thaliana columbia
tcaattccctgaaaaaatttcataattcaaagagtgttccttggagagaaaagtttcatcctttcaacagatctgaagagggtcaattgaaattcgttttcacgattcatccgccatttttccggggaaaaaacaaaaggtgagatcaaagaggaaaaatggcgcatagggtagaacaggattatgattatttgttcaagatcgtgttgattggtgattctggtgtcgggaaaacaaacatcttgtctagattcacaaggaatgagttttgtttggaatctaagtccactattggtgttgaattcgccaccagaactcttcaggttgaaggaaagactgttaaggcccagatatgggacactgcaggtcaagagcggtacagagctatcacaagtgcttattacagaggagcggtaggtgcacttcttgtctatgacatcactaaaagacaaa

SEQ ID NO: 82627 - DNA, 1294 bp, Arabidopsis thaliana columbia
  unsure (1)..(1294): unsure at all n locations
ctcactatanggaaagctggtacgcctgcaggtaccggtccggaattcccgggtcgacccacgcgtccgcccacgcgtccgcggacgcgtggggtgagaacaaacatttaaagcttcttactcaaagtttctttctttatagatctcaaaaaattcgatatttttctcgattcatccgccattaaggttntattgcgagatcgaagagagaaggagaaaatgacgcatagagtagatcaggaatatgattatttgtttaagattgtgttgattggtgattctggtgttgggaaatcgaatatcttgtcgagattcaccaggaatgagtgntgcttngaatctaaatccactattgggtgttgaattcgcaccagaactactcangttgaaggaaagaccattaaggcccagatctgggacactgcangtcaggagaggtacagggcgatcacaagcgcgtattacagaggcgcagtgngtgcacttcttgtctacgacattactaagagacagacctttgacaatgttttaaggtggctgcgcgaactgagagaccatgcagattccaccattgtgttcatgatggctgggaacataatccgatctgaaccacttgagatccgtttctaagaaagatggtcaaagtttggctgagaagaaaggtctctctttcctggagacatctgctcttaaagcaacaaacgtcgagaaagcgtttcagaccatcttaggtgagatctaccatatcataagcaaaaaggcactggctgcacaagaagcagcagcagctaattctgcaatccctgggcaaggaactacgattaacgtcgatgacacatctggaggcgcgaaacgagcatgttgctcttcttaaactaaaggtaaactgtttatttcggttgctccttgttcagagattcaaacttttgttttcactggcttctcttcttttcaagttttggctgatgaaacgtaactatgcaagactatgtagaatactctgtttttattctcttcggtttggggtttgtgttcagtttaaagcttgttagtagtatacttagaatcttctggtgcttgcttgctttcccttcttcttcccttggtgtgtttctattgatttctggtttataaagtattttttctatctccggtttagtccggttcgtcttggctttgtttaatcaaatcattgattcctctctaaaaaaaaaaaaaaaaaaaaagnnnnnnnnnnnnnnnnnnnnnnnnnnnnnnnnnnnnnnnnnnnnnnnnnnnnnnnnnnnnnnnnnnn

SEQ ID NO: 82628 - DNA, 1246 bp, Arabidopsis thaliana columbia
  unsure (1)..(1246): unsure at all n locations
tcacgaagaagaagacgaagcccaaattcggcacgaggaaaaattccattttcctccattgattgtgagtgagaacaaacatttaaagcttcttactcaaagtttctttctttatagatctcaaaaaattcgatatttttctcgattcatccgccattaaggttttattgcgagatcgaagagagaaggagaaaatgacgcatagagtagatcaggaatatgattatttgtttaagattgtgttgattggtgattctggtgttgggaaatcgaatatcttgtcgagattcaccaggaatgagttttgcttggaatctaaatccactattggtgttgaattcgccaccagaactactcaggttgaaggaaagaccattaaggcccagatctgggacactgcaggtcaggagaggtacagggcgatcacaagcgcgtattacagaggcgcagtgggtgcacttcttgtctacgacattactaagagacagacctttgacaatgttttaaggtggctgcgcgaactgagagaccatgcagattccaacattgtgatcatgatggctgggaacaaatccgatctgaaccacttgagatccgttgctgaggaagatggtcaaagtttggctgagaaggaaggtctctctttcctggagacatctgctcttgaagcaacaaacgtcgagaaagcgtttcagaccatcttaggtgagatctaccatatcataagcaaaaaggcactggctgcacaagaagcagcagcagctaattctgcaatccctgggcaaggaactacgattaacgtcgatgacacatctggaggcgcgaaacgagcatgttgctcttcttaaactaaaggtaaactgtttatttcggttgctccttgttcagagattcaaacttttgttttcactggcttctcttcttttcaagttttggctgatgaaacgtaactatgcaagactatgtagaatactctgtttttattctcttcggtttggggtttgtgttcagtttaaagcttgttagtagtatacttagaatcttctggtgcttgcttgctttcccttcttcttcccttggtgtgtttctattgatttctggtttataaagtattttttctatctccggtttagtccggttcgtcttggctttgtttaatcaaatcattgattcctctcttatcaatgtattgtatccggttccnnnnnnnnnnnnnnnnnnnnnnnnnnnnnnnnnnnnnnnnnnn

SEQ ID NO: 82629 - DNA, 620 bp, Arabidopsis thaliana columbia
  unsure (1)..(620): unsure at all n locations
gttcatccagatcatgaataaagtcttcgagcatgcaggagatctggtaaatattaaagtggcacataatctgatgcgtttgattgctgaaggatttggagaggacgatgatgatgcagacagcaagctcagattatcagctgtggaatcgtacttgcagcttattagcgaaccaaaacttccatccctgtttcttcaggtcatttcttgggttttgggagaatatggcacagctgatgggaaatattctgcctcctatattagtggaaagctgtgcgatgtggcagatgcatactcaagtgatgaaactgtaaagggttatgctgtttctgcactgatgaagatctacgcatttgaaattgcatctgggagaaaggtggatgttttgccggagtgccaatctttgattgaagagctattgggttcacattcaaccagatcttcagcgccgagcatatgaacttcaggtccctgcnctagancccncctttttgngcatanccccctagggctatttcgggacncttgggttcaagctttntttttccaaggggtttcccaaattntggggggggcaccctttttttttggnggggccccggnnttttaaaccnttcnta

SEQ ID NO: 82630 - DNA, 659 bp, Arabidopsis thaliana columbia
cggacgcgtgggatttgattgaagtacagatccatcggagaagaagacagagagattgaagatcaatgacttcgagatattgggtggtgtctcttccagtgaaagactctgcttcttcgttatggaatcgattacaagagcagatctctaagcattcctttgatactccagtttatcggtttaacattcctaatcttcgtgttggaaccttagattctctactcgctctcggcgatgatctgcttaagtcgaacagctttgtggaaggagtttcgcaaaagatcaggagacagatcgaagaattggagaggatttctggtgttgagagcaacgctcttacagttgatggagttcctgttgattcttatctcaccaggtttgtgtgggatgaagctaagtacccaacaatgtcacctctgaaggaggttgtggacaatattcagtctcaggttgcaaaaattgaggatgatctcaaggttcgtgttgctgaatataacaatatccgtggtcaactcaatgccattaaccgaaagcaaagtggaagcttagctgttcgtgacctctcaaacttggttaagccagaagatattgtcgagtccgaacatctcgtaactctccttgcagttgttccgaagtattcccaaaaagactggctagca

SEQ ID NO: 82631 - DNA, 1438 bp, Arabidopsis thaliana columbia
  unsure (1)..(1438): unsure at all n locations
nnnnnnnnnnnnnnnnnnnnnnnnnnnnnnnnnnnnnnnnnnnnnnnnnnnnnnnnnnnnnnnnnnnnnnnnnnnnnccacgcgtccgtacggctgcgagaagacgacagaagggtacggctgcgagaagacgacagaagggtacggctgcgagaagacgacagaaggatacggctgcgagaagacgacagaaggggatattgtcgagtccgaacatctcgtagctctccttgcagttgttccgaagtattcccaaaaagactggctagcatgttatgagactttgaccgattatgtggttcctaggtcctcgaagaaattgtttgaggataatgagtatgccctttacaccgtcactctctttactcgtgtcgcagataatttcaggattgctgctcgtgagaaaggattccaagtccgtgattttgaacaaagtgttgaagcacaagagactcgtaaacaagagctagcaaagttggttcaggatcaggaaagtttgagaagctctcttttgcagtggtgctacaccagttatggagaggttttcagctcctggatgcatttctgtgctgtgcgtacattcgctgagagcattatgagatacggtttacctcccgcgttcttggcatgtgtcttatctccggctgtgaaaagtgaaaagaaagtacgctccattcttgaacgcttgtgtgattctaccaacagtttatactggaaaagcgaggaggatgcaggagccatggctggtttagctggtgactcagagacacatccttatgtctccttcactatcaaccttgcttaaaaatatgatgagagatgcttttgatgccacttctcctctggtcttctcatctgttatatttgtttgtggtctatagatttcacatttatttttcgtaacatattttgattttcataaataaggtggaactcaagagagatgttgctgtaattttatttggccggagtcttttagattccggcgagtttcagacacttgtggaagacagaagggttatacagttgttaaagcctttttgtcattttgtgacatggttgatttatttatatcatcactctgtttcgtttttgtctgaaaaatgtttttggcttctattggtattttcaaaccgatgttggaatgatctggagattagcatttagcaatcatgcaaactggtaacatttgtggctgagtgaagatgccccaattgggcagctgatgttttatacttttaactaaaaattgatattcttactactttagtttcttgtaagttgtaacatattacagtatctatcttttacatagtagagtttttctaatctcaaaaaaaaaaaaaaaaaaaaaaaacccaacnnnnnnnnnnnnnnnnnnnnnnnnnnnnnnnnnnnnnnnnnnnnnnnnnnnnnnnnnnnnnnnnnnnnnnnnnnn

SEQ ID NO: 82632 - DNA, 406 bp, Arabidopsis thaliana columbia
tcgcgttttcaacaatggtcgaacttttgcagcagttcgaggatattggaacacatggaacaaaagtaattatatacaacttgtggcttaatgatgaaggaatctatgagctgagttttgacgacgatgatgtggatatacggctccgagatgaaaatgcccaggacgggaaacggttgcacgctaaaacattggaagtaagatctcatatttcgtaccgctatcgacattctctaagggcttacatttccatgttatatctcaaaaagttcaaaaacttcaaaattattcttcggggagtctctgtggcgcaattcaacattgctgatgaattcagacatcctgagacaataatgtacaaaccccaagcagctgcagtggattatgctgccactggaattaaagt

SEQ ID NO: 82633 - DNA, 550 bp, Arabidopsis thaliana columbia
  unsure (1)..(550): unsure at all n locations
acgactcactatanggaaagctggcacgcctgcaggtaccggtccggaattcccgggtctacccacgcgtccggcttagcgtgcaggagaggatcagcatgtttgaaaacaagcagaaagagaactctggagagaaaacagctgtggcaaaatctactgagctgaaaagactttcttctgatttatcatcttctgcaggcatggaaaaggttgtggtacgaagatggagtggtgctagtgacatgagcatcgatttgggaaatgacaggaaggatgatacgggtgatagtccactgtgcactccctcgtcatcttcagtgtccaaagatggaagtggtgcatcctcaaaacaatttgtcggctacaataaaaaagagcagaatggattgagccatgctgcgaatcctcataggaatgacgatgaatgtacttccaacaatggtggtgactgggggatggtgaacanattctcaaattcaggtgtacttcttaccaagacaggcggtgactggatggccatttgacgatatcaatgagactcaggaatttc

SEQ ID NO: 82634 - DNA, 1102 bp, Arabidopsis thaliana columbia
  unsure (1)..(1102): unsure at all n locations
acgactcactatagggaaagctggcacgcctgcaggtaccggtccggaattcccgggtcgacccacgcgtccgcggacgcgtgggcggctgcgagaagacgacagaaggggggatttgctggaaaacaaaccgtcaatctccgtctttatagagaaaaaaagattctcttctcttctcgttctcatcatcgtcttaaagaaggaattcgatttttcgcctgaacctgcggatttttcgattcttcaaattcaatgtcttatgcttatctcttcaagtatatcatcatcggcgatactggagtggggaaatcatgtcttctgcttcagttcaccgacaagaggtttcagccggtgcatgaccttaccattggtgttgaatttggggctaggatgatcaccatcgataacaaacctatcaagcttcagatctgggatacggctggtcaagaatcctttaggtctattacaaggtcatactatagaggagctgcaggggcattgcttgtctatgatatcacaaggagggagacatttaaccatctagctagctggctagaagatgcaaggcagcatgcaaatgcaaatatgacgataatgctcattgggaataagtgtgatcttgctcacagaagggcagtgagtacagaggaaggagagcagtttgcaaaggagcacggtcttatattcatggaggcctctgccaagactgctcagaatgttgaggaggcattcattaagacagctgcaacaatatacaagaagattcaagatggtgtgtttgatgtgtcaaatgagtcatatggaatcaaagttggatatggaggaattccaggaccatcaggtggaagagatggatcaacctcgcaaggaggagggtgctgcggctgagatgggaaaaatatgtctatgtcattatgtaaaaatgatcacatatgatatagcaaaaatgtctctgcttctttctatagttgtaaatcgttttggaattcgatttggtgactgtgttgtggttggttttgaacggtttgacaatacacgtgtatgcctcttcatatatctaaaaattaagatgtgtttgcgnnnnnnnnnnnnnnnnnnnnnn

SEQ ID NO: 82635 - DNA, 532 bp, Arabidopsis thaliana columbia
  unsure (1)..(532): unsure at all n locations
nnnnnnnnnnnnnnnnnnnnnnnnnnnnnnnnnnnnnnnnnnnnnnnnnnnnnnnnnnagcgtcgttgagaggttatacgaaggaaggaggcagaggatagagagatagcgaggctaatggatcagtgactcactgagtcagattttaccgattcattgcctccattgaagcctcttttctcagattctacgcttcactgtctcttctccatgtgcgtctcctcctcctccgtttcttcagatcttgctttccggtgacggttttaatcttcttctctctggtaacacgtataaagcatggcttacctgatgtagacatgtagtgttaggctaaagactcctcttttcacttctgtcttgttgagtttgtgttggtttaaggctttaagccaaaggcgttgttggtctgacaagatggcaatggcggtgtttaaggctcctctaaaaggggaatttcatggggctagaaagatggaagggaagcaatataagcaccatctgcttcagcaacagtctacagggagaagacgtg

SEQ ID NO: 82636 - DNA, 1121 bp, Arabidopsis thaliana columbia
  unsure (1)..(1121): unsure at all n locations
gattctccaggnnnnnnnnnnnnnnnnnnnnnnnnnnnnnnnnnnnnnnnnnnnnnnnnnnnnnnnnnnnnnnnnnnnnccacgcgtgcgcttggttgctattggaactcatgaccttgatacattgcagggtcctttcacatacgaggctttgccgccaacggatataaattttgtacctttgaagcaaacaaagagcttcagggctgacgaacttattgaattctacaagtctgatatgaagctgaaaaagtttctacacataatcgagaattcacccgtcttccctgttttatacgacagtaagagaactgtgctgtcattgccacctattatcaatggtgcacattcagcaattaccttacagacaaagaatgtcttcattgaatgtactgcaactgatttgacgaaggccaagattgttttgaatacaatggttacaaccttctcagaattttgtgccagaaaatttgagattgagcctgttgaagttacatacgacgatgganagtcatacatctatccggatntagctgtctatgaatatggaagtcctctctctttcattacagactcaattggagtctctttaaaggtggaacaggttacaagtctgctgtcccgaatgcagctgcaagctgagcaagcaaaatctagtgataaccagtgtgccatcaaagtacatgtaccccccagcaggagcgacgttctccacccttgtgatgttatggaggatgttgccattgcctatggtttcaataacattccaacaagaaagcctgcttcgataaaaccactgactttgaatgagctcactgatcttctaagaatagagattgcgatgtgtgtgtacacggaggtggtaacgtggctactatgctcacataaggaaaactttgcgatgctaaatagagaggatgttaattcagccgtcatagttgggaacccgcggtctgctgattttaaggccatgaggagggctctcatgcccgnntnattgaagacagttggtcacaacaataaataccctaanccaattaagatttttaaaatcagtgatgttggtcatgtttggatgaggagcaaagacggttgggttcatcccaatcngtcgccatctt

SEQ ID NO: 82637 - DNA, 529 bp, Arabidopsis thaliana columbia
  unsure (1)..(529): unsure at all n locations
anccggcccgnaaacctgggncccccttaagccggcccccccttttttttnnncnnatgggtncnnnttttccccccctttnatttgcaaggtttgattggaattactngaccaaaccccaggaatnctaactcacaatgcnaaaacccancggtgggagttatagggcatttggaaaatatcaaattgttatctacagacagttttgtaaccacagagagagaaagatatataggagtaagatgtttcttgggtttgtcaaatctgaaggatcttcaaagagtcggccacaacttgaagctgctttttcactttcctccaccttctctnatttgctccaactatgagagtgtagtatctgttgtttccaactgccactgttgcaaaggaagtggttgcatagataggagttcttagtccatactcaaacgtgtaatagttctttccatcttccaccctctcttncatatcgtagatggtagctacttggtttggtgctgcaaacttatgcttcactagatcataaacc

SEQ ID NO: 82638 - DNA, 736 bp, Arabidopsis thaliana columbia
tggttgttttcaagaatggttgatccggaaaggcataggatagtggttaccatagatgatccaaacccaccattctttgcccggcaagggaatcctaatgtgcctgctgtgacacttgccatggatgacaccatagccgatgttcacccgtgaaagtttgagctttccttgtttgagacacaggttttggttaatacccctcaaggtatactggagatctcttcgggttggttaggacggcataacatttataatattcttgctgctgtggctgttgggattgctgttggagctcctcttgaggatattgttagaggtgttgaggaagtcgatgcagtcccaggaaggtgtgagttgattgatgaggaacaagcttttggtgttattgtggatcatgcaaacacacctgatggcttgtcaaggctgctagattcaattcgagagcttaaaccgagaagaatcattaccgttattggttgtgagggtgagaatgaaagagggaaaagaccgcttatgacgaaaattgctactgaaaagagcgatgtgacgatgttgacatctgataatccgaggaatgaagatccattggacatcttggatgacatgttgtctgggattggatggacgatgcaagagtatttgaaacatggcgaacacgattactatccgcctttggcaaatggtcatagactcttccttcacgatatgagacgtgtagctgtacgttgtgctgttg

SEQ ID NO: 82639 - DNA, 518 bp, Arabidopsis thaliana columbia
  unsure (1)..(518): unsure at all n locations
ggaattttggttttccctttactatttcatgattatatttgcccaaaaaacaattcttatcatcgcaccgctttactattctgggccatataatttgaaccaattctattagtgtacatagagatttgatgaataatctctcaaccaaagcttaacatgacgttgtgttggtgtttggacttgtaatccgatgatagcactcgctatcatatgatatatataactctgcaggtaacgagagcgagagagaggagagatcatatcttacatatccaattagtcttcatcaaagtacttatcttcagcgtcacggccaatctctcgaagccaatgatcatcaagagtctcgncattgtctatctttgcgtaatccaaatgttgatgatcttctcccgataagaacttctgttccatgattgatgtgaactgatccatcatatcttgcatctcctctggcggtaagactgttgcagccttctctttctgttctttaccattcagacttgaagagctagctt

SEQ ID NO: 82640 - DNA, 504 bp, Arabidopsis thaliana columbia
  unsure (1)..(504): unsure at all n locations
gggggcatggcccatgaatggtgaaaagtttaagggttcttagttcttacagatccaatacaactaaaacagaaggccgaaatggtttatcttctacacaagaagggtttctggacacaatacacgtcctctatagcaaaataacaattttaccaatgacaacaaaacaagtcaaaagcttttccatgggatctttcacaaaacggagtttatcttctctgtaggtagtaatacaggtgaaggtaaggttcactggtttgcctctttgaccaaaaccacattatatacacaaggattggattcctgctgtaagcttcatcaaaagtaaaagctattcagctctgccttggcttttctcgccgtgaaaagatgagccttacgatagaatagagtaccgccttaatgcaagaaaccacaaagttccagcatgaggatggccagtaccacgggatatagcagcctgaaaaatgcaaatgggtgctcggggacgccanaggaaggggg

SEQ ID NO: 82641 - DNA, 433 bp, Arabidopsis thaliana columbia
gtactagttgtccgaacccgaagaagccccaatcgctgatgcaactgtctaggagccgccacgctgcgaagaagctctagggtttgttcgtcttcttcctcggtttcatcagatggtaatcaagattgttgacggtgctctgaagatctgttgacctgctcagagtttgcttaaaaagtttgagaaaaaatggacgatgataatgggctcgagctcagcttgggtctttcttgtggaggatcaacaggaaaagctaagggtaacaataataataatgctggaagctcctcagagaactacagggcagaaggaggcgatagaagtgctaaagtgattgatgactttaagaacttcctgcatccaacttctcaaagacctgcagagccgagttctggttctcagagaagtgattcgggtcaacagccttcacaaa

SEQ ID NO: 82642 - DNA, 552 bp, Arabidopsis thaliana columbia
  unsure (1)..(552): unsure at all n locations
tggtccgtactagttgtccgaacccggagaagccccaatcgctgatgcaactgtctaggagccgccacgctgcgaagaagctctagggtttgttcgtcttcttcctcggtttcatcagaactcaaaaggtacttggtaggagcgagaagaaagtttctggagaattgctgaattgtttctttcaatggttttgtttctaagatggtaatcaagattgttgacggtgctctgaagatctgttgacctgctcagagtttgcttaaaaagtttgagaaaaaatggacgatgataatgggctcgagctcagcttgggtctttcttgtggaggatcaacaggaaaagctaagggtaacaataataataatgctggaagctcctcagagaactacagggcagaaggaggcgatagaagtgctaaagtggnttattgcctttaanaccttcctgcatccaactttcaaagacctgcagagccgagttctggttctcagacaagtgattcgggtcaacagcctccacaaaatttcttcaatgatctctcaaaagctccta

SEQ ID NO: 82643 - DNA, 579 bp, Arabidopsis thaliana columbia
  unsure (1)..(579): unsure at all n locations
nnnnnnnnnnnnnnnnnnnnnnnnnnnnnnaaccattgcaagcctttgtgggcacttgtttatatcgctgtttccacgtggcaaacaaagtcgaaccagaagaaattttggtttggtaataatttatttcgttagtaccggttctcgaaccaaataaaccaaaccggattaaactcagaaccgataaattatggatccgattacattcaagcagaaggaatcatgccggcttttcttgcataagcgaagattccaccggcgtcgatcaccggaccggcatcaccgagcggtttcagtttgtattctttcctcgtcgtatgattgatcagcaaactactaccgtcttccttgtgttcgattgtcaccacatcccctgttttgcactcgtcgcaaatcctaacctccgattccaacggggaaatctcacctgtagctacacagttcctggaaaaggatcctagcggacgattccgccaccacagctttagctcccgccgcgccgagacaaactggagcgtgttcgcgggaagatccgcaaccgaaattatcgccgccgatgatgactgagtactttgattt

SEQ ID NO: 82644 - DNA, 614 bp, Arabidopsis thaliana columbia
  unsure (1)..(614): unsure at all n locations
nnnnnnnnnnnnnnnnnnnnnnnnnnnnnnnnnnnnnnnnnnnnnnnnnnnnnnnnnnnagaagcgttactcccccgtcatctaccttctcagaaagggagctgcatcaatggcgaccaataatgattttggagctttcattgagaaagttacaatctctccaacttctacttcctcgtcgcctccttctctacagggtcttactttcgccattaaagacatttttgatgtggaaggacgcgttaccggttttggtaacccggattggttaaggacacactcggcagctacttctacagctccagtagtttcatctctcttagaagctggtgccacagctttgggtattaccattatggatgaaatggcttacagtataaacggagaaaatgcgcattatgggactccgagaaacccgattgctttcgatagagtgcctgggggatcatcgagtggctcagccgtagctgtagctgctcgtcttgtggattttcctattggaactgntaccggagggaggtgtacgagttccagcatctnactgtgggatttcgggtttccgggccatccannggtncagttttccactgtgggncttantcccantggttnaa

SEQ ID NO: 82645 - DNA, 688 bp, Arabidopsis thaliana columbia
  unsure (1)..(688): unsure at all n locations
gnnnnnnnnnnnnnnnnnnnnnnnnnnnnnnnnnnnnnnnnnnnnnnnnnnnnnnnnnnnnnnnnnnnnnnnccacgcgtccgcccacgcgtccgtacggctggaagacgacagttcggctctcttagaagctggtgccacagctttgggtattaccattatggatgaaatggcttacagtataaacggagaaaatgcgcattatgggactccgagaaacccgattgctttcgatagagtgcctgggggatcatcgagtggctcagccgtagctgtagctgctcgtcttgtggatttttctattggaactgataccggagggagtgtacgagttccagcatcttactgtgggattttcggtttccggccatcccacggtgcagtttccactgtcggacttactccaatggctcagagcttcgacacagttggatggtttgctcgggacacagccactttgaaacgtgtaggttgcgttctcctgcagcagcatcacttgaaccccatcggaccctctctactgattatccgcgggatgactgntttaaagctgtgtaggtgtaccccaatgatcncttgggnnaagcnntggttggatccntnggnaaaaacgtttggggggaacactttngtaaaanaggnggatcttgggngnaaattggcaaaatttncaagctaaaaatttatt

SEQ ID NO: 82646 - DNA, 769 bp, Arabidopsis thaliana columbia
  unsure (1)..(769): unsure at all n locations
aagaactaacacatgtcgggacctcagtgctgtgaaaacccgccaactcttaacccggtttccgggtcgggtcatgtcgagaagctgggtgggcttgatgcctacgtctccggctctgccgagtccaagctctgcgtcctcctcatttctnatatttttggttttnaagctccaaacttaagggcgcttgcggacaaggttgcagcttctggattctatgttgtggttcctgattactttggtggagatccttataatccctctaaccaggacagacccatccctgtctggatcaaagaccatggctgtgataagggctttgaaaacacgaaaccagtacttgaaaccataaagaacaaaggcataactgccattggagccgcagggatgtgttggggtgcaaaagtagtggtggaactgtctaaagaagagcttattcaagcagctgtgttgcttcatccttcttttgtcaatgttgatgatatcaaaggtgggaaggctccaattgctatattaggagctggaattgatcaaatgtccccaccagcactctgggagcaatttgggggagattctatcttccaaacccgaggtgaatagntacgtgaagatacaaccgaaagtgtcanacggatggacaggtagntacaacaatcgatgaaccagagncgnttatgnagcagagagcnacanggggtncttgntgggttgggnccccaacaaatctttgggaagaagaagggtttgcttttatcanttttaaagatat

SEQ ID NO: 82647 - DNA, 615 bp, Arabidopsis thaliana columbia
  unsure (1)..(615): unsure at all n locations
nnnnnnnnnnnnnnnnnnnnnnnnnnnnnnnnnnnnnnnnnnnnnnnnnnnnnnnnnnnnnnnnnnnnnnnnnnnntggggttccacggaagaactaacacatgtcgggacctcagtgctgtgaaaacccgccaactcttaacccggtttccgggtcgggtcatgtcgagaagctgggtgggcttgatgcctacgtctccggctctgccgagtccaagctctgcgtcctcctcatttctgatatttttggttttgaagctccaaacttaagggcgcttgcggacaaggttgcagcttctggattctatgttgtggttcctgattactttggtggagatccttataatccctctaaccaggacagacccatccctgtctggatcaaagaccatggctgtgataagggctttgaaaacacgaaaccagtacttgaaaccataaagaacaaaggcataactgccattggagccgcagggatgtgttggggtgcaaaagtagtggtggaactgtctaaagaagagctttttcaagcagctgggtggcttcatccctcttttgcaaaggtggtgaatcaaggngggaggcccaatncaatttgggnnaatngcaatnctc

SEQ ID NO: 82648 - DNA, 461 bp, Arabidopsis thaliana columbia
  unsure (1)..(461): unsure at all n locations
gatggaagtttttgcaagtaaaaatgttcgtagcaatcattactactaatcttttctggctttctcaaaaaaaaaaaaaaaatccatcaagtaaagacgtcaaaggctcccaacattttgtaagcccctaaaacaaaactaaaaacaccttcgggaccaaattccccttttgctctttttaagcgttttatgcaacttcttagcttgagtcaaaacacaatcttggtcgaacaaagctgacacaactgctacaccttttaggttcggtgcatcgatctgcatnacagacccagnatttgagatccctatgcctccgattgcnacaaccggtaattttgatgcttnacatacttcttttagcccatcaggtcctatggtacgattgttggccttagtgttcgttggaaaaactcctcctgacccaatgtagtccgcaccatctttccatgcttgatgagctt

SEQ ID NO: 82649 - DNA, 947 bp, Arabidopsis thaliana columbia
  unsure (1)..(947): unsure at all n locations
cntcnncgcanaattngnatcaancncccgtttcccaaatagttggcagggtatccgtatctcacccagggccagcagctttccccgttgacaatggtcgctatatcccatctacagttccaggttgatacatccggggaaaggcctcccttcagagatgctaagtgatatgtttgagactcgagatggatgggtccacccctgatggtttagggcctaacgctttcccggaaactattggagcagatgaatggccgtgtcagttatgtcctgacaagacgaacggtgtttctttcaggtggatcttcaagtgaactcaatgttaggtgttcagtcaagaggaacacagggtagttcaagcataaagtagaaattttgagttacaaggcttataaaatttaatcaaatttggtctcttaccaaatgtattaattagaacaaaggtacattatttattaccaccaataagattgtatcttaactatcctatgtatacaatttggagagatcatttggccaaccagacaaaagtaaaacacaaccatcaattcacatgtctagaacaataattctttctaattctggataccagcaaactagaaggaactgagaaaaccagaaatgtttctaaagggtactatgtagtagtttgttgttggtcatcatcatctcatcctagaaactgatatttacgttttaaaccagaggcaataacgtgattcacttgactgtcagctttgatgtgtgttctcgccggcaagaggatgaggaaccgttgaatttgatgcctcgagctgcgnattctcccggntgntcggntattnggttcggtccancaaggccatngggtgggncccctanctcatcancaactgngtctgaagtggcatagcgcgttacctggtcgggnngccntggggcttncggggggctnccctctcctaggc

SEQ ID NO: 82650 - DNA, 531 bp, Arabidopsis thaliana columbia
  unsure (1)..(531): unsure at all n locations
atagtaaattaatgactttcaagtggttttcatcttacttacaaacttataatatgctataatattataatccataaataaaaaataaaatctattaaatatgctatattttttgtggcatcttgtgtagagatgatcatcagttgacaagaagtgccttgataatgtctttgcatttctcctcctcggcgtttagaagatgtccataacctaagacctcatggtacttaatccatggaagcttctctgatatatatcgattaatttcgtatggaatgattctgtcttccatcccttgccaaacgtggaccgatccttcgccttccgcaaacggattttctaattcagtcgggtcgaattcccatgtcgcgaatccngggancaaggcccgggggaagacattcangggcncctggtgggccaaacttttccaagccaggggggggntcccccatttcctccttaagnnggcnaatcttggcggggaaaaggatgtccccggnanaanccaggnggaaaanttgggcnccc

SEQ ID NO: 82651 - DNA, 482 bp, Arabidopsis thaliana columbia
aaatcacattgttcacatcataaaataactttgaaagaaaccaacaagttacattctaaacatttcgtcctttgaaaactcttaaaaacacattattaattaagcatcacagattaatcatacagtcactttacctcacaattttagcaacaaactcatcaatattcttatcagaatttcctccatcagacaaagcttcccttgcaaactccatcaacctccgagcgttttttctaatctccttccctttctccgacatatcttccataacttctccaacacatctcacaatctcttccttcggaacaaacccattttgatctgccttaaccctaaccccaaccttccacacatcttcaataaacttagcattagtcggctggtcgctataagccggcatccctatcaaagcaactcctaagctcaatgcctctaaagtcgaattccacccgcaatgagtcatgaaacaaccgattgattta

SEQ ID NO: 82652 - DNA, 421 bp, Arabidopsis thaliana columbia
ttttttttttaaacaacaccttttgatttttgattcaagaacccattttaaggacaaagttttggggggtcatttggtcactcttttgttgagtaatcaacaagattttcatctaaaataagaatgatacattaccccctcttacaacataagacttaagggacaaaagttgctggataagcttaaaggaagagtgaaaatctttatcagaaaagaaggaagaagaattaaaacgatcaaatccggatactgtacctttaattatcatggcctcccttttctggaacaacatgaaaaaactgcagaagataaagggaaaaaaaacttatatcattatgtttctgaaccacttctggtcttgagtctttagaatagcattttgagtaaaagaagctttttgctggttagttgaacatcctga

SEQ ID NO: 82653 - DNA, 528 bp, Arabidopsis thaliana columbia
  unsure (1)..(528): unsure at all n locations
catgtccaatcatatatataatattaagaggttaccggcgctgagtcatacagtaaataaaaatacagacaatagttacctcaatcaaaatcacaaaaccaatgactctttttctggttaatgcttgtgattccaatggggtagggtttcatacagattagaatcaggagcaaatggattctgcatgccttcacggttcacctgttccggcaagaaatttgccgtctccactctctgattttgtgctaaaccagcactggtgttggtacttgaatttgctgggtttcaaaaatgtgggttagangttttggcgggaatacctangaggaagcnncccggtggtgttgcctgaatgggaatgcccangntttgggcctttaccaattgcaaaggggtccatccntgtcaatcctttttcacagnttccnctgccatcttaacctttgnnccccaaagttncgaaatcagcccntaaaatcctggttgcaanagnagnggancaacntatggtcctngccnaagcgntaa

SEQ ID NO: 82654 - DNA, 424 bp, Arabidopsis thaliana columbia
aggtttacgtcgctctcatcccagggcgagaaagatggtgaaacggagtaaaaagagtaagagtaagagggtgaccttgaagcagaagcataaggtcctgaaaaaggtgaaggagcaccacaagaagaaggcaaaggatgctaaaaagcttggccttcaccgtaagccaagagtagagaaagacccaggtatacccaatgactggcctttcaaggaacaagagcttaaagcccttgaagttcgacgtgcccgtgctcttgaggagattgaacagaagaaagaagctcgcaaagaaagggccaaaaagaggaaacttggtttggttgatgatgaggataccaagacagaaggagagaccatagaggacttacctaaagttgtcaatgttcgagataactcggagagggctttctacaaggagcta

SEQ ID NO: 82655 - DNA, 456 bp, Arabidopsis thaliana columbia
cgagccccgccttgggggggcttccagtccatttgtccaaaggttaaagactttcccaaggcctaagttggtggtgttccccccgccgttccccgtcaagtccaaggctggtgattctactccagaggagcttgcccaatgctactcaagttccaaggtgattacatgcccaattgcccagtgtcaaggcagctatggagctagttaagctgactgcagatttgaaggcgttcaaggcttacgataagattcgtttggagcgcacaaacgcacgtcatgctggtgccagagccaagagggctgccgaggctgagaaagaagagaagaagtaaaattcgctgctttatagagcttaatcattcttgaattcttgttcttctggtttttgattttgtgcacgactctgttttctttttggtgcggtttatcaatacatagatctcaaaggtttctggt

SEQ ID NO: 82656 - DNA, 677 bp, Arabidopsis thaliana columbia
  unsure (1)..(677): unsure at all n locations
ctaatcgactaaccttagggaaagctcgtacgcctgcaggtaccggtccggaattcccgggtcgacccacgcgtgcgcgcttttcgtccaagccgctaaaaatgaagcacaacaacgtgtatcccggagctcacacttttcgcaagcactgggcagaattatgtcaaagacttggtttaaccagcgctgccagggaagacaagggagaccgtgttgctagacagaagaaaggcttgtgaagagcggccctcctcccacctctggtcctctccgacctgttgttcatggtcagacacttaagtacaacctgaaagttagagctggaaaaggattccctcttgaagagcttaagggtgcgtggtatcccaaagaagttggctcccaacaatcgggaatttctgggtgatcacccgacgcaaagaccccgttctttgagaggggtcttcaagtccaatgtgcccaaaaggttcaaggacttacaaggggttgagttggtggtgttcccttggccgttcccggcaagtnaaggctggggatttttcctcanagggggtttccaatgnttnctaagttcaangggggttaaatnccaatttcnagtttaaagnanntttggggttnttaagttcctncanttttaagggntaaggttcggaanatttttttnggggnnaang

SEQ ID NO: 82657 - DNA, 719 bp, Arabidopsis thaliana columbia
  unsure (1)..(719): unsure at all n locations
nnnnnnnnnnnnnnnnnnnnnnnnnnnnnnnnnnnnnnnnnnnnnnnnnnnnnnnnnnnnnnnnnnnnnnnnnnnnnnnnnnnccacgcgtccgcccacgcgtccgcccacgcgtccggacgattctctctcttgagttgaagaaatgaagcacaacaatgttatccccaatggtcacttcaaaaagcactggcagaattatgtcaagacatggttcaaccagcctgccaggaaaaccagaagaagaattgcgaggcaaaagaaggctgtgaagatcttccctcgtccaacttctggacctctccgccctgttgtgcatggtcagactcttaagtacaacatgaaggtcagaaccggtaaaggattcactcttgaagagctcaaggctgctggtatcccaaagaagttggcgcctacaattggtattgctgttgaccatcgtcgcaagaaccgatctttggagggtcttcaaacaaatgtccagaggctgaaaacctacaagaccaagttagtcattttcccggggtcgtgccccgaaaggtcaaggctggtgactnttcaccagaaggggggtttggctaaatggtcccccaaggtttaagggggcttctttcccccttttttccggggggaggccttcccttggnctggtaaagttgcttttaaantagggttttaagggttttaaagntcnntttngggcnttaangggnttcggg

SEQ ID NO: 82658 - DNA, 854 bp, Arabidopsis thaliana columbia
  unsure (1)..(854): unsure at all n locations
atttcnttttttttggccagggccccccgctatggctnctggagcttaaacttcacttttcgtccaagccgctaaaaatgaagcacaacaacgttatcccgagctcacactttcgcaagcactggcagaattatgtcaagacttggtttaaccagcctgccaggaagacaaggagacgtgttgctagacagaagaaggctgtgaagatcttccctcgtcccacctctggtcctctccgacctgttgttcatggtcagacacttaagtacaacatgaaagttagagctggaaaaggattcactcttgaagagcttaaggttgctggtatcccaaagaagttggctccaacaatcggaatttctgttgatcaccgacgcaagaaccgttctttggagggtcttcagtccaatgtccaaaggttaaagacttacaaggctaagttggtggtgttccctcggccgttcccgtcaagtcaaaggctggtgattctactccagaggagcttgccaatgctactcaagttcaaggtgattacatgccaattgccagtgtcaaggcagctatggagctagttaagctgactgcagatttgaaggcgttcaaggcttacgataagattcgtttggagcgcacaaacgcacgtcatgctggtgccagagccaagagggctgccgaggctgagaaagaagagaagaagtaaaattcgttgctttatagagcttaatcattcttgaattcttgttcttctggtttttgattttgtgcacgactctgttttctttttggtgcggtttatcaatacatagatctcaaaggtttctggtggagaacctcaacaaaaaaaaaaaaaaaga

SEQ ID NO: 82659 - DNA, 1022 bp, Arabidopsis thaliana columbia
  unsure (1)..(1022): unsure at all n locations
gatcttnnnnnnnnnngatcctccagctacattcgactcactttatggaaagctgcgcacgcctgcaggtaccggtcccgagctcgcgtgtggagccgcgcaagaagacgattctctctcttgagttgaagaaatgaagcacaacaatgttatccccaatggtcacttcaaaaagcactggcagaattatgtcaagacatggttcaaccagcctgccaggaaaaccagaagaagaattgcgaggcaaaagaaggctgtgaagatcttccctcgtccaacttctggacctctccgccctgttgtgcatggtcagactcttaagtacaacatgaaggtcagaaccggtaaaggattcactcttgaagagctcaaggctgctggtatcccaaagaagttggcgcctacaattggtattgctgttgaccatcgtcgcaagaaccgatctttggagggtcttcaaacaaatgtccagaggctgaaaacctacaagaccaagttagtcattttcccgcgtcgtgcccgcaaggtcaaggctggtgactctacaccagaagagttggctaatgctacccaagttcaaggagactacttgcctattgtacgtgagaagcctaccatggaactcgtcaagctgacttcagaaatgaagtctttcaaggcttttgacaagatacgccttgagcgcactaacaagaggcatgccggagctagagccaagagagccgcagaggctgagaaagaagagaagaagtgaggtcgttcttcttaggtagaagaaacttttatcttatcaacttttggaactgaattttgtgtatcagactgtcttttctttcatcagtttttatccttaaatctttgattttgctgctaccttgcttctcttgatttatggaaaagaccgtatctcacaaaaaaaaaaaaaaaaagggcggccgctctagaggatccaagcttacgtacgcgtgcatgcgacgtcaaagtcttctatnnnnnnnnnnnnnnnnnnnnnnnnnnnnnnn

SEQ ID NO: 82660 - DNA, 461 bp, Arabidopsis thaliana columbia
  unsure (1)..(461): unsure at all n locations
gcaatggaagtagtcaactaaaattattcataatcgaatatgcaactttttatacatttcacattgaccagtaataagcaaattgaaaccttggactcttggaacgaacgtctcttattacacacgaaaccggcacacgtccaacattcattcaataggcaaattctctgcttcatatctaatcgaatcgaacagtttagtcgataaataacgttctcctccactaggaaaaaccaccacaatgagtttccccgcgttttctggccgctttgcaacctttaacgcagccgctgctgggcttcccagaggatattcccaccagtaatccttctttgaggggcaagaagcttggnctgtttcaatagcctcttcacctgccacttggaataatttncatcaacaatgggttaagtcccaattgatgggnngattccagggccaatncctgaatcaatntggac

SEQ ID NO: 82661 - DNA, 984 bp, Arabidopsis thaliana columbia
  unsure (1)..(984): unsure at all n locations
caagggtagggccaacctttaaaattcccatctctatctattggggaggtgcgcccaccctttttttattatccttttccaccctttgacccatctttttaacccgacatggaactccttgaactcctgggaccgtagcgtttctttcttctccaggaacctggcacccgcccaacattcattcaataggcaaattatcggcttcatatcttctcgaatcgcacagtctagcctatagaaaacgttctcctccactagcagaaaccaccacaatgagtttccccgcgttttgtgtccgctttgcatcctttcacgcagccgctgctgcggctccagaggatattccctccagtgatccttctttgagggctataagcttggctgtttcaatagcctcttcaccggccccttgaatgacttcatcagccatggttaagtcctcattgaatgggtccattccagagccacttccctggatctaatgtggccctggttgacctccgctaagtaccggactttcttctggttccgccacacaatccttgatgtctttgttccgctccctgaggaccttccctactccagtagcagttccaccagtccctacgccagcgaccaatatatctactttcccggctgaatctctccatatttccggtacaatggttcggtaatgagtctcggggtctgcagctttctcgtaatgccggggcgcgtctctctgtccaactcatgtccggcgtggttttcccaaacgacngnctcctaatcaaaattgttgtctcctgcctcccttgggggtgtgttagtatagtagttctgggctcctggactgtcgtctctctatcatcccagtgttctcagcaggcccgtcgtagttcgccaccacgtgtgtaggactgctgagcttccttggctaattatagatgcgacgcgcagccgctagtgagtggatgatctctgcgcctatcttgatagatgcga

SEQ ID NO: 82662 - DNA, 632 bp, Arabidopsis thaliana columbia
  unsure (1)..(632): unsure at all n locations
gtctgatttaggcgacctatagattagcttgacgtcgcatgcacgcgtacgtaagctcggaattcggctcgagaaaaaaatggcaacagaaggaaaaaaccccatcaacatgaactctatgtcttcaagtcttgcaagaaccggtcaatgggttttttctcaagatattccgaccgatgttgttgttgaagtcggagaagccaatttctctcttcataagttcatgttagtggctaagagtaactacataaggaagctaataatggaatccaaagatagcgacgtgacaagaatcaatctctcggatatacccggaggtcctgagatatttgagaaagctgccaagttctgttacggtgttaacttcgagatcaccgttcagaacgtggcggctcttcattgcgcagccgagtttcttcagatgaccgataagtactgcgacaacaaccttgctggtcggacacaagacttcctttctcaagtagctctctctagcctctctggagctatcgttgtcccaaggctttcgggattctccttcctatttctcggggtctttggattgccccccgtgtgtggcggtgctgtgctaaggnttnaacggggaatnttccatgtgncncnccnantta

SEQ ID NO: 82663 - DNA, 411 bp, Arabidopsis thaliana columbia
agaacagaggatttttctcggccaagttttctctagctcaggtgtttgatgtgaattttttgagggaggggaatgagttcaatgagcagaagcagaagtcgaagtagaagtcgtagtcgggatcggtttcgtagtcggagtccgagagacaggagaatgagatctgaacgagtttcttaccatgatgctccttctagaagggagagggagccacgtcgtgccttcagccaaggaaatctctgcaacaactgcaagcgacctggtcactttgcaagagactgttctaatgtttccgtctgtaacaactgtggtcttccagggcacattgcagcagaatgcactgcggaatcacgttgttggaactgtagagaaccgggccacgtagcctcaaactgttcaaacgaaggaatc

SEQ ID NO: 82664 - DNA, 532 bp, Arabidopsis thaliana columbia
gcggtttcctcttctctgcatctcaccggttcgccggaaaactctacgccggcgccggattttgcaccaacgaaaacttctttaaactactttcttcattattcttctgctgagtttcaaaaactcagccatgggtaattgtatcgcctgcgtcaagtttgacccagacaactcaaaaccaaaccagaagaagaaacctccacggggacggcaacgaaacccatacgacgatcccgatggtttaagaactcacgcaccgttacgtgtgattcctatgagccatcaatctcagatcagcgacaagtacatcttaggacgagaactcggtcgcggcgaattcggaatcacgtatctttgtacagatagagagactcgtgaagctttagcttgcaaatcaatctccaagagaaagctccgaaccgccgtcgatgtggaagacgtccgtcgtgaagtcacgatcatgtcaactttaccggaacacccaaacgttgtgaaacttaaagcgacttatgaggataacgagaacgtgcat

SEQ ID NO: 82665 - DNA, 496 bp, Arabidopsis thaliana columbia
  unsure (1)..(496): unsure at all n locations
gcacgcctgcagtaccggnccggaattcccgggtctacccacgcgtccgcagcctcttcttctaacaaaagcaaactgaaccaagaatggagtcgctgatcaagtcccagcacgctcagcaactggcgggtcacaagaatacgaccggtaaaactccgtccatggagatgataccggcgacgggacttgcgatgtcatcggacgaaagcatgatgctgaagctgattcaacaaactcactccccagatgctcgcgaagtccaagtgcgtggccttctctctctcgttgaagatattctcgatcgtgccactcttgactctgaagacaccaacgcctccatgcttccgttgcccactgaggataaactgatgcagtcaagcatgatgagcgttcttgatagtgtctcctatgctatcgatcgtgttgcctgcgagatagcctataagtctctgacgggatctgattcacacgaaatcacaatgtccgtgttcgaaca

SEQ ID NO: 82666 - DNA, 140 bp, Arabidopsis thaliana columbia
aggttgacttgaggaaaaggttcttcatgagcttcatcctctctataataaacaaccatttctatagagaatccaccccatggttttaaaccgaaccggggaagactgtaccgttaatattaatatgaaattgatttctg

SEQ ID NO: 82667 - DNA, 602 bp, Arabidopsis thaliana columbia
  unsure (1)..(602): unsure at all n locations
aaaaatcttgaaattttggatttaacaaacaacaatgtttgccctcacacacatgttcgctagacgaccatgcagggacacaattgtgcaacttaaagatagccagtgcatagaattccgtggtttgacatttatggctatcctgaacagatactgtgttgagtaggacactaattgggtcactgaaactacaagatgaggaacttggaaaaactacgggttcaggtcgaagttcgtctccaataggttctggattttggacaaggaatcaaccttaaaatcaggttgcagaccggaaacagaaaaatccgtctggtccataccttccggtttcatctagcaagcaagtgaaggctccagctcggttcccacatgctatatcaccttttaagctgtcaccaaccatcatgacttcattaggttggatgtcccatgtagaacatatatgcaacagcgggctggggttggttatatggggcgnacncctgccaagtgctgggggaaaggtaccncaaacgttntggaaatnccattnctttgaaattgnggaatagccccccttaccttttgnccaggngcccaagtncgngnccagngtgnna

SEQ ID NO: 82668 - DNA, 722 bp, Arabidopsis thaliana columbia
agaaggggaagcaaagatcaaagagaaaaatatcccaaaaccaaaaacagaggaagaaagaagaagaaaagatgccttcaagcacattctccgggactgttagcacgccgaagctgtcggtggcagtggacatgggaaacccttttctcaatctcaccgttgatgccttcctcaagatcggagctgttggagtcactaaatctcttgcagaagacacttacaaggccatcgacaaagggagtctctccaagagcactttggagcatgcgcttaagaagttgtgtaaagaaggtgtttactggggagctgctggtggagtgtacattggaacagaatacggaatcgaacgtatccgtggcagcagagattggaaaaacgcaatgttagcaggcgcggcgacaggagcagtgctctcagcggttggtaagaaaggcaaagacactattgtgatcgatgccattcttggtggcgcgcttgcaaccgcttctcagttcgttaacaatcattatttctactgattctccatcttcctttagggaccaatttggttcatatggtgtggattcctttgtttactctttaaataataataaaaaacaatgtagtgtttttgaaatgaatacattcgagtattgttgacgttaaaaaaaaaaaaaaaagggcggccgctctagaggatccaagcttacgtacgcgtgcatgcgacgtcgtagctgttctaa

SEQ ID NO: 82669 - DNA, 423 bp, Arabidopsis thaliana columbia
gcgtccgacgaaaccctaattttgctcctcatcttgttcagaaaattactcaaattcctattagattactctctcttcgacctccgatagctcacatggcgtctcgaaactatcggtgggagctcttcgcagcttcgttaatcctaaccttagctttgattcacctggtcgaagcaaactccgaaggagatgctctttacgctcttcgccggagtttaacagatccggaccatgttctccagagctgggatccaactcttgctaatccttgtacctggttccatgtcacctgtaaccaagacaaccgcgtcactcgtgtggatttggggaattcaaacctctctggacatcttgcgcctgagcttgggaagcttgaacatttacagtatctagagctctacaaaaacaacatccaaggaacta

SEQ ID NO: 82670 - DNA, 656 bp, Arabidopsis thaliana columbia
  unsure (1)..(656): unsure at all n locations
tcagcttggatctgtacaacaacaatcttacagggatagttcccacttctttgggaaaattgaagcctctggtctttttacggcttaatgacaaccgattgaccggtccaatccctagagcactcacggcaatcccaagccttaaagttgttgacgtctcaagcaataatttgtgtggaacaatcccaacaaacggaccctttgctcacattcctttacagaactttgagaacaacccgagattggagggaccggaattactcggtcttgcaagctacgacactaactgcacctgaaacaactggcaaaacctgaaaatgaagaattggggggtgaccttgtaagaacacttcaccactttatcaaatatcacatctattatgtaataagtatatatatgtagtcaaaacaaaaaaaatgaagaatcgaatcggtaatatcatctggtctcaattgagaacttcgaggtctgtatgtaaaatttctaaatgcgattttcgcgtactgtaatgttcggttgtgggattctgagaagtaacatttgtattggtatggtatcaagttgttctgccttgtctgcaaaaaaaaaaaaaaggacggccgctctannnnnnnnnnnnnnnnnnnnnnnnnnnnnnnnnnnnnnnnnnnnnnnn

SEQ ID NO: 82671 - DNA, 982 bp, Arabidopsis thaliana columbia
  unsure (1)..(982): unsure at all n locations
aggtgcactatagaagagctatgacgtcgcatgcacgcgtacgtaagccaacttcaataaaggggaaccaacgtaaccctaattttgctttctcctctttgttcagaaaattttccctttactctcaaattccttttcgatttccctctcttaaacctccgaaagctcacatggcgtctcgaaactatcggtgggagctcttcgcagcttcgttaaccctaaccttagctttgattcacctggtcgaagcaaactccgaaggagatgctctctacgctcttcgccggagtttgacagatccagaccatgtcctccagagctgggatccaactcttgttaatccttgtacctggttccatgtcacctgtaaccaagacaaccgcgtcactcgtgtggatttgggaaattcaaacctctctggacatcttgcgcctgagcttgggaagcttgaacatttacagtatctagagctctacaaaaacaacatccaaggaactataccttccgaacttggaaatctgaagaatctcatcagcttggttctgtacaacaacaatcttacagggatagttcccacttctttgggaaaattgaagtctctggtctttttacggcttaatgacaaccgattgacggggccaatccctagagcactcactgcaatcccaagccttaaagttgttgatgtctcaagcaatgatttgtgtggaacaatcccaacaaacggaccttttgctcacattcctttacagaactttgagaacaacccgaggttggagggaccggaattactcggtcttgcaagctacgacactaactgcacctgaaaaaattggcaaaacctgaaaatgaagaattggggggtgaccttgtaagaacacttcaccactttatcaaatatcacatctactatgtaataagtatatatagtggcccaaaaaaaaagggggcnnttgggncngttngcggnatgggggntgnt

SEQ ID NO: 82672 - DNA, 1008 bp, Arabidopsis thaliana columbia
  unsure (1)..(1008): unsure at all n locations
ttnaatatcaacgcctccaaaatttccgtgcttttgttttcgtagataacgaacaatggctgatgagattgtgccgccggcgactcaattagccgccgtatccttagaaaacgatggatctacggtgcaaagagctcaattctctaaccgggttttgattcgaacgattttggatcgacctgacggcggagctggactcgccggtcaaacggttcgaatcggtggttgggtaaaatccggaagagatcaagggaaaagaacgttttctttccttgcggttaacgatggatcttgtccagcgaatcttcaggttatggtggatccgtctctctatgatgtctctaacttggttgctacgggaacttgtgtgactgttgatggagttttgaagggtccaccgaaaggtaaaggtacgcagcagcagattgagcttaacgttgtaaaggtgattgatgttggaacggtggatgcgtctaagtatccacttcctaagactaagttgactcttgagactttgagagatgtgcttcatcttcgttctagaactaactcgatctcagctgttgcaagaattcgtaatgctcttgcttttgcgactcacagtttctttcaagagcatagtttcctttacattcacactcctatcatcacgacaagtgattgtgaaggtgctggtgaaatgttccaagcaacaactttgatcaattacactgagaggttggagcaggatctcattgataaccctccgcctactgaggctgatgttgaagctgcgaggctcattgtcattgagagaggtaatgttgtagcggaactgaaagctgccaaagcaagcaaggaagcgatcactgctgctgttgctgaacttaaaatagcaaaggagacttttgctcatattgatgagaggtcgaggcttagacctggactacctaagaaagatggaaacattgattattccaaggatttctttggtcgtcaagctttcttgacagtttccggtcaattaca

SEQ ID NO: 82673 - DNA, 633 bp, Arabidopsis thaliana columbia
  unsure (1)..(633): unsure at all n locations
nnnnnnnnnnnnnnnnnnnnnnnnnnnnnnnnnnnnnnnnnnnnnnnnnnnnnnnnnnnnnnnnnnnnnnnnnnccacgggtgcgggtatggacaatctccggaaacttaatcttctctctgtctctctaaccataatctttgtctctcttaccatagccaccaacttacctttctttgaagtgaaatatcccaacaacaacccttttgggatgttactacggccgacaccgatcaagaaccaatccttgggtctaccggctcatgtcgggtcagatgagtgtcgggtttggaccaaagcatgttctgatgagattcttaggctgacttatcagccggataacgttgcgtggcttaaacgcgttaggaggacgatccatgagaacccggagctagcgtttgaggagtatgagactagtaggcttattaggtcggagctggaccgtatgggtatcatgtatagatatccgttagcgaaaacgggtattcgggctgggatcggatccggtggaccgccttttgttgcggttcgggctgatatggacgcactacctattcaggaagcagttgaatgggaacatataagcaaagttgcaggcaaaatgcatgcatgtggtcatgacgcacatgtgac

SEQ ID NO: 82674 - DNA, 628 bp, Arabidopsis thaliana columbia
  unsure (1)..(628): unsure at all n locations
gcccntaaggaaaaactggnccccccnggtcgnccttttaactnaggnccccccgggttcaggaatncccnccccnggnangccattactntcggggncgagancancgcnccatcncaatttcaaggccaagntccaaggcaaaggagggaatccctccggatcagcagagattgatctccccggaaagcagctcgaagatggccgtactttggctgactacaacatccagaaagaatctacacttcatcttgtgttgaggcttagaggaggtattattgagccttccttgatgatgcttgctcgtaagtacaatcaggataagatgatttgccgcaagtgctatgctcgtcttcacccaagagctgtcaactgcaggaagaagaagtgtggtcccagcaaccagttgaggcctaagaagaagatcaagtagagagactcttatcaagaatcccatctcttgcttgcttctttttgttgtcttccctttgatagggtttgtttttcttgtttcagtgactctctatgttaaacgataatgtcagtaaaaggatataattttctattaaaaaaaaaaaaaaaaaaaaaaaaaaaaaaaaaaagggcggccgctctaagaaacaagctt

SEQ ID NO: 82675 - DNA, 502 bp, Arabidopsis thaliana columbia
actcactatttggaaagctggcacgcctgcaggtaccgggcccgaattcccgggttcgcccacgcggccgcttgggttgaggcttaaaggaggtattattgagccttccttgatgatgcttgctcgtaagtacaatcaggataagatgatttgccccaagtgctatgctcgtcttcacccaagagctggcaactgcaggaagaagaagtgtggtctctgctaccagttgaggcctaagaagaagatcaagtagagagactcttatcaagaatcccatctcttgcttgcttttttttgggtggcttcccctttgttaggggttggtttttcttggtttcagtgacctttctattgtttaaagattaatgtcagttaaaagggatttggtttttctattaaaaaaaaaaaaaaaaagggccggcccctcttaaaggatcccaagcttacctaccgccggccttggcaacgtaataaatttttttttaggggcacccttaaattc

SEQ ID NO: 82676 - DNA, 658 bp, Arabidopsis thaliana columbia
actacggtttcaattttggagctccaccccggtggcggccgctctagaactagtggatcccccgggctgcatttatattttttggccgccggcaagaccatcactctcgaggtcgagagcagctacaccatcgacaatgtcaaggccaagatccaagacaaagaaggaatccctccggatcagcagagattgatcttcgccggaaagcagctcgaagatggccgtactttggctgactacaacatccagaaagaatctacacttcatcttgtgttgaggcttacaggaggtattattgagccttccttgatgatgcttgctcgtaagtacaatcaggataagatgatttgccgcaagtgctatgctcgtcttcacccaagagctgtcaactgcaggaagaagaagtgtggtcacagcaaccagttgaggcctaagaagaagatcaagtagagagactcttatcaagaatcccatctcttgcttgcttttttttgttgccttccctttgatagggtttgtttttcttgtttcagtgactctctatgttaaaagataatgtcagcaaaaggatttgggtttttctagcggccgcgaattcaatttcaagcttattgataccggcgacctcgagggggggcccggaacccaattcgcccta

SEQ ID NO: 82677 - DNA, 546 bp, Arabidopsis thaliana columbia
ggcaaagaagacgaacgcaaagatgcagattttcgtgaaaacgctaaccggcaagaccatcaccctcgaggtcgagagcagtgacaccatcgacaatgtcaaggccaagatccaggacaaagaaggaattcctccggaccagcagaggttgatcttcgccggaaaacagcttgaagatggtcgtaccttggctgactacaacatccagaaagagtcgactttgcatcttgttctgaggcttaggggaggtatcattgagccttcattgatgatgttggctcgtaagtataaccaagacaaaatgatttgtcgcaagtgttatgctcgtctccacccaagagctgtgaactgcaggaagaagaagtgtggccatagcaaccagttgaggccaaagaagaagatcaagtgatcttttgttcaccaaaagcttatttacgttatttttgtgtttgctttgagaaagactcctctattgttctgacacaaaccttgtttcagtgaattttgattttacgattattgtttagtaaatctgatttttggctt

SEQ ID NO: 82678 - DNA, 766 bp, Arabidopsis thaliana columbia
  unsure (1)..(766): unsure at all n locations
tctaatacnactcactatagggacaagctggtacgcctgcaggtaccggtccggaattcccggggggacccacagcgttcgaccacgcgttcgcccacgcgtacgtacggaagacgaaacacaaaagatgcagatcttcgtgaaaaccttgaccggcaagaccatcactctcgaggtcgagagcagcgacaccatcgacaatgtcaaggccaagatccaagacaaagaaggaatccctccggatcagcagagattgatcttcgccggaaagcagctcgaagatggccgtactttggctgactacaacatccagaaagaatctacacttcatcttgtgttgaggcttagaggaggtattattgagccttccttgatgatgcttgctcgtaagtacaatcaggataagatgatttgccgcaagtgctatgctcgtcttcacccaagagctgtcaactgcaggaagaagaagtgtggtcacagcaaccagttgaggcctaagaagaagatcaagtagagagactcttatcaagaatcccatctcttgcttgcttttttttgttgtcttccctttgatagggtttgtttttcttgtttcagtgactttctatgttaaaagataatgtcagtaaaaggatttggttttctattattctgaatcgattacggaagattcttgcttaaattccaatctatacaagtatcgtgaaataatgaccgtttatgtgattaggagacgtgtttcattaataaaatataagatcaatcc

SEQ ID NO: 82679 - DNA, 675 bp, Arabidopsis thaliana columbia
atgatctgccagctctatacgactcacttagggaaagctcggtacgcctgcaggtaccggtccggaattcccgggtcgacccacgcgtccgcccacgcgtccgctaccaatctaattcctctcttcagcttcttgtgttgtgacgcatactcgtcgcagtcttgagatatggccgccgcagtttccaccgtcggtgccatcaacagagctccgttgagcttgaacgggtcaggatcaggagctgtatcagccccagcttcaaccttcttgggaaagaaagttgtaactgtgtcgagattcgcacagagcaacaagaagagcaacggatcattcaaggtgttggctgtgaaagaagacaaacaaaccgatggagacagatggagaggtcttgcctacggcacttctgatgatcaacaaggcatcaccagaggcaagggtattggttgactctgtctttccaaggttcctatggggaccgggaccttaaccacggttgtccttagctcatacggatacgttagccaaggcctttggggagtacaactttggcaacatgttggttggggtttaaattgcccccgttttaatggcaagttttttttcaaataccaaggactttttccttttcctaataaggtccctttttgggtttgggggaaagcaggaattctccct

SEQ ID NO: 82680 - DNA, 1884 bp, Arabidopsis thaliana columbia
  unsure (1)..(1884): unsure at all n locations
gagagttaagcnttgaagacgaagagataacgaattggttgttgatcactcgctttataaatatctaagtttcttgctcacaccaacatctctctaagcttcttcttctaccaatctaattcctctcttcagcttcttgtgttgtgacgcatactcgtcgcagtcttgagatatggccgccgcagtttccaccgtcggtgccatcaacagagctccgttgagcttgaacgggtcaggatcaggagctgtatcagccccagcttcaaccttcttgggaaagaaagttgtaactgtgtcgagattcgcacagagcaacaagaagagcaacggatcattcaaggtgttggctgtgaaagaagacaaacaaaccgatggagacagatggagaggtcttgcctacgacacttctgatgatcaacaagacatcaccagaggcaagggtatggttgactctgtcttccaagctcctatgggaaccggaactcaccacgctgtccttagctcatacgaatacgttagccaaggccttaggcagtacaacttggacaacatgatggatgggttttacattgctcctgctttcatggacaagcttgttgttcacatcaccaagaacttcttgactctgcctaacatcaaggttccacttattttgggtatatggggaggcaaaggtcaaggtaaatccttccagtgtgagcttgtcatggccaagatgggtatcaacccaatcatgatgagtgctggagagcttgagagtggaaacgcaggagaacccgcaaagcttatccgtcagaggtaccgtgaggcagctgacttgatcaagaagggaaagatgtgttgtctcttcatcaacgatcttgacgctggtgcgggtcgtatgggtggtactactcagtacactgtcaacaaccagatggttaacgcaacactcatgaacattgctgataacccaaccaacgtccagctcccaggaatgtacaacaaggaagagaacgcacgtgtccccatcatttgcactggtaacgatttctccaccctatacgctcctctcatccgtgatggacgtatggagaagttctactgggccccgacccgtgaagaccgtatcggtgtctgcaagggtatcttcagaactgacaagatcaaggacgaagacattgtcacacttgttgatcagttccctggtcaatctatcgatttcttcggtgctttgagggcgagagtgtacgatgatgaagtgaggaagttcgttgagagccttggagttgagaagatcggaaagaggctggttaactcaagggaaggacctcccgtgttcgagcaacccgagatgacttatgagaagcttatggaatacggaaacatgcttgtgatggaacaagagaatgtcaagagagtccaacttgccgagacctacctcagccaggctgctttgggagacgcaaacgctgacgccatcggccgcggaactttctacggggaaaaggagcccagcaagtaaacctgccagttcctgaagggtgtactgatcctgtggctgaaaactttgatccaacggctagaagtgacgatggaacctgtgtctacaacttttgagcaatattatcctgcttattaatttgctgttttactcctattgtctcttttggtttatttttctcctttgtgtaattgtggattggatcttgtcctcttttgttccctttttttttttttatgatgtacaacacattggtaatttaaaattgccttgtcataaactacacttaaaaaaaaaaaaaaaaaaaaaaaaaaaaaaaaaaaaaagggcggccgctctagaggatccaagcttacgtacgcgtgcaggcgacgtcatagatcttntatagatggacctaa

SEQ ID NO: 82681 - DNA, 508 bp, Arabidopsis thaliana columbia
  unsure (1)..(508): unsure at all n locations
tggttttttcagcgggngcttcccccccgggtcaacccccattttgggcccgggtgtcccagtcccgtctattcccccagcccttgttttggtggcctccccaaccggtgttcgcaattggccgtgttttggacaattgccccgaaattggtttaggtcaggccttgacttaaatttctggtcctggaggtcatgaaacagagggaagagacgaatcaacacttgtatcaaggcaattatcttcatctgcttccgtaccgtcgaaggaggatcaagcaagaatgtatcaaatgtcaggtggtgttctgaagaggaaagaaccggaaggaggatgggatggatataggcagtccttataacaataacaataacacactttaggtcatttttcatgcatgtgtatctttctctatacaccggctcaaaaaactagcgataaaacaaatgttagtggcttttgagtgtgttcaaaatgatttataaaagaagtcttcggcattgtggcctt

SEQ ID NO: 82682 - DNA, 893 bp, Arabidopsis thaliana columbia
  unsure (1)..(893): unsure at all n locations
nnnnnnnnnnnnnnnnnnnnnnnnnnnnnnnnnngcctgcaggtaccgggccggaattcccgggtcgacccacgcgtgcgggcctcccaaacggtggtagcaatggcggtgttttggacaatggcgcgaaatggtttaggtcaggacttgacttaaattctggtcctggaggtcatgaaacagagggaagagacgaatcaacacttgtggcaaggcaattatcctcatctgcttccttacctttgaaggaggatcaagcaagaatgtatcaaatgtcaggtggtgttctgaagaggaaagaaccggaaggaggatgggatggatataggcagtcctcatggcaataacagtagctcagaatctcagtaggccacatgagcttttactaagagatgagagtgaatgtgatgccacaaggcttcattggctggcctgctctgtacaaatgaggcatgggtgagtcaatttgcgacttcacagtggtctcaatctttttaagaacacaaacctgacctcttggtttcaccatcatgtagatcttccaaaaacagtcctaaattcaccggagtggccattctctttcaaaaaagtcatcaacaaggttctcagcgaaagacccgcatccccccctccccccaaagagtttttaaacgtgaaaacacacttttaggtcatttttcacgcatgtgtgtatctctataccccggctcaaaaaactagcgataaaacaaatgttgggggcttttgagtgtgttcccaaaaaaaaaaaaaaaaaaaaaaaaaaaaaaaaaaaaaaaaaaaaaaaaaaaaaaaaaaaaagggcggccgctctagaggatccaagcttacgtacgcgtgcatgcgacgtcatactcttctataggnnnnnnnnn

SEQ ID NO: 82683 - DNA, 721 bp, Arabidopsis thaliana columbia
tggggttttaataaccgaaaagcttgatttcccggatctaaccgtacccgatttcgtagtcggatgttcaattatctccacccgacaacccgctggtatcgctgggtttgggcgaggacccgtatcgcttccttcacaaatgaatctcaagagattctctcactgtttggtttctcgtcggtttgacgataccaacgtaaccaccgatcttgatttagataccggatcgggtcataattccgggtctaaaactccgggtctcacatacacgccgtttcggaaaaatcccaatgtctccaacaaagcttttcgcggagtattattacctcaatctccggcgaatctacgtcggaagaaagcacgtgaagattccgtataagtatctcgcgccgggaactaacggagacggaggatccattgttgattccggatctacattcactttcatggagcgacccgttttcgagctcgttgctgaagaattcgcttcacagatgtcgaactacactcgtgagaaagacttggagaaggaaacaggacttggaccgtgttttaatatctccgggaagggagatgtgacggtgccggagctgatttttgagtttaaaggtggagcgaagttggaattgccgttatccaattacttcacgttcgttgggaatactgataccgtttgtcttacggtggtttcggataaaaccgttaatccctccggtgtgac

SEQ ID NO: 82684 - DNA, 748 bp, Arabidopsis thaliana columbia
  unsure (1)..(748): unsure at all n locations
atgattcgccggcactaatacgacccctatagggaaagctggcacgcctgcaggtaccggtccggaattcccgggtcgacccacgcgtccgctcggctgcgagaagacgacagaaggggttgctgaagaattcgcttcacagatgtcgaactacactcgtgagaaagacttggagaaggaaacaggacttggaccgtgttttaatatctccgggaagggagatgtgacggtgccggagctgatttttgagtttaaaggtggagcgaagttggaattgccgttatccaattacttcacgttcgttgggaatactgataccgtttgtcttacggtggtttcggataaaaccgttaatccctccggcgggactggaccggcgataattctggggagtttccagcaacagaactatttagttgaatacgatttggagaatgacaggtttgggttcgcgaagaagaagtgtagcccgtgagttttcaggggtaaatttgacttttcacaacgatgagatcaatttttatgatttttaattccgttttccgaaataaaagaaaagggtttaaatgtttatagaaatatcagaaatatgtaagagtagtaaaattaataaattaaaaaaaaaaatcgtaatagttggatgctaaaaaaaaaacaaaagccatagnnnnnannnnnnnnnnnnnnnnnnnnnnnnnnnnnnnnnnnnnnnnnnnnnnnnnnnnnnnnnnnnnnnnnnngtcctaaa

SEQ ID NO: 82685 - DNA, 416 bp, Arabidopsis thaliana columbia
tcgccctcgcgtccgattcatcgtctcttctctgctctgctttgctctagatcacaaattaaaagacttcattagtcttcctgtctccaccattaccttcttcctttttaactcagccacgacgagcagactattgttctgttttccttgtataaaaatggcgtcgatgatgtttaccgattgctcctccaccacgacgtcgcgtctcatccatttgaaccgaagcagcggtactttcctcctccgtcaatgcgtcggccaactccgtttacagaccactgcttctggccgtggctgctgcattcgctcctcttcttctcccatttcttccatttccgctgatacaaaatcagagggtggcgcaattgtaatagatggaaaggctgtggccaaaaagattagagatgaaatcacaa

SEQ ID NO: 82686 - DNA, 903 bp, Arabidopsis thaliana columbia
  unsure (1)..(903): unsure at all n locations
acccacgcgtccgcccacgcgtccgaaaatcgtccattgaagtgaacagtcagcatcgttttgcttgcttgtgcgtttctctcgaactctctccatggctgttgcgctccaattcagccgattatgcgttcgaccggatactttcgtgcgggagaatcatctctctggatccggatctctccgccgccggaaagctttatcagtccggtgctcgtctggcgatgagaacgctccttcgccatcggtggtgatggactccgatttcgacgccaaggtgttccgtaagaacttgacgagaagcgataattacaatcgtaaagggttcggtcataaggaggagacactcaagctcatgaatcgagagtacaccagtgatatattggagacactgaaaacaaatgggtatacttattcttggggagatgttactgtgaaactcgctaaagcatatggtttttgctggggtgttgagcgtgctgttcagattgcatatgaagcacgaaagcagtttccagaggagaggctttggattactaacgaaatcattcataacccgaccgtcaataagaggttggaagatatggatgttaaaattattccggttgaggattcaaagaaacagtttgatgtagtagagaaagatgatgtggttatccttcctgcgtttggagctggtgttgacgagatgtatgttcttaatgataaaaaggtgcaaattgttgacacgacttgtccttgggtgacaaaggtcttgggaacacggttgagaagcaccagaagggggagtacacatcagtaatccatggtaaatataatcatgaagagacgattgcaactgcgtcttttgcaggaaagtacatcattgtaaagaacatganagaggcaaattacgtttgtgattac

SEQ ID NO: 82687 - DNA, 1056 bp, Arabidopsis thaliana columbia
  unsure (1)..(1056): unsure at all n locations
tcgaccacgcgtccgcccaagcgtcagcggacgcgtgggcggacgcgtgggtgcaaattgttgacacgacttgtccttgggtgacaaacgtctggaacacggttgagaagcacatgaggggggaatactcatcagtaatccatggtaaatatcatcatgatgagacgattgcaactgcgtcttttgcaggaaagtacatcattgtaaagaacatgaaagaggcaaattacgtttgtgattacattctcggtggccaatacgatggatctagctccacaaaagaggagttcatggagaaattcaaatacgcaatttcgaagggtttcgatcccgacaatgaccttgtcaaagttggtattgcaaaccaaacaacgatgctaaagggagaaacagaggagataggaagattactcgagacaacaatgatgcgcaagtatggagtggaaaatgtaagcggacatttcatcagcttcaacacaatatgcgacgctactcaagagcgacaagacgcaatctatgagctagtggaagagaagattgacctcatgctagtggttggcggatggaattcaagtaacacctctcaccttcaggaaatctcagaggcacggggaatcccatcttactggatcgatagtgagaaacggataggacctgggaataaaatagcctataagctccactatggagaactggtcgagaaggaaaactttctcccaaagggaccaataacaatcggtgtgacatcaggtgcatcaaccccggataaggtcgtggaagatgctttggtgaaggtgttcgacattaaacgtgaagagttattgcagctggcttgattcggcattgtgatcgtattcaaatactatttgtcatgtcaagagtgtactaaaatatatgtagttgtatgatttgtctttataacttttgtaagaggttttgtaattcaaagtcaacatcctcgttatcttaaaaaaaaaaaaaaaaagnnnnnnnnnnnnnnnnnnnnnnnnnnnnnnnnnnnnnnnnnnnnnnnnnnnnnnnnnnnnnnnnnncacc

SEQ ID NO: 82688 - DNA, 855 bp, Arabidopsis thaliana columbia
  unsure (1)..(855): unsure at all n locations
nnnnnnnnnnnnnnnnnnnnnnnnnnnnnnnnnnnnnnnnnnnnnnnnnnnnnnnnnncggacgcgtgggcggacgcgtgggcccacgcgtccgaaataaacctctcttcatcgaaaatgtggagactctctgtgtcaattttcctcttctcatgtctcttcgtttcttcgtcttcgttgggcgattcggaggcgacgtgttccggtatagttccgttacggtaccggtacgataagatctcgataaccgactttggaggcgttggagatggtcgaacggtgaatactaaggcgtttagggcggcgatttatcggattcagcatctgaagaggagaggaggcacgcttttgtatatacctccgggagtgtatttgacggagagcttcaatctcactagccatatgactctttacttagctaaaggtgctgtgattagagctgttcaggatacctggaattggccattgattgatcctttgccgtcttatggaagagggagagagttaccagggggacggtatatgagctttattcatggtgatgggcttcgtgatgtagtcatcactggacaaaatgggacaatagacggtcaaggagaagtgtggtggaacatgtggcgtagtagaacgctaaagtacacaagaccgaacttaatcgagttcaaggactctaaggagatcataatctccaatgttattttccaaaaattcaccctttctggaaacattcattcctgtgtattgcagcaaccgttgtcatcccatcacgtttacgatctttagctccacaaggattctccccaacacccgatgggatcgcgcctgattccagctacaacgtctgcataggaaact

SEQ ID NO: 82689 - DNA, 536 bp, Arabidopsis thaliana columbia
  unsure (1)..(536): unsure at all n locations
agtcatcatccttccaatggctattacttgagaactcttctgattaaacatagcaacaacaacaactcttcttctcctctctttctcacttcaatttagcgatggctgcaactgcaatctcttctctttccttcccagctttgggtcaatcggacaagatctccaatttcgcatcttctcgtcctctcgcctccgcaattcgcatctgcacaaagttttctcgcctttctttgaattcgcgttccacttcgaaatctcttattcactgcatgtccaatgttaccgccgatgtgcctcctgtatcagagacaaagtcgaaattcctaaaagcttacaagcgacccatcccgagtatctacaacacggttttgcaggagctcattgtccagcagcatttgatgaggtataagaagacttatcgttatgatcctgtttttgcccctgggatttgtcactgtatatggtcagcccattggaggntatccggggtgtnaaggccgggtgcnattttaagggtncaatnagcctnatngggc

SEQ ID NO: 82690 - DNA, 662 bp, Arabidopsis thaliana columbia
  unsure (1)..(662): unsure at all n locations
tacgactcactatttggaaagctggtacgcctgcaggtaccggtccggaattcccgggtcgacccacgcgtccgcccacgcgtccgaaaaaaaaacattttaaggtaatctcaaaaccaaaaagcctatcaatctttgtacttggatgttttgttgttgcaaggattgcagaggaaaccaacgagtttctaactttgattctctaacaggtgttttctttggagatcttgagtttggacctcagaatcaaagatatataaagatgaatgaggaagaagataaagatcaagatcgagtaacgagaggatgtagtcacactcatagctgtaaccctccaggcccagaggatgcttctcactcccacacatgcttccacgctcacactcatctcatcatctctgatcagcaagagaatgatcattctgacagtagcaacaagaaacggttatgtggtaatagagaggcagtgaggaagtacagggagaagaagaaggctcgcactgcataccttgaagatgaagtgatgagattgcaatctctgaatgagcaattccttagaaaacttcagagccaagaaatggtggaaactgaattgatcagactccgggctctttctgtagagatgcagngggnaattgaagttgaactttgtagtttctcgt

SEQ ID NO: 82691 - DNA, 724 bp, Arabidopsis thaliana columbia
  unsure (1)..(724): unsure at all n locations
agctgtctctatggctgctgctgtgatgggtttggttctcttgggacgtagattgtataatatgaagaagaaagctcaaaggttccatcttaaagttacgattgacgataagaaggcgtcgcgggtgatgagtcaggctgctcgactcaatgaagtgttcacagaggtaagaagggtccctgtgatccgccctgctctaccatcgcctggcgcatggccggttttgagccttagatgagtacccgttttctacaatacctagacacagtggagaatcaatcatgcaatgtccatcactttatgtaccgtaagaatacaaatacatgtgtttatgtcgtacctatgcataagtagtagtttaccatcttatgaaatcgcgtatgtgagtcgtgtcccaaccgtgggatacactgcagagtgattaccgtagcgatttatgtatgttcagagactgaaaatcccagttggtaagcctttttttatgtttgatcttaagaatttcataagctatatgtgggttttgttatggatttcattggggtttcaagcttgtattctattatagagaggaggacatagtccacagtcgatataaccactacaatggaaataaagaccctacaaatttctactaaaaaaaaaaaaaaaaaaaagggcggccgctctagaggatccaagcttacgtacgcgtgcatgcgacgtcaaagtcttnctatagtgtcac

SEQ ID NO: 82692 - DNA, 493 bp, Arabidopsis thaliana columbia
acggttacttttcttctgcatctagttttttttttgcatattcatcaccttctctcagttttcttctttcaatagaattatccagaaaacttttaagagatggcagctccgattcgattctttgaactgaacactggtgccaagttaccttgcgtcggtctaggaacctacgcaatggtcgcgacagcgatcgaacaggcgattaagattggttacaggcatatcgactgtgcttcgatttacggaaacgagaaagagattggtggtgtgttgaagaagctgataggtgatggttttgtgaagcgtgaggagttatttatcacttccaaactctggagcaatgatcatttacctgaagatgtgcctaaggcactggaaaaaacgttacaggacttacagattgactatgttgatttatatctgatacattggcctgcgagcttgaagaaggaatcactaatgccaacacctgagatgctcacaaaacctgata

SEQ ID NO: 82693 - DNA, 1017 bp, Arabidopsis thaliana columbia
  unsure (1)..(1017): unsure at all n locations
gtcacatcgaactctaaaccacactgagatggcgaaatggtggcgaggcctgagatccgtgacggcggaggtggctgatcttccggcttcttcattcggtcgatcgattcgatgtattcatcagtatcagacgatccaggcgattccacgtgaagctacgggtcgaggagtatcggctcgggatcggacgattggtcgtattcccgccgtcgttttcccgcaatcgcttctagatactgatgcttcgaagcgaggcgtgtcgaggaagcagctattgacggcggataagaagcagatcaagtctattattgactctgttggtctcccattcttctgttctaccactttccagcttcagatccgagctggtcagggttcgtcgacgcttgttgaatcgggtcgagtactttcccctcaaggttcatagggccgaagaaacttggaaagatacttaatttagtattcgtatgggctgatgatggggagaggttgaaggttgatgttcctgttgttttcaaagggttggatcattgccctggtctccagaaagggggaaacctgcggacaatcccgaagcactctgaaactacctagggccagctgagcacattccaatctaaaaatccgaagtagatgtgagcaatctggacattgaagaccaaagtgttattgcaagacgttgtatttcatccatcattgaagctactgagcaagaatgaaaccatgcccgtgtgtaagattgtcgccacaagcccggtgaaagaaccagaagctgttcaagcataaaataagtctttgaaaagagtaatgtaatgtctctctgaagtttctgttccatacaaaaatgatcatttgtagaattctcagaggaaagaagcagatttttagaataaccctttttgtataaacctttcaagtggaagaacacttaaaccctctaaaaaaaaaaaaaaaaaaannaagggcgnccgcttctagaggatccaagcttacgtacgcgtgcatgcgacgtcggag

SEQ ID NO: 82694 - DNA, 889 bp, Arabidopsis thaliana columbia
  unsure (1)..(889): unsure at all n locations
tcgcatgccccccttccttagctcggaattcggcttgagaaaaaaaatcaaatctttttttttcttttttttatgggggggacctttagccgagacccagttggggtcctgggcaaacttggccagccagccggaccgtaccaaaaagatggttaatttattggaccagttggttccaggccctcttcaaccgaagaacctaaccgtggagaaaagaattctcctttttgtggctaacaaaaccgtgaccggttctctccccgccgcctggaggatcgtgtcttcgatggaccagaaggaagagagtaggaagaccgacgagcacgtgtcgcttggccaaggattccagatctaaagttgagtctgagctttcttctgttggctctggattccttaagctccttgactcgctatctgatcccatctgctggagcgagtcgagtctaaggtcttttacttgaagatgaaaggtgattatcatcggtacatggctgagtttaagtctggtgatgagaggaaaactgctgctgaagataccatgctcgcttacaaagcagctcaggatatcgcagctgcggatatggcacctactcatccgataaggcttggtctggccctgaatttctcagtgttctactatgagattctcaattcttcagncaaagcttgtaacatggncaaacaggcttttaaggagncatagctgagcttgcactctgggagaggatccttcaaaggcagactttcanaatcagtttcttaggggcaattancctttngcccccgntttcaggncagntgccgggccttaggcctggtaagggggagggtttcgggtttntcnccaaccgcttaaacccnaacctttcnnaactgtgaaaagttggtc

SEQ ID NO: 82695 - DNA, 814 bp, Arabidopsis thaliana columbia
tcggtccggaattcccgggtcgacccacgcgtccgaaaaaaaatcaaatctctctctttctctctctaatggcggcgacattaggcagagaccagtatgtgtacatggcgaagctcgccgagcaggcggagcgttacgaagagatggttcaattcatggaacagctcgttacaggcgctactccagcggaagagctcaccgttgaagagaggaatctcctctctgttgcttacaaaaacgtgatcggatctctacgcgccgcctggaggatcgtgtcttcgattgagcagaaggaagagagtaggaagaacgacgagcacgtgtcgcttgtcaaggattacagatctaaagttgagtctgagctttcttctgtttgctctggaatccttaagctccttgactcgcatctgatcccatctgctggagcgagtgagtctaaggtcttttacttgaagatgaaaaggtgattatcatcggtacatggctgagtttaagtctggtgatgagaggaaaactgctgctgaagataccatgctcgcttacaaagcagctcaggatatcgcagctgcggatatggcacctactcatccgataaggcttggtctggccctgaatttctcagtgttctactatgagattctcaattcttcagacaaagcttgtaacatggccaaacaggttactcttcttctttctttttcgctgcttgcctcaattaggaacatctctttctctctctttccgttgcctctctggtaacaaacatataagtcgttgacctgagtttgtctcttgagagtttgcttctgtttct

SEQ ID NO: 82696 - DNA, 1128 bp, Arabidopsis thaliana columbia
cccgggccgacccacaacgtcacccacgcgtccgctttttttctgcgggcgcgtcgacccgatttcaaaattttccggtgaaatcgaaaaaaaaagcgagatcttcttctctaatggcgacgaccttaagcagagatcaatatgtctacatggcgaagctcgccgagcaagccgagcgttacgaagagatggttcaattcatggaacagctcgtaagtggagctacaccggccggtgagctgaccgtagaagagaggaatcttctctcggtcgcgtataagaacgtgattggatctcttcgtgcggcatggagaatcgtgtcttcgattgagcaaaaggaagagagcaggaagaacgaagaacacgtgtcgcttgttaaggattacagatctaaagttgagactgagctttcttcgatctgttctgggattctcaggttacttgattcgcatctaattccttcagctactgccagtgagtctaaggttttttacctgaagatgaaaggagattatcatcgttatttggctgagtttaaatctggtgatgagaggaaaactgctgctgaagatactatgatcgcttacaaagctgctcaggacgttgcagttgctgatctagcacctacacatccgatcaggcttggtttggctcttaacttctcagtgttttactacgagattctcaactcttcagagaaagcttgtagcatggcgaaacaggcttttgaagaagccattgctgagctggacacattgggagaggagtcatacaaggacagtactctcatcatgcagttgctaagggacaatctaaccctttggacctccgatatgcaggagcagatggatgaggcctgaaggtctaatggaagaaaagacggttatgtaatgtacctgcaaccgtaaccgaaaatctgagttcaacctcctttgctgtaaaacttgtcgaaaagaaaagtttgtttttttatgacagattatgtgcacagctttggtgttatctgctgctctgtatcaactctgtttttgtttggtaatttatcctcatctttgcttcttttcttctcaaaaaaaaaaaagaggggggggggatattattaaaaaaaaaaaaaaaaaaataattgaa

SEQ ID NO: 82697 - DNA, 874 bp, Arabidopsis thaliana columbia
ctatacgacttacttagggaacgctggtacgcctgcaggtaccggtccggaattcccgggtcgacccacgcgtccgcccacgcgtccggttccatgaattgaaccatctcttcgtaacgctcggcttgctcggcgagcttcgccatgtagacatattgatctctgcttaaggtcgtcgccattagagaagaaggaagagagcttgaagaacgaagaacacgtgtcgcttgttaaggattacagatctaaagttgagactgagctttcttcgatctgttctgggattctcaggttacttgattcgcatctaattccttcagctactgccagtgagtctaaggttttttacctgaagatgaaaggagattatcatcgctattttggctgagtttaaatccggggatgagaggaaaactgctgctgaagatactatgatccgctacaaagctgctcaggacgttgcagttgctgatctagcacctacccatccgatcaggcttggtttggctcctaacttctcagggtgtactacgagattcttaactcttcaaagaaagctggaacatggcaaaacaggcttttgaagagccattggtgacctgacccattgggagaggagcatccaggacagactctcatcttccgttgctaggaacaatctaacctttggacctcgattccagaacaaatgttgacgccgagggcctatgggaaaagacggtattgaatgcccgcaccggacccaaatcgggttcacccctttgcggaaacttggaaaagaaagttggttttataaaatatggcacccttggggtaccgcgcttgacaacctggttgggggaatatcccacttgttcaaaaaaaaaaaaaaaaa

SEQ ID NO: 82698 - DNA, 1188 bp, Arabidopsis thaliana columbia
  unsure (1)..(1188): unsure at all n locations
nnnnnnnnnnnnnnnnnnnttaggtgcactatagaagagctatgacgtcgcatgcacgcgtacgtaagctcccacccgcgcgcccgccattaaacaaaaaaaaaaaaaaaatcaaatctctctctttctctctctaatggcggcgacattaggcagagaccagtatgtgtacatggcgaagctcgccgagcaggcggagcgttacgaagagatggttcaattcatggaacagctcgttacaggcgctactccagcggaagagctcaccgttgaagagaggaatctcctctctgttgcttacaaaaacgtgatcggatctctacgcgccgcctggaggatcgtgtcttcgattgagcagaaggaagagagtaggaagaacgacgagcacgtgtcgcttgtcaaggattacagatctaaagttgagtctgagctttcttctgtttgctctggaatccttaagctccttgactcgcatctgatcccatctgctggagcgagtgagtctaaggtcttttacttgaagatgaaaggtgattatcatcggtacatggctgagtttaagtctggtgatgagaggaaaactgctgctgaagataccatgctcgcttacaaagcagctcaggatatcgcagctgcggatatggcacctactcatccgataaggcttggtctggccctgaatttctcagtgttctactatgagattctcaattcttcagacaaagcttgtaacatggccaaacaggcttttgaggaggccatagctgagcttgacactctgggagaggaatcctacaaagacagcactctcataatgcagttgctgagggacaatttaaccctttggacctccgatatgcaggagcagatggacgaggcctgaggatctagatgaagggggggagggttgttacgcgatgtttctgccaccaaatcgatctcaaaatccccataacctttgctcaaaaactgtgaaaaaagattgaagtgtttatgatgattatgattgtgcacagcttgatgatttatctactctactaaacctctgtgctcttaatatttattgtctcgactctgctcaagccttaaaaacatctttctccttaaaaaaaaaaaaaaaaagncgtgtcctaacgctatacaggatcccagctgacggcaggggacatcatagctcgtcgatagtgt

SEQ ID NO: 82699 - DNA, 1599 bp, Arabidopsis thaliana columbia
  unsure (1)..(1599): unsure at all n locations
gccnnnnnnnnnnnnnnnnnnnnnnnnnnnnnnnnnnnnnnnnnnnnnnnnnnnnnnnnnnnnnnnnnnnnnnccacgcgtccgtgcggctgcgagaagcgacggaccgcggactcactcagtgtgcgcgattcatttcaaaaacgagccagcctcttcttccttcgtctactagatcagatccaaagcttcctcttccagctatggctgcttcagtacactgtaccttgatgtccgtcgtatgcaacaacaagaatcactctgctcggccgaaacttccaaactcgtctttgttacctggattcgatgttgttgttcaagctgctgctactcgattcaagaaggaaacaacaaccacaagagccactttgacgtttgatccaccaaccactaattctgagagagctaagcagagaaaacacaccattgatccttcttctcctgattttcaaccaattccatcttttgaagaatgctttcctaagagcactaaagaacacaaggaagttgtccatgaagaatctggtcatgttcttaaagttccctttcgtcgtgttcatttgtctggtggtgagccagcttttgataattatgacactagtggtcctcaaaatgttaatgcacacattgggcttgctaagctaaggaaggagtggattgatcgtcgggagaagctaggaacaccaagatacactcaaatgtactacgctaagcaagggatcataactgaggaaatgctctactgtgctactagggagaagctagaccctgagtttgtaagatcagaagttgcacgaggacgggcgattatcccttccaacaagaagcatttggagctggaaccgatgattgttggtagaaagttcttggtcaaggtcaatgcgaatatcggaaactctgctgttgccagctctattgaagaggaagtctacaaggttcagtgggcaaccatgtggggagctgatacaatcatggatctctcaactggtcgtcacatccatgagacacgtgagtggctcctaaggaattcagctgtgcctgttggtacggtgcctatttatcaagcacttgagaaagtggatggaattgctgagaatcttaactgggaggttttcagagagactctgattgaacaagctgagcaaggtgtagactatttcacaatccatgctggagttttgctgcgttacattcccttaactgccaagcgtttgaccgggatcgtttcgcgtggaggatccattcatgctaaatggtgcttagcttaccacaaggagaactttgcttacgagcactgggatgacattctagacatctgtaaccagtatgatgtggctctttccattggagatggtctnagacctggctccatttatgatgctaacggcactgctcagttttcagggctccttactcaaaggtgaacctaactcgccgagcgtgggaaaaanttttcaaggtatgaattaagggccagggnatgtcccaatgncaagnttncagggattttcagaagcngttgnagtggtgaccnngcncnttttcaccttggccttnanctctaaattcccnggatgccaatnncttcnatgggtcnta

SEQ ID NO: 82700 - DNA, 1355 bp, Arabidopsis thaliana columbia
  unsure (1)..(1355): unsure at all n locations
nnnnnnnnnnnnnnnnnnnnnnnnnnnnnnnnnnnnnnnnnnnnnnnnnnnnnnnnnnnnnnnnnnnnnnnnnnnnnccacgcgtccgcccacgcgtccgcccacgcgtccgcccacgcgtccgtacggctgcgagaagacgacagaagggggatccattcatgctaaatggtgcttagcttaccacaaggagaactttgcttacgagcactgggatgacattctagacatctgtaaccagtatgatgtggctctttccattggagatggtctgagacctggctccatttatgatgctaacgacactgctcagtttgcagagctccttactcaaggtgaactaactcgccgagcgtgggaaaaagatgtgcaggtgatgaatgaagggccagggcatgtcccaatgcacaagattccagagaatatgcagaagcagttggagtggtgtaacgaggcaccattctacacccttggtcctttgactactgatattgcccctggatatgatcacattacctctgccattggagctgccaatattggagccttgggtacagctcttctttgctatgtaacaccaaaagaacaccttgggctaccaaacagggacgatgtgaaggccggggttatagcatacaagatcgccgctcatgcagctgatctagccaaacagcatccacatgctcaggcatgggacgatgcgctgagcaaagcgcggtttgagtttagatggatggaccaatttgctctgtcgttggaccccatgactgctatgtctttccatgatgaaactcttccagctgatggagccaaggttgcacacttttgctccatgtgtggaccaaaattctgctctatgaagataacagaagacatcccaaagtatgcagaggagaatggttatggcagtgctgaagaagcaatcagccaaggaatggatgctatgagtgaagaattcaacatcgcaaagaaaaccattagcggagaacagcccggtgaagtaggtggagaaatatatttgccagagagctatgtcaaagctgctcagaaataaaaggcaaatgttttaaacaagaccttgcttacccaagtcttggtgcctgttggactatacctggataaaggcacaaactgttggtaagcttagtagtctctatgtcatgttacttttagaactatctatgttgtctgttcatttgagtcagagtcagcaataaagacaatctaagttgatgtttcaaaaaaaaaaaaaaaaggggcggccgctctagaggatccaagcttacgtacgcgtgcatacgacgtcannnnnnnnnnnnnnnnnnnnnnnnnnnnnnnnnnnnnnnnnnnnnnng

SEQ ID NO: 82701 - DNA, 1573 bp, Arabidopsis thaliana columbia
gctccctacgactcactatatggaaagctggtcacgcctgcaggtaccggtccggaattcccgggtcgacccacgcgtccgcccacgcgtccgcgaaattgctgatgtggttaaaatcccaataataaatgaagctgatcaaataagtacttgttgtctgatctgacgtggctagatagcttctccaacgctttatctcggaaactccgtgacaaaagatagtactttcatgtctgttttggtttcatccaaaagtatcaaatttgtgtgatcttctccagaagaaacttgaggaactttaagctaaacctctgtagttttcagattgattcgttggtggaaagcgtctaaattttgcgtaaatggcggcagctcttgtacgcagattctgccggggatcatcttttccggtctctggtcatggatataggatgctatcgacggttgaaaatgtatctgaaagtggtaaatcgatgaatctatactctgctattaatcaagctcttcacatcgctttagagaccgatcctcggtcttatgtttttggggaagatgttggatttggtggtgtcttccgatgtacaacaggattagctgaacgttttgggaaatctcgagttttcaacactcctctctgcgagcaaggcattgttggctttggcattggtttagctgcaatgggaaatcgagttattgcggaaattcagtttgcggattatattttcccggcttttgatcagattgttaatgaggctgcaaagttcagataccgaagtggaaaccagtttaactgtggaggactcactattagggcaccgtacggagcagttggtcacggtggacattaccactcgcagtcccctgaagctttcttttgtcatgtccctggtatcaaagttgttattcctcgaagtccacgggaagctaagggattattattgtcatccatccgtgatccgaatcccgttggctttttcgaacccaaagtggctatatcgtcaagcggtagaggatgtccctgaagatgactatatgatacctttatctgaggcagaggctatgcgagaaggttccgacataactcttgttggatggggagcacagctcactatcatggaccaagcatgtcttgacgcagaaaacgaaggaatatcgtgtgaattgatagatctcaagactctgatcccttgggataaggaaaccgttgagaccccagtgagaaagactggccaggcttcttattagccatgaagctcctgttacaggaggctttggggccgagatcgctgcaactatagttgagcgttgcttcttgaggttagaagcacctgtaagcagagtttgtggcctggacactcctttccctctagtgttcgaacctttctacatgccaaccaagaacaagatattggatgcaatcagatccactgtgaattactagcccatcttagcattgtacacatgattctctgtctcctatcttcgaaataattattgatgctggtggttcagacatgtaatggatcctgtaatcaccacttttgttatttaatctatgatcttgaaactctcc

SEQ ID NO: 82702 - DNA, 2143 bp, Arabidopsis thaliana columbia
aaaacacccaccaatgtctcgtgaacttattattctctgccaaccaattcttgttctgttccttactctgttttacaattctcatggctacttcgtctcacaaggatctgtaggaatcggcttcaacggttacttcactttaaccaacaccacaaaacacacattcggtcaagctttcgaaaacgagcacgttgaaatcaagaactcatcgacaggtgtcatctcatctttctcagtcaacttcttctttgcgatcgtccctgaacataaccagcaaggctcacacggtatgactttcgtcatctctcccacaagaggccttcccggagcttcctccgatcaatacctcggaatctttaacaaaacaaacaacggtaaagcctcgaataacgttatagctatcgagttagatattcataaagacgaagagtttggagatattgatgataatcatgttgggattaatattaacggtttgagatctgttgcctctgcttctgctggttactatgatgataaagatggaagctttaaaaaactttctttgatcagcagagaggtaatgaggctttccatcgtttatagtcaacctgatcaacagctcaatgttactttattccctgctgagatccctgttccgccactaaaaccgctcttgtctttgaaccgagatctctcgccgtatttgcttgagaaaatgtatcttggattcactgcatcgacggggtcagttggagcaattcattacttgatgggttggttagttaatggtgtaatcgagtatccgagattggagcttagtataccagtccttcctccatatccaaagaaaacatctaatagaacgaaaactgttttagccgtctgcttaacggtatctgtgtttgctgcgtttgtcgcttcgtggatcggtttcgtcttctatttgaggcataagaaggttaaagaggttcttgaagaatgggagattcaatatggacctcataggtttgcttataaggagcttttcaatgccacaaagggtttcaaggagaaacaacttcttggtaaaggaggctttggtcaagtctataaaggaacacttccgggttctgatgcagagatcgctgtgaagcggacttctcatgattcaagacaagggatgagcgagtttctagccgagatatcgaccattggtcgtctcagacatccaaatttagtcaggcttttaggatactgtaggcataaagagaatctctacttggtgtatgactatatgcctaatggaagccttgacaagtatctaaaccgtagcgagaatcaagaacggcttacttgggaacaacgtttcaggatcatcaaagatgttgcaactgctctactacacctgcatcaagaatgggtacaagtcatcattcatcgagatatcaaaccagctaatgttttaatcgacaatgaaatgaatgcgaggctcggggatttcggactggcgaaactgtatgatcagggattcgatcctgaaacatctaaagtagcgggaacattcggatatatcgcaccagagtttctaagaacaggaagagcaaccacaagcactgatgtttacgcctttgggttggtaatgcttgaagtagtgtgtggtagaaggataattgagagacgtgcagcagaaaatgaagaatatcttgtggattggatcttagagctttgggaaaatgggaaaattttcgatgcagcagaggaaagtatacgtcaagaacaaaacaggggacaagttgagcttgttttgaagctaggtgtgttgtgttcgcatcaagctgcatcgataagaccggctatgagtgtggtaatgaggattttgaatggagtttcacagctaccagataatcttcttgatgttgtaagggctgagaaatttagagaatggcctgagacatcaatggaattactactacttgatgtgaatacatcgagttcattggagttaaccgactcttcttttgtctcccacggccgctgaaattttaagtttaccactgattctttgtttgctatgaagatgtatcacaactgagattattacacattgtaatacacagccgaatgttttttttcctggtatgtacaagaataagaccacaccgcctcctccaaacattttttt

SEQ ID NO: 82703 - DNA, 416 bp, Arabidopsis thaliana columbia
attgagatctctccaacaactctactttgtctttactcaagtatgtcactaacaaagatagaatcacaaaaaggaaagagaaaatgagaggagaaatcgatgaagctaatcttgctcctgaaacttcacttattaacaaagagaatcaagactcatcggcgacaataacaactactctcttgctcaccacttttgtagccgtgtctggttcctttgtctttggctcagctataggatattcatcacctgttcagtcggatttaaccaaggagttgaatctctctgtggcagagtactcgctcttcggttcgattctgacaattggagcaatgatcggcgcagctatgagtggacgaatcgccgatatgataggcagacgagctactatgggtttctcggagatgttttgcattctc

SEQ ID NO: 82704 - DNA, 448 bp, Arabidopsis thaliana columbia
aaagactcaaaaaagtctgcgtggatctccagccgttttcagacacttacccacaaaatattcctctcggcgatgatccctttctgctgaatttttggtcctttgtcgctcgactgttttcttcgtctactatttgttccttttggatattcttcggacttttcgttgatttgattttcaagagagagagtttgaacaaggaaggattgaactatggaagatgcatcagagactagctactggtgtcacatgtgctcccgatcggtgattccattgattcaagacgaaatcatcaaatgcaatttctgtcaaagtggttttgttgaagaaatggataataatgatgaccatcaggctgctgattctctctggactcctatcttgacggagatgatgaacaacaatcacgaccaacattctaccaatcaggaagactcagaatctattc

SEQ ID NO: 82705 - DNA, 529 bp, Arabidopsis thaliana columbia
gtaggaagatcctccctgcgtccctgaccggtggccagcggacctaccaatcagttcaacaccaccctcaatgtgggctccgacgacacccccaaaaatctcatcagcgatgagaatggcgtgttgtatagttctcgccgcaggcatgcgcgagacctcaatcaggtcgctttcgggcggcagcgtctaagacgtgggatcctgattctcggggcctgccctattcaagcccaatccgccccttggagccagtccgctcccgggggcggattgtccccgtgacgccatcggccccgggtttccaaaccgcagaaataatgaagcccatcaatcgccttagcttgatgggcttttttggttcataacggccgcatgggcaaggaatgggcatgcgttggcagcaacttgccagctttctggccagcttttgaagcgggcaaggtgccccgctcaccttcctggcggatccgcgagctgctggttctcgtcctcgagctgcttgatcgtctcgcccgtcacccggtgcagc

SEQ ID NO: 82706 - DNA, 632 bp, Arabidopsis thaliana columbia
  unsure (1)..(632): unsure at all n locations
ggtgtttagtggtgtagtggttttcaattcttcgtcatctgttggagctgttaaggaagagtttgaggaagaatgttcggggaagaggagacgaactggatcatgtagcaagccaggaaccaaagcctgtcgcgagaaactaagaagggaaaagctaaatgacaagttcatggacttgagctctgttttagagcctggcaggactccaaagacggataaatcagctatactcgacgatgcaatccgggttgtgaatcagcttagaggtgaagctcatgagcttcaagaaaccaaccaaaagcttctagaagagatcaagagtctaaaggcggataaaaacgagctacgagaggaaaagctggtgttgaaggcggagaaggagaagatggagcaacagttaaaatctatggtggttccatcaccaggtttcatgccctcccagcatccagcagctttccattcccattaagattggcggtggcttacccttacgggctactatcctccaaacatcgccaatgtgggcacccttaccctcctgcttgaccgtgatccgtctcgtgatcctcaaaaattttccncccgttgttaaacctnctnaatggtgnttcancattggccatggtnatnaa

SEQ ID NO: 82707 - DNA, 873 bp, Arabidopsis thaliana columbia
acgactcactatagggattgctggttcgcctgcaggtaccggtccggaattcccgggtcgacccacgcgtccgggtgtttagtggtgtagtggaaatcaattcttcgtcatctgttggagctgttaaggaagagtttgaggaagaatgttcggggaagaggagacgaactggatcatgtagcaagccaggaaccaaagcctgtcgcgagaaactaagaagggaaaagctaaatgacaagttcatggacttgagctctgttttagagcctggcaggactccaaagacggataaatcagctatactcgacgatgcaatccgggttgtgaatcagcttagaggtgaagctcatgagcttcaagaaaccaaccaaaagcttctagaagagatcaagagtctaaaggcggataaaaacgagctacgagagggaaaagctggtgttgaaggcggagaaggagaagatggagcaacaagtaaaaatctatggggggttccatcaacccaggttttcattggcccttcccaagcatcccagcagctttttcatttccccaattagaagggcgggtgggctttacccctttaccggcttcctatttcctcccaaaccattggcccattgttgggtcaccccttttacccttccctgctgtaacccggggaaatccctgtctttggtgggaaacctcaaaaaaaaaacctttcccctcccggggtggggtttaaattctttctcttccaaagggtgggaattcccctcccaatgtgatcccactgggttatatccaatatccctcttaagggaaatttttttttgttttccttttcggaaaagagaattttttttcaaaaccaacaaaagggtttttgggagg

SEQ ID NO: 82708 - DNA, 636 bp, Arabidopsis thaliana columbia
  unsure (1)..(636): unsure at all n locations
nnnnnnnnnnnnnnnnnnnnnnnnnnnnnnnatggaccgggccagnaatncctgggctaccccccgcgtccgcacaatcttttctcaggagaacttcccaaatcattgatcaactgcagtgatatcgagtttctaaacgtggaagataacagaatcaatgacacgtttccatcctggttggaattgttgcccaatcttcagattcttgtccttcgttctaacgagttctatgggccaatattttctcctggagattctttaagtttctccaggttgcgaatctttgatatttcggaaaatcgcttcactggagttttgccgtcagattactttgttggttggagtgtaatgtcatcagtcgtggacattgatggtagaataattcagtatacagttacaggaattgaccgggacttctaccataagtctgtagctctcataaacaaaggattaaaagatgggacctggttggggagtgggttttcacaatctacaaaaccatcgatgtctcgggaaacagactcgaaggagacatccccgagtccatcggtcttctcaaagaagtgattgtgctcagcatgtcaaacaacgctttcacaggccatattccaccatctctatcaaacttgagcaatc

SEQ ID NO: 82709 - DNA, 624 bp, Arabidopsis thaliana columbia
  unsure (1)..(624): unsure at all n locations
cactnnnnnnnnnnnnnnnnnnnnnnnnnnnnnnnnnnnnnnnnnnnnnnnnnnnnnnnnnnnnnnnnnnnnnnnnnnccacgcgtccgagccaacgtccgagaaatctttgacaaggctcgtcaatctgctccttgtgttctgtttttcgatgagctagactccattgctactcagagagggaacagcgcgggtgatgccggcggtgcagctgacagagtgttgaatcagcttttgacagaaatggatggaatgaatgcaaagaagacggtattcattattggagcaactaacagaccggatatcatagattcagctcttcttcgacctggaagactcgaccagcttatctacattcctctacctgatgaagattcccgtctcaatatctttaaggcctgcttgagaaaatctcccgtcgctaaagatgtagatgttactgcactcgcaaagtacactcagggattcagtggtgctgatatccccgagatctgccagagagcttgcaagtaccccatcagagaaaacatcgaaagggatattgagaacgagcgtagaaggagccagaatccagaggccatggaggaagatatggtggatgatgaagtttcagagattagagct

SEQ ID NO: 82710 - DNA, 366 bp, Arabidopsis thaliana columbia
cagatcaacgataccaactttttttaataaaaataaaacatattgcacccatatttttaaaaaagaaaaagaaatgtcccttgaggggttttgtagggcgtaggtaaaagaaccaaaactttacgaaaaatatggcttcgttgagagaacacatcaaacaacctcaacctcattcttcgtagactttgactttatctcccacttcaccccactttctctttgttttgggtatctctctgcctaaccccaaaagtaaacggccgttatcacgctttcgaaacggatacggcctctttaacggcgatagaagacgacctctcggtcacgccgttaccgtttaatttcccattaccgttacccattttt

SEQ ID NO: 82711 - DNA, 526 bp, Arabidopsis thaliana columbia
  unsure (1)..(526): unsure at all n locations
aagtgaaagtgacaagaaaaaagaaaaggaattaaacaagggtgctgaaagaaaagatctgaatgctgacaagccaggttctgatttaactcctgggaatgcgagagaggaagatgaagttcccaatagagagaagaatgtgcacaaagttcagttatgggctgagatcaggccatctcttcaagcaattgaggacttgatgagtgtccgtgtcaaaatgaagggggattccacaaatggcgagcaagaagctcagaaattgaattccttagcctcaactgatgagaccgagtcttcaaagggagtatgtgagaatgattccgaagacgagttctatgatgcggagagatcagatccanttcaggatggntcttcagatggcacaagtgtctccagcatgtctgctnctgctgatncagcttccctagaatctgcatgcccctggaaagacgancntgaagttcttagtcatgngcggtgacntatggctctgaaggggtaagcntggaagcatttgggggggcaa

SEQ ID NO: 82712 - DNA, 482 bp, Arabidopsis thaliana columbia
ggcaaataataagaataaaattgataatagtaacgcacaaagaccaaaaaccaattaatcagaagttttggcacaaaccacagacaaatttaaagtttctcaaagacaacaaacatcattttattcgtattcaacaacattgcttttgcttttaaaagcaaaaaacgcatcactgaacattgaacttttgctttgcgaatgcaacgacctcttcgacggttggcatgtagggcttaacagcttcatgggccctaaacctctcggcccatttgatcaacccaggtgttgtctcttgccggagaaacttgacgccggaaaacgcctcgatcacagagatcggacctaaaggagccgaacaagcaatgtcaaggtagccgatggtctctcctccaaggaaccctaatcctttgctgctcttctgaaacgtttcttcaagtatcgccaaacactccatcagctttcccaccgccgccattttccct

SEQ ID NO: 82713 - DNA, 796 bp, Arabidopsis thaliana columbia
gaaatttaatcagtgtgtgtttataaatgtgcctaatttttcaattcaaaaagttaagaactgggtagtatatttctgtagtcaaaacaacaaaacccaagcttgggatttctatatcggttacaaaaacaattgttatgagatcattctataagagagatgcaaagagcaacactcatgccaagaatcaaagatatcaaatggcaggcactgtttttaagtgttgattttcccgagttgttcatttctgcaagaactccagcaacagctatgtatatgaatcctcccgctgtgaatccctcaatcaacgatgattgtcctggttcatttccccagaccaaaaccaatgcagttccggcaagtgcgacgagtgcagagaggaagttgaagaagagtgcttttgttactgtgaagcctgatcttactagaatcccaaaatcacctatctcttggggaagctcgtgggcaagtaaaaacatagttcttgaccaaccaccaactgatccatagatgagaaacgcacttcctaatgccattccatcagtgaaattgtgaacaccatcagagaacaagttgaggtaaccaaagactaggctcgaagaacgcgtctccacctgttctggtttgtccgattttccatcggaagtaatttctgttcctgaatctgatttatcagtagcgtcactagcagaagtctttctcttacggagagatttatctgtagagccgccagagactttctctgatgaatttacaattgcatcagaagaagattgttggtccaagttgttcccgg

SEQ ID NO: 82714 - DNA, 693 bp, Arabidopsis thaliana columbia
agcccacgcgtccgcccacgcgtccgcaaaaggcttcgttatccccaagccatacgagagattacgagtaagtgatacgttagccaaagagtgtcaccaattgattcaatatcccaagaggaagaagaagaagcaagagaagaagaagatagaagcgatttttataaaaatggcggcggatgctctgagaatctcgagttctagttctggttcgttggtttgtaatcttaatggttcacaaagacgacctgttcttcttcctctgtctcatcgtgctacctttctgggtcttcctcctcgtgcttcatcttcttcgatttcttcttcaattcctcagtttctgggtacttctcgtattgggctaggttcttccaagctctcacaaaagaagaaacaattctcagtcttcgctgcagctgaagccgaggcgaagcgggctgtaccgcttaaagattaccgaaacatcggtattatggctcacatagacgcgggaaagacgacaacaaccgagaggattctttactacacaggaagaaactacaaaatcggtgaagtgcatgaagggacagctacaatggattggatggaacaagagcaagaacgaggaatcaccattacttcagctgcaaccacaacgttttgggataaacacaggatcaatattattgatacaccgggtcacgtcgatttcac

SEQ ID NO: 82715 - DNA, 544 bp, Arabidopsis thaliana columbia
  unsure (1)..(544): unsure at all n locations
ctctcggtctcgaagagaatcccgtttgccgatcatcggaatgtcaatcgctagacgcgatcggaccgcactgcgaaaacgctgtctccggcggtggatcggcgtttgaagttcatatcaaggtacgaaacggaggagatagagaagggattcacacggtgtttctattcacgacgccgccggcgattcacggatcgccgaggaagcatttggtaggattcgagaagattcgattggggaagaggggagaagcggtggttaggtttaaggtagagatatgtaaagatctgagtgtggttgatgagattgggaagaggaagattggtttgggaaagcatcttcttcatgtcggagatttaaaacattccttaagcattagaatctgattctatatttttatttgaggaaggaaaaaagaatattaatatgcttaagcttttgcaagttggaaaagaaaagtaataaaaaaaaccaattgaagatctctttaaaattaaannnnnnnnnnnnnnnnnnnnnnnnnnnnnnnnnnnnnnnnnnnnnn

SEQ ID NO: 82716 - DNA, 852 bp, Arabidopsis thaliana columbia
  unsure (1)..(852): unsure at all n locations
gccccccctcgatttcgacggtatacataagcttgatatcgaattcgcggccgccctctgtttcctctgtttatctaatctttctctgtttcttcctctactttttaaatttctcaaacgctcaatcatcgccggttttcgcctgcgacgtagctgcaaacccttctctcgccgcctatggtttctgcaacaccgttttgaagatcgaataccgagtcgctgttctggtcgcgaggctcacgttgcaagaaaagatcgggtttttagtgagtaaagctaacggcgtgactcgtcttgggattccaacgtatgaatggtggtctgaagcacttcacggcgtttcttacatcggacccggcacgcatttttctagccaagttcccggagctacgagtttcccgcaggttatactcaccgccgcttctttcaacgtatctctgtttcaagccattggcaaggtcgtctcaacggaagcgagggcaatgtacaacgtgggattagccggactaacgtattggtcaccgaacgtgaacatattccgagatccaagatggggaagagggcaagagnctccaggggaagatccnttgctcgctagtaagtatgcttcagggtacggtaaggggtcttcaagagacttnacggtggcgnttctaaccgtcttaaaagtcggccgcctgctgcaaacactataccgctttacggtgtcgataatttggaaggcgtagnancgttacagtttaacggccgtggtgnctaancaggtttttggttgtnacggtttaacccnccnttcaaagttttttttggtttaatgganttttgggcgngttttattgntttttcanacaa

SEQ ID NO: 82717 - DNA, 969 bp, Arabidopsis thaliana columbia
  unsure (1)..(969): unsure at all n locations
taatacgactcacttagggaaagctcgtacgcctgcaggtaccggtccggaattcccgggtcgacccacgcgtccgatcgaaacacaaagcaatgggctcttcttctccattaacaaggagaaacagagcaccaccatcctctgtttcctctgtttatctaatctttctctgtttcttcctctactttttaaatttctcaaacgctcaatcatcgccggttttcgcctgcgacgtagctgcaaacccttctctcgccgcctatggtttctgcaacaccgttttgaagatcgaataccgagtcgctgatctggtcgcgaggctcacgttgcaagaaaagatcgggtttttagtgagtaaagctaacggcgtgactcgtcttgggattccaacgtatgaatggtggtctgaagcacttcacggcgtttcttacatcggacccggcacgcatttttctagccaagttcccggagctacgagtttcccgcaggttatactcaccgccgcttctttcaacgtatctctgtttcaagccattggcaaggtcgtctcaacggaagcgagggcaatgtacaacgtgggattagccggactaacgtattggtcaccgaacgtgaacatattccgagatccaagatggggaagagggcaagatactccaggagaagatccattgctcgctagtaagtatgcttcagggtacgttaagggtcttcaagagactgacggtggcgattctaaccgtctcaaagtcgccgcctgctgcaaacactataccgcttacnatgtcgataattggaaaggcgtagaacgttacagtttcaacngccgtggtgactcaacaagatatggatgatacggnttaaccacccgttcaanagttnntntggttnattgggaattttggcgnggttttatgtgtnctacaaacaaggttacggnaaaccggcattnggtgntccanatcttnt

SEQ ID NO: 82718 - DNA, 1300 bp, Arabidopsis thaliana columbia
tctctacgactcactattgggaaagctggtcacgcctgcaggtaccggtccggaattcccgggtcgacccacgcgtgcggaagagggcaagagactccaggagaagatccattgctcgctagtaagtatgcttcagggtacgttaagggtcttcaagagactgacggtggcgattctaaccgtctcaaagtcgccgcctgctgcaaacactataccgcttacgatgtcgataattggaaaggcgtagaacgttacagtttcaacgccgtggtgactcaacaagatatggatgatacgtatcaaccaccgttcaagagttgtgtggttgatgggaatgtggcgagtgttatgtgttcttacaatcaagttaacggcaaaccgacatgcgctgatccagatctgctctctggtgttatccgcggtgaatggaaattaaatgggtacattgtttcagattgtgattcagtagatgtcttgtataagaaccaacactatacaaagactccagctgaagctgcagccatatctatattggcaggtttggatttaaactgtggttcattcttgggtcaacatacagaggaagcagttaagtcgggtttggtaaacgaggcagctatcgataaagcgatttcgaacaactttttgacccttatgcgtttaggattctttgatggaaacccaaagaaccaaatctatggcgggttaggtcctaccgacgtttgcacgtctgcgaatcaagagctagcagcagatgcagcaagacaaggcattgttctactcaagaatactggatgcttaccgctttctcctaaatcgatcaaaacactagccgtgattggaccaaacgcgaatgtcaccaaaacaatgattggaaactacgaaggcacgccgtgtaaatacacaacaccactacaaggactagccgggacggtatctacaacatatctaccaggctgctccaatgtagcttgtgctgtagcggatgtagccggcgccacgaaactagcagccactgcagatgtgtctgtgcttgtgatcggtgccgatcaatcaatcgaggcagagagccgcgaccagagtcgcccttgcatcttcctgggcagcaacaagagctggtgatcccaagtggctaaagcagcaaaagggccggtctttgctcgtcattatgttccggtggggggtttcgattttaccatccgctaaggatgaccccaagatcgccggaatttttgtgggttggttaatcccggggaagcctgtggtttccccattgctgatatcatctttggccgttata

SEQ ID NO: 82719 - DNA, 1096 bp, Arabidopsis thaliana columbia
ctctaatacgactcactatagggagagctggtacccctgcaggtaccggtccggatttcccgggtcaacccacgcggccgtgcgggtaccggatgtacccggcgccacgaaactagcagccactgcagatgtgtctgtgcttgtgatcggtgccgatcaatcaatcgaggcagagagccgagacagagtcgacctgcatcttcctggacagcaacaagagctggtgatccaaggggcggaagcagcaaaaggaccggtcttgctcgtcattatggccggtggaggtgtcgatattacattcgctaagaatgacccaaagatcgccggaattttgtgggttggttatcccggagaagccggtggtatcgccattgctgatatcatctttggccgttataatccaagtgggaaattaccgatgacgtggtatccacagtcgtatgtagagaaagttccgatgacaataatgaacatgagacccgataaagcaagcgggtatccgggtcggacttaccgattctacaccggagaaacagtatacgcattcggagatggactcagctacaccaaattcagtcacactttagtcaaagctccaagtctcgtttctctcggtctcgaagagaatcacgtttgccgatcatcggaatgtcaatcgctagacgcgatcggaccgcactgcgaaaacgctgtctccggcggtggatcggcgtttgaagttcatatcaaggtacgaaacggaggagatagagaagggattcacacggtgtttctattcacgacgccgccggcgattcacggatcgccgaggaagcatttggtaggattcgagaagattcgattggggaagagggaagaagcggtggttaggtttaaggtagagatatgtaaagatctgagtgtggttgatgagattgggaagaggaagattggtttgggaaagcatcttcttcatgtcggagatttaaaacattccttaagcattagaatctgattctatatttttatttgaggaagaaaaaaagaatattaatatgcttaagcgcggccgcgaattcgagatcaagcttatcgataccgtcgacctgagggtgtg

SEQ ID NO: 82720 - DNA, 556 bp, Arabidopsis thaliana columbia
ctctctcttagccatgtttgggtcaagaggtctctgttgcagcagaatctggaatcgttctctgtttctcaaacgttcttcaaacttccgagctagtttctctacgaaacgtgttgggacccataatgggacattccactgcgacgaagctttagcttgcttcatccttcgtcgttccaatagattctccgatgctcaaatcgtccgaaccagagatcatcaggttttggagaagcttgatgcggcacttgatgttggaggtgtgtatgatcctcagagtgaacgttatgaccatcaccagaaaggatttagtgaagtgtttggccttgggtttaatactaaactcagtagtgctgggcttgtctataagcattatgggattggaaataaatttccaaggagcttcaacttgagcagaggcaatcctgatgcctttcgattgtttctcagctgtgtacaaaaacttcattgaggcagtagttgctttagacaatggtatccatcaatatgatactgaccaacctccaagatatgtaaacaatactagcctggggca

SEQ ID NO: 82721 - DNA, 823 bp, Arabidopsis thaliana columbia
taaagtgtgtggggggcaaccccgacccagggggtttttttccccccaggttcaaaaaggagagtttggttacaaactccgaccggggcccaaaggtgaaaatttggatattttaaggggctcccccacctaattaagaaagaaagcctaattttcctgttcggcaattgcaacagccgtaccggtaaaggctttgggattcccttttaaaagccggcccgccccaagttgtgaatggttcttgaaaaatacatcccaaaacaatgtgtatctttgttatgcacattatgatacacacacccgaataacaagttcatccacgaatatataaaagcagtaattacaaactcaatcgggtttcttctaccttaaccacttataccggtgtagattacaatcaaaccaagcaatggcaaatgcagtttagtaatctcaacctgatcattcaaaatctcaccagctctttctatatatccccggtgggcataatcttcaatagcttgaccagatcatatgacttgaaatctcttccaaagcacagagccaagtccaaagctaatttcccatccttcgttcgtcttgttttatcagcaccattggtcaacaatatctttgtaatgtctcgatttcggctttgtacagctatatgtaacggagtccatccttcattatctgcaacattgacgtctacattgtacttgaatagtagttttacagtctgcaaggctccaacttgaactgcataatgaatcggagcaaaaacgtcccgatcttgaagatgcggattagctcggacgcggggtcgtccgggaattctggtccg

SEQ ID NO: 82722 - DNA, 473 bp, Arabidopsis thaliana columbia
gaactcatacattttgtattgatttttatgtgaggcgaaccaacaaacaaagaacgtatctctaccagaaccaaggatctttgccttaaaggttcagcataaatctcgacacagagagactctaatagtagtaggaggaccagatatatgactccaaatttgagattattactagtgtgttgcggatttagctgcatattggacaacgaacaagaccattcttattacactccttacacttcaccaccactgcatcattcccccatccttccaccactttacagcttccattacaacccgaacacggcaaaaacgctaatccgccggaaccaccggaaccgccgccacaccgatcgttcttcctcggaatctctttaagcaattcaccaagcaatccttctttcaccaatctcatcacttcctctgctccaccaatgtgcttgcccttcacaaaaacccgaggcggcaacacc

SEQ ID NO: 82723 - DNA, 771 bp, Arabidopsis thaliana columbia
ggggaaagaaacccacaattgggaaagggcttaaggttttggtaaggttttcccggttttttgaaggggtttcctttaaaagaggaaaaggccctttaggattctattcggccaattcagaccctttaggggttttaattcctccctgaaacttacaaggtcccccaagcttaatacctaaccctaaagcctgaacttgatctctatattgtataccccggatatcccccccccgtttaaacccccaaactgcccgccgttaaaaaaaacaaggtttggcccttggaactttgttttaaaaacggttgtgtttttgtgcccttgcataaaaaggagttaaccttgatggtactaaacccgctttccctccgttagtaggcatgagcttcgatcctaccgtagtagagtccgatcctcttgtttgggttacggacaggaacagtgagggctaggttataccttaaaatgttgtccggggaagtgtggtcaaagcgggtaagggacgcatcggtcacgtgaaacttgatggcacgaggtcggacgatgagccagaagatgagagcggctacgccgaggatgacaataagggatatgattactttgacgaataagctgaggaggcagcagccacagccacgaccgtgcccacgtcggtagtagcctttgggagctggtggtgggactgatggaccgtagaaggcgccattgagaggttgttcagcagccatgatagtaattgtgtgcgtacgcgggagtcgtcccggaattccg

SEQ ID NO: 82724 - DNA, 481 bp, Arabidopsis thaliana columbia
ataagaagcgttatcttgaaaagttacttataaaaaagagggtggtcgataatcagaagaagacaagttcaccaagatttaactattggactgaaatcagccaagttgcacatactcttcaatttttgccttcttacgggccaggaacctctctttagcggcagcgattcgcatcctctcttctcttctggtcgttaatggctttcggcacttcttttgctgcctctttgattgatgactttctctctttcagtgccatcttgaacccatctccttttcagaaactgcttgctctgcttctagtggctccaaactttttgctacgacttgatccaaattcgcccgagtcaggagatacttccttctccggggattttcgtttcttctctacccttgttacttcttttctcagctcctcgagcttctctgcctttcttgttcctcgagcttctctgcctttctttgttcctcgagcttctct

SEQ ID NO: 82725 - DNA, 560 bp, Arabidopsis thaliana columbia
  unsure (1)..(560): unsure at all n locations
cnnnnnnnnnnnnnnnnnnnnnnnnnnnnnnnnnnnnnnnnnnnnnnnnnnnnnnnnnnnnnnnnnnnnnnnccacgcgtccgcccacgcgttcgcggacgcgtgggcgaagaacgacgagctcgagattattgattttcaagtggagattgaatcagtgataatggacaatgagacgaaagcaaccaccttcagcaaatcaacagggcttcctaggaagagattctacagagcaagagctcatagtaacccacttagcgattctcacttcccaatccccatatctccagctcatgtcgactattcacttcacttccccaaattcgttgaagctgacaacaaattcatcaagaaggttgagtttgcggatatcggatgcgggtttggtggcctactaatctcccttgcgacgcttttccccgatacgctaatgatcggtatggagctcagagataaagtgacggagtacgttaaagaacggatcttagctttaaggagaacaagctcggagggacagtatgagaacatctccgttgttaggacaaactcgatgaagtaca

SEQ ID NO: 82726 - DNA, 505 bp, Arabidopsis thaliana columbia
atctaaaacctgcctgattttagcattcactgtaaggaacaacacattgagtagcaaatggaacatctgaaaagtctacaaactgcaaagtaaaacgaacaagaagataacaaatattgctagggacttgactagatgaaaattcccaaaatatgtttttcgatttcagatgtgcaaaaaccctcttcacagcctttgtgaggatcacatcgttgaaatgttggaacacaaaaggcgtgtggaagacttgaattctagtttccaccttcattgataaacccttctttgcggccttcaaagccaggacgcaggagctttttctctttgttggcgaatttgcgcatcttattctgttcaatcctatcggcaatattccctgatctcttttgctgcttctccacctttgaacttttgttgcccttcaattctctctttccacttctctgcgttcttctcttgcctctttttgtctttgtggatgctttgcttcaatagctttgggtca

SEQ ID NO: 82727 - DNA, 745 bp, Arabidopsis thaliana columbia
  unsure (1)..(745): unsure at all n locations
gttggtacgcctgcaggtaccggtccggaattcccggggtcgacccacgcgtccgctgttttatttcgttggaaggagttccgaatagtcaagacaaagtcatgtctgaagtttacttagggaaccagatttgtaatctggtggcttgtgaaggtcctgacagagtcgagagacacgaaacgttgagtcaatggggaaaccggtttggttcgtccggtttagcgccggcacatcttgggtctaacgcgtttaagcaagcgagtatgcttttgtctgtgtttaatagtggccaaggttatcgtgtggaggagagtaatggatgtttgatgttgggttggcacactcgcccactcattaccacctccgcttggaaactctcgacggcggcgcactgagtttgactcgaagcatacgacggtggtggagtcgagtcgagtgaatttgagattgagatcagtggaccggtgatgacatatgttcggaccaagacctaaaccgaactgaatcgaaccgttttgccttttgtttattttatttattttcgttcacttgtttaaaattcttatatatatcgttttggtaggtcattttataatttatgcctttttgggatcaatttttaataggctgagtttgtatttattaataaatatcttatgaaaaaaaaaaaaaaagggcggccgctctagaggatccaagcttacgtacgcgtgcatgcgacgtcatagttttttnnnnnnnnaac

SEQ ID NO: 82728 - DNA, 2254 bp, Arabidopsis thaliana columbia
aaaacaaaagcaatccaatcccaaacccatttgctcttaagattcttcacatagagaagtcacatgttccttcttcttcttccttcatcatccccaaacacacacaaactaaaaaaaaggcaaaaccctagatccaagatcagacctaatctaatcgaaactcatagctgaaaaatgaagagagatcatcaccaattccaaggtcgattgtccaaccacgggacttcttcttcatcatcatcaatctctaaagataagatgatgatggtgaaaaaagaagaagacggtggaggtaacatggacgacgagcttctcgctgttttaggttacaaagttaggtcatcggagatggcggaggttgctttgaaactcgaacaattagagacgatgatgagtaatgttcaagaagatggtttatctcatctcgcgacggatactgttcattataatccgtcggagctttattcttggcttgataatatgctctctgagcttaatcctcctcctcttccggcgagttctaacggtttagatccggttcttccttcgccggagatttgtggttttccggcttcggattatgaccttaaagtcattcccggaaacgcgatttatcagtttccggcgattgattcttcgtcttcgtcgaataatcagaacaagcgtttgaaatcatgctcgagtcctgattctatggttacatcgacttcgacgggtacgcagattggtggagtcataggaacgacggtgacgacaaccaccacgacaacgacggcggcggctgagtcaactcgttctgttatcctggttgactcgcaagagaacggtgttcgtttagtccacgcgcttatggcttgtgcagaagcaatccagcagaacaatttgactctagcggaagctcttgtgaagcaaatcggatgcttagctgtgtctcaagccggagctatgagaaaagtggctacttacttcgccgaagctttagcgcggcggatctaccgtctctctccgccgcagaatcagatcgatcattgtctctccgatactcttcagatgcacttttacgagacttgtccttatcttaaattcgctcacttcacggcgaaccaagcgattctcgaagcttttgaaggtaagaagagagtacacgtcattgatttctcgatgaaccaaggtcttcaatggcctgcgcttatgcaagctcttgcgcttcgagaaggaggtcctccaactttccggttaaccggaattggtccaccggcgccggataattctgatcatcttcatgaagttggttgtaaattagctcagcttgcggaggcgattcacgtagaattcgaataccgtggattcgttgctaacagcttagccgatctcgatgcttcgatgcttgagcttagaccgagcgatacggaagctgttgcggtgaactctgtttttgagctacataagctcttaggtcgtcccggtgggatagagaaagttctcggcgttgtgaaacagattaaaccggtgattttcacggtggttgagcaagaatcgaaccataacggaccggttttcttagaccggtttactgaatcgttacattattattcgactctgtttgattcgttggaaggagttccgaatagtcaagacaaagtcatgtctgaagtttacttagggaaacagatttgtaatctggtggcttgtgaaggtcctgacagagtcgagagacacgaaacgttgagtcaatggggaaaccggtttggttcgtccggtttagcgccggcacatcttgggtctaacgcgtttaagcaagcgagtatgcttttgtctgtgtttaatagtggccaaggttatcgtgtggaggagagtaatggatgtttgatgttgggttggcacactcgtccactcattaccacctccgcttggaaactctcgacggcggcgtactgagtttgactcgaagcatacgacggtggtggagtcgagtcgagtgaatttgagattgagatcagtggaccggtgatgacatatgttcggaccaagacctaaaccgaactgaatcgaaccgttttgccttttgtttattttatttattttcgttcacttgtttaaaattcttatatatatcgttttggtaggtcattttataatttatgcctttttgggatcaatttttaataggctgagtttgtatttattaataaatatctttatgaattttaaatgaaaattatgttttaaaaaaaaaaaaaaaaactaaattact

SEQ ID NO: 82729 - DNA, 713 bp, Arabidopsis thaliana columbia
  unsure (1)..(713): unsure at all n locations
aacaagacaagtctctagagttgtatataaaaatgtacatccatgtcctatgattatgattcctatcatctataactataagaagacatcataataagtctgtgttaatgtcaatagtatttaggagggtaacccccaaaattggaaagacctgaagcaagttaccagaacccaacacaagaaagccattgcacccgagccttggtattggatacagaggctcccatcaaaggtctttccatcagcagacgcaaagcagttcagttgcactagctacaggacaagcaccaccaagagaaagaaacgaaagtacgaaatcaccggcgaaaacgatggaaagaactcttaattcttgaggaaggagtttcactaagacagagtatgtgtctgtcaaggcaagtaaaatgctccatggagttacaattgccatcaccatcgctaaatagcagaaagtagtgaaatcatagaaatcgaaatcaaagcacatgaagatcaacgaagcagctgagaaaatggtttggccgaaacggagagcgaantggcgctagtgccgaacgatcccgggacatgctccatccaatttcaaacctaattctctgtaacgccaaatggacttgtgtgtttgctctttattctcttttgctctgttttanaaaaataaatttactttataaacttaaataatactaacactcttcanattttcatttaag

SEQ ID NO: 82730 - DNA, 497 bp, Arabidopsis thaliana columbia
aggagcctcaagctgatgaagagaatgccattacccttttaatccggatgccggatggaacacgtcggggccgccggttccttaaatctgacaaactccaaacccttttcaactttatagacattgccagagtggtgaaacccaacacttacagactggtgaggccatatcccaggcatgcgtttggagatggggaaagtgagtcgaccttaaacgatcttggattgaccagcaaacaagaagcattgttccttgagcttatctagttttaagctcttggatatataaccagaattacatttgtcttctgcttagaaaactctttaattttcaagttattttttttatctttctttatacaaaagaaaaagtatttgttcagggtggaggattatatggtttccaaaaccgtcgtcgtttagtccaaaaaaaaaaaaaaaaaaaaaaacccaaagggcgaccgctctagaggatccaagcttacgtacgcgtgcgtt

SEQ ID NO: 82731 - DNA, 962 bp, Arabidopsis thaliana columbia
  unsure (1)..(962): unsure at all n locations
cccacgctttcgcccacgcgtccggcagtgactgctgctcaaggacctcaggatacccaggccctgaacggaagattggcagcacctagttcaccatttgatgatgactctgatgatgttgatgagcaacctcttgttagacacaggccaagacgtgcagcatccggatctctggctccacctaacgctgatcgttcccggagtgggagtcctgaagaagaacatgcaagtattaatccagcggagcgtggcagtgggtttccttctgagtggggaggcatttcatctgaggaacatgatgaagctgtcatgctcgaggcagccatgtttggtggcattcctgaaactggatataatcatcttccattcttacctcctcagccgagggcccaaccacgtccaccctcaccttcgctgacagctcagaggttgatacgggaacagcaggatgatgagtatgttgcgtccctgcaagctgaccgagataaagaaatgaagtccattagagatgctgaggcacgtcagctagaggaagaaactgcgagaaaggcttttntggaggaagaaaagaaaaaagaggaagaagctcaaagaaaactcgaggaggaacaggagctagaaagacaactagatgcaaaagaagcgtctttacctaaggagcctcaagctgatgaagagaatgccattacccttctaaatccggatgccggatggaacacgtcggggccgccggttcctttaaaatcttgcaaacttccaancccttttcaactttnttaggcattnccagagtngtgaaccccacaatttcaggcttggtgaggcctatccgnggnatnctttttgngttggggaagtnagnggccttaacggttttgggtttccccaacaagggnttttccttngtttntgnttagcctaanttnggggttcattnttttctgaactttttttaggnttgc

SEQ ID NO: 82732 - DNA, 498 bp, Arabidopsis thaliana columbia
ctatacgacttacttagggaaagctggtacgcctgcaggtaccggtccggaattcccgggtcgacccacgcgtccgctgctctcggctgataatagctggacatgataggaggatatatattgttgacgttggtagcatggagttattacattcttttacaccacgccaggagggacaggaaggtgaatctcctcctcatgagcctccaattacaaaactgtatactagctcaaatgatgattggttagctgctatcaattgctttggggacatatatgtgttcaacctggaaacgcagaggcagcattggttcatatcaaggcttgatggtgcatctgttgcagccgctggttttcatccgagggacaacaatgtgattgtgatctccacctcttcaaaccaggtctttgcattggatgtggaggctagagagttgagcaagtgggcattgctgcagactttttgtctgccaaagagctaccaaaattttcctggtg

SEQ ID NO: 82733 - DNA, 376 bp, Arabidopsis thaliana columbia
  unsure (1)..(376): unsure at all n locations
tcggagcggtactgcactacgagctgagcgtgctcactgctaccgatgcgaccgaacggctcatcacccgcaccgaacgcatcgaccgtatcggcctggtcgaagccagcaccgccgtctgatcgataagcacacagaacacacaccgcgaaaggccggacatcctccaaggaggatttccgcctttcggacaaatcgagcacactcagccaagctgtcacgtgagcttcggggcgggttcttcccgttttcccccgggggctttcgaacttccggcttgttcgggttccgggttctttgaattcagctncggggtttttcgaaacctatgtactngnacaggtggtacaatcccnnttaacgacgatggtnncca

SEQ ID NO: 82734 - DNA, 499 bp, Arabidopsis thaliana columbia
ggcaaatgcggtagtaagggcacttgagaacgaaagtgcagaaatccgggcggaaatggaagcttccaaattaagtgcatcagaatcgctcacggcatgcatggaggcctcgaagaaagagaaaaaatgcttaaagaaactactggcgtgggagaagcagaaaatgaagttgcaggacgagattacagctgagaaagagaagattaaggcactcaatagagctttagctcagatcactcaggaagaaaaagaatatgaggcgaaatggaggcaggagcagaaagctaaggagcaagttttggctcaagtggaagaagaacagcgctcgaaggaagcaattgaggctagcaacaagagaaaggcggaaagcctgcggttaaagatcgaaatagacttccagagacacaaagatgatctccaaagactggaacaagagctgtctcggctcaacaaagcctcttcaactgactcaagcctccaatccaataacacctctcac

SEQ ID NO: 82735 - DNA, 694 bp, Arabidopsis thaliana columbia
  unsure (1)..(694): unsure at all n locations
gggtagaggtggtagaatttttatttacttacattgtgaatcctgggaagatcataaaccaggcaacatcttctttgaacaactcaaaacaatgtaaaagatgcgaatagtccaaaccccctcagattgaagataagagacaataggaagtagagagacggagccataaacaaacaaacaaacaaacaaaaaagtattacacctgacaaaagaagttgtgctgtgattaatctttggaccccagataattatctttgttactaagaactcgctccaaagacacggattctctgctgaaccggagctctgcaacaaggacaggtcgctttgccactgcccatgaagctatcgctgcagctcgcacagaccacttggtgagcacaagggagaaacacaaccgaaacctcatctttcatgcagatcagacattcccgggtcatagtttgcttccttcctcatatgatccatcaagcctattcagcccttcaagcggcttagacattgtttctcccttcgacttgtctgatttcanctttgtgtganaggtgttattgggttggaggngttgaggcaggttgaagngggtttgtttacccgngncagcccttngtncagccnttngggganacctttgggncnngggaggcnattngngnttaaccgngggttccacctttnctggtggaanccnntc

SEQ ID NO: 82736 - DNA, 737 bp, Arabidopsis thaliana columbia
ggaagaaatacgagagaaagatctcaccgactctaaaccatctccaccgcaaccaccaccgaaacgtggtctcatcagccgcaaaagacagcttgtgtttctctctttcatgattttattagccgcaaaaggactcgttgggatcggagaaatagcgtttgtaatcttgtgttatatctacttgtatgagtttctctcaagatttgccttccctcgcaagcaaacagaacagaagaagagactctcaaaccctaaaaacaaactctttcaagcttacttcctcgccactgcaattataggcctactcttccctctttgttacatcggagatggaatataccgtggagacattcacggcgctggagccgctcgcaccacatctatttctcctctcaggtcaagctttcacagaacctattggtttctctgacaagtattcgatgccaataggtattcttggaccggttttctacaacgctcgtaggattttcgctcttttggattgggttaaagcagaattctccgacactcaacgtcctggtggtccgttgagattgtacggaggaagagtgattgcatcggttaacacggtgatgtggttttataatctgtttggtctcttgttgcctgtgtttcttcctaggtcttgtgagatttacttctccggtgataacaaagatgattgaactgatttgtatttgtctcatttagaataaaaatgttgagaagttcgtttt

SEQ ID NO: 82737 - DNA, 620 bp, Arabidopsis thaliana columbia
  unsure (1)..(620): unsure at all n locations
agcaaattaaatacactactacttcttgagcttttaaactacacaaacaaatggctccaagaaccccccttgcactcttcgtttctctcaacctcctcttcttcacttacacctctgcaaccacagggacttgtcctaaaaattccatagagatcggtacttgtgtcactgtgctcaatctagtggacctaacattgggaaacccacctgtaaagccatgttgctcgctcatccaaggcttggctgaccttgaggctgcggcctgcctctgcactgcgctcaaagctagcattcttggaattgtcaatattaacccttcctatcaatctcagcgtactcctcaatgtttgtagtaggaatgctccaaagagtttccagtgcgcgtaagttgaatacctatgacatacctatgaaacaaacgaatcataccgatgcttgaacatgttttcttacctacttggtggtggtccttaggtggttgggtttncctttctttcttgggttggtaataatgaacgnncggaggtcctgatgaaaatatgggaaggggnnggggtttcaancgaaagttgggttttttccctanttgggggcccngggtggggggcccctctgggnaa

SEQ ID NO: 82738 - DNA, 459 bp, Arabidopsis thaliana columbia
ataatcctaatgtataacacgtttaagttgatattaaagacaattgtcaaagctctctaacccatgaaaatatttggacaaagaaataagagaggatttggtgtcttgcaagtttcacagctcctatcttaacttatcactagcttgcttgatcctaaataggatttaaaggcatacagcttttcagtttataaaactggttcaagctgaagttagttttcaattaaactggccctgccccatttcgatgcagagcggtcgggccttcaactgcgggtggggtccggcttgccaaatagccggacacctggactcgagttgaagccgcagaccggttagcttacggggttggagggtgcttgagggatggtgatcaagggtaaaacgtcttggttggtcagaggaagaaacccatgttgttgaatttgacagaagagagagagcaccatcaagatcttg

SEQ ID NO: 82739 - DNA, 507 bp, Arabidopsis thaliana columbia
  unsure (1)..(507): unsure at all n locations
ctcagatacagaaactgactaccaagaacaaagctttttccttcgagcaaagaaagttcttttttcttttcttttgctcttcgtaacccaaccaacaagactttcataagctattaaatcagaaccctggaagacaaaaaaggggaaaaaccattatccttaaagtaaccaacacttctctctctctttcttcaatggatttgcaactgaaacaatggagaagccagcagcagcaacaacatcagacagagtcagaagaacaaccttctgcagctaagataccaaaacatgtctttgaccagattcattctcacactgcaacttctactgctcttcctctctttacccctgagcctactttcttctaaactctcctctttgtctcctgattcttcctccagggttccccaaggatggggggcttttttaggctggggacagtgggaagaacttgaccttcaagcttttgatctttcaggtacatgtttgggttggngttgntgttcc

SEQ ID NO: 82740 - DNA, 551 bp, Arabidopsis thaliana columbia
  unsure (1)..(551): unsure at all n locations
cgcttgcagcatcattataacttaaaaatgaaataaaaagtcgttgcacttctacattttgcctaagcttcatcgtagatcctatttagacatgaatttccaaaaacaaatctttgaggatataaaatctgcagagaaaggctacagatacaagggaaatcttaaaagaaaaagggaagaggacaacaaaagcctcccctctttatacaggaaatttggataaaaaccaaaaacacagtaaaaaccgcattgttgtgttggttttacactggtcaatgaaaggcttgtgtcgagacaccaagctgatggagaacactggttggggaagatgaggaagaagatctcagggcttcggccaatgggccgcccatgttgtgatgatggtgggtggaacctccaacggtcccaacagctcatggtttgctganctctccccatggttgttgccccggggtnccnccttcgttgcctgtnganaacttcaaaanacgtctnaaggaaaagtnccgggcatggnnattgngaaacaatgggttnannccatgggggtt

SEQ ID NO: 82741 - DNA, 488 bp, Arabidopsis thaliana columbia
  unsure (1)..(488): unsure at all n locations
cccacgttttcaatttggttttcttttttcctctctatttcttcggctgagaggcggcgactatggcggaggaacagaagatagcgttagaatcagaatctccggcgaaggttacgactcctgctccagcagatacaccggctccagctccggcagagattccggctccagctccagctccgactccggctgatgtcacgaaagacgttgcagaggagaaaattcaaaacccacctccggagcaaattttcgatgactccaaagcccttactgttgttgagaaacctgtagaagagcctgcaccggcgaaacctgcgtctgcatcgctcgatagagatgttaagctagctgatttgtcaaaggaaaagagattgtctttcgtcagagcgtgggaagaaagcgaaaagagcaaagcaggagaacaaagctgtagaagaggtttccaggttgttcatgcttttggggaaacanncaagaaannnancttt

SEQ ID NO: 82742 - DNA, 814 bp, Arabidopsis thaliana columbia
ctactacgactcactatttggaaagctggtacgcctgcaggtaccggtccggaattcccgggtcgacccacgcgtccgcacgaaagacgttgcagaggagaaaattcaaaacccacctccggagcaaattttcgatgactccaaagcccttactgttgttgagaaacctgtagaagagcctgcaccggcgaaacctgcgtctgcatcgctcgatagagatgttaagctagctgatttgtcaaaggaaaagagattgtctttcgtcagagcgtgggaagaaagcgaaaagagcaaagcagagaacaaagctgagaagaagattgcagatgttcatgcttgggaaaacagcaagaaagcagctgtcgaagcgcaactcaagaaaatcgaggagcaactagagaagaagaaagcagagtatgcagagaggatgaagaataaggttgcagcgattcacaaggaagcagaagagagaagagcaatgattgaagctaagcgtggagaagacgttcttaaagcagaagaaacggctgctaaatacagagccactggaattgttccaaaggcaacttgtggatgtttctaatcttgaatttgcgaatcaaagtttcaagacttcgtaactgtaaagtgtaatcaaatttctctgttctctttaatggcttgtaatgttgtttgtatattgattttgtgtgtgacaatcagagtgaaaaatatgtttccttgttttccaaaaaaaaaaaaaaaaaaaaaaaaaaaacaaaagggcggccgctttaaaggatcccagcttacggacgggtgcatgcgacgtcat

SEQ ID NO: 82743 - DNA, 621 bp, Arabidopsis thaliana columbia
tatgatgatggggatgaagtttttctctttttacgttgtacttcttctagttgcagctagctcggggatgcggataaatgggcagagcgtttcgtgtctaaaccaacttgctccatgcctaaattacctgaatgggaccaaggaagtacctcaagtttgttgtaatcctctcaaatcagtgataaggaacaatccagagtgcttgtgccgtatgattagtaaccgttggagttctcaagccgagcgagctggcatcgatgtcaatgatgctcaaatgttgcctgctcgatgtggagaacatgtcaatcccattgcttgcttgactcgttctagaggaggatcttcaaactcagaccgaagttcctccattggcaacaccttttctcagtcctattgggtgacaaacattagctattgcagccactgttttgtcataattgccatcacataattagctgaatccctcatggtctttagcagcgttgctttgctttgcttaattaaagacgggtgggtctcttgtttttttaatgcccttttagttaattatgattattggtcgtcaccaacacattgtatgtaccactttgtccccataaatagtcaaaatccatttctatt

SEQ ID NO: 82744 - DNA, 522 bp, Arabidopsis thaliana columbia
ggtctgggctacctcaaaacacgatgtttatttattgtccaactactccatcagccactggtcttctttgacaggttgtaggagtgaaattcttaacgttaaaggtcatgtggctccgtctgagaaacatcccgagagtttgttggaaggatttacagagactcaagttagcactcttgcagtaaaagaaaggctactagttgctggtggattccaaggagaactcatttgcaagcatctcgatagacctggtgtgagcttctgctcacgcacaacttacaccgaaaacgctatcaccaatgcagtaggtatatataggaactccagcggcgcactgcatttcaatggcctcaaataatgactgtggggtcagagactttgacatggagagatataagcttgtccaactcttccgttatctatggcccgtcaatcatagttccctaagtcctgatggaaaactagtagcagtcgttggagatgacccagatggtctactggtagacacaagtaacggacaga

SEQ ID NO: 82745 - DNA, 2152 bp, Arabidopsis thaliana columbia
  unsure (1)..(2152): unsure at all n locations
agtaatttagttttttttttttttttttacaatttattttgttattagaagtggtagtggagtgaaaaaacaaatcctaagcagtcctaaccgatccccgaagctaaagattcttcaccttcccaaataaagcaaaacctagatccgacattgaaggaaaaaccttttagatccatctctgaaaaaaacccaaccatgaagagagatcatcatcatcatcatcaagataagaagactatgatgatgaatgaagaagacgacggtaacggcatggatgagcttctagctgttcttggttacaaggttaggtcatcggaaatggctgatgttgctcagaaactcgagcagcttgaagttatgatgtctaatgttcaagaagacgatctttctcaactcgctactgagactgttcactataatccggcggagctttacacgtggcttgattctatgctcaccgaccttaatcctccgtcgtctaacgccgagtacgatcttaaagctattcccggtgacgcgattctcaatcagttcgctatcgattcggcttcttcgtctaaccaaggcggcggaggagatacgtatactacaaacaagcggttgaaatgctcaaacggcgtcgtggaaaccaccacagcgacggctgagtcaactcggcatgttgtcctggttgactcgcaggagaacggtgtgcgtctcgttcacgcgcttttggcttgcgctgaagctgttcagaaggagaatctgactgtggcggaagctctggtgaagcaaatcggattcttagctgtttctcaaatcggagctatgagacaagtcgctacttacttcgccgaagctctcgcgcggcggatttaccgtctctctccgtcgcagagtccaatcgaccactctctctccgatactcttcagatgcacttctacgagacttgtccttatctcaagttcgctcacttcacggcgaatcaagcgattctcgaagcttttcaagggaagaaaagagttcatgtcattgatttctctatgagtcaaggtcttcaatggccggcgcttatgcaggctcttgcgcttcgacctggtggtcctcctgttttccggttaaccggaattggtccaccggcaccggataatttcgattatcttcatgaagttgggtgtaagctggctcatttagctgaggcgattcacgttgagtttgagtacagaggatttgtggctaacactttagctgatcttgatgcttcgatgcttgagcttagaccaagtgagattgaatctgttgcggttaactctgttttcgagcttcacaagctcttgggacgacctggtgcgatcgataaggttcttggtgtggtgaatcagattaaaccggagattttcactgtggttgagcaggaatcgaaccataatagtccgattttcttagatcggtttactgagtcgttgcattattactcgacgttgtttgactcgttggaaggtgtaccgagtggtcaagacaaggtcatgtcggaggtttacttgggtaaacagatctgcaacgttgtggcttgtgatggacctgaccgagttgagcgtcatgaaacgttgagtcagtggaggaaccggttcgggtctgctgggtttgcggctgcacatattggttcgaatgcgtttaagcaagcgagtatgcttttggctctgttcaacggcggtgagggttatcgggtggaggagagtgacggctgtctcatgttgggttggcacacacgaccgctcatagccacctcggcttggaaactctccaccaattagatggtggctcaatgaattgatctgttgaaccggttatgatgatagatttccgaccgaagccaaactaaatcctactgtttttccctttgtcacttgttaagatcttatctttcattatattaggtaattgaaaaattttaatctcgcctaaattactttttttttttgcatgtgacattggagggtaaattggataggcagaaatagaagtatgtgttaccaagtatgtgcaattggttgaaataaaatcatttttagtgtcacccttcattaaaaaaaaaaaaaaagnnnnnnnnnnnnnnnnnnnnnnnnnnnnnnnnnnnnnnnnnnnnnnnnnnnnnnnnnnnnnnnnnnnnnn

SEQ ID NO: 82746 - DNA, 525 bp, Arabidopsis thaliana columbia
atgatgatttaagtcttgcgatcaagaaaactcaaatcttaaaactttctggaaaaacaaaaatgtcaggaagaggaaaaggaggaaaagggttaggcaaaggaggagcaaagagacacagaaaggttctaagagacaacattcaaggaatcacaaagccagcgattcgtcgtcttgctcgtagaggaggtgtgaagagaatcagtggattgatctatgaagaaacgagaggtgtgttgaagatttttctggagaatgtgattagagatgctgttacttacactgagcatgcgaggaggaagacggtgactgctatggatgttgtttatgccttgaagagacaaggaagaactctatatggatttggtggttgatcaatttgagatctgggttttctggtgaatgatgatgatttaagtcttgcgatcaagaaattccagaaattgggttgaattttagggtttcgttttgtgttgtaattagggcagcattgtaatggattaatgataagtaccatttgctaat

SEQ ID NO: 82747 - DNA, 478 bp, Arabidopsis thaliana columbia
gaaacagagtttgattccgtgcacaaccgtcggagagaggaatctgttagccgacgcggcgaagattgtagataagaacaaatcggtgaaacgaaaagacgatatgaagaagatcgtcaatgaaggactcttatcacttaattacaattcttcaatctgcaaatcaaaatgggataaatctccttcgttcccagctggtgaatacgagtacatagatgtgataatcggagaagaaaggttaataatcgatgtagatttccgatcagagttcgatatagcgagacaaacgagtggttacaaggtgttgcttcaatctctaccgttccatttttcgtcggaaaatctgatccggttaagtcagaccgtgttttttgatatcggaggcgggcgtaacagagtttgtaggagaaaggattgccttttcccccgtggaggaaagctgagtacatgcgatctaaatggctctcttcttatacgc

SEQ ID NO: 82748 - DNA, 540 bp, Arabidopsis thaliana columbia
cgcctgcaggtaccggtccggaattcccgggttgacccacgcgtccgcggacgcgtgggttgtcatggaatttatacattccactcctcaaagtacttgaatatcttccacgggggagtccttcggaagcatgcttgatgaaaatatttgttgccactgtggaaacaatactcagtagaacttttccgcctgaatcttccagggaactaaccagaaaagctagatcgagttttaccacaagatcagcgaccaaaaatcttgctatgtctgagcttcgtgctatggtccatgctctctttttagaatcatgcgctggtgtggaattagcttcacgcctactttttgttgtgttgactgtatgtgttagccatgaagcacagtctagtggtagcaagagaccgagaagtgaatatgctagtactactgaaaatattgaggcgaatcaacctgtatctaacaatcaaactgctaaccgtaaaagtaggaatgtcaaaggacagggacctgtggcagcatttgattcatacgttcttgctgctg

SEQ ID NO: 82749 - DNA, 487 bp, Arabidopsis thaliana columbia
ataagatgtgtcgttacctgtttgttagatgtgacaatgagccagctccatggaccagtgatgagcatggcgatcgtccaagacctttgcctgatgttccagagctggagaatgctactgacctgtttgtgagaaaggagagtccatcatggggtttcgatgaagctgagggtcgttggaagtggatgaagtctccacctgttagcagaatggctttggatactgaggagaggaagaagaataagagagcaaaaaaaggaaataatgctatgaaggccagacttctgaaagaattcagttgccaaatctgtcggaaagtgctgagtcttccagtgacggcaccttgtgcacacaacttcttgcaaagcatgccttagaagcgaagtttgctggggtaacctcacctggggggcagaagcaattggcgtgcggtaaactacgtgcaaagaaaaacatcatgacctgcccttgctgcacaaccgatctc

SEQ ID NO: 82750 - DNA, 365 bp, Arabidopsis thaliana columbia
tcgccttcgcgtccgaaaaagaataacaatccgacgagaaagaggaaagatcaaatcatctaagtgctggtgccttgattctgcagttctccattttaatccaacaaaaaaagaagctgaatcgacggtatagattcttcaaagaagcaatcataacgcaattgattatatccccaaaagaaaaggtttttaaactccaaaaatgcagactccaaaatcaagtgattgtgattgtgtgtgataggccaggatcattggagctgccacaaaagaagtctcctttaccagctcccaaagttgttaggagactcaaaccaagcggagcagaatccgatccaaaaaccaagacaatatcgaaaactcaa

SEQ ID NO: 82751 - DNA, 571 bp, Arabidopsis thaliana columbia
  unsure (1)..(571): unsure at all n locations
cgnnnnnnnnnnnnnnnnnnnnnnnnnnnnnnnnnnnnnnnnnnnnnnnnnnnnnnnnnnnnnnnnnnnnnccacgcgtccgcttaaagattcagtcaaaaaaaactttaatctttgttttcctgcaaaaagcaaaagtgtttctgtaataaaacacctttttgcagagaatgttaaaagattctctagttttaggctttatgtaaaaacgatttttttgctgggtgttctgtttttggatctgtgtttcttttttgggaagatccacccaatgaaaccaaatctcacattacaaaatgacaagaaattgtctcttcttcccaataattccaaaactttgatttagtaaaaaataaaataaaataactgggtgacttaacaaccagaaagattatgtattcttcaaagaagcaatcataacgcaattgattatatccccaaaagaaaaggtttttaaactccaaaaatgcagactccaaaatcaaggccaggatcattggagctgccacaaaagaagtctcctttaccagctcccaaagttgttaggagactcaaaccaagcggagcagaa

SEQ ID NO: 82752 - DNA, 1031 bp, Arabidopsis thaliana columbia
tacggctgggaggggactactgaagggggaggaggaggacattggttgttgttgacgacgcgtttccgctcactaattttttttaacctttttgtgtctccgtcgtcttttgatcttcaatctcagttttgagctgaagattatcgtatcgacctgcgattctcttcagatcgataatccatggctgcagctggaaacaagagcattaacgccaaattggtgttgcttggagatgttggtgctggaaaatcaagtcttgtgttacggtttgtcaaagatcagtttgttgaattccaggaatcaaccattggtgctgcttttttctcacaaacgttagctgtgaacgatgccactgtgaagtttgagatttgggatacagcgggtcaggaacggtaccatagtttggctccaatgtactacagaggtgctgctgctgcaatcattgtttttgatgttacgaatcaggcttcgtttgagagggcaaagaaatgggttcaggaactgcaggcacaaggtaaccctaatatggtcatggcccttgctggaaacaaatctgatttattagatgcaaggaaggtgacagcagaggatgcacaaacatatgctcaggaaaacggccttttccttcatggaaacttcagcaaaaaccgctactaatgtcaaagagatattctatgaaatcgcaagaaggctaccgcgagtacagccaacagaaaacccaacaggaatggttctgccagacagggccatggatagggcagtgagctcatcttgttgtgcttagttatattgtgtaatggcacacacttctcttaaaaagagatcttttggtcactttaaagttatggacttctgtgtttgcgtctctttgctttgttttacgtatttgagatttgatctccactattttgtaaataaatctaatactcaactaagtaactaagtgcgtgagggggctatggatccatttgtcataaccctacgtacgcgtgcatgcgacgtaatagctgttcgatagttcacgcgttttt

SEQ ID NO: 82753 - DNA, 1064 bp, Arabidopsis thaliana columbia
agcggacgcgtgggttcttctctgtttttttgctttcgtcttcaagagagagagagagagagatacaaagagagaaatttggttgtttgttgacggaagcttcttcggtctctcttctccgtcttacgattgtcaacgcgtggttccatcttcaattttgtttctattttagcagaagtttctcgagcttcaaatactgtttcagatcaatcaatcagtcaatcatggctagctctggaaacaagaacatcaacgccaaattggtattactaggagatgttggagctggaaaatcaagtcttgtgctacggtttgtgaaagatcagtttgttgaatttcaggaatcaaccattggtgcagcttttttctctcaaacattggctgtgaatgatgcgactgtgaagtttgagatatgggatacagctggtcaggaacgataccacagtttggctccaatgtactacaggggtgcagctgctgctattattgtctttgacattactaatcaagcctcatttgagagggcgaagaaatgggttcaggaactgcaggcacaaggtaaccctaatatggtgatggctcttgctggaaacaaagctgatttattagacgcaaggaaggtgtctgcagaggaggcagagatatatgctcaagagaacagccttttctttatggaaacctcagcgaagaccgcaacaaatgtcaaagacatattctacgaaatagcgaaaaggctaccacgtgtacagccagctgaaaacccgacaggaatggttctcccaaacgggccaggggctacggcagtgagttcatcgtgttgtgcttagattcgtaccttaagagagatctcttttggttagtcacatagtagagaacatctggactttcatgtgtttgcttcttcttcgtctttgttactttactttgcttgcattgacaacaacaacagcgtatatcatgatgatacttctgcctttgtgaaatctgaagatatttgtatttggagagatttatatatatatatctcttttgtaattagaaaacataacttagtccgaaaaaaa

SEQ ID NO: 82754 - DNA, 551 bp, Arabidopsis thaliana columbia
agtgtttgcatgtttcagaaagaagataatgaagagatatcgaggtgaaaatttcagaaaagggattgaggaagaggacttggacttgcctatttttgacagaaaaacgatttctatagccactgatgatttttcatacgtgaacttcctaggaagaggaggttttggaccagtttataagggtaagttagaagatggacaagagattgcggtgaagaggttatccgcgaactcaggacaaggagtggaagaattcaagaacgaagtaaaactaatcgcaaaacttcaacatcgtaacctcgtgaggcttttaggttgttgtattcaaggtgaagaatgctatgttgatctatgagtatatgcctaacaaaagtttagacttctttatatttgatgaaaggagaagtacagaattggattggaagaagagaatgaacattatcaatggagtggctcgtgggattctctatcttcatcaagattcaagattgagaatcatacatagagatttaaaagctggaaatgttttactagataatgatatgaaccct

SEQ ID NO: 82755 - DNA, 505 bp, Arabidopsis thaliana columbia
  unsure (1)..(505): unsure at all n locations
gtacacctgcgttcactgtgatttctaaggttccaaccgttatccttgggatggatgtttcacatggatctcctggacagtctgatgtcccgtccatcgctgctgtggtgagttctagggagtggccactgatatccaaatatagagcatctgttcggacacagccttctaaggctgagatgattgagtcccttgtcaagaaaaatggaactgaagacgatggcattatcaaggagttgctggtagatttctacaccagctcgaataagagaaaaccagagcatatcataattttcagggatggtgtgagtgaatctcaattcaatcaggttctgaatattgaacttgatcagatcatcgaggcttgcaagctcttagacgcaaattgggacccaaagttcctttctgttggtggtcaaaaggatcatcatacccaagtttttcnagcnaacgtttcctgaaaaatttccnncngggccaacnattnnccacaaaattttncacc

SEQ ID NO: 82756 - DNA, 570 bp, Arabidopsis thaliana columbia
  unsure (1)..(570): unsure at all n locations
ggccgccctttttttttttttttttttaacttcctgaacttatatattcactacaataagtctttaattaaacaaccgaattgttaagggggacaaaagaatattcaaaccccaacaggcaaacaaggctggcgataatagtcacaaaaaacattccaagccttagtgtcgatgcctggcttaaaagccgagagagatcctaagctgaaagtcagatagcctattgaactactacttacttactgagccaagtagggccgctcatttaacagaagaacatggagttggcgacgttgtctttgagtcttgggagctgtgcaacagagaattggtcctggagctgtgataccaccatggcttgatgatggcccagactgatcttcaaacttcatgaacgtcccaagctgagcagctgccaagtggngcatagcagatcggcgcaacaacagaaatngcnctggngctcctttngnacacataggngaccgantggncaagtcctgaagtcgcagctgaaaccatcnntcataaggcgggtattanttggngggagtccacnatcccnggngg

SEQ ID NO: 82757 - DNA, 529 bp, Arabidopsis thaliana columbia
  unsure (1)..(529): unsure at all n locations
cattcatctcgaacgagattggtctcaaagagccctgggttgactgagcgaccatcgccttcttcatccttgtctttattttctacattaggcattcaattcattcattatatatacttctctctaatttcttaatcatctcttcttatagtttttaccctaaagaaaatggcaaccgtcgatgtcatcaacggtgattcaatctcaactcttcattctgacataatccaaacccaaatcttgacccgactcgatggtccgacgctagcctccaccgcaacaacctcttcttacctccaaactctatgcacggaagaggaactctggcaagaactctccatcgacacgtggccttcgatcaatgatccacgtgttgtcaagcaactcctctttnccttccgggtaacggcctccttgctgancgaaccgtcactganaacgggnagctgaaaaatgtcaccgcgggtaatccagcgtggttaacaaggggggtnaaccgaggcaggtgganggaaggaacaggtggctt

SEQ ID NO: 82758 - DNA, 581 bp, Arabidopsis thaliana columbia
cattcaccttgaagaaaattagccccaaagtgctccttttgcctgatcaaccatcgccttcttgggggttttctttattttctacattagccatttaattcattcattatatatacttctctctaatttcttaatcatctcttcttatagtttttaccctaaagaaaatggcaaccgtcgatgtcatcaacggtgattcaatctcaactcttcattctgacataatccaaacccaattcttgacccgactcgatggtccgacgctagcctccaccgcaacaacctcttcttacctccaaactctatgcacggaagagaaactctggcaagaactctccatcgacacgtggccttcgatcaatgatccacgtgttgtccaagctatctcctctttcccttccggttaccgttctttctttgctgactcgtacccgttcactgaacacacgtggcagtctgaaaaacatgatccaccgccgggattaatctcagccgttcatttatactacagaggagagattatatactcgtaggtacaagagatggaaacagagaaaggtaaatcaggatggttcttgtca

SEQ ID NO: 82759 - DNA, 323 bp, Arabidopsis thaliana columbia
atttcttctatagatttcttactcagaaaacttgaagcaaaagttaattaaaaacctaaaaaaaattagaagaaggaaaaaagatgaaacgatttttaggtttttaattaacttttgcttcaagttttcttctatagatttcttactcagaaaagtttcgaattcgaccctgtagcttagttgttgtttataatttcttgtgatcattcacagtacaaaaaaactaattcacccatcgacttcttcttcatcgtcgcttctctgtggcccatccttaaacccacactgcttttgcttttcctttttttttccgggaaatttga

SEQ ID NO: 82760 - DNA, 449 bp, Arabidopsis thaliana columbia
actctttctctctctcttcatcttcaacaaatcacgcaccatcataatcatcatcatcttcatcgtcatcaccaacttcttcatcatcaccatcaatggaattccccaaaccaaaccacccttcaccctaaaaatcgtttcatcttttttccttcttctaattttttttaggtttttaattaacttttgcttcaagttttcttctatagatttcttactcagaaaagtttcgaattcgaccctgtagcttagttgttgtttataatttcttgtgatcattcacagtacaaaaaaactaattcacccaccgacttcttcttcttcttctcttctctgtggcccatccttaaacccacactgcttttgcttttcctttttttttccgggaaatttgatctctttacctttcgtcattattagtagggaatgatcttttagttttttttttg

SEQ ID NO: 82761 - DNA, 546 bp, Arabidopsis thaliana columbia
  unsure (1)..(546): unsure at all n locations
nnnnnnnnnnnnnnnnnnnnnnnnnnnnnnnnnnnnnnnnnnnnnnnnnnnnnnnnnnnnnnnnnnnnnnnnnnnnnnnnnnnccacgcgtccgcctaaaccctagctgagtagcttcttcctccccaattgctatttctctgcctccgtgtgctgagaaccagaacgaaaccctagcaaaatatcgccatgggtaaggtcaaaggaaagcatcgtttggataagtactatcgtctcgctaaggaacgtggattccgttctcgagcttcctacaagcttcttcagctcgacgccaagtactctcttctccactcagctcatgccgttctcgatctctgcgccgcccctggtggttggatgcaagtcgccgtcgagaaagttcccgtcggcagcctcgttctcggtatcgatcttgtcccgattctccctgttcgtggctgtgttactatgacgcaagatatcacaaggactgagtgtaaatcgaagatcaagcaagtgatggagcagcatggtgttagtgcttttaatttggttctgcacgatggg

SEQ ID NO: 82762 - DNA, 544 bp, Arabidopsis thaliana columbia
tcaaggttgtacaaatatgcctccatgggttttactgttcttggtgtgttcctaattacgaagcatgtcattgactctgttctagagagaagacggcggagacagttacaaaaaagagtgcttgacgcagcagcaaagagagctgagctagatagtgaaggttcaaacgggacacgtgagagcatttcagattctaccaagaaagaagacgctgttcctgatctctgtgtgatatgcctagagcaggagtacaacgctgtgtttgtcccgtgtggtcatatgtgctgctgcaccgcatgctcctcccacttgaccagctgtccactttgtcggagacgaatagatctggcggttaagacatatcgtcactgaacaacaactcaggcctcagaaacattctctacttgagtcttgtctgtaaataccgcaaaatcaaaacattacacagtttagcgttcgatattccctttggtttgatttcgacaacaaaacattttgaattatatagaaacataaggtgtttactcgatttgcaaaaaaaaaa

SEQ ID NO: 82763 - DNA, 356 bp, Arabidopsis thaliana columbia
gtatgggaaggagcatttaatctcgactcaattgctctacgagctctctccttgtttcaaactcggtttcgaggccgcgaatctcgccattctcgacgccgccgataacaacgacggtggaatgatgataccgcacgttatcgatttcgatatcggagaaggtggacaatacgttaaccttctccgtacattatccacgcgccggaatggtaaaagtcagagtcagaattctccggtggttaagatcacccgccgtggcgaacaacgtttacgggatgtttagtcggatgacgggtggagaagagaggtttaaaagcccgcgcgggtttgttgtgccagccccgtcagcgactccg

SEQ ID NO: 82764 - DNA, 483 bp, Arabidopsis thaliana columbia
tctcactcaatggcattaactcaaacccagccatgctcatccgcattcgccatttcccgaacacctcgcaccgctctatacgatcgattccttcgcacgccaccgcgtttactagcttccggccaaattccttcctcaacttttggcacgggtcggaattccgtactaggaaccgtagactcgaccgactcaagcaacgcaccgtaacacgcgcatgactcactcactctccctaaaaacggcgccgtattcgaattcatttcttgctccactagagtaaccacgcgcggtttaagtcccttcacgcgccggagaagttcgtcttggattctccgtgcatacgctttcgtcgggaacacgataaagcttgaaagctaagttcacagccaaagtctcgtcgggatcacacccgagagattcacgattcagatcaccgagtcgtaaactcgtcaccacgttgaaacttacggagataccgagtcg

SEQ ID NO: 82765 - DNA, 575 bp, Arabidopsis thaliana columbia
  unsure (1)..(575): unsure at all n locations
attaaagaacccaatcactctttcttttattattagaaaaacataaaagtcttttttttttctttgttacataagattcctacacttttcgaaatggaaaatcacaatgataataatatcagaataatctcgaaaattaataataatatggtaataataagaagaaaaaaaaagagtgtgtgaagttaacgccaagcggatgcgacagtgagtgcccgtcccatccaaccaaagcacacacctccgttatcttctttaacggtaaagcccgggtggactcggtttccacgactcttcatcgactccgctatcttctcactcaatggcattaactcaaacccagccatgctcatccgcattcgccatttcccgaacacctcgcaccgctctatacgatcgattccttcggacgccaccgngttttacgaggcttccgggcaattccttcctcaactttggaacgggcggattcgttcttgggaccgtaggctcggcccgcttgacgaccggaccgtacaggggnatgttttnttaatttcccttaaaagggggcgnttttgggttnatttttnana

SEQ ID NO: 82766 - DNA, 600 bp, Arabidopsis thaliana columbia
  unsure (1)..(600): unsure at all n locations
ttttgaacgaaatagaaattgttgtagttttctataaatnattttttaataatctccaaatagagcaacgtatccacttatatatataaccttatctctttttttattggagaaaaaaaaagtacactgtgataatttgaactcatatatatacacactagttgtgtgtgcttgtcttaagaaaaaacaatgggttcaatggcagaaatcggttttgatgttatgcggagagttcatggaagcctacgagactatagtacctctctacgtcctccaagcgtttggtgttagcgtccactgcgtttctcctggtcgcaaaactggcgacaagtgcgtcatggccgctcacgatctccttggcctcgagatatacaccgaactggtggttgaccatctaacactaaacgctaacttcgatggcgtcatccccgaccaatacgacgccatcatcattcccggtggacgtttcacggaacttttgagcgccgacgagaaatgcgtgagtcttgttgctagattcgccgaactcaaggagctcatcttcacgagctgccacagncagctgtttcttncggcggcaggtcttttcaccggtggaat

SEQ ID NO: 82767 - DNA, 778 bp, Arabidopsis thaliana columbia
  unsure (1)..(778): unsure at all n locations
cgagctcactagtgagctctnctancngacgatccgggaatgagaggtcttggtcttggagcctttacactagactggaccgcggttgcctctttcttgttcagtccacttatcagccccttctttgccatcgcaaatgttttcatcggttatgttcttttgatctacctcgtgttgcctttagcctattggggatttgattcttataacgcaacgaggttccctatattttcgtcgcatcttttcacatcggttggtaatacatatgatattcctgcgatcgtgaatgataactttgagctcgatttagctaagtatgagcaacaaggaaggattaacttgagcatgttctttgctcttacctatgggcttggtttcgccaccattgcttctacgctcactcatgtagctctcttctatggcaaggaaatttctgagaggtttcgagtttcatacaaaggcaaggaagatataccacactaggttaatgaagagatataaagacataccttcatggtggttttacctcaatgttggctgcgacactacttatctctcttgcattatgtgttttcttgaacgatgaggttcaattgccttgtgtgggggcttgtgttcgcaagcccgatggctttcgtcttcacactcccgataagcatcataaccgcaacaactaaccaaacaccgggattgaatataataacagagtacgcaatgggactcatttacccgggacgacctatcgcaaacgtatgctttaaagtctatggatacatga

SEQ ID NO: 82768 - DNA, 542 bp, Arabidopsis thaliana columbia
  unsure (1)..(542): unsure at all n locations
gatttttttttgaaattcttaattagttacttggtgtatcatacattgttgaaacacaccaatggatcctttaagattatttaaccggacaaccatcaacaattactcctctagcggttggacatttagctagatcacaatgttcacctcttgttccccaccagtccaaactcttttcctccatccccaccgagaagtacaacaaaaccgccatgaaagctacaccggcatccatagcggctgagagaacgtagttatacctctgccaccaacttttcctgtaccggaacacaaacaagttgaatatcgtccccaccaatatccacgagttgtagttcaccgcggtcgcaggtggcatcattgcgggttgctccctagaagaacagggggatttacaaggtggnatccaagaacgttttggggacgctttgtggcatggccacacttctgcttggnctaatgacctccggggaaaaccggtcactggccgaataggttcctggggccaaatcccggttggccgcaaacccaatggncggtgt

SEQ ID NO: 82769 - DNA, 350 bp, Arabidopsis thaliana columbia
ggaagaactcgtggccggagcttacgggaacaaatggtgactatgcggccgtggtgatagagagagagaaccccaccgtcaatgctgccgtgattttggatgggagtccggtgaccgcagacttcaggtgcgaccgggtcagagtttttgttgatggaaaccgtatcgtcgtcaaaacccccaaatccggctagacttgtataatttctatattcataatgaaaaagctatagacgagtcgtggttggttagtaatcaatcatgtaaaataataatcgtttgccttcataatttctgtgttactgatgcctaaagttatgaatgaaaatagtatcctatatttcaaaaaa

SEQ ID NO: 82770 - DNA, 410 bp, Arabidopsis thaliana columbia
acgccgtgccggaccattaacgctaatgctatcgccgcaccgtcgccttcgggattgatctttaacgggtttcgtgatttcgtcccgattgaaaagaggcttgttatatcaagctttcgtggcttgaaactaccgtcgaggacgacgaagactattacgagctctgactggagttggagttataggtctccgggaagattggcgtctgcgtctacgtctacgtctgcgtctacgtctacgtctgcggctgtaacatcgaattctacgaatagatttgaagctttagaagaggggattgagaaggtcatttatagttgtcgatttatgacgtttcttggaacattaggatctttgctcggatcggttctctgtttcatcaagggatgtatgtatgttgtagactcgttttt

SEQ ID NO: 82771 - DNA, 569 bp, Arabidopsis thaliana columbia
  unsure (1)..(569): unsure at all n locations
caaaatcaaagtcagagagaaacaatattttttgaacaaaaagagaagatggagcgttgctaaaacattatacacatacaaagtttcttttgttttgggacaacaccattaactcctcagtgtgaaccattgagcctagagagcatgaagagacaagcagaagaaaaaaagatagaaacagagatacatagcaaatccgtgacagaagttatgactactctcttgctcttgtcaaacaaaccaatcaatagtagcatcactattacatgtcccaactttgttttcagctcgcttaccgatttcacctctaaccattgaggtcgctcctttaaggtgaacatgccaaagaggctcgacctattggaaacaatatcgtgtgtgcgcgactctgaagtatcgagattgctgatggacaactcgtaaagncccatcccaaggctaacatcacagtcctaggggtatatatctatgggctcaccaaagggttcnctttccncggtcncgganctgnaaacgggctaaantactaancctggtgacaggaccgtccgggaaagnctatgtccaga

SEQ ID NO: 82772 - DNA, 1378 bp, Arabidopsis thaliana columbia
cttttgttggttccttgtcggtttccaagggtttttgtttagggttttcattttctttttccttatctatctaatcctctgtttctctccacatcaaaaaaaacctcaaaattaagagacgaattcgagataatgggttcgcttaaggaaggtcaaggaagagacatggaagaaggtgaatcagaagagccgcttttgatggctcagaaccagagattcactatgttccccattaggtacaaatctatttgggagatgtataagaaggctgaagccagtttctggactgctgaagaggttgatctttccactgatgtgcaacagtgggaggccttgacggattcagagaaacactttatcagccatattctggcgtttttcgcagcgtcagatggtattgttttggagaatttggctagattcttgaatgatgtccaagttccagaggctcgtgctttctatgggtttcaaatagccatggagaacattcattcagagatgtacagcttacttctggagacattcataaaggactcgaaggagaaggatagattgttcaatgctatcgagaccattccttgtatatccaagaaggcaaaatggtgtttagattggattcaaagtcctatgtcgtttgctgtgaggctggtcgcttttgcatgtgctgaaggaatcttcttctcaggaagcttctgtgccatcttctggctaaagaagaggggtcttatgccgggtttgaccttctcaaacgagcttatatcgagagacgaggggctccactgtgactttgcgtgtctcttgatcagtttgctgcagttgcacgttccattggagaaagtttatcaaattgttcacgaggcagtggaaattgagacagagtttgtctgcaaggctcttccatgtgatctgatcggaatgaactcaaacctcatgagtcaatacatacaatttgtcgctgaccgtcttctggttaccttgggatgtgaaaggacatacaaagcagaaaatccatttgactggatggagttcatatctctgcaaggaaagacaaacttctttgagaagagagtgggagagtatcagaaggcatcagttatgtcgaacctccaaaatggaaatcagaactacgaattcacgactgaagaggacttttgaatgaatccgccatcgaatctggaagggctcatcaaagtttagattctttatgagtcactctcattctttttagcccaaatccattagtagtagtctagtaagactagtagtagtagcaatggatgttatttgtgttctctatttcaccatcacttgtcccttctccattgtgtaataatattactatcttagttaatcaaatctataaaaaaaaaaaaaaaaa

SEQ ID NO: 82773 - DNA, 548 bp, Arabidopsis thaliana columbia
  unsure (1)..(548): unsure at all n locations
gtctttctcaaaactaaaattactttaattcccatctttatctagtccaaactcatgatgtgacaattctgatcatacatataacaacttaaggagacatgtaatatatattatacccttttctgatcacaattcgtccttcgagtcactttggctactctttgtcgtgctatcgggtgattctttggtctcggtagtttctacttttggtgtggactctgcagttttaggtgattcggttgatgcaggtttctccagtttgaatgggatcgttgcgtgtttccttaagaacttgtaaaatgcaaccacagtgcggtctgtatctacagtaatcggctctgaagtcttgttgcccgcagggaagaagagaatggtagggaaccctcagcctttgccttgggatgtcatgggtggtccanccaccttggtangacgggngaancaaactccgaaangcctgnaagttgntaaaatggccaagggtngaatgccacangggngaaccccggagaannttaaacgcngaaaatcccaaggacccacccnat

SEQ ID NO: 82774 - DNA, 381 bp, Arabidopsis thaliana columbia
cggacccatgcgcccagagctttattcttgccctagagataccgagcgggagattccagattgagagcagcttcgagtctctctctcctcgccgttccttttcgcttcttcaagtttcgttgccagagagattctaggtattgaagttatagaatggactttgatgagtatgagtacttagagaagacagttgaaaatcctcacctggagaatgaagttggtaatggtggtggtgatgagaaagtcaaatctgaagggaaagagaggagtaggagctcaaggcataggggtgacaagaagaaggagagggatgaagatgaggatggtcggcgttctaagcggtcgagatcgcatcaccgttcacgttctagggacagagag

SEQ ID NO: 82775 - DNA, 568 bp, Arabidopsis thaliana columbia
ggaagagccaaggaagctgagaggccacaaatctactgccacttgttgtatagcttctcgtgaccggcctggaattgttctcacttccggcgaggatggttgcatttgctggtttgatttgcgatgtaaagatgttcaattcatcatcgatgttggaacagaaccagtttcatctctttgtttcaagacaggtaatgagaacattctctatgcttcttgtggaaacgaaatcaagtctttcgatgttcatacgctaagtgctacttcttggaagccattagagagttacaattacaacaaagatgaagttaaccaggtagtatgtaacggaaggtcgtcttttcttgcttctgcagatgattccggcgatgttaagatcatcgaccttggtcagaaatgcctttataaaacccttagagctggtcacacaagtgtatccttacttcgttttttttacccattctcgtctatgaaactctactagcctcgaaaaaatgtctcaaatcaacaccttaatgagacatataagatatgtagttctgtacaattcattccatggagaccttgg

SEQ ID NO: 82776 - DNA, 504 bp, Arabidopsis thaliana columbia
ggccgcccttttttttttttttttttttttaattaaatgtttcattctttataacttggtttatcaaacaaaaaaataaactaacttgtagatcaagcaaccattctaatgtcaaaaataaaaatgaatctcttagactaataacaatgtcaaaaaggatgaagcttttagactatttttatggacccatcaggcctatttaagagattgagtaaaccttaactactcttgttgtgtcacacactacaagattctcagaatcagattgattcgtgcaaagccaattcaccttcttgcttaggttaatattcaaatggaggagatcactgttattggttggttgttgtttggatcaagacatttaaagcaatcccagattttgactgttttatcattaccaccagagattaaggaatccacccttctcccggaaccggggaaaaggctccccaggaaacagcagaattgtgtccaccaacagagtagtctaaacaaacccttttg

SEQ ID NO: 82777 - DNA, 523 bp, Arabidopsis thaliana columbia
aaaagcgtcactaggaagctgcgactatttgactgactctgaccgcacgcgactccttgtgagattctccgattgcttcgcctgagtttctgggttaactctccacgccgtcactttgatctttgcttttccgatctttagggtttttgtttagggaattgtcgaagactctgctctaacatgtctggaagaaaagaaacggttttagatttggccaagtttgtagataagggtgtgcaagttaagctcactggtggtagacaagtgactggaactcttaaaggctatgaccaattgcttaatcttgttcttgatgaagcagtcgagttcgttcgagatcatgatgatcctttgaagactacggatcagacaagacgccttggtttgattgtttgccgtggaacagcggtgatgcttgtctcaccaaccgatggcaccgaagaaatcgctaacccgttcgttactgcagaggctgtctaaagactttcttttaaagaatatgtctctctattagtttaacttg

SEQ ID NO: 82778 - DNA, 361 bp, Arabidopsis thaliana columbia
ccggtagctctgaagtgagggaaggtattgaagagaagactctgcttaacaggttgggaacaacgggagacatggctgctgcggctgctttcttagcatcagatgattcttcttacatcactggagaaactttggttgtcgctggaggaatgccttcaagactctaaacaatttcacatcaataatagcgtaaagaatgcaatcagggtatcaagtaagtagagatgttttttttagagttttcaactaaacaagactttaagaaacgaaagatgttccaataatatcacgaggccattggatacttgttggtcttgtaaaagataatttcttcatcagcaaaaaaaaaaataaaaacggg

SEQ ID NO: 82779 - DNA, 510 bp, Arabidopsis thaliana columbia
agcacctgcacctgggaagaaagcggctctgtcttgttcgcagtcacttcctcgtggaatggaatgtattgatccactaaaattagggatcatagacaataagacattgagattaatcactgagtcgtcaggcagcccatcaaaagctgagaaagtggataatactcttcgcgaaaaattggtttacttctctgatcattccgatccgaagctgtttctttcccgtattcaccaagacacgactgcagcacatttggaggctggtgcccttggcttgaaaagtgactcaaagggtcggaatctgcaaaggaaacaattggcgaaggacaattgtgactgcttcgtctcatgtaaaacaacaattgatgatattgagtcaaaactgatgcggattgaagaagaccccgaaggttcaggaactactcattagtttaattgtatgaaaagtgtgacatcgagggccaatcttgcatttgagccactttttgagagacaggctcaagctgagaa

SEQ ID NO: 82780 - DNA, 644 bp, Arabidopsis thaliana columbia
  unsure (1)..(644): unsure at all n locations
nnnnnnnnnnnnnnnnnnnnnnnnnnnnnnnnnnnnnnnaagaaaagcataataataaatagaaagaaaaaaatcaacgatggacaagcaacgttatctttacaaacattttcttcacagtttcgttttcgttcagatccaataaacagccgaatccaaatttgatatcctcaagagatcatccaattacaaataacaataataatagtaataagaatattaaaaaaaaaagatcaggaaaagcttttgcttgttgttaacttcaacatcctgcaaacacatttccctgatgaacccaaacacatctattttcctcctcctttgattgtttgattgattgctctgcaaataacaaagcttcttcacatcaccatttgtttttttccccattattactctttcactacccttttcttcttttctttctttcaatcggacaaacacatacagaccaacaaactcccagtctcttctattccttggctttgnctgtctaacctcttctttagccatctatgcacatcaatcattcattgtatttatcagaacaagatcatacattgtcgcagaaagtgagcaaatataactggaattgattgagatcataagagggtaaaacctggcaaaagatctggttccaaatc

SEQ ID NO: 82781 - DNA, 420 bp, Arabidopsis thaliana columbia
tcgttgaactccttggtggcatggagcaactgctgataggttaatgatgatccaagactcccaaagtttatagagactcctcctcttgagggaagtgtttcatcaggaggtaatgggccaacaccgttgtgtcttcctctaggatgattacttgttgatgatctgtttcttcgacggacacagaaactcactgttattggtaacactatgagaatgagcataagcaatatagaccctccaactgcagcaagtataactattttcgtgtggcttaaccaggaagttttagaactcttcttctcttcatgttgtccgaaattgttgaaagttaagcccttttttgaataaaacaaagtgcaatccgacaacttccgctgcttctctgggccctgaagacaattgttgctcaatgaagctctg

SEQ ID NO: 82782 - DNA, 548 bp, Arabidopsis thaliana columbia
cgctgtgattgtcaagagtttgaacacacaaagaagaaagaagttctcaacatttcaagcaagaagaaagagagaagagtgaaggtccaataatagagagaacaaaaaaaagagagcttaattgtcagtttattctctgcaaacgtgcggcctaagtaacacatgtcgaattatggagtgaaagaactcacatgggaaaatgggcaattaacagttcatggtctaggcgaagaagtcgaaccaaccatctctaataaccctatttggacacaaagtctcaccgggtgtgagactttggagtctgtggttcatcaagcggctctacagcagccaagcaagcttcacctgcagagtccgaattggtcccaaccacaattatgagagcaaggacggatcttgttcaagaaaacgcggttatcctcaagaaatggaccgatggttcgctgttcaagaagagagccatagagttggccacagcgtcactgcaagtgcgagtggtaccaatatgtcttgggcgtcttttgaatcccggtcggagcttgaagaca

SEQ ID NO: 82783 - DNA, 574 bp, Arabidopsis thaliana columbia
  unsure (1)..(574): unsure at all n locations
ttccctccaaatttttaancaatgcntanccgtnattcntcgngganaaggnaccggtagagttcttatggtggatgttggagggagtcccccatgtgcaatactcgcaggtaaccccgttgttcaagctcagaccaacggatgggcaggaatcgttgtgaacggatgcatcagagacgtcgatgagatcaacggttgtgatatcggagtgagagctttggcctctcatccgataaaagcgagtaagaaaggacttggagaacaacgagttccggtaaatatcgcagggactcggatttgtgatggtgaatggctttatgcagatactgatgggattcttgtctcccaaattgagttatccgtttaataaaaaaggctttgatcagttaccaaaaaaaaaaacagaacgtggtttgtgttcatcttcttgttacttaagagattgttgaattataatggaaaataaatttttgttttgaatcaaaaaaaaaaaaccaaagggcggccgctctagaggatccaagcttacgtacgcgtgcatgcgacgtcatagactctcntatagttgcaccta

SEQ ID NO: 82784 - DNA, 703 bp, Arabidopsis thaliana columbia
  unsure (1)..(703): unsure at all n locations
acgtcaagcaagtgttagcttttgatctttcttatattcttctctgaaatagtaacacactgtgaagagtttttcctacatctgaattttgtctgatccaggtaacaaaacttgatctgatcccttccatagaaatattttcaaaagttttgtcctttttcttctgggtttgtttgattctccatgaaatagaaaacagattcggtgatcatactcaagctatatcgaaaatctgaaaatctgattattttcattatgtgtttgatcatatcatatcatcatgatctcagattacttttgattgattcagtcgcaagtctcatgttttgatcatagctgagaacaggaaaaagaagaaaatggcgtttgtgacaactgcggaagtttgtgacgcgaatcaagagctgattcggagtggtcagctacgagctttgcaacccattttccagatttatggccgtcgacaaatattctcaggaccagttgtcactgtcaaagtttttgaagacaatggcttaatccgtcaattcatcgaggagaaaggaaacggtagagttcttgtggtggatggtggagggagtcaccgttgtgcaatactcgggggtaaccccgtgttcaagctcagacaccggatggcagaatcgttttaccggttcattaagcgcggttgtnacggtttattncggttggntttnctnaccgc

SEQ ID NO: 82785 - DNA, 1040 bp, Arabidopsis thaliana columbia
ctctatacgactcactatatggaagctggtacgcctgcaggtaccggtcccggaattccggggtcgaccacgcgtgcgcccacgcgtccgcacgcacaacaaaaagcaagaatatataccactttgtgaacttcagagatcctatagcaatggcgaacctaccgattcttttggattactggccaagtatgttcgggatgagggctagagttgcgttgcgagagaaaggtgttgagtttgaatacagagaggaagatttctcgaacaagagccctttactcctccagagtaatcccattcacaagaaaatcccggttctggtccacaacggtaaaccggtatgtgaatctcttaacgttgtccagtacgtcgacgaggcttggcccgagaagaacccgttcttcccttccgatccttacgggagagctcaggctcgattctgggctgatttcgtggacaagaagttcaccgacgcccaattcaaggtatgggggaagaaaggtgaggaacaagaagcaggcaagaaggaatttattgaggcagtgaagattccttgaatctgagctaggagataaaccttactttggtggagatagctttgggtatgtagacatttccttgattacattctcgagttggttccaagcctatgagaagtttggtaactttagcatcgagtcagagagtccgaaactgatcgcttgggcaaagcggtgcatggagaaagagagtgtgtctaagtctctccctgactctgagaagattgttgcatatgctgctgagtataggaagaacaatctctgatttgaataatcttgttgttctcttgttgctaagctgtgttctgtttttgtctttgtttttttttttcccctaataatgcgagagagccttagtgaatgtgtgttgtggtttttatgcatcctaagtatggaatttaaataaaatttgtttcgaaaaaaaaaaaacaaagggcggccgctctagaggatccaagcttacgtacgcgtgcatgcgacgtcataactttttctatagtg

SEQ ID NO: 82786 - DNA, 726 bp, Arabidopsis thaliana columbia
  unsure (1)..(726): unsure at all n locations
ccgcagtccggttcgattccgccgcccacgcgtcgtagccataccaagcaaactggtcgtgacgtgcgtttgtttacatgtcttactgtctctcaattcttgtcactgtcacatcatgacatcgggactctgtattgatgcggcacaacactatcttccgacccttttcatatctgattatcctccttatggccgtgatttcgctaaccacaaagccaccggtcgtttctgcaacggcaaattagccactgatataactgctgagactttaggcttcactaagtacccaccagcttatctaagtcctgaagcttctggtaagaatcttctcattggtgctaatttcgcttctgcagcttcaggttatgatgacaaagctgctcttctcaatcacgcgatcccgttgtatcagcaagtagagtatttcaaggaatacaagagcaagctaataaaaattgcaggaagcaaaaaaagctgattcgntcataaagggngcaatcttgtctcttaaggtgcaagggaagcagttntttttntttcaaaaacctacttatngtgaaanccccctggttttnccaaaaggtttncacctgtttgatggaatnccggggtctttncccttnatcgggtaaacttcctnttcnattttttccaagcaaagggtttttcnggtttggggccaaggaaggnccggnttggccaatttttgccnccaannangggtgg

SEQ ID NO: 82787 - DNA, 975 bp, Arabidopsis thaliana columbia
  unsure (1)..(975): unsure at all n locations
aaaaatggttggagaaatattgaataagagagagagagagagagagagagagagagatagagtttcagagttgacacaacattgaagtaaactaaactcctaacctctttatctatgtgtatatataaaactcaaaagtacatataatcttcaccattcacacatagtcacataccaaagcaaaaacatggatcgttgcacgtcgtcgtttttgcttctcacattggtctctaccttgtccattctccaaatctcctttgctcaacttgttccagcaatcatgacattcggtgactctgtagttgatgtcggcaacaacaactatcttccgacccttttcagagctgattatcctccttatggccgtgatttcgctaaccacaaagccaccggtcgtttctgcaacggcaaattagccactgatataactgctgagactttaggcttcactaagtacccaccagcttatctaagtcctgaagcttctggtaagaatcttctcattggtgctaatttcgcttctgcagcttcaggttatgatgacaaagctgctcttctcaatcacgcgatcccgttgtatcagcaagtagagtatttcaaggaatacaagaggaagcttataaaaattgcaggaagcaaaaaaggctgattcggtcataaagggggcaatctgtctcttaggtccaggaggcggtgattttcttcaaaactactatgtgaatccncctgctttacaaaggtttacactgttgatgcatacgggttctttccttatcggtaacttcctctaccatttttcaagcaagtgatgcggttgggggcaaggaaggccggtgtgccatctctgcctccaacaggntgnttcccgtgnagancccttttnggttccntgaaaagnntgttttcaagctaccnaggtgccaaacttncagnggtaacggtntgttaaggttagggaattcccgccttaaggtt

SEQ ID NO: 82788 - DNA, 961 bp, Arabidopsis thaliana columbia
cttcaatctctcgtcgtcatttcttcgtctcaccgttgaatctgaaaatgatcgccggagtattgccccgatcttcactcccgtcgaggcagactctctccgccgcgttagcctccttcaattcgtgtatttcgcacaatctcactccagccaccaccggagcttccgtcagctctcgattcactctcgcgtcgtctcctaactcttttggcatcagagcgaggaacatccacattagatctgagccgtcgatgattgttcccgcaggaatcgcgtcacaaggttacgccactgtcacaaaggatcgcaaaaacgagattaagaaagctaagattaaaatttctccagacaatgtcagaccattgagtaggaaggagatcgctctccagaaagaggcagcagaagaaagcacatcaaagataaaaggaacaaagatttgtatagcgattcggtcttttgttaacccggaaaagcaagcttggtgtcttcctcctcacactcgtaaagtcgcaatgcccgatacacgaactctgtacacggtgctaagatcgcctcacgtcgataagaagtctagagaacagtttgagatgaggttcaagaaacggtttcttgtcatcaaagctcagagtcatgagttgagcaagaagctgttttggttaaaacgttatcgtattcttggagctcaatatgaactccagttccattgcaagacccgtttggatatgactcaagtgttaggcaacatcaatggctccaccaccaatgcttactgagatggctaaagacatcattttgtagaagtttcaagacccaaccgggtactatgcaataatttcgaacttacggatccatgaaaccagctttgcttcacatcagatcaagtagttattttcttgcttagtataaacatgtgtttttggacgattttgaaagatacaattgagtttcagttaaaaaaaaa

SEQ ID NO: 82789 - DNA, 537 bp, Arabidopsis thaliana columbia
  unsure (1)..(537): unsure at all n locations
agacgagcactgacagacagtgcatatgcgtatggcgggccagctaaggagcagctgctcctccgcttctctttctcagcgtctcgccgtcccgaagggcatgtctccggtgctcctttcggtgcttctccgaccaaaagagtctctgccttcactgtccgagctgttaaatccgacaagacaacattccaagtagttcaaccaagcaacggtgatccattcatcggaagtttggaaactccggtgacatcaaagcccattgatcgcgttggtaccttttccaacctccctggatacggtaacggncgtcaaccctctcctccgcggtgtggaaattggcctggnccatggtttcttcttaattgggccattcntccaaactnggccatttaagaaantgntttacncnggtcanccgggtntttaaccccggtgggtggtatctccccacatntnctccccantnggtttttctttcaggaagaaaacatccatcccccaatttnatttaatggggaaaaanactgacncttcaca

SEQ ID NO: 82790 - DNA, 532 bp, Arabidopsis thaliana columbia
  unsure (1)..(532): unsure at all n locations
aagagtaacaaccaagacaaaaagaacaatggcagcgagtgcatctccaatggcgagccagctaaggagcagcttctcctccgcttctttttctcagcgtctcgccgtcccgaaggcattctccggtgctcctttcggtgtttctccgaccaaaagagtctcttccttcactgtccgagctgttaaatccgacaagacaacattccaagtagttcaaccaatcaacggtgatccattcatcggaagtttggaaactccggtgacatcaagcccattgatcgcntggtacctttccaacctccctggttaccgtaccgccgtcaaccctcttcctccgcggtgtggaagtgggccctgggcccatgggtttcttcttagtgggcccgttcgtaaaggctggccattaaggaacactgtttacggccgggtaaccgggtttttgcccgggttgggttagaagccatcctaagatgtgcctaaccatttagggatttttttttaaggggggggcgtcattgttcgggttantttt

SEQ ID NO: 82791 - DNA, 556 bp, Arabidopsis thaliana columbia
  unsure (1)..(556): unsure at all n locations
accaagacaaaaagaaagaacaatggcagcgagtgcatctccaatggcgagccagctaaggagcagcttctcctccgctgctctttctcagcgtctcgccgtcccgaaggcaatctccggtgctcctttcggtgtttctccgaccaaaagagtctcttccttcactgtccgagctgttaaatccgacaagacaacattccaagtagttcaaccaatcaacggtgatccattcatcggaagtttggaaactccggtgacatcaagcccattgatcgcgtgtggtacctttccaacctccctgggttaccgtaccgccgtcaacccttttccttccgcggtgttggaagtggggccttggcccattgggtttcttcctttggtgggccccgttcgttaaaggttgggcccatttaagggaaaattgttttaaggccggggtaaaccgggttttttaagccccgggttggggtaagtagggaaccccgaaagttgcccaaccaatttaagggtntttttttttttaaaggaaggggggccatngntcggaaccnngttt

SEQ ID NO: 82792 - DNA, 672 bp, Arabidopsis thaliana columbia
  unsure (1)..(672): unsure at all n locations
gccnaaanaaantcagnttaccaatacggnncattanggaattgaacccgggaataacccnattacngggaccttccaacncctggatccgnccncgtaaccctttccncccggtttgnaatggcctgcccatggttcttcttagtggcccnattcgtaaaagttgcccaattaaggaacactgttacgccgggtcagccgggtctttaagccgcggctgggctggtagtcatcctcagcatgtgcctcaccatctacggtatctcttctttcaaggaaggagagccatcgatcgcaccgagtttgactttgactgggcggaagaagcagcctgaccagcttcaaacggctgatggatgggctaagttcactggaggattcttctttggagggatctctggggtgacttgggcttacttccttctctacggtcttgaccttccctacttcgtcaagtaaatgtagatccaaatatatcgagtggaccttcaactctctctgcatcattggtttttactctttgtcttgatccagaatccttaaactcaggaatggtaaaggaaaatactccttcctttaaaaaaaaaaaaaaaaaaaaaaaaaaaaagggcggccgctttaaaggaacccagcctacggacgggtgccggccaccgcaagaatcttccaaaa

SEQ ID NO: 82793 - DNA, 1024 bp, Arabidopsis thaliana columbia
  unsure (1)..(1024): unsure at all n locations
tgccacatcagcaaacgcaatctcaagtttngtagattgcttatttnttcatcacacacttcaaactcgattttattttaattttcataagagaacaaccaagacaaaaagaacaatggcagcgagtgcatctccaatggcgagccagctaaggagcagcttctcctccgcttctctttctcagcgtctcgccgtcccgaagggcatctccggtgctcctttcggtgtttctccgaccaaaagagtctcttccttcactgtccgagctgttaaatccgacaagacaacattccaagtagttcaaccaatcaacggtgatccattcatcggaagtttggaaactccggtgacatcaagcccattgatcgcgtggtacctttccaacctccctggataccgtaccgccgtcaaccctctcctccgcggtgtggaagtgggcctggcccatggtttcttcttagtgggcccattcgtcaaagctggcccattaaggaacactgcttacgccgggtcagccgggtctttagccgcggctgggctggtagtcatcctcagcatgtgcctcaccatctacggtatctcttctttcaaggaaggagagccatcgatcgcaccgagtttgactttgactgggcggaagaagcagcctgaccagcttcaaacggctgatggatgggctaagttcactggaggattcttctttggagggatctctggggtgacttgggcttacttccttctctacgttcttgaccttccttacttcgtcaagtaaatgtagatcaaaatatatcgagtgtactttcaactctcttgcatcattgttttttactctttgtcttgatcaagaatcttgaaactcaggattgttaatgtatattactctttctttatcttattgacattaatttataaaacaaaaaaaaaaaaaaaaaaaaaggtcgtnnnnnnnnnnnnnnnnnnnnnnnnnnnnnnnnnnnnnnnnnnnnnnnnnnnnnnnnnnnnnnnnnnnnnnnnnnnnnnn

SEQ ID NO: 82794 - DNA, 980 bp, Arabidopsis thaliana columbia
gaagtttttaggagaaggaaatgatggcgtcggttccaaaactgaaggctgagatcggagccgatggtcttgcaagagaagctcctgttattgcttacacagagaagataatcgaggaagagcaagttcagctgaggaaatacattgaggagaactatacaaaaattagggatgttgaaagggaatttggaaacctttcaatggaattgaaactcactgctggacctaagaaagcagcaatggaacacttgagaaagaaaatcgaagtctcaactgaaaggatccatgctgctaagttgaaagaagaagaagcgcgaaaggcatttgaagcagcatcaaaagttgtgaaggatgaagaagcaacaaaacagagtctttgcgaagatttaaacagtctggtacaacaaagcagcaatacgcagtacgccagacttgaggaattgaaaagaagactagaagcgttgaatccaaatcgatcatctacttctattcagcaagtgcaagaaccggagactaaatctgtagtagacagcgcaccagcagccaatgcgaaccaaactcacccgggaaaacctgaaaataaccacgggaacgaggaaggtggtaaagaacatggacagagaccagcaacagctgaaggagaatcaaaagcgaaaaagaaaccacagaatcaagggaggggaagaggaattggaataatgaacaaaggcagaggaggttggacaggtgctggattcgatgtcgatggtagaaattgagatacatatatctagataatccatataccgaaagcgtcatttcgaatcagaagtatgtcaaatatattgttaccaggtatgttctatcatcttttaacatcgatggaccagtacgtagccacaaagacttctccttttctcatacacctgtgttactgaaaagaagtccatcccatcaataatggactgttcataaatcaaaaaaaaaaaaaaagggcggcc

SEQ ID NO: 82795 - DNA, 602 bp, Arabidopsis thaliana columbia
  unsure (1)..(602): unsure at all n locations
atttgtngaccgggcancggggacntggtcgggttccaccnggtcngggggtcncccctgncncngggtcntcccancttcttccggtgccctgntgttttttcccggccctcaaaattccccccagcaactctacggacaaggaaaggtgggaggcgaagatgattccggaagtgcctcaagaggaaattggtggcaagggtctctgtattactaagtagagatcttactacttaagcaaatgttataactacaaaatcaaggtacataggaacaaaaaaagaatagagtagctgtggatccgtcgtttttagtaacttctcatcttattattacaaaaagtatggaagaagtttgaatgtagcttagctgcagaaagcaggggagttgtttttgtcccttgtcgtggtttagtgattgacccgaccggttcagatttaattttcccttaattttatagttaaaccgttgatggttttgtacaaactctttaaaattccagtttccacgcatataaataaataaataacccttcctgtaatcctgttctagctctttgaaactctttgttatgtttgaatgttcaaatcggtctggttatt

SEQ ID NO: 82796 - DNA, 655 bp, Arabidopsis thaliana columbia
  unsure (1)..(655): unsure at all n locations
tgaatattacgaccgaaggggagagcgagcgacgaattccaatggaaggaagaaagaagaaagcttcgtcttcctctccttgttcttcttcctcgttaacctctgagctttttggttccagagaaaacccttcttctccttcctcttctggtattctcggatccatttttcctcctccttctaaggttttgggaagagaatctgtgcgacaagagactgtgactggtggttgctggaacgagaaaacctccaagactggtggtaatgttgatagaaacagggaacaacaggagaatcatggttcaggttatcagcaggatcagagagtacaaccctgtcatctgagttcttccatctattacggtgctcctgatgtttatttccagcctcaaaattccaccagcaactctacgaacaagaaagatggaggcgaagatgattccggaagtgcctcaagaggaaattggtggcaagggnctctgtattactaaggagaggtcttacaacttaagcaaatgtatacnncaaaatcaagggccttggnccaaaaaggattgagacctgtggancgcggtttaggaactcccacctatatacaaaagntggagaagttgatgacntngctnaanaacagggngttgtttgccttcngggc

SEQ ID NO: 82797 - DNA, 333 bp, Arabidopsis thaliana columbia
  unsure (1)..(333): unsure at all n locations
caactatctcattctcaagcagtgaaaccgataacccttatagtcactcagaggaagtaatctcattttgtccctccctctctaacaatacacgtcaaaaggtcatcacaaggctcaaggagaagaagagagcaagagtggaggagaaaaaagcttaatatggtcccaagaaaatggcagagtaacacaatttcttgcaatgcctttgtacataagacactaatctacctcttcatctattttacatggctcagtttcttgcatgtaactgtgaatctgaagattcatcacttgttgattattttccaaaaaaaaaaaaaaaaggncggccgc

SEQ ID NO: 82798 - DNA, 773 bp, Arabidopsis thaliana columbia
  unsure (1)..(773): unsure at all n locations
aaaaccgtggaatcaagaagaagaagaagagcaagcacgtcctcctcactctgttgaccctgttgaagatcaaactcgccgccatccttccgttcgccatcggtaagatcgccctgatcgccggtaaggccttgttgttgggaaccatcgcactggtcctgtccctgatcggagtcctgcagaaggtgctcagcaaacaccacgagaagaccgtcacctatgaggtgatcccacaacaccaccacgaatctcacggtggacacgactcctacggcagtgccggaggcgccgacatctctttccggaggatacggcggtggttcttccagcggcggatggggacgcagcgtcgactcccaacagatggcctacagtgcccaagcaccgcagacatcccagtgaacgcccaagcaaaacaagtcctcgagttgacgacaaagacgtatatgataacgccatcatcgcatatacctacacaaccacatcgtgtcataccgacggtgcaccacaacaatcccgacgacaatcaaagttcaaacgagccatcgaaacgagagctacaccacacgcaaaagctcactaaacttatttgtacattatttatttattatttatataatatttatattgatttatttcaacactgtttgaaacgttcatactatattttgatgttttcgaaaaaaaaaaaaaaaaaagnnnnnnnnnnnnnnnnnnnnnnnnnnnnnnnnnnnnnnnnnnnnnnnnnnnnnnnnnnnnnnnnnnnaacgaaa

SEQ ID NO: 82799 - DNA, 927 bp, Arabidopsis thaliana columbia
gaaaagtaattatctatggctctctcctcgttgatctcagccactccgctctccctttcggtgccgagatatctcgtgttacccacgcgccgccgtttccacttgccgttagcaactcttgactcatcgcctccagagtcatccgcatcatcatcgattcctacctctattcccgtcaacggaaacacgttacctagttcttacggaactcgcaaagacgacagcccgtttgctcagttctttcgctccaccgaatccaacgttgagaggataatatttgatttccggttcctagcgcttttggcagtaggaggttcgctggctggttcgctactctgctttctcaatgggggtgtctacatagtggaggcatataaagtctactgggctaactgttcaaaaggcatccataccggccaaatggttttacgcctagtcgaagctatcgatgtttatctagctgggactgtgatgttaatatttagtatggggttgtatgggctcttcatcagtcactcggcctcatggtgttcccccggaatccgatcgggcccttagatcctcttccctctttggtatgtttgcaatgaaggagagaccaaaatggatgaagatcagctcacttgatgagctgaaaaccaaagtgggacatgtcattgttatgattctgctagtgaagatgttcgagagaagcaagatggttactatcgccaccggtctagatttgcttagttattccgtttgcatcttcttgtcctctgcttctctttatatcctccataatctccacaaaggagagacatgaaccaatgtatatgtacagacccaatctatccaatatatgtgtttactactgttaaaaaaaaaaaaaaaaaagggcggccgctctagaggatccaagcgtacgtacgcgtgcatacgacgtca

SEQ ID NO: 82800 - DNA, 490 bp, Arabidopsis thaliana columbia
tcatcgtctcttcgatttcgcaaagacggccataatcaacatcttcgcacatccttatgccactgtttgcgaattgtactgtggcggagctcccgaaaccgacaagtgggaagctgctccgattggtcactacatcggaattgatacatcttctgggatttcttctgtacgagaagcttgggagagtcagaggaagaattacgatgtggaattctttgaagctgatccttccaaggatgattttgaaatccagctacagaagaaattggagcaggctgatttagtttcttgttggcgccatctccagttatgctttgaaactgaggagagtgcgagaagactcctaactaatgtagcatgtttactgaaaccagggggttattttttcggtatcactcctgactcgtctacgatttgggcaaagtaccagaaaaatgttgaagcataccacaacagaagcggtgcaaagcctaatgtatttccaaactac

SEQ ID NO: 82801 - DNA, 820 bp, Arabidopsis thaliana columbia
  unsure (1)..(820): unsure at all n locations
cggacgcgtggtacgcattcgtcatttggtccctccacttagagagaagcagacagaacataactaaaatcgagaaaaatggcaaacagtggtgaaggtaaagtggtgtgtgtaacaggagcctccggttacatcgcctcatggctcgtcaagttcctacttagccgtggctacactgttaaggcctccgtccgtgatcccagtgatccgaaaaagacacaacacttagtttcactagaaggtgcaaaggaaagacttcacttgttcaaagcagaccttttggaacaaggttctttcgactctgctattgatggttgccatggagttttccacactgcttctccattttttaatgatgccaaagacccacaggctgaacttattgatcctgcggtcaaggggacgcttaacgttttgaattcgtgcgccaaagcctcttcggttaagagggttgttgtaacctcctccatggctgccgttggttacaatggaaaaccacgcacacctgatgttaccgtcgatgaaacttggttctctgatcctgagctttgcnaggcctccaagatgtggtatgtcctatccaagacttttggcggaagatgcagcttggaaactcgcctaaagggaaaggcttaggcattgtnactattaacccggctatggtgatcggtcctcttctacagncaactntgaacaagggtgcttgctgctattttaaactnaatnaanggngaaaggttttccaaacttgngtttggangggntaatttaaaaaaggggngccaatngggacatccnangatttgggggccccttaana

SEQ ID NO: 82802 - DNA, 517 bp, Arabidopsis thaliana columbia
  unsure (1)..(517): unsure at all n locations
caataaacaagataaatggagggtctaattccgttagtatacaaagccgtcatgcaaatccgttacggtaacgagtcgcagcaactttcttcttcttactacgttcgtcttcccggtgattcgggtcggtttgtaagatccgatttagatgtatcgggtcctggatctaattcctccaatagggcgtcgtcgtcgacaagcacaactacgtttgctgtttacgcgggagtccagtcacctgtttctcgtcaggttgtcacgtgattcacacgcgctttttgaaggaacctgaagttgcgtgtgagggaagggttcgtgacttttgttttgtgcgttttttttttgtaagttaggcttggaccggtttaataaacctgatgtaataattcggtttggaaaattgatttctctaagcgtagactttaacccaaaagggtggtctcgtggcttttgatttgcaattgtgtgttttctttaaattgaaaaaggttctatgatatattaaggtattngggcc

SEQ ID NO: 82803 - DNA, 716 bp, Arabidopsis thaliana columbia
gctataggaaaagctggtacgcctgcaggtaccggtccgaatttcccgggtcgacccacgcgtccggacatgtttaagcgtcaattcgaaagtctcagagatgagaacgaagttcttcaaactcaaaatcaaaagcttcaagctcaggtaatggcattgaaaagcagagaaccaatagaatcaatcaatctgaacaaagaaacagaaggatcatgtagtgacagaagtgagaacatttctggtgacatcaggccaccggagatcgatagccaattcgccctaggccatccaccgacaactacaacgatgcagttttttcagaattcatcgtcagaacagagaatggtgaaagaagagaacagtatcagtaacatgttctgtggaattgatgaccagtctgggttctggccatggcttgaccagcaacaatacaattgaatgtggtcgatctgttcttgtttgtattaaaattgtcgttttctttaagtggtcagatgaaccaattcatgtttcaagaatctatatttagtctatatgcaccaactaagctagtagtttttttgggtaatgtgatgtaagagaattaatgggggaaatattcatcatattatatgataataatcaatcatatgggccatatgattaaacattaaaaaaaaaaaaaagggcggccgctctagaggatccaagcggacggacgcgtgcaaactaagtct

SEQ ID NO: 82804 - DNA, 482 bp, Arabidopsis thaliana columbia
  unsure (1)..(482): unsure at all n locations
gtgtatttatgaagcagcctctatcggattctggcgaggggatgttaagatattgatagaagacattgctgcattgaaacctactgttttctgcgctgttcctcgcgtgctagagagaatatacaccggtcttcagcagaaactttctgatggtggttttgtaaagaagaaattattcaactttgcattcaaatacaaacataaaaacatggagaaagggcagcctcatgaacaagcatctccaatagctgacaaaattgtatttaaaaaggtaaaagaagggttgggaggaaacgtgcgtcttatcctctcaggagcagctcctcttgcagctcacatcgaatctttccttcgagttgtcgcgtgtgccccatgttttgcaagggttcgggtcctaccagagagttgtggggggacttttgtgtccattccaaacgaggtttcaatgcttgaaccggtggncccccggtncaaacgttgaa

SEQ ID NO: 82805 - DNA, 485 bp, Arabidopsis thaliana columbia
gttggagtccgaaagcaatcaaaactcgtttgaccaggttccaagtaatattattgggattgttcctccagctcctgggaaccagcatccacaatttgagacttctgaccctcaagcacgtgatgcccttcgtcttcccagttttatgggccaacaaccttttgatacggcgagctactatgctcagttctaccgctcaggtcctgacagtgatggccgtgtttctcccttcgtttccccaggggttgcctccaaatttaatgggattacagtattgcctccgcattcatctcaaaccatgcaagagggtggaaataacttggtcctgtctacttgctagtccaccaccactggtaactcaagctgctggactaatgcagagctctatacctgtcacgcagcagcctgttcctgttttccgccctccgggcttacatatgtcgcattatccaccaaactacgtgccatatggatacttctcccca

SEQ ID NO: 82806 - DNA, 797 bp, Arabidopsis thaliana columbia
  unsure (1)..(797): unsure at all n locations
gtccnnnnnnnnnnnnnnnnnnnnnnnnnnnnnnnngcccgtccgcggtaccggtccggaattcccgggtcgacccacgcgtccgaaaaaatcaaagctttttcttttatcttcaattctcctccgatgaggtgtaaaagacacaccgtcgatctcagcagcagcaacggcgtttgcgcttcttgcctccgtgaacgtctcctctctctcgccgcttccgccgccgtatcagccgccgtagaagaaatcaatcaaagaaatctaataacaataatcatcctccgcttttgattttccctcgctctgtttctccttacgttacccgtagaaaatccgacgccggagccggtggaggagatcctttagtttcttctaatcggagattcattaccacgccacagatagatctcgtcggatattcatgcaaagatttcgaatcgaatcgatcaaataaatcaaaacaaggtaaaaaagtatctagattctcgaatctattcagagctagatctgaagatttcgataccaatcccaaatccaacaatcctagattctcctcatgcgacgcgtctgagatttcatcttcttcttcctcttcacgttcatggatctcgacgattctctccaccgggcgacgtaaaaagcaaccaaccaccgcgtgttacatcgaagacgttatcgctgcgcgtagacctcaacgtatatactgcagaggaatgtcacctgtaagagatacggaacccgagcagtccgcggaatcaatcgaggaaatgaagagaactccggcgaccaaaactccc

SEQ ID NO: 82807 - DNA, 1349 bp, Arabidopsis thaliana columbia
  unsure (1)..(1349): unsure at all n locations
nnnnnnnnnnnnnnnnnnnnnnnnnnnnnnnnnnnnnnnnnnnnnnnnnnnnnnnnnnnnnnnnnnnnnccacgcgtgcgcacagcctttataactctttctggggtttttaattctctcaacgaacaaaaaaaaaaactcaactaatattctccatcctctttcttcagatttaagagaaaccttatcgttatattctctcttctcttttctttttgactcccacaagaagaaagcaaatttctttttctcaggattgcttgaaaactgtagaaatctttaaggtttttttacaccaataagagtcagagagagagagagagagagaaagagagatctattcataaaaaagacaggtaatctcaactccgaggagataactgatataacaatttgagagaataagaagaagaagaagaagaagaccaagctaaagaatggttgcttttttatcagcttggccttgggaaaactttggcaatctcaagtatcttctctacgctccattagctgcacaagtagtgtactcgtgggtctatgaagaagatatctcaaaggttctttggtgtattcatattcttataatctgcggtctcaaagcacttgttcatgaactatggagcgttttcaacaacatgcttttcggggctcgtactctaaggattaaccctaaagggatcgactttaaacagattgatcacgaatggcactgggacaattacataatcctacaagcaataatagtgagcctgatctgttacatgtcaccaccattgatgatgatgataaacagtcttcctctgtggaacacgaaaggactcatcgcattaattgtgctacatgtgactttctcagagcctttatactactttctgcacagatctttccatcgtaacaactacttcttcacacattaccactctttccaccactcatctcctgttccacatcccatgactgctggaaacgcaacgttattggaaaacattatcctctgtgtcgtagctggtgttccattgattggatgttgcttgtttggtgttggatcattaagtgcgatctacggttacgctgttatgtttgatttcatgaggtgtttaggacattgtaacgttgagatattctctcacaagctgttcgagattcttccagtcttacgatatctcatctatactccaacgtaccatagtctgcatcatcaagaaatggggaccaacttttgtctatttatgcctctctttgatgttttgggcgatacacaaaacccaaactcatgggaactccaaaagaagattcgtttgagtgcaggggaacggaagagagttgccgagtttgtgttcttagctcac

SEQ ID NO: 82808 - DNA, 687 bp, Arabidopsis thaliana columbia
acccgatcggttatttctgggtcgcgccacgcgttgcgatccatttgcttgcgcctctgccgcagccgccgtgggaacatcagttcaccgacacagtagtcggaaggaaatagaagtagcagattatgaatctagtgatgaagataggcatttcaagaggaagccgtcaaggtacgcgcgatcaccaccggtggtggttagtgatgtgagtgaagataaactccgatactcaaaacgtggaaagggggagagatctcgagcttgacatggattttcaaacatgtttttttttttttttgtataatcaaaaacagagaatgagaactcttctcgtcttgctgtaacgatcaaagagagagagctcttttgtcatcgaattcttttttaatttttgtagtggaattcgatttcgtaacttcttttattcttttataaataaaaaatatatatgggcggccgctctaagagatcctagcttacgtacgcgtgcatgctacgttatagctcttattatagtggccacctataattctatttctattggcgcggcgagttttacataccgtgcgccgacctggagtaataaatccccctggacgtttcacccccaaacttttaatattcagcccttttgactattcaacaattcccccccttttttcagtcccagtcctgtgggtggttata

SEQ ID NO: 82809 - DNA, 938 bp, Arabidopsis thaliana columbia
  unsure (1)..(938): unsure at all n locations
tcagctccggattccggttcgacccacccgtccgcttctagaccatagatttgttcttcgaaaaaaccgttctttcttttgcctctcactctagttccttctctcatttctacttctctagcttcactgacttgctgctaccactaaatcttggcatttgtggaaagttgggaatttagggtttttgggtgtgtgtgtgaaaacaatggaagcactagttgttgatgctggctctaagttcctgaaagcaggagcagcaatccctgaccagtctcctgcaatgataattccctctcaaatgaaacgaatggttgatgatgggtcttcttcagctgataaccccaccactgtctttgaggatgtcactcttgatcctattgaaaggggtttgattagagattgggatgctatggaagatctgttgcgttatgttgtctacactgggcttggatgggaagagggaaacgaaggcaatatactttttacagatccactttgtactcctaaggctattagggagcaattggtgcagttgatgtttgaaacattcaatgtctctggattttatgcatctgagcaagcagtgttgtccctttatgctgttggacgcatctccggttgcactgttgatattggtcatgggaagatagatattgccccagttcttgaaggtgcagtacaacacattgcctcgaaacggtttgagctaggtggaccgagctaactaaattatttgcccaagagcttggaaaaacccaacccgtcgatgaatctcagcatgtctgatgttgaaaaactcaaggagcagtatccaaactgtgccgaggccgaaattgtttcaaaaaaacccaaaactgtgaatcgggagganncntttcctgatggcaggtgtnngnatcggnggaanntcncggttgggagctttttnacnccanaac

SEQ ID NO: 82810 - DNA, 751 bp, Arabidopsis thaliana columbia
acaaaaattaaatagaaattaattaatgctttacatgaatcaaaacactcagaaagtagtatgtatcaactgttttttgtcgttaataaacctctataaatgatattattaaaccaataaatagaaaaaaagttaccaaaaacaaggactgcaaatgaaagagctgggactcgatattatttgatcagatatgtcaaacatggaatcagcaagcacaacctcttgactgatctggatcaataatatccgtaacagagtcatgatactggcctctaggatatatgtcattgctttgtttacgttcattagagagagcaatgtgtgcaacactcaaaaaagcttcatcgatattggtatcttccttcgcagaggtttcatggtacggtatgtttccctttgagccacaccactcgatggctctcttatttgaaacaactcggctgtttccgccatctacatcggtcttgttcccgatcaaaacaaagggaaatgtctccggttccataggatttgcctgtttgaggaactctgtgtgccagttattgagagtttcaaaagatttgagattgttcacgtcgtagacaagaacgcaacaatcagcacctctatagaacgcggcccctagactttgaaatctctcttgtccagcggtatcccatatctgtaaagtgacagatttttcatctatatgaagctctttggtcacgaaatctgctccgatcgtagccttatattgcttgttaaatttctt

SEQ ID NO: 82811 - DNA, 457 bp, Arabidopsis thaliana columbia
cccacgcgtccgccgtccggcttcttctaagataaatctctccccgattctctctttttctcgctagatactctttttcttcaattagggtttcttctcgcttgccttttaattctctccagctgatctgatctccgttaccgatggagtctactgctaacgcactcgtcgtcaaggtgagctatggaggtgtgcttaggcgtttcagggtgcctgttaaagctaatggacagcttgatcttgaaatggctggtcttaaggaaaagatcgctgctctctttaacctctctgcggatgctgaattgagtctgacttactctgatgaggatggggatgtggttgcccttgttgatgacaacgatctctttgatgttactaatcagcgtcttaagttcttaaagatcaatgtgaacgctggcgtgtccactaactctgctgctccagagagtagtgggag

SEQ ID NO: 82812 - DNA, 479 bp, Arabidopsis thaliana columbia
  unsure (1)..(479): unsure at all n locations
aagatgtaactgggtatatttaaaagtagaggaactaagacgtaactggtttatatgatacatgtatgagtacaaggtattattattatcattgttgttgttgttgttgttgtctgaggttttattaaagtgagagtagcttatgggttcacagaatcagatggtggaagaaggagcatctggctgcttttccggtagtgcattttgaaacgcaggcagttcgttgtatgattcgtaacattttgcaagagttgggtacggttccatgttaatctggaatctgttgattgctccgtggatctgtggtgctagaaagagatcagccaggtaaatttcatcaccagtcgcatgtttcccagcgcaattcaccaacagtttctcgagagctgtaaatccctttgtgatagcattattaacccaggcagncttctcctccacantgacctttcccccganaaacccaataacagccagatttg

SEQ ID NO: 82813 - DNA, 589 bp, Arabidopsis thaliana columbia
  unsure (1)..(589): unsure at all n locations
atgatcgctcccggtcaaacctcctcccttcttctccgcgccgaccaactctccggcggtgaatttctcatcgccgcaactccttacgtcacttccgtctttcctttcaacaactcaaccaccgtaggattcatccgttacaccggtaaaaccaaaccggaaaattccgtaaacacacggcggagacggcgattaacggcaatgtcgacagtcgtagctctcccgaatatgctggatacgaaattcgcgacgaaattctccgatagcatcaaaagtctgggatcagcgaagtatccatgtaaagtcccgacgaagatagacaagcgagtgatcaccacggtaagtctcaatctcccagggattgtcccgtttaaatcagacctgcgcacgggttacggcaggggaaggggattctttcgcattcaattaaccaacatcttcattttgttaagancctccggtatnngttnctcgnaaagcttcctttaaagaaacaggggcaaaaggngntttnttnacttggatttcccaggggaaacncccnaccaggtttcngttttacggggggtaggnccggttttgnnaanat

SEQ ID NO: 82814 - DNA, 508 bp, Arabidopsis thaliana columbia
  unsure (1)..(508): unsure at all n locations
ggaaaatatgtttctattaagatttcacaaaccattttgacaattaaaaccaggaaagacaatctatatttatatttaaacactcttaattagcgaaaccaaaaccctaacaaaaccaggtaataataatagaagacattttttaacactgaggaagatcatgaggaggaggaagcagagtttgtgaaggaagaggtccatctttgacgataaaccccattgctaaaccccacgaagtatgttgttctagatgacagtgaataaaccaaactcctggattatccgcatttatcctaatcgccgcccatcctcccgtcggcactgcaaaagtantcctctccggcggatccaccaagttgtaccttttcggatccttctccggggtcaaaattcccaatcctcttnccactacgaagaattgngtccgngacatgtaaagntgatcccgtgttaagacccgtcctgacacgttcatccgtcgatcgctcgaagtcgacgatctggtnnt

SEQ ID NO: 82815 - DNA, 306 bp, Arabidopsis thaliana columbia
ggcttttagcgtttagcttcatcatgatatatgatctttagactttattattgttatattattattattatttattttttgtgtgtttgttcttaattattttatgtataaccaaaagaaagaaagaaaataaggacagatccatagttgagtcagtagtcatcgtttgtagaaagttttgacagtatataatttctgattatatttgttaaaagttcatatgttgactttgttttccttttaaaagtactttcaggtgacttgtgtaatatattcacacttgtaataacaacaattttgatctta

SEQ ID NO: 82816 - DNA, 498 bp, Arabidopsis thaliana columbia
caaaaaattcatttttgttttcttttagagttcacaagttcttcgttgttcagctactcccactgtcataacacgaagtgggtttttttctgatcaaagaacaaaaacaaaaatggatatctccgccttgtttctcactctcttcgccggaagtctcttcctttactttctccggtgtctaatctctcagcgccgctttggatcttccaaactcccactccctccgggaacaatgggttggccttacgtcggaggaactttccagctttactctcaagaccctaatgtctttttccattcaaaacaggaaaaggtatggatcggtgtttaagactcatgtattgggatgtccatgtgtgatgatctcgagtccagaggctgctaagttcgtgctggtgacgaaatctcatctctttaaaccaacttttccggcgagtaaagagaggatgttggggaaacaagccatcttcttccaccagggtgattatcacgctaaac

SEQ ID NO: 82817 - DNA, 501 bp, Arabidopsis thaliana columbia
  unsure (1)..(501): unsure at all n locations
ggccgccctttttttttttttttgatggggaaatatcatacactctcaaaacgtatggttacaatggaacattacatgactttcttcacaacccccagaagaaaaaaattctgaaaagggaaccaataagaaaagaatcaaaaacacaatttttgtataactctgtttctatcattgcattactgcaagctctataccctgagtccatcataccaactccatcagaagcgggtcgccctcagccatttgctgaaccaatttgatgaaatcttgttcgcttgatatgctccacgggtgaaccgcaggtgcttttagcagaatacagactcgaagaagtgttaaacgaagctgatttcctcttatataccattgaaccgagaacggggcaaaattcctgaggngaatccatagncaagaagacattggcacagcactttggtaatgcagtccatatcggcccgggtnaacaagntcgtaagcagtncagcttaggcctagaat

SEQ ID NO: 82818 - DNA, 711 bp, Arabidopsis thaliana columbia
gcttccgattgtagtctgttgcagctctcgtgacgaacttgacgccgtctgttcttccttatccactcttccttacatttccttagccgctttgtacagcgatctagcagatagagaacgagctatggttatagagaaattcaggcaagcaacaatcaactggaaccagcaacttaactctgtggtagaagaaggtttggaagagagtgaaaacggaaaagaagaaaagacatctcatttggtagttgtgaccgatgtttgccttccgttactctcatcaggagaatcttctctatccgcacgcgttctcataaactacgagcttcctacaaagaaggaaacatatacaaggcgtataacaacttgcttagcttcaggtggaatagtcataaacatggttgttggaggtgaagtaacgactctcaaaagcctcgaagaaagcagtggcatactcatcgctgagatgccaatcaatatttctgaaatcttataaccaacacatggatctccgatctgaagaattctaaatggggttaatggctcttaagccttttgaaggactagaggagatgaatggtggattgataacgctttatttgtttgattgtatccagatgtctcttgaccattgcgctcaaatcatcaaagccaaacttattgtaaaaccagtttctttttttcttatattattaaagaatgttgaaacgaaag

SEQ ID NO: 82819 - DNA, 541 bp, Arabidopsis thaliana columbia
  unsure (1)..(541): unsure at all n locations
gaaagaaatgagagatgtttttgaaacatgtacaaaggtacagaaggggtaacaccgaatatcagctagaaagaagcaacaaatcaattcacaaacgagacatacatatagacataacatatacttcaccaaattcatattttgtcatcagccatttcctggtgttctaacaccaacaaatctgatgataagtaaagccttagaaacgccgcacacttgtgaaattcaacaactttttgccatcctcaacattcacggcgataatcacggccatagctgtagtttggcctagctccgaaatcactctcagacctctctgcagcagctctctcttcctctaagctcaatccacccatcgtcttctgcaactgcctgtgatcataaggagagtaatcgactggnggccgatgggccattanggactccgtagctaagacaatcgngagnccaagggggantttggnttgncncgggaaccagaagggatcaagggngctnagggccatangnggggnccgaagtagaaccgggggggtaaggt

SEQ ID NO: 82820 - DNA, 494 bp, Arabidopsis thaliana columbia
cgcgaagagaagctagcgttttggataaacattcacaatgccctcacaatgcatgcgtatctagcctacggaactcacaaccgtgccagaaacacctcggttttaaaggcagcttatgatgttggaggctatagcgtaaacccttacattatccaaagctcaatcttaggcattcgcccacatttttcacaacctttgttgcagacattgttttcgccatcaagaaagtcgaaaacttgtaatgtcaaacacatttacgccttggaatatcccgaggcattggctcattttgctctttcttcaggattttctactgatcctccggttcgggtttacacggcggattgcgtattccgggatctaagaaaatccaaagaagagtttataagacacaatgttcgtatacacaacgagacacagatattgttgcccaagattgttcattactatgctaaagatatgtcacttgaaccatctgccctcatggaaacaac

SEQ ID NO: 82821 - DNA, 507 bp, Arabidopsis thaliana columbia
  unsure (1)..(507): unsure at all n locations
aactgtgatcggtaacttacagaactcgtcgaatcttcagagctcaatacagaatgggctaaagttttcaaagcgagtcgcataaaacaaattgataaaacaaaaagagagagcaaaaagtcacaatgataatggagctaacaatgcataatctgttctcaagagtctaaagacataactaagcgattcctgacctgcgcagctcaagattcaccatgagcaaaatggcatctatctccatatgtacagttccctttagagtacctatcacagatcttgggttttgtaagttgctcccaggatgtgggttcccttcaggaccaccaatcccttgagggttccttcactgatccaggcctccctataagctctctcaccatcccactcgcgacattgatcctgttcaaatgtcccttccagctcgataatcttcaagtttggggcccttcagtgcttaatcggaatttggcccgttcagggaatnggtggatgggncccttccaagng

SEQ ID NO: 82822 - DNA, 471 bp, Arabidopsis thaliana columbia
ttctctttctctttctacttttttttggttctgcgatttccatcaaaacccttttcccaacaatcttggttttgtacagagaagaagaagaagaagaaaggcacacaaaataacccatgtctggtttatacaataactcatcttacttctctcctgctcgagctgcttctcctcagattagaagcactcctgagatcgacagctctcagtacttgacggagcttctcgctgaacatcaaaagcttactccttttatgcaggtcctacccatatgtagccgtctattgaatcaagagatgttcagggtctctggaatgatgtctaaccaaggatttggtgattttgatagacttcgacacagaagtcccagccctatggcttcttctaatcttatgtctaatgtctctaataccgggttaggaggctggaacggcctctctcaggagagacttagtggaacacctggaatga

SEQ ID NO: 82823 - DNA, 505 bp, Arabidopsis thaliana columbia
  unsure (1)..(505): unsure at all n locations
taataacaatctccaaatggctaaatcatttgcacctctcatcgctgtgttatgcgttttggttctcccacttgcggccatggcggttggaacgccattccacattgaaggaagtgtttactgcgacacttgccgctttggattcgagacaatcgccacccaatatatccgcggggcaagagtgagaatagtatgcaaagacagagtgacactaaaatcggagttggttggggtggcggtgacgggacctgatgggaaatacaaagtcgccgtcagaggagaccgacaggaccagcaatgtctggcggagcttgttcacagtccactgtcccgctgccaagaggctgatcctggcagaagcaccgctaccgtgatcctcaggggttcaacggggcggcttntactngtaattcggcaacgcattgggttttttagggcggaccgttncntggnttngngttttcgnaaacgtnnctgagacggggtaaccgggtntttattantc

SEQ ID NO: 82824 - DNA, 543 bp, Arabidopsis thaliana columbia
aagctcatatcacaaaacttttagatctcatttcatctttcttcgattctacctactccgattcaatcgatcttatcgagacatggatgctcgtaagagaggacgccctgaagctgctgcctctcacaactccaatggcggattcaagaggtctaagcaagagatggaatcaatttcaactggtttaggaagcaaatccaagccatgcactaaatttttcagcacttctggatgtccatttggtgacaattgccacttcttgcactatgtgcccggtgggtacaatgctgcagcgcagatgacaaatctccggccaccggtttctcaagtttccagaaatatgcaaggatctggtggtcccggcggcagattctcagggagaggagatccaggatcaggccctgtttcaatctttggtgcttctacttccaagatcagtgtagatgcttctttagccggtgccatcattggaaaaggtggaatccattccaaacagatatgccgtgaaacaggagcaaaattatcgattaaagatcatgaaag

SEQ ID NO: 82825 - DNA, 516 bp, Arabidopsis thaliana columbia
  unsure (1)..(516): unsure at all n locations
gcatgaatcttttttaaaataatctgtaatgaatttttgatgaggaaaaagaaaaacaaaaatttaaaataaagaagaagaaaaacgaaagccacagggtcgctcacccgagagagaccagggcaggccttgaccagaccaccaccattgcagccactactggagaaaccagatatacacatgtgcgtctgtgtaatgcatgcagacatgtacttttggttgaagtaaccattataaggcttgaaggagcgttttgggcgagacgtacaaaacgctacttagcatcctgttttcgggcgtttaccacttgaattgaaaggcgaacgctttccacctccgcttggcccggactctcttncctcaggntgttcgagtttagcaatgccagttccctcagctgctggncnctttatggaatnttggcgantcgtcaaaggntttaggaactctccaataattccttgagnttgtcnagggnattncacaatacagntggantctgcncataantggant

SEQ ID NO: 82826 - DNA, 410 bp, Arabidopsis thaliana columbia
  unsure (1)..(410): unsure at all n locations
aaaaaaatataaaatggaaaaactatcgtaattatccccggcatatcaaaggatgatcctacataagtaacagaacatacaacaaattcctctttcttgccaaggacatgagatttttttttttgaagggtgcaaatactttattttatatgggttatcttagatatgtctaaatagtctcaccatctttagagactcaacaattcaataaaatagaaataaataaaaactctaaataaacttctgtgttctgtttcatcaagaacataagatgactcaaatagcccggttatcgccgnctgcgaggtagcgtttgcggagagcggcgcncacgggagcgggtcgtccccgaagaaanccctggcgtggcgnatgacgagtaaaagggggncngttgagngcgtaaggat

SEQ ID NO: 82827 - DNA, 442 bp, Arabidopsis thaliana columbia
accacacgtccgcttgttttctcctccttgccgttaagttccattgaagaagaagaagaagaaggtgtgattcaacgataaacctagcgagaaaacgaaccgcataaaatcgccattgaacgagacggtggtgttaatctatggttatggaggtttgcttgactttttgaggttggcttgacttttgaagttttgatctgaagaaaagaggtttcgttgtaattggtttatacatcatgtctgggtcgagtatgtataagacgaagctttgtattctgttcaataagactggtgattgttcgaggccgaattgtacttttgctcatggaaatgctgagcttcgtcgtcctggcgaatcttcttttacaggaagacgtcacaatatggatagtgacttaagagatagacgtcacaatatggatagtgacttaagagatagact

SEQ ID NO: 82828 - DNA, 508 bp, Arabidopsis thaliana columbia
  unsure (1)..(508): unsure at all n locations
ggccgcccttttttttttttttttttttttgattgagcgaaggtcttacaagtacgagaacgaggaggctagagaatgctggacaagtgtcattgtcaagtgctgagagctgatacttgtgaatgaattgattgattcaagattatttatgcggtatggagtactgaccgactctgcgtgaagatgggacactggtgatgcacacctagcagagcagaggaagactataggcatgagattagttgctgcctctggaggcaatcacttggcttgtgcccccgcatcaatgaagaggttggtagcattgagcagtcgattggcagtcacatctaagatgaagctagcaatctcctctggctgaccggcagtctcagccaatgtcacctgcttggcaaatgcatcagcagcgtcaaacagaccaggatcgatattacgtagaccatcagtttgactnggccnggggtgactgcagccncganatctgctggccgctcggggaaacacanaa

SEQ ID NO: 82829 - DNA, 721 bp, Arabidopsis thaliana columbia
ggcgacgtcgatgcagtggatctttgcgatcatggtgaagtatccagagatacagaggaaagtatacgaggaaatgaagagtgcgttcgccggagaagaaggagaaagagaagagatcagagaagaggatttggggaagttgagttacctcaaagctgtgatcttggagtgtctaagaagacaccctcctggtcattacttgtcttaccataaggtcacacacgacaccgttttgggtggatttctcattccgcgccaaggtactataaactttatggtaggagaaatgggccgggacccaaaaatatgggaagatcctctaacgttcaagccagaaagatttctagagaacggagaagcatgtgattttgatatgacgggaactcgcgagattaaaatgatgccgtttggagcgggacgacggatgtgtcccggttacgcgctttcgttgcttcatctcgaatattatgtggccaatttggtttggaaattcgagtggaaatgtgtggagggtgaagaagttgatctttcccgggagcaaccagttcttcacaatgggcatgaaaaaccctttcaaagcaaatatttatccaaggagaaagtgatatttgcttttgttatatacataatcaaaaggcccattgggccaatttgtcatgtatattaacaactttgtctcatatgtattaaaacaattaaggcctttaatgggtttcaatat

SEQ ID NO: 82830 - DNA, 527 bp, Arabidopsis thaliana columbia
ccaggtctctacgactcatattgggaaagctggtacgcctgcaggtaccggtccggaattcccgggtcgacccacgcggccgcccccgcgtccgctacgacaaagtatccgaccaagaaaaccaaatccatcatcatcatcattctccacttccaaaaccatcatcattttcccgtaaaaccctaatcgccaccggctccgtcgtatctctcctcttaatcctctccgtcgtcgctttaaccgccggagctttcactcactctcctccacaccatccacctatctcctccgcctctctcaagtcactatgctccgtgactcgttacccagagacctgtttcaactctctatcatcttctctcaacgaatctgattcaaagcttaaccctgaatcaatcctcgagctttctcttcgagtcgctgctaaagagatctcaaacctctctatctctttccgatcaatcaacgatatgcctgaggacgcggcggttggtgattgtgtgaagctttacaccgacacgttgagt

SEQ ID NO: 82831 - DNA, 544 bp, Arabidopsis thaliana columbia
cactgacatccacacagcctccactcattctcacctaccatctctactctactcgactacactacactacactccactgactcagtacgtcagcagtgcatcctctctacagcatgggctcacaatctcaacaacggcgctatgaaggcaaagtggtgctagtgactggtgcaggtagtggcattggtcgttccactgcattagcattcgcccaagaaggtgccaagctagtgctgggagggcgcacagagagcaagctgcagaaggcagcagagctgtttccaccagcaagtgtagaccgcccaggtggtctaccatgcaaggggcctgttgggctagaggaggtcaaccccgaagttagttgggctagcagtctcccagttcggtgggctgcatatagccatcaataatgctgccgtccttgaggttcataaggctgtggacatcagccaagtcagtgtcaacaatcaactggcatccaacgttcatagtgtcatatatgggatcaagcaccagctaagcgctatcggcaaatcatctacag

SEQ ID NO: 82832 - DNA, 653 bp, Arabidopsis thaliana columbia
tggtatggctaaccggtggcttaggtgtggtccacgttctcatcaaagaaacgatcccatcttggtttctatcaactgacaaatcagaccgagaacaaggaccatcggatctagttgcagagctaagaggtcatgcccttgcctactttgtggtcctatgtggagcacttacttggggcgtggattcaagatcatctgcatccaaacgccgccgccaagcaatcttgggaagccacttggagttcatcgcgagtgccttagatgggaaaatatcagtgggatgtgaaacagcaacttggcgaacatatatttccggtttggtgagtctaatggtgagctgtttgccgctctgggtgacagagatcgatacagaagtgttaaagagtctaagcaatggactaagaaaatggggaaaagacgagctagcgattgtattactctccttgggaggtctcaaaacaatggattacgcagctgatttcatcattcatttgcgttcatagcttcttaaaaagttttgatcttctccagatttcagatagttgtttgatagatgtttttcttctagtgtttgcttccttgttgtgacttgtgttctctagctccagtgttgtgtgatgaaatcaatcacgcatatgtatagagagaaacag

SEQ ID NO: 82833 - DNA, 543 bp, Arabidopsis thaliana columbia
acccacgcgtccgggtttctaaataatattttattcttattttgcattatataacactaacatattacatcaaagtttatagtgatatcactgattaaaattaaatgattatagatatgtatatgaacaatatgaatcatgcaggatgtaatgctgatatggggtgagcaagatcaagtttttcctttaaaaatggcccatgacctcaaagagtaagacccttgactatattctttctatttgatctaactaaagttaatcgggtaaccaatacctatgctacaaataccaagagtgcgatttgagaacgaattttggaattggtatagtaacgagttattcatattcgtgtgtttgtttgtatatttaccaggatgttggggactaaggcgacgctaaaagttatacaaaagacatcacatatacctcatacggagaagtccaaagaattcaatggctttgtcatgtctttcttattacctccttctccatccccataaatggaacatccatatttaactattaataaccattttttttttg

SEQ ID NO: 82834 - DNA, 461 bp, Arabidopsis thaliana columbia
  unsure (1)..(461): unsure at all n locations
gttgaactagtattatacatacatacatacatcaaaagcatttgggtgatacacattagtttgaatgattcgagtaaacatcatcgagatctgatatttgatgatgcaaaagaaaagctgtagcttgacgcatcaaacctaaagtgataagtttcacactttgggtctatgccatcaagttatattcatctctttcgattaatacagagtttgtcggcttctatcggtcattccttcttggtttcctttcccttatctgcttctgataataatgtctgctcgtatacgaattgagtgagcagtgggacaaggatagctccaagaattgcgacttttctccaatccgggtggaagaaacgaaggatcagcaattgggngaccacaancccattaacccggggaaaaatccctcttgacttganccggncttccttggaaccctggattcccagtcccccagt

SEQ ID NO: 82835 - DNA, 730 bp, Arabidopsis thaliana columbia
  unsure (1)..(730): unsure at all n locations
agaaaacatagaagatgttgttcacacttcatgcatttcagacaaccttaacaccaaactttcatgttcttttcaatgcctcgagacattctctttcccgaccccaatttctctgtctctccaaatcgggagacggaacttcagattctgattctgatcccgaccctccaaaacccgaaggcgatactcgcaggcaagaactcttagctaggatcgccatgattcagacatcgaaggtccgtttgacggatttcttggacgagagatcagagtatctcaccaagtttgctgaagaagccaatgcggagtttgacaaggttggagaagacgccatgaaagaccttgacgaagctagcacaaggatactggagaatatcgaaagcaagatgcaagcttttgaggaatctgcgggattgaacagattagagatcgaggagaacgataataagttggctgagtttgaggagaagattcaagtagacaggaatgaaggattgtcctttaaaagcttacgtgacaaaaaaccagtggatagagagcaagctngagaggnaactgnggaaatncaagaggttncccaagaaagtgcaggtccaagtcaagaagggntntttnccccggggtaattgggtttntggttctcgaatttccttnttccttcgttttttcaccggnttggggaaagccgaattntttggctntctttccccctnntacnaatncggttcgg

SEQ ID NO: 82836 - DNA, 495 bp, Arabidopsis thaliana columbia
gggttggccatatgttcctgcgctctgctggtggacttgcttcagtttcttgagccatttttaagaaatgctgaactcggaggaccggttcatttcctatacaaagggacattgagagtattactggttctgcttcatgatttcccagagttcctatgtgattatcattttactttctgtgatgtgattccttcaagttgcatacaaatgcggaatattatcctcagttcttttccacggaacatgaggcttcctgatccttctaccccaaatttaaagattgatttgttacctgagatagtagaagctccctgtatcctttctgaggttgatgctgcgctaaaggcaaagcaaaattgaaggatgacgtggatgagtatcttacggcgaggcagcaaaattcaaccttcctaaggtgggttgaggacaaaggtacttctttcggccagcggggctagttcagctgggacccgttacagtgtaccattgatcaac

SEQ ID NO: 82837 - DNA, 1707 bp, Arabidopsis thaliana columbia
gcgatcttcctttctcttcaaacccttcaagagacaatctttcctgcgaaaatggtggtctctgctgactgcagaatctccctctctgcccctagctgcatacgtagtagctccacgggattgactaggcacattaagcttggcagcttctgcaatggtgagctcatggggaagaagctcaacttgtctcagcttccaaacattcgtcttcgatcttctactaacttctctcagaagagaattttaatgtctctaaatagtgtagctggggagagtaaggtacaagaacttgagactgagaaaagggatccaaggacagttgcttccattattcttggaggtggagcaggaactcgactctttcctctcacaaaacgccgcgccaagcctgccgttcctatcgggggagcctataggttgatagatgtaccaatgagcaattgtattaacagcggaatcaacaaagtctacatactcacacaatataactcagcatcattgaacaggcatttagcccgtgcttacaactccaatggacttggctttggagatggctatgttgaggttcttgcggccactcaaacgccaggagaatctggtaaaaggtggttccaaggtacagcagatgcggttcggcaattccattggcttttcgaggatgcaagaagcaaggacatagaggatgtattgatcctttctggagatcacctctacaggatggattacatggattttatacaggatcatcggcagagtggcgcggatataagcatttcctgcataccaatagatgacagacgtgcctcagattttgggcttatgaagatagatgacaaaggaagagttatctcattcagtgaaaaacctaaaggagacgacctgaaagcaatggcagtagacacaactattttaggactttccaaggaggaagctgaaaagaaaccatacatagcttcaatgggagtttatgttttcaaaaaagaaatactgttaaatctcttgagatggcgtttccccacagcaaacgactttggttcagagattatacccttctcagctaaagaattctatgtgaatgcttatctctttaatgactactgggaagatataggaacaataagatctttcttcgaggcgaatcttgcactcactgagcatcctggggcatttagtttctacgacgcggcaaaaccaatatatacatcaaggagaaacctgccaccatcaaaaatagacaactctaagctcatcgattcaatcatttctcatggaagcttcttaaccaactgcttgattgagcatagcattgtgggaattagatcaagagtaggcagtaatgttcagttgaaggacactgtgatgcttggggcagattactacgaaactgaagcagaagttgcagcactacttgctgagggaaacgttcccattggaataggagagaacacaaaaattcaagaatgcataatagacaagaatgctagagttggaaagaatgtaatcatcgcaaactcggagggtatacaagaagcagataggtcatccgatggattttacatcagatctggcattactgtaatcttgaagaactcagtaattaaagatggagttgtgatatgatacttttaagatctaattgtaagaactgagaactaaaaaatgcagagcataaaagtcaacaataaattacaaagaaatttatttgat

SEQ ID NO: 82838 - DNA, 442 bp, Arabidopsis thaliana columbia
  unsure (1)..(442): unsure at all n locations
ccaagacagaaaaatgaacacctatgacgtaacgtgacttcatatatctatatatatgcatgaaatcccatctttaaaatttatacgtttaaatcaaccaaaatatgtacaaactcacgctttgtatactaactctgagttttcttttgttatctggattatcaaatacgggtattagcccgagtacaatatgaatctccaagccaaaggaggaaaataggaaaagaagtttgggatcaaacactattaaggggtctcaagatcgggtgcatcagggcagtaattcagggggggcgttccttccatggtaattaattggttgtaaacctaaccggccttaaccnanaaaaaaaataaaaacaaaaaattctgtgtcaagttgatctaatttgggaaagtcaatgacatattaagatatgtatcttacgcttcaagctgaacc

SEQ ID NO: 82839 - DNA, 491 bp, Arabidopsis thaliana columbia
  unsure (1)..(491): unsure at all n locations
aaaaaaaaatgaaaattctactaaaaaaatacaaatgtaaattaattattcaaacttgcataattaacagaacaaaaatctaattgttatgccataatgcaagcaaagtttgatcggaatgatgacccaataatatatttcttagtcaacgaaccataaaatacaggatccaattaatgaacggctctcgttcgtcctcaagcttcaaatctgtattttaaaatatcaacggccaggattcataaatccctcgggggcgcgcagagacagtcagtggccattttcggcgacggaagtaggctccgccggctgctgctgcgttatacaatgaatggttcctccagcaagaacgatctctcttgcattctcggattccccacaaccgagtgatgaggaatgtatccggggggcacgatcgctccttncccgatnggtnccgatgngggggtatccccatggngngagaatccaacgngggnngctgcccgcag

SEQ ID NO: 82840 - DNA, 546 bp, Arabidopsis thaliana columbia
  unsure (1)..(546): unsure at all n locations
gnatttacggaaaaancnatgtaccataanaanaagttgacggatgtgcccaanatatattctagcacggaccataaattcnggaccaatttaatgacggctctcggncgnctaaagcttnaaatctgtattttaaaatatcaacggcccaggattcataaatccctcggtgccccccaaagccagtcagtggccattttcggcgacgggaaagtaggtccgccggctgctgctgcgttatacaatgaatgtttcctccagcaaggaaccgatctctcttgcattctcgattcccacaaccgagtgatgaggaaatgtatccgagaggacacgaatcgcttctttatcacgtattggatcaccgaattgtggagcgattattcctccattggcgatgtagaaattcacatacgatgctgcgagtcttgtccctgcaagtcttggtatagcttcaccatcctgagtgattccagacgattcttcttcagtcatataaaggggttccgggatataaacgtttaagtgaccttgaagtgttccgttccc

SEQ ID NO: 82841 - DNA, 493 bp, Arabidopsis thaliana columbia
aggagatccaaaaaccctagttgtgctagctctccgagttatcattttcaactattcgcgttgggttactgatattttcccggtcatctccggcgttaattttccgatcaggctccaaattctcaaagatggcaggaaaccaatctttaaaagattacttgaagaagtatgaaagtagtgatgttgtagagaagaagaagaagaagaagaagcagaagaagccatctaaacctgaaccaagaggtgttttagttgtcgacggagatccagttttggcaaaagcaggttgatcctgaagaggacggaaacggagatgatttcagcaagagggaacaccctctggttcgatgaagaccattgaaagttaaggcgattgagggaggttgtgaggaaatttaacggcaaaaggcgtgctcataaatcccattgcttgaggatggaagtgggtgggtaacgttacctctaaaccgtgaagacacacaatctaatattt

SEQ ID NO: 82842 - DNA, 615 bp, Arabidopsis thaliana columbia
  unsure (1)..(615): unsure at all n locations
caaatagacgagctatgacgtcgcatgcacgcgtacgtaagcttggatcctctagagcggccgccctttttttttttttttttttttttaccaaaaaaaacttaataaaataaataaatttaattgtcattcaaaactttacaaaaaaaatatcacacgattcttaatcttctctatgtaacaagtaatcttctctaaatctccttctaatggagaaatcatacgaacgagttaacgtttctctgaatcttctcaagtcaagcttcacgttctgtccttgtagatagattttcttcgtatattcccatcctttgtcgtttagactatccggatctcggattacagggtcatctttcccatattcttcatacaaagagctctctttcggcgcaatcttgtaaccaacgtacttcaatcctagcttcttcgccggttctccataatatgtctctgccgcccagtccgtccctaatgggatgatctgaatgaaaacggttttcggtttcaagaaaaggaaatgagtcattgctgctccatgtacaccgatcattacatcgctcgtgttcaacgaacgataaatcttggnnatttangttgccttttgtggttttagat

SEQ ID NO: 82843 - DNA, 612 bp, Arabidopsis thaliana columbia
  unsure (1)..(612): unsure at all n locations
aagatttgaaagtctaaactaaccgagttctgtttttgtaccggtttctcaacgttgagtttggttttttacgggtttcttacttaccggctgcatcagacagaccggacaagactcaggccatactagtatgtatagttatctcacatttcaaactagaaccagaattcaaacttcctcagtttagaatggttatctcctgaatcaaaccacattttgccgaacaaaatctgattcacatgtctgcaacggaccagagataagcctctatttccgttgctttcctctcattggtcttcttaatcagatccttctcagttccgttactacggtcgaccccatcccagtgtctacccggtttaatcccataccggtttgatgcagcttccaaccgtctcgtcaaccaactatgtttaggcacactttgtggtataatgaacccagattttttcatctcctcatcgtctcctagatccacaagagttgtctcgtactttcttttcttgaccaatgagccattgggatctccaaatntaactctttccttnatcagttggannangcncgggncnanccctgtcggngnaantgggttacccttcnaagncaagt

SEQ ID NO: 82844 - DNA, 527 bp, Arabidopsis thaliana columbia
tacgactcacattagggaaagctggtacgcctgcaggtaccggtccggaattcccgggtcgacccacgcgtccgcccacgcgtccggtactcagcaccatcaatggaccgcccggagacgatcgccgtcaaatgcgaacccatgaccgttgactctccttctcgacctctaaagcttgtagttttagctgaccttaatttcaatcctcctgagactgatgatcttgactcatccattccaatccctactcctcctcccatcactaggttgagtaacgaggaaagtcatcaagagggaggtatattaacatgcaaggaggtggaaccaggagaagtagaagccaaaaagatcagcaaggtgggaaaatgccgctccagaagtaagattgagtcttcctctgattgtggagttgatgcagatggtgatctggctaatcaaggggtccctgcatcccgggaagaaaaaatcagtaacctcaaaatgggtttgattcatgttgcaaggaagatgcccaaaaatgctcatgc

SEQ ID NO: 82845 - DNA, 498 bp, Arabidopsis thaliana columbia
tggagatagaaaagagtttgttccaaggaagttaccttcggttcatctcggggttgaggagactggcacagtgagcactgaaatagggaacttgattaggtggaggaagaattttgggaatgttgtgctggttatgttttgtaacggtcccgttgaacgtaccgcactcgagtggaggttactttatggccggatattcaaaactgttgtgatactttcttctcagaagaactcagatctctatgtagaagaagccaaactcgatcacatttacaagcatctaccaaagatatttgatcgatacagcagcgcagaaggattttggtttgttgaagatgatacagttctcaattactgggaatctacttcaaggctgacaaaatctaaggatttggactaccaggcaaggtatcaaaggcttgggcatcagtgaaaccggccgggaactctgattggttttctgtacaagcagagttagtgaagaaaactgtaagtaca

SEQ ID NO: 82846 - DNA, 507 bp, Arabidopsis thaliana columbia
ctcagtaacaaaaacaccgttccctagatttcctttcacctgaatctgaagatggagttctctaccgccgactttgaaaggtttatcatgttcgaacatgctcgcaaaaattctgaggctcagtacaagaacgatcctcttgattccgagaatctgctgaaatggggtggagctttacttgaactttcacagttccagcctattcctgaagctaagctcatgttaaatgatgctatttccaagttggaagaggccttgacaataaatccaggggagcatcaggctctttggtgtattgccaacgcgtacaccgcccacgcgttttcatgttcacgggtcctgaaggaagcaaaaaggggcactttgataaagcccctgattatttccggggggccggaaaatgggggtcccgggattcacacatatcgcaagtccttggattcctcactaaaggccccggaactgcatatgcagtttatgaatcaaggaatgggacagcaaatacct

SEQ ID NO: 82847 - DNA, 524 bp, Arabidopsis thaliana columbia
gattccatctttctccgtttccggcgataatcttcatcgcttcttcaggttcatgtttttccagattctttgatgccttttatgtatctctgactctccacggtttcttaatatgaattcttcttcgcttcatttctgattcgcgatcgtcagattctctggtttgtttgaaattcgaatccgtgtgtctgatatttcgattcctggatcatttgttgattatctttagaatggagctaaagaatgtcaaagatgcgtttgaatcgtgttaccaaaaagcaggaacctatgctatagcaaaccgcatgagggtggtagacaaaaatgcctcaaggaaatcggccaaggcatttgaaaacggtaccaggagggtaatccatggatcctgttgttgctgatctgaagaaaacttttgaggagattgctccaatcaatctactagaagcgtctcagaaagaaataaatggggttcttaccaaatacccgaaagctcttgacaaaactctgaatccagatatatcgac

SEQ ID NO: 82848 - DNA, 431 bp, Arabidopsis thaliana columbia
  unsure (1)..(431): unsure at all n locations
tgttcctgacaattatgattgccttgcaaaccttggagttgcttatcttcaaagtggcgatatggagctttcagcaaaatgttttcaagatttggtactgaaagaccataaccatcctgccgctttgataaattatgctgccgagcttctctgcaaacacagttcaactgttgctggtgccggggctaatggtggtgctgatgcttctgaagatcagaaggcacctatgaatgtcgcaaaggaatgtctcttggctgctctaagatcagattccaaggtctgcccattgcgtgggtgaatcctgccaattcatacctttaatggatgggtgatcacaggaagctcgggcaaatgtttcgagaaggcagccaagctttgatcccaactgtatggcnactaagnnntcctcgtttctgtccaacgggtcaaag

SEQ ID NO: 82849 - DNA, 923 bp, Arabidopsis thaliana columbia
cgggccgacccacacgtccagccccggctatcagatcgtcttctttatcgctcctctaattatattcatctcgagagacgagagctaaagaactacttccaaaaaaatgccgattgctgagcttgctgtaatcaaaacagtgggtgggcctctgatagcggctgctcttggagttggagcccaagtcatttacgacggcttcagaaaaggaaaagatacatctatcataaaccgtctcggccgtacaatggaaagtatcagtccggtgcgggatcgaatcggtaagctcagtaatgtggaaggtaaaccatttagggaagtccacgaaagtcttacgcgtctccttgaagatgcgaaatctattattgagaaatattggaaactcagatggagcagacacgtttgcaggaagtacaggtacatcaaaaaactcgaatcgatagaacttgaattagtaagggtagcacgtgagatacaagtccaccaatggaccgatatcaaagaaatgaaggcgatacaagtccaccaatggaccgatatcaaagaaatgaaggcgatacaagtcgaccaatggaccgatatcaaagaaatgaaggcgatacaagtcgaccaatggatcgatatcaaagaaatgaaggcgatacaagtcgaccaatggaccgatatcaaagaaatgaaggccagatatctgaaaagcataataaatgaatcaatatctaaaatctggtgtttttctctctttcttcttccccacaatgattgaaaaactcttcttgttatgaataaagatggatgcccatttataagggccatcatctaagcccatcatctagatttttctaggggttttaccccttcccttgttccccctatatttaaagaaaccccctttatctcaatggaataacacactcatttcttct

SEQ ID NO: 82850 - DNA, 527 bp, Arabidopsis thaliana columbia
  unsure (1)..(527): unsure at all n locations
aancctncggtccggcggatcccggngcccctgccgatggagtgcataaaggttttagtatttggcttgatgtacctctagaagccttagcgcatagaatagctgctgtaggaactggttcaagaccattgctacatgatgatgagtcaggggacacatacacagcggctttaaaccgtctttcaacgatttgggatgcacgtggtgaagcatacactaaagccagcgcaagagtttccttggagaatattactttgaagctcggttatagaagtgtctcagatcttacaccagctgaaatcgccattgaggcctttgagcaagttcagagctatttagagaaagaagatggtatggctagaccagatggactctagttccagaaagttatgtttccccggcaacatctcatgaatttgtgcctagttttgaatgttgtatataaatgaataatactcctgtttgagcacattggctccttttcaaattggacccaaaaaatgaaaaggagccatttgcatttttat

SEQ ID NO: 82851 - DNA, 481 bp, Arabidopsis thaliana columbia
ccgagttaatggtaccgagcttgattaacaaattacctggagcaatgttgttgatgactcggtatagattgttcttgaaccctggtttcccttacgaaaacatgctcaataggtaccataacgctactggtatcaccatgtgtgcttatctcaagcagtacaatgtctttaaccgaacttcaggagggcttatgcaactcaacttggggaaaccaagaccactttgaatatggttggctcatgctttcccttctttaagcttcccttgtttcgcggggttatctttaatttctacttggagttcccttggaatgggtactgtgggcctacatttgtagagaaccatgttctcaaggattttgctcagtctcagattgattacattcttggagacaaccccttaaaaatgagctatgtggttggattcggcaagaagtttccaagacgtgttcatcaccgaggcgccacgatcccaaacgac

SEQ ID NO: 82852 - DNA, 477 bp, Arabidopsis thaliana columbia
gatggatatttaggaaaaaggttggcgatgttcttctagattgggacacaagatttaacatagcactcggaacagccaaaggtttagcgtatctacatgaagattgtgatgcaaggattgttcactgcgatataaaacccgagaacatcctattagacgataacttcaatgccaaggtatccgatttcggactggcgaagctcatgacccgcgaacaaagccatgtcttcacaacaatgcgcgggacaagaggctacttggctccagaatggatcacaaactatgcggtatcagagaagagtgatgtttacagctacggaatggtgttgctagagttaaataggaggaggaaggacctttgtcccatcagaaacttccggggaatgccattttcccccttttggctttcaagaagatggaagaagggaagcttatggatattgtcgatgggaagatgaagaatgttgatgtgactga

SEQ ID NO: 82853 - DNA, 382 bp, Arabidopsis thaliana columbia
aactttgaaatggggaaatttaaactgaaaaaattaacgcgaaagagtgcaatacaaacgagtttttgacctaatcagttactaagaacttacggatactcctagcatgaaaaatcaaactactgttacaaccaaaaagtaaaatgctaaaaaataatgaaagttatttttcaaagggaaacaagtcaatgagaaactaacttggggctaacaactgaaccggttcggatcctaaatctctgctctaattaaggccctatttcttcaaaaacttggaacagcttgtagggactgaaccagctggcttaaaccggttgcgttgtcactggttggctccttcttccgcctcatctgtatgactttccggtggtggttcgagtgc

SEQ ID NO: 82854 - DNA, 387 bp, Arabidopsis thaliana columbia
agtagtaacgtgttttcttgatgaacacaaggagtttgatagaagaacttaacggccccaacaatagttgcacacatccataatcatttacgattttaagcatctatacattgcatccagatacttataaaaatttccagaaagagaagttggattcataacagtatgttgtaaagaggtacttacttggggtggttgtggttgttgaacggttttttcattgctctctctaaatccatcttgcaatcgtctcgcaattttttcattctcacaaagctgttttgaaggtggctactctcttcactgaggatatcgcccatgctaagaaagagcggacttcactgggccatgagcttggattcttggtttgcagaaactgagtttccc

SEQ ID NO: 82855 - DNA, 458 bp, Arabidopsis thaliana columbia
catgcttgcaaaagaatcgcttctcttgtcgcctctcctttcaattcttcactcggaaagctctctgttaactcctctagtgggtcagaccgagatgcgcctaagccgctcgatattgtctcgaacgatatcgtcttgtcctctcttagaaactcagggaaagtagcagtaattggcttctgaaggaaacgatagtccaacttggatcaaagatgatggtccttacgttgtggttgtagatcctctagatgggtcacggaacatcgatgctttcggtttcccacggggacctatatttggaactttacaattcggctcgttgagcttgatcatttacctgttgaagagaaagctgagctcaattctttgcagagaggcagcaggcttgtagcttccggttatgtgctatactcttcagccactatcttctgtgatacacttggatcgggaacacacgc

SEQ ID NO: 82856 - DNA, 448 bp, Arabidopsis thaliana columbia
ttcccaaatagtacttttttttttgtttggccttcttatagaaagaagaactcaaagcacagagagaagatgagcgaagaacaaccacacgccaatctagcggttcccgcgtttaaaactgagaaagagcccataacgcaaacacgaaatggtcaaagtagcgtttggcgtttcggtggaagtgataaggcagcgaaagcatccaccgtaacgcttagaggtgtcatctacatgctcttcgacaactgcggcaaagacgtcaataagaccattttacccctcggccacggtgacccttccgtctacccttgcttccgtacctgtatcgaagctgaagacgccgtcgtcgacgtccttcgctccggcaaaggcaattcttacggtctcggagctgggattctccccgcaagacgagccgttgctgattatatgaaccgagatcttccgc

SEQ ID NO: 82857 - DNA, 336 bp, Arabidopsis thaliana columbia
  unsure (1)..(336): unsure at all n locations
gtttggacgatgtgattattaatggctcacctgggtatctccctcctgagtgcttgcaacccgaacacgagctgccaacaccgaaatctgacgtctattgctttggagctgttctgtttgaactcatgacagggaaaaagccgattgaagatgattatctcgatgagaaagatactaacttggtgaggtgggttagaagtttagttaggaagaatcaagcatcaaaagctattgatccaaagatccaagagacaggctcagaagaacagatggaagaagctctcaaggattggttacctttgcacaagttagctcttccttaaaaggnggccaatg

SEQ ID NO: 82858 - DNA, 789 bp, Arabidopsis thaliana columbia
tgacccactatcacggttagctgttacgcctgcaggtaccggtccggaattcccgggtcgacccacccgtccgcctaaatctctttcaaacttacaagagctcaagattcttaagctagaggctaataatcttagtggagaaataccgaaagagcttggggatttgcagaatctgttattggttaacgtttcgtttaaccgacttatcggaaggttaccatttggagaagtgttccaaagcttagaccagagtgctattcaaggaaacctaggtatttgttcaccgttgttgagaggtccttgcacactaaatgtcccaaagcctcttgtcatcaatccaaactcctacgggaatgggaacaatatgcacggaaacagagctagcagtggttctggaacattccaccgtagaatgttcctgagtgtttcagtgattgtagcaatatcagctgcgattctcatcttctctggagttataattataacgctgcttaacgcgtctgtgagaagacggcttgcatttgtagacaatgcgttggaaagcattttctcggggtcttcgaaatcaggaagaagcttaatgatgggtaaacttgttctgttaaactcaagaacttcacgttcctcgtcttcgtctcaagaggccgaaagaaaccccgagtcacttcttaccaaagtttcaagaattggtgaaggggtttttggaacagtctacaaggcacctttaggagaacaggggaaaaacttgcctggtaagaaaccttgtcccgtcgcctttttttaaaacct

SEQ ID NO: 82859 - DNA, 520 bp, Arabidopsis thaliana columbia
  unsure (1)..(520): unsure at all n locations
aacgacgtgattatgctggtggtttgaaagttgggaataggattgaagacagggcagaagatggaagaaataagtttcatggttacaataatgttctggaagagcagttaaaagatgtagagatggatgttaagatgctaactgatgacaaactacgattggaggcgtccgttgaaaggaaggcacatgaagtagacattcttacttctaggatccaggagcttgagacccagttggatagagagaaagatgaatgtaggaggattacttcaagctcgaagaaatttgtgaaaggatataaccgtttcttgcgggcacaagatgatctaaagaggtcagaaagcccgtcttcagaaattgggaaaccaacttagtacgtatcttgcttggaagtgaaggcaataatagggttgtaggcctggatattttgaccgttaaggggcttattgncgnattttnagacctctttnacccnatnacggttcagatnctttttnatttccggaaancttntttgttc

SEQ ID NO: 82860 - DNA, 462 bp, Arabidopsis thaliana columbia
cccaagcgtccgcggacgcgtgggcgaactcaaagctatctctctccctctatctctgaggcacgcattttcgtctgtgattctcgagctcttttggggtttctccgagatttttggtcggttcttcacgttttgtttatggcggtgattacgtgatgaaagtcaccggaaagccgtattcgacggcgacattaccggcctttgagtcggataagaatctcttctctcacggtccagatctcagagctattcaaagagctactactgtcactaaacgtcgagctaggaacccgagtttgactcgtcagcgaagatccggtccttctggtggcagacgaagccggccggagactcctttattggaatggaaggtggaggatcggaataaagggagaagcggcgttgtagaagacgacgatttcgaggtggataatcaccaggttgcgaggtcagagactactc

SEQ ID NO: 82861 - DNA, 329 bp, Arabidopsis thaliana columbia
gaactaatggagccgcctgaagatgggaaggttaatgtcgccaaagagctttatggagaaagtttgcagatttcgaaacttagtaataaagatcatggtcttgagaatttagatgatcccttttacggaagttcagatgaagattatagtgaagctcgcgtgttggacattgagaatgagcagagacgtgtgaaattccactcggctggatatcgtgatgggattgttgccgggaaagacgctattgcgcaggaaggttataactttggctatcaggaatcagttcttgctgggttacaagtttggtattgttagagggtgtttccagt

SEQ ID NO: 82862 - DNA, 430 bp, Arabidopsis thaliana columbia
  unsure (1)..(430): unsure at all n locations
ctcacatctgaagtcaacaatctgatatctgagtacaccgcattgacagatgagtcccgcgagttgacacaggagaaaaacgacctgagagaagaaaagacatcgctgaaatcagatatagagaatctcaatcttcaataccagcagagattaaggtcaatgtctccatggggagctgcgatggttcacacagtcatgatggctccaccaccctcctttccataccctatgcctattgctatgcctccngggtcaatccnaatgcatccatcantgccatcttacacatactttgggaacnaganccntagcatgatcccagntccatgtcctacatacatgccctacatgcttcctaattacagtngttgaggcaacaatccggtgnacattccacaggnaccccggttacccntatttgggggaacct

SEQ ID NO: 82863 - DNA, 303 bp, Arabidopsis thaliana columbia
  unsure (1)..(303): unsure at all n locations
gcgtccgtgattcgggtcgggtcgacccgtttacagtgaccacctttaatgttgagcgaggtgagatttataccggaccggaatatacttcgacggattggtctttgacgagtctagtgatcaggtcaattgaatttcaagttagtttgatgattacctttataaggtttcctccatggttaattagtaaatgtttgagctttggttttgatccgtatcgaacaatgaggcgtggtagacgctatttagtatcgtggattgttgggttatgtgattcaggggttaaaagatgntaaagcctgt

SEQ ID NO: 82864 - DNA, 412 bp, Arabidopsis thaliana columbia
  unsure (1)..(412): unsure at all n locations
aagaaaacgagaacttcttcttgtctcagagtacatgccctatggtagtcttgacgagcatttgtttgatgaccagaaaccggttctttcttggtcacagagacttgtggtcgttaagggtatagcctctgctctctggtacctgcatacaggtgctgaccaagttgttctgcaccgagatgtcaaagcttccaacattatgttagacgcggagttccatggaaggttaggggattttggcatggccaggtttcatgagcacggaggcaatgcagctacaacagcagcttgttgggactgtagggtacatggccccgggggctantcanaaatggggggtttccnctggaactnattttttaaccgnatttggggnttttcaancctttaaagnnaaccctttgnggngggg

SEQ ID NO: 82865 - DNA, 366 bp, Arabidopsis thaliana columbia
ggccctaatactatcatcatatttatttcggcaaagccaaataagggaaaaatgttttcgacatttctgagcaaacatttaaacaataagtactatgagtctgatagtactcgagaggcatcttttaacggaggagactacatcacttttagaggaaaactcgagggagatgcgtatttcacaacaaggctcttcaaatcccatcttcatctttcatcttcccccatcacaatttctttctctgtgacatcagatgaaacctctaaacatggaatcctgctttctttctcatctccatcacacgggacggaatccattctcgtttcacgacaagaatccatctgtagattcaacaacatgttctta

SEQ ID NO: 82866 - DNA, 511 bp, Arabidopsis thaliana columbia
  unsure (1)..(511): unsure at all n locations
gcggccgcccttttttttttttttttaccttaagagacatcaaccacacaatatttcttctaatctcttacaaattttataagttctggtgttttcgacttcactttattattcgatacgaaattcttaaccagacgacattaatgaaaaaccctcataaactagtagtgtcttcaacatgagagattggttccaggagtgaccccaagcttcttgcagaagtccaagtaatggttaaccctgctctgcactgcagctggacgcccaccattacattcaccaccgttgatcctcctcgtggttgcaccaaacccttggctcaaaaccggacgcacattcttgttccaaaaccacatggcacactggaaagccacagttgggctacgagccaccatatctgggtccttcaagagaggaagtccagggaactttccggctgcaccatagttgtagttccagtgattggancggaccgcgaccatagtagtctttacgggttgacaaggatatg

SEQ ID NO: 82867 - DNA, 561 bp, Arabidopsis thaliana columbia
  unsure (1)..(561): unsure at all n locations
aaagnntaccaaaantactcacctaaattaaagncagattcnctcacttattatgnttcaaatnttaccagcggcattattaaaaccctaaaaactagtagtgcttcaacatgagagattggtcccaggagtgaccccaagcttcttgcagaagtccaagtaatggttaaccctgctctgcactgcagctggacgcccaccattacattcaccaccgttgatcctcctcgtggttgcaccaaacccttggctcaaaaccggacgcacattcttgttccaaaaccacatggcacactggaaagccacagttgggctacgagccaccatatctgggtccttcaagagaggaagtccaaggaactttccggctgcaccatagttgtagttccatgtgatttggatcggaccgcgaccatagtagttctttccgggttgacaaggatatgttgtgcttggtgagcagtaccttcctctggctatttcttctttgtaacaaaaacttccagattcgtgagagaactgagccaacatggcggcaatctcacgcttagcaacagttcc

SEQ ID NO: 82868 - DNA, 522 bp, Arabidopsis thaliana columbia
aggacggagaagcatttcaagggtagaagttaaggaaacaaaaaagaagaaattagagtatttcccaaggattgtgaaccaaaagatgagagaaagaaagataatggagattgttgatcaaaggctgattgaagttaatgaggtagatgaagaggaagtgatgaaattggtgtgtgtggctttgtggtgtatacaagagaagtctaagaaaaggcctgatatgactatggttattgagatgcttgaagggagagttccggtgaacgagccaccggattcagatgttgttgtggtcgatcttttggcggctgatgatgatgatgcaagtaccggtgttcgacgggtagtaaatatcccgaaattgcaaatccatagggagaggaatttccgtttatcatccatttgctctagtatcatatctcccatctttccacgctagtaatttttgggtgttcatattgggtttgtttcaatcaaaacctgagtatgtttgggggttcaattatcaacctttgtccggtt

SEQ ID NO: 82869 - DNA, 653 bp, Arabidopsis thaliana columbia
gaatttagccctgatcatgaggcagaggacagggacgcttggttcgatgaattcattgaaaaagtagatggaaaagtgacgttcaaaccggttgatttcgatgagttagccaagaacattcaagagaagattggttcacattttgagcggtgctttggatccgaaacacatctagaacttgataaagaagtgatccttcagattctggcggcttcatggtcatcattatcatcgggcgaagaagaagggagaacaatagttgatcagtggatgcaaacagttcttgctcgaagctttgctgaagcaaaacagaagtacggttcgaatcccatgttgggcgtgaagctggttgcttcttctagcggcttagcttcccggagtagaattgccggcgaaggtggatgtgatatggtgacatgcatatatataaatgaggtaataataaagagttataatcctcagattgtttttctcatggaaagttttttgcttgtgtaaattacaatgtaaaatggctaagctttcaccttgggagatagggttgtttgggagtcccattttgccacatcttttttggcattttgagttttaggtatttctcctaaaattttccccaacttccaaatttaaatgaattaaaccatcttctctgt

SEQ ID NO: 82870 - DNA, 562 bp, Arabidopsis thaliana columbia
  unsure (1)..(562): unsure at all n locations
gattccgcgtctagtgataacaagtcaaacttgacgttattctcggatgtggttgcctcttcctccccagtttctcaactgtgtagggaagcttcaacttcagggcataacccagtttgcaccacacatagtagttggacagttattttaaaaacagcttctatggctagcggggcaattaggagatttcaagaccgtgtattagggccgagtaggacgggtatttccagcagtactagtgagatatggctcctgggtgtctgttataaaatctcagagggtgaatcctcagaataagcagatgctggccgtgtattggccgcattcagacaagatttttcatccttaatactgatgacatatcgtagaggttttgagcctattggggacacaacttattcctagtgatgtaactggggttgcatgcttcgaaggggcccaattcttttcgacaggggttgctttttcaaagcctggaaggccttggggaaaaggntcccngccccggtggaatacttgggctttggccttttgggaacttggtcagatctggtcnaatttc

SEQ ID NO: 82871 - DNA, 458 bp, Arabidopsis thaliana columbia
  unsure (1)..(458): unsure at all n locations
cnaaagggcaaccctttaanaaacgacgacatggcccattgccagtttttaacatgcccaccaatacagagaaagctccatgaaccacgagcatgacactcgtaaatggtgcacacattgaccaaaacacaaatgattacgagtaactcctgattaaagagctctggcttaaggtgaacaaagtctagaactagagagagcaaaaagatcctggtgaccaacaataatcaattagctagattagatacattgacctttgcaaatgaacaaagatccagcatgtttgacattgtacataagacattcagacaactgacccatgctcatcaagtcctcttatgaacgtgacaagactcctttcgagcttggtattgtcccaccgcggcgtggatcagactctgttgcttgtcggagagctcttgcaaaggccttaaaggtcgcttctattatgtgatgcg

SEQ ID NO: 82872 - DNA, 777 bp, Arabidopsis thaliana columbia
tgggatttgtggtgatgggattcgttggattcttcgtgaagctcgttttcatcccaatcaacaacatcatcgttggatcttcttagtgtagtactttctttacgaggtaattgatctcgcattatatatctacattttggttatgttacttgacctatagtcattgattcaatagttctgttaattcctttaaagatcattttgactagaccacattcttggttcattcctcaataatttgtaatcatattggtggatatagaagtagattggttatagatcagatagtggaagactttaggatgaatttcagctagtttttttttttggcgtattgtctcaaaagactagtgctttgctgtctccattgcttctgctatcgacacgcttctgtccccttgtatctttattatatctattcggcccatgggttttgtttgccctgtattcgttcgctctggtgtcatggatggagtctctgttccatgtttctgtaatgcatgttgggttgtttcatgcaagaaatgctgagataaacactcatttgtgaaagtttctaaactctgaatcgcgctacaggcaatgctccgaggagtaggaggagaagaacgaaccaaacgacattatcagccctttgaggaagctcttagttttgttattgtttttgtagccaaattctccattcttattccattttcacttatctcttgttccttatagaccttataagttttttattcatgtatacaaattatattgtcatcaagaagtatcttt

SEQ ID NO: 82873 - DNA, 659 bp, Arabidopsis thaliana columbia
cacaccggcgacctgaaaatggaaacttcctgttttacccttctcggtctccttgtctccctctccttcttcctcactctctccgcccaaatgaccggaaacttcaactgcagtggctcaacctcgacgtgtcaatctctcgttggttactcaagcaagaacgcaacaacgttgcgcaaatatccaaaccctttttgccgtcaagaacctccgctcgatcctcggagctaacaatctcccactcaacacctcacgtgaccaacgcgtgaacccgaatcaagtcgtacgtgtcccaatccattgctcttgctccaatggaaccggtgtctcgaaccgggacatcgaatacaccatcaagaaagacgacatactctctttcgtcgcaactgagattttcggtggtctcgttacgtacgagaagatcagtgaggttaacaaaatccctgacccgaacaaaatcgaaaccggtcaaaagttttggttccctttgccttgtagctgtgataaattgaacggtgaggatgctgttcactacgcacatgtagtcaaactaggggaggctctcttcgggtgagatcgctgctcagttgggaacggacaacacgacgttggctcagctcaatggaatcattggggactctcagcttcttgctgataac

SEQ ID NO: 82874 - DNA, 518 bp, Arabidopsis thaliana columbia
  unsure (1)..(518): unsure at all n locations
gtcaaaagctgaaatgtttccaatataaaaatggtacaaggacgtgatgcttctggtgaaacaatgtctttattttaatccgaactgtacttagatacacactcataaacacacaacaaaacattactagagaaggcagagacaaagcagagcacactgaatcaacacaatcacgaaattgaagcttgagctgagcgttgatgcatagttatcaggaccagcagaatctggacaagctggggaagctgtggtgaagatggtttggttggagtaaccagcatagacgcaatcacgaggtcgtcctgccaagaggcgttaagcaaagctccatccacattggggaaatgggggggcaggtttgccagtccgagggcttattctcaggtggtggattgaccgcttaaagccccattcttcaaggcgccacaagtacccttggcgcaattgtttccagtgaagacgtatgagttgttaacagaaccaggggctnccacggnctccnccagaggntnaccttt

SEQ ID NO: 82875 - DNA, 505 bp, Arabidopsis thaliana columbia
aagcttcgcttgagatggaagggaagcaatatgagagaatgattgatgagaaatttgcttatgatgaggaagagatgaatattctcaaggagattctttttaaaagggagagagaaaagcattttcttgagaaagaacttgagacttacaagcacattgatgatgatcaagagacggaagacaacgagaagagagaatgcgatgaggatggagaaccgattgtgtatgatgttcatgtcattgaggataatagtcagactaaagtgagggatgatgatgtagcagaacacaaagagatgaaggaagaagagatagtcaaggatcatgattcagtatcatcacctacttcatcttcaacacatctcccataagtttctaattctgattgttgaactctgtttttgttaatgtatgtgtgtagatttggggtaattggtgattatcaatggccgttttaccttttaggtggtgtcacgcataagatgaaataaaaatgttttgattg

SEQ ID NO: 82876 - DNA, 522 bp, Arabidopsis thaliana columbia
ggatttgaattttcctcctccgactttgaacaattctcctttgttgaacctcttcgacgatacaacgccggaactgaagctacttccgtcgtctcgttcttctcgtccgaacactagtaatttacagagtgtatgcacactggacaaggtgaaatcagctctagagagggcagagagagatcctgctatgttcaagaaacgtcaatcaccggatgatacggtttacgatcattataggacggaggctgtagcgtcaccggtggttgccggatgtcctggttgtttatcgtacgtgttggtgatgatgaataacccgaaatgtccgaggtgtgataccattgttcctttgcctacaaatcctatgaagaagaagcctaagattgatctcaacatatcaatctgaatgttttggagtttatattggaacatttttgtaaatgatagataacaattcagggggtttattttgtaaaacttaagaaagaagaaaaaattgatggtaaggaaggaagatttgaaggg

SEQ ID NO: 82877 - DNA, 635 bp, Arabidopsis thaliana columbia
  unsure (1)..(635): unsure at all n locations
cttcgaaactaatatcagagatagatttagaagctttttcaatggcggcgtttttcctttttgcaaggagacgcttctcctgagaaatcggacgcgtgggtcgacccacgnananaaaaacatctctctgcttctttagtttcacatctcacacaagtctttgctctctcttaacagtttttcttctatcatctttaaactatgggaactgttgtgtatcaacaagggtttcagtctcagcttaatgagcctagggctttaaggcttaggctatcttcaccaaatcctcacttttctcaaccatttggtttagctctcaaatctcatttacttgactcctctcatgcagaggacacccgaaaccgtaacgatgacaaagctgctgcttccccggtctctgactcgagtggctggagctctctccagtccctatcctctggctcctcctcctccacaaagacgacgacaagctctgagaaagagagtagttactatgttcaacggccgtcttcttgtagagctctaagggaccagagcttagcattgtgcactgagatctcggaagcgatctggtctgtgtacagnattntgngtgtcccgctgcggnaccagatcnggggaacangggagngttt

SEQ ID NO: 82878 - DNA, 409 bp, Arabidopsis thaliana columbia
accacgcgtccgcatttccatacttggccttcactaagattagtttttgcacttctctctttctctcgatcgctgcttcttcgtcgctcaatctcaagctccgttccgttagttcttcgtcggagagacggggtggagagaatcctgctgcaagtggtagctgtttgatacttgagtcattttgtcacagcaacatgaatatgccgctgttggatattcaaccacgaacgttgcagtttgcagttgacctgaagaagcaaacttcctgcgtggtacagctaaccaatactacccatcattatgttgcatttaaggttaaaaccacatcaccaaagaagtactgtgttcgtccaaatgttggtgttgttgcacctaaatcaacctgtgaattcactgtcattatgcaagc

SEQ ID NO: 82879 - DNA, 593 bp, Arabidopsis thaliana columbia
  unsure (1)..(593): unsure at all n locations
ccaaaagaaacaaaaccacctcgaaaacaattgagacagcctccttctgttcctttcatttgggaagagcggcctggcttccccaagaagaattggcaaccttcactagccacttttgtgccttctcctcctccgcttccgccacctatcccagtcccggttaagctggtaacatcagttcctttccgttgggaagaaacgcctggaaaaccactccctgcttcctcaaatgacccacctcagcttccacatccaccattggaaaccgctacgccgactccattaccgcctccagttcctgttccggttaagcaggttacttcgggtcctttcgatttgggaataaacttccaggggacaaccattacccatggcttttgttgactaccagtccacctgagctgttggatcaaccgctgccaccgcctcccatgtacggtgatgttgaaaccagcagcgatatttttgatgatgcaagcagtgactccttcagctctgtgccgtctctattagcaacaaaccgctcggtttcgatatccggtgctgntgcggtggatgaatttgatgacaacctgaatacagtgactagctcg

SEQ ID NO: 82880 - DNA, 511 bp, Arabidopsis thaliana columbia
  unsure (1)..(511): unsure at all n locations
agagaattttattagtctctcaatatcattttccacaaaacttatcatgtcatcatcatcatcatcatcgtcagccaccgatactaacataaagccatcgtcttcgttgccggcggtggagtctgtcacgtgcgacacgtgcggtttcgctgaagagtgtacgccagcttacatccaccgtgtcaaagaacggcataagggacactggctttgtgggctttgcgcggaagcggtaaaagacgaggtggttcgatcttccactcgtatctccgtcgaggaagctctccgccgccacacgacggttttgccaccgtttccgttcttggagtcccgatgaagaggaaggttcccatatccgtcaatttggtaggattctacggcggaccttcgacgggtctccacggggaaccaccacggggacaagctcaattggggtttcaccgggattccngggtnaagtnagcgnggtngtttttcnntttggngtttttccgttttttnttaaaaattg

SEQ ID NO: 82881 - DNA, 538 bp, Arabidopsis thaliana columbia
  unsure (1)..(538): unsure at all n locations
cagnnnnnnnnnnnnnnnnnnnnnnnnnnnnnnnnnnnnnnnnnnnnnnnnnnnnnnnnnnnnnnnnnnnnnnccacgcgtccgctctctggagccgccacgtctcagtgatccgactacgacacctttcttcactcttcttcttgcgtcttctctgctctcgtggtctctctgttatttaattttaatcgattgagatcgcttttagctctcgtctttgaattttacgggcagaaaatgggtgaagaagctcgagcgttagatatggaggagatcagtgacaacacgacgagacgaaacgatgtcgttcatgacttgatggttgatttatacccgcttagcagctactacttcggttcaaaagaagctcttcgcgtcaaggacgagattatctctgatcgagtcatcagattgaaatccaattatgctgctcatggattgagaacttgcgttgaagctgttcttctggttgagttgttcaagcatcctcatgttttgcttcttcaatatagaaactccattttcaagcttcctgggg

SEQ ID NO: 82882 - DNA, 503 bp, Arabidopsis thaliana columbia
aaaagcatcataatctcgatgagttaaatccatgtatctcataaccctaatcaccacttagctagtaaaaggaaaggaaaataaaaaggacttgtgtggtagaaaaggaagatgagcagtagcggaaaccctagcagcagcagcggtggaggaggaggaccgtgcggcgcgtgcaagttcttgagaaggaagtgtgtcgctggctgcatcttcgctccttactttgactccgagcaaggagcggcgcacttcgcggcggttcacaaggtgttcggagcgagcaacgtctccaaactcctccaccatgttcccgagcataaacgatccagacgccgtcgtttcaatctgctttgtaggctcaagctcgtctcagagaccctatcttcggcttgcgtctctaacatcgtctctcttcagcaacaggtggtaagtttgcaaactgagctttcatatctacaagcacacttagcaactctagagctgccacaacctcaaccaccaca

SEQ ID NO: 82883 - DNA, 515 bp, Arabidopsis thaliana columbia
agctggtggctgaagcagctggaacacccctgtttgagattttcgttattaaagacactgacggaggatatgttatgcaggtggtgtatgtgcaacacgtgaagcaaaacctaaccatttccgagaattccttttcaaaagtacagcaatcctcgaaatcctcgatcaatgacccatccattttagatgtacgaggaagtgaactgaaggtggataaaaaagaagatacacaactaaatgctggggaaccaactgaagaaggaattaaaaatgtgataaaatttctaaaagataaaatcccagggctaaaactgaaagtaatggatgttattaaaatccctgaggaagagattgttggcagtgatgacgctactgaagagctggttggagaaggcactgaggaaacaaattcttctgatgatgaagaagaagtagaagaagaagaaaatgacagtattgaagcaatctcatctatggatagtgcagattatggaaagcattcaaacactaggttt

SEQ ID NO: 82884 - DNA, 716 bp, Arabidopsis thaliana columbia
  unsure (1)..(716): unsure at all n locations
ctagggtttctgaaatcgaggagagatccaatcggcaatggcgaatcaagtgatcaccggaatcaaagaaacagctcagtcaattactggagcggctcgtccatggggcgatttcctcgatctttccgccttcagcttcccttcctccatcgccgatgcaacaactcgcgtaactcagaacctgactcacttccgcatcaactacagtatcattctctctatcctcctaggtctaaccctaatcacacgtccaatcgccatcctcgcgtttatagccgttggcttagcttggttcttcctctacttcgctcgcgaggagccactcacgatcttcggattcactattgatgacggcatcgtcgctgtgcttctcattggtctttcgattgggtcgctagttaccaccggagtttggctcagagctctcaccaccgttgggatttggtgttctggtttttgatcttacacgctgcgttaagaggaacggatgatcttgtgagtgacgatctggaatcaccttatggaccgatgctctctacctctggcggggggtaacgacgggggctcgtnggngattacaaggggaatcttnatcaacaagaatttggtaaatgaanttgggggattttagggttttngggnggtttggggaaattggcaaaaggntggggttgggggtccccccnaaanantggnaaannaaaaaaatttttttt

SEQ ID NO: 82885 - DNA, 550 bp, Arabidopsis thaliana columbia
aatatccttacatcgcggggatgggagtttattgtttcaaaaccgaagccttactgaagcttctgacatggcggtacccgagttccaatgactttgggtctgaaattattcctgcagctataaaagatcacaatgttcaaggatacatctacagagactattgggaagacatcggaactattaagagtttctatgaagctagtattgctcttgtcgaggagcatcccaagtttgagttttacgatcagaatacacctttctacacttctcctcggtttctaccacccaccaaaaccgagaagtgccggattgttaattcggtaatctcacacggatgtttcttgggagaatgcagcatccaacgttccattattggtgaaagatcacgtcttgactatggtgttgagcttcaggatactcttatgttaggagcggatagttaccaaaccgaatctgagtcgcgtctgcttgcggaaggaaatgttccaattggcattggccgagatacaaagatcaggaaatgcatcatcgataaaaacgcgcggattgg

SEQ ID NO: 82886 - DNA, 495 bp, Arabidopsis thaliana columbia
caacggtttgttcgaagaacgagaagcaacaatcaagaagctaacaatgctttctgcacatcgtttatctgattcagtaacgctggtttctcttgctcctctctctcaatttcttttgtcggttttaaattcatttcattttattataaattcgctaccgttttttttctgtcaccggagctccttcttccagatcgtgcttgatgtcccggatatgattttttagttccaaatcttgaatcttttgattggataagaaatgaggaagcttagtattagagactccttgaaatctttctttgagcctcatcttcatcctgataatggtgaatcactcaaaggaacaaaaactgaaattgatgagaaagtgaagaaaatcttgggaattgttgagagtggagatattgaggaagatgaatccaaaagactagtggttgctgagttagtgaaagacttctacaaagagtatgagtctttgtatcaccaatacgatga

SEQ ID NO: 82887 - DNA, 380 bp, Arabidopsis thaliana columbia
aacatcaatcctcttcctctaaaccggttttcgtcttaaaacatattttgtcattaacaatgtttaaatgggccacaaaacaaacaatgacaatttacaaaacaacaaaaccctaaatccccaaactcattatcaaatcgtgttgatcagattccactgtaatcaccacgagcaccgtcgttaccaccgccagaggtagagagcatcggcccataaggggattccagatcgtcactcacaagatcatccgttccttttaacgcagcgtgtaagatcaaaaccagaacaccaaatccaacgggggtgagagctctgagccaaactccgggggtaactagcgacccaatcgaaagaccaatgagaagcacagcgacgatgcc

SEQ ID NO: 82888 - DNA, 580 bp, Arabidopsis thaliana columbia
agtagttcgagtaatctttgtttacctggttcgcttgatttttttattgttcgtgggaagattgttgtttgtgatagaggtgttaatgctagagttgagaaaggagctgtggttagagatgctggtggtttagggatgataatggcgaatactgctgcgagtggagaggagcttgtggcggatagtcatttgcttcccgcgatcgctgtagggaagaagactggtgatttacttagggagtatgttaagtcagattctaatccaactgctcttcttgtttttaaaggaacggttcttgacgttaagccgtctcctgtggttgctgcttttagctcgagaggtcctaatactgttactcctgaaatcttgaagcctgatgttattggtcctggagtgaacattttggctggttggtctgacgctattggtcctactggtcttgacaaggactctaggaggactcagttcaacatcatgtcaggtacgtcaatgtcatgcccacacatcagtggtttagcgggtcttttgaaagcagctcaccctgagtggagtccgagtgctatcaaatcagctcttatga

SEQ ID NO: 82889 - DNA, 341 bp, Arabidopsis thaliana columbia
  unsure (1)..(341): unsure at all n locations
cccacgcgtccgtgagaatgctattgaacttctcaaaacaattggggctttaaatgacgtggaagagcttacaccccttggtcggcatctttgcactctacccgtggacccaaatattggaaagatgcttctgattggagctatcttccagtgcgtcaatcctgctttgacaatcgctgctgctctggcgtatcgtagcccatttgtcttaccattaaataggaaagaggaagctgatgaagccaaacgatattttgctggtgattcctgcagtgatcacattgctcttcttaaggcatatganggatatcgggatgcaaagcgtggtggaaacgaaaaag

SEQ ID NO: 82890 - DNA, 434 bp, Arabidopsis thaliana columbia
ggaacctacaacatactccccgatgataacgttttggtcattaggtcgttgattttcaaaacatcaaaagggagaatctctcccacatatgggtttgtgtcaggtaccaaatttgtgttggagagccaaggtaatgctattgttggattctatgggcgggatggtggtgctttcgacgctatcggagtttacttctctccaattccttcgtaattcgagactataaaggctataaaaccatatggttagatggaaatatagtcacgaacttcatcttgttttaaggctctcatatctacaatgatttactacctactccgatgtttctttaatcagtaatttctttcgagtttacaatctcttgtaataaaacaaggtttaattatgaaacctgtatttcagtatttaaaaataaaaatattattataattctg

SEQ ID NO: 82891 - DNA, 515 bp, Arabidopsis thaliana columbia
  unsure (1)..(515): unsure at all n locations
gatggtgattggcttccatggatccgctgggaaagtcctaaactccattggagcatatttaacaacagctcctcctactaagtcacaacttgtaggtggtctaaccggaggcgaaccttgggatgatggtcctaattatgatggcgtgaaaaagatatatgtcacttacattagcactcttataaggagtatcaatgtggactatgaaaaggacggccaagttgtaacacgttaccacgggatgaagaatggagatacagaggagtttgtgatagactatccaaatgaatatttgatatcagtggaggggacctacaacatactccccgatgataacgttttgggtcattaggtcgttgattttcaaaacatcaaaagggggaatctctcccacatatgggtttgtgtcaggtaccaaatttgtgttggggggccaaggtattgctattgttggattctttgggcgggttggggcttttgcggtttggggttttttnncannccncgaaatngaa

SEQ ID NO: 82892 - DNA, 1206 bp, Arabidopsis thaliana columbia
actaaccacttccttatccacaccaatccagaacgttcctcaaaaagctccctccttttctctcaaaatggcgtctgcaaacgctctctcttccgcctccgtcctctgttcttcccgtcagagtaagttgggaggaggaaatcagcagcaaggtcagagagttagctacaacaagaggacaatcagacgttttagtgttagagctaatgtaaaggaaatagcttttgaccagcactctagagctgctctacaagctggtattgataagcttgctgattgtgttggtctcactcttggccctagagggaggaatgttgtgttggatgaatttggaagtcctaaggttgtgaatgatggagtcaccattgctagagctattgagttacctaatgccatggaaaatgctggtgcagcgcttattcgtgaggttgcgagtaagactaatgactctgctggtgatgggacaaccactgcgtctatccttgctcgggagataatcaaacatggattgttgagcgtcacttctggtgcgaatcccgtttcactcaagaggggaattgataagactgttcaaggtctgatcgaagagcttcagaagaaagctaggcccgtgaaaggtcgtgatgacatcagagctgtggcttctatctctgctggaaatgatgaccttatagggtcaatgattgctgatgccatcgacaaagttggacctgatggtgttttgtccattgaatcttcatcttcttttgagaccacggtcgaagttgaagaagggatggagattgacagaggttacatctcgcctcagtttgttacaaaccctgagaaactactagctgagtttgagaatgctagggtattgatcactgatcagaagatcactgcgatcaaagacatcatccctattttggagaagaccactcagcttcgtgctccgttgttgattattgcagaggatgttactggtgaagccttagctacccttgtcgtgaacaagcttcgtggtgtcctcaatgttgttgccgttaaagcgccaggatttggagaaagaagaaaagccatgcttcaagatattgcaatcttgacaggagctgagtacctagccatggacatgagcttactggttgaaaacgcaaccatagatcaattgggtattggccgaaaagtcacgattagcaaagattcgactaccctcattgcagatgc

SEQ ID NO: 82893 - DNA, 462 bp, Arabidopsis thaliana columbia
  unsure (1)..(462): unsure at all n locations
aaaatgaatgaggccataatgagatttgagaaggttcggtcaattgatccttacacactaaccagtatggatgagtatgcgatgctgcttcagattaagtgtgattattccaggctaaacaagctcgtccacgatttattaagcgttgatcataccagagcagaagtatttgttgctttgtctgtactatgggaaaggaaagatgcaaggacggcattatcttatgctgagaagagtatcagggtagacgagaggcacatacccggctacataatgaagggaaatctacttttacaagcaaaacggccagaagctgcagcgatcgccttcagggctgcccagaaatttgagggtccgttcttcgttcatatcaaggcttagtccattcttatcttgcatttggtaanccaaggaggcntttttnccnccgggangcattgttcaatgnntnatncgnggnng

SEQ ID NO: 82894 - DNA, 504 bp, Arabidopsis thaliana columbia
  unsure (1)..(504): unsure at all n locations
ccagaatgtcgtcttcttcttcttctccttcttcgtcttcccttaaacccattaattcaatttcctgataaacgagcagagagagatctgtcaaaatcacaaaccgtgaattcgggaagaataagccgatgatgcttcgtattgttcaaatcgcgtttctatgtctcgttctcgtcgccgggatctcgatctccacggcgatatcagagactgagactatatacgagatcctcctggcaaacggattaccttcggggatattcccgaaaggtgtcagagaattcaccttcgacgtcgaaacgagacgattctcggtttatttgaatcaggcatgcgaggctaaatacgagactgagatacattacgacgccaatattacggggactatagggttctgctcaaacctctgatttggcttggaatctgcgggaaacctatttttgtggttccggtaaaggatccgngngcgnnccnagtntggcttnaanctcggcggtgggtttt

SEQ ID NO: 82895 - DNA, 653 bp, Arabidopsis thaliana columbia
  unsure (1)..(653): unsure at all n locations
gatagagagagagagagatccagaaaaagacgaacaacattggcgctgcaatggctgattctatcgtatgtggtggccgtcgaagtagtaatcaccctcgtgttgactctcccttaccctatgcttcttaagaaacgtgtagttcagcttgtctcattgattctccaacctgctgcttccatcgtcgccttcgccggatttcagctcctcgatatttactggaaggctgagcatagactatcttgttcatctgaggtttgcactgctacagaacgtgatcgctacgagaaatctatctacaagggctcagaggaacgtggttctatgcgcttgcaggaattctactctactggtgcatctaccgcatctgcaaatacaacaaagacctggagcgcttggaggcaaacggggaagagattcaaggnagagtaataatcttcacgagtatagggagttgggtcctcaaaaccattatataagtaaagcnttttttaattgcattttacggtccaaaattattgncctgaatgaaccaaggggnancgngaanagcctttgacaccnaaatgggnaaacaccagggccaatccnttggcaaattcaaganaccctaattttcggggggaatcctgacccgggggcncnannttttc

SEQ ID NO: 82896 - DNA, 636 bp, Arabidopsis thaliana columbia
aaaagatgctcttgcttaaacaccaacataaacaagaagagcagcagcaattgttacgacagcaacagcagctgtattctcaggtttttgctgatcaacagcgttctcagcaacggtttggagacccatcttatggtcagttgcaggcgtctcttgatgcgcttaggctgcaaccatcaaaagatatgtcacaagtcaatcagcaggtgcaggttcctgtttcccatgaggagcgaggcatcaacttagctgatttgctcccagtaacccatgccactaatcagactgttgcttctttcgaaaccccctctctgcacctgcaaaaccagctatttggtaatgttgaccctaggatggttctgcctgatcaaattgatgatacccataaaaaagagtcgaaatcagaatatgaaagaacagtttctgcagactatgtgaacagcttgtactcagaaaagcctgtcctttcccctggctatcatgctacacataatgtggaagaacctgtgagctatccaaacaatgaaagctccactgctactatgacagctcccgaaatagttgaaagtaagttgctggaggagcagtctaaggacatgtatgctggaaagggagaggtcagtattgagttatctg

SEQ ID NO: 82897 - DNA, 501 bp, Arabidopsis thaliana columbia
ccgcattcatcatcacctctcaattcattttcacgtctcctcgattgttcaactctttaagctcacaatatatacaaaactctgtttttgattttctctttgatcaaaatcaaaaaacgccgatcacaagttcacaacatgccgggaaattctcaccgccggggatccgacgtcatattcaccgtgatgatgatcgccttgctgacgtgtccaacactcatcaacggttcatcatcatcagatgcttctttagaagcaagaaagctcgatgaggtcgatcccataaagtgctctccaagctgcatccaaaaccctcctccggccatctcctctcaccaccgtcttccgccaccacctgcatgtcccttccaacccccggctcttttccaccgcctccggcctaaggaagtcagttcctactgcccaccgcctccgccggctaatttcttgtacatcacgggtccgccgggaaatctctaccccgttgatgagcaattcgga

SEQ ID NO: 82898 - DNA, 759 bp, Arabidopsis thaliana columbia
cattcatcttcttcttcaatctctctcaacacaaagatgtatcaaagaagttatgagctcaatgatggagactctccagattcgtaaacccacttccctccccgtttctcaacgccctaatgcagcagccaccgccgacgatgagcctggtctcatccgccgtcgtctctcttctctatcactcaacctctcaaaccaaccagcagcgatcgcacctgcttgccccaggtcccaatctgttcccgccatgggagaacaagcaggaagctctgtgaaagaatggtgggaatggggttggtcatggatcctttcaagaaaacctatattcatcagagatcttgagcttaacaaagacgaagctaaatcgattggttcacaaaacagaggaagtataatgcacgttttcttcaaactccgatctcagatccgtaatttcatgggaccttcttcagaagattctcttcctctttcttgcaaatacaagcgtcaacgataaaatgattcatataaggttgagattttgtgatttgtctgttctttttttacttttgtgcaatggagtataatgaatgtataattcgtctttttttttttaaacttgatgttgtattttgctataattaatttgcctagattattattaatcaatttatttattttatttgtggttacgacgtttgtggctagtgcagttggtatttttgtatttttaaatagccagtgcaaatttatataaaaaaaaaaaaaaaaaagggcggc

SEQ ID NO: 82899 - DNA, 625 bp, Arabidopsis thaliana columbia
ctcgtcgtcgtctctagtctgaactttttcaatctctcgcgatttcattcaatcaatggcgcctaagaaaatcggagccggcaaaggcgattcgagcatcttggcgaagatttcaaactacgatatcgtttctcagggaagacgcgccgcttgcgatgccgtctacgtgtcgaagaagctgttaaagagcaccgggaaggcggcgtggatcgccggtacgacgtttctcatccttgccgtgcctttgatcttagagttggagcaagatcatcgattaggcgagatagattttgagcaggcgagtcttctcggaaccccaccggtcggtgcgatgctctaaagtaactttagaaaccctaatccgtcgatcatatcataaatttgatattatcatgcttgtttctgctactcgattagaagctgttagtttccttccttgtgtaagattaggtttactcataagggatttgatgaatttcaattggctattttgaagattgtgtttgagcaatcttcttctaatttatttggcaatttatgatgtgggctgagattttctccgtacaagtgattattcttttaatctcatagctgtgactcactttgagtggagcatcaatcttcg

SEQ ID NO: 82900 - DNA, 564 bp, Arabidopsis thaliana columbia
gaggcatcaagttacaagaacatggctgcaaaacttgagttcgacctaaaaagcttatcggatgcatacaacagtctagaacaggcgaattaccatcttgagcaggaagtgaaatccttgaaaggaggagaaagtcccatgcagtttcctgatatagaagccattaaggaagaagtgagaaaagaagctcagaaagagagcgaagacgaattaaatgacttgttagtatgtttgggacaagaggagagcaaagtcgagaaactaagcgcgaagtgatagaattaggagttgatgttgataagcttttagaggatattggggacgaatcagaagctcaagcggaatctgaagaagactgaccattgaacaagtagtagagattctatatcctctaaaatgctctctcatcaggtaatggaacttgtacagtcttgggtggtttattttgatgtttgacaattctctttgcttaatcttttagttataactctttaattttctaccaacttttagattccttgaaacatccacatcttaccattagaacccaatttggttaggttc

SEQ ID NO: 82901 - DNA, 427 bp, Arabidopsis thaliana columbia
  unsure (1)..(427): unsure at all n locations
caagaaacaagaaaaatgggtgttcttgatcacgtctctgaatatttcgattgttctcatggaagctccaagagacacaaaagtctacagacggtggatgtgagggttttgatagattgtgaaggatgcgagaggaaagtaaggagagctttagaaggaatgagaggaataagagatgtaaccatcgagccaaatgctcagaaagtgacagtggttgggtacgttgaaccaaacaaagtggtggctcgtatcattcaccgaaccggtaaaagagcagagctatatcctttcgttccttacggcggttgtggctcatccttacggggctggtgtttacggtaaccagagccccgacttgggtaccgttagggaccccccggggtttgatccccaaagtttcanggtttngaacgngntnanctncccc

SEQ ID NO: 82902 - DNA, 542 bp, Arabidopsis thaliana columbia
aaattttgtggtgaatgagagagtcaactttaatggagaatgtcatcaaggagaactatctcctccttcatcttctttatcgtctcttctaccattctttttctcgccggaaaatcctcggccaaaatttctcataacggtgacaataatgtgacggccttgttcctctttggagactctttcttggatgcaggaaacaataattacattaacaccactacacttgaccaagccaattttccaccttatggtcaaacattctttggcctccccaccggaagattctccgacgggtcgtcttcatctccgatttcattgcgggatatgcggatttgccggttaattccgccgtttttgggaccggggaatagtcaaaaagaagcttttccgggcgtcaactttgcggtttctgctggggcttgggtgctcttgtggaaacgttccaaggttcggttataaatttgagaacacaattggatcactaccagaaagtggagagattatggaggacaaactttggtaaagaagaaagcatgaagaga

SEQ ID NO: 82903 - DNA, 1947 bp, Arabidopsis thaliana columbia
gccagctctatacgacttacttagggaaagctggtacgcctgcaggtaccggtccggaattcccgggtcgacccacgcgtccggacaaccacaaaactctcactccaaaactctcaattttgccttcctttgatcgaatactacaatggcgtctgtatctgcaattggagttctcaaggtacctcctgcttcgacttccaattccaccggaaaagccacggaggcggttcccacgaggactctttctttctcctcctctgttacttcatccgacgacaagatttcactcaaatccaccgtctcccgtctttgtaaatctgttgttcgcaggaatccgatcatcgtctctcccaaagccgtctcagattctcaaaactctcaaacttgtctcgatcctgatgctagcagcagtgttttggggataatcttaggaggtggagctggaactcgtctttatccacttacgaagaagagagcgaaaccagctgtgcctcttggtgctaactataggcttattgatattcctgtgagcaactgtttgaatagcaacatatccaagatctatgttcttactcagttcaattccgcgtctttgaatcgtcatctttcacgagcttatgctagtaacatgggaggttataagaatgaaggattcgttgaagttctcgctgctcaacagagtcctgaaaaccccaactggttccaggggacagctgatgccgtcaggcaatacttgtggttgttcgaggagcataatgtcttggagtatctcattcttgctggggatcatttgtatagaatggactatgagaagtttattcaagcacatagggagactgatgctgatatcacagtagctgcattaccaatggacgagcaacgagccactgcttttgggctgatgaagattgatgaggaaggacgtattattgaatttgctgaaaaaccaaaaggggagcacctaaaggccatgaaggttgacacaacaattctaggtcttgatgatcagagagccaaggagatgcctttcattgctagtatgggtatttatgttgtaagcagagatgtaatgctagacttactacggaatcagtttcctggagctaatgactttggaagtgaagtcattcccggtgccacttcccttggactgagggtgcaagcttacctatatgatggttactgggaagacattggtactatagaggcattttataacgctaatcttggaatcaccaagaaaccagttcctgattttagtttctatgaccgttctgctccgatctacacacagccgcgttatttaccaccgtctaagatgcttgatgctgatgttactgacagtgtcatcggagagggctgtgttatcaagaactgcaaaattcatcactctgtggttggactccgttcctgcatatcagaaggtgctattattgaagattcgttattaatgggagctgattattacgagactgctacggaaaagagcctcttaagcgcgaaaggaagtgtacccataggtattgggaaaaactcgcacatcaaaagggccatcatcgacaaaaacgcacgtatcggtgacaatgtcaagatcataaacagcgacaacgtgcaagaggcagcgagagagactgatggatatttcataaagagcggaattgtaacggttatcaaagacgccttaatcccaaccggcactgtcatctgaagtacacataatgctcctttgtttatttcttcatctttctaatgccctatcaataagttttctttatgctttttaagccccaataaatctactactagttgtaatgctgcttacgaaagagattacgaaatcatgttttcacaataccattgtctcttttgagaaaaaagaagaccctatgaatttcactaaatttatcttttgtagataataatcaataaaagtaagtttcttcatcc

SEQ ID NO: 82904 - DNA, 399 bp, Arabidopsis thaliana columbia
cttgtctcacacagtttcttgatccaaccaaaaccaatgcgcatagcttctcaaactccttcacctcaaagcttcttcctttacatctgaatcgttgagttaactcggatttgttctgcatcctctgtttctgaatcgcgggccatccttattttgtctcgaattcttcaccaattgcttcgatcaagctgcattggttaaccagttgccctaaagatcagatctttgagcaaaattttgtcactgatcttctaaatccaaaccagacacagcaaaacaacctctgtagatgattcgagaaatctcaaacttacaaaaagatattataaacattcaagacagttattcgaacaaccgagtcatggacgtcggaagaaacaaccggaaaaacatgagctt

SEQ ID NO: 82905 - DNA, 466 bp, Arabidopsis thaliana columbia
ttcatattaagttaataactaataaagttgtttgggaaagtcagctagaaaaagaagattaactaacacagcttttatttggtttttttttaatcggaaaactgaaaacactctctctattacggggaaaacaacaaaagggcgtcgaaatcataggttgaaccactttcaatagaccagttgtccatctttaacatatcaagactcacgaagcctttttttgattaaaaaacacgaacagacaaccaaaccccataaattctttagatccaacggtcggaagttttttattagcatcttggaagatccaatgggggagcctgcaccgattgcaactgtccacgaccggtctctaccaagaaaaccatagccaaaccccatcccaaatgtgaatcaatgtgacaatgcataaaccatgctcctggagtatcagcgacgaaccgaattgccacccaaccacctggag

SEQ ID NO: 82906 - DNA, 504 bp, Arabidopsis thaliana columbia
  unsure (1)..(504): unsure at all n locations
gagcggccgcccttttttttttttttttttttaaatcaatccttttaggttttcattgatagtttgcttaaagcttacaacttgagtttgagaatacttaaatacaaaggtggagacttagctaaaaccctagagacattggacagatgtcatacatcaagttgagtcttctgaatcaagggttgagaaacgattctcgagctttacgttgaactgctttgccgtacaagaggtcgttgtctccttattgccagctccacttttgtcattacttgaggaagattctagactctgtttacttgaaacagatgaccgttgcctccacttctgcttccttgggcttgggtttgtgcgaggcccatctggttcattttcccccttgctccattagccgaaacgacaacgtattgtcgtttgccagagaaagccccggctcttacccgtatgggtgaactcccccaaattgngnaggggaannaaaccgatttgccctaagngnanaag

SEQ ID NO: 82907 - DNA, 424 bp, Arabidopsis thaliana columbia
ctcaacatccgatccgtgcgtaatgctttccaagagtctgttggaaacagactcaagaagttcggtggctcagacaatgacgagttgcttcaaagcttcactagcctcttcaaagatgagtataagattccaagaaactccaccattgatttgacaaaagatccgggccatgtactcagcgttgcaattgaggggaaccatgtcgggagtgtgaagagccatctcttgtgtagatcaatcttagacttgtacattggtgaagaaccgtttgataagaatgcaagagaagattttctagacaatgcagcttctctagccttcgacaactagttcacaacaaaatgttgctttctttctttcttaacggattctctatatatacggcataatgttgaggaatgtatttgaaataaattgcttgggg

SEQ ID NO: 82908 - DNA, 527 bp, Arabidopsis thaliana columbia
  unsure (1)..(527): unsure at all n locations
ctctttcagaggcatggagaagtgaccaaaatcgtttctcctcctggaaagggtggaaaacgtgattttgggtttgtccactatgctgaaagatctagtgcattgaaggctgtcaaagataccgagagatatgaagtcaatggtcaaccactagaagttgtgcttgctaaaccccaggctgaaaggaagcatgacccttcttcttattcttacggggctgcacctactcctgccccctttgtgcatcccacgtttggtggttttcctgcggctccttacggtgctatgggtgccggtttgggtattgccggtagttttagtcaagccaatgatctatggtagaggagcaatgcccacaagggatgcaaaatgggttccaatcgttttttcccgatggccgagtttgntattgttnttgaaaaagccttggnattccgnttggagnaananccaccncaacggcccangagggaatncccggataangggttaaanggggggnnaagnaggggtaacagttntgccnt

SEQ ID NO: 82909 - DNA, 518 bp, Arabidopsis thaliana columbia
  unsure (1)..(518): unsure at all n locations
agcaaaaacaccaaatctgatggataattgataagagtattattcagaagagaaaaaactaaaaagtctcataatttaaagatcgaatcactcaatcctatccccccagcagtctccatatcaaaccagaaaccataaggtttcgatttcatattttataacacatgagagagagctttttaaagttctccaaaaacaaactacaaacaaatcccaatacacttctccttttctttttctacttgcttatttttctctatggttactagtagggtcggtaccttcggcctcctcgggtaccatcatgttcatgactggttatctctgcctgaccctccgcttgagccgttattccggtcatttcttcttgggtcgttgtggcggcggctgctgccatcggcataccaggctgctgcagaacataagccaactcggccatcgggaagagcattggaccattgcatcctgtnggattggccccananagnnatnggngcnaaatncgganacccaaccgg

SEQ ID NO: 82910 - DNA, 493 bp, Arabidopsis thaliana columbia
ctaagaatggggtcactaggagaagaaccacaagtagctgatgactgcatgggtttgcttcaactcctaagcaacggtaccgttttgagatccgagagcattgaccttattacccaacaaatcccattcaaaaacaaccaaaccgttctcttcaaagactcaatctatcacaaacctaacaaccttcacctccgtctctacaaacccatttccgcctccaaccgtaccgctctccctgtcgtggtcttcttccacggcgggggcttctgcttcgggtcacgttcttggcctcactttcacaacttctgtctaactcttgcatcgtcccttaacgcccttgtcgtctcaccctgactaccggttagcacccgaacaccgcctcccggggctgcctttgaggatgctgaggcggtgcttacatggctctgggaccaagctgtttccgatggtgtgaaccactggtttgaagatggaacagacgttgactttgaca

SEQ ID NO: 82911 - DNA, 522 bp, Arabidopsis thaliana columbia
  unsure (1)..(522): unsure at all n locations
gcgtccggattattaaaaaggtaaaacgatggtagaagaattggtggtaatctcgaagagcatagttaatcccagaagccttatgataccgacttctgtgaagaagattcagctgactccatgggatctctctcgccttcgttttggttatcttcaaagaggtcttctctttcacaaaattgaagtcaaacaattacaagcttcactctctgttgcacttgatcgtttctatccattagctggtcgtcttgtgaagctaaagaacgacgacgatactgtctcgtttttcatcagctgcgatggttcaggtgtggagtttgttcacgcagtggcttaaaaacatcgagctcagtgatgtccttgagttatccgggttctgtccccgggttttccgcttcctttatcccggcaacggggatcaagacctcccaggggtntnaagtcttacttagggntnaagtaacanantttaggncgggttttnancgggtttggaaanctctccggggtnnnnccttaatt

SEQ ID NO: 82912 - DNA, 530 bp, Arabidopsis thaliana columbia
  unsure (1)..(530): unsure at all n locations
cttgatggaaaccgcatcagctgtttgcctgatgaattgggccagttggtaaggcttgagcaactatcaatctcaagaaatatgctcatatacttgcccgatactattggtagtctccgcaatctactgctgttgaatgtctcaaataacagattgaaatcccttcctgaatcagtagggagctgtgcttctttagaagaagtacaggctaatgataacgttgttgaagagcttcctgcatcactctgcaatctgattcagttaaagtcgctttccttagacaataatcaagtgaaccagattccagatggattgctgatacattgcaagagtctgcaaaacctttcttttgcataacaatcctatttccatggttcagtttcagctgatggaaggataccaagactttgaggtgaggcgaaaggaggaatttgttaagcaaatcgattcgaatgtggtgatgggcttaagcccttgtgtggggttgtaaaggaacngcttnnaaagcctncttgtgggtcggnnatggg

SEQ ID NO: 82913 - DNA, 614 bp, Arabidopsis thaliana columbia
acaactaactaggagggaaggctgggccccctccaggtaccggtccggaattcccggttccacccacgggtccgggggaattaaatatttcggacccgaaacctgacccgctttgatgggctggattccgtgtccgtgctggggaaccaacgaccatgaaaacgccggcgaggtggcggatcgtgatcccgtgcttctagtatctggaattggaggctctattctgcgggctaagaagaagaattcaaagtctgaaattcgggtttggggtccgaatatttctagctaaccttgcctttaagcagagcctctggtctctctataatcccaaaactgggtatacagagccggtggatgataatattgaagtattgggccctgatgatgaccatggactctatccaattgacattctagatccctcttggtttgtaaaggctttgtcacttgacggaggtttatcactttcacgatatgatagaaatgctggttggatgcggttataagaaggggactacattattcagttatggttacgatttccgtcaaagcaataggatcgatctacttatactaggtctgaagaagaagctggaactgcaattacttcaggg

SEQ ID NO: 82914 - DNA, 553 bp, Arabidopsis thaliana columbia
taggtgcaactatagaaaagctatgacgtcgcatcgcacgcgtacgtaagctcggaattcggctcgaggttacgatttccgtcaaagcaataggatcgatctacttatactaggtctgaagaagaagctggaaactgcatataaacgttcaggggggagaaaagtcactatcatctcccattcaatgggaggacttatggtttcatgtttcatgtatctccatccggaggcattttccaagtatgtaaataaatggattacaattgcaacacctttccaaggagcaccagggtgcatcaatgattcaatcttgactggagtgcaatttgtggaagggttagaaagtttcttttttgtgtcacgttggacgatgcaccaactgttggtcgaatgcccatctatatatgagatgatggcaaatccagactttaagtggaaaaagcaaccagagattcgagtttggccgtaagaaatctgaaaacgacgttgatacttctgtagaactggaatcatttggcttaatcgagagttttgatctattcaacgatgcatt

SEQ ID NO: 82915 - DNA, 441 bp, Arabidopsis thaliana columbia
  unsure (1)..(441): unsure at all n locations
cactcccatnnnnnnnnnnnnnnnnnnnnnnnnnnnnnnnnnnnnnnnnnnnnnnnnnnnnnnnnnnnnnnnnnnnnnnnaaggaacgaatagagtttctttattcggccgctatcaatctccaaatagccaaaaaacatactcgccagccaaaagggaggtagtcgtattaactgttaatttaatttgaaagaaaagtaaactctcactcacgttcatcataattctctctagctttgaaatataaaggaaaatcggtctcaggtaacacctctccgcagcttgtaaatctcaactgtgcactgaaaaaaacaggtattaggacttgggttttagggaactcagatttcttagtccgaatcattcatgaagcggtttcctaatctccctcctggtgcaacccgaaagccgtctcctgcttttctttcacaaaatttggat

SEQ ID NO: 82916 - DNA, 801 bp, Arabidopsis thaliana columbia
accggaccttccgggtcgtaccacgcgtccggatcgagtggggtatagcgcaactgattgtgaatcctgagatttttctcttctctacgatgagattaaatcaacggttggagatcgtgaggttgaagaaaaagatgtggataaaatggtctttttacaagccgttgttaaggagattttacggaaacatcctccgacatactttacgttgactcattccgtcacggagccgacgacggtcgccggttacgatgttcccgttgggattaacgttgagttttatcttccgggaataaatgaggatccaaagctttggtctgatccgaagaaatttaacccggatcggtttatttcgggtaaggaggaagcggacataaccggtgtaaccggagttaaaatgatgccgttcggtattggccgtcggatctgtccggggctagcgatggcgaccgtacacgtgcatttgatgctagcgaagatggttcaagagtttgagtggagcgcttatcctgcggaaagtgaaattgatttcgccgggaaattggagtttacggtggtaatgaagaaaccgttgagagccatggttaaaccaagggtctaaattttgtttaattatgaaaacgatgtgtgcttatatattaaagaaggaacctatacttttgaattttgtcaagtgcctttgtgaattttttaagtaaaagattttattttatttgtcaaaaacaccattcaattaatgaatttttgctttaaaaaaaaaaaaaaaaaaaaagggcgggccgtttttagagggaatccaaa

SEQ ID NO: 82917 - DNA, 783 bp, Arabidopsis thaliana columbia
  unsure (1)..(783): unsure at all n locations
accggaatttccgggtcgacccacgcgtccgctggatgatgtatatgctgcttttgatgatccggaggaactaacatatgcacaggatggaacaagagacacaggtccactaactctaaatgcgtttgacctaattattctatctcagggcctgaacctcgcaactctttttgaccgtggaaaggactccatgaagcaccagacaaggttcatctcacacaagccagcaaacgtggttctctcaagcatggaagttgtgtcacagtctatgggctttaagacacacattcgtaattacaagatgtgagtggaaggattatctgcaaataagacatctcatttctccgtcatactagaagtcttcaaagttgcaccatcaattctcatggtagacattcaaaatgcagcaggagacgcagaagaataccttaagttctacaagactttttgtagtaagcttgatgacatcatttggaagccgccagatgcatctatgagaaatcgagtcactcaaggccaagagtaaaaagacgttgaatccacgtgcgtggtattcaagcagagctttcacagaagacagttagaaacaatatttaactctctgtgtttcttaagtgctttagtcgagtgaatatgtacaagcttgttgatttggttttaatttatgaatacatagaagatggtactaaacttatacgatatcaagactaaattgagtgaaaattgctgatagtttctcctggggaaaaaaaacccccntaacactttcctactcacgacata

SEQ ID NO: 82918 - DNA, 507 bp, Arabidopsis thaliana columbia
  unsure (1)..(507): unsure at all n locations
gccttgtttaggactttcttcaaatggcttaaaccgggtggttaagttctcatcagcgactactgtagaagccccaaaactccatctgctgagttttcagagtacatcaaacagagaggatatgatctccatgacgttcaagcttatggacagatgctaaaagacactggcttcactgatgtgatcgcagaggaccgtactgatcagtttatgcaagtcctgaaacgtgaattagacagggtggagaaagaaaaggaaaaattcatctccgacttctccaaagaggattacggtgacattgttggaggatggaagtcaaagctggngaggtgtgcatcggntgngcagaaatggggcttttcatcgccaccaaganttangcaaatcggaaatcttctacttctatgttttntcctnctttgtttgtnaataaaaatgncnttnccgttggggttgtattgcctnaggtgtgtntttggctttttgagggggtaacttgttcctttg

SEQ ID NO: 82919 - DNA, 361 bp, Arabidopsis thaliana columbia
gtccgttgcagtttttgaagagaagtacgagttcgagttctgaatttgagaattctatccaaggagctatcttgcattgcaagcaatcacagcagcagaagcagaaacagaaacagtatagtactgttaacgaggtcggattctgttcgttgtcagcgtcaagaatcgcagctagggatgatcaagaatgggctcagatgtttaggggctaactaaagatatcggtcatgaagaaagttaagaaggaaataagagttgagcgagagtgagagaactagagaataaattctttgttttctttgtattttgcctcttctttgttttgaggttacataaattcacaatgctttttttggattcc

SEQ ID NO: 82920 - DNA, 765 bp, Arabidopsis thaliana columbia
accggacctcccgggtcgacccacgcgtccgctggcttaacacaacgtcgttttgggccaattacccggcgggtacacccaagagcatccttctagataggcctccgacgaattcagtgtcatttaagagtaaatcggattttgtcaaaaaaccaatacccaaaaaaggtttagagaagctttggaagacaatgtttaaattcaacagtagcgtctcgttgcaattcaacccttacggtggagtgatggaccggattccggcaacggccaccgcttttcctcatcggaaaggaaacttgttcaaggttcaatactctacgatgtggtttgacgcaaacgccacacagagtagcctggctatgatgaatgagctttttgaggtggcggaaccgtacgtgtcaagtaacccgagagaggccttctttaatttcagagacatcgatattggaagcaatccaagtggtgagacaaacgtggatgaagctaagatctacggatccaagtatttcttggggaatttgaagagattgatggatgttaaagctaagtatgatcctgataatttcttcaagaccgagcagagtattcctccggttcgtgtaaagtagtgatattaagttatctgggcatgtgttataggcttatagtctctatgtaggttgccttggttaatcattagtactcaataaagaaatctatacgtgagtagtaattagtttcataatcaattaagcatgttcatctaatttccttttgtttaaaaaa

SEQ ID NO: 82921 - DNA, 519 bp, Arabidopsis thaliana columbia
  unsure (1)..(519): unsure at all n locations
ctctatacgactcactattagggaaagctggtgcgcctacaggtaccggtgccggagttcccgggtctacccacgcgtgcgagcagacaaaaaggagataaagagaagaggattcatcatcatcaatcaatccttcattttatggatctactcatatcttgattcttccttctatctctcccttttcttccatctctttttctctgggtttccccggattgagttttttaatctctgaggggcagatttgaagagcgtgacaaaggaagaatcttttattaaaacaaattcttctgttttaatcttgggatggcctcggtgggcatagagcctagtgccgcggttagagaatctactggaaacgttactgatgctgatagattacccgaggagatgaaggacatgaaaattcaagatgataaagaaatggaagctacgattgttaatggcaatgtgactgagactggccatataatagtaactactataggangaagaaatggccacccaaaacagaca

SEQ ID NO: 82922 - DNA, 507 bp, Arabidopsis thaliana columbia
agcccgggcatagttcttgtctccagcagttccatttaagtacggaggaggaagtgaccatacgccgatgcccgcgaccagctaaggctatcggcaaagaaccccaagcatctcgttatcctcctgttttcgagtaagcagccgcctcggatgtaccgaaaacaaggttattgacaacttcagcttttccgctcggaatcccaacctctgcagctccttcttcaccagctctatttccaggtacgccaaagtcagccattgcaatttgagcaatagcctctttcttctcttcatgatgtgtaatttctcctgtgctagtgctaactgtttgttgatcaccaggaggagtgagctgaaagccaagaacggagccagaaccatctctctctgcgtctgtgataaatctctcttcatcagactcacgagagtcacccggacgcgtgggtcgacccgggaattccggaccggtacctgcaggcgtgcgtgctttccctaaggtgagtcgta

SEQ ID NO: 82923 - DNA, 905 bp, Arabidopsis thaliana columbia
  unsure (1)..(905): unsure at all n locations
tggccgtctctgcggtaccggtccggaattcccgggtcgacccacgcgtccggagaaactgttgctataaagaaagttctacaagatcggaggtacaagaatcgtgagcttcaaacaatgaggctacttgaccatccaaatgttgtgtctttgaaacattgtttcttctctacaaccgaaaaagatgagctttatctcaacttggttctggaatacgttccggaaactgtgcaccgcgtcatcaaacactacaacaaacttaaccaacgaatgcctctcgtttacgtcaaactttacacttatcagatttttaggtccttatcctacattcaccgatgtatcggcgtatgtcatcgagacatcaaacctcaaaacttgttggtaaatccgcacactcatcaagtgaagctatgcgattttggaagtgcgaaagtattggttaaaggagagccaaacatttcctacatctgctcgaggtattacagagcacctgagctcatttttggagccaccgagtatacgacagccattgatgtctggtctgcaggatgtgttctcgccgagcttctgctcgggcagcccttgttcccgggtgagagcggtgttgatcaacttgtagagattatcaaggtcttgggaacgcctactagagaaggaatcaagtgcatgaacccaaactacacgggattcaaattccctcagnttaaagctcatccatggcacaaggattttncacaaacggatgcctccagaagcttntgntttnggctnaaagctttnttcaaaatctcctaatcttcggngngccgtttttgcaaatttggnccnccctttnttttnatgggttaggggcccaanggnggtttccnatnggngggtcnttccnccggttttaacttaaagcc

SEQ ID NO: 82924 - DNA, 612 bp, Arabidopsis thaliana columbia
  unsure (1)..(612): unsure at all n locations
ggcttatacaatatcataacccccacaaatgattcactctttctctactcatacaacaaacaaagggttactaaatcctcagattaaagctcatccatggcataagattttccacaagagaatgcctccagaagctgttgatttggtctcaaggcttcttcaatactctcccaatctccgttgtgctgctcttgattcattggtccacccattctttgacgagctaagagatccgaatgcgcgattacccaacggacgtttccttccaccgctctttaactttaagcctcatgaacttaaaggtgtgcctgtggagatggtggcgaagttagttccagaacatgcgaggaagcaatgtccgtggctcagtttgtgatttgttctcacctgcaaacacgaaaactagagcaaagcagtcgagatattcatctcttctcttctctctccttctctgtattaatattattataatgatcatatctcaatctgatgatttagtaaccctttgtttgttgtatgagtagagaaagaataaatccctcctgggggttatgatattgtataagccaattnnggttgttaataaaaaaaaaaaaaaaaagggcggccgct

SEQ ID NO: 82925 - DNA, 1486 bp, Arabidopsis thaliana columbia
  unsure (1)..(1486): unsure at all n locations
caggtcctggtccggaatcccgggtcgacccacgcgtccggaagcgacagtggtagatggaaatggaacagagactggacatatcattgtgactactattggtggtagaaatggccaaccaaaacagacaattagctacatggctgagcgtgttgttggtcacggatcttttggtgttgtgttccaagcgaaatgtcttgagacaggagaaactgttgcgataaagaaagttttacaagataggaggtacaagaaccgtgagcttcaaaccatgaggctacttgaccatcctaatgttgtgtctctgaaacattgtttcttctcaaccactgaaaaagatgagctttacctcaatcttgttcttgagtacgttccacaaactgttcatcgtgttatcaaacactacaacaaactgaatcagagaatgcctcttatatacgtcaaactttacacttatcagatttttagagccttatcttacattcaccgatgcattggtgtgtgtcatcgtgacataaaacctcaaaacttgttggtaaatccgcacactcatcaagtaaagctatgtgattttggaagtgcaaaagtattggtaaaaggagaaccaaacatttcctacatctgctcgaggtattacagagcacctgaacttatttttggagcaaccgagtatacgacagccattgatgtctggtctgcaggatgtgttctagctgaactattgcttggacagcccttgttccctggtgagagcggtgttgatcaacttgtagagattatcaaggtcttgggaacccctacctaaaanaagaaatcaagttgcatgaaccaaactacacggaattcaaattccctcagattaaagctcatccatggcacaagattttccacaaacgcntgcctcccaaaacctgttgaattgggtctcaagaanttcttcaatactcctcctaatctacnaaattgccgctccccaaccattaattccacccattccttgatgaattaagaaaaccaaatgcgcgattactcaacggacgtttccttccaccgctctttaactttaagcctcatgaacttaaaggtgtgcctgtggagatggtggccaagttagttccagaacatgcgaggaagcaatgtccgtggctcagtttgtgatttgttctcacctgcaaactcgaaaactagagcaaagcagtcgagaaattcatctcttctcttctctctccttctcggtattaatattattataatgatcatatctccatccgaagagatagtaaccctttgtttgttgtatgagtagagaaagagtgaatcatttgtgggggttatgatattgtataagccaacaaagattattttttaaagagagtttcgtgttttctgtctctctcactcatataaaaatatcaaaaaaagtgttaaaacgcaaagggcggccgctctagaggatccaagcttacgtacgcgtgcatgcaacgtc

SEQ ID NO: 82926 - DNA, 1604 bp, Arabidopsis thaliana columbia
acccacgcgtccgaaagttagagagagagattcataatcatcaaacccacaaatccttttttttttttgttaaaacccacaaatccttactcgtacggatctctctctctttaatatctcagatcgatgaagagaagaattaggatttttacgttttcatcggcttgaaagtttgaagagttttgtagcctgaaaaatggcgtcagtgggtatagctcctaatcctggagcaagagactctactggtgttgataaattgcctgaagaaatgaatgacatgaaaattcgtgacgataaagaaatggaagcgacagtggtagatggaaatggaacagagactggacatatcattgtgactactattggtggtagaaatggccaaccaaaacagacaattagctacatggctgagcgtgttgttggtcacggatcttttggtgttgtgttccaagcgaaatgtcttgagacaggagaaactgttgcgataaagaaagttttacaagataggaggtacaagaaccgtgagcttcaaaccatgaggctacttgaccatcctaatgttgtgtctctgaaacattgtttcttctcaaccactgaaaaagatgagctttacctcaatcttgttcttgagtacgttccagaaactgttcatcgtgttatcaaacactacaacaaactgaatcagagaatgcctcttatatacgtcaaactttacacttatcagatttttagagccttatcttacattcaccgatgcattggtgtgtgtcatcgtgacataaaacctcaaaacttgttggtaaatccgcacactcatcaagtaaagctatgtgattttggaagtgcaaaagtattggtaaaaggagaaccaaacatttcctacatctgctcgaggtattacagagcacctgaacttatttttggagcaaccgagtatacgacagccattgatgtctggtctgcaggatgtgttctagctgaactattgcttggacagcccttgttccctggtgagagcggtgttgatcaacttgtacacattatcaaggtcttgggaacgcctactagagaagaaatcaagtgcatgaacccaaactacacggaattcaaattccctcagattaaagctcatccatggcacaagattttccacaaacgcatgcctccagaagctgttgatttggtctcaagacttcttcaatactctcctaatctacgaagtgccgctctcgacacattagtccacccattctttgatgagttaagagacccaaacgcacgtctacctaatggacgtttccttccaccggcttttcacttcaagcctcacgagctgaaaggtgtaccattggagatggtagctaagttagtacctgagcatgcaaggaagcagtgtccttggctcggtttgtgatttcctcttaatgtagcatgaacacaacaaacacttcttataaattacctctctatgtatcaatatgtcacaaactgatatgcaccctttgtttgttgtatgagtagagaaaaaaagagttattactatggttggttggttcataatgtaaaagcccaccaagattttttatctagataaagagtttgct

SEQ ID NO: 82927 - DNA, 1750 bp, Arabidopsis thaliana columbia
attcatcatcatcaatcaatccttcattttatggatctactcatatcttgattgattcttccttctatctctcccttttcttccatctctttttctctgggtttccccgatttgaagagcgtgacaaaggaagaatcttttattaaaacaaattcttctgttttaatcttgggatggcctcggtgggcatagagcctagtgccgcggttagagaatctactggaaacgttactgatgctgatagattacccgaggagatgaaggacatgaaaattcaagatgataaagaaatggaagctacgattgttaatggcaatgtgactgagactggccatataatagtaactactataggaggaagaaatggccagccaaaacagacaatcagttacatggcggagcgagttgttggacatggctcctttggtgttgtgtttcaggccaaatgtttagaaacaggagaaactgttgctataaagaaagttctacaagatcggaggtacaagaatcgtgagcttcaaacaatgaggctacttgaccatccaaatgttgtgtctttgaaacattgtttcttctctacaaccgaaaaagatgagctttatctcaacttggttctggaatacgttccggaaactgtgcaccgcgtcatcaaacactacaacaaacttaaccaacgaatgcctctcgtttacgtcaaactttacacttatcagatttttaggtccttatcctacattcaccgatgtatcggcgtatgtcatcgagacatcaaacctcaaaacttgttggtaaatccacacactcatcaagtgaaactatgcgattttggaagtgcgaaagtattggttaaaggagagccaaacatttcatacatttgctcgaggtattacagagcacctgagctcatttttggagccaccgagtatactacagccattgatgtctggtctgcaggatgtgttctcgccgagcttcttctcgggcagccattgttcccgggtgagagcggtgttgatcaacttgtagagattataaaggggtttgggaacaccaacaagggaagaaatcaaatgcatgaacccgaattacacagagttcaaatttcctcagattaaagctcatccatggcataagattttccacaagagaatgcctccagaagctgttgatttggtctcaaggcttcttcaatactctcccaatctccgttgtgctgctcttgattcattggtccacccattctttgacgagctaagagatccgaatgcgcgattacccaacggacgtttccttccaccgctctttaactttaagcctcatgaacttaaaggtgtgcctgtggagatggtggcgaagttagttccagaacatgcgaggaagcaatgtccgtggctcagtttatgatttgttctcacctgcaaacacgaaaactagagcaaagcagtcgagatattcatctcttctcttctctctccttcctctgtattaatattattataatgatcatatctcaatctgatgatttagtaaccctttgtttgttgtatgagtagagaaagagtgaatcatttgtgggggttatgatattgtataagccaacaaagattattttttaaagagagtttcgtgttttctgtctcaaaaaaaaaaaaaaaaaaaaaactcaaacccacagggcggccgctctagaggatccaagcttacgtacgcgtgcatgcgacgtcatagtaatctatagttcgcctaaatt

SEQ ID NO: 82928 - DNA, 783 bp, Arabidopsis thaliana columbia
accggaatttccgggtcgacccacgcgtccggttccattacgcaaacctcacttgtttcccaagttacctcttcctttcagagatacactggatacgtattcggctgaactgaaaagcatagctaaggtcttattcgcgaaactagcgagtgcactcaaaatcaaacctgaggaaatggaaaagttgtttgatgatgagttaggtcagagaattaggatgaattactacccgccttgtccggagcccgataaggctattggtctaactccacattccgatgctacaggactcaccatactgttgcaggttaatgaagttgaaggtctccaaatcaagaaagatggcaagtgggtttctgtcaaacctctcccaaatgctttagttgtcaatgttggagacatcttagagatcataacgaatgggacataccgaagtatagagcatcgtggagttgtaaactcagagaaagagaggctttctgtggcgtcattccataatacggggttcggtaaagaaattggtccgatgagaagtctcgtggaaaggcacaagggtgcacttttcaaaaccctgaccactgaagagtatttccatggcttgttttcccgtgagctcgatggaaaagcttaccttgatgttatgagaatctaaagaaaccatgcataaaaccattgtcttcttgtgttacatatactctgtttcttctctgttttcatactttctgcagcaatcatctctgtctgctttatatatggtaaaacaatgactaataaagaatgttt

SEQ ID NO: 82929 - DNA, 510 bp, Arabidopsis thaliana columbia
cagcagtagaacttcagaatttggctgaagaagttaccagactctgcaatgaaaacgcgaaactcagcaggtgaaaaagtttcaggtctctctgttgttgctcggagactcccagcttcaagataatgctgcaaagtaaatcatcttcgttgacatataatgcaaatctcagactctacttggaaggtaatgatgttgatccatcaaagggaacaagagatcatgatgctcccaaaggcattcaatccagaaaaaatggtttgtatcgcttggatagtattttgattaccgtctgatgacaaacacatgatgtaaatatccctcacaaatttggtttcttgttctcagtgaccactatttttgtatgtccttaggttgaatcaatgatgttgcaccaagttccatagttagtttttcagcttaaaaaactccgtccagctatatgtaactgatttgatatatcacccaaatgtttggtaaaaatcccataaaaaaaaaaaaaaagggcgg

SEQ ID NO: 82930 - DNA, 440 bp, Arabidopsis thaliana columbia
cgtaactcaaaagtccctcaatcttaaacccacaactacttcatctcctttcgcttcaatgtctcaatccatccctcgcgcttcgagggttctctctgctttgggaagtgttgaaacgatgattccacttcacagtgccgttgcttcagctcgtctccggtcaagcatcgctgctgattcctcttgttggagcttgctttctcaggaactgggagttcctcggtgacaccatcattagctttggtcttggtcttgaagcgtccatgggttgatacttgatattgtactgctttaagactacttggtgaccgttgcccaggcttcttagaccgggttttctcccggtttaggatcaaggttgttttcccaaattttattggttatcggttaagacttttcagatcctttttttgaagcattggaaaggggggtttagcatc

SEQ ID NO: 82931 - DNA, 798 bp, Arabidopsis thaliana columbia
gcaccggacttcccgggtctacccacgcgtccggaaaaacgaaactttcggttgtgcgaaatcttaagatcaaagatggcatcgttttgcagatcagcgttaatggcaggttccagaaacttagtatcaagatccagaaccgtaactcaaaagtccctcaatcttaaacccacaactacttcatctcctttcgcttcaatgtctcaatccatccctcgcgcttcgagggttctctctgctttgggaagtgttgaaacgatgattccacttcacagtgccgttgcttcagctcgtctccggtcaagcatcgctgctgattcctcttgttggagcttgctttctcagggacttgcaacgcctttgtgaccccggtctgctggatcgatataaggcggaaataatcaatatattacaatgaatgaacaagaatagtgtttttttttctagttcgaactctatcgtcaatgtattgttgggtgggtcacaaggacttgttgtttcaaacttcttgcaatctatctattcgatatttggatccacacattttggggcctttttccttcactaaagtcagcatttgctttcttttggtcatgcacattgtaacgaggaacctctgcatttttcaatttctgaatcctgttcactgatcctctttccaaaaaaaaaatttggcaaaaccggtccttttttaaaactttaaaatttaaggggcgggccggttttagaaggatccaagttttaacttcccggggccttgcaaatttataaactttttttataggggccccccaaaat

SEQ ID NO: 82932 - DNA, 789 bp, Arabidopsis thaliana columbia
ttgacgttccgctccggaatttccgggtcgacccacgcgtccgctttgggtgactcctctttgcagaacgctctggaacttgtacatgagcatctcaaccaggttccatcttatggtcaccgcgaggttctgatattgtactcagctttatgcacatgtgatccaggcgatatcatggagaccattcaaaaatgcaagaaatccaaattaagatgttctgtaattgggctctctgcagaaatgttcatatgtaaacacctctgccaggaaactggcggattgtattcagttgcagtggacgaggtgcatctaaaggatcttctgcttgaacatgcgcctccacctccggcaatagcagaatttgcaattgcaaatttgatcaagatgggtttcccacaaagagctgctgagggttcaatggcgatttgttcgtgtcataaggaagttaagattggagctggttacatgtgcccaagatgcaaagcccgggtatgtgacctccctacggaatgcactatctgcggtctaacacttgtttcttcgccgcatttggcgagatcataccatcatctcttcccgattgctccatttgatgaggtgcctgcactttcaagtctgaatgataatcggagaaaattgggaaagagttgttttggttgccaacagagcctaattggtgcagggaataaaccccgtccatgcgtaacatgtcgtaaatgcaagcactatttttgtctggactgtgacatatacatccacgagagctgacacaactggtctggctgtgag

SEQ ID NO: 82933 - DNA, 355 bp, Arabidopsis thaliana columbia
caggtacatggcgccttatgtctcaagcaatccaagacaagcatatgtgaactacagagatctagacttcggacagaacaagaacaacgcaaaggttaacttcatcgaagctaaaatctggggacctaagtacttcaaaggcaattttgacagattggtgaagattaaaacaaaggttgatcccgagaacttcttcaggcacgagcagagtatcccacctatgcccttctagaagctaggttcatgaaaccgataacattatcaaaaataagaataaatgataattgtatgttacaacttccctaaatacaacagtgattcgtctttaaatatcccagacaatgtggatactact

SEQ ID NO: 82934 - DNA, 951 bp, Arabidopsis thaliana columbia
  unsure (1)..(951): unsure at all n locations
ccgagtggtactcagagcagctggaaatgatggaaacaagactgtgacaatgacctacctaggtcagtttcttggcgagaaaggcaccttgctgaaggttatggagaaggcttttccagaactagggttaactcaaaaggattgtactgaaatgagctggattgaagccgcccttttccatggtggatttccaacaggttctcctattgaaattntgcttcagctcaagtcgcctctaggaaaagattacttcaaagcaacgtcggatttcgttaaagaacctattcctgtgatagggctcaaaggaatattcaaaagattgattgaaggaaacccaacatttctgaactggactccttacggtggtatgatgtcgaaaatccctgaatctgcgatcccatttccgcatagaaacggaaccctcttcaagattctctattacgcgaactggctagagaatgacaagacatcgagtagaaaaatcaactggatcaaagagatatacaattacatggcgccttatgtctcaagcaatccaagacaagcatatgtgaactacagagatctagacttcggacagaacaagaacaacgcaaaggttaacttcattgaagctaaaatctggggacctaagtacttcaaaggcaattttgacagattggtgaagattaaaaccaaggttgatccagagaacttcttcaggcacgagcagagtatcccacctatgccctactagaagctaggttcatgaaaccaataacattatcaaaaataagaataaatgataattgtatacaacatgattcgtctttctttatttcagacaatgtggacactactctaaataaaatgtcatttaccttacaaaaaaaaaaaaaaagggcggccgctctagaggatccaagcttacgtacgcgtgcatgcgacgtcatagctncgtcatagtgtaac

SEQ ID NO: 82935 - DNA, 653 bp, Arabidopsis thaliana columbia
gaatatcgggcttgttttcagtccgtatggagggaaactggcggaggttgcggttaacgcgaagccgtttcgacatcgaggcaagcttttcaaggattcagtactctgtgaactggaaagaaaactctgcagagatagagaaggggtacttgaatcaggctaaggtgctttacagtttcatgaccgggtttgtgagcaagaatcctaggagttcttacttcaattaccgggatgtcgatatcggtgtgaatgatcatggggcgaatagttccaaggaaggagaggtgtatggaaggaagtatttcggagagaatttcgatcgattagtgaagattaaaaccgcggttgatcccgggaatttcttcaggaatgaacagagtatacctaccttgaaaagtaaggcataattgatatatgatcatttaatataaagattggcttcctataatgtaatgttttagtgaagcactatagaatatatggttttggatattgtatattgtatagtttctctgttcatggaactctacaacaagctcttttgtttaaaaaaaaaaaaaaaaaaaaaaacacaaacccgaagggcggccgctctagaggatccaagcttacgtacgcgtgcgtgccacgtcataaatcttctatagtgcacc

SEQ ID NO: 82936 - DNA, 626 bp, Arabidopsis thaliana columbia
  unsure (1)..(626): unsure at all n locations
cgttnnnnnnnnnnnnnnnnnnnnnnnnnnnnnnnnnnnnnnnnnnnnnnnnnnnnnnnnnnnnnnnnnnncttttttttttttttttatactcaaaacagggggaaatagaaatatacataaacatgaaacaaacacttcatattcactaaccttgattagtgtcctaacgttaatacaactgagaaacaaatagagtaaatttagttaagttcagaatctaagactgaagagtactaaaccagattcgaggattacgactagatgaagaaaactaaccctaaaagaaggttataaagagagagagagggatcagagtcgtgaaaacagagttaataactagctctttgaatgaaaacggtttctaggtccggcggagagaagtaatctctagtgacggtgacgtaactgcacttcaacgacggtttacgcttctttggcgccgctggacacggcgggacccttggaattctgacggaaaccgcggtaggggtcgtaggcctgtctgatcttgctcctctgtttcggtaactgtgacgccgggagataggttaatctgcttgagaggggaacgtgagggaattccggcgatgacccattttttaccgacggtggattcttggtat

SEQ ID NO: 82937 - DNA, 1040 bp, Arabidopsis thaliana columbia
  unsure (1)..(1040): unsure at all n locations
attccgttnnnnnnnnnnnnnnnnnnnnnnnnnnnnnnnnnnnnnnnnnnnnnnnnnnnnnnnnnnnnnnnnnnnctttttttttttttttttttttgagattgaacttgcattttgattttgtggaattctgttatgatgtctttgtatggttttgttgaattccaaactatatcttatgcaaaaaattgctaaaaataacattaccgtaactttatcggggtttaagacaagattcttcaggcgggttttgtgatagggatggaccatcttccaagatgagcggtgtagtttgtgcaacggattactcctttgctactaggaccatccgggaaatctatgacactgatgctacctgcgtctaggtgaaacaacccgagcgcttctttagtgaggttaaggcattgtgctatgagtgaaatgtgagtcattgcaggaccaaccaccaccatgatttctccagggtttgacttctcatccgatagttcgtctaagagtgattcccatgctttctcggatctgttccacagagctgaaaacgcttcttcgtctaattgacttgcaatcacatcattgtccttattggatttccgaaaaaccccctcaacataaaggtcattcatttggtcccgttttcccgtagtggggcacattacctacacctaaacaacccgcagcttcttgcacccgggatattactccagaagactcaatggaggctgttttagggctgcaaactattgaactaacccttagatcaagtagaagctctgcggttttctgtgaatgtatcacaccaagcatgttcattgcctgatcattattagctgcttggttaataacagcagaatcctcattattcccctgaccatggcagacaagtataatctgcttactagctttccggccaccagaacttccaccagctagaggcgaattaggtgtctgatttagtcgattaagacatacgtgaggagatccaccgtcagctcttggtatgaagtccaatacacttacaccacaattgctctgcaacaaac

SEQ ID NO: 82938 - DNA, 407 bp, Arabidopsis thaliana columbia
aaaactaagcagtagaattataatcgaaattcaaatgattctcaaaatttccgccctttttgggaaatatgcaggtggcaaaagaaaaacaatggcatataggtaaaaatggatcacctcatacaggacccacaaaaaaataccgtcatttccgtttaaaatcattatttgctttcttttgttcatacggatatatatatgaagatgcattggatcactcgcattctccttcagttgtcgccgaggaaacgtaactcataacaagagacgacgtactctcatcagccgtaacaggcagctgaaatagttgcttgcaagagtggcaagtgatctccatcattgttgcattaatcctcttgattgcttcttctctaacaacgtgagccttctccaactcggtttttgct

SEQ ID NO: 82939 - DNA, 761 bp, Arabidopsis thaliana columbia
ttgaccagctatcacgtcgcatgcacgcgtacgtaagcttggatcctctagagcggccgccctttttttttttttttagaatctggatttttatatcatttgtatttactactttcgtagtaaaacataaatttttacccttttggattcttcaaccaaattattcagacaaagtgtctcaaatatggaaatattgcttgacaaagttgttgggagctggttgttatacggagttgacttcatcttcatcgtcacttcctccacttccacggctactgcttccactactgctttggccgccgctgccacttccgctgcttacgcttttgctacaaccatcactgtcacttacgctgctacttccactgctactgcttgagcttgaggttagactcttttgcacctctgcgttcacttgtgctctaagagcttctgctgcgttaaaaccttattcttcttcaccgccgctatcgacatctacatctgcaatctctttttccgacatgctaagctgtttatttaagctttcttcatattctccaccatcagcgttctctttctctgcattggcgctctctggtgtaaatgaaccacatatttcaaccagatcgatctcttgatggtcatctccatcatcgttcttgtactcaactggggaggttgcaagcacgttcaaattgtgggcaggttagctgagttcttttgctcccaattttgattctttccacctaaacaggcacattaggaaacaaacttctatt

SEQ ID NO: 82940 - DNA, 763 bp, Arabidopsis thaliana columbia
ttacactatagcacgagctatgacgtcgcatgcacgcgtacgtaagcttggatcctatagagcggccgcccttatcttttttttttttttttttgacagctggaaatataaaatcttattgaatcagttgaaaacaaagttccagtgaacgcagagagtttctttcctcagtaagaaaatgaaacttactacgacaatgagagatcatcaaaaggttgtcagaaaaagaaactaaaagtgaaaaaaatgcatatttgtgatgctgtggtatataaattatatacattacaccaaaccaaaaccagattcttctttttggttgttctgtccctgcaattcaccaacaggtgcttcgtttagccataagaagcggatgaaatcgttcagctttgcgcttacactaaccttataaggagttgggtttaatctcctcatatgatcaggtcgcatgttttcgagctgcttgatgcaacggtcttttatctctttcaaaggcggtaatactttttttgcttcatctgcgcttccacgccaataacatttgaggagcttttggacacgctgtggccctacatatgcttttttggattcgttgattgggtgacgacaaagtaaaacctcacccaccttttggaggtggttttgttcttctccaggccttttatttcttccaagaggggttaaccttttttttgcccggaaaaaaatctggaaaccttctgcctttttatacccacggatatttggataaccccttctggta

SEQ ID NO: 82941 - DNA, 742 bp, Arabidopsis thaliana columbia
cttgacgtcgcatgcacgcgtacgtaagcttggatcctctagagcggccgacctattctttcttttttttttttttgcaaccacaaaaataacttcattgtcatctaaacttgacaagatcacatataaacagacactccactctactactatctctttgttacaggcacaaaatctcgcctctttcattttttcaaatctttcaaataacttcaacaaacggaaaaggaggaatactctgttcatcacagaagaaatcagaaggatcaacacttgtcttaactctcaccaatctctcaaaattattcttaaaatacttcactccccaactcttcccttcctcgtacttactcctcttaactccaacatacatccccaaatcaagatctctcagattcatataagctcctctcggagacttcgccacaaactcactcatatcatcgtaaactctctccacccatctcatatacttctctttcacgtctcctctccaggaattcaagtactgaatctcatatatattccccttcctatgcggaaatggtgtttcgtaatctgcaatctcactcattttaccaccaaatggagggaaaattagctgagcatgctctgcttccgggtcttgcaaccggcctccaaagcttccaaatcgcgcttttaggcatcgggttcttgaccaaaatcagatttagcccttgaaagccaacgatgctcgtgtacgtttagtaagaacatggtc

SEQ ID NO: 82942 - DNA, 770 bp, Arabidopsis thaliana columbia
gaccagcttgacgtcgcatgcacgcgtacgtaagcttggatcctctagagcggccgccctttttttttttttttatttacagttttgttttgatattttgtaatggatttttcaaaaaattttttattaatatagcttttttttttgtatcttttacttattttgtgtttatttttatgaaccaatgaaatacctatggttctatatataataagttgtccatcgttttgtacagacaaacgcacaggttcaataatcaatattccttttttcattaattttgcaaaagtgaaatttttctcaatcattagaatgtctaggctcatctctcctctttcaatagaagataccgctatttcgtttggattgtttagtctaaccaagagacagtatacttttacattattgagaattttttgattaaaaaaacaattccatcgcaattgaaaacgcggataccttgtcagaaataaatcaagttccgcttctgtattacttttgtattgatttttatttttacgtttttttattgttgattctgcaaaattttcttcaatatttttttcttggtttaatcgagcctgttcgggatttctttttgtttctttatctgattcaagttctacttgaccggccgattcttttttcttctttattcagattataaaattcgaagggattttttttcatttgatgggtataaaacctttttttcttttccaaagatcttttttattaaccattaatgtttttcattaaaattttaaaag

SEQ ID NO: 82943 - DNA, 731 bp, Arabidopsis thaliana columbia
catgcacgcgtgcgtgagcttggatcctatagagcggccgacctacgcgttctatttttaaatcaaagggagtgtttgatttagatttacagtttcattttatgctacaaataaaaaagggtaatggaagaactaaatgaatccaacatgacatttttacagcgacattcacaaagaaagctcttctagattgctgtcctcttgagaacaattctggagagctcttgagagactagcttcatatccggtctctctggtgctggtgagatacagctcagagcaacctgcaagacatcagtaagaaccccaaagggattccttgagccctgtgatccaacaatcgatggatcaaaacactcagttgcacgggttttgtcccacaagcagtagaaccctttcagtgaggtcaacgacacctggatcactgcacactatatttcccgaaacttttcccgggaggagccctatctaaatggctccgagggcatagacatcgctttttcgagaacgggacggtttactcgagctggcaaactttggagggcagataccaaggtcaggtgcgttcaagactttgctttgacgttgctttctggggtgatttaattcaaatgaagactaataactctctttaagttgtagccaaaaggaggttcctgggaaggtttttctaaagaaaaaaatttttaggttggcaaatattaagaatgtccccccttggtggggaatat

SEQ ID NO: 82944 - DNA, 527 bp, Arabidopsis thaliana columbia
  unsure (1)..(527): unsure at all n locations
aatgaatgggatcaagcaactccacgcgcactgtctgtgatcatggcgtagacgaaaccaaagatctcttacaacgattgcttctgataccaaaccttgtttatgcccgaaaactcttcgatcatcatcaaaattcttgtactttcctctacaacaagctcattcaagcttacctatgttcatcaccagccccatgaatctatcgtcctctataatctcctctccttcgatggtctccgtccaagtcaccacactttcaatttcattttngcagcttctgcttcgttttcttccgctcgacctttacggttgcttcattctcagnttttnaagatctggggtttgagtccgattcggttctgctgnactaccctaaatcaattgcctatgcgaagtaaggagctttgtgttgtgngnccagagtgttcgcngaaatntttaaggggggttncccgtttggatgcaattttcangggttccacgcgggggtnnnttaggggcgtgggttnttntcannctgnanacnc

SEQ ID NO: 82945 - DNA, 677 bp, Arabidopsis thaliana columbia
  unsure (1)..(677): unsure at all n locations
aagctttaatacgactccctatagggaaagctggacgccctcaaggtcccggtccggaatccccgggtcgacccccgcgcccggaggatgccaagtttaggagtttgaaatgtgctggctctgggaatcttgtttatgtgtttaatgatgattgtcataagaaatttccagcttgtgtttgtgaagattggtggtggtgagaatgggatatgtagttggagaagagttcccttgtttgccttctccggttaataagtttcataaagttgttagtttctgctcaacggtgtctattaccgatgttttccaccccgaggaagctcggattggcggttcgatccgtggttgagtttgcttagtgctaatgtaaagtggagatgaagggagaagatttaataatgaagtgtataaaaatggttatcaatttattatggtaatcatgtaattagacgtaaactggtttataattcttcgttgtatgaatcatttacatacatacccatatctacagaatcattaagtattgttgtttgtttataaatgagggggttttcccaatttttttannnacaggggaaaaaaaaaaaaaaaaaaaaaaaaaaaggncagggcggccgctttaaaagaacccagggtagcgtgcaggcacgtaatagctgtgctatagtaaagaacgt

SEQ ID NO: 82946 - DNA, 517 bp, Arabidopsis thaliana columbia
  unsure (1)..(517): unsure at all n locations
gaaatggaaacacacaaatcgttgtagaaaacacgtttacagtacatatataattcaaaacacacacaaaaggagggcaaaagaatatacaaagggttttagagttatagggaagttatggcacaaaaggatgtacttggaatactctctcatgtttgcttctcttatcacatagatggtacttacccgtaaacttgacgccggcaaaaaacatagaacactaaaaatgaattccagatatataaacatccaaactctctcaccatcctcacaatttagatgagattaattaactatgaatgtcgtccaggagcgttaccgatcagtctgcattgttcaggtagcattgtcgatatcacttctccatgcaatgcaaacagttccccgtctttnccggaactgtcatgcgnatttttcccggctttatcttcactgntttanctgcaattgtcatgcatttggtccactacattctnttntnggcttttaanaattgnaattgngnttnaccgttttg

SEQ ID NO: 82947 - DNA, 900 bp, Arabidopsis thaliana columbia
caaaggactttttatatatattacaaaaatgaacagcaagttccaccactggagaaaccatggtgaaaaggcaaaaaccttatacaaacagcctttcttacggtaatggcaaaccaaacagaagttacaacacattcaactaccaaagccaaaagaaataaaatgataactttgaaacagtctttaataacgtccttcataagagcatagttccaatcaagagaattggacatgatcttagagcatccaacttttgcatttgttgtgaacgacctgtatatatcatcatatcctcctttcgagaaatagtagcagcataaccccaaaaggtagtcacctgaagatcaccaagcttgtttatgccgatcttcctgttaacatcatcttgacaaaagtaactcaaaatgtgtccactaacttatctgaacagtggagatttattacctaaaaagaaaagactgaacctatccttgacacttctcagagaagaccagacctatctctagaaggaaaggattagattgaaggatttaaaagcaaactctttggcgtgttcaaaaaaacccttgctaacccatctaggcagcgtggcgagcaaacataaggaactcaacctgagatctaatgtcacactttttgcaataaaaaaagctccagtattgcattttgtgtaggctcaaacaggacaaaccaatcctgttttccactgcctaagacaaggagaggagcaatgtgacttaaaatcaatggccattcagtaggcttgtgaatagctttaatgatgttcatagtggatgcagcaaaagtcactttctccatatgtaaactattcatactttttaaagcccattcccagctcaaaatcttagcttcacggacgggtgggtctaaccggaaatt

SEQ ID NO: 82948 - DNA, 565 bp, Arabidopsis thaliana columbia
  unsure (1)..(565): unsure at all n locations
agcggccgccctttttttttttttatttggagagcaaagatgatttgactaaaataactaaaatcacataacaattaacgaaaacaacttagagaagaaaaacacatatataaaaccagaatccatgaagagaaagatccacaacataacataccaaagcattaatatatataaatgcctaagtcaagtaaggtgatgcaacggcataaagaggggaactcgcggtgaaccgaaaaaccgctggattcagcgacatcagttttgtcttctttagattcctccggtagtttccaatcaaacccatgcactaagttagccaaaaccacctcattcaataccacagcgaatggatactgctgggacaaatccttctccctgctccaaatgggagcagctcaaagttttgacctcgggaatcaacagacggatctaaatgcctctccgggttggactcctccgcgtctggtccccatggggcaacctctcccccgggccagcatcatcacacttgcgacggtggatgggngccctattaaacctccgtggtcntggggcncatgggant

SEQ ID NO: 82949 - DNA, 513 bp, Arabidopsis thaliana columbia
  unsure (1)..(513): unsure at all n locations
gggaagaagaaaatacatatgttatatatatattttaaatcatagttgaaacaatactcagcctagaaggcagacaatcattcctattcactacaaatctttctttatatacaaaactagttagaaaacaaaatcataagaatacttgtgggtgtgggtgtttgtgtcaagagtcaagaccaatttcgctcctgtcaaatgtggtttgttttctccttatccaaacataaacgagagatcatccataggaacctcatcaagacctgctgtatcaatatcctgaagaccctcgaaccagtttccaagatctgcctgttcatctaatttcgtctagatcacggaacgctaatttcgagaaatctatgggagcttcgtcgtcgactgcaccatctccagaggtaacccctcggtttgaggccccctgctgctggcccgtnggggngtaaggtgtgcgcntnatggtccgtgtgtgngngtccttggttggtgncggcccnacactcccccgtcttt

SEQ ID NO: 82950 - DNA, 406 bp, Arabidopsis thaliana columbia
acatctgagtctattctgctggatttataatcaaactaaaaccgaacagagaaaaaaaaaatggaagaacatatcatgaaatcaacagaacctaatcccatatacaagttacaaatttacaacaaggtttccgtttgatttataatttggttagatcacgcgtaaataagaaaccaaacttggttgagaataagaaaccattcttggtagaaaatcagtaactaatatataataacccattcctttgacaccgcatctttgaccgggtcaatatccccggctaatcggagaactaaacctatttcagccgtacacactctgctgacgtaccgtcttagagagatcatcacgaatcggagaaggagacggcgtgtaaaacggtggggaagcacatggagtagaaaac

SEQ ID NO: 82951 - DNA, 498 bp, Arabidopsis thaliana columbia
  unsure (1)..(498): unsure at all n locations
cggagaaatcgtggcacattccacaacattatgaattacacgtttccacgagaagggagcaacttgaataaacatttgttcaacaaaagaatcttctcaagatgaaaaatatggtttcttatgcggtagaggtgaattgtatagagcattcctgccaacgatactgtggagaatgagatcaacgtcaatatccaaaaatcctttggattggagacaatgatacctaaaagatatgccatcaagtcaagagccgattgcagtgagttctgaacacctccaaccacacaacggtcggattctgaaacaagatcctgcatttgttgggatgacggcaagatcaaacatccacaagccaagccttgaagcagnacncagccattagctgnaaggggcaatttancccntttaaccccancggtccaanggggccaagggggncccctgggnccaagggccagggngggcccanntngnaccggttncttggggaacaaattt

SEQ ID NO: 82952 - DNA, 543 bp, Arabidopsis thaliana columbia
  unsure (1)..(543): unsure at all n locations
cctntnaaaaaaaagnccccttaaaangccttagggcctatattacagaccttgagtttgtacataaaatcattcgtatacgtaacatacaaggctgagacaatctattgtgacaacccggagaagaaggacacaccggtggatggcaaccacgaagaaccagaaatgaactgagccaccgtaaacttactagcctctaccgttgaggtaataacatgataaccaggccatttgactcgttgaccaattcctgaacccaaccctttgttcatatactcaccatagtacaacgagtccaatgcaaacggaccattccactccaaccatcctcgcgggtcaatatggtcacccatatccgacatcatgtacacaactctagaatacaacttccacggacggccgagatacgtcggataactaccccttagaggcttcaagatccgggtgttgctagagcttacaagatgaatcgaatcccgnattctgatcggtntttcgggtctggccganagaactctgnnggccatggtncgggnaatgtaa

SEQ ID NO: 82953 - DNA, 369 bp, Arabidopsis thaliana columbia
aggacgcgtgggcggacgcgtgggctctctctcactttcgaatatatcttaagataacagagacacatactcttaagtttggtgaagaataagaagacaatgacgaaggaagtggttggtgataagagatctttctccgggaaagactatcaagacccaccacctgaacctctattcgacgctactgagcttgggaagtggtctttctacagagctctcatcgctgagttcatagccactctccttttcctctatgtcactattatgactgtcatcggttacaagagccagaccgatccagccctgaatcctgaccagtgtacaggcgatggcgtccttggtatcgcatgggcctttggtggcatgatc

SEQ ID NO: 82954 - DNA, 1346 bp, Arabidopsis thaliana columbia
  unsure (1)..(1346): unsure at all n locations
tnnnnnnnnnnnnnnnnnnnnnnnnnnnnggacacaagatagatttgtttaattagcaagtctattggcttgggcactcaagtctgaattacaaaataatttaaccatttaaatgtaaaaacgacagagggtctgttcgagaaacaagatcaacatcattgccccaacatcctcctctacaaatgccaaaccagactaataccgggaaacccataaccaaaaaatagagggaaatttatttttattgtctgcaaattcagtgtcatatccaagtcaagggtggttgtcgagtgacaggagttaacttaagaggatgagccatggtaaggatggtccctttaacagcctctttcatgttgaccttctctccttcgattctccaggcaaagcactgcaccatcattcctattgcacttcctacaatcatataagctagatttgatccaggacatcctctccttccactgccgaaaggaagaaacttaagagcttgctctcttctctcgccctcttgccctgaccttgaagaagctagaaatctctctggtttaaacccctcaggggcctcccaagacattcgggatctctcatcacaacaataggcatttaatcaaaaagtgtttgccttcccccggtatgtagaaccctccgatcttacacccttgttgaaattcccttggcaagagaggccccggtgggtgcagtcttagtgcttccttaatgacagcgtgcaagtaagggaggttcggtaaatccgtttcttgaatcaaccttgatttccctacaacagaatcaatttcttctctcattctctcaagaatgtgagtattgttcatgatctcggccattgtccactgtattgtttgcacagaggtatcagtggctccaatgaaaaggtccacgaaaaaagccttgatgtgattcttagtgatcttgtactctgcattttcgtctccataagctgccaacaacacgtccaacataacccgtaccttgatccttcctccggtttctctctatgttccacaaagaactttctctagcagcacatcaaatttgttggaaacgcccatgatatccttcttgaatagtgagattccaagtttctgaagctgtctgcgcaacaaaactgccaagaacatctttttcatcaagccaatcgactcggtaactaatccccttagtttctctgtctcaccattctcctctgaaaaactccttcccatgctcatcttgcacaaaatgttgttcatgagattcattgcttcttataccaatctcaacgcttctcccttcttacccttgctttatcgaccgcagattcggacgcgtgggtcgaaacggaa

SEQ ID NO: 82955 - DNA, 425 bp, Arabidopsis thaliana columbia
aagggaaacaagaatataatcactttgtgtttttcaaatgcaattattttttccttaggatccaggcataattggggtataaacaaacaccacgacgaagagtaaagtgaaattgtgtgaagaatcatgtgattgtgaataaaagaatgaatggtgaactgtctggagacgacgggattcttctgtcctgcctgacgattaaaaggtcggatttgttcagagtggtttagaggatctccatgctgctctgttttctctagttggtagaggacttgcagaagaagcaaatactgttaacccaactctttttcggcttagttctttgagatttggtgtttcttgcctccacaagatcattcatgtattgaaccacggcctgtgcgcctttttcggttatatcccttggaagctcttcaagtggattt

SEQ ID NO: 82956 - DNA, 432 bp, Arabidopsis thaliana columbia
  unsure (1)..(432): unsure at all n locations
ttgtttttttttttttttttttaaaacttacgatttttttttttaatatagtttatttaaaaccgccgtaaaaatggtatgtaacagatgcgtaccaataccaaatgtagtgattacacgggattgtatagctagtcaacgatcaaaatcgaatcccttagttacaataagaaatcaaaactataaataaaatataaaacttttgaagcaggggaaaaggaattcaaacttacacgtatcaaaaaaagaagttactcttctccccaattttgcttccaacaaaaagtaacaaaaaatattggagaacccatctagtttagggccgtggaacgccaatgcccattttcactaccaaaaacctaccaccaccacttccgggaccggggnccccnttncggnnggggcctttccggggttgaaaaacnncccccg

SEQ ID NO: 82957 - DNA, 538 bp, Arabidopsis thaliana columbia
  unsure (1)..(538): unsure at all n locations
actacacacctataatgtttttcaataggttacatcaatgtttcccatcaaacattcatacttaaaaatgctaccagaacttggccacaagcctaaaagagagtttagaagagatgatcaggtaactagtacagaggacagaccgaaccattgataagttgctgcagatacaagctgatacccttcaacctctgacccatttttaatttcctttttggggtgcaaaagccaaaagtcatttaaagcttttgatgcatcaccttcctcctcaagtatttttccatcctttggaaccaagcatggaatcccatctttgataggaaaagagacaccaatagtatcgctnacaagtgatttcgtcttctngnaaaacctcagaggttgcttagagagagggcacaccagaatctcggagagggtcttgtnaattacattgccggcgtnttttagcagcactntgtttagtctcaccattctaaagctttgatctttagctctctccggactttttccttttttccgatctccggtagaattg

SEQ ID NO: 82958 - DNA, 487 bp, Arabidopsis thaliana columbia
  unsure (1)..(487): unsure at all n locations
gacgaaaccgtcttcaccgatctaagtgtttacttagcgacgatggcatggtatggatattcaaaaactttggctgaggaaacagcgtggcggtttgctaatgaaaacgggatcgatttggttgtaatgaatccaggaaacgtgatcggaccagttttgcagccaactcttaattactctgtagaagtgattgtggatcttgataaatggtaaaaacccttccaatagtttttactataggttcatggacgtgagagatgtttctnttgctcacatcaaagcgttcgaggtcccttctgctagtggcagatacatacttgctgatccaggtgtaacantgaaagncattcaaaaagctttttacatgaactgtttcctgattttgtgcccgtgttgatnagggntantgngnattagggtgggntnaatggcatncaaagtttgtttncgtaaatttgaaaagttttggganttnggtcacnccntt

SEQ ID NO: 82959 - DNA, 482 bp, Arabidopsis thaliana columbia
  unsure (1)..(482): unsure at all n locations
ccagtaaaaagaaagagaaagagagaataaataaatggaagatgtacggaggattgtggtggtcgtagaagataaacaagcggcgaggacggcgttacaatgggcacttcacaacctcctccgtcaaggtgacgtcatagtactcctccacgtgtactctcctccaccgcgtaagaagaaatccacggcggcgcgtctcctccgccgtcacggatacaatcttgctctctctttccgtgaaatctgcgactctttcttcaacgtttgtttttcctttgtgatcgtaattttgacagacgaatactgagatcattgtgagagaaggagatgatgatgggagaatgattgctcaagttgtcaaagagattggtgcttcgnatgcttcncgttgggctcccatcagaacagntttcttttacanntnggcanaaggtgggtncnnttttncgggaattncatttcaaangatgncntaagcnccc

SEQ ID NO: 82960 - DNA, 898 bp, Arabidopsis thaliana columbia
  unsure (1)..(898): unsure at all n locations
attatgaaaaccaaagcgctaaaagtaggcgtaatggcagatgatggatcatcgctgcagttggagaaaggcgaaaatggaaaaatggatttggacgagacacttgaaccaagggatgatatattcaggctcagtcttgatgacacacttgagcaagaaaggatgacgtttcatttaaagatgtctcaagataagcaagaaagtctaaggcagacctttaaacagggtgatgttgaaaaagattcagacgtattttcagaaggccctgaatttccaagtaaaatggcagaactagatagtgacactgaagaggagatagtggaagaacaattagaacatttgcagaaagagaatgagaagttaagtctaacctttgaacaacatgatcacatctacagcacaacggagccttctgaaattgtgggtttgcgtcatgcgttataccaaacgcaaaattcacctctacgatcacctctcacttcaccaattcatactcccattggttctccgctgcattacctgatggcttcacaaatacgttctccaatagcttcaacaatgcatagtcacatagtttcaccgcttcgttctcccatcaactcctctggatcactctctgatgtattgttcttcagcaagaaaacttgatggcacgaaaacagataagcattgttccaagctttccccacatacttgaagactttacctgcgatacaaaaacagtgtgtacattgtttcaattttgtttttgagtgattgtaaggttttctacagataataaatcaattcattgagtatccnnnnnnnnnnnnnnnnnnnnnnnnnnnnnnnnnnnnnnnnnnnnnnnnnnnnnnnnnnnnnnnnnnnnnnnnnnnnnnnnnnnnnnnnnnnnnnnnnn

SEQ ID NO: 82961 - DNA, 432 bp, Arabidopsis thaliana columbia
gcggtgatacaccggcaacgacaactgttcgccgttgatttccactgaatacctgactatctgcgctgcgacggcaagaaattgaaaattatggcttacggtttgatgatgttgaaaacccgaaaaaggcttcgtcttttaagcggcctccttctgcgtcgagactgtctggctttcgagaggaagaagaggccgatcggagtagaaaatcgggttcctttgtggatcatatcggtcaggaggacaagagaatatgcgcctctggatgtttcagaaaatgctgcgcttgcacctgcatgtttgtttctgttgtccttataatcgtcttgttggtaggattgtctgcaaactcttcaatcaaatctatactacctcaggtgcttgtcacaaaccttaagttctcgagattggatatcgccaaatcatcgacag

SEQ ID NO: 82962 - DNA, 456 bp, Arabidopsis thaliana columbia
aacctcatcactctgacctcattctcaagtgctatgcggttcttacataattgcggtttttatgttcaagcatatcaatcctttttcatttttatgtacctatcttctggaaatttgcagggagacaaaaatatcatcaagtttgatggtgatcacaactcttcgcgcccgcagtcttattatgattcagtattagtattcttctacaatgttcttcgcccgcctccaatttcttcatcttactcatctaaacttgaaagttattacagtttgggagatgtcaatagcgctactggtttggatgagaggttttctgtatgagatcatatctggggctttcgttcggcatgtatcggtgttgcaagtccttcttttctgcaacctcctggcccctctaacccacaaggccaacgattgagctcctttcagaagctatgcccatgatagatacagata

SEQ ID NO: 82963 - DNA, 380 bp, Arabidopsis thaliana columbia
  unsure (1)..(380): unsure at all n locations
gggagcaatgggatttgtaggagtatcaagatttgggaatttattgaagaaacagagagttggatcgaagtagaaacattaccggacattgtttgtaggaagtttacttcggtttgttaccataactacgagcatgtgtactgtctgtggcataaggagatgatttgtgtgtgttgttacaattggcctgagattctgtttttccatgttggaagaaggacatggcattgggttcctaaatgtccttcgttgccggagaaatggagtttgtgggtttccggtgggtcncctttttgtcccaaggnttgcttcttcnnttttangtgttaaaatgangantggtttnaggccngnaatccncctttgttanagggggtttt

SEQ ID NO: 82964 - DNA, 763 bp, Arabidopsis thaliana columbia
ggagcgggaaataccaattttctcccaagggggaacaggcttatgccccattgattttcggccaaaggtttgtaattacagcgttccctataagggaaaaggttgggtacggcctgccaagggcccggggtccggaaatttccggggtcgaaccaagggggcggcatttttttcataaaaatgatgaagaagagcaagctgatctgcattggcatggaagcaaatgtcaagcagagttgccaaacaccgcgtcgccaccggaaatcctaagggtcaatatcatataccacatgacgtaccaaagggacaccttgtggtgttcgttggtaaagatgaggaaacttataagaggttcgttataaagatcacggtgcttcacgatcccatcttcagagctttgcttgttcaatcaaaagatgaagctttcgacgatttcacttccggagattccaagctttgtattgcttgtggcgaaactctctttctcgaggtcctccggggcgcttctcctcgttattcgttatgagtctttgattcaagaagatggttctactactaacgtttagggtttttttaataatgttggaggatccctttaaggagtttgtgaaatgagccatttttaggtattagctgatggtagatatcatataatcttctcatagaagccttcattgttttataaaaaaaaaaaaaaaaaaaaaaaaaaaaaaagggcggccgctctagaggatccaagcttacgtacgcgtgcatgcgacgt

SEQ ID NO: 82965 - DNA, 685 bp, Arabidopsis thaliana columbia
  unsure (1)..(685): unsure at all n locations
ttcttcttctacttcgtcctcatcatcgtcacatagatcctcctttttcgttaattggggagagatatactttcttttgaggatcagatcgtgacagggtttagctcaaggagaggtattagatccgtactttgtgataaactttctcaagggggtgagaaaaagaagaagaaggtgagacatgtgaaggcaaggctttgaggatgtcttttacaggaactcaacagaaatgcaaggcttgtgagaagactgtttatgctgttgagcttctctctgctgatggagttggatatcacaagtcttgcttcaaatgcactcactgcaaaagcaggcttcagctgagtagttactcatcaatggaaggtgttttgtactgtaagcctcattttgagcagntctttaagggagngtggtagtttcaacaagaactttcaagtcaccctgcaaaatcgggctgacaaatcaaacttccctgaggcttgncaaggnccgcttggccnaagtttnncttgcaaggttctcttgggtacacaaggggnaatncngccccttttaggtaaaacttgtggatccctntttnaaaagggtancagtcggggggcccggcatttttacaaagcccngctttaagggcctcccaatngggggttccccantttaccttccaactnnggnggctttaagg

SEQ ID NO: 82966 - DNA, 600 bp, Arabidopsis thaliana columbia
gcggtgttccccccagggaggttttgccgaaccccctttgggcccccctttaggggggtggtgtttcacaaggacttcggcccctggaaatcgggtgccaaataaacccctgggctgccagggccccttgcccggttgctggcaggttctctggctccccaaggggaattggcgccacttggtaggtaaacctggggtaccctatttgaaaagggtaccaggtcgagagcccagacatatcacaaggtcctggcttcaagtgctcacatggaggttgcccaatttcaccttccaactacgcagctcttgaaggaatcctgtactgcaagcaccatttcgctcagctcttcaaggagaagggaagttacaaccacttaatcaaatccgcttccatcaaacgctctgcagccgcagcagtcgccgccggtgtaccagcagcctccgttcctgaatcttaaaatccaataatttctcctctctagtctaaaatttgaagttaatgccaaactgattcagtttgatttctctttgtgagagcgtgtgtgtaatctatgctttgatgttcttatttccattgatgtctcctaaaattctatgttt

SEQ ID NO: 82967 - DNA, 1203 bp, Arabidopsis thaliana columbia
  unsure (1)..(1203): unsure at all n locations
nnnnnnnnnnnnnnnnnnnnnnnnnnnnnnnnnnnnnnnnnnnnnnaaaggattttacccaaaatctccgatattcttattccccacgcgtccgatcttcttcttctacttcgtcctcatcatcgtcacatagatcctcctttttcgttaattggggagagatatactttcttttgaggatcagatcgtgacagggtttagctcaaggagagggtgagaaaaagaagaagaaggtgagaaaagtgaaggcaaggctttgaggatgtcttttacaggaactcaacagaaatgcaaggcttgtgagaagactgtttatgctgttgagcttctctctgctgatggagttggatatcacaagtcttgcttcaaatgcactcactgcaaaagcaggcttcagctgagtagttactcatcaatggaaggtgttttgtactgtaagcctcattttgagcagctctttaaggagagtggtagtttcaacaagaactttcagtcacctgcaaaatcggctgacaaatcaactcctgagctgacaaggacgcctagccgagttgctggcaggttctctggtacacaagagaaatgcgccacttgtagtaaaactgtgtatcctattgaaaaggtaacagtcgagagccagacatatcacaagtcctgcttcaagtgctcacatggaggttgcccaatttcaccttccaactacgcagctcttgaaggaatcctgtactgcaagcaccatttcgctcagctcttcaaggagaagggaagttacaaccacttaatcaaatccgcttccatcaaacgctctgcagccgcagcagtcgccgccggtgtaccagcagcctccgttcctgaatcttaaaatccaataatttctcctctctagtctaaaatttgaagttaatgccaaactgattcagtttgatttctctttgtgagagcgtgtgtgtaatctatgctttgatgttcttatttccattgatgtctcctaaaattctatgtttgtgtggtgatttggttatctataaaaagtctgaaactttccttataaaaaaaaaaaaagnnnnnnnnnnnnnnnnnnnnnnnnnnnnnnnnnnnnnnnnnnnnnnnnnnnnnnnnnnnnnnnnnnnnnngaaatgcaacccaacctnnnnnnnnnnnnnnnnnnnnnnnnnnnnnnnnnnnnnnnnnnnnnnnnnnnnn

SEQ ID NO: 82968 - DNA, 958 bp, Arabidopsis thaliana columbia
  unsure (1)..(958): unsure at all n locations
tttttttttttttttgatgaaatcattgtgaaaacggatatccagcaaaatcatgcaaaatctacagagtcgccgtccttataagtaaaagattgagccttgcatgctgcttgattcgctttccttctatgtccagtaacataaagataaaagatctacatagatcctaagttctaaacttgtataggaacctccggttttaattaagagtttttgtgtcggatgatgactccctcgaagataccatctgatcggaagttaggagagaatagccgcggatcaactggccccgggaggttaaagcacagcttaaaaggtccaggcggacaacagcttcccggggtattcatctcgaacacccgagaatgtctcttgatatttttttcgcctgttgtagttgacccctccagtataaccttcccatctgattcaatctcacaggtgaatccaccgtaatctttgcggacaccgggcaaggcaacctgaaaaaagtaagcacccttgttgacacccaatgtcaacaacaccaacagatgatcctagagtttctttactggctgttccagtagttaccaaccgacggttctgcatcgcttgaaaaaggtataggcttatctgttttttctctttccataagagtttcaccattcttgtttgttgccttttttgatgagttcttgaaccgtcttctcttgtatgtctcacgaaatctttcaggggttttactcgttccactaacagcatgaccagtaactgcttcttcttccttgttctttcgcttacatgtttctggaagctttacaaatgaatagtagtcttggtcagagacaattccactgaatgcagattctccgtttctcccacgcgtccgactagttctagatcgcgannnnnnnnnnnnnnnnnnnnnnnnnnnnnnnnnnnnnnnnnnnnnnnnnnnnnnnnnnnnnnnnnnaac

SEQ ID NO: 82969 - DNA, 351 bp, Arabidopsis thaliana columbia
  unsure (1)..(351): unsure at all n locations
gtgaacagaaaagaaaactttttaacatatgcaacaagattttggtgagggtttgtctacatgttccgggaagagagagagagagaatcagaagtgtatcttgatctagggttcacagacaaaatctccatgctttgaactaagcagaattcatctgggtcttttatctctttcaatatcaaacccaaggattgatctatccatatcgtccaaaacctatatctagctaagcctagaacttctctatcgnttaccactttctttctatatttcttctgaatttgtaacatcagaagtaataatgattccaagtatggagggaggcgggaagactaacagagaagaagagga

SEQ ID NO: 82970 - DNA, 783 bp, Arabidopsis thaliana columbia
atgaccgcagccaagtgatgtaccatcctgagctgactcatttgctcatgaataccccttcgttgaacaatttagcttcgacgtttcagaacgagtatgttgggggaagttatggtaactatggtaactatgagcaagaagtatcctcttcttatcaagaagatccaaatgagatcgatgctctcttgagcgcagatgaagattatgaagagaatgatgataatgaaggcgaagaggatggtggtgattcagaagaagtcagcactgctcgtacttcttccagggattatggaaacaccacagcagaatcttgttgttccagttatggttacaacaacaacaacaacaacaactcaaggaagcagagtttatcgggcagtgctagtagtagtaacaatgatgggaaaggacgtaaaaagatgaagaagatgatgggagtattgaggagaattgtccctggaggagaacagatgaatacagcttgcgttcttgatgaagctgttcagtatctcaagtcacttaaaatcgaagctcagaaacttggcgttggacatttctcaaaccaatcttgaatgctaccgatatttggttcttccatcactattgtttctcgggggggttaatcatcgggcttgcgctattctggccctttctctttattttcccccctctatactcacttccttttgttggcaggatggatctattttatgtttgaatctctctatgtattttgctttttgtgtgttactgcttcgatgaagaagcaaggtttgaacaaaa

SEQ ID NO: 82971 - DNA, 467 bp, Arabidopsis thaliana columbia
  unsure (1)..(467): unsure at all n locations
tttacaccgantcagggaccnggcctgnattcccagggctgcccactgtgtccggggctgactctaatgatcaacagcatttgccaaactggaataagatgagagtctcagtgaacatcatcacccaaaaccgagctcaatctttattaagattgcttaggtctttgagcaatgcatactaccttggtgacgaaatatcactcagcttcaacatggatagcaaagtggatgaagagacgatcaatgtagtgagcacattcgattggcctcatggaccaaaaacactaagaagaagaatcatccaaggaggcttaatccgtgctgtgagcgagagttggtatccagcttctgatgatgattttggtctcttgcttgaagacggcattgaagtctctccatattaatttcctctggttcaaaatacggtttacttgcttaccacttcggcccttaagggttttttcccc

SEQ ID NO: 82972 - DNA, 617 bp, Arabidopsis thaliana columbia
  unsure (1)..(617): unsure at all n locations
aaacccccncccgttntttgngattggccgnatacaatttccccngnaccactttgccntggttccccaancncgaatttnccccncccttaaggggaccaaaagctggncncccaccncggttgcggccgctnnnngacctagnggacccccccgggcttncaggaatttcgccacgngccccatgaaccgtgaaccattncactggttgagcccctagttggttttgagaaatcattcaaaccacttggatgatcnccgaagttgacatcagttccaagggaattacaaagccgaaggaagtaaagaagttcaaaggagaagggatgccacttcactacagcacaaagaaaggcaacctctttgtcacttttgaggttttgtttccgtcttctctcactgacgatcagaagaagaagattaaagaagtctttgcttagtgctcttctcccgctttcgctctctctctctttagaagtttggggattaaagagaagaacatgtgatggtcctaatgtataacatgattaggttttaatatagaaagaaaaaagatatggggagacaaagtcggaaggacgttttgatcaagttgtcatttttgtttgctctttgtt

SEQ ID NO: 82973 - DNA, 577 bp, Arabidopsis thaliana columbia
acaatctcttaggtcatcgcctttactatggtttccgttcctcaatcagaccagacagaaaagcacttgccccaattttcattgcttgagagaaggggaaaagggctggcttcgaagagccagtgagccgggtattgctgaaaaccaaacttcgggggcgcctcacaagcgtgtatcctcctggatccgttttttacaaacttcatggcctgaatgtttcctgtcagatgaatcccgaaggaagtcctagtgataaaatgcccgccaaaataatgttatagagattcttgacagccggttagagagtatcagagatccagattcaacttctcagacgaattccacggtcactggattagaacggtaaggatcttaactggtaagcctttggaacgttttatacctaaaagtgtttcaaacaaagaagagcagaagaagagagatgtgtctccaccattgttcatacaattcaggtagctcaacgtctctgtgtcaaacaattttctttatgaagcatagatttgaatcttgtttcaaaatttgtaacaaaatctaagagaagtgatgagattccact

SEQ ID NO: 82974 - DNA, 759 bp, Arabidopsis thaliana columbia
aaaaatggagccttccgtcaataaagatgaataaagtatggggaacggccccaacaagggaacccggggaccgaaaaatttcccgggggtgggaaccccagagggtgcgaacaaatgtttaagagtaaatagcatttaacaagggtttccggtcccgcggtggggccagtcaaaaaaagctatgaggtccgtgtttcaaagagaaaaaaaaggagaaaagggctggcttcgtagaggcagtgagacgagtaatgctgaaaacaaacttcggaggagcctcacaagcgtgtatctcctgaatcgttttatacaaattcatggcctgaatgtttctgtcagatgaatccgaagaggtctagtgataaatgcccgccaaataatgttatagagattcttgacagccggttagagaggatcagagatccagattcaacttctcagacgtattccacggtctctggattagaccggtaaggttcttaactggtaagcctttggaacgttttatacctaaaagtgtttcaaacaaagaagagcagaaagaagaaagatgtgtctccaccattgttcatacaattcaggtagctcaacgtctctgtgtcaaacaattttctttatgaagcatagatttgaatcttgtttcaaaatttgaaacaaaatctaagagaagtggtgggcttccaaaaaaaaaaaaagaaatatatagggcggccgctctagaggatccaagcttacgtacgcgtgcatgcgacgtcatag

SEQ ID NO: 82975 - DNA, 390 bp, Arabidopsis thaliana columbia
  unsure (1)..(390): unsure at all n locations
gagacaagctctgtctgtggtcgggaaatcgaaaccagagcctcggactgtgtctctgctctgcggagcatccggtggcgttttcttgaaggtgaatccagcgaacccttaatctcaagctccgagactgtgcaataaacaaaacagtagctagcagcagcagcaacacatgaactcgcgcaaatcccttatccgtgcctcaatctcttcctttccatttgttcctcttccaaaccctaatttctctatcaccttcatctccgttcgcgcctttcctcctctctctgtccttcatccaaattnatcatgtattgtaacaagttcgacggacatttaatnggagctgtggcncttttaaccggagaggcttaacgggaggagtttcccang

SEQ ID NO: 82976 - DNA, 454 bp, Arabidopsis thaliana columbia
gcgcttaacgttcatatgcttctttttcttcttcaagaaacctatggattcacgagttaacttcgatttgcctccgagccctccttctctaccaatcattggtcatgttcaccttctcctctctactctaacccacaagtcattacagaaactctcctccaggacacaagacgtgaacatctcctctcgcggtgtcaccgcggttgatgagtccctcgtgtttggttcttccagcttcgtcactgctccttacggagattactggaagttcatgaaggaagcttacttgtcatgaagctttctcggaccggcaggcaacaaggagcagtccacgggggacatccgctgcaagatgacattaaaagcggttttgcaggaatctgctcgataaagcaaggaagaaggagagcgttgagattggtaaagaagcaatgaatctcatgaacaacatttt

SEQ ID NO: 82977 - DNA, 533 bp, Arabidopsis thaliana columbia
  unsure (1)..(533): unsure at all n locations
cttgaagggtcagagtctaagacagaaagtgttgctgaagaggagccggatcttcctgggaggtcttctatacaggatgatgaatcaaatgcagaagaaactgatgatcaacatcttgcatctgaccatgccacagacatcacaagagaagactcgaatgataaaagcaaagaggttgttgaagaggagacagtagagccatgtttcaccacaagagaagactcggttgacaaaagcaaagaggttgaagaggaaacagtaaagccatgtctcatagaagacgcgcttacaagccagaatgacaaaacctcatctggtgaccatcctgttgaaataaacggaccaatccagttgaaagcaagaatttgggaatctgaaaacattggaactggtatcaaanttgcttcaactgaggtagngtcaccagcctttgatgatcttnaccgcancagntttaaaggnaccccgnggttgatcttncaaggnccattttcagctgnntgttnttttnacgggtgggccatttcttgaat

SEQ ID NO: 82978 - DNA, 1013 bp, Arabidopsis thaliana columbia
cgtccgagcgaaacaatgattgagctataacataggcgaaacttgagcggctctaattgaaaatcactccttgtttttttgaggaaaaagtaagatgtagggctgagaattcgtctatgtgatccaacggttttaaaatgatccttgttccttcctctcctatttatctgaaggacgaagccccacgctgcacataaccggggcacttaacgtatagatcataaacaaagaagaagaaaaaaaataagaaaagaagaagaagatgtcgtggcaaacttacgttgatgagcatttgatgtgtgatgttggcgatggtcaaggacaccaccttactgctgccgctatcgttggtcatgacggtagcgtttgggctcagagcgccaacttccctcagttcaagggacaggagttcagtggtattatgaaaggtttcgccgacccgggtcacttggcacccaccgggattttttcattggcaggaccaaagtacatggggatccaaggtgagcccggggctgtaatccgtggcaagaagggagcaggaggcataacgataaagaaaacaggacagtcatgtgtgtttgggatctatgaagagccagtgacaccaggacagtgcaacatggtcgtcgagaggttgggtgattacctcctcgaacagggtctctagaatcttcttacaatgttccaccacctacatttttttataaggccattgtttctcctatttttttcctttgggtgatttgcatctctttctctaattgatattataagttttgggctaatggaccttcctggtttctccccatagcaaacttttaagaaagctgaagcctaaaaggcttttactctctttgccttggtttcttatttatatgcatgttttagttgttttctctttgcttttttgtcaattgcattctgtctaaaaaaaaaaaaaaaaaaaaaaaaaaaagggcggccgctctagaggatccaagcttacgtacgcgtgcatgcgacgtcagagc

SEQ ID NO: 82979 - DNA, 649 bp, Arabidopsis thaliana columbia
gtttctcggcaccgcttctttgtatagcacagaagtgaagagcaagcagacgaaaaaaatggcgactctgtcttcctatctgttatcttctcctcctctatgcaaatcccgattctcggcaacaagtctcgtctcaggaattgatttcatctctttctctcctcgaacaactctctcctcgtcatccactgtcttgccggcgattctttctctttccgttaaacataatcgccggagaaactcgcttcaagtgaaatcagtagctagcccaacggagacgatttcagaattcgatgagatggtctccggcacgaaacgaaagtattacatgctcggtgggaaaggaggagtgggcaaaactagttgtgctgcttctttagctgtgagattcgccaacaatggacacccaactctggttgtatctacagatccagcacattccttgagcgattcttttgctcaggacttgactggaggaatgcttgtccctgtagaaggaccccaagctcctttatttgctttagaaataaaccctcagaaggctttggaagagtttcgtaggcccccaaggatatttggaggaactggggtgaaagattttatggatggtatgggacttggaatgcttgtagaacagttgggggagctt

SEQ ID NO: 82980 - DNA, 1004 bp, Arabidopsis thaliana columbia
  unsure (1)..(1004): unsure at all n locations
aaaaattgtgtagaaagctagatgatgatgcaatcccgattattagcgtttgcttcagcggcgcgttcacgtgttcgaccaatcgctcaaaggcgtttagcgtttggatcatccacgtctggtcgcacagctgatccagagatccatgccggtaacgatggagccgatccagctatctatccgagagaccctgaaggtatggatgatgttgcaaaccctaaaacggcggcggaagaaatcgtagacgatactccccgaccgagtttagaagagcaaccgcttgtaccgccgaaatctccacgcgccactgcgcacaagctagagagtactcccgttggtcacccgtcagaacctcatttccaacagaaacggaaaaactccaccgcttctccgccgtcgcttgattccgtgagctgtgctggtttagacggttcaccatggccgagagacgaaggagaagtggaagagcaaaggcgaagagaagatgaaacagagagtggccaagagttttacaaacaccacaaagcttctccgttatcggagattgaattcgccgatactcggaaacctattacgcaagctaccgatggagctgcctacccagccgggaaagatgtgatcggatggttaccggagcagctagacacggcggaagaatctttgatgaaagcaacaatgatattcaaacgcaacgcagaacgtggcgatcctgaaacgtttcctcattctagaatcttaagagaaatgagaggcgagtggttttaaactaaagaccacaataaaatgttaagaagtgtctgaataaacttttgtcaattagcttcattgagacattttggttccttacgaaagtgaacaaagcctctttatgtcccaaatctctagaaaccctaaaatcaaaagaatttgttcgtaaaaaaaaaaaaaaagnnnnnnnnnnnnnnnnnnnnnnnnnnnnnnnnnnnnnnnnnnnnnnnnnnnnnnnnnnnnnnnnnnnaacgaaa

SEQ ID NO: 82981 - DNA, 519 bp, Arabidopsis thaliana columbia
gaaactttggttccatcgtctctctacaaatcttactgctttgaccacctggtgattgctacaagagattattgttttgctccttccatggaagcaatatgccaagctgtagaatttatccatagaaatgcttcgcttggaaagacgacttatgttcactgcaaagcgggtcggggtcgcagcacaactattgtcatatgctacttggttcaacacaaaaacatgacacctgaagcagcatattcctacgtgagatcaatcaggcccagggttcttttagcagcagcccaatggaaggccgttgttgagtactaccatgtcaaggtgctgaatactcagagttgcttaactgatgcaacttcagctttgatcccgagaaatgtgaagcaggtttgttcctgggaatgtagggggtgtttgttgatgggtcaatggttgtagtcacccactcggatctagagggctataatgatgatgactcacggtcacgaggtcagtgaaagttaatgggaatgagct

SEQ ID NO: 82982 - DNA, 403 bp, Arabidopsis thaliana columbia
gactagttctcggggctgcagttctctggtggctctccctcgacggcagcgttttctcagtcacacgcggtggctgatacaataacggcactcacagctgacccgaatttcacggcggctcttgcagccgttatttcttctatgatcaatggtacgaaccaccacgacggcggaggaaacaacaaaaatcaatagaaaaatattacattttttttttggggatctacaattttttttccaactgggttataggaaacagagagtttatttcattgattcacatttgttctgtttcgtaccaaaatcccagtaaatatacaaaagcaaactatactcaagttcatattcgtaaacactataaatagttacgtaacttaattagcattgcctttaaagctttaat

SEQ ID NO: 82983 - DNA, 625 bp, Arabidopsis thaliana columbia
gactcatattgggaaagctggtccgcctgaaggtaccggtccggaattcccgggtcgacccacgcgtccgcccacgcgtccgcccacgcgtccggtttctggaaaatgaacacaaaaaaatatctgaaaatttcgatctaaaaagcataaacgaatccaaatttcaagaggagaagaaaaatcttcaagtccacgacgaaacttttcatcgatcttcaaattccagaaaaaactcgatgaatcttcaagctgtttcttgtagcttcggattcctttcgagtccacttggtgtcactcccagaacttcgtttcgtcgcttcgtaatccgagcgaaaacggaaccgtcggagaaatcagtagagattatgaggaaattctccgagcaatatgctcgtcgctctgggacttacttctgtgttgataaaggagttacttcagtcgttattaagggtttggctgagcataaagattcatatggtgcaccgctttgcccttgcagacactatgatgataaagctgctgaggttggacaaggcttttggaattgtccgtgtgttccaatgagagagaggaaggagtgccattgtatgcttttcttaacttctgataatgatttcgctggaaa

SEQ ID NO: 82984 - DNA, 500 bp, Arabidopsis thaliana columbia
  unsure (1)..(500): unsure at all n locations
gcgtccgtagatgctgttcatgctgccattggccggcatctaccttttgtttcaaatatatccaaatataatttggtcaaagaagactttactcgagctatgcatgattttgtgcctgttgccatgcgtgacatcacaaaatctgcctctgaagggtggtcgtttggggtgggaagatgtgggaggtgtgactgatattaaaaatgctatcaaagagatgattgagctgccatcaaaatttccaaaaatctttgcaaaatctcctctgcgtttgagatcgaatgttctcttgtatggcccacccggttgtgggaagactcacattgttggcgcagctgctgcagcgtgttccctacggtttatttcggtgaagggggcctgagctgttaaacaaatacatttgggtgcatctgaaccaagcgggtccgngatatantttncgaaagnagcagctncaagctccatgcatacnctttttngntggnntcgnttaattngga

SEQ ID NO: 82985 - DNA, 514 bp, Arabidopsis thaliana columbia
tcaacaagctgcatctcttacagagtttagttggcttggctacagatttccagtttcgaatccaaaatctcgggtttctattttaaaagctcaggaacttgagaaggaactacagagtccaacagcagaatctctccctgcagagaaaaagctaaccatttttgataaattattcactgcatatcatggtgccagggacacggtacgcagtgaccttggtaagtgcaggtaatgctggatctgttaaaggtgaccctaaatcggtttggacaaagctgttgcagctgtgctagggcaaagaacccttgtaagggaccccttgcttggttaaagttgcaaagggttaaccgtacaggaaacgtgatgataaaaatgataaagctactaggcctgaagagcttgttcgattgtatgaccttctattacagaatgtcgctgatctttctgatctcattagctctggaagagacaggaaacctgaagagattgcctttgaagaagagtgtcagcgcac

SEQ ID NO: 82986 - DNA, 520 bp, Arabidopsis thaliana columbia
  unsure (1)..(520): unsure at all n locations
acctgagaatctcatctctctcggatgtagaagaagatgttgacgatgaagaagcgaacgatgtccgcatggggatcggcgattgtaatcttcataatacttatgatcgtcactcccacaatccctcaatctcaggcttaccacaatgtcgccgatcaacgctccttcttcgggattccaaattttttaaacgtcatctccaacttccctttcctcatcatcggctttatcggtcttatcctctgcttttacccagaagattactttagcttttagtttgcgaggtgagaaaataggatggacttgcttttacatcggtgtagctgctgttgcttttggatccttcttaactatcatccttcacccaaacgggtgctactctcctctggggtcgtccttcccatgactattgctttcacatcaatcatggctatatttgtaatcgagagggctgttgagcataagggtaccttctccatggcccttatttttcnggttttaananttttttttggggttt

SEQ ID NO: 82987 - DNA, 790 bp, Arabidopsis thaliana columbia
  unsure (1)..(790): unsure at all n locations
gcctgcaggtaccggtccggaatacccgggtcgacccacgcgtccgtacttactaagtaaaaagagaaaaaaaaaaaattaagatatggagggactcttgaagttgtcaactttggtgattgtgtgcatgttagtgaccgctccaatggcgtccgaggcagcaatctcgtgcggcgcagtcaccggcagcttaggtcaatgctataactacttgacccgaggcggtttcattcctagagggtgttgctctggcgttcagaggctcaacagcttggctcgtaccacccgtgaccgccaacaagcttgtcgttgtatccagggagcagcgagagccttgggttctcgacttaacgctggtcgtgctgctcgtctccctggtgcttgccgtgttaggatctcttaccccatcagtgccagaaccaactgtaacaccgtcaggtgatcaaaagaagatagacgttgaagggttttcatataatcgatgagagagtattaaaaataattaagatgtcacactatatacacactagtgtatccttttactgttattattgttgtgtttctagattttgtgttttcatgtctttctttgtatatgacggtccatttaattggtcgtctgtgttatgtactcctctaatgatatattgaatttacgatttatgtattaaaaaaaaaaaaaaaaggcagcccgctctagaggatcccagctcacgcacgcgtgcatgccacgtcnnnnnnnnnnnnnnnnnnnnnnnnnnnnnnnnnnnnnnnnnnnnnnnnnnnnnac

SEQ ID NO: 82988 - DNA, 521 bp, Arabidopsis thaliana columbia
  unsure (1)..(521): unsure at all n locations
gcagtttgtnttgatgatcctgagtataagcacatcactaacatcaatgaacttcctcctcatcgtctttctgaaatccgtcgattctttgaagactacaagaagaatgagaacaaggaagttgcagtgaatgattttntacaacctggtcctgctattgaagccattcagtactcaatggatctttacgctgagtacattcttcacaccctgaggagatagatgaaaagaggacttcttcaagaacattcctgccaatttttgggtctgcaatctcagattctgttgcagtgaatatgcaaaagaacaagaatttggtcttatatttggattttttttggaataagcacgtgtctcatattttggctttgacggctttcccttttttgttggtggttgttgttgttggccctcctcgggggatgtttttgtccttgaacattaaagaggttttgtatttgtgaaaacactgcccctttgggtccctttttttaataatttcaagcttcgatttggttccg

SEQ ID NO: 82989 - DNA, 1086 bp, Arabidopsis thaliana columbia
  unsure (1)..(1086): unsure at all n locations
agctgataccgaaactgatcctatattgaagcagaatctggtatctttggaaagtaaagtcaagaagatagataaggaaatggagaaacacaatgaccttttgaaggagattcaagaaaacccaacagacataaacgcaatcgctgccaagagacgcagagactttacgggagagtttttccgctatgttactttgttatcagaaactcttgatggcttggaagaccgagatgctgttgcgaggcttgcaactagatgtttatctgctgtgagtgcttatgacaacacgttggagagtgttgagactctagatactgctcaagcaaagtttgaagatattttaaactctccatccgtggattctgcttgcgaaaagatcagaagtttagccaaggcaaaggagcttgattcctcattgatcttattgatcaacagtgcatacgctgctgcaaaagagtctcaaactgttacgaacgaggctaaagacataatgtatcatttatacaaagctacaaagagcagtcttagaagcatcacaccgaaagagatcaaacttttaaagtacttactcaacataacagaccccgaagaacgattctctgccctagctacagcattctctcctggtgatgaccacgaagctaaggaccctaaagcattatacacgacgccaaaggagctgcataagtggataaagataatgcttgatgcttaccatctcaacaaagaagaaacagacattaaagaagctaaacagatgagccaacctatcgttattcagcggcttttcattctcaaggacactatcgaagacgagtatttagacaagaaaacaatcgtggctgatgaaactccaaagaaggaagaagaagatacgactattgaagattttttgaactgaaaattgtgaaatccatgaacacactctgtttacaattagtaccttttatgtaatggggaaaagagtaattttgtagaaaaaaaaaaaaaaaagnnnnnnnnnnnnnnnnnnnnnnnnnnnnnnnnnnnnnnnnnnnnnnnnnnnnnnnnnnnnnnnnnnnaacgaaatgtacaaccaattttccc

SEQ ID NO: 82990 - DNA, 564 bp, Arabidopsis thaliana columbia
  unsure (1)..(564): unsure at all n locations
agtgaagtatgtaatctttgacaaatcaggcaccttaactcttggaaaagctactgtgacaaccacaaaggtcttctcagagatggaccgtggagaattccttacacttgttgcgtctgctgaggctagcagtgaacacccattggcaaaagctatagttgcgtacgctcggcatttccacttctttgatgaatccactgaagatggcgaaacaaataacaaagatttgcaaaactctggatggttacttgatacctcggattttctctgctcttcccggaaaagggattcagtgcttagtcaatgagaagatgattctggtgggaaaccgtaaacttatgtcagaaaatgccataaacatcccagaccatgtcgagaaatttgtggaagatcttgaagaaagcggaaagacgggagtcattgtagcctataatgggaaattagttggtgtgatgggaatcgcggntcctctaaagcgngaagccgcttttggttgtggaaggtctccttgggaatgggtgttcggcccataatggttacaggtgatacctngnggacagcaag

SEQ ID NO: 82991 - DNA, 519 bp, Arabidopsis thaliana columbia
  unsure (1)..(519): unsure at all n locations
ctgcgcacccacgncgtccgnatggtcttggtctctcccagggtctggagttgcgggttgctactgcccacatgcaatcttctggcagattgggaaattctactccgggtttcagtcatcagaatccccgtataccattaggtgaatcacatttttcacatttggaaccaacggaaggacgctggtctggagccgatacacagctagctggtgactgggccgaatctcaatttcgtagatctaatatggatactgagcatgataaaatgaggtcggaaattaggagactgggtgaagatcccaactcatggatggtaggtggatctacagacggcaagtcaaagcagcttttttatggggttgctccaccagagacctggccatcaatcttgcttgggtcaccaaacatgaaccgtggggtatccttatgacaaggatgggttccctnnagggcttnaccccagggnttnaaancggttggngggccttttaaancatnggtggaatnaaaacggttaa

SEQ ID NO: 82992 - DNA, 623 bp, Arabidopsis thaliana columbia
  unsure (1)..(623): unsure at all n locations
gaggntgaacccncccttgttttttncccctntttaaagaaggncgatccccggtactcttatccccacttccaaacataccctatacaacagggcaagagagtcaatcaagtagagtgaagatggcaactaaacaagaagctttagccatcgatttcataagccaacaccttctcacagactttgtttccatggaaactgatcacccatctctttttaccaaccaacttcacaactttcactcagaaacaggccctagaaccatcaccaaccaatcccctaaaccgaattcgactcttaaccagcgtaaaccgcccttaccgaatctatccgtctcgagaacggtttcaacaaagacagagaaagaggaagaagagaggcactacaggggagtgagacgaagaccgtggggaaaatacgcggcggagattagggatccgaacaaaaaggggttgtagggtcttgctttggncttncggcacttncgtgnaagcttggaagagcttttgaccangnggcgtttcaattacgttggaggaaagnaatcttgaatttccccttngatnttagggtncgnagaaacttntcttgggaggggtntnggtttgggangaagcagtaga

SEQ ID NO: 82993 - DNA, 964 bp, Arabidopsis thaliana columbia
  unsure (1)..(964): unsure at all n locations
gattnagggaccnggcctggaattcccagggtnaacccactgcantccggctagaaccatcaccaaccaatcccctaaaccgaattctacccttaaccagcgtaaaccgcccttaccgaatctatccgtctcgagaacggtttcaacaaagacagagaaagaggaagaagagaggcactacaggggagtgagacgaagaccgtggggaaaatacgcggcggagattagggatccgaacaaaaagggttgtaggatctggcttgggacttacgacactgccgtggaagctggaagagcttatgaccaagcggcgtttcaattacgtggaagaaaagcaatcttgaatttccctctcgatgttagggttacgtcagaaacttgttctggggaaggagttatcggattagggaaacgaaagcgagataagagttctccgccggaagaggagaaggcggctagggttaaagtggaggaagaagagagtaatacgtcggagacgacggaggctgaggttgagccggtggtaccattgacgccgtcaagttggatggggttttgggatgtgggagcaggagatggtattttcagtattcctccgttatctccgacgtctcccaacttttccgttatctccgtcacttaaaacttcggaaaagtcaacgtacgatgacgttttcacttgcgtcactctcatgatttcatttattcttgtataatataaaggtagcggtagtgtgcaaatatcaaataagtagtttaattagtaccaatcattttattcattattttttttagtagaatatttggatgttgaaaatataaatttaattttgtatttgttgatgttataaatttattgattgtataaaaaaaaaaaaaaagnnnnnnnnnnnnnnnnnnnnnnnnnnnnnnnnnnnnnnnnnnnnnnnnnnnnnnnnnnnnnnnnnnnaacggaatgacacca

SEQ ID NO: 82994 - DNA, 531 bp, Arabidopsis thaliana columbia
  unsure (1)..(531): unsure at all n locations
gtaaacatttactctaaacgtagcttatcagagctttaaagtgatcgatggattgaatctatacggttgcatcagtatactctctctgctttatctgtttcccgtggcgattttcgttgaaggatcacattgggctccaggttaccataaagccattgcatctgttgggacaccatcaacgttctacttttgggttttgctctctggtgtcttctatcatctgtacaaccagtcttcttaccaggcactcgacgagatcagtccattgactttctctgttgggaacacgatgaagcgagccgtggtgattatctcccactgtttttggtggttaggaatcctgttagacctctgnaatgctcctttgntcnnccattncgnatttttgggaacctccttgtattctcaaggcccntcaaagaaggaggagnnttaaagtnggngggtgtaaagaaggnctaaaggttttaagggnaaaaccaagggttctttggntttttttnttccaaatttttttttccncnnngtttt

SEQ ID NO: 82995 - DNA, 463 bp, Arabidopsis thaliana columbia
cggcaatggctttctcacaagctgctctctctgcgttgcctctttctgatcgaactttccgcaaaaagccatcttcttcttcttcatcttcaccgaatttcgttctgagagtaagagctgctgcaaaagaagttcactttaaccgtgatggctctgtcaccaagaagcttcaggcaggtgcagatatggtggctaaactattaggcgtgacgttaggtccaaagggacgaaacgtggtgttgcaggacaagtacgggcctcctaggattgtcaatgacggtgaaactgttcttaaagagattgatttggaggacccgttagaggatgttttggagtgaaactttgtgatggcaagcggggtgctaagactaatgaccttgccggtgatggttccactacatctataattcttgctcatggccttattactgaaggtattaaggtgatttctgctggaacaaat

SEQ ID NO: 82996 - DNA, 2042 bp, Arabidopsis thaliana columbia
  unsure (1)..(2042): unsure at all n locations
nnnnnnnnnnnnnnnnnnnnnnnnnnnnnnnnnnnnnnnnnnnnnnnnntgtgccggaccggaatttccggttcgacccacgcccacgcgtccgaaagaaattaaatacacacaatgaccaaagaagtttgctccaacattggactttggttattgctcacgttacttattggtaactatgtcgtcaatcttgaagcctcgcaccatgtctacaagagacttacccaaagcactaacaccaaatctccttccgtaaaccagccctaccggaccggtttccatttccaaccccccaaaaattggatgaacgatcctaatgggcctatgatatacaaaggaatatatcatcttttctaccaatggaacccgaaaggagccgtgtggggtaacatcgtgtgggctcattccacgtcaacagacttaatcaattgggatccacatcctccagctatcttcccatctgcacccttcgatatcaacggatgctggtccggttcagctactattctccctaatggaaaaccggttatcctctataccggaatcgaccctaagaaccaacaggtccaaaacatagccgagcctaagaatctctccgatccttatctccgagaatggaaaaagtcgccgttaaatcctctcatggctcctgacgccgttaacggaatcaacgccagctcgttccgtgacccaaccaccgcgtggctaggccaagacaagaaatggagagtgatcatcggaagcaagattcaccgtcgtggactagccattacttacacgagtaaagactttctaaaatgggaaaaatctccagagccgttgcattacgacgacggaagtggaatgtgggaatgtcctgattttttcccggtcacgaggtttggttctaacggcgtggaaacgtcttcgtttggtgaacctaatgagattttgaagcacgtgttgaaaataagtttggacgacacgaaacatgattattacacgattggtacgtacgatcgggttaaagataaattcgtaccggacaatggtttcaagatggacggtacggctccgagatacgattacggaaagtattacgcgtctaaaacgttttttgactcggctaagaaccggagaatcttgtggggttggactaacgagtcatcgtcggttgaggatgatgttgagaaaggctggtccggtattcagacgattccaaggaaaatatggcttgatagatcagggaaacaattaattcagtggccggttagggaagttgaaagattacgtacaaaacaagtcaaaaacttacgcaacaaagttctaaagtcaggatctaggcttgaagtctatggtgtgacagctgcacaggcggatgtagaagtattgttcaaagtgagagacttggagaaagcggatgtgatagaaccaagttggactgatccgcagttgatttgtagcaagatgaatgtatcggttaagtctggtttaggtccattcggtttaatggttttggcatctaagaatttggaagagtacacatctgtttattttagaatcttcaaagcccgtcaaaacagcaataagtacgttgtgctcatgtgcagtgaccaaagcagatcttcgctgaaggaagataatgacaaaacgacatacggagcctttgtggatattaatcctcaccaaccactatccctcagagccttgattgatcattcagtagtggagagtttcggtggaaagggaagagcatgcattacctcaagagtgtatccaaaattggcaataggaaaaagttcacatctctttgcttttaattatggatatcaaagtgttgatgtcttaaacttaaatgcttggagcatgaactctgcccaaatcagttgatcacgtaaagatacacacatgtaaacacattacatctccattgatttagcatttatatgagttgattttggagagatcttatatggtccactttgtttggttgtcaataaaattgtccaatttgtttgtttgaaataattctaaaaggctaatatatatgacattttatttga

SEQ ID NO: 82997 - DNA, 541 bp, Arabidopsis thaliana columbia
  unsure (1)..(541): unsure at all n locations
ccgcgtccgaagaagtactcacttcgccaacaggattccaagttgcagatcttccactggacccaatgatatcaaaaatgattttggcttcaagtgagcttggttgttcacatgagatcattacaatcgctgcagttctctctgtccaatctgtttggatcattgcccggggagtacagaaagaacaagatgaagcaaaactgagatttgcagccgcagagggtgaccatgtcacattcctgaatgtatacaaagggtttcttgagtcggaaaagcctacacagtggtgttacaagaatttcctcaactaccaatccatgaaaaaagtagttgaatcagggtcaactcaacgggttnctcggggttagggntaccttggaatcatgtgacggggncatggnggctttnggaaaagcttttcctcaggtttttttcccatgatnncgtttgggccccgnaatggggtttcagcccttgggggntttnggggtttttncccgcnctttttttnggggggcnccaaggggggtnccnccttttt

SEQ ID NO: 82998 - DNA, 755 bp, Arabidopsis thaliana columbia
  unsure (1)..(755): unsure at all n locations
cccacgcgtccggagaagtttataatctggtttctgattttagttttctttccatttatgggttcatttgcttcttcttgcacgttatagttttcctaattgggtaagctccaaggtagcttcttcaatattaatttcatttttttcattttctgtagccatatgtttattttcccgagaaatattatccacacccagatctttaaatctcttttaactctgagtctctgatacttaaataccactcatgctgcttattagctccaccaaatctggaaaaccaatagattctttttatttcttctgcaaaaatctcagagctaccctaaaaattctctctttttgactcacttaccagatctccactagattttactcaattctttttcaaaaggtttaaacttttatagattccttgaagtgggtctaagcaatgcttcagagaaattccgatgatttcttctctaaccaaaataaaaatgaagtatcatttgatagtgatttttgtgttcttcttttgattctcttatctcttccttcccatcaataaacccaaaaaaattaatatcatttttgggatcttattgatcccaaaattcgctaaatccgttgacctttgtcggcatgatttgttcttacttaccgtaaaaaaaacagagctaggttttagttttcggacatggaggttatgagacccgtcgacggcacacggggtcaagggtggggacctgggtcatggaggaaaccnaagggcg

SEQ ID NO: 82999 - DNA, 610 bp, Arabidopsis thaliana columbia
  unsure (1)..(610): unsure at all n locations
cngnttcnccccctctgtggggcaatgcagtcaaagagctaacccgacagtactgcaacctactcggtgaatcatctgaaagcccgttgagtataacagtaacagcgggcacacaagcgttaccagtactattgaaatacatgaacgtggtgatggcgaataagaagcttgattggcagaccatggaacaacttcctgttgatgcgcaactatccgaggagtttcagtttcattcggtgtttgtctgtccagtctctaaagaacagtcaagtgatgataaccctccgatgatgatgtcttgtggacatgtgctttgcaagcagacgatcaacaaaatgtcaaagaatggctctaagtcgtcgttcaagtgtccttattgcccaaccgatgtagacatctcaaggtgtaggcagttgcacttttgaaacgaaagctcgggaatttgtacgaccgatataactggaactaggttctgaatcgggggaatctgtgtcaaaattgtaaccttgtggggtcctctgtttctttttttcatgaagttttttaagtgatggggctttggtgtacaaattgatcaggggaagtttttagatgattggacatcccataa

SEQ ID NO: 83000 - DNA, 460 bp, Arabidopsis thaliana columbia
  unsure (1)..(460): unsure at all n locations
catgtttctggatggtcatgacacttagtggacttctagggcttgccattagctttacttcaatgtggtttcttcatcaaactggagcaacaacatacagcctggtgggatctctaaacaagatacctctatccatcgcggggatcgttcttttcaatgtaccgaccagtttgcagaactcagcaagcatactctctggtcttgtcgctggagttgtatttgctagagccaaaatgagggagaagtcctaaaatactaaccatctacaacacattttactacatcaatcagtataggccatggcaaaaagctgattaaagcagagcaatgaggtttataaccctcagaattctatgcacgttaatgtgtttctggtaaaagctttcggcactctacttgtataatgnnagtaaatnttaatggatgnntcggttctgnngtgggaagggnagttttggtt

SEQ ID NO: 83001 - DNA, 500 bp, Arabidopsis thaliana columbia
ctctgccccactgcccactccagtcgcttctcctctcaactcgatggggtaggaaaactctgtccacgggctagttctgtgcatttgtgtgaccctgcactacacaagctgctgaactggtttcacagcgaccctactagtgtacccgtccatcttcatctcctccctcctcctcctcctcgttgatctcctcctcattcttcgttgtcctatccctcgtcttcctctcctctggcattgatccagctgcagctgttgattgattggctgttgtgttgatctgttgttcctccctcctcctcctcctccttctgtcgctatgtctaacggtgagctggagcagactcatttcggtggcttggcaaggtgttcgggggccaagtgcccaagctcgagtcgagtgaaggattcaaagctgcttcctggtccaagactcccctgtggactggtcgactgcgcgtggtgagtaagggggacaaggtgtcggtgctgctggagca

SEQ ID NO: 83002 - DNA, 494 bp, Arabidopsis thaliana columbia
tgatcttttaatgctcttttgtccttggagaagaatcatacatgcatataccgttacttctgatgatgattcagattacaagaatcttctaacatcttcttagaaaagcttctttcctgcaattagtggtttttatggttaaaatctgggaacttcaagaggcatgaatagatgtgcagaagttttcggttgatattgtcactcgctataggtttattgaggagctcctttaagctaagtagtccacatagggttatctacagggggataaagcctgaaaatgtgtgtggttttagggggaatttcagaaattttaacagtaaataggatttatgatggggtatcaaagtgggggtatttgcacctatgcatgaagttcacgatggtacatctggaatttcttcggagtgtgacggcagtctcagttttcgtttttggcttcagagactgactgataacaccagtatgattcatatgaagttagtcaaatttac

SEQ ID NO: 83003 - DNA, 402 bp, Arabidopsis thaliana columbia
  unsure (1)..(402): unsure at all n locations
ggaagaagaagtttcgtccggaagctggtcagagctgtagcctccggagattccgtggctccggcgatttcggaagaatcaaaagtgaaattgggtggctcggatttgaaagtgacgaagcttgggatcggagtctggtcatggggtgataacagctattggaatgatttccagtgggatgacaggaaattgaaggctgctaaaggtgctttcgataccagtcttgacaatggtattgattttttcgacaccgctgaagtttatggttccaagttttccctgggtgctataagctctgaaactcttttaggaagattcatccgtgagggaaaagaggggtattcccgnagcttagggtttcggttgnaaccaangtttcctgnatnnccatgggggttttng

SEQ ID NO: 83004 - DNA, 474 bp, Arabidopsis thaliana columbia
tcgtccaaacgcgctgatagctctagtaatgaagctgctgttgctgcaactagttattctgatgaacttgatttccagccttcatcagggaattccgaaaattggatggtgttatcggttaatggcgaaaaacccgctccacgctttaatcatgcagcggcgactattgggaacaaaatgatagtagttggtggagagtctggtagtggcttgttggatgatgtacaggtgcttaactttgattcatgtacatggtccaccgcatcttcaaaagtttacttatcgccgagtagtcttcctctcatgatccctgcttggaaaggccattgcttggtctcttggggtaaaaaagtgctgttggtgggtggaaaaacagatcctagcagtgatagagtttcagtgtgggcatttgatactgattcggaatgctggtcactaatggatgcaaaaggagacttaccggtcagtcgcagc

SEQ ID NO: 83005 - DNA, 482 bp, Arabidopsis thaliana columbia
tcgattcgtggatggaaaaagtgggagcaagagacattatctaatgactatgagttttctattgatcattcaagacttaggctcactcatgagacttcttttgtgagagaacatacaagtttctggacaacaactcctttcttcttttacgtcggatgcttctttaggcagttctttgtatctgttgaaagaaccgactacttgactctgcgccatggattcatctctgcccatttagctccaggaagaaagttcaacttccagagatatatcaaaagatctctcgaggatgatttcaagttggtagttggaataagtccagttctttgggcatcatttgtaatcttccttgctgctcaatgttaatggctggggaccattgttttgggcatcggtaccgcctctactcataatcccaggctgttggaaccaagcttcaagcaattttggcaacaatggcgtagaatcgtgggcacatacgg

SEQ ID NO: 83006 - DNA, 482 bp, Arabidopsis thaliana columbia
  unsure (1)..(482): unsure at all n locations
tcgattggacggaccagcaatggagagtgctgcggttggagctactttggggatgtggtcatgacgctggtcagctcatctttggtttattgtttctgcttctaaaagataggctccacattgaagttataagaacttggggtacaagagttgttggtttgactctccttgtgattggtgctatgggaatcaaagaagcttctgagatgccggaaccatgtgttgttacttggagaatggggaaacagatgagaaaagcttaaagaaggaaaagatagggtttgcgacatttgcgactgggattgttcatggcctgcaaccggatgctctgatgatggtatttcctgcattggcttttccttntcgggtaanccgtccttcggttcccaacaaagtctttnattggancggtntttccaatnggangccccaaaattttatttggncccttnangcgggtnaaaangaaaatnncccgggnc

SEQ ID NO: 83007 - DNA, 682 bp, Arabidopsis thaliana columbia
  unsure (1)..(682): unsure at all n locations
ggtacttgatatgatagaaaaaggaggagtgaaaggtttagctcatatcacaggcggaggtttcacagacaacattccccgagtcttcccggacggtttgggtgctgttattcacaccgatgcttgggaacttccaccgttgttcaagtggattcaacagactgggagaatagaagacagtgagatgagaaggacgtttaacctggggatagggatggttatggtggttagtccagaggcagcttcacggaatactagaagaagtcaagaatggaggctatgttgcgtatcgcgtaggagaggttgtcaacggtgaaggcgtaagctatcagtagagtgttgtgcgttcttttttcttctgtgtttttctaagttttcgtttcccaccgtttttaagaattaatccatttgtctacggttttatgaggttacaatcgagatgaggcattttttaagacgtcgtgttattatttgatctaattttttaaaaacaaccaatgtgattggtctggtttattctctttgtcgcacaaacagatgttgaaagatattctcgttctaattatataaaatttaaacatgttgtttgcctaaaaaaaaaaaaaaaaaaaagnnnnnnnnnnnnnnnnnnnnnnnnnnnnnnnnnnnnnnnnnnnnnnnnnnnnnnnnnnnnnnnnggtaa

SEQ ID NO: 83008 - DNA, 542 bp, Arabidopsis thaliana columbia
  unsure (1)..(542): unsure at all n locations
cccatgttaaccgcagccggagacgatgaactggacccggtcgtgggaccagaatcggcaacggaagcagccactccaagagtgctgactataatctcccatgtgatggagaagctcgtggcacgaaacgagtggttagctaagcaaactaagggatttgggaagagcttggaggcgtttcacggcgtgagagcgccgagcataagtatagctaaataccttgagaggatatataagtacacaaaatgtagcccggcatgtttcgttgttgggtatgtgtacatagaccggttggctcataagcatcctggttctttggttgtctccttgaatgttcatagactcctcgtcacttgtgtcatgattgctgccaagatactagatgacgtgtaagtaaagcctttcctgaattcctataaaacctggaatttggcctactcatgaacctttgggcccnaggtggatcctaattggttacccaaatgaaggtccatttttttccccccattttaatggggcaacttgtcccatatggtgtagnc

SEQ ID NO: 83009 - DNA, 764 bp, Arabidopsis thaliana columbia
  unsure (1)..(764): unsure at all n locations
cccatgttaaccgcagccggagacgatgaactggacccggtcgtgggaccagaatcggcaacggaagcagccactccaagagtgctgactataatctcccatgtgatggagaagctcgtggcacgaaacgagtggttagctaagcaaactaagggatttgggaagagcttggaggcgtttcacggcgtgagagcgccgagcataagtatagctaaataccttgagaggatatataagtacacaaaatgtagcccggcatgtttcgttgttgggtatgtgtacatagaccggttggctcataagcatcctggttctttggttgtctccttgaatgttcatagactcctcgtcacttgtgtcatgattgctgccaagatactagatgacgtgcactacaacaacgagttctatgctcgggttggaggcgtaagcaatgcagacttgaacaaaatggagttggagcttctctttcttcttgactttagagttactgtgagttttagagttttcgagagctattgctttcacctcgaaaaagagatgcaactaaacgacgtcgtttcttccctcaaagatattcaaccaatgcaagaaagtctctctccagcatctactttatcatctttatatgtttgatatatgtatatgaatttttttaatataacttttaaaaaaaaaaaaaaaaaaaaaaagnnnnnnnnnnnnnnnnnnnnnnnnnnnnnnnnnnnnnnnnnnnnnnnnnnnnnnnnnnnnnnnnnnnaacg

SEQ ID NO: 83010 - DNA, 663 bp, Arabidopsis thaliana columbia
  unsure (1)..(663): unsure at all n locations
ggnnnnnnnnnnnnnnnnnnnnnnnnnnnnnnnnnnnnnnnnnnnnnnnnnnnnnnnnnnnnnnnnnnnnnnnnnngcccacgcgtccgaaaagacgaagaagcagacgcagagaagatccgaattacccgaaaccgaaccggagcggttacaatttcttctttgctgagaaacattgcaagctcaaatcactttatcccaacaaggagagagagtttacgaaacttatcggagaatcgtggagcaatctctctaccgaagaacgaatggtttatcaagacattggattgaaggataaggaaaggtatcagagggagttgaatgagtacagagaaacgttgagacttagggatggtgacatgacaaacggcaaggctttttaggtgatttagttaaaacggcaagtcgttttgttgtaggtcgtttctctcttttaagattggacgcctcgccgtttcttttattttctagcttattgtagttgtccatgcttgcttaactaggctcagtgagaggctagacttgccaaacttgaagagtctttatttatttaagaattttagatgttctaatgtattaatcctttttcgaaaaaaaaaaaaaaaaaaagggcggccgctctagaggatccaagcttacgtacgcgtgcatgcgaagtcatag

SEQ ID NO: 83011 - DNA, 1054 bp, Arabidopsis thaliana columbia
  unsure (1)..(1054): unsure at all n locations
ggaggacaatggcagatggtgacgcgatttctatctttgtatcgagtcatgtatggattgatcataactccttgtctcattgcgctgatgggcttgtggacgcagtcatgggctcgaccgcgatcaccatctctaacaaccacttaactcaccacaacgaggttatgttgctaggacatagtgactcgtacatgagggacaaagctatgcaagtgaccattgcttacaatcattttggagtcggacttattcaaagaatgccgaggtgtcgacacgggtacttccatgttgttaacaacgactacactcactgggaaatgtacgcaataggtggtagcgcaaacccgacaatcaacagtcaaggaaaccgctatgccgccccaaaaaacccctttgctaaagaggtgacgaagagagtggacacaccggctagtcattggaaaggatggaattggagatcggaaggagatttgcttcagaacggtgcttacttcacttcttcaggagccgccgcgtctggcagctacgcacgtgcctccagcctttccgcgaaatcttcgtcattggtcggacacattacttccgacgctggagctctaccttgtcgcagaggacgtcaatgttcctcatagttactaccccaccaccaaaattcaaaaccatcttccattatattcagacaaaagtgtaaatttacacacatttgtcatttaaaaagccaattatcttttttttttgtcttttcggtgtgtgtgtttgtgtcgatttttctcaacctcgggtttgcttgcttcaaccgcaagttaacacaagaaaagggaaaagaaccaacctttcatgaaaaaagaaaaatcccccgaaggtgttgttgggttgtttggttctaatctgatcaactcagattgttcttcggctgtccccggcttctatccggagaaacaagggttttaccccctggttttcttttcctccttggaatttttgggggttatcaaattaatataggggctaaaaaaaatttggggaactttttacctttcnatnggtttaaaaa

SEQ ID NO: 83012 - DNA, 514 bp, Arabidopsis thaliana columbia
tattccaggaccgaaattgttcttccataagctcgttcaaccattctggggtaaaattgagacagagaagtatccacaagtggtaattgctgatctcgatgatgagctcatggggttaaagctattgcattatgatgctaagattctctgcattggtcagggatcggattctgctgtttcagggttcaaagagatgggtttctcagttgttcaaggggttcctaagcatccattgttttcctttttcagtaggaagcatgtcaacgagcttgagcttagtggtgacaagtcttttgatttcgtgctctgtggggatgttgatcatgttgcttccccctgctcttcttgtgcttgagatggagccggggtctgaagccctgggtgggaaccggacgcagtccttgtgagtactaaatgcccaaccggtcttgtcaaaacccgggacttcggggcttaacgagtctgagatagtgcgtgtgaacaacttggataagttcaccgtcattgtattcaa

SEQ ID NO: 83013 - DNA, 465 bp, Arabidopsis thaliana columbia
  unsure (1)..(465): unsure at all n locations
gaatgaatatgccttctatgatgcttcctatggccatgcagcaacaacaacaactacaaatgtctctcatgtccaatcccatgggtttagggatgggcatggggatgcccggtctcggtctcctcgaccttaattctatgaaccgagctgctgcaagcgctcctaatatccatgccaacatgatgccaaacccatttttgcccatgaattgtccatcgtgggatgcttcttccaatgactctcgatttcagtctcctctcatccccgatcctatgtctgcctttcttgcatgctctactcagccaacgacgatggaagcgtatagcagggatgggctacattattatcagcaaattgcaacancaacttcntncttctttcgaatccaaaatgntttantactnaaacacctctnttatagtttacgncnntattatgngttngtcacattacatncanntatat

SEQ ID NO: 83014 - DNA, 583 bp, Arabidopsis thaliana columbia
gtttttcgtctggtcccatagtgaatcgtggctcagatggcttcctagggtttgtggaaatcggagaggggaatacagatttgagatgcaaagtagctccagctccggtggtgacgaccttgaaaagcagcagcagcagcagcagaaggacaagtctccccagaagcagagcgagtcagccaatgaatcgaaccacctcacaatcgttgtctgcaatggagattctagtcgggaagaattggtgggtcagatcccaccggaaaaggaggttagcttatccagaaacggaagctcgcacgagcagtgcaggcgtttgtctacaagacaaagaagaggcttttgattgaactcaggttgtcaatgtcgtgcggtggtcttgctaaagctcacaggtcttgtatagatgcttggtttcgtactaaaggctctaaccagtgtgagatctgtcaagttgttgctgttaatgtcacacctcctgagactcaaccaactacaaactattgggtttggaggattgatcctagctatagacaagaagagcgtgagagaggatgctttagtccgctttgggttgcattttcga

SEQ ID NO: 83015 - DNA, 913 bp, Arabidopsis thaliana columbia
  unsure (1)..(913): unsure at all n locations
tctctcttctctctttcatatcttttagatgagaggggcctctgtttttcttttgtaatctccttctaaaatcggagctttttggtttgtgctttaggcttccggtattgttgccggtttctctttccgacttgttcggatttacttccgactttgttcggttttagttgttttctttctcttttggttgtcttttgcaggttcaaattaacacttccaattttgggaagctgaaaattccggaagtcatcaaatggatccttgttcattgagtgcttgattcttctcccaagtgaaggtaattccttgctccgccgaaagggcttgttgagagcgttggttctccttggtggattgatcaagttgatgcggttgatttgggacgggatcatgaagaattggagtcttcggcttgttttgatgattctctgatgaatatttcgagctaatcggctgaagttaaaaattttcgtgatcaagtttaggtccagccaatctcttccggtggtctatggcataaggcgagttggtacaatcgaaggcacatatagaggtttctcggagggttgagtcgatctaccggctgatgaagaaaatttccggtgatgatgagtcggtgacggcgtagctgacgaaaccttctcttctctcaacatctcacgttgcataacacgtgtcattttgttttccttatcttgttgtgtttgcaattagtgggccaactttggtcttcttctgtaccgaatatttgcccacttgggctttataaaacatattgggcatccaaaaaaaaaaaaaaaaaaaaaaaaaaaaaagnnnnnnnnnnnnnnnnnnnnnnnnnnnnnnnnnnnnnnnnnnnnnnnnnnnnnnnnnnnnnnnnnnnnnnnnnnnngaaccccaaccggggcggggc

SEQ ID NO: 83016 - DNA, 724 bp, Arabidopsis thaliana columbia
tctttcacaagtaacagtactggccatcttacctttggttccgctggaatctctgaatccgttaaattcacaccgatttcttccttcccaagcgcattcaattatggcatcgatatcataggtatcagtgtaggcgacaaggaattagcgattactccaaactcattctcgaccgaaggtgctataatcgactcaggcacagtgtttactcgcctccctaccaaagtctacgcggaactccgcagtgtttttaaggaaaagatgtcgagttacaagagtacgtcgggatacgggctttttgacacatgttacgatttccctggcttggatacggtgacatacccgacggttgcattcttccttcgccgggtagcactgtcgtaggacttgatgggtcaagggatttcggttcccgatcaaagataatcacaaggtttgttttgggcgtttccagggaaatgatgcccttccccccatcttttggaaccgttcaccagacgccgctagattgttgtgtaccgccggtggctggtggccgagccggttttgctcccaatgggtgttaattagctccttgaccaaaaaaaaaaggagagggttttgtaatttgagtaagggtttggctcgtaaatttagctcctttttttaaaaaaaaaaaaaaaaaaaaaaaaaaaaaaagggcggccgctctagaggatccgagcttacgcacgcgtgcatgcgc

SEQ ID NO: 83017 - DNA, 566 bp, Arabidopsis thaliana columbia
  unsure (1)..(566): unsure at all n locations
cccacgcgtccgaaacaatggcgtattctcttcctacatttccccaagccttaccttgctcgtcaaccaaaacttcttcctccttggctaccttccgatctcctttcttaagattcaatggttccacttccttaatcccctcctctatctccatcacttcacgtggcacatcctccccgaccatcatcccacgtgctgccgcctcagaatccgactctaacgaagccctagccaacacaaccttccacggcctctgctatgtcttgaaagacaacatagacaccgaccagatcatcccagcaggagccgcttgcaccttcccatcgaaccagcaagagcgtgatgagatcgcgggtcacggtctctctggtctaccagactttcacaaaaaaagggttcatttgggccagggggggacaggtcaaaagtactnaattaataatcggngggggaaaantttggttggggtnggtaaggtgaaatgttcgggttttttttggggaanttgggntaaaggcatagtttnttngttttcggaagattttttttcggaattggttttaagg

SEQ ID NO: 83018 - DNA, 650 bp, Arabidopsis thaliana columbia
  unsure (1)..(650): unsure at all n locations
gttggaattgatattgctgaagggtcgattgaagattgtcgcacgcgttataacggtgatgcagaccatcatcaacggcgtaaaaagttcagttttccgtctcgattattatgtggggattgttttgaggtagagctagacaagattcttgaagaggatgccccttttgatatctgcagttgccagtttgctatgcattactcatggactactgaggcacgtgcacgacgagctttggcaaatgtttcagctttacttcgtccaggaggtgtctttatcggaacaatgccagatgccaatgttattataaaaaaactcagagaagctgaaggtttggagattggtaatagtgtttactggattcgttttggtgaagagtattcccaaaagaagttcaaatctagcagccccatttggtatccgaatacggggttcatctcgaggatgcctgttgattgtcctgaaatgggtttgtgcccttttaacggcttcaaagtctttagcgggggagtattgattttanaggttnggaattttttgaagaccnccncggggtttnnccncngggtttttnaaaagccncnaggttttngaccccattaggaggctttggnccttttggggatngncnaataccaagcccatttaac

SEQ ID NO: 83019 - DNA, 825 bp, Arabidopsis thaliana columbia
  unsure (1)..(825): unsure at all n locations
agcttggtcacattgttacaaattatcatgtttttgctaagttagctactgatcagtttggattacaacgtttttggttgtttgtgtaggtgtctctagttgatgctaagggaacaagatttagcaaggaagggaaaattgtgggtcttgatccagataatgatctagctgtgttgaagattgaaactgagggacgtgaactaaatcctgttgttctcggtacctccaatgatctacgcgtaggtcaaagttgctttgcgattgggaatccatatggatatgaaaacaccttgacaatagggggtagtaagtgggttgggaagagagataccttcacctaatgggaagagtatttcagaagctatacaaaccgatgctgatattaactcaggcaattctggagggccattgcttgattcttatggccataccataggtgtgaacactgccacattcacccgaaaagggagtggtatgtcttctggtgttaactttgccattcccattgacacagttgtccgaacagttccgtacctcattgtgtatggaacagcttatagagacagattctgaagtaaaccaaacatcttctttgcattttgtctatcactttgtctattgtttgttgataatacaattcgaaaagtttcagacttgtctctctaaatgtaaatacaaaaagttcaaaaacagtttccaatgtnnnnnnnnnnnnnnnnnnnnnnnnnnnnnnnnnnnnnnnnnnnnnnnnnnnnnnnnnnnnnnnnnnnnnnnnnnnnnnnnnnnnnnnnnnnnnnnnnnnnnnnnnnnnnnnnnnnnnnnnnn

SEQ ID NO: 83020 - DNA, 424 bp, Arabidopsis thaliana columbia
  unsure (1)..(424): unsure at all n locations
acggaaaaagagcatcatagcaccagtggtcgcatcaattgcttcaatagctattcttataggtgcattggttctgttttttgttcttaaaaagaaaacgcaatcaaaagggccaccagcagcatatgtacaagcgtcgaatggtagatcccgtagatctgcagaaccagcaatagtgacgaagaataaacggtttacttactctgaagttatgcaaatgacaaataacttccaaagagtgcttgggaaaggagggtttggaattggtttatcatggttttggtgaatggtactgaaccaaagtngcttatttaaggtacctctccccattcttccatctcaagggttataaaccaattccaaagcttgtgggtaggaccttcttcctntgnggttcattcccaaagaatttgggtaggccctt

SEQ ID NO: 83021 - DNA, 397 bp, Arabidopsis thaliana columbia
agaaaagaaaaaagaaatcaatcataatgttttcgaattttttggaaagcttatacgatggaatcggagacgatgacgccgccgacgacgactaagacaacaacaacgacgagaaaaccccgaaagcctcaacggaaagacacgatttctcgagaaacgccgttcgtttgtcaccggaagaggaggctcaagcgcgtggggttaaagatgatttgacgggacttggtcataccctcacgcgtcaatttcgtggtgtggctaacttttcttcgctccgttacctgattggatccttcttccttcttccctccgatcctttccgaacccatcccacggtttaacccaatctccggcttcagatcctggattgaataattcgcgttcttcagatcgggac

SEQ ID NO: 83022 - DNA, 547 bp, Arabidopsis thaliana columbia
cgagctttcagacgtcaaacatggctaaagctcaaatatgtctttgtttcatcattttcttatacctctggccagaaggaaatttcatcaaagtcaccaaggcagatcgctcggccggagattggtgcgttgctaaaccttctacggataacgaaaggcttcaagaaaacataaacttcgcgtgttcgaaaatcgattgtcagattatctcggaaggaggtgcatgttatttaccagatagtatcattagtcgtgcttctgttgccatgaatctttattaccaagctcaaggaggacatttttggaactgcaattttgaaggctctggtctcatcggcataactgatcctagctatggaagttgcatttatcaatttcgtaagtaaaacatatcaaggttcgatcttgttgcaagaagttagaggactgtatctgaaatttcctatttaaaatctaatgttgggatgttttaattggatttctcaacagttaaatgtttgagcctagatatgtgtatgccattgttaaagcaatataatttaattta

SEQ ID NO: 83023 - DNA, 404 bp, Arabidopsis thaliana columbia
gggatcttgtatgtagccttagctctagtgatcattggatcagctgggacgcgattcaccttggcagccgcgggtgcgaaccaatataagaagcctaaagaacaaggaagattcttcaactggttcttccttgcactgtatattggagctattactggcacgacagcgattgtatatacacaagacaatgctagctggaaacttgggttcggtctatgcgccgttgctaacttgatcagtttcattgttttcatcgccggggttagattctacaagcatgacaaacccttgggaagtcccctatacaagccttatcccgcggtttaagttgccttgctaccaatcgaaaagcaaaggtagtgatttcatcaaaagacgaagactatcatcaatttggtctcggg

SEQ ID NO: 83024 - DNA, 692 bp, Arabidopsis thaliana columbia
ctccattggtgagctccacctcttctccgatgaggcttttccggcgaatccggccattgatcatctgcaaatctcaggtttcttccgacgatctccatcttccactgtcacttctagcacttttattccccaatttctattgcctttaggctgtagctgctccatctcaatttctgggttttgcacgagaacccttaatccctccttttttttttgtttctcgctgaaactttcatgagctactccacctggaacctatcactttctaacacggctccaaaatattccgaggtagcttcttcccagtacttttttcaaatctatcctgcaagatcaagtcacaaacactaggactgtttctccaatgaacaacgaagcctttcatctgttaagatgaactccgcagctcctaactcggatttcttgaatcttcatcacataaactccacatggaatcagaatctgcagctcaggtcaactgattctccacatctccacctggaatataagtctcctcaccgtatttccaggcgcctacagtggagttacctggacgatgttgaggagatcataacaggcatgaaagtcctttccagctcttgtatctggaatcgatctcttctttgagatttttagaattggtaaaagaacaagaaagctttagatgtgctgcgtagagctgtaactaaaga

SEQ ID NO: 83025 - DNA, 862 bp, Arabidopsis thaliana columbia
cccacgcgtccgtagaaaaggaagaagacacgtcaacaatggaggttctgaagaagaagactctctcccagcagatttagagcgtgtgagggagataggaagagagaaagtgagcgagagacgatcacggccgcgctgaaatccacgaccacggccgcgctgaaatccacgaccacggccgctctgaagaagaagactctctccgtctcctcccttctcctcctccgtctaagagacaaggcatccccagacgccatgatctctctcactccctcgttgtttctgaacaagacggttgttcctggatgttccacacgcctctctctgcgccagcctagaactataattactcctcctgcttccttgagagtcttttcctctctcggatctaaccaggatcccaccggcagcgttttgattgagaccactgccacttcatcctcctctctcgagacctccgccgccgacattgttcccaaatccaccgtatctggtggagttcaggatgtctacggcgaggatgccgccaccgaggacatgcctatcactccttggtctctctctgtcgccagtgggtatacgttgttgcgtgatccacatcacaacaaaggccttgcctttagccacagagagcgtgacgctcactatctacgcggcctcctcccccccactgttatctcacaagatcttcaggttaaaaaaattatgcacactcttcgtcagtatcaagttcccttgcagaagtatatggctatgatggatctccaggagaccaacgagaggctgttttacaaacttctcattgatcacgtcgaggagttgctacccgttatctacactccaacggttggggaagcctgcc

SEQ ID NO: 83026 - DNA, 389 bp, Arabidopsis thaliana columbia
  unsure (1)..(389): unsure at all n locations
gtacaatgtgtttgagattcataggaaagaagtcaattcaagtcttttggaagtgaaagctatgaacaaagatactgaagctgatagtgatagtgataggaagattaaagaagaggaaaggagaaggaagattggattagctaataaaggaaaggtgccatggaacaaaggaaggaaacacagtgaagacactcgaagacgaatcaagcagagaacaatcgaagctttgacaaatcccaaggttcggaagaagatgtccgatcatcaacaaccacacagtaatgaaacccaaggagaagataagagcttcagtgaaccaagtttgggcagaaccggtcaagattcggaagcgattaaaggggagntcatgtcatccgtggncnagaaac

SEQ ID NO: 83027 - DNA, 455 bp, Arabidopsis thaliana columbia
  unsure (1)..(455): unsure at all n locations
ctcgatgatgatatttacctcggtgctgagaacaatttcaatctgttaacagtgaaaaagaacagtgaaggtgctactgatgaagatcgaggacggttagaggtagttggagagtatcaccttggggaatttgtgatcagattccgccatggatctctagtaatgaggctacctgattcagagattggtcagatcccaactgtcatctttggtacagtcaatggagtgattggagtaatagcttcacttcctcaagnacaatatacttttcttggaggaagttncagtcaagttttaggaaaaagtgattaaaaggagtccggcggnttaagccacgggcaaatnggagggccgtttaattaccggggaaaaaggaacccncggggaagngnngggaattttccttngnatgggtgnccttnaatccggaattngttttcttggatcctntnggt

SEQ ID NO: 83028 - DNA, 434 bp, Arabidopsis thaliana columbia
caagggactcctgctggaattcgagttactgctccccctaattctcttaggcctataaccgcaccgccccttgttgaggaaagagttgagactggcatcaaagtaccaccgcttacctcttattcagatgttttcagtgatttgaagaagccggatcatgtattggtttgtgcgcattgtggagaacgttgcgattctcctttctatcaaccataacaagggtataggcaacatatgcggaaagtgtttcaagaatggaaaccatcggggggaacaacactgcaggtggattttaaagttgattgggggttcacccccagctgtgtggacagaggaagagatcctcctcttgctagaatctgtgctgaaacatggagatgattgggaactcatttcacaaagtgtttctaccaagagtagactagattgcattt

SEQ ID NO: 83029 - DNA, 520 bp, Arabidopsis thaliana columbia
tgtaaccgggactcggctatgggaagaaggcgctctgaaaacagtaacaatgaggaaaaaggaagggcttgctgattaccgctactttccagaaccagatcttccagaagttatccttacccaagaatatgttgatagcattcgtgcttctttaccggaactccctgaagcaaagcgcaggagatatgaggcgatgggtctaggcatgcaagatgtgcttttcctcgcgaatgacgtcagtgttgcagaatatttcgatgcagtcattggtaagggtgctgaagtgaagttggcagcaaattggataatgagtgatattgctgcttacttgaaaaatgagaaactttctatcaatgatattaaactcactccccaagagttggctgaacctgatagctgcaatcaaagatggggccattagcgggaagactcggcaaagaagatactgtttgagctattagccaaaggtggaaccgtcaaaggaatgataaaggcaaaagatttagttcagataactgat

SEQ ID NO: 83030 - DNA, 839 bp, Arabidopsis thaliana columbia
  unsure (1)..(839): unsure at all n locations
cttcttcttcttcttcttgtctccgatgtctgccttggatgttatgattcactcttcaagctttctcctcccttgcgacgaaactagtacagggacgagatacgctctcgttgttctgaaccagagtttgccacgattcactcctcttctctgggaacatgcaaaacttcgtctctgtgctgatggaggcgctaatcgcatctacgacgaattgcctctcttcttccctaatgaagacgctttggccattcgaaacaggtataagccggatgttatcaaaggagatatggattctatacgtcgtgacgtcctcgacttttatataaacttggggactaaggttatagatgaatctcatgatcaaggcaccacagatcttgataaatgcatttttgtatatccgtcactctactttgaatcaagagacttccggactccagattcttgccactggagcacttggaggaagatttgatcatgaagccggtaatctcaacgtcttatatcgatatccagatacaaggatagtccttttatctgacgattgcctcatccaactccttccaaagactcatcgacatgaaatacatattcagtcttctctagaagggcctcactgtggactcatacccattggaactccatctgctaaaaaccacaacctccaggggttccaatgggatcttccagcnaacactgaaaatganatttgggtgggttgaataaattacatcccaacttggggttaaaagaaanaaaaaaatcncagtccnaatccggattccngatttttctctgggantatttccctccaagaaaaacaggactttccctttcaa

SEQ ID NO: 83031 - DNA, 477 bp, Arabidopsis thaliana columbia
  unsure (1)..(477): unsure at all n locations
ccagaatcgaaaccaatttgtctactacaatgttctttacaattgcagaaaaggtttcaactttcccaagacaatcacacgatggtgtgtatcgtgccattgacatgttcttgaagcaacatccaggaataacaaagagtgagaagaaatcatcaagcaaattaatggattgccggaaattatcgccggaggcttgtgctcacgccgtgcaaaacgagaggttaccattacgagtcgttgtacaaatcctcttcttcgagcaagttcgtgccaccacgaaaccttctcttccaccgagcggctcgcacgggagctcaagaacgacaacagaagaagagtgtgagtcagtcacagccacggaggcagacgacaacttcgtcggggggcaagacgggtagttctgtgcaagacggaagcaaaaaggagttttaatntctcgggatttctnggaagntttgncangtaaangtnaaattg

SEQ ID NO: 83032 - DNA, 469 bp, Arabidopsis thaliana columbia
gagagagatatgcatcattttgtccctgtcttcgataccgatgatgattatgtcaacaaccataattcttctttgaatcatcttcctagaaaatccattactactatgggtgaagatgatgatcttatggagcttttatggcagaacggtcaagttgttgttcaaaaccagagacttcacaccaagaaaccttcttcttctccaccgaagcttcttccttctatggatcctcagcagcaaccttcttcagatcagaatctttttattcaagaagatgaaatgacttcttggcttcattatcctctccgtgacgatgattttctgcctcagatcttctcttctccgccgcacctactgcgacggctaccgcgacggtgagtcaagtcaccgccgcgagaccgccagtaccttcgacgaatgagtcgaggccgccggtgaggaacttcatgaatttctcgaggctgagagg

SEQ ID NO: 83033 - DNA, 437 bp, Arabidopsis thaliana columbia
ggaagataagaaaatggaggagaagaaatctgtagtgccacaagcgaaatcagaagataagaaaccagaagaagagaaaaagaaagaacctcaagagattgtgcttaagatttttatgcattgtgaaggttgtgctaaaaaaatccatagatgtcttaaaggctttgaaggagtggaggatgtaactactgattgtaagactagtaaagttgtggtgaaaggagagaaggcagatccattaaaagtgttgcaaagattgcagaggaagagccatcgtcaagtggagcttatctcaccgattccggagccttaaccggtttctgatgaacccggagaaaaaggaggaggagaaacctaaacctgtggaggaaaaaggaggaggtagtgccagtcggtgctgagagttcacatgcattgtgaagcatgtgccatggaga

SEQ ID NO: 83034 - DNA, 571 bp, Arabidopsis thaliana columbia
cactcttaaaaccctaaacctctccacgcatggtttcaacgtcacaagcaaagccaacgatgacgaagaacaaagcaagaggtatgagaaagagattttggagttcggcccctcttcgtccatgttcttgcccttgactacggttgccatcgttaacctccttgcttttgtctgggggctttatggtcttttcgcttggggagaaggactcgtccttgagctgatgctggcgagtttcgcggtggtgaactgcttgccgatctatgaggctatggtgttgaggatagacgatggaaaattaccaaaaagggtttgtttcgtagctggaatcctcacatttgtgctgattgtgtcaggttacgtcttcctcaagtaactggacccattatggttggttctgtcgtttcagttaaactaatattacatctgtattgtggtaattaggagagaataatgtgatgaatccatttctcacctcattttagaacatacatttcggtatattgcgtctgtattgtagtaattaggagagaataatgtgttgaatccatttctcacctcattttagaac

SEQ ID NO: 83035 - DNA, 589 bp, Arabidopsis thaliana columbia
  unsure (1)..(589): unsure at all n locations
ctcgtcatcctctccctctgattctcttatgtcgccttgaaaaattaagacaaaacaacaacaaaagaacaagagaagctctaaaatccagcagctatggcgtttcttctccccaatctctctccttctttccttcttccgaccggaaaatcactcaaagagaaacccatttccaaccaagctttatcatcatcatcatcatcgtccaatagctacgagtttgaagaagatagtctctctccactttctctctttagcgtccaggctcctcctcctgttcgaggtgcgcaggttaagaccaaaccaagtgcgcaggataagtacccagcacggcagcaaaggtgacttcttacatcaaatctcgggtttagcctgtacggtaccccttcggcggaggattttgcctctcctctttcaaccaaaggatctcaatttccggcatttacagggggtggtataacattaggtgggtcccaatggananggtttttttggggttnncaacttcaaaatttgtntttttggggactttngggtttatggnaagntttntttaggggttttnnnntgangnttttaggggtttggg

SEQ ID NO: 83036 - DNA, 512 bp, Arabidopsis thaliana columbia
cagagatagcagaatttggaatgaaatggttttctcttactaaatccatttgctggaaggtcgtgacaaagacggttgattcctctggaatcggacttgtgatctatcaaaagccaacatcagaatcctgttataataaacgcagcacacaagatccaccactttgtgataaaaaggaagcaaatggttcatggtatgttcctctcgctaaatgcctttccaagttacctagtggaaatgtccagagttggcctgaactatggcctaaacggcttgcgagtgttaaaccgcaaagcatttcagttaaagcggggaacattgaagaaagatacaggggaatggtcagcaagtggtttctgatggtttacctcaaaacatctacgctgtaaactggtcgactgtgccggaatgttgacggacatgaatgcctggcttttggcggctttgcctgctgcacttttcaaatctaccactctgggtgatgaatgttgtccctgtggataaacctgaca

SEQ ID NO: 83037 - DNA, 864 bp, Arabidopsis thaliana columbia
ggattacataatatactggaaaattatagatcgatggtgggagcaacaacagcatattcctttgcttgctgctggtttctttcttaatccaaaactcttttataataccaacgaagaaatgcgtagtgagcttattctatcggtgctcgattgcattgagagattggttcctgacgacaagattcaagataaaatcatcaaggagttaacctcctacaaaactgctggtggagtttttggaagaaacttggcaataagagctcgggatacaatgcttcctgctgagtggtggtctacgtatggagaaagctgcttgaacctctcacgttttgcgatacgcattcttagtcagacgtgcagttcatcagttagctgcaggagaaaccagatacctgtcgaacacatataccaatcaaagaactccattgagcaaaaacgactcagcgatcttgtatttgttcagtacaacatgcgcctcagacaactgggtcctggaagcggagatgacacactagacccgttgtcacacaacaggatagatgttctgaaagaatgggtttctggagaccaagcttgtgtagaaggaaatggaagcgcggactggaagtcgcttgagtctattcataggaaccaagtagcaccaatcattgatgatactgaagatttgggttcaggtttcggtggatatttgaggtattcaaaggtaggaaaaagaagtgagagcatgaagggttattattcaaacacatcgggggaggttttccacggaagattgatcatggttggtttaagcttcctcggcggtgctttctgacttacatgaagctgttgtagccataggggtcgatttgtaacattagagtc

SEQ ID NO: 83038 - DNA, 543 bp, Arabidopsis thaliana columbia
aacttgaaggatgtaattgctaagaaagttgatgtgctacaaaattttcagaaggtaaaaggtaataatgcaacatccctgaaacgtggattaagcaatttaaggttggtggggcctacatcacctagaagacattctattggagcgtcaccaaacgctcgacgaggaaaggcctctggtttatttggaagaggaacctcagatgttgacaactgctctgaatatagcagcaagcattcggattctggttcacaacaatcatcagacgggcgtaaacatcaaaaagattatcaccaaccatcttaaatttgctcggtgcggcggaaaggaatcgattttgaatgatgaagatgtttgaacctccgtagggcctttccagaatgcaagattcctgtaggccagattgtggtgatatcccctgatagtgtgtctttcaatggggacagaaactgatggatccataagcagtgcagtagagttgactctattccctgaaactgctaagcctcttgaactaatagaacgacctgaagcacgcatgac

SEQ ID NO: 83039 - DNA, 798 bp, Arabidopsis thaliana columbia
tccgatggttactgagactggatggccaaccataggttcaccgatgtgtatgctgctgcgtcttctgacaacgcggagtcatacaattcaaacataatccggcatgtagttaccaaccaaggcacacctgcaaagccaggagaggcaatgaacgtttatatattctcattgttcaacgagaatcggaaagcgggtttggattcagagagaaactggggattgttctaccctgaccagacaagtgtttatcagttggatttcacgggaaagagcaacgggtttcactctaattcgagtggtacaaactcaagtgggagtagtaatagctggtgcattgcttcttctaaagcttcagagaggagatctgaaaggtgctttggattgggcttgtggtcctggaaatgttgattgcacagctattcagccaagccagccttgttttcaaccagatactttggtttctcatgcttctttcgtgttcaatagctatttccaacagaacagagcaacagacgttgcttgcagctttggaggagctggtgttaaagtcaacaaggaccctagttatgacaaatgcatatacattactgcaggagggaacaaaaccaaggcgacgaatgcaactgcattgacctcctctgcttcaactccacgtggaaacgaactactccaatggattttgaaactctgtctcatgatctcgttgttcttcagtttgcaaactatgaattcacaggcactgtaaccgaaatctgaaagaaatgtagcaatagcaagaaaaagcaaaatttgttcctg

SEQ ID NO: 83040 - DNA, 804 bp, Arabidopsis thaliana columbia
cgcttgaacaccaggtcgtcaagggtgtagtggaaagtcttaacatcatctcccgtaaggcgagtatgagagttgccgagtatgcctttctttatgccaagactcacggaaggaagaaagtttctgcaattcacaaagccaacattatgcagaaaactgatggtcttttcctgcagtgttgtgatgaagttgctgcgaagtatcctgagatatattacgagaaggttgttattgacaattgctgtatgatgcttgtgaaaaacccagcactttttgatgtcttggtgatgccaaatctctatggagatattatcagcgatttgtgtgctggacttgctgggggactaggactgactcctagtatgaatattggggaggatggtattgcccttgctgaagctgttcccggctctgcacctgatattgctggaatgaacctggcgaacccaacagctttgctactgagtggagtgatgatgttgcggcacctgaagctcagcaaacaagcagagcaaatccacagtgccatcatcaacacaatagccgagggaaagtatagaactgctgatctcggaggttcctcaactacaacagatttcacaaaagccatctgtgatcatctctagacacccgtgaaaagccataattctttccttacttacttattggatcttcctcttggattttcactccaaaatttttctacatattgatcctcttcctatgaggagaaacaaagcccccataggctttagacattgacttgtgtttacataaaatttgaagttcttgcagagctgtatt

SEQ ID NO: 83041 - DNA, 466 bp, Arabidopsis thaliana columbia
ggcggtggtggtggtggaggtggagggttatctagagctgatgatgttgataattggggtgcagggaaaaggcaagcaccggttagatcatctacgtttgggtcgagttttggtgattcaggtcaggaagaacgtcgtcgtttggttttggaaccaagaaaggttgagtcaggaggaagtgagactccacctgttgttgagaagacgagtaagccgaatccatttggggcagctagaccgagggaggatgttttggcggagaaaggtttggattggaagaagattgactcagagattgaggctaagaaaggaagttctcaaacgagtaggccaacgagtgcacattctagtagaccttctagtgctcaatctaacaggtctgagagttcaggattgaataatgtggtgaaaccgagaccaaaggtgaatccttttggcgatgcaaagcctcgagaagtgttgttag

SEQ ID NO: 83042 - DNA, 517 bp, Arabidopsis thaliana columbia
cgttggttatacacctacattgcgttatctaatcacgatcctctttctcggagttgaggtatacataatggctattgcagggcttgggtttgtcgtctctgtattggaagaaagatacggttttgatgcgattaaggaaggaaccgctctgatgaaagggaggaggataacagggttggccttggcgggtgtatttgtgtttctatcgagtctcattggtcatgggatggagaagttggcgaaggagctagatatggacttgagctcagggtcgtggtgaaggtcggtggttgtgaccggtgggtgggacgggtggaagctggtttgtatgtatggggctgaggttgtgctgagttatgttgtaatcactgttttttactgtgagtgtaggaaacgccatggtaacagttatgcaattgttgctgatgaggaaggtcttgctatttaaaattagttccaacacttttttgttgttgataattcaaatgaaaatctgtgaaatacatttttgtttacc

SEQ ID NO: 83043 - DNA, 530 bp, Arabidopsis thaliana columbia
  unsure (1)..(530): unsure at all n locations
aatatataaagagaggngaaattaagcgtaagattggtggcgggggaaaataaaagcatggaagaaggacttcttcggcatgaaaacgacagagatgatcgtcgtatcacagcttgtgttatcctcagcacttttgttgctgtttgtagttccttcagctatggatgtgctaatggttatacttccggcgctgaaactgcaatcatgaaagagttagacctttctatggcacaattttcagcgtttggttccttttttgaaactttgggaggcgcggcgggagctttgtttagcggtcaattagcagtcatcccttggcagaagacgaaccgttgttgggcaatgcgactttgttcctgcaatttcttggttggctctccattgcttttgcaaagaatgtcttgtggctggacttgggaagaatttctttaggcatcggagtgggcttgactagctacgtggtccctgtctatattgcggaaatcactcctaacatgttcgtggcgcattttctgctttaaccctgcttc

SEQ ID NO: 83044 - DNA, 363 bp, Arabidopsis thaliana columbia
  unsure (1)..(363): unsure at all n locations
ccaacttgatccaaaaacgaantgccgaagaaaagcaatgcagcagttttaaaggattggtcaaagaaatcgaaaactaaggcggtgagagttcactatacggcggagttcacggtggatgcagcgtttggctcgccgggagcaatcaccgtcatgaataaacaccaaaaagagtttttcttggagagcataaccattgaaggcttcgcacttgggcctgttcactttccatgcaattcttgggttcagtctcaaaaaagatcaccccggtaaacgcaattttctttcactaatcagccgtatttgccgaatgagacaccaagcggattaagagtattgagggagaaagagttgaagaatcta

SEQ ID NO: 83045 - DNA, 264 bp, Arabidopsis thaliana columbia
ccgggttttaaggaagctgcaatgaatctggcacgcatgtcgcaatgcatgtatcaatatggtgatggtcatggatgccctgaaaaagccaagaccattgatcgtgtccaatccttactcgttgatccaattccattagatgtaaatcgtcttggttgaagtgtaaggactctactacataaaatcatttgtacaatgaaatcctcaaccataaaaaatgttgacgtcagcccctttctcaagaaatcattaagttaaatttat

SEQ ID NO: 83046 - DNA, 661 bp, Arabidopsis thaliana columbia
  unsure (1)..(661): unsure at all n locations
ctcgcgaaacctcaaagacaattattgtcaggcgtctacgatctactgctctattcgggggccaaccagggtctggcggggaataccgctgggcggacgaagttctccgcagatcgataacgccttaggtacttgactgcgtggctctcgatctccgttggctcgacaccaactgcagcccaatcgccctcgacatcagcatcgtcgatgtaccggcgttcgacctcatcaggactgagggctggccaccagacgttctgagcgaccttggcaagcgcagtcgcaactgccttcggcaagacaggggccttagaaggttccgtgatagcgattgatgatacgaggtccagaagatattcataggtcaaggtcgaaggtccaggtagcgagagagttcccgagatctgagggttcgacataaggttcgccagancctggggcgacatccatcacatgaacagggcgtatttggtttgccgggtttaattncaccagattggccaaatagccatattgttcagnacttgcttcanancgacatttgcaggggcgannatggtnctaggggaagnttcttgacgcgtcttcaccccagctagtttggagactcgctcgatttgggagcataagggcgnaggtcacgaangagaacgcagattaa

SEQ ID NO: 83047 - DNA, 456 bp, Arabidopsis thaliana columbia
  unsure (1)..(456): unsure at all n locations
tgctgatatgtgctccaagacaaatcttctggtgtgtgctctcttctggatgtatgacacagtatgcgttacgggaacatcaggttggtgttggccatgagactgctgcaatgacggggtttgattctgagtcaggtctagagacagaaggcaaattagcggtagatccaataagaaggtggtccatgatccaaaaccaatctagaagagagacgcatgacccccacagtgacatatatggaggcggaacatcagtggattctcaaagtcaagtgtttccagaggtttgttagaaaaccacagtgtctgaggaagcttggcaaagtatctaaggaaaggaacctacccgtgtggtgggataagcgtcaatttgtaccatatttgaagcgggacaaccagcaaacgcatctgccgacttaagttaccctttttggggaaagngaaaanntttaggtt

SEQ ID NO: 83048 - DNA, 480 bp, Arabidopsis thaliana columbia
  unsure (1)..(480): unsure at all n locations
ccgctaagacgcattattgttgagcatacacatggcaaaccatctgctattgttcttagatgcagcatctatcaacagatgagatgagacaatgcgtttttgcaactcatataacataacattgtatgcaatacaagcaaacacaactcaatggttacaaccatgtgatgcattgatattcggtcctgcaagcagaaggtgaacgctgctttgaaagatatacgaaacaaaattggtgtgcggcgcgtatgtnatgagttacacaaagcagtacatagcattagtaagcaagatattgtacaaatatggaatcagatagcaaacagtacagtcgatgagtactaagctccagtgcagtcaatgccattgcacctgaatgctcagatanggtgccntaggattacatctgntngnaacctttgctccagntncngattntggntggctnncttcccngtgggtncncaaacttgtgnaanc

SEQ ID NO: 83049 - DNA, 676 bp, Arabidopsis thaliana columbia
  unsure (1)..(676): unsure at all n locations
aattcattcatctttaatcttttttgcttcatgaacacgatgagtgataataaaaatcttctcctgagacgaatggatgaagaagaagaaaaagatcgagcaagaaaacaaatctctgttttatcctcaaaaagatcccaaaccacaaacgcaaacgcagctgttacagctccgtccgaggtggcgtttaacgtttgttgtttatgtgtttattgtcctctttgtgttctttggtgctgcatcaaacagccttgtacaattggatggagagccattctaaacgccaaacgcagattaagcggttgcagcggctgcggtagaagctttagcaggagggttttggctgctgattattcgtctttttccgatattgattctgatgatgtgaattgcaaagctcataattgctcaacacgaaatcggtgactacaaaaatttcattgagtttcatgaatttcccaaacttcctttttctctgttctaaacgcccaacgcaaaacgctggagttgacttcataatgctgagttgatgaaaaatctcgagattaagctctattatttcgataatttacaggttaaagatgttgttgtgattcattatataaagatgtatatattacttggaaaaaaataaagttgtttttttttnnnnnnnnnnnnnnnnnnnnnnnnnnnn

SEQ ID NO: 83050 - DNA, 480 bp, Arabidopsis thaliana columbia
  unsure (1)..(480): unsure at all n locations
tttttttttttttttttttagcttaatgagaggcctttcattttaatttcttcaaggatcgaacataaatgctcataaaagagtatctgataacttaagctaggcattacatcaaaagacacgaacactatatgactatttgatccttagacttggttcatctgtgcaaaaaaatctttttactagacgaagagttttgcacttcctctcttccaagcaccacgaaggcanaatccaccgggagagttctggctccttttggagttatcgttcttaggttctggttcaggctctgggttagaatnctaagatctagtactgcagccattgatttcccncctagacgtgttctgagaaanttttganggttncttanggtgcntgcctgtggcaccttantccactccagccgatgaaagactccccaacgnnggnacttttggtntggcnttaactgaanggnaaggancctaaacttgg

SEQ ID NO: 83051 - DNA, 532 bp, Arabidopsis thaliana columbia
  unsure (1)..(532): unsure at all n locations
gaggagtaagacagatgacagtgaaaaagttgaagaaagctcacatgatgaagggacgcctgcagtttcacaacacgatgaaaccacacatcatgatgagattggtaattacaaggattatccttcagatgaggagccagcagctgaaggtgaaccaacaagtatattggatgaggctactcacactaatccagcagacgagcatgttgtggagagaaaagaggaatctacctcatctgaggattcctcttcccccacagatgaatctcaaaatgatggtagtgctgaaaaggaggaatcagacgaggttaagaaagtggaggattttgtaaccgagaagaaggaagagttgtcaaagggaagagtttgggcgtcttgttgcctctcgttgggcaggggngaaatctgataagccacctnaggagccgttttcccaagtgatgtnngggaancntggccacgccatnacttacatnagcagttaagtnntgntttttnnnatgtntnggtnccccgtttggannacgcctac

SEQ ID NO: 83052 - DNA, 409 bp, Arabidopsis thaliana columbia
  unsure (1)..(409): unsure at all n locations
taaaggaatacgtaagcagtcttgactcggagtttgtcagcagttactggatctcctggtgcagattggggtgttattagtggtggaacagctggttatagcgagtagaaacattcaagtaatggtggtgtgttattaatgatggaatagctggttatagtgggtagaaacattcaggaagcagattcatgtcgcgtaaaagagaagacttgattcttggtgtagcatataggatggccaaaaaattaccagtctaacatataccctgggtgaatcctaagttcgtatggtgatacttgaacattagcgtttccccttttccctttgtgtatagtttcctcatttagaggccgncttttcccctttggggttctttatcttaagngggggtanantagcntctngctag

SEQ ID NO: 83053 - DNA, 405 bp, Arabidopsis thaliana columbia
ggagtttttcttggcgagagttaggatgggagatcattcagcgctggtggttgatcggttatcaagcgattctggtctggggacggttaaccgagcagacccgaaagctgactcggttaacgaagatgggggagcgtggatctatatctgcaggagctgatttatgtgagagcaaatttgtacagcgtaggatttgtcatgatgaagatgaagataccaacatggatacgccttgttcttggtcctggaacattaaagtttgcacatcataaattgcgtccagagatggtccaatgagaaaaggtgatacgggatgccggaatttgttccgtcagcaattataaacctgggttacaccgcgccacgacaattgtttcactacacaggcatttctatgaacttcgg

SEQ ID NO: 83054 - DNA, 437 bp, Arabidopsis thaliana columbia
ccgggagcccaaaactttgaaatctcttcaagacccaaagctcttgggtcgaattgctggtgtaccggtttatccaattgggcctttgtctagaccggttgatccatctaaaactaatcatccggttttggattggttaaacaaacagccggacgagtcggtactttacatttcatttggaagcggtggctctctctcggctaaacaactaaccgaattggcttggggacttgagatgagtcagcaacggttcgtttgggtggttcgacccccggtggacggcttcagcttgcagtgcatatttatccgctaacagtggtaaaatacgaggcggtcacacccttgattattctccccgggaaggtttttctgtaagcccggactcaatgacagaggccttcatgggctccctctccttgggctccccaagcggagat

SEQ ID NO: 83055 - DNA, 622 bp, Arabidopsis thaliana columbia
  unsure (1)..(622): unsure at all n locations
acagattaaaacactaattatttattttacattgtaaaatacattactgatagggactagcattgaccaaaacaaaaccacgtgataccatgtggcaaccaagactcggaaactatataatacaagatacccaaaagggtaaaacgacacgcagtttataagtaacatactataaacggtaagcgttcctaggcaccacgtgccatgcacctgacacgctccaaaagatgctcgctctcgtcggcgattcttgacaacgattcatgcgccactccaccgtcgcaactcagcgattcggcagcggtctctttcagcttctttatcttctttcttcatcttcaggcaccttcctcctccaccatgatctttctcaccaacgcctcgatctccgccctcgtaatcantccctccgacggtagtttcttagagcggaggcaacgccaagctcttcgttgaggagtgtcgcgttcatcattgctccgcaaaangggcacgcgatcatcggacggcaccacgangtctcgagaacgattccaccgcgtgagtagaaccactnggatggtgggcaaattcgttgggngcccaaagngacataagctcttatggtcgggaaaaaactcgg

SEQ ID NO: 83056 - DNA, 523 bp, Arabidopsis thaliana columbia
  unsure (1)..(523): unsure at all n locations
cgcaaaatgcgattctgtaaaaagctctcatcattttcctctttactctaaccatcatgacaggaaccgcgttttcacaaaactgtggtacaaacgggtgtaaaggcaacatgtgctgcagcaggtggggatattgtggtaccacaaaagcctactgtggcactgggtgccagagtggaccttgcaactctaaacctaaacctactccgactccaagcggtagtggcggtctaaatgctggtcctcgtggtaccatagcaagcgttatcacaccagcgttcttcaacagcatcatgagtaaagtcggaagcggttgcccagcgaaagggttttacactcgccaggctttcatcgcagccgctgaatcgttcgcagcctncaaaggaccttttgctaagcggtgagattgccgccatgttggttcagttctttcacgnatnttggaggtttttctttcaaggagggaattggccagggggaggttcttntttcccaggnacaaaaatntctttnttaaccccgg

SEQ ID NO: 83057 - DNA, 705 bp, Arabidopsis thaliana columbia
  unsure (1)..(705): unsure at all n locations
ccaggtcactacgactcattttagggaagagctgcgccgcctgcaggtcccggtccggaattcccgggtcgacccacgcgtccgctcgttgtgtaatttcccggcaacggaagagaggaggaggaagagtgtaagcaataaattcctcttcttctacgaaacatttgctcttctcctctttctcttctcttctcttctcctttgcttctccgattctcttcctttttttttattttgatccgactactcaagctttttttctgttcatggtttcctccatcatcgcagttgcagaaggcaaaaagatggagctagaacccaataaatcactatctgctgatatgccatctttgctgagtagatcatctgaagcttttaatggaggcactggatatcgttcttcaagtgatctcagcatgttctcaagctcattgcccacactttttcatgaaaagctgaatatgactgattcagatagttggctctcctttgatgaaagctcacccaatctgaacaaacttgtcataggaaactcagagaaagattctttggaagatgttgaacccgatgctttagaaatattgctgcctgaggatgaaaatgagctccttcctggcccattgatggnctaattttaccggggtgccttatgacttgacggcctcgaggngtatgntttcccggagggggtgngtggtgtganca

SEQ ID NO: 83058 - DNA, 609 bp, Arabidopsis thaliana columbia
gggaaccttattgatctccaaaatccgtgaagaatacccagacagtttaatgaacacatattctgttgtaccctctccaaaagtgtcagatactgttgtagaaccctacaatgctaccctttcagttcaccaattggtagaaaatactgatgaaacctactgtattgacaacgaagccttgtatgacatttgcttccgtacattaaaacttacaacaccaacatacggtgacttaaaccacttagtctctttgactatgtctggagtgaccacttgtctcaggttccctggtcaattgaatgctgatctccgtaaactcgccggtcaacatgggttccttttccccaggttacaatttcttcatggcctgggctttcgcttcctcttcaccttctcgtgggaggccaacaatttcaaggggcactaacccgttcccgaacttaccccacaaactgtttgatgccaaaaacatgatggcagcatgtgacccaagaagtggacgttatctaacagtagcagctgtattccgtggccgtatgtccatgaaagaagttgatgaacaaatgttaaatattcagaacaaatattcgagctacttcgttgaatgga

SEQ ID NO: 83059 - DNA, 444 bp, Arabidopsis thaliana columbia
  unsure (1)..(444): unsure at all n locations
gacttgtgctatcttccaagtcatttttgtcattggactttcatcgctatcgctatcatcatacatgttcttgattagaccaagaggttgtggggacgaagtcacgccttgtggttcacattccatgatggagatcacaatgttctacttctcgatctacttgatcgcattgggatatggcggttaccaaccaaacattgcaacgcttggagcggatcagttcgatgaggagcatcctaaagaagggtactcgaagattgcttttttnagctacttttaccctgctttaaaactcggntcgcccttttcggacaaccatcttggggnatttttaggatgaggggatttggggactccgggtttttggnatccnctgggtctcctataatnggggggntcttttccncnttggacaccgggtancnccattttaagnccccgggg

SEQ ID NO: 83060 - DNA, 465 bp, Arabidopsis thaliana columbia
  unsure (1)..(465): unsure at all n locations
agacaaagatgactcaccttgatttctttcacaacaactctaaccatatgatccaatgccgggttataaaccactataaagattcctataaagatcccaacattcacaagtgtctctctgtgtttgtatcccaaaattcaagacaggaatctggactatctttcagaatcagagacagaagttacaaggaaaggacctgcaggaagcgactttggtatatcaactccaaacaagagcctttgtgtttgttgtctgtaagttatgaaaacatcaagaccttcttgtagtttagtttcaccttctcctcggcttgcgggtcttctgctgtggcctccagtaacaagcaagcggccccaaatgcacagctgggcgagggtaatggccaatggagctccatcgggaaaaccagagcatnggggggcactggtaagncttcagggggngaantgggcccctnccttgccc

SEQ ID NO: 83061 - DNA, 706 bp, Arabidopsis thaliana columbia
agcattaagtcctttaggattccagagctttttattggagttccagaaactgcaacagtaggatcactaaagaggactgtgatggaggctgtcagtgttttactcagcggaggaatacgtgttggggtgttaatgcatgggaagaaggttagagatgaaaggaaaactctgtcccagactgggatctcatgtgatgaaaatctagacaaccttgggttcaccttggagcctagtcccagcaaagttcccctacctttgtgttctgaagatcctgctgtgccaaccgaccctacaagtttgtctgaacggtctgcggcgtctcctatgctagattctggaattccacatgcagatgacgtgattgattcaagaaatattgtggacagtaacctcgaattagttccatatcagggtgacatatctgttgatgaaccttcatcagattcaaaagagcttgtcccacttccagagttggaagtcaaggcgcttgccatagttccgttgaaccagaaacctaagcgtactgagctagcccagaggagaactaggagacccttctctgtgacagaggtagaagctctttgttcaagcagttgaggaactcgggactggaagatggcgtgatgtaaaattgcgtgctttcgaggatgcagatcatcggacttacgtggacttgaaggacaaatggaagacgctagttcacaca

SEQ ID NO: 83062 - DNA, 521 bp, Arabidopsis thaliana columbia
aacggcaaaaaactatattttttaaaataacatgccagtttagtatcagaagatgcagaaacgccattagccaaaactgattaattaagagaagaaattaacattaaattttttaaaacataattaaataacccaaaaaaaaaaaaactcaacagtcaaagaaactgttggcatttcagtcatttccttgaaaaaaagcgttagagccgttaccgctcaccatgattatcatcaatctccaccgccaccgctttcaccgtcgctcgccaatctccgccgtctgccgcaacccaccaaatccaacggcgtacattcaaccttatggcttcgctctccaatccaacgcctgaacaaccacgggaaccaataattaaccttcccacaaacagaacatcgccgaaactcatgagcccgagtctccggccttccacaaccaccatgcgaacacatccttaacccttccgctaaatcaacccgacccgaactaaaccactcttttaaaaaccggttaaccggatgaa

SEQ ID NO: 83063 - DNA, 441 bp, Arabidopsis thaliana columbia
  unsure (1)..(441): unsure at all n locations
tgcaaacaatgtccaagacgaagcactctcggtattgagcttactctctacaacattgacgaatcagacagtggaaagttggtctcttgtgatgatgatttttgctaccagattagtggcggtcctctctctggctgcaaagctaatatgtcttgtccttatcttgagatatatggagatggtagctctactgctggttattttntcaaanatgttgtgcagtatgacagtgtagctggtgatctcaagactcaaacagctaatggcagtgtcatttttgggtgtggtgctaggcagtcaggagatctagactctnctaatgaagnagcacttgnccgggntacttgggattnggggaaagctaattcttccatgatttcccagctggcctcatcagggggngtgaaaaanaaatttccccattncttaggtggangaaat

SEQ ID NO: 83064 - DNA, 465 bp, Arabidopsis thaliana columbia
aattctttcatagtcttatggctactaaattcatcaccctcactcaaatccaccgccctaaaaccttactatccaccacaaaatctcgtcgacgcaataataacaaacccaaaccatccaaaaccataagcgaaaacatgttgaacaacgtcttttctggcaaaacgctaacagaaatctaccataataagataaattcacacccacttactaatccactactgtttcttgaagatcagttcgtaaaagaagaggagacggatcaacaagaacacggggaggtctcgtacaacagatggtaagtcccctaaccgcggccaactacgggggatttgaggcggtgttgttgctccgcttaagcttgttgtggggacatgaaaatgttccctaagccatatattaaggaaggcaagagcgttttacaatgagttttgttgtgatacttatgctgagagtaacactatg

SEQ ID NO: 83065 - DNA, 380 bp, Arabidopsis thaliana columbia
ttcttcaatctatccatgaaccggagctcatttctgcgttcgacaccggtggtgcagagcttctatacgaaattcgtctccttagcaccacgcagcgtgttgcagccgccacattcatcattgatcgtaatattgattcgaaaggagcacaggatttggcacgagccatcaaggattatcctaaccgtcgtggagacgttggatggttggattttgattacaacttaccaggagattgtctttcattcttgtattacaggcagagcagagagaataagaatccatcggatcagagaacctcgatgcttctacaagccattggggggtgcagaatcaggaaaaggctaagaacaggttgaacacagagctatacggggaca

SEQ ID NO: 83066 - DNA, 426 bp, Arabidopsis thaliana columbia
cggacgctgatttggaagcttactattctcactataatttaccggcgatggttcctcctccgccgccgggagtttctccgattccaattacttcagctcattccgtctatttgcctacccatgtctcaattggagctcgcgatgaggttaggacgcttttcgtcgccggacttcctgaagatgtcaagcctcgggagatctacaatctctttcgtgagttcccaggatatgagacttcgcatctccggagctcagatggagctaagcccttcgcatttgctgtgttctcggatctgcaatcagctgtagcggtgatgcatgctctcaatggaatggtgtttgatcttgaaaagcattctactcttcacattgaccttgccaaatcaaatcccaaatctaagcgttcaagaacagatgatggttggg

SEQ ID NO: 83067 - DNA, 972 bp, Arabidopsis thaliana columbia
ggcaacttcacttcagaggaggaagaaacaatcattaagcttcaccacaactatgggaacaagtggtcgaaaatcgcttctcaacttccaggtagaacagataacgagatcaagaatgtgtggcacactcatctaaagaaaagactggctcagagctcaggaactgcagatgaaccggcctcgccttgttcgagtgattctttttctcgtgggaaagatgataagtcatctcacgtagaagattctttgaacagagagactaatcataggaatgagttgtctacatctatgtcttctgggggttccaaccaacaagatgatccaaagatagacggactcaggtttgagtatattgaagaagcttatagcgagtttaacggcattattattcaagaggtaggcaaaccccgatctgcttggaggtacccattttgattcagatcctgacactttgggggttcttaggtccttcaaactcatttcaacaatcccctgcaaatgggaccagctcaggctcaggggcaccaccagaagaagagtctgatgtggatggggttaagaaatggttcacgcccctagaaagcgaactcgggttagaagaagacgataatcaacaacaatacaaagaaggagaatcatcatcatcatcactcttgaagaactacgagctcatgatacattgataaaagatatttattttggatatcaatatgacaatatgtatgatggaaaggtagagagatagtagagaaaatgtatttcctatagttttttaattggcattatttttagtagcctgtagataaaacagagctggtcaaaagatgcacactatactaaaagtctaaaactatatatctggaagattctttctttagtcttagagaatcttgaagaaaaaaaaaaaaaaaagggcggccgctctagaggatccaagcttacgtacgcgtgcatgcggcgtcaagctcatag

SEQ ID NO: 83068 - DNA, 1790 bp, Arabidopsis thaliana columbia
cgaccacgcgtcagcacaatctctccacagaacaaaagcaaaaagcctaaaccgggataatggaagctctaaactctatcttaaccggctacgccgtggcagccctatcagtctacgctctttggttctacttcctgtcccgaagactaaccggtcccaaagtcttaccgttcgtaggaagcttaccgtatctaatcgctaaccggagccgaattcacgattggatcgctgataatctccgagcaactggtggtacgtatcaaacatgcaccatggtgatacctttcgtagccaaggcgcaagggttttacactgtgacgtgtcacccaaaaaacgtcgagcatatccttaagacacggttcgacaactatccgaaaggtccgatgtggcgcgctgctttccacgacctgttaggacaaggaatcttcaacagcgacggtgacacgtggctcatgcaacgtaagactgcagcgcttgagttcacaactagaactcttagacaagccatggctcggtgggttaacgggactatcaagaaccggttatggcttatattagaccgtgcggttcaaaacaacaaaccggttgatcttcaagatttgtttttgaggttaacttttgacaacatttgtggtctgacttttggtaaagacccggagacgctctctctggatctaccggataatcccttctctgtcgcttttgacaccgcgacagaggctactctaaagagacttctctacaccggtttcttgtggaggattcagaaagctatggggattggatcagaagataagctcaagaagagtcttgaagtcgttgagacttacatgaacgatgcaatcgacgctcggaaaaactctccctccgatgatcttttgtcacgtttcttgaagaaacgtgacgttaacggtaacgttcttccaacagatgttcttcagcgtatcgcgcttaactttgttctcgcgggccgtgacacttcttcggtggccttgagctggttcttctggctcgtcatgaataaccgggaggtggaaacgaagatcgttaacgagttgtcgatggttctgaaggagacacgtggcaatgatcaggagaaatggacggaggagccgttagagttcgacgaggcagataggctcgtttacctcaaggctgctttggctgaaacgctgcgtttatacccttctgtgcctcaggatttcaaatacgtcgtagagcattgacgttttgccggacgggactttcgtgccaagaggctcgacggtgacctactcgatttactcgatcggacgtatgaaaacaatttggggcgaagattgtctcgagttccgtccggaacggtggctgacagccgacggtgaacggtttgagactcccaaagatggttacaagttcgtagcgttcaacgccggaccaaggacttgcttgggaaaggacttggcttataatcagatgaagtcggtggcttcagccgttctcctccgttaccgggtttttccggttcccggtcaccgcgttgagcaaaagatgtcgctgacgcttttcatgaagaacggtttacgtgtttatttgcaacctcgtggtgaggtgcttgcatgattcacattaagggtattatcgtaaatatgtttgtcatttgaagtttaaattgttttaagaacaacctactttattctatgttttctccacctacaaaatacttattatgatatatatgcactttttgtgcctttgttaaaattgtttgagtttgttcaactctttttgaataaaagtttatttggttt

SEQ ID NO: 83069 - DNA, 361 bp, Arabidopsis thaliana columbia
accacgcgtccgaatggcgactctttatagtcaagttccttctgtatcagcagttttctctctttacacatctttttccgcaatcacgatgctttttcgaacaatcctcagcgagattgtgcctaaaagaatcagagagtacatagctatgaaagctgtagacttcttctcttcttactttcaatctgatttcacttttgtgatagagcaacgttgggagtttgttgagaatcagacgttccgtgctgctgaagtttacgtacctacctgtctcgccggactttctacaggcaaacttcttgtgggttcaagtaatcttaagaatccagctgctgagccaaaacttggtatccctgtgaac

SEQ ID NO: 83070 - DNA, 873 bp, Arabidopsis thaliana columbia
agattgtgactactactgctactactagtgcaagaagctcgaggagtactagcaaagagattgctgttgttgctaaagttactaaaacgggaagagccaagaataatattaagaaacaaacggatacgaaaacagaatcatctgacgatgatgatgatgagaaggaagagaattctaaaacagagaagaagccagtagcggataagaagaagagcgtggctgatttcttgaagaggataaagaagaactctccacagaaaggaaaagaaccaacgagtaaaaatcagaagaagaatgatggaaacgttaagaaagagaacgatcatcagaagaagagtgatggaaacgttaagaaagagaacagtaaagtgaaaccgagggaattgaggagtagtacgggtaaaaagaaggttgaggtagagaataataatagtaagagctcatcgaaacgaaaacaaacgaaagaaacagcagaggtggctactggaaaacgaggtagggaatcgggaaaagacgataaacagccaaggaaaagaagcagaagatgaaactgaactagcctgtggttaagcatttgtacatttgatgtgccagaagtattcatcattcctcttaacatcactgtttcggagggaatcataggtcttgttaggtatttattctcatagttaccagtttagtttttttttttgtttaaactgtgttttccttgttagagggtataactatagtggttataaactgtgtcttcatttatttgtctagtttgatcgattcatgttcacaaaacccaaaaaaaaaaaaaagggcggccgctttagaggatcccagcttacgtacgcgtgcatgcgacgtcatagctcgtctaaaggt

SEQ ID NO: 83071 - DNA, 515 bp, Arabidopsis thaliana columbia
  unsure (1)..(515): unsure at all n locations
gcgcccccaatctctctcaaccaaggcgattttaatctttgaaacccttgtttcttatcgattccgcctctccggccaccggcgctcctcgctgtggtcgtgagagggcccatgtgtttctccgttcgccggtttggccctttccaatcggcgatttgacgagtttaacgatcganttgtgtggtgaggtcttcggtggtgcttcctgcggttaataaggcgtcgacttgtcttggtcctatcggtgaggacggtgattgtaaccttctcggcggtctcgctcttcctctagattgctcgtggacagcatctnagcttttntaaggctcctacggtggttctcggtggtttantctacgcgttgttttncnacgacgtttcctncttgtttcggtttcaaagtnggtggtaaggtcctgtnttggcaaatnggtttaagcaagtattggtctcccanaatctaagcctctcctttccctttggcggttcgggnggaacntccaaatnngttntgg

SEQ ID NO: 83072 - DNA, 586 bp, Arabidopsis thaliana columbia
ggtacgtattctatctttgcttcctaaaaatcaatcaatttttttttcacagagtacgcaccaccagccaaattataagtgagagagaagataacgacgacaagaagaagaaggagaagctccaaaattgttcatttgcatttctccaacttgtaaaatcgagcacctgcatttgggggctttcctcttatctggaaacaaagagagccgccactgatggaatgagtttccgtgaatcatccacccaggtgaaaggaatcataatttggttggtcaactaataataaaaatgggtgaggcaagtgattcagattcgtctgatgagtctttgaaacacaatagcaccccaccactctttagcatctctggcttcttttgtgttgccaaaggaggagactctgatcccggtaggagccctacttctccccttgattttggagtctttggtggcctctttagccccaggtctttttcttcttcacccctccacccgaaaccaaatggctttctttcacaaagtcgggctttctcttctgagctccagcttcgaactaggcgatgatccattcagaagggactacattgt

SEQ ID NO: 83073 - DNA, 646 bp, Arabidopsis thaliana columbia
accatgtgaccaacatttatgactcgtttctacctatccttactcagttcgttgaggacggcttacctgtagcaagaacaaatgaggtacttaagatgatcaagcaagtcctagtggatctgaagaatgcgccttacaaaacaaggaaggctcgattgactttagattcagataactcaagttcattcccggagcagtttcttcccgcactaggcgatttgcttctcgctctttctttaaagagcgagagagacacaaacggtaaaagtgtcacaatatccgtagacgggaaactcactaaaactgctatagcattgccagttgcattggacgcgttaagggaacttgttgctgacctcagcaaataccaaaacttaaacaaagattcactgtcttttccacttgttaaacagaacagggtatgctctggttctgtcctcgcaagtggtgaagagcttccttctggcattgcaaccgcagcttttgatggaatccaagagtccaaatgggaagaaccaaatggtgcaaaaggctgttggatcgtgtacaaaacactctacaaccagatgcaccaactcatagcatacgaactcatgtctgctaatgatgccccagagagagaccccaaagatttggattcttgaag

SEQ ID NO: 83074 - DNA, 542 bp, Arabidopsis thaliana columbia
  unsure (1)..(542): unsure at all n locations
tcttnggattcaccncnctttgtngancnanngccaatggaagcccaattgntgcaaaggctgttgaacggnttcnaaaccntttacacccagatgcaccaactcatggcatacgaactcatgtctgctaatgatgccccagagagagaccccaaagattggattcttgaaggaagtaacgatggtggttcgacatggtgtgtcctagacaagcaaactagtcaggtattcgaggaacggttccaacgcaaatcctacaaaataactacacctggattccaagcaaatcttttcaggttccggtttttaagtgtacgagacgtgaattcgacctcgagactacaactagggagcatcgatctgtacagaagtcaccagtgatttaatgatgcattcatgcacatcaaatgtataaatattccaaaaacatcaatttgttttgtcttcactttctgcacattgatgtattccgtattcgtgagggaattggcctttgctattgctatgaaacacctctgtcttagacagaggcttacagactc

SEQ ID NO: 83075 - DNA, 548 bp, Arabidopsis thaliana columbia
ataggagcataacacgacttcttacttctctcaagaccaaaatagaaatgcaattcataggtggagaataatgtaatgcaccacatcatcaatctatttgatgaactttaataaacaacaaactcgtttcttaaaacaggaattttaaaagtaatactgctcttaacatattccatagttttcctttttccttcggacatgtcaatgaacaccacattcctttttaagaggaactagccggtgttttgggttcatcgcctgatttggaggctggaggaggagtgccttctactcccatctcggctcttagatcattgatgctttgctccagctcattgattctgcctcccatgtcatcaatctttgtgatgatggagtccgacattgtctggaacctggtttgcatctgctggagaagattttggacaaaagcagtcatatcagcagtgctctgcttagtatccttagaatcatgaccatccatttttagggttttcttgcgactgatcggaaaactggagaaattttgatttcagcgaaaagcgatg

SEQ ID NO: 83076 - DNA, 687 bp, Arabidopsis thaliana columbia
cgacgggttacaaggttgtccctagagccacagcagctagtctacttgaccatgatgatccaccgcagaagagaggagcttttactaataaccaaatttgggttactccctacaataagtccgagcaatgggcaagtggtttattcacttaccaaagccatggtggtgatactcttgcggtttggtccgacagagatagagatatagagaataaggacattgtggtgtggtacacgcttgggttccatcacattccatgtcaagaagattttccgataatgcccactgtttcttcaagtttcgattttgaagcccgtaaattttttcgagcgcaatccaatccttaaagccgctccaaactttgaatatgaccttcccgggtttgcggagccaaaatctgtttctgcttgagaagaatgaagaaccaacaaaagaaattatccaacttcttggatcttattggcaaaactacaaatcaaggtacatgatattcactttcctatgtgttattggcgtaatcccaactcctataaaacttataagcgcaaaaatagtatataacatgtccaattcaccccggaatgttaatctcaaggaattgtattggctactaaattgttttccattttccttgttattagcttcaaaaatagattgtgaaacgaagatttaacattctcttctcct

SEQ ID NO: 83077 - DNA, 737 bp, Arabidopsis thaliana columbia
  unsure (1)..(737): unsure at all n locations
ccaaaatttgttggagaacgaacactctcgagacggaatcgatggcgtattctcagacggtgatggctatgatcaggtgggctagacctcctttccgcaacaatcacgataaggttgctttcgctattcactcttctttcgtcgcttccggttatatcctcaccgccaccggacggcctgctttcgccgacgaggctctctcttcgtcttctcagaatgatgttggaatcgaaggatggaacgaattcgagggagagtatgcgtttgtctatgcgaatccgaagaaagggtcaaagaaaattctggttaagtgcttggcgatgggtgataaacttcttgttgatgccatagctgatggtggagcagaacctgctcatcttgagattaaagttggggattatgctgaggaaagcaatgagggggattactctgcgcagttcaagaatttgggtaagttagtgactgatttgcagagtgagattatcgataagcttgatggaaaaccaaaacctgttgcttcgagagcacagtccagctctgagactaatgaagagcctagatattacgatgatacgcctaatccattaggccctcagattcacccctcaggngtngtngttcctccgatacctngtaatggtggntncagggatctcttccctngncccaggtgntngaatttaccctnggaggggtggttttggggatggaaagatttttgntgggacccnctannc

SEQ ID NO: 83078 - DNA, 549 bp, Arabidopsis thaliana columbia
  unsure (1)..(549): unsure at all n locations
atcttggaacatgtcggtctattttgcttttgatttcttattctttaggtaacaacaacaataccaaatcaaacaaacataaaaaagttaagaaaatagaaaactctaaaacacaaatattcatcaaatagttatgcatacaagaacaccatcatggttatggaagaggattaagctaatgatggaatcattcccatcatcctcgcataagcaaaaataccaccagcatcaataaccggtccagcatcaccgatcgacttcagcttatagtttttaccggtcgtgtgattagtcaataaaccaccactatcactcagctcgatcgtcaccgtatctcctgtcttacactcctcacagactctaacctctgactcgagcggaaacacctctcctgtagcaaccgagttacggaaaaagattcttgcgtaagactcagcaactatggctttagctccagtgctccagaaagacggggatgtcacggacgtcggaccaagttcgcgcggtatgttgganttatggcccctggcatgacggttgggacggact

SEQ ID NO: 83079 - DNA, 561 bp, Arabidopsis thaliana columbia
  unsure (1)..(561): unsure at all n locations
aataataagcaattaacaaaaagtttgcttgaaagagaagctgatcaatgtcaaaggtttttacagcagaaagttggaaataaattggacaaacaaagaaagatccaaccgaagaaggaaataacaactctctctgggtgtgtagagcaaaaaacgagtctaacatgttttaaaatctttcataaaaacttataaaagatgagcaatcttcaaaagaagaagagacaggtttgggctaaagaagagtgctgtgatgttgaaaatccagagataacctttttcattcattcccatggagattgagaccaaaaaaattattattactcaacgctgtgttggcctgggcctggagcttccaaatgtggatcggcgatcatcactgcctctaggaccagaaccccaacggtctcctccttcagctgggggtccagatctttccctattaactaggccaccgggcaggtctgtggggggtcccctgttgcttccccaggggcaatctccggagggggccacggttggacgcgggnagttctnagatntnggcnaagggctgnccca

SEQ ID NO: 83080 - DNA, 490 bp, Arabidopsis thaliana columbia
  unsure (1)..(490): unsure at all n locations
agcttgaactcaattcagataagaaacttcagatggttcaaaaggcaatcaaaagccaaagtgacaatgtgcagattctttaatactatacaatatttagggtaagcaaagactatcatgaacccttaagacagagagagatagttaacttgtgtgtgcagtcttgtgccttaacagccttcaaactcacaggagtgtagtcaaaagtattctaaaccccaaacctttctccaatttgctgaactcttaaaaagtctttcttcttcctgagtaatctagacctttgtgagagagactgagtgatgtaactgaaacctgagagatctcaattgccatctggggttctgctgganccgccaattttggagcttcctttacctttnccancgccttttggcttgccaganggttagagtagcngggtgcngcaganctgtgatcanacagcagnccatctccnggnttcncngtttcaagangggttggatnt

SEQ ID NO: 83081 - DNA, 295 bp, Arabidopsis thaliana columbia
tcaagaacggaaggttggctatgttctctatgtttggattcttcgttcaagccatcgtcaccggaaagggacctttggagaacctcgccgaccatttggccgacccagtcaacaacaacgcttgggccttcgccaccaacttcgtccccggaaagtgagcggctgcttattatgtgaatgagagcagagaaagagagtttgtttgtggtctattctatgtaaatttgtgaactttcctttgtggtatctttgtatagaaatcgaacctctttttctctaactgtgttggcgtttt

SEQ ID NO: 83082 - DNA, 339 bp, Arabidopsis thaliana columbia
atcacgcgtccgcagatcttaaacgttttactttgtgctgcactactcaacctcaatggccgcctcaacaatggctctctcctcccctgccttcgccggtaaagccgtcaagccttcccccgcggcatctgatgtcctgtggaagcggccgtgtgaccatgaggaagactgttgcgccaagccaaagggcccatcaggcagcccatggtacggatctgaccgtgtcaagtacattgggtccattctccggcgagtcccccgaagctaccttaccggtgagttccccggtgactacaggatgggacaccgccggtctttccgctccgacccagagacctt

SEQ ID NO: 83083 - DNA, 383 bp, Arabidopsis thaliana columbia
cccacgcgtccggttagtcagaacacaaaaaaagcacacaaaaaagtttcaatggccgcctcaacaatggctctctcctcccctgctttcgccggaaaggctgtgaacctttcccctgcggcatcagaagtccttggaagcggccgtgtgacaatgaggaagactgttgccaagccaaagggtccatcaggcagcccatggtacggatccgaccgagtcaagtacttgggtccattctctggcgagtcacccagctaccttaccggagagttccctggagactacggatgggacacagctggtctatccgctgaccccgagacattcgcaaggaaccgtgagctagaagttatccacagcaggtgggccatgctcggaaccct

SEQ ID NO: 83084 - DNA, 585 bp, Arabidopsis thaliana columbia
  unsure (1)..(585): unsure at all n locations
atcggccaaatggtcagcaaggttctctatcggtcccttaccagtgacgatggcttgaacgaagaatccaaacatagagaacttagccaatctaccgttcttgagcttggttcacgctcagagcattttggccacttgggccacacaagttatgttgatgggagccgatgaaggctacagagtagcaggaaatgggccattgtgagaggccgaggacttgctttacccaggtggcagcttcgacccattgggcctcgctactgaccccgaggctttcgcagagttgaaggtgaaggagctcaagaacggaaggttggctatgttctctatgtttggattcttcgttcaagccatcgtcaccggaaagggacctttggagaacctcgccgaccatttggccgacccagtcaacaacaacgcttgggccttcgccaccaacttcgtccccggaaagtnagcggctgcttatnatgtgaatgagagcagagaaagagagtttgtttgtggtctattctatgtaaattttgtgaactttncctttgnngggatcctttgtattagnaatcggaccctcttttttcnntt

SEQ ID NO: 83085 - DNA, 436 bp, Arabidopsis thaliana columbia
atcgcatcaataccaaaccacccattttttggtttacaacaacaaatcttaaacgggtgagtttgtgctgcactactcaacgctcaatggccgcctcaacaatggctctctcctcccctgccttcgccggtaaggccgtcaagctttcccccgcggcatctgaagtccttggaagcggccgtgtgacaatgaggaagactgttgccaagccaaagggcccatcatgcagcccatggtacggatctgaccgtgtcaagtacttgggtccattctctggcgaatcaccgagctaccttaccggagagttccccggtgactacgggatgggacaccgccggtctttatccgccgaccccgagaccttcgctaggaaccgtgagctagaagttatccacatagctcaggggggccacgggacagcgaagagcggggttgg

SEQ ID NO: 83086 - DNA, 558 bp, Arabidopsis thaliana columbia
  unsure (1)..(558): unsure at all n locations
nnnnnnnnnnnnnnnnnnnnnnnnnnnnnnnnnnnnnnnnnnnnnnnnnnnnnnnnnnnnnnnnnnnnnntcgcgatctagaaactctttatnaaactaaaagagccttttactttgcgccacaactctcacncgcaaatgggcccgnctccgacaatgggctctctttcctctcctgcttttgaccggaaaaggcgttaaactatcccccggcggctccaagtatttggaccggcaatcaccatgcgcaagcctccaagnccaccgtccatcccgcagcccatggtacggatccgaccgagtcagtacttggtccattctccgtgagcctccgagctacctccactggagagttccccgggtgattaccggtgggacactgccggtctatccgccgatcccgaagaccttcccctaggaaccgtgaggctagaagttatccacagcagatgggcccattgctcggagccctaggctggcgttttccctagccaatagctcacccaaactcgagccgaattccgagcttacgtacgcgtgcatggtacgtcatagtaa

SEQ ID NO: 83087 - DNA, 416 bp, Arabidopsis thaliana columbia
caaatcttaaacgttttactttgtgctgcactactcaacctcaatggccgcctcaacaatggctctctcctcccctgccctccgccggtaaggccgtcaacctttcccccgcggcatctgaagtcctcggaagcggccgtgtgacaatgaggaagactgttgccaagccaaagggcccatcaggcagcccatggtacggatccgaccgtgtcaagtacttgggtccattctctggcgagtcaccggagctaccttaccggagagttccccggagactacggatgggacaccccgccggactttttcagctgaccccgagacattcgcaaggaaccgtgagctagaagttatccacagcaggtgggctatgctcggagccctaggctgcggcctccctgagcttttggctaggaacg

SEQ ID NO: 83088 - DNA, 480 bp, Arabidopsis thaliana columbia
gaccggaacggaagggccgacccacccgacccgactggctgtaccgcggaggcagcttctacccattgggtttggctaccgacccagaggcattcgctgagttgaaggtgaaggagctcaagaacggaagattggctatgttctctatgtttggattcttcgttcaagccatcgtcactggtaagggaccgatagagaaccttgctgaccatttggccgatccagttaacaacaacgcatgggccttcgccaccaactttgttcccggaaagtgagccaagttttatctgtattttgcttcagtctttgcttcgtgagtgtgagaggagaaagagagcttgtttagatgtaaaatttgcaagactttgtatttttttcattaatcaaataactcgtttttctctcaaattatctggcaattaccaaattggattatatatatattttgggcggccgttctagatgatccaagctttactt

SEQ ID NO: 83089 - DNA, 388 bp, Arabidopsis thaliana columbia
aggtggcagcttcgacccattgggcctcgctactgaccccgaggctttcgcagagttgaaggtgaaggagctcaagaacggaaggttggctatgttctctatgtttggattcttcgttcaagccatcgtcaccggaaagggacctttggagaacctcgccgaccatttggccgacccagtcaacaacaacgcttgggccttcgccaccaacttcgtccccggaaagtgagcggctgcttattatgtgaatgagagcagagaaagagagtttgtttgtggtctattctatgtaaatttgtgaactttcctttgtggtatctttgtatagaaatcgaacctctttttctctaactgccttggcgttttatctgaagactcaattgaattg

SEQ ID NO: 83090 - DNA, 439 bp, Arabidopsis thaliana columbia
  unsure (1)..(439): unsure at all n locations
aacaacaaatcttaaacgttttactttgtgctgcactactcaacctcaatggccgcctcaacaatggctctctcctcccctgccttcgccggtaaggccgtcaagctttcccccgcggcatctgaagtccttggaagcggccgtgtgacaatgaggaagactgttgccaagccaaagggcccatcaggcagcccatggtacggntctgaccgtgtcaagtacttgggtccattctctggcgaatcaccgagctaccttaccggagagttccccggagactacggatgggacaccgccggactttcagctgaccccgagacatttcgcaaggaaaccgtgaacttagaagttatccacagcaggttgggccattcctcgggggccctagggttgngtttttccctgagctttttggttggaaacggggtaaagttttggg

SEQ ID NO: 83091 - DNA, 510 bp, Arabidopsis thaliana columbia
ccccccgaccttaacctggaacccttaaaaccgtccgcccgcaacctaaacctttaattaactaaagaagccttttactaactggccccacactctcacccgcaattggccgcctcgaccaatggctctctcctctcctgctttgaccggaaaggccgttaagctatccccggcggcctccgaagtattgtggaacccgcccgaatcacctatgcgcaaagcctccaagcccaccggcccatccggcagcccatggtacggatccgaccgagtcaaagtacttgggtccattctccggtgagcctccgagctacctcactggagaaagttccccggtgattacggggtgggacactgccggtctctatccgccgatcccgagaccttccgttaggaaccgtgagcctagaagtttatccacagcaaatgggccatctgctcgggagccctaggctgcgttttccctgagctattggttaggaacggagtgaagttcgaagaagcggtttg

SEQ ID NO: 83092 - DNA, 432 bp, Arabidopsis thaliana columbia
aacaaatcttaaacgttttactttgtgctgcactactcaacctcaatggccgcctcaacaatggctctctcctcccctgccctccgccggtaaggccgtcaacctttcccccgcggcatctgaagtcctcggaagcggccgtgtgacaatgaggaagactgttgccaagccaaagggcccatcaggcagcccatggtacggatccgaccgtgtcaagtacttgggtccattctctggcgagtcacccgagctaccttaccggagagttccccggagactacggatgggacaccccgccggactttttcagctgaccccgagacattcgcaaggaaccgtgagctagaagttattccacagcaggtgggccattgctcggagccctaggctgcgtctttcctgagcttttggcttgggaacgggtcaagtttg

SEQ ID NO: 83093 - DNA, 823 bp, Arabidopsis thaliana columbia
cgacccacgcgtcagcccaagcgtccgggaagactgtcgccaagccaaagggtccatcaggcagcccatggtacggatctgaccgagtcaagtacttgggtccattctccggcgagcccccgagctaccttaccggtgagttccccggtgactacggatgggacaccgctggtctatccgccgacccagagaccttcgccaggaaccgtgagctagaagttatccacagcagatgggccatgctcggagccctaggctgcgttttccctgagctattggctaggaacggagtgaagttcggagaagcggtttggttcaaggccggttcacagatcttcagcgacggaggattggactacttgggcaacccgagctacgttgagtcacaacgctctgaagtcatctcttagccatttcgggctcgcgcagggttatcctcattgggagctggttgtatcctaaccaccattgaagaaaagctcttgaggatatagctatggcatccattaccccggtggcatttgagaccgatcgggtttgaataccgacccataggcatacgctgaggtgaaggtgaaagagctcaagaacggaagattggctatgttctctatgatgggattcttcgttcaagccatcgtcactggttagggacccatagagaaccttgctgaccatttggccgatccagctaacaacaacgcatgatccttcgccaccaactttgtttccggaaagcgagccaagttttatctgcatttgcttcattctttgctttcggagtgttagaggagaaagagagctttgttagatgtaaaatttg

SEQ ID NO: 83094 - DNA, 567 bp, Arabidopsis thaliana columbia
gccggaattcggtcgccacgcgtcgaatcttaaacgttgccctggaccgactagcgtccgaccgcatatggccgcctcagccaatggctcgtctcctcccctgccttcgaccggaaaggccgtcaagctttccccgcggcctccgaagtccttggaagcggccgtgtgaccatgaggaagactgtccaagccaaagggtccatcaggcagcccatggtacggatctgaccgagtcaagtacttgggtccattctccggcgagcccccgagctaccttaccggagagttccccggtgactacggatgggacaccgccggtctatccgccgaccccgagaccttcgccaggaaccgtgagctagaagttatccacagcagatgggccatgctcggagccctaggctgcgttttccctgagcttttggctaggaacggagtgaagttcggagaagcggtttggttcaaggccggttcacagatcttcagcgacggaggattggactacttgggcaacccgagcttggtccacgctcaaagcatcttaaccatttgggctactcaagttat

SEQ ID NO: 83095 - DNA, 773 bp, Arabidopsis thaliana columbia
tcggagccctaggctgcgtcttccctgagcttttggctagaaacggagtcaagttcggagaggcggtttggttcaaggccggttcacagatcttcagcgatggagggctcgattacttgggaaaccctagcttggttcacgctcagagcattttggccatttgggccacacaagttattttgatgggagccgttgaaggctacagagtcgcaggaaatgggccattgggagaggccgaggacttgctttaccccggtggcagcttcgacccattgggttgggcttcccacccccagagacctttcgcggagttgaaggtgaaggcagctcaagaacggaagattggctatgcttcccctatgtttggattcttcggtcaagccatcgtcactggtaagggaccgatagcagaaccctgctgaccatttggccgatccagtcaacaacaacgcattgggccttcgccaccaactttgttcccggaaagtgagccaagttccatctggttggattttgcctttccttcagtcttttgaattcgagtgagagacatgaggagaaagagtaggtttgtgtttgtggtggttggtagagaccttcagatgttaatttctccaagccttggtatgatttgtccttaatccaaaaactccatggtctcttaaaaaaaaaaaaaaaaaaaaggcggcccccggctaatgaacctctccaccccggaatttaatccgggcccggtcccgccagcggtaccaccttccccatattaattcgaa

SEQ ID NO: 83096 - DNA, 664 bp, Arabidopsis thaliana columbia
  unsure (1)..(664): unsure at all n locations
cgnnnnnnnnnnnnnnnnnnnnnnnnnnnnnnnnnnnnnnnnnnnnnnnnnnnnnnnnnnnnnnnnnnnnnnccacgcgtccgcggacgcgtgggcggacgcgtgggcggagaagcggtttggttcaaggctggttcacagatcttcagcgacggaggattggactacttgggcaacccgagcttggtccacgctcagagcatcttagccatttgggctactcaagtttttctcatgggagctgttgagggctacagagtcgccggagatggtccattgggagaagcagaggacttgctttacccaggtggcagcttcgacccattgggcctcgctactgaccccgaggctttcgcggagttgaaggtgaaggagctcaagaacggaaggttggctatgttctctatgtttggattcttcgttcaggccatcgtcaccggaaagggacccgtggagaacctcgccgaccacttggccgacccagtcaacaaccacgccttgggccttcgccacccaacttcgtcccccggaaagtgagcggctgcttaatnatgtgaattnagagcagagnaagagagttttttttgtgggtctatncaatgnaaattttgttgaactttccctttgtgggatctttnnanaggnaatcgaacntttttttttt

SEQ ID NO: 83097 - DNA, 564 bp, Arabidopsis thaliana columbia
  unsure (1)..(564): unsure at all n locations
gtcacaaccaaaaaaaagaaaacacaaaaacaaagattataatgncttcctcaaccatggctttgtcctcccctgccttcgccggaaaggctgtnaagctgccgcatcaaatgtcctcggaagcggccgtgtgaccatgaggaagactgtcgccaagccaaagggtccatcaggcagcccatggtacggatctaaccgagtcaagtacttgggtccattctccggcgagcccccgagctaccttaccggtgagttccccggtgactacggatgggacaccgctggtctatccgccgacccagagaccttcgccaggaaccgtgagctagaagttatccacagcagatgggccatgtctcggagcccctagggttgcgttttcccctgagcctattgggtcaggaacggagtataagtttcggagaaggcgggttttggttcaaaggccggtttaaaacgtttttaagcgacggcggatttggcccttctttggcaaacccgcggtttggccacggcttagaaggatttttgccattttgggntnttaaantnttcccnatnggn

SEQ ID NO: 83098 - DNA, 620 bp, Arabidopsis thaliana columbia
  unsure (1)..(620): unsure at all n locations
tagggaacttttaaaaatatttaacgtcccttcgccccttccgtaacctcgaatttcggttcgagcctacctgggttcaccctaaaagcattttggccatttggcccacacaagttattttgatgggggcccgttgaaaggctacagaagttcgcaggaaatgggccattgggagaggccgaggacctgcttttaccccggtggcagctttcgacccattgggtttggcctaccgacccagaggcattcgctgagttcgaaggttgaaggagctctagaaacggaagaatgtggctatgttctctatgtttggaattcttcgttcaagccgtcgtccctggtaagggaccgatagagaacgccttgctgaccatttggccgatccagttcacatcatcgcattgggccttcgcctcctactttgttacccaggctagtgagccaagttttatctgtatttggcttcagtctttgcttcgtgagtgtgagaggagaaagagagcttgtttagatgtaaaatttgcaagactttgtatttttttcattaagcggccgcgaattcttgcagcgcgggggatcctctagtaagagagcggccgcctccncggtgcagctccagc

SEQ ID NO: 83099 - DNA, 595 bp, Arabidopsis thaliana columbia
  unsure (1)..(595): unsure at all n locations
ccggccggaatcccgggcgaccacgcgtccgaacaccaaatcttaaacgttttactttgtgctgcactactcaacctcaatggccgcctcaacaatggctctctcctcccctgccttcgccggtaaggccgtcaagctttcccccgcggcatctgaagtccttggaagcggccgtgtgacaatgaggaagactgttgccaagccaaagggcccatcaggcagcccatggtacggatctgaccgtgtcaagtacttgggtccattctctggcgaatcaccgagctaccttaccggagagttccccggagactacggatgggacaccgccggactttcagctgtccccgtgacattcgctaggaacccgggcccttgaagttatccacagcaggtgggccacgttcggagccctaggcttcgnnttcccntaantttttggctagaaacgggtcaaagttcggnaaggcggtttggttaaaggccggtttaaanntttttancgttnnngggtcnttnttttgggaaccccaggtttgttcacgntanngattttggcanttggcccanaaantttttttattgggccnttaaggtt

SEQ ID NO: 83100 - DNA, 588 bp, Arabidopsis thaliana columbia
  unsure (1)..(588): unsure at all n locations
cagctctctacgactcactattgggaaagctggcacgcctgcaggtaccggtccggaattcccgggtcgacccacgcgtccgcccacccgccccgccgccggcgagaagacgacagaagggcataaaaaaaaaaaacccacaaaaaagtttcaatggccgcctcaacaatggctctctcctcccctgctttccgccggaaaggctgtgaaccctttcccctgcggcatcagaagtccttggaagcggccgtgtgacaatgaggaagactgttgccaagccaaagggtccatcaggcagcccatggtacggatccgaccgagtcaagtacttgggtccattctctggcgagtcaccccagctaccttaccggagagttccctggagactacggatgggacacacagctggtctatatccgctgaccccgagacattcgcaaggaaccgtgagctagaagttatccacagcaggtgggccattgctcgggagccctaggctgcgtctttccctaagtttttggcccaggaacggagtcaaaggttggtgggggggaattttgttcaaaggttggttnaaaatttttnaag

SEQ ID NO: 83101 - DNA, 645 bp, Arabidopsis thaliana columbia
  unsure (1)..(645): unsure at all n locations
aggtgacactatagaagagctatgacgtcgcatgcacgcgtacgtaagctcggaattcggctcaccaaaaaaaagaaaacacaaaaacaaagattataatggcttcctcaaccatggctttgtcctcccctgccttcgccggaaaggctgtgaagcctgccgcatcagatgtcctcggaagcggccgtgtgaccatgaggaagactgtcgccaagccaaagggtccatcaggcagcccatggtacggatctgaccgagtcaagtacttgggtccattctccggcgagcccccgagctaccttaccggtgagttccccggtgactacggatgggacaccgctggtctatccgccgacccagagaccttcgccaggaaccgtgagctagaagttatccacagcagatgggccatgctcggagccctaggctgcgttttccctgagctattggctaggaacggagtgaagttcggagaagcggtttgggttcaaggccggttcacagatcttcagcgacggaggattggactacttgggaaacccgagcttggtccacgctcagggcatctatagattttgcanttnggaannaagntcccatgggggtntaaggaaantncgaatggcatggnaaaangttntncca

SEQ ID NO: 83102 - DNA, 771 bp, Arabidopsis thaliana columbia
gctgtggataacttctagttcacggttccttgcgaatgtctcggggccctaggctgcgtcttccctgagcttttggctagaaacggagtcaagttcggagaggcggtttggttcaaggccggttcacagatcttcagcgatggagggctcgattacttgggaaaccctagcttggttcacgctcagagcattttggccatttgggccacacaagttattttgatgggagccgttgagggctaccaggagttcccagcaaaggggcccattgggagaggctcgagggacttgcttttcccccgggtggcaggctttcgaccccattgggtttggcgtcccaccccccaaaggcattctctttagtttaaggggaaggaggtccaaacacgcgacgaaaggccatgttcctccatgtttggattttttgttccagcccttgtccctggtaagggcccgatagagacccctgctgcccctttggccgatccagttaaccacaacgcatgggccttcccccccaactttgttcccccgaaagtgaaacaagttttatctgaattttgcttcagtctttgcttcgtgagtgtgagaggagaaagagagcttgtttaaatgtaaaatttgcaagccctttgtatttttttcattaatcaaataactcgtttttctctcccaaaagaaaaaaggaccaaccccaaagagcgaccgctctagaggatccaagcttacgtacgcgtgcgatgcgacgtcatagtcttctagagtgcacct

SEQ ID NO: 83103 - DNA, 1099 bp, Arabidopsis thaliana columbia
  unsure (1)..(1099): unsure at all n locations
actgccaggtactaatacgactcacgttaggggaagcacgtacgcctgcaggtaccggtccggaattcccgggtcgacccacgcgtccgtgaagtccttggaagcggccgtgtgacaatgaggaagactgttgccaagccaaagggcccatcaggcagcccatggtacggatctgaccgtgtcaagtacttgggtccattctctggcgaatcaccgagctaccttaccggagagttccccggagactacggatgggacaccgccggactttcagctgaccccgagacattcgcaaggaaccgtgaactagaagttatccacagcaggtgggccatgctcggagccctaggctgcgtcttccctgagcttttggctagaaacggagtcaagttcggagaggcggtttggttcaaggccggttcacagatcttcagcgatggagggctcgattacttgggaaaccctagcttggttcacgctcagagcattttggctaataaggcacggccagcaaaagtcaaagaggaaggcgacactccggctgcagatgcaaatgatgctgtcactattccacggcctattcctactattccacctcctcccggtcggcgtactttaccttctgagttgatccctgatgaaaatacaaagaatgctcctaggtatgacggggtgatatttgaagctctctctgctttagccgatggtaatggatctgatgtcagttccatttatcatttcattgagcccaggcatgaagtaccgccaaattttagaagaatccttagtacaagactgaggaggcttgcagctcagagcaaacttgcccacgcgtccgcggacgcgtgggcctttgccaccaactttgttcccggaaagtgagccaagttctatctgtttgtaatttacttttctttcaatcttttgaattcgagtgagagacaggaggagaaagagtaggtttgtgtttgtggtggatggtagagactttcagatgtaaatttgcaaagactttgtatgatttgtcattaatcaaataactcattgttctctnnnnnnnnnnnnnnnnnnnnnnnnnnnnnnnnnnnnnnnnnnnnnn

SEQ ID NO: 83104 - DNA, 1111 bp, Arabidopsis thaliana columbia
  unsure (1)..(1111): unsure at all n locations
tcgaacaaacaattctaaatccccaaaaaaaatctatgactagccaatagcaacctcagagattgatatttcaagataagacagtatttagatttctgtattatatatagcgaaaatcgcatcaataccaaaccacccatttcttggcttacaacaacaaatcttaaacgttttactttgtgctgcactactcaacctcaatggccgcctcaacaatggctctctcctcccctgccttcgccggtaaggccgtcaagctttcccccgcggcatctgaagtccttggaagcggccgtgtgacaatgaggaagactgttgccaagccaaagggcccatcaggcagcccatggtacggatctgaccgtgtcaagtacttgggtccattctctggcgaatcaccgagctaccttaccggagagttctcccggagactacggatgggacaccgtcggactttcagctgaccccgagacattcgcatggaaccgtgtactcttcgtgttcacggctcctggcccatgcctcggagccctaggctgcgtcttccctgagcttttggctaggaaccggagtctatgttcggagaggcggtttggttcaaggccggttcacagatcttcagcgacggagggctcgactacttgggcaacccgtagccttggtccacgctcagagcatcttaggccatttgggccactcaagttatcctcatgggagcctgttgaaggctacagagtcgccggaagatgggccattgggagaagcccgaggacttgctttaccccaggtggcagcttcgacccattgggtcctcgctacctgaccccgaggctttccgctgagtttgaaggtgaaggagctcaagaacggaaaggtttggctnatgntccccnatgntttggattctttcgttnaaagccatcgtnaaccggaaaagggacccttttgnagaaaccttggcgaccattttggccgacccagntaaanaaaaacgtttgggcctttggcacaaatttgtcccccgaaaantaagcgcttttntnttnnaattanggccannaaaaaagattttttttggcctttttnnaaattggnacttccttgggnnttt

SEQ ID NO: 83105 - DNA, 692 bp, Arabidopsis thaliana columbia
  unsure (1)..(692): unsure at all n locations
cacactctacctgagctatgacaccgcatgcacgcgtacgtaagctcggaattcttttcgagcctggctgagctcacgctcagagcattttggccatttgggccacacaagttatttttgatgggaagccggagaaagctacagagtcgcaggaaatgggccattgggagaggccgaggacttgctttaccccggaggcagctttttcccattggggggggctaccgacccagaggcattcgctgagttgaaaggtgaaggagctcaagaacggaagagattggctatggtctctaggtttgggattcttcgttcaagccatcggcactggggaagggaccgatagaagaaccttgctgaccatttggccgatccagttaacaacaacgcatgggcattcgcccaccaactttgttccccggaaagtgagccaagttttatctgtattttgcttcagtctttgcttcgtgagtgccagaggagaaagagagcttgtttgagaaattgaacacccaggctttgtatttttttcattaatcaaagaactcgtttttctctcaaggatcaccaacaaaaaaaaatgtgtggaacaaaggnnnnnnnnnnnnnnnnnnnnnnnnnnnnnnnnnnnnnnnnnnnnnnnnnnnnnnnnnnnnnnnnnnnnnnnnnnnnnnnnnnnnnnnnnnnnnnng

SEQ ID NO: 83106 - DNA, 1089 bp, Arabidopsis thaliana columbia
  unsure (1)..(1089): unsure at all n locations
acgccggcagcgtgaccgtacggtactggccgggatcgacgcgtccgcaaaaagaaggaaagcacaaaaacaaagattattttgtcttcctcaaccatggctttgtcctcccctgccttcgccggaaaggctgtgaagcctgccgcatcagatgtcctcggaagcggccgtgtgaccatgaggaagactgtcgccaagccaaagggtccatcaggcagcccatggtacggatctgaccgagtcaagtacttgggtccattctccggcgagcccccgagctaccttaccggtgagttccccggtgactacggatgggacaccgctggtctatccgccgacccagagaccttcgccaggaaccgtgagctagaagttatccacagcagatgggccatgctcggagccctaggctgcgttttccctgagctattggctaggaacggaatgaagttaatcggagacgcgggttggttcaagggccggtccacaatgttctttaccgccgaggattgccttcttgggcacccnngnttggncacgctcaganatcttaccatttgggcactcaagttaacctccatgggagctgttgaaggctacaggagtcgccggagatggtccattgggagaagcagaggacttgctttacccaggtggcagcttcgacccattgggcctcgctactgaccccgaggcttttcgcagagttgaaggtgaaggagctcaagaacggaaggttggctatgttctctatgtttggattcttcgttcaagccatcgtcaccggaaagggacctttggagaacctcgccgaccatttggccgacccagtcaacaacaacgcttgggccttcgccaccaacttcgtccccggaaagtgagagtgagcggctgcttattatgtgaatgagagcagagaaagagagtttgtttgtggtctattctatgtaaatttgtgaactttcctttgtgggatctttgtataaaatcgaccttttttctctaaaaaaaaaaaaaaaaaaaanaaaggcgccgctctagaggtccaagcttacgacgcgtgcagcgacgtcaagttttaatgtcact

SEQ ID NO: 83107 - DNA, 848 bp, Arabidopsis thaliana columbia
  unsure (1)..(848): unsure at all n locations
caaatnttaaacgttttactttgtgctgcactactcaacctcaatggccgcctcaacaatggctctctcctcccctgccttcgccggtaaggccgtcaagctttcccccgcggcatctgaagtccttggaagcggccgtgtgacaatnaggaagactgttgccaagccaaagggcccatcaggcagcccatggtacggatctgaccgtgtcaagtacttgggtccattctctggcgaatcaccgagctaccttaccggagagttccccggagactacgggatgggacaccgccggactttcagcttgaccccgagacattcgcaaggaaccgtgagctagaagttatncacagncaggtgggcaattgttcggaggncctaggttgcggttttncctgaggtttttggctaaggaacggagtcaannttnggagaggcggccttggtccaaagccggttcaccagatttttatgcgattggagggcttcgattactttgggagaccctaggtctctggtccacgctgagggcatttttggccatttgggcccactcaagttatcttgatgggagctgttgaaggctacagagtcgcaggaaatgggccgttgggagaggccgaggacttgctttaccccggtggcagcttcgacccattgggtcttgctaccgacccagaggctttcgcggagttgaaggtgaaggagctcaagaacggaagattggctttntttcttttgtttcttccttttctctcctttttttttgctttctctgttttttttgtgtgtttttttctctcttcttttcttttcaatgcattggttttgtttttatatttcctcta

SEQ ID NO: 83108 - DNA, 578 bp, Arabidopsis thaliana columbia
  unsure (1)..(578): unsure at all n locations
tcgtgggacgacacaagactctacagtgagtctcattgccggttccccagatcttcagcgatggagggctccgattacttgggaaaccctagccttggttcacgctcagagccattttggccatttgggccacacaagttattttgattgggagccgttgaaggctacagagtcgcaggaaatgggccattgggagaggccgaggacttgctttaccccggtggcagcttcgacccattgggtttggctaccgacccagaggcattcgctgagttgaaggtgaaggagctcaagaacggaagattggctatgttctctatgtttggattcttcgttcaagccatcgtcactcggtaagggaccgatacagaaccttgctgaccatttggccgatccagttaacaacaaacgcatgggccttcggccaccaactttgtttcccggaaagtgagcaagntttatctgaattttncttaaggcttttgcttcggnnagttttnnangggaaaaaanggcttttttanggnnaaaatttnaaagctttnantttttttcnataancaaaaaccgggtttttt

SEQ ID NO: 83109 - DNA, 1072 bp, Arabidopsis thaliana columbia
  unsure (1)..(1072): unsure at all n locations
taggtgacactatagaagaactatgacgtcgcacgcacgcctacgtaagctcggaattcggctcgagattaactaaagagccttttacttgcgccacactctcaccgcaatggccgcctcgacaatggctctctcctctcctgctttgaccggaaaggccgttaagctatccccggcggcctccgaagtatttggaaccggccgaatcaccatgcgcaaagcctccaagcccaccggtccatccggcagcccatggtacggatccgaccgagtcaagtacttgggtccattctccggtgagcctccgagctacctcactggagagttccccggtgattacgggtgggacactgccggtctatccgccgatcccgagaccttcgctaggaaccgtgagctagaagttatccacagcagatggggccatgctccggaggccctaggctggcgtttttccctgaggctattgggctaggaccggagtgaagttcggagaaaccggttttggttcaaggctggttcaaaaatttttttagaggcggggggggttgggctaattttggggaacccaggttttgtgcacggtcagaggcattttaggccatttgggccaactacaagttattctaattgggagcctgttgagggctacagagttcccaggaaatgggcctattgggagaggccgagggacttgcttttaccccagggtggcagctttcgacccattgggtttggctaccgacccagaggcattcgctgagttgaaggtgaaggagctcaagaacggaagattggctatgttctctatgtttggattcttcgttcaagccatcgtcactggtaagggaccgatagagaaccttgctgaccatttggccgatccagttaacaacaacgcatgggccttcgncaccaactttgttccccggaaagtgaggccaagntttatctgtaattttgcttcaggctttgctttcgtnagttttagagggggaaanagggtttntttagnntgnaaaatttcaaggntttgnaattttttaattaaccaaaaaacngggttttcttt

SEQ ID NO: 83110 - DNA, 650 bp, Arabidopsis thaliana columbia
  unsure (1)..(650): unsure at all n locations
gntagngccatntgncccnagntcgttncctagtttgnttaaccgatnantcgaaancgttgttaagccgttacaatcttcancatggaggcngattcttggaaccctagcttgttcacgctcagagcattttgccatttggccacacaagtttattttgatgggacccgttgaaggctacaagagtcgcaggaaatgggccattgggagagcccgaggacttgctttaccccggtggcagcttcgaccccattgggtttggcttccgacccagaggcattcgctgagttgaaggtcaaggagctcaagaacggaagattggctatgttctctacgtttgggattcgtcgttcaagccatcgtccctggtaagggtccgatagagaaccttgctcgaccctttggccgatccagttaaccacaacgcatgggccttcgcccccaactttgttcccggaaagtgagcccagttttatctgtcctttgcttcagtctttgcttcgtgagtgtgtgtcaggaggagaaagagagcttgtttagatggtaaaattatatggccagccgttgcattttttttcattattcttccccctcgtttataaatcaaatctttttttaaaaaaaaaaaaaaaaaaaaaaaaagggcggcc

SEQ ID NO: 83111 - DNA, 714 bp, Arabidopsis thaliana columbia
ccaagcactatacgactcactaagggaaagccggtacgcctgcaggtaccggtccggaattcccgggacccatttcttggcttacaacaacaaatcttaaacgttttactttgtgctgcactactcaacctcaatggccgcctcaacaatggctctctcctcccctgccttcgccggtaaggccgtcaagctttcccccgcggcatctgaagtccttggaagcggccgtgtgacaatgaggaagactgttgccaagccaaagggcccatcaggcagcccatggtacggatctgaccgtgtcaagtacttgggtccattctctggcgaatcaccgagctaccttaccggagagttccccggagactacggatgggacaccgccggactttcagctgaccccgagacattcgcaaggaaccgtgaactagaagttatccacagcaggtgggccatgctcggagccctaggctgcgtcttccctgagcttttggctagaaacggagtcaagttcggagaggcggtttggttcaaggccggtttaaaatgttctttaagcgattggaggggtcgtttactttgggaaaccctagctttggtttacggtcagaggattttggccatttgggccactcaagttatcttgatgggagctgttgaaggctacagagtctcaggaaatgggccgtaggaagaggccgaggacttgtttaaccc

SEQ ID NO: 83112 - DNA, 1203 bp, Arabidopsis thaliana columbia
  unsure (1)..(1203): unsure at all n locations
nnnnnnnnnnnnnnnnnatgannnnnnnnnnnnnnnnnnnnnnnnnnnnnnnnnnnnnnnnnnnnnnnnnnnnnnnnccacgcgtccgcccacgcgtccccccgcgcccccgaaaaaagaaaacacaaaaacaaagattataatggcttcctcaaccatggctttgtcctcccctgccttcgccggaaaggctgtgaagcctgccgcatcagatgtcctcggaagcggccgtgtgaccatgaggaagactgtcgccaagccaaagggtccatcaggcagcccatggtacggatctgaccgagtcaagtacttgggtccattctccggcgagcccccgagctaccttaccggtgagttccccggtgactacggatgggacaccgctggtctatccgccgacccagagaccttcgccaggaaccgtgagctagaagttatccacagcagatgggccatgctcggagccctaggctgcgttttccctgacctattggctaggaacggagtgaagttcggagaagcggtttggttcaaggccggttcacagatcttcagcgacggaggattggactacttgggcaacccgagcttggtccacgctcagagcatcttagccatttgggctactcaagttatcctcatgggagctgttgaaggctacagagtcgccggagatggtccattgggagaagcagaggacttgctttacccaggtggcagcttcgacccattgggcctcgctacctgacccccaggctttccgcagagttgaaaggtgaaggagctcaagaaacggaaggttggctatgttctcctaggtttggattcttcgttcaacccatcgtcaccggaaagggaccttttggagaacctcgccgacccatttggccgacccagtcaacaacaaacgcttgggccttcggccaccaacttcgtccccggaaagtgagcggctgcttattatgtgaatcgacccagcagagaaagacagtttgtgttggtggtctatcctatgtaaaatttgtgaacttcccctgtgggatctgtgtctttgtatagaaatcgaacctctttttctctaactgtgttggcgttttatctgaagactcaattgaattgaaaaaaaaaaaaaaaaagcgcggccgctatagaggatccaagcttacgtacgcgtgcatgggacgtcatagtaattctagaggt

SEQ ID NO: 83113 - DNA, 611 bp, Arabidopsis thaliana columbia
  unsure (1)..(611): unsure at all n locations
caacaacaaatcttaaacgttttactttgtgctgcactactcaacctcaatggccgcctcaacaatggctctctcctcccctgccttcgccggtaaggcgtcaagctttcccccgcggcatctgaagtccttggaagcggccgtgtgacaatgaggaagactgttgccaagccaaagggcccatcaggcagcccatggtacggatctgaccgtgtcaagtacttgggtccattctctggcgaatcaccgagctaccttaccggagagttctcccggagactacggatgggacaacgccggactttccagctgaccccgcagacaattcgcaaggaaccggtgacctggaagtttatccacaagcaaggtggggcccatgtcttgggggcctaggatgcggttttccctgagctttttggctaggaacggagtcaagtttggagaggcggtttngttaaggccgttanaanttttnagcgattgagggntcgttactttggaacctaggttagtnanggtaaaggattttgcatttggccaaagttttttattgnncgttaggnnangngagaatggcnttgnngccggttttnccgngaatttccctgggc

SEQ ID NO: 83114 - DNA, 961 bp, Arabidopsis thaliana columbia
  unsure (1)..(961): unsure at all n locations
cccgcccaccaacaacaaatcttaaacgttttactttgtgctgcactactcaacctcaatggccgcctcaacaatggctctctcctcccctgccttcgccggtaaggccgtcaagctttcccccgcggcatctgaagtccttggaagcggccgtgtgacaatgaggaagactgttgccaagccaaagggcccatcaggcagcccatggtacggatctgaccgtgtcaagtacttgggtccattctctggcgaatcaccgagctaccttaccggagagttccccggagactacggatgggacaccgccggactttcagctgaccccgagacattcgcaaggaaccgtgaactagaagttatccacagcaggtgggccatgctcggagccctaggctgcgtcttccctgagcttttggctagaaacggagtcaagttcggagaggcggtttggttcaaggccggtttaaaatgtttttaagcgattggaggggttcgtttactttgggaaccctaggtttggttacggttagaggattttgccatttgggccaaaagtttttttattggggccgttaaggttaaagtcgagaattggccttgggggccgagggacttgctttcccccgaggtggcagcttcgacccattgggcctcgctactgaccccgaggctttcgcagagttgaaaggtgaaggagctcaagaaacggaaagggttggctaatggttccccnatgtttggattccttccgttcaaagccaatcggcaaccgggaaaaggnaccttttggaagaacctcggccnacaatttgggccgacccaagtcaacaacaacgnctttgggcctttggcaaccaactttggncccggaaagtgaccggntggttattnatgngaaatngnnccganaaaaaantttcggccgnaatntngnccngggaanaatcttnccnaggtncgt

SEQ ID NO: 83115 - DNA, 1127 bp, Arabidopsis thaliana columbia
cccactctagggttagttggtacgcctgcaggtaccggtccggaattcccgggtcgacccacgcgtccgtcacatcttattaactaaagagccttttacttgcgccacactctcaccgcaatggccgcctcgacaatggctctctcctctcctgctttgaccggaaaggccgttaagctatccccggcggcctccgaagtatttggaaccggccgaatcaccatgcgcaaagcctccaagcccaccggtccatccggcagcccatggtacggatccgaccgagtcaagtacttgggtccattctccggtgagcctccgagctacctcactggagagttccccggtgattacgggtgggacactgccggtctatccgccgatcccgagaccttcgctaggaaccgtgagctagaagttatccacagcagatgggccatgctcggagccctaggctgcgttttccctgagcttttggctaggaacggagtgaagttcggaaaaggcggttttggttcaaggctggttcaaagattttcagggccggagggtttgggactacttgggcaacccgagctttggccacgctcaaagcatcttagccatttgggctactcaagttatcctcatgggagctgttgagggctacagagtccccccggaggatggtccattggggagaagcgccgaggactttgctttaccccaaggtgggcagccttcgacccattgggcccccctgcttgaccccgaggctttcgcaaagttgaaggtaaaggagctcaagaacggaaggtgggatatgttctctatgtttggattattcgttcaagccatcgtcaccggaaagggacctttggagaacctcgcggaccatttgtccgacccagtcaacaacaacgcgtgggccttcgccaccaacttcgtccccgaaaagtgagcggcggcgtgagatgtgaatgagagcagaaaaagagagtttgtttgtggtgctattctatgtgaatttgtgaactttcctttgtgggatctttgaatagaaatggagcctctttttgtctagaggaaatagaaaagataagaaaaaaaaggtcggccgcctagaggatccaagcttacgaggcgtgctg

SEQ ID NO: 83116 - DNA, 1174 bp, Arabidopsis thaliana columbia
  unsure (1)..(1174): unsure at all n locations
nnnnnnnnnnnnnnnnnnnnnnnnnnnnnnnnnnnnnnnnnnnnnnnnnnnnncctgcacgtaccggtccggaattcccggcacacgcaagttagtcataaaaaaaaaaaaaacacaaaaaagtttcaatggccgcctcaacaatggctctctcctcccctgctttcgccggaaaggctgtgaacctttcccctgcggcatcagaagtccttggaagcggccgtgtgacaatgaggaagactgttgccaagccaaagggtccatcaggcagcccatggtacggatccgaccgagtcaagtacttgggtccattctctggcgagtcacccagctaccttaccggagagttccctggagactacggatgggacacagctggtctatccgctgaccccgagacattcgcaaggaaccgtgagctagaagttatccacagcaggtgggccatgctcggagccctaggctgcgtcttccctgagcttttggctaggaacggagtcaagttcggagaggcggtttggttcaaggccggttcacagatctttagcgatggagggctcgattacttgggaaaccctagcttggtccacgctcagagcatcttagccatttgggctactcaagttatcctcatgggagctgttgaaggctacagagtcgccggagatggtccattgggagaagcagaggacttgctttacccaggtggcagcttcgacccattgggcctcgctactgaccccgaggctttcgcagagttgaaggtgaaggagctcaagaacggaaggttggctatgttctctatgtttggattcttcgttcaagccatcgtcaccggaaagggacctttggagaacctcgccgaccatttggccgacccagtcaacaacaacgcttgggccttcgccaccaacttcgtccccggaaagtgagcggctgcttattatgtgaatgagagcagagaaagagagtttgtttgtggtctattctatgtaaatttgtgaactttcctttgtggtatctttgtatagaaatcgaacctctttttctctaaaaaaaaaaaaaaaaaaaaaaaaaagggcggccgctctagaggatccaagcttacgtacgcgtgcatgcgacgtcatagctctaacagagtgtcnnnnnntagaaatcgnnnnnnnnnnnn

SEQ ID NO: 83117 - DNA, 1064 bp, Arabidopsis thaliana columbia
  unsure (1)..(1064): unsure at all n locations
aggggaggagagagccattgttgaggcggccattgaggttgagtagtgcagctttcccccgcggcatctgaagtccttggaagcggccgtgtgacaatgaggaagactgttgccaagccaaagggcccatcaggcagcccatggtacggatctgaccgtgtcaagtacttgggtccattctctggcgcgtctccccgtcctcccttaccggagagttccccggagactacggatgggacaccgccggactttcagctgaccccgagacattcgcaaggaaccgtgagctagaagttatccacagcaggtgggccatgctcggagccctaggctgcgtcttccctgagcttttggctagaaacggagtcaagttcggagaggcggtttggttcaaggccggttcacagatcttcagcgatggagggctcgattacttgggaaaccctagcttggttcacgctcagagcattttggccatttgggccacacaagttattttgatgggagccgttgaaggctacagagtcgcaggaaatgggccattgggagaggccgaggacttgctttaccccggtggcagcttcgacccattgggtttggctaccgacccagaggcattcgctgagttgaaggtgaaggagctcaagaacggaagattggctatgttctctatgtttggattcttcgttcaagccatcgtcactggtaagggaccgatagagaaccttgctgaccatttggccgatccagttaacaacaacgcatgggccttcgccaccaactttgttcccggaaagtgagccaagttttatctgtattttgcttcagtctttgcttcgtgagtgtgagaggagaaagagagcttgtttagatgtaaaatttgcaagactttgtatttttttcattaatcaaataactcgtttttctctccaaaaaaaaaaaaaaaaaaaaaaaaaaaaaaaaaaagaataaaaaaaaagggcgaccgctctagaggatccaagcttacgtacgcgtgcgtcgacgtcnnnctannnnnnnnnnnnnnnnnnnnnnnnnnnnnn

SEQ ID NO: 83118 - DNA, 1157 bp, Arabidopsis thaliana columbia
  unsure (1)..(1157): unsure at all n locations
actatagggacagctggtacgcctgcaggtaccggtccggaattcccgggtggacccacgcgtccgcccacgcgtccgcccccggcgtcccaaaaaaaagaaaacacaaaaacaaagattataatggcttcctcaaccatggctttgtcctcccctgccttcgccggaaaggctgtgaagcctgccgcatcagatgtcctcggaagcggccgtgtgaccatgaggaagactgtcgccaagccaaagggtccatcaggcagcccatggtacggatctgaccgagtcaagtacttgggtccattctccggcgagcccccgagctaccttaccggtgagttccccggtgactacggatgggacaccgctggtctatccgccgacccagagaccttcgccaggaaccgtgagctagaagttatccacagcagatgggccatgctcggagccctaggctgcgttttccctgagctattggctaggaacggagtgaagttcggagaagcggtttggttcaaggccggttcacagatcttcagcgacggaggatttggattacttgggaaaccctagcttggtccacgctcagagcattttagccatttgggctcacacaagttatcctcatgggagctgttgaaggctaaagagtcgccggaaatggtccattgggaaaagcagaggacttgctttacccaggtgggagcttcgacccattgggcctcgctactgaccccgaggctttcgcggagttgaaggtgaaggagctcaagaacggaaggttggctatgttctctatgtttggattcttcgttcaggccattgtcaccggaaagggaccgttggagaacctcgcggaccacttggctgatccagtcaacaacaatgcatgggccttcgctaccaacttcgtccccggaaagtgagtttaatttgtgatcgagttgtgtgtatccggtttgttgcatcttggaaatgtgatgcagatttcatatcttgtaaattactttgtatgtgtgtgaaatatttaagaagctttatgatattgatggatcagtcacttactcttaaaaannnnnnnnnnnnnnnnnnnnnnnnnnnnnnnnnnnnnnnnnnnnnnnnnnnnnnnnnnnnnnnnnnnnnnnnnnnnnnnnnnnnng

SEQ ID NO: 83119 - DNA, 1140 bp, Arabidopsis thaliana columbia
caccggaccttccgggtcgacccacgcgtccgccgtcatcacatcttattaactaaagagccttttacttgcgccacactctcaccgcaatggccgcctcgacaatggctctctcctctcctgctttgaccggaaaggccgttaagctatccccggcggcctccgaagtatttggaaccggccgaatcaccatgcgcaaagcctccaagcccaccggtccatccggcagcccatggtacggatccgaccgagtcaagtacttgggtccattctccggtgagcctccgagctacctcactggagagttccccggtgattacgggtgggacactgccggtctatccgccgatcccgagaccttcgctaggaaccgtgagctagaagttatccacagcaggtgggccatgctcggagccctaggctgcgtcttccctgagcttttggctaggaacggagtcaagttcggagaggcggtttggttcaaggccggttcacagatcttcagcgatggagggctcgattacttgggaaaccctagcttggttcacgctcagagcattttggccatttgggccacacaagttattttgatgggagccgttgaaggctacagagtcgcaggaaatgggccattgggagaggccgaggacttgctttaccccggtggcagcttcgacccattgggtttggctaccgacccagaggcattcgctgagttgaaggtgaaggagctcaagaacggaagattggctatgttctctatgtttggattcttcgttcaagccatcgtcactggtaagggaccgatagagaaccttgctgaccatttggccgatccagtcaacaacaacgcatgggccttcgccaccaactttgttcccggaaagtgagccaagttttatcagtttgtattttgcttttctttcagtcttttgaattcgagtgagagacatgaggagaaagagaaggttgtatgtgatggtttgagactttcagatgtaaatttgcaagactttgtatgatttgtcattaatcaaactcaattttctctaaaaaaaaaaaaagataaaaaaaaaaagggcggccgctctagaggatccaagcttacgtacgcgtgcatgcgacgtcatgcttgtttat

SEQ ID NO: 83120 - DNA, 529 bp, Arabidopsis thaliana columbia
cgaagacttgataaaagcttgagcattgcgaggagtcggcatgactgtgcaaggagttctgaaggtgcagagaatatagaagagctagagatgttgctggaagcttactttgtcgtcattgatagtactctaaacaagttgacatcgttaaaggagtacattgatgacactgaagatttcattaacattcaactggataatgtgcggaatcagctgatcgagttcgagttgcttctgacgactgcaacgtttgttgtagccatatttggggtcgttgctgggatctttgggatgaactttgagatagacttcttcaatcagccaggtgcattcagatgggtactcataattactggagtatgtggctttgtgatattttcggcattcgtctggttcttcaagtacagaagactcatgcctctataagaagagagacatgaatgtgctccccagaaagtagacaccaacttatattgttatgttgcttacagatattaatgatttgtttcctttacacaatggaatcttg

SEQ ID NO: 83121 - DNA, 682 bp, Arabidopsis thaliana columbia
agatttgatttggatctttggggcgtctaggaacatcttggagtctgcatagtaacaaacattgggcagggtaataaaatcgggatttgtacacgcagacacgttttaaaccgcttatattagccagacagagcaagctaggaagcatacgactacaaagccaagtgtatgcgtatgagaaacatgtgttgaccatatatgttagcttgttctttagcagctgaactgatctcgctttgtccggacaagttccagcggtaatctctccagcgccatccatagtcttggagctgttggatcagacttgggttgggctttggctagcttcgatttgaaacttatggtgatgcataccttgaattccactgagaagggacctgcgaaaacggaaggacacattaaaagccgaggtagtaaaacgtaaatgggtagagtcatgttacggcacacatctccatccgcaatctgtgtagactgaatcaaagaggtcccagtgacaatcctttcccctacaattatcgactcgactcggagtaggtgaatgtcaatagaagtaataggaactgaagatgcttccactgttaactcaccactgagtggatcctgcaaagagcattgggtggctaattttccagtaactcggaaaccacctgtcttaatatcaggcagcaacggatgtctc

SEQ ID NO: 83122 - DNA, 558 bp, Arabidopsis thaliana columbia
  unsure (1)..(558): unsure at all n locations
gccagtttcttcctaatacaatgagactttgagtccaattcaaaaactgtacactaaaacacacaaaagagagttcctttcttcaccaggagtaatgccggaaccttctccgactcgttctcctaaaaggtttacaagcaagaatgctaagatcaacagctgcagcaagtgccatgaaaatggctgcatcttccacacaagttacatgtctcatagctaattgtacaacgggcttgctgcttttcccttccccttgcactctcgagctcattacaaacccacctccagagacacactgtcccaaccctgagaagtctccactactctgcggggcttggaattggtgtagctgcaacttttcagcatctgtttatcccgggtcgattaaaaattccccacctttctcagcgctgatgagggtttcagacattaaaacatttgcaacttctggcccgtttgagaggtggttttttaaccacggggtttttgtnccgggttcccgccangttnggggtttcccatgggttccacctttttgcgggtggcaagccgncnagc

SEQ ID NO: 83123 - DNA, 461 bp, Arabidopsis thaliana columbia
ggtaaaaacccgggtgataaagaacaacttgaatcctgtgtggtatgagacgctaatgctttcgatacccgagcccatgcctcctctcaaagtgctagtgtacgacaaggatacattctcgacagatgatttcatgggagaggcagagatagacatacaaccattggtgagtgcagcaaaagcatacgagacatcgagcataaaggaaccgatgcagctgggaagttgggtggcgagcaaagagaaccacattggtgagtgatggcataatcttacttgaagacgggaaagtgaaacaagacatttcacttaggctacaaaatgttgaaagaggtgttcttgagatccagcttgaatgtcttcctctcactcaatgatgatactttcttcttcatccctcttctttttttttttctttaaaagatttatttctaaaaataaaatgaagaaaagatgctgct

SEQ ID NO: 83124 - DNA, 647 bp, Arabidopsis thaliana columbia
cgccatcaaccgggctccttctaaaggagctcatatgcctccaaatgtcccaaaggatcatgaaagcttcagtgctcgtgtcctagtaactttcatggcttttgtgatggcgattctcacattcttccgtacagtatcaaaccgtgttgtgaccaagcagcttccaccgcctcctagccaaccgcaaattgaaggaagcgctgctgcagaggaagctgatctcctcaattcagtgctgaagaaattaaccgaacttgaggagaaaattggagcgctccagtcaaagccatctgagatgccttatgagaaagaggaactgcttaatgcagctgtctgccgtgtagacgcccttgaagctgagctcatagccactaagaaggctctttatgaagctctgatgagacaagaagaattactcgcttacattgaccgtcaagaggcagctcagcaccagaagaagaataagaggaagcaaatgttctgtttctagaagatgaagaagaagaatcaaatgtttgtttctagaagaagaagaagaagaagaggcatctctgctttctctctctcccttgtaggtttccattgaaacagaacaactctcatctcattttatgttaaaagctaatcagttctttctcttttatgat

SEQ ID NO: 83125 - DNA, 534 bp, Arabidopsis thaliana columbia
  unsure (1)..(534): unsure at all n locations
tgcacgcctacangtaccggtccggaattccgggtctgaccacgcgtccgcaccacgcgttcggtgggaggcaaaagaaagccgataaagacagtggacaatctcacatccaagatagatttcatgaagttcaaccatgatgctcagattctagctatagtctctacaatgaacaaaaacagtgtaaagctagtccatgttccatccctaaccgtcttctcaaactggccgccaccaaacagcacaatgcattaccctcgctgcctagacttcagccccggaagtggcttcatggctatggggaacgctgccggaaaagttttgctgtataaactccatcattaccagaatgcttgaagtggtctttaacaagggcagttttgggattgttgtgtttcctctttttttgtcgcaagtactctttatgttatcaattttcctatccaattatcgatcaatgaaaaattttctttctgattaaaaaaataaaaaaaaaaggcgaaccgctctagaggatccaagcttacgtacgcg

SEQ ID NO: 83126 - DNA, 551 bp, Arabidopsis thaliana columbia
tcgatgaaggagaagaaatacagcatagattgtgctgagagtgtcatcaaatctctgaatttacctattgagaagatcaagaaatgcattggtgatcctgaggctgatacagagaaccaagttctgagaactgagcaagtatctcagattggccgaggaaaccggggagatgttacgatattgccaacattagtcatcaataacgctcaatatcgagggagattggagagaaccgcggttttaaaggcgatatgcgctgggtttaatgaaacatcggagcctgccatttgcttaaacacaggtctagagacaaatgagtgccttgaaaacaatggtggttgctggcaggatacaaaaagcaaccatcacttgcttgtcaaaggcacatttcagagggaggactcttgcgagtgtccggttgtaaaaaggtgttcaattttaaaggaggccgggctccacttcatgtacaccttatgggcctgcgaggtgtactatgaacaatggaggttgctggtctgacacaagaaatggcttaactttctctgcttgct

SEQ ID NO: 83127 - DNA, 514 bp, Arabidopsis thaliana columbia
aaggaattgtagtcaggccatgaatctctcagaagcttcaataacttctgtcctttcttcttcgctctctccgtacactcactctgcaccatcaacaacaactgtaccaccactcccgcccccgccgcttcctccctccacctttcctccgccgtacaaagcgctaacaacgcccccgccgcatactccgtcgcgcgatccgaaactctcaatatcgttttaactaacaacggcaccgttaaagcgtgctcaccgaacgccgcgcatccttccggcgttcggcagagtagctccaccgtcgctaaggctcgctccgtatcgcatctatcgaaatccgccggcgagtctgtctattagaatctccggcgcaaccggctgtgattcgcgatgtgtcgcgtcggatttcactgaacagagcgcgaacagagtttttgattccgattttgagagctcgtcgtgacgaaatcggatttctcagaagatcgagaactccttcgaatacagattctgaatt

SEQ ID NO: 83128 - DNA, 535 bp, Arabidopsis thaliana columbia
caatgaaagcattttttgcattattttcttgaaaagtcattacatccaaattatttttttttagccatgaaaatatacacaactctatctcactcttttatttttacagtataattcatatgtacattaattggatctccaaacattgcctttgtgtaggacagttttggttactttgggtcatatactattaggggtgtaaaaggctcggcttctggatggaacttcacggagctctttggccctcaaggggcatatacggtgccatgatcggccataatcccaggggccatgtaagacctgaaccggtatttgtagaatatataaccagctaaaccggctactgcgacaatagctagtatcaagagtgtgagccaccatgctgttttggatccatatctctctatacaaggatcttgatcgtttatgtaaagccggtcaccagaacaactgcatttgaatccaccccaggagttcttgcatctgcaaccgctacattgacataccgaacgctctttacattcggtaatatctt

SEQ ID NO: 83129 - DNA, 470 bp, Arabidopsis thaliana columbia
gtataattgtatatcattcatataaatcttaagcttcacttcaaagatgcgactttctcccacaaaacatatttacgtatatatcatctcatgatgttcacttgattaaaaattaacatcacgaatttaacagaatatattattaaataatccagcaggtaacaaagttataaaatggcacacgtgtggggctccatacccagataagctctcggttcccccatacccttaacgcgtcacaaccaaacaatctcacctttcctcctccttcctccttcccccctggtttcccaaggttccttaatgcccagggaattatagacccattgggatcttgggatcccaataccccatcccttcagatgtccaatatcactcgaacttatgcaagacccagtcaccgtctgcaccggccaaacctacgaccgagccagcatcgagtcatgggtctccatcggtaacaacacgac

SEQ ID NO: 83130 - DNA, 486 bp, Arabidopsis thaliana columbia
aaaaccctaaatcagagaatctagcgttgttgcttcttcagttgtctctaaaaatggggaggaagagaaagcacagcgagactgttacggcggcaccggtgagggattctcctccggagagacctcaaaggactcttttgggttggaaagataagaaggaagatgctgagaactctaaacctgcgtatgcgtctgtattcaggaataaagagaaggttctcgttacttgttcccggcggatcaatttcaggtatcgacatttgatgttgaacatggtgtcactttttacctcactgtaagaaggatagtaaggtaggaagcttaagagccagtaggaggtgccccctcttaaatgagctccattcgggctttaagggcctctttcttcctggtttgttttttcggggtgtcgggagcaccaagattcttttacaatgtgggtggtgaagtcccctgggggacctttcgttaagttcttggttaatg

SEQ ID NO: 83131 - DNA, 531 bp, Arabidopsis thaliana columbia
gagaagaaaaatatcctttgatctataatcttttgatgatttattcggaacacgccacacaaccaaaacaagctttgatcaaaatcacaaacaactcagatatgtctatagtcagcataaaagtcttgagaaatataccagaactgggcggaaggtgtgagcgctgtagcatgacgtgagggccaaggataaagattgcgaaaaggaagaatccaccagatataatgctaatggtgactaaaagccatttcacatgggcaattgcagtgatcacgccaaaaaggaatgccacgggcatgcatagtaatgaaaaaagtagtaagggcaaggccacatgtaaggatttgaggatgagtgctagatcacccaactgcgcccaaataagagtacatattgttgcaacagaactttgcattgccaagatgtcaaaaagcagaaaaatgaagagagttgggtttggccccgtgcctgccctgcccaagtttggttttttgctatcgctgatataaccacctgggattgtaaagcctg

SEQ ID NO: 83132 - DNA, 466 bp, Arabidopsis thaliana columbia
  unsure (1)..(466): unsure at all n locations
tgtctggtttcatgcaaacatccttcttcttcgggtgcatggcttgcatttgttacggttgcttcctcatgcttggaaccgttggcttccgcgctgctctcctcttcgtccgccacatttaccggtcgattaaatgcgagtaaaactgttgctgccaatcaccctcccccttacgatttttggtagaacaaagaagaggataatctgttcttaggtggataaagaagaagacttcttcgaagccagaaactgaataccaaagcgctctgtggtcacattttgagttcctttttgttaaaaatgttgtggggcagtttgttttcctgtgatatgatttttaggcggaaactatgtttgggtttaggtgaagtctttcctcttctcttactactttagagggcgtatcctcccttttttctggtaattaattaagggaaccttttggtaaccttttttttaatggncc

SEQ ID NO: 83133 - DNA, 506 bp, Arabidopsis thaliana columbia
  unsure (1)..(506): unsure at all n locations
gttcgcaagcnagagcatttttatagaataccctttagcaatataaacagaatactcagttcttttttgtttttgtttttcaacttgtacagacagtgtggtaacatatgtaagtggtataagaaacgaaccaatacctaaacatcatcagagctcacacaacatgaacaccaaattttattctagatgatgtgtgatgagagttttttacacctactacaatcggatggtgcacataaccgtggtcctgaaatcaagttgatgattgaacggtggctttgagacaaccgatctccaagtcttcttctttggatcatacatatgaatcatcaaagatccagctttcctctgttgtccagtatgccttgtatccatcagattataaccatccaaaagaatcataacatgtaattccccatcagggcacggaaccaaccggttgtcgaaagggcttctagggcgctgncncctctccacggtcaaccaccaaccaaggccanctatcc

SEQ ID NO: 83134 - DNA, 442 bp, Arabidopsis thaliana columbia
cgaacttctccctcctcctctcactttcaccatggattccgtctccggttacgccgccggagcaggtcagcctcgagtcggtgggaaaattgttcgaccacgacgcaccgctgttgtcaggacgccgtgtgagcgccccgttcagagatcccgagatcctcctcagcaaaaccctagttggatctccaggctcgtttacaaacccgccagcgtaattgcttccggcgccggaaaattcatttcttccgtcgtcttctccgactcttcctcatcttcggaggaggacgaggattcatcttcagatattgatggtgatgaggatgttgagaagaacaatcccgattttactgaagaggaccttctgagtgcccagcaaccaagcattcaacgactcaattctaagcgaggaattgagcagcttctcttgcaagaaacatttgca

SEQ ID NO: 83135 - DNA, 446 bp, Arabidopsis thaliana columbia
acccacgcgtccggatccggcgagattcgattcgatttctgctgacaagtcaaactctttgcccagaaatagctaagaaggtctagaggtgaaaaaatggcaacttcgcgtttacagttggaaggagatgactctgtacatctacacattactcacgccaaccttaaaagcttctctgcggacgctcgtttctctccgcaaatgagtgtagaagctgtgaaagaaaagctatggaagaaatgtggtacatctgttaattccatggctttagagctctatgatgactctggctcaaaggttgcagttctcagtgatgattctagacctcttggtttcttctctccttttgatgggtttcggttacacatcatagatcttgacccctcctcggtcacaactggaggctggcttgaagatacgtcactggttgagaagtataacatctc

SEQ ID NO: 83136 - DNA, 463 bp, Arabidopsis thaliana columbia
gaatatgataagggacgatctgataaatcaaatggtgcacgtcgtggtagacaatggagaagccagccgactaaggtctctgagatccctcctcttctgagctctgaggttcacaaaattcataactacgagaagaaagatcataaacaccgacataataaaaggtctccatctccgcaggctcaatctcagaggaaaaggtctagaactgacgactcacggaatgaacagacattctcagtgtaaagctttggtcagagggcatctttccgttctgctttgtatgagactaacaagtcagacaggggaagctaaacctgatgtctctcgcccgcggctttagtttgcctgtgcgagatgctttagctatatcaaggccggcaaatagttcgactgaatcctgattaaaacgtcttcgttcagtggtgtccacatctactcaaaactcatttgaccctgatcc

SEQ ID NO: 83137 - DNA, 513 bp, Arabidopsis thaliana columbia
  unsure (1)..(513): unsure at all n locations
ccgttaccatattctttgatccattatataatatatatactttcaccacatcatatatgcatctaagtaaaagtgggtacatgcagagggcacatatatttacataaaatccgttttttagttatagatttcagtagcttccaatatacttgttggtcccttcactgggactggtcctggttgtcagagacggcctcatagtgactatagtgttttcgtctgctcctgcttccagtgcagccatccctgcttccagaaacttctgaacagcgtcttctgcgtatttgttgccttcacttactgtcatgttcttcccaatgtctggatatgagtttaggagatggtctccaacgagttgagaggccagttggatcagctccacctggaattctgagagctttgagtctcctttgcccccagggctcagcgaaagttcactccgggggttcccgggaaactngggggggaatccggaacggggaattccaaagacagccaggaccctggaggggg

SEQ ID NO: 83138 - DNA, 570 bp, Arabidopsis thaliana columbia
accagattgatacgtgtatgtatcataactcatgtgatgctgtatcgctttacaaggatcactgttgcggtagagaccaaattccttcagagacagtccagattttggtggcacacaaaaatgaagtgtggtttgtgcaattctctaatagtggcaaatatctggccactgcatcaagcgattgtacagctataatatggaaggtactggatgacaacaaagtcgaactgaagcacacacttgagagccaccaaaatccagtttcttttgtctcgtggagtcctgacggtactaaactgccttacatgcggaaacgctgagggttcttaaggctatgggatggtgtcacaggtgtgttgagacacacatttggaaacaacaatactggattcactgtcagctcttgcgcatggttccctgactcaactcggcttgtctgtggcagttctgacccagaaagagggattgtaatgtgggacactgatggaaacgagatcaaagcctggagaggaacgagaattccaaaggtggtggatttggctgtgacgccggatggcgagagtatgatta

SEQ ID NO: 83139 - DNA, 474 bp, Arabidopsis thaliana columbia
  unsure (1)..(474): unsure at all n locations
ccgcagctgaagaatttcgaaggtttattttcaaccgaagtccgacctagtaaaggttcaggggtacaagccttcgcctctcgtgcatttgatgcttcatttagctggaaggacattgaatggttaagatctattacagagttacctattctggtcaaagggatactcacccgagaagacgctcttaaggctgttgaagctggtgtagatggaataattgtatctaaccatgggggtcgccagctcgactattcccctgctacaataactgttttaggaagaggttgttcaagttgttagaggtagggttccggtttttgctttgatgggaggagtaagaccgaggggcaagatgttttcaaaagccctcggcactttggggcacaagcttgttctttattaggggaggcctatgaaccctatggggctttcaagctaaaggggtnaagattgggggttaaaaaaangggttng

SEQ ID NO: 83140 - DNA, 3734 bp, Arabidopsis thaliana columbia
tccagaaacagtgtcttcttctctttttgttgttacttcctttggtttcttcaatggaaaaagaagagctcaacaaattgaatcatctctctctcgtctccaatgtctgcaacgaattggaaacgcatctaggatctgcagaaaaagttttggctgagttcattatcgatctaggtcgtcactctgagacagtcgatgaattcgataagaatcttaaggaaggcaggtgcagagatgccggattacttcgtccggtcgttgttaactacaatccacggtatttatcctccgaagcctaagtcggagaagaagaaagaggaaggtgatgatcagaaattcaaaggcttagcgattaaggatactaaggataaagttaaggagctcgagaaagagattgagagagaagctgaggagcgacggagagaagaggatcgaaatagagatagagatcggagagaatccggtagggatagagacagagatagaaatcgtgatcgtgatgatagaagggatcgacatagggatagagagaggaatcgtggagatgaagaaggtgaagatagaagaagtgataggaggcatagagaaagaggacgtggtgatggtggtgaaggggaagataggcgtagagataggcgtgcgaaggatgagtatgtggaggaagataaaggcggtgcgaatgagccggagttgtatcaggtatataaagggagagttactagggttatggatgcaggttgttttgttcagtttgataagtttagaggaaaagaaggtttagttcatgtttctcagatggctactagaagggttgataaggctaaggagtttgtgaagagagatatggaggtttatgtgaaagttatatcgatttcgagtgataagtatagtctttctatgagggatgttgatcagaatacaggtagagatttgattcctttgaggaagccttcagatgaagatgattcatccaggagtaatccgtcgtatagaactaaggatgggcaagtgactaagactgggatttcagggatcaggattgtggaggagaatgatgttgcgccttcacgtagaccgttgaagaagatgagctctcctgagagatgggaagccaagcagttgattgcctctggtgttttgagagtagatgagtttccaatgtatgatgaggatggagatgggatgctttatcaagaggaaggtgctgaagaagaacttgagattgagatgaatgaagacgaacctgctttcttacaagggcagactaggtactctgttgacatgtctccggttaagatcttcaaaaatccagaaggttctttgagtcgtgcagctgcacttcagtccgctctcactaaggagaggagagaaatgagggaacaacagcagagaacaatgcttgactcaatccccaaggatctgaatcggccatgggaagaccctatgcctgaaactggtgaaaggcatcttgctcaagagcttaggggtgttgggttatcagcttatgacatgcctgagtggaagaaggatgcctttggtaaaactcccacttttggacagagatcaaagctttctattcaagagcaaagggagagccttccgatatacaagttgaaaaaggagctgatacaggctgtgcacgataatcaagttttggtggttattggtgagactggatctggaaagacaacacaggtgactcagtaccttgcagaagcaggttatacaacaaaaggaaagattgggtgtacccagcctcgtagggttgctgcaatgtctgttgccaagagagtagctgaggagtttggttgtcgtttaggagaggaggtagggtatgcgattcggtttgaagattgtactggaccggatacagtgatcaagtacatgactgatggtatgcttctcagggaaattctgatagatgaaaacctctctcagtactctgtaatcatgcttgatgaagctcacgagcggacaatccacactgatgtgctgtttggtcttctaaagaagctgatgaaacgtagactcgaccttcgtctgatagtcacgtctgccacattggatgcagagaagttctctgggtacttctttaactgcaacatttttaccattcctggaagaacatttcctgttgagatactatataccaaacagccagaaacagattacttggatgccgctctgatcacagtccttcagattcacttgactgaacctgagggtgatattctggtctttttgacgggacaggaagaaatcgattctgcctgccagtctctgtacgagaggatgaaaggtctaggtaaaaatgttcccgaactcatcatacttccagtttacagtgcgcttcctagtgaaatgcagtctagaatttttgatcctccccctcctggtaaacggaaagtggttgtagctacaaatattgcagaagcttctttaacaatagatgggatatactatgttgttgatcctgggtttgctaagcagaacgtgtacaatccaaagcaagggctggaatcgctagtcattactccaatttcacaggcatcagcgaagcaaagggctggacgtgctggtcgtactgggccagggaaatgttatcgtctctacacagagagcgcatatcgtaatgaaatgcctcctacatcaatccctgaaatccaaagaatcaaccttggaatgacaaccttgaccatgaaagcaatgggcatcaatgacctgttatcgtttgacttcatggatccaccccaacctcaagcattgatttctgcaatggaacagttgtacagcctgggagctttggatgaggaaggattgttgacaaagctaggtagaaaaatggctgagtttcctcttgaaccgccgctctctaaaatgttgctagctagtgtggatctcgggtgcagcgatgagattttaacgatgattgctatgatccagacgggtaacatattttatagaccaagggagaagcaagcacaggcagaccaaaaacgggcaaagtttttccagcccgaaggtgatcacttgacattgctagctgtgtatgaagcttggaaggctaaaaacttctcaggtccatggtgtttcgaaaacttcatacagtcaagatcgttacgacgtgctcaagatgtgaggaaacaacttctcagcattatggacaagtataaactagacgtcgtaactgctggaaagaatttcacgaagataaggaaagcaatcacggcaggattcttcttccatggagcaagaaaagatccacaggaaggttacaggacgctggtggagaatcaaccggtgtatatacacccgagcagcgcgctgttccagagacaaccagactgggttatatatcatgatcttgtgatgactacgaaagagtacatgagggaagtgactgtgattgacccaaagtggcttgttgagttagctccaaggttcttcaaagtgtctgacccaacaaaaatgagcaagcgtaagcgccaagaacggattgagccgttgtatgaccgttaccacgagcctaactcatggcgtctcagcaaaaggcgtgcttgagagacttttcctttcggtaaatctattcttcttccttatgttggttttgccgtcttcaaatgtactcctgtttttatgtattgaaagctaaaagctaacagaagtgatggatgagccatagattacagctgcatcatcgtttttcttgacatgtatgaaaattcatctttcct

SEQ ID NO: 83141 - DNA, 402 bp, Arabidopsis thaliana columbia
ggattctgtttttctttcctttatatttatattttatgcactaaccacatcattgggtcagacaagcattcaatatgtttatcatatgtacttttcaaaagatgagtgttgaattgaatccatgcttcagtccttgttcttctaacatggctgctggttgccacggttcttcagctgtctgattaagtttctcagaccatatctgttggtttttttggatcagagcatagagggaagtctctcattctctggcctaacatgggttctggttatggcatcaatgggtgggacaaccaggaaagagccataggaatctcaaacccagtctttaacatatcaatcacttttttcactccatcttcacccttagctgcaagcccatagatcataggcctccctata

SEQ ID NO: 83142 - DNA, 475 bp, Arabidopsis thaliana columbia
aattcgacaaccaacttttaaataatttaaatttactcaacaatagagggaaataaataatcctcatttactctcccccaaaaaccataaataaaagattcacaaaaaaaaaaaaacatggaagaatcgaagaaacaagaagtgaaactatagaagccaagaagaagcaaacaagcagagcaagctcaccaccaaaccagccttagctcctccgatgatcctaaccgcaccagcatcatctgccgtcgcatcatcggcctctccgctcaggccctttcggcaggcgaatccggagtcaccaaaagggatcattatctggcgacgggtgcagccttcttgcttcctttcctttcggctttcccctttagccggcttttggagaatccgcaacatcaaccatcctctggtggccggagcaggagccggagcttcaacagccgaagccttaaacaactgtttaggcaacaaaacctta

SEQ ID NO: 83143 - DNA, 539 bp, Arabidopsis thaliana columbia
  unsure (1)..(539): unsure at all n locations
ctcacgaaaatttaaatccctagctattaccttactcgtcgttctcttttgattttcatttcccgaagaagcgttttctcaggatatgcttctcgatctctgagaagaaagggatttgcaaatttgagaattcacattttggattaagatagaaacgatgtcgtctgagtcaccgaatttgcctgctgctgcgggaacagtaccagataatcatcctcctcctcctcctgttgttactgctgcagaagctggaagcgatgattcacctaaaggagtagcatcaaaactatctgctgctgggatttcaaattgggccaaaaacttgaaagttccacagccttttgcttccacacaaaacgactctggtgtcgaaaacaccgagaagtctgcgtttgcaaagtttacaagcgggttaggggttcgtttatctccgaaatcttctcaaacgggttgccactcccncaggagggacttcggggtntncaanattntagttttttttgggcttttcgnaanggnttggtggtcnancaaggant

SEQ ID NO: 83144 - DNA, 483 bp, Arabidopsis thaliana columbia
  unsure (1)..(483): unsure at all n locations
gaatccaaacgagcaaagctgatttaaattgagtttaaggaattaccatattgttcggccatatcaaactccaaagtaaaagtttgatgatacaaaagcaggaacttgacaagaggaaaaaaaaaaatactacataaaacatacacacatacaaatttttatgtaaggggccatggttcttaggttaaaactgcggagattgaatcagcgatggagacaatagtcgacggtgagactccacgacttccggacaaataccatctctgcatcattcccaccacattcgcattctccaccttcagtttctcctcttcctttaccttccggctcaaacccgatctcgcaaatgccatctttggctgagaaatggtaagtgataacggagttagctttggaagtactggactgggaaagccaacgnccttntcggggtcagttctcctcttccncggacttatcncccagcnaangttcccncggntt

SEQ ID NO: 83145 - DNA, 600 bp, Arabidopsis thaliana columbia
  unsure (1)..(600): unsure at all n locations
gggaaagcntggtangccntgcaggtacctggtcctggaattccactctcaccttgatatttttcagagagggagagatgatttccgatcattgctatgtcgtccggatttcttcgtcaaggccgtccggtttgtcaaccggcttcagcccgacatccatatgcctcttgtgatgtggtttgtcggttactttcccggaatcttctggctcctttagcagaattgtccggtgtcgccgtcctccatcggttggttcctctaccaacggtggttggctcttgtctagcttctccgtcgtccctctccggcggtttaggctagcttttggccggatttcttttccggttttgttttatgttctcgttttctatagatccagtttgattttgctcctttgtgttctaactcttagagggctcaattccttgaacctcctttgtttaaagggctcaatttgtttttcaagcttatcgatttcaattatataagaacaaattagagttgtggattggggttttctctaatgcctttgagttgggttttatgcaattgagtcaattgtcatattggtttttggaaacgagtgtttttattttactt

SEQ ID NO: 83146 - DNA, 822 bp, Arabidopsis thaliana columbia
  unsure (1)..(822): unsure at all n locations
gaatgttttaggtgcactatagaagagctatgacgtcgcatgcacgcgtacgtaagctcggaattcggctcgagagaaacctgtctgatttgctccgtcgcctaaaaagtctaaaaccctaagtgtctccgcctcgtagctttacccgattcaacgaagagtgaattcgcgtgagctcaagcagtatcgaaatctaccaatcatggcgagtcaaacaccgaatctcgagtgtcggatgtacgaggcgaaatacccagaggtggatatggcggtgatgatccaggtgaagaacattgccgatatgggagcttatgtttctctcctcgagtacaacaacatcgaaggcatgatccttttctccgagctctctcgtcgtcggatccgaagtgttagcagtttgattaaggtcggaagaattgagcctgtcatggttctccgtgttgacaaagagaaaggttacattgatctgagcaaacgtagagtcagcgaggaagatattcagacttgtgaagagaggtataacaagagcaaacttgttcattctatcatgcgccatgttgctgagactctttcaattgatttggaggacttgtatgtnaacattggttggcctttgtatcgacggcatggtcatgcttttaaggctttcaagatcttagtgacggatcctgattcagtgttgggtccntcacccgtgngatcaaagaagttgggcctnatgggncaanagntgcctaaggtgtnccncctntncggnangaagtaaaaantccctttttaggacattgggggggnattnncccccacccaatnaaaaccggg

SEQ ID NO: 83147 - DNA, 442 bp, Arabidopsis thaliana columbia
cacgcgtccgcaaagtttgatacaatcgcccgcttggccatgggaataaaaagggtctttcacgtctgcaggttttaatggcgacaatttcgttaagaagaacaaaagaaaagagtttgattggtttaccgcctaagactgttgaaacttgttatgttgagctttctccggaagaacgtcagttatatgatcacatggaaggagaagcgaaaggtgttgtgcagaatcttataaataatggaagcttgatgcgcaactactcaacagttttgagtataatccttacggcttaggcagctttgcgattgacaatgtctctttgcccctccagcaattaagatcctttttcccacttctacaatctgtaggaagattgtgactgttaagccagggctactgcaaaagctggttgcagcattgcaagatggcgaagattttgact

SEQ ID NO: 83148 - DNA, 463 bp, Arabidopsis thaliana columbia
cacgcgtccggggatcgctagttcagacaccttctcttcttcttcgttctccttcgaggtcaaaatcttcttaatcgaggaagagcaagatcttctttaagcagtcatggccaagcatcatcctgatttgatcatgtgccggaaacaacctggcattgctattgggcgactgtgcgagaagtgtgatggaaaatgcgtcatatgtgattcctatgtccgcccgtgtactctggttaggatttgcgatgaatgcaactatggttcgttccaagggcggtgtgtcatatgcggagggagttggaatctcggatgcttactactgcaaaagagtgtacacaaccaggggcaaagatagaggatggttgtcctaagatagtcaatcctttggcagtgccaaaaactgatctgttcctttggaccgtaaggaatattgggttcaaaaaacggtaggaggtttttttgt

SEQ ID NO: 83149 - DNA, 635 bp, Arabidopsis thaliana columbia
  unsure (1)..(635): unsure at all n locations
ccggcncccccnnccggnccntagtcacccnttctctctcgtccctcgngcaaacctcttaccggggaggccantctcttaancancatgccaagcnccacctgattgancatgtcccgnaaccaccctggcattnctattgggcgactgtncgagaagtgtgatggaaaatgcgccatatgtgatccctatgtccnccccgtgtactctggttaggatttgcgatgaatgcaactatggttcgttccaagggcggtgtgtcatatgcggaggagttggaatctcggatgcttactactgcaaagagtgtacacaacaggagaaagatagagatggttgtcctaagatagtcaatcttggcagtgccaaaactgatctgttctatgaacgtaagaaatatggattcaaaaaacgatagtagtttgttgttacttgagctattgatcttttatttattgatgctaggaaagtgtctgtacttgtcttgtttgtgttaaggaaattttatccggtgaagtaatttaagacatgggttcaaactaaggattatggtttgttgaaaaaaaaaaaaaaaaagggcggccgctctagaggatccaagcttacgtacgcgtgcatgcgacgtcatagctctt

SEQ ID NO: 83150 - DNA, 484 bp, Arabidopsis thaliana columbia
  unsure (1)..(484): unsure at all n locations
cgcgtccgaggatttggaacaattagtagaagtagtgtgcaaggtggtacctttgatcatcgcagtatcaggagatgttggctctgagacacctattaagtgtgagcatagtgatgttctcggtgtatttctcaagagaacggcagaacaacaggttttgagacgtaattggagattttcatgggttcgaaatagtacattgatgcagccgatgactaaggaagtcccctggtatctggacgacgggacaggtcgtgtgaatgtagatgtatctcaaggtgaattaggcttggcgttgacggttggtagtgatgtattttnaaaggcagagccgctattcgctttttcaaggagcgttggggtatcttaaaggcttttangatacttngggtaagacacntttagcgtgttttccccncttggtccnccncttcaaattntttggtnaggcttttagggattgcatngggntttcaagggttna

SEQ ID NO: 83151 - DNA, 483 bp, Arabidopsis thaliana columbia
  unsure (1)..(483): unsure at all n locations
acgcgtccgagctcgggttaactcactgcgctctgctataattgaaacatttccagaaccaaacaggcgactactactgcggatgctaaagatgatgcatactatcacctctcattccagtgagaatcgcatgacttcatctgctgttgctgcatgcatgtccccattgctcttacgtcctctattggctggagaatgtgatctagaaggttttgacactctaggagataactctgcccagcttcttgctgccgccaatgctgccaataatgctcaagccattgtcacagcccttttggaagactatgggaatatgatcaatgatgaaggtcttgggagatgctccacttctactgattctcatatttggcgacaagtgggccctgaggaactcaagtgatgaagagggaaatagtggttaaacatcctgactttcataatctgggtataggagaagggggaacaaggttgntgtattntgtc

SEQ ID NO: 83152 - DNA, 462 bp, Arabidopsis thaliana columbia
  unsure (1)..(462): unsure at all n locations
cgcgtccgcattggttgtcacctttattttatcccacattttttctaattagaccataagtcatttttttggtttccgtttgattgatgaattcaacatttttgttgtatatgttccacgattttgcaatgttcttctcaatcgaagctaaagggattatatagacaattattgcgtgtgtttgaatataggacgcagatataatgtggcttagagatccatttcctcggttatatccagatggagacttccaaatggcgtgtgacagattctttggaaatccttatgattcagacaattgggtcaatggctggtttcacatacgtgagatcaaacaatcgaagcattgagttttacaaattttggcacaaatctcgtctaggttatccagacttngcatgntcaagatgtgttcancagnttcaagcatgggcctttnatctcagggnttggantccaatt

SEQ ID NO: 83153 - DNA, 477 bp, Arabidopsis thaliana columbia
  unsure (1)..(477): unsure at all n locations
agacggcgttgaacactcagctgtcttgtctttgcggtttcatcaaaagtccaatgttgttgatccctttcatatgtcaccgacttcaatgctcttttctccaaaacttgcggactcaccactgatcccaacttgtgttccgaaactgccgcccaagctcctttgccgaagacggcagcacctgttccaggagcacccaaatctgacaaggatgccgcaagcaaactcgcgggaacaggcttggtcggaatcgtcgtgatcacgattgctgcgatgttttattaaaattgaattatatattcttaaccattggagtgctttatatagactatagcctatattcctatccggctatatgtgagaattgtgttgggtccaattatacatggcgttttattttgaattttgttttttacatcttgggttttttaaaaaaattnttggtgncgccnttaatgccattttgtttttncaacc

SEQ ID NO: 83154 - DNA, 484 bp, Arabidopsis thaliana columbia
  unsure (1)..(484): unsure at all n locations
tngcggcgcgtgaccnagtgctgcttgcggtcacaaagccaatgtgtgcccttcatgcccngcttcatgcctttctccaaaacttgcggactcaccactgatcccaacttgtgttccgaaactgccgcccaagctcctttgccgaagacggcagcacctgttccaggagcacccaaatctgacaaggatgccgcaagcaaactcgcgggaacaggcttggtcggaatcgtcgtgatcacgattgctgcgatgttttattaaaattgaattatatattcttaaccattggagtgctttatatagactatagcctatattcctatccggctatatgtgagaattgtgtttggatcaattatacatggcgttttattttgaattttgttttttacatctagagtttttaaaaatattgttgttgtcgcctttaatgtcattttgtttattacaactcaaatttaatatatgtgaaatgtgatcgtgc

SEQ ID NO: 83155 - DNA, 883 bp, Arabidopsis thaliana columbia
  unsure (1)..(883): unsure at all n locations
gcgtccgtgccaaaggtggtctgatgctcagaactatgattcctcagcattctacaaggtaccgttctctagagttgtatacattgaccaatctgacttccgaatgaaggattcaaaagattattatgggctcgcccctggtaaatctgttttgctaagatatgctttcccaatcaagtgcaccaatgttgtctttgctgatgacaatgaaaccgttcgtgagattcatgcggaatatgcccccgagaaaaagtcaaagccaaagggggttctacactgggtcgctgaatcttccccaggagaagagcccataaaggtggaagtccgattattttagaaactctttaactccgagaacccggctgaactcaatgatgcttggctcactgacattaacccaaactctaaaatggtaatttctggtgcctatgctgtatcaacccttaaagatgctgcagttggggacagattccaattcgagaggctaggttattacgcggtggacaaggactctgagccaggaaagcttgtgttcaaccggacggtcacactcagagacagctacgggaaaggtggaaagtaaaacactccacccatattaacattttgttggtcaaaattcccccgaaagggttttataacaacagtaaatgaaatcgtttggtttgatacgcacattgtacaacagttggttttttatttcttgaatcaaaacaatgtcatgttttatcttttgaaaagttctttatctccnnnnnnnnnnnnnnnnnnnnnnnnnnnnnnnnnnnnnnnnnnnnnnnnnnnnnnnnnnnnnnnnnnnnnnnnnnnnnnnnnnnnnnnnnnnnnnnnnnnnnnnnnnnnnnnnnnnnnnnnnnnnnnnnnn

SEQ ID NO: 83156 - DNA, 374 bp, Arabidopsis thaliana columbia
cacgcgtccgagctcgtacaaagaaagcagctttacagttccagggacaaagattgtttccgtagacagccctgtcgggcgcttaggccttactgtatgctacgatttgaggttccctaagatatatcagcaactgagatttgaacagaaagctcaggttttactagtaccatcagctttcaccaaggtcactggggaggcacactgggagattcttcttcgagcccgagcaattgaaactcaatgttatgttcatagctgctgctcaagcaggaaagcataatgagaaaagagaaagttatggtgacacactgatcattgatccgtggggaactgtagttggaaggttacctgatcgtgtttcgaccggcatt

SEQ ID NO: 83157 - DNA, 353 bp, Arabidopsis thaliana columbia
  unsure (1)..(353): unsure at all n locations
tcttcttcttcttcaagcgatgaaccagaaaagttttgattttnattttggtgaaccaggaaagtggtactcgatctgtggtttggcgattctgaattactatattcctggaaaattctgttcagtttcataatttaaacaagatgcagctcaacgcccctgaacatccggttgcaggacacatcgctaaagacgggaagcctgggccctctcgtacatgacaagggtcgggttcttcacgccacttcagggcggttctcgtcgcgaaaacgaggtgaagctctacgaatctttgtcctcaaacacagaggctccagaacacatccatagatatttgccggtgtatcacggca

SEQ ID NO: 83158 - DNA, 523 bp, Arabidopsis thaliana columbia
  unsure (1)..(523): unsure at all n locations
caaccgntcggttgnctgccagcnntccgctatggacggcntgtgaggccttttgggatctcccagtttgggggcattgggaaaattnttacgggccggggccaagcccccgatccttttatccacgtcgctttcaatagtcccatacttgggccccctgagagatggggtcgtccttcttctgttgaaggcacccaaacaggattcgataaaatatgtgaagcaagtagttttggaggacgatacaaagttgaagggacttccggcacaagattgttccaagattatgctttggcgtctcaaatttcccacaagaacacgtttaagcncctgatttgctttatttcattctaatctctttcaaattagacacttttccttcttttcttgacaaaaaaaaaaaagagacacttttccttttttttttttttgaatttatacatcacagtgaaagatttaaaatcagtcatctagagtgtagatttaaaatgctaaataaatactatagttcttaacattaatc

SEQ ID NO: 83159 - DNA, 745 bp, Arabidopsis thaliana columbia
  unsure (1)..(745): unsure at all n locations
gcattgaacatcacaaattaagcggaatagttcattttgcgggactaaacaacatatatgatcttggttttttcgtcaagatcagagatatcgaggtatttggtacttggccaatggcattgttatcggctaataggaaacgagtggtagtagaagggcctgtttgtgaatcttcacaagtattggggtggcatttgagaaaaattaataacgagacagagacaaagcctccgattcatatatcaagcttcgctttcaatagttccatactttgggaccctgagagatggggtcgtccttcttctgttgaaggcaccaaacaggattcgataaaatatgtgaagcaagtagttttggaggacgatacaaagttgaagggacttccggcacaagatttgttcccaaggattatgctttggcgtctcaaatttcccacaagaacacgtttaagcacctgatttgctttatttcattctaatctctttcaaattagacacttttccttctttttttgacaaaaaaaaaaaagagacacttttccttttttttttttttgaatttatacatcacagtgaaagatttaaaatcagtcatctagagtgtagatttaaaatgctaaataaatactatagttcttaacattgaaaaaaaaaaaaaaagnnnnnnnnnnnnnnnnnnnnnnnnnnnnnnnnnnnnnnnnnnnnnnnnnnnnnnnnnnnnnnnnggaatgcaaattcaaccatac

SEQ ID NO: 83160 - DNA, 479 bp, Arabidopsis thaliana columbia
  unsure (1)..(479): unsure at all n locations
gttattgcagatatattaagtgcaatgcttctncgagctattggtcagaaacttcagatggcttatggactgaatgcgagactacttggttttcttaagtcatcaagggataaagtgatcctaccttgtggtgatattgctgctcttgtgtatttgtggcatcctttcacgatagtttcttgtgtgggcttatcaacttctcccatcgaaaacctggctgtcatattggcgctttttggagcagttacacgacgagttcctctggcagcatttggcttagtcattgccacacatttatctctttatccctgctactctgacaattccaataatcttttctatttggggataatggttttggatgctcctcccaataaaaatggttnccttcagaccagaagnggtaggaaaattnagggngagttcaaccctctanctngtttncnanacaagncaaggttgaaacaggcttacggacc

SEQ ID NO: 83161 - DNA, 408 bp, Arabidopsis thaliana columbia
acgcgtccgaacataaactcttcttctctttctctgcctctctttttctcctctctctctcaggcacacgatccacacacacacacaaagactcaaaacaaagtcaagaaccctaatatcttaagaacgtcctgacataaccataggatcaaagatggagggagaaaccgcagccaaagcagcggcaagttcctcctcatccccgagccggtacgagtctcaaaagaggcgagactggaacactttccttcagtatctaagggaccacaagccacctctgaatctgtctcggggtagtggcgcacacgtccttgagttccttaagtacctcgaccagtttggtaagaccaaagtccatgccacggcttgtcccttcttcggacaacctaacccaccgtctcagtgcac

SEQ ID NO: 83162 - DNA, 518 bp, Arabidopsis thaliana columbia
  unsure (1)..(518): unsure at all n locations
nnnnnnnnnnnnnnnnnnnnnnnnnnnnnnnnnnnnnnnnnnnnnnnnnnaacgactcttctctttacccacgcgtccgctcgagtcctcgtcgctcgtagacggtgccaagcttcagtccttagaccctacggcggtttaaagccctttctttccttctgcagcttacctaactccactgcgccgttccgggattcgttgagagcaaaatccgatggattggctcgggcctatgttaccggagcgccgcctatcgtggaagaaccagacccaaagattgaagaatccaaatctgaggctgaatcgaaggatttaattagttgggggcttctgtggagcttgatgagcaagcacaagctcaggctcagtgtttgcttattgactctccttggatgcagtacttgcactctctctatgcctgttttttctggtagattctttgaagtactgattggggtgagaccggagcctttgtggcggctgctgagcaaaattgctggtttggactcggtggaacc

SEQ ID NO: 83163 - DNA, 498 bp, Arabidopsis thaliana columbia
  unsure (1)..(498): unsure at all n locations
gaatcaagtgcttcaccgtgatataaaaggctcaaatctccttatcgacaatgagggaaatttaaagctggctgattttgggcttgcacggtcgtattctcatgatcatactggaaatcttacaaatcgtgtcatcacattgtggtataggccccctgaattactacttggggctacaaaatatggcccagcaattgacatgtggtcggttggttgcatatttgccgaacttttgcatgcaaaaccaatcttacctgggaaaaatgagcaagaacaattgaacaagatatttgagctttgtggatcacctgatggaaaaactttggcctggggtttccaagatgccttggttcaacaatttcaagcctgcacgggccttgaaggggcgtgtaagagagttcttccagacacttttgattccgggcatgctcttggattaccttgggggaaaatgtttggggctttttnccccgcccagggatttntcgnnnaaggatt

SEQ ID NO: 83164 - DNA, 498 bp, Arabidopsis thaliana columbia
ccggcagatgctacccaaaagcatgattgtgaaatcatgagtctggaaggccaaaacacccaagaagcagagtatccaagctctgataaagttgcaaagggtggctttggctcagatatagaaggtattggtacagcacctacttcgggaacagaccctgtaggaacagagcaagtcaatgaaactcaaagtccaggaaatgattatgagagaaatgatcatctgaggaagtctattattttagctggtgatacaatgcaaatagattgtgaaactcaggtacatgaaagtgttcagattgaacggggctgttctcttgttaaggaacccgaacgatcgaagggatactcaagacatagagggagtaggtactatagggacgtcggatcttctagcttctgaagttgcggggagttgggctaatagcacgaatccttctgtacatggagaaaacgaaactgaaagaagtagagaagatgaagagagtcagactcaaaa

SEQ ID NO: 83165 - DNA, 532 bp, Arabidopsis thaliana columbia
caatgaagttcttcttcaaaacatgtacgccggttttgctggttccatgggacgtgccgttgagcgtcacgatatttggagctggaattcggctcgatttttgaaaacccgccaaaaacaactaaaccggtttggttctgtttataggctaagtatcgtttgttttgtttttacttttttagtaattgctgcatactactcagtggtaactagagtgaataattatggtttgaataaaacaagccaagtgcgtggtttcattactccggattgccatatttgtattcagtctgattaattcagatatctcaataaaaagaactttgttttcatgttgtaaaaacaaaaatcccctaccctacatctatcaacatactagggggcggccccccactattgaagtcctcacccccgggaatttattcccgcccgttaccctgaaggctaccaatttttccttatagaggatctccattaaaagctcggcggaaactattggcaataacctggttcctggcgtgaaattgttata

SEQ ID NO: 83166 - DNA, 615 bp, Arabidopsis thaliana columbia
  unsure (1)..(615): unsure at all n locations
gcagagcttggtccttcctctgatggtgtaagccgatccggagctttatccatgacccgagacgagaacccattctctcatggtcaaggtctttacatcaatcaaatcccattcaaaccttcaaacacttcttctcctttttcatttgaaacttctttcactttctccatcactcctcgcaccaaacctaactccggtcaaggtttcgccttcatcataaccccggaagctgataactccggtgcttcaggtggcggatatctcggaatcctcaacaaaacccaacgatgggaaagccagagaaccaacatctttggctatcggaattcggttaacttttttcaggaccaaaaggaggtttctaggcccaattaggtgggtaacccatggtttgggggttaaccaatcaaactcaaatggccttcctcttggttcgcttgaggaaagcttggttacttggggttcaagacaaaggngtcgggggaaaagggaagttttggccggcttaaagggtgtttagcttttngnagttgggggggggtnaaaggntttngggtttggtntagaaacaaagncnttttgggttcgggttnaattgggccttaaaacggtang

SEQ ID NO: 83167 - DNA, 1209 bp, Arabidopsis thaliana columbia
  unsure (1)..(1209): unsure at all n locations
nnnnnnnnnnnnnnnnnnnnnnnnnnnnnnnnnnnnnnnnnnnnnnnnnnnnnnnnnnnnnnnnnnnnnnnccacgcgtccgcaaaaaacaacaaacaaacaacaacaaaagaaacacaatgcagattcacaaactctgttttcttgctctgttcttagctaatgcagcttttgccgtcaaattcaacttcgattccttcgatggcagcaacttgttattccttggagacgctgagcttggtccttcctctgatggcgtaagccgatccggagctctttccatgacccgagacgaaaccccattctctcatggtcagggtctttacatcaatccaatccaattcaaatcttcaaacacttcttctccttttgaatttaaaacttctttcactttctccatcactcctcgcaccaaacctaattctggtcaaggccttgccttcgtcattgtcccagccgctgataactccggcgcttccggcggaggatatctcggaatcctcaacaaaaccaacgatggaaagtcagaaaacaacctcatatttatcgaattcgacacgtttaagaacaatgagtctaatgacattagtggtaaccatgtcggaatcaacatcaactcgatgacttctcttgtcgctgagaaagctggttattgggttcagacattagtcggaaaaagaaaagtttggtcgtttaaagatgtgaatcttagcagtggagagaggttcaaggcttggatcgagttcagaagcaaagactctaggaataccattaccatcgcccctgaaaacgttaagaaaccgaagaggcctttgatccaaggttcgagagtactcaatgatgttcttcttcaaaacatgtacgctggttttgctggttccatgggacgtgccggtgagcgtcacgatgtttggagctggtcgtttgaaaactaagtaaaccggttcggttcggttcagtttggctaggtatcgtttgctttgtttttgtaattgttgtagagtgaataattaaggtatgaataaaataagccgacctgtggcttactctgcattgtattttcatatttgtgtaatcagtctgaataattcagaggttttcaataaaataaacttcctttcccaaaaaaaaaaaaaaaagnnnnnnnnnnnnnnnnnnnnnnnnnnnnnnnnnnnnnnnnnnnnnnnnnnnnnnnnnnnnnnnnnnnaa

SEQ ID NO: 83168 - DNA, 419 bp, Arabidopsis thaliana columbia
  unsure (1)..(419): unsure at all n locations
cgcgtccggaaatcggaaatgcttccattaaagcttgctcgatctcttcttctccacgagactctcaatctcactcataattccggcgatacagacgacgttgatgaagacggagaaaccagtatccggcaaattctaagctcctacaagcaatcaaaaacccgatcgagatccgataacaacaagacgagaaattcgaaaaccccattgctatacttcgttccaacacgagaattgatctcagatacataccgattagcaacaatcgggagggatctaggtatggatatgtacccaacaccatcactcttctcacatcatcttcttcattcccatcgccagattcaaaatccgccggcacctttctcttcttcatcgcatccttcggcatggggggcttttgntttngnattngnggg

SEQ ID NO: 83169 - DNA, 640 bp, Arabidopsis thaliana columbia
ctttgtcttcttcaggacctcctttctgggcagcgggtattattttcggttaaatcctcagaaacatgtgaatctgatttaagcatccctgtcaccctgaatggagaaaatgtagctctcgtcaacaaaatcgctctaactgatcaattggtggccggaagcgctattttggcggcaatatgtactgcacttgatcgtattggatatatctgcgaagcttcctttgaaatcctgcacaagtacagtcatgagaaaacctcagtgctactgaccattcttcacgtttttgcttacattgctggagagaaaatggtgttgtctagtgagcatggcatatcaattgcagtgttgaaatacattgtcatgtttctagaaaacaaacattttggtactgtggagggcagttctcgattgcacccaggcaagaacaagtgtccattctcagacaggtcttcctcgctggaggctatggcatctaagctcatggaaattcttcaggaatttactgagtctaatactttgcataaaagcttgactggttcattgggttctagccacctagagaagaccgagtttaggccggcacacaaagatttccagtgtgtattgaccagggatcaaagtatcaatctctgtgaca

SEQ ID NO: 83170 - DNA, 751 bp, Arabidopsis thaliana columbia
  unsure (1)..(751): unsure at all n locations
acgcgcaagannnnnnnnnnnnnnnnnnnnnnnnnnnnnnnnnnnnnnnnnnnnnnnnnnnnnnnnnnnnnnnnnnnnccacgcgtccgacatttctctccactcagatttccaattcctaaagatagagagaatgactaaaatctctgttggattgcaacttgtgacaagagattcgagggaaaaactaaacaatatagtgatcaaatcttcactgagactaaaccgatccaatccaaacatctcggagctttgtttccttaaaacatgtcatctctgcaataaacaactccatcaagacaaagatgtttacatgtacagaggagatttgggattttgtagtagagagtgcagagaaagtcagatgttgattgatgatagaaaagaactagaggcttcgacgaagatgatgttggcttcgtacagacgatgtaataacggcgccggaaaaagcgagtctcggaatttgtttgatgatctccggcgacgacgtcaattatttatagttccttgaggcttctttaagcaatatctaattatagtttttttggttacacatcttatgaaagttattagtaaaagaaagagaattaaattgtatctcccggttgtcatttttcaaaatcttaaatgttaattggacagtttatgtggtgaaaaaaaaaaaaaaaagnnnnnnnnnnnnnnnnnnnnnnnnnnnnnnnnnnnnnnnnnnnnnnnnnnnnnnnnnnnnnnnnnnnnnnnnnnnnnc

SEQ ID NO: 83171 - DNA, 653 bp, Arabidopsis thaliana columbia
atattttcggaagaagagagagagagacggagagtgaaggcggaggaagggagagagagatgataccgcagcaatggacgccgccgtgtgggagcaaatgcacgaataagtactcagcatttacgcagcttccatggagagtattctgcaaaaagggatgtgatgccgatagtgactcatgggaagattgtgtaggagactgcagtgaaatttgctacaaagatcctgtgctaaaagacagaccatggactgctgttatagatcgttctcctggagatgccaaatactctgaggaatgctttcacgcatgtgtagcaggctgtggttacaagtttgatgttgaagctgagatagtcaataaggtgaaaccaaatggggacctccaccaccaccgcccaaaggccacaaccaccaccaccatccaccacgttctcaaaaaccaatgcagcctcctactgaggatgttcttgcaacttccgcttgacgtatctcaacccccatcaaaggctaacacttggaactcctcaattttttggtatctaaacatatgagggagtattacttttcagagtagccaactcaaaggattggtccataaacttttttttttttctttttcttttgatagtttttgcaatagagattggagagta

SEQ ID NO: 83172 - DNA, 691 bp, Arabidopsis thaliana columbia
  unsure (1)..(691): unsure at all n locations
acgcttaatcgagggggattcttttttttttttcaaaggcctaagaaaaaaaaaaaaagtgtcgcccccgttttccacctaaggggtccaataggggaaacagaagggaacaagccggaaagggtaaagcacagcaggacccaggcagggggtctcggaacggaaaggaccaggggcaaagnaaaaccaccaccaccaccaccaggttttcaaaaaccaatgcagcctcctactgaggatgttcttgcaacttccgcttgacgtatctcaacccccatcaaaggctaacacttggaactcctcaattttttggtatctaaacatatgagggagtattacttttcagagtagccaactcaaaggattggtccataaacttttttttttttctttttcttttgatagtttttgcaatagagattggagagtagatattagtgggactcgtcccgtgatgaaagttagagcatccaaaaagctcaagttcctaaattccattgaattttttgttttcttaatatgtagaattttcattcttatcaaaagaaaaacaaatgtagaatttcctttcattagatccaataatatttgaacggcaaaaaaaaaaaaaaaaaagggcggccgctctagaggatccaagcttacgtacgcgtgcatgcgaagtcatagctcgtctagtagtgtaacgaag

SEQ ID NO: 83173 - DNA, 649 bp, Arabidopsis thaliana columbia
caaaaacctctgataagttttggttcttgatataaacaaaatgggaagatcaccgtgttgcgatcaagacaaaggcgtgaagaaaggaccgtggctgccagaagaagatgataagctcactgcttatataaacgagaatggttatgggaattggcggtcgctttcctaagctcgctggacttaaccggtgcgacgggagcagtcagctcccgtggatgaacatatctacggcctgatatccggagaggcaaattttccgatggagaagagagtactatcgttagactccatgccctccttggcaacaaatggtcgaaaattgcgggtcatcttccaggaagaacagataatgaaattaaaaactattggaacactcatatgaggaagaagttattgcaaatggggattgatccagtgacgcacgagccaagaaccaacgatcttagccctatcctcgatgtttctcaaatgctcgcggcagcaatcaacaatggccaatttggtaacaataacctcctcaacaataacaccgctttggaagatattcttaaactccaattgatccataaaatgcttcaaatcataacccccaaagccataccaaacatcagtagcttcaagaccaatttactgaatcctaaaccagaac

SEQ ID NO: 83174 - DNA, 772 bp, Arabidopsis thaliana columbia
  unsure (1)..(772): unsure at all n locations
nnnnnnnnnnnnnnnnnnnnnnnnnnnnnnnnnnnnnnnaactggtacgccaccaggtaccggtcctggattcccgggtcgacccacgcgtccgcggacaagtagtgaagtatcacgactttgatttatttctgtatatctaagatgcaggcggtatcagttgatgaaaccaaaaacacggtggtgctacgggcggagcacaagaatgaagaaggccggaaatctgttgataagttcgaagtgaagacacgtaatccggagacgatcaagagcgttgagcggaagcttatggagaaaggtgttcaacggatggatcgtcatccttccgatgggattcctctcaggcgaccaccatcgaagtcaggtcacggcgggaagtacacgtgggaaggacctgatcggatggaggattacgagatgcagccggatccaccggcgatggatgaaggagatcctaattacgacgaggaacaggtgaagaagagtggtgatgacgtggcggttgagcttgtgaaaggagaggttgaggtggctaaggaggctccggctggtgttgctagggttgaggttgatcctcgcttggtcggtcgttgagagtttgatagaggaggaagaaaaatgttggggcgaatgtgagaaagagggagaaatgtggggttggatttttaatttcgagttaatgttttagtgtaaaatgacttttcactatttctttaaaaaataataaattgcccgtggtagnntttaaaancccccttcgggggtctttttc

SEQ ID NO: 83175 - DNA, 646 bp, Arabidopsis thaliana columbia
  unsure (1)..(646): unsure at all n locations
taatttgggcncaaaaggcntncngcaatcccggccnaacngggncccaaannggcccccttttttttttgggtcccccctttaaatgcaagggccgaagtaaaaaaattttgtttgtcaaaaaaagaaaacttataacccttttaacccttaaatggttatttaggttttccattaaatatccagaaataatgaattggggtttttaaaggcattttttgatgccgctattgaaatagcttttcttgctatatttgcgggtacaccaccccatttcaataaaggattttccctggtttaaccacagctacccaatactcaggggatcctttcccagaacccatacgcgtttccgcaggtcttactgtaactggtttgtctggaaatatacgtacccaaatttttccaccacgtcgtacattccgtgtcattgcgcgtcgccctgcttctatttgtctagatgtgaaccaagcgggttcaagtgtttgaagagcatatctgccaaaacaaatacgattcccacgagaagatattccttttagtcttcctcgatgttgtttacgaaatctggttctttttggactaagcatagcaattatatcaaaggagttttgatggaaatttttattcaatcttataagaattg

SEQ ID NO: 83176 - DNA, 507 bp, Arabidopsis thaliana columbia
  unsure (1)..(507): unsure at all n locations
gggtttacgcaaagtctgatttctctattcattgctaataaagagaaaaacaacctgtgctaatatacacattgagatctatgtttcaaagaaaaggcagacaaaatgttcaaagcaaacagagtgtttctgcattcagataaagaagaaattacaaacactttcaggctccggagttggatgattaaacggaatttggttctccaaatatcattctgcagaataaaatgatctccatgtaccatcagaaacaggatccaagaaaggaatgtcttcatcttgttctttagttatcatataatcaacagacaaagcttccccctctagagatgttgatgatgatgcttctccctcccctaacggaagctccatatttagagcggccaatcctgtgtctgcgacaatttgggccccggctaaggtgggatattcttcagatgtcccgatgcaacggaaccgntctggctcccgangcngtgggggacccggtctggggaaaangggcgt

SEQ ID NO: 83177 - DNA, 495 bp, Arabidopsis thaliana columbia
  unsure (1)..(495): unsure at all n locations
cataatccattaattatcttttataatttccatcttataacgaacccattccaaggctctagaagacatatttgttggccaaagccgactcttgaaccctaaacccctaattaccgctttggtcaacaatcaccaactttgaccttctcttctccatttagaaatttgcaatcaaagggacaccaaacaagggatcttcaaattttttggcaatgcagattggaaaagaagaaccacaaagaatttaagaagctggtacacaacccaacctttttctattaaaactggaaatcatttcgnttcttttctttcttcctataggaacagacatatatggatgaagttataatccncatcagattcagacccatgaggttccattattatcccaattatggccaggnaacttcagtggggccagncgtcgnggnatgaccnnggcaaggcacagccaagcacacacnggcccaacccnggaatgcnngggggggggga

SEQ ID NO: 83178 - DNA, 567 bp, Arabidopsis thaliana columbia
  unsure (1)..(567): unsure at all n locations
aggaaactgaaaaagacaatgagcagcagcagcgatactcatgccggagaatctcgtcatcgccgtaacccgatccggtggctactcggtttcggtttcttcgtacaaggattcagaggattcccatggcttggagccaatttcttcctcacagaacagctccgtgttaatccttcagttcttcagcttctttcaaaactcagccaatcttccaatggtcgctaaacccatctacggcgtcgtttcagactctgtctacttctttggccaacatcgaatcccatacatcgccgttggagctttgttacaagcaatctcatggctagctatagcattcttgtcaagatccaatgtatcaatcttagctttatcgatatatcttctccttagggaatctccggtgctttccttcagtaggaagtcagcgcaatgatgctaattngttgcngnaatccgggaaagcaaaaaaaaccttagnggcgngaatcccggtgngggtacccgnaattngttttgggtggnttctttncttnggtggnatntangggaanccttttnnggnggntt

SEQ ID NO: 83179 - DNA, 418 bp, Arabidopsis thaliana columbia
aacaaggaatcactaatagcgctagccccaaacaaagtcacagatatacaaagtttgcttctaccatcgaaatatgaagcaaaatcaaagaaaaagctacacaatcgaaagttggaccatgtagacaatgacagagactatgtaaaacctcaaatcacaagaatgtcacaaagatatacaaaggtcacattaacccaaatgaactcactctatctttttactcttctcctttggttccgcttcatcatatatccacgaagttaagatcaacgggatcccaacgcagaacgcttttatagcgagtccgcgagtaaaccccgagaaatcattctttgttacaccgacaaacgatgcaagaacgattccaagatatccgctaactatgaatgcaagagcaatggctgacatgacaaatgcc

SEQ ID NO: 83180 - DNA, 506 bp, Arabidopsis thaliana columbia
  unsure (1)..(506): unsure at all n locations
aagaaaaaaaaatattgatttcattttgttgattttctacaaatacataaatcatttccagaaaaggaaaacagcatcaatttaagcctagaaaaccctaaaaactctgtagaaagaaaatgagaaaatttaaaagaaaacaaaaataccagcagagtcataagagcaacagatgacgccatggcatttttcttacctcttcctaaaataaaattaggataacaaacataacaaacaaatctaaactaacataagagagattctattggaaagaacccaaacaagtctcttacgttatctggtatcatgactctttgttgttgttgttgttgtcgttggctaccaccactactgttggttcttcattaaacctgaaccatcggatatcatcacctccgctgctgagccatctcaacctgncccaccagngntctcttcggaccgncgancttctgtccgataatggcctgagtngtgtggggagtgnagattttgctccnaagatt

SEQ ID NO: 83181 - DNA, 688 bp, Arabidopsis thaliana columbia
cttctttcctattttttatctttttattgttttgtatataaaatccctaaattcccgttttatgtaacggacataataagccgcgtacggcgtatccggcaaatcggcccagctcgagccatcatcaatctacggaggagatccatctctctctctctctccatatcgcaacaacactgctgaagatttcggggggttgccgacggagctggaatctagctttttcttctccagatctctaaaccgattctcaccggttaattggtattataaagccatggttcttgatgggcttgtatcttcaccgtcaaggagacaacaatgtctaaagaagcagtgggacgagttgggtagctggtcgactcttattcagaggcatcaatatctcttaacagctttggctcttttggctttcctctgtactgtttatctttactttgcagtcactttaggcgctaggcactcgtcctgctatggcttgaccgggaaagacaaggcaatgtgtcaattacaacttgttcaagctctctccaaagggaaacttaaattcttctagactgtttatctatcggtgaaagtttgaaacccccacatttattgttcttgtactaaaacattctttttcttctttattctataatgcaatttgtgtgtattattacatggtgaaataaaaccagagattcat

SEQ ID NO: 83182 - DNA, 518 bp, Arabidopsis thaliana columbia
  unsure (1)..(518): unsure at all n locations
gaaaattcgaagctttctcggcgatgatggagcgaacttacggccgtcgcatgccggggatgttaaacgacgacgtctcgcgggcggaacatatttttccgtcttcttcatctccagaactcgagccagttgatttctcaactcaagaatcatcttgtgtctggaattattctttaacatatgacattgaataaaggatgtctctgtcttttatctgattgccttttaacagccgtgaaggtattaatgaacctaacaaatgataattctgttggttgtcgggaagttgctgcctgcggaggactggagagcatggctgaattaagttgttggacactttccttcctttaacagattcttccgctttaacagtcagaattggagtccggggcaatntccaccaganaggttaaacancttanaagaccagggnnttangattttctttntanccnatnctgggggntcttggnaaancttngtnggnggaaaaccggggttaancnnggntaangnnt

SEQ ID NO: 83183 - DNA, 505 bp, Arabidopsis thaliana columbia
  unsure (1)..(505): unsure at all n locations
actaagatacgatatgattaactctcattaagcaatctatttctatatatctgtttgttctttctttgtatgacaaaagtacaaaagaatgggggatgtgaattactaacctaagctgaaccaaaaaaacaaaacctcaaaagaaagaactaaaagatactctatttgggtctatattatacgtgtaacatgttccattgtgtgagaccactaactataagtgtggagcaaacccaaagtgtggcagaagctgtacagtgagaggagaacgaagatgtcgcctgtttttttccctccgttctatggcaatttgcacgactcgataacttccataaccactttatgtgtttctggagggatcatgtccagtgttgtatgaaacgccacaaatctatccaacacggggaccagaattgccatgncgcgttttgggngaaanccccgaggnattccgaaactccacctcccgggggagaatgcagagagggggaaagcccccgccaca

SEQ ID NO: 83184 - DNA, 506 bp, Arabidopsis thaliana columbia
  unsure (1)..(506): unsure at all n locations
cggacgcgtgggcggacgcgtgggtgtgtgttcgcctttctctcgtacaagtcaaaatggcgtccgttgttcttcgaaaccctagctcgaagcgccttgttccattctcttcccagatctactctcgctgtggtgcttccgttacttcctcttactcgatctctcattctatcggtggagatgatctctcttcctctaccttcggaacctcctccttctggagatccatggccacttttactcgaaataaacctcatgtaaatgttggaactattgggcatgttgatcatggcaagaccactttaactgctgcaatcacaaaggttcttgctgaggaggggcaaagctaaagctattgcctttaaatgaaattggtaaagctcctgaaggggnggagggggggattaacttnttgccacggnttnntgtgggggtntgaaactncaaaggggnaactatggttcattnngggttnccctgggcacggnggtttttgtaaaaaantg

SEQ ID NO: 83185 - DNA, 1825 bp, Arabidopsis thaliana columbia
  unsure (1)..(1825): unsure at all n locations
tagtttgagatggaagaaccagtagaccgagaagatatcgatttaagggtttcatccacagatataggctggaacgaattcgcggccgcctcgaagcgccttgttccattctcttcccagatctactctcgctgtggtgcttccgttacttcctcttactcgatctctcattctatcggtggagatgatctctcttcctctaccttcggaacctcctccttctggagatccatggccacttttactcgaaataaacctcatgtaaatgttggaactattgggcatgttgatcatggcaagaccactttaactgctgcaatcacaaaggttcttgctgaggagggcaaagctaaagctattgcctttgatgaaattgataaagctcctgaagagaagaagagaggaattactattgccacggctcatgtggagtatgaaactgcaaagcgtcactatgctcatgtggattgccctggacacgcagattatgttaaaaatatgattactggagctgcgcaaatggatggcggaattcttgtggtttcaggaccagatggacccatgccgcagacaaaggaacatattctacttgcacgccaggttggtgttccctcacttgtgtgcttcttgaacaaagttgatgtggtggatgaccctgagctcttggagcttgtcgagatggaactacgtgagctcctcagcttctacaagtttcctggggatgatattcccatcatccgaggatctgctctgtccgcattacagggcaccaatgatgaaattggaaggcaagctatattaaagctgatggatgctgttgatgaatatatacctgaccctgttcgcgtccttgacaagcctttcttgatgccaattgaagatgttttctcaattcaaggacgtggaactgttgcaaccggtcgtatcgaacagggagtcattaaagtgggtgaagaagttgagatattgggtttacgtgaaggggggtgttccactaaatcgactgtaactggggttgagatgttcaagaagattttggataatggacaggctggtgataatgtaggacttcttctgcgtgggctaaagagagaagacattcagcgtggaatggtgattgctaagcctggttcatgcaagacatacaagaagtttgaagcagagatttacgtgctcacaaaggatgaaggtggacgtcacactgcatttttctctaactacaggcctcagttttacttgaggactgcagatatcactggcaaagtggaattacccgaaaacgtgaagatggttatgcctggtgacaatgtcacagctgttttcgagttaatcatgcctgtcccactcgaaacaggtcaaagatttgccttaagggaaggaggtagaacagttggagctggtgttgtatcaaaagtgatgacctaaactactcaaaagcacattcttctccttcgttctctaggaatccatcaatttcgagatttttctttttgtctttttgctgctttgagatttctttgggtagatcaaataaacagagagaaacttaatttatgtttccaatgagaaagattagggcagagggcacgaaacgtctatttctttttgatgcttcctactttgtgaaactttcaaaaagccacttccaattctttctcaccttcgtggtttgtcaagtatttgtttttatttcttttagcccctatnnnnnnnnnnnnnnnnnnnnnnnnnnnnnnnnnnnnnnnnnnnnnnnnnnnnnnnnnnnnnnnnnnnnnnnnnnnnnnnnnnnnnnnnnnnnnnnnnnnnnnnnnnnnnnnnnnnnnnn

SEQ ID NO: 83186 - DNA, 725 bp, Arabidopsis thaliana columbia
agtttggtctcttgtgttttcttatgatcgttgaccgagcctacgctagagagtttacggtcggtggtgcaacaggttggaccgtcccttctggttctcaagtgtacagtcaatgggcagaacagagcagattccaaattggtgactctctgttgttcgtctaccaatcaaaccaagattcagtgctccaagtcacaagagacgcttacgacagctgcaacacggactcaccaaccgctaaattcgccgatggcaaaacttctgtcacgctgaaccactctgggccatactatttcattagtggaaacaaagacaactgcaagaaaaacgagaagcttgtggtcatcgtcatggctgatagaagcggcaacaaaaacaccgcatcatcaccgccgtccccagccccagctccctcaggagaatccgctccttctccacctgtctcgggaacctttgagatgaccccagcaccgacgcctactacttctgaagacactccaaacagcgcagcttcttccttatcatttgtcgctgctcttcttggggctgctctagcttccactctattcctacactaagaagtttctcttttgtcttcccttttcattctgtatcgagtcttttccctttccctcttcatccaagtttgtgtcaattggtgtttgttgtttgattttttaccccatttgttcttcatgtatatgaataaaagttctactcgtaag

SEQ ID NO: 83187 - DNA, 571 bp, Arabidopsis thaliana columbia
gagctctccaccgccaccgacgaattcgaattctcagatgatgatgaacagaacgacgccgttgacggaattctcagcagatccgggttttgcggagagagcagctagattctcttgttttggtagtcggagctttaacggaagaaccaatacaaatcttccgattaacaacggtaataacatgggcaacaactccgggaagctgacacgtgtctccagcacaccagctcttaaggctcttgtttcaccggaagtcacacccggcggcgaattttcccggaagagaaaatctgtgcctaaaggaaaatccaaagaaaaccccatttctatcagcttctccatctcctagtttctcaaagacggcgggaaaagaatggtggaaaaggaggacaggtaaaaagttcacgttggaaaaaaggaggacaaaaggagaaggcgaagatggaggtgttttgaagaagaagaaggatggatggtgtaaggggccaaaagcaatttctcaaaaccacctgagcctcctaaagattacattcatgttcgagctcgacgaggccaagcaaccgatagtcac

SEQ ID NO: 83188 - DNA, 522 bp, Arabidopsis thaliana columbia
agtggaacgaagactaaaccaagcggctgcagctgatcattctactcttcctgcaacaagtaacgctgagcagaaacctgaaacccctaagccgcagatagcagttataccaaataatgcaagcacggcaactgcagcagcactgttaccttctcataaacctagtttgcttggagctcctaggcgggatggccttcacttttttctgatggtggaagaccccttatgatgaggcctggtgtagatataaggaaccaaaactttaatcaaccccccattctggctaaaattcctatgcagccaccttcctcgtctatgcattctccgggtggttggttggtagatgatgagaatagaccttcttttcctggtcggccttcaggactttatccaagtcaatttcctcatggaacaccaggttctgctcctgttggtccatttgcacatccatcccacttgaggagtgaagaggtagcaatggatgatgacctgaaaaggcaaaatccttcacgtcaaacaaca

SEQ ID NO: 83189 - DNA, 464 bp, Arabidopsis thaliana columbia
aaaaaaaactatcaacttagactacatatatacaatcactatacacaagacaaagcctaattgaggtggagccttgggtgcaaggtttcatactcactttctcaaaactctagaaaccaaaacagcaagagtcatgagactagctccctgaggaataggccatcttttcatcaaaaagtctcttatttgggacactttgttaccttttttgatctttgcttattttctcacattggtaatgaatatataccgtatgtcttcttccccacaatcacatctctctttcgacctaaattttgcatttctgcaaaactcacaactctgaaatgttttctttaggcgcttcctcttcaagtcctttgtttgatacatcttcactgctttcccacaaaaatccattatcattttccggacctttctctgtttctctagctagaggtgccacatgtgcaacatacttttca

SEQ ID NO: 83190 - DNA, 462 bp, Arabidopsis thaliana columbia
atcaatcaaaccaaaaagacttctcgtattcatgcctctccctcctaagaaaagaaccctaatttttattatctgcagaaatcatcatcatgaacgagattcatcaaccgctggcgaggagagtatggagaagcaacgtcgatgaagagatggctcgtatggccgaatgtctcaagcgattcccactcatcgctttcgatacagagtaccctggcattattttccgcacttatttcgattcctctagcgacgaatgttacagagccatgaaaggtaatgtcgagaacaccaagctgatccagtgtggtttcactcttttcaacgccaagggtgagatcggtggtgttttgggaggtttaaccttctcccaattttcggcgacccattcagacaacacgcaatcgagcttttccaatcgaattcctgaggaggcatggtttggatttgcagaagattagagac

SEQ ID NO: 83191 - DNA, 444 bp, Arabidopsis thaliana columbia
cggacgcgtgggcacacacccagagagagacagagattcatcgatatggcggtttcttgcaaccactctgcgattctcttctctccatcatccaccgctggttcctcctccgttacttcttcctcgtcgctcatcggctttcctcgtttccaaacgctgcgtttcaaatcaagaagcgtttattcgaaatctagagtttcttctcctgtctcggcattgcctttacgttctctagaagctctgattttcgattgcgacggcgtgattctcgaatccgagaatctacaccgtcaagcttacaacgatgctttctcgcatttcgatgttcgatgtcctccttcttcctctgagtctctcgattggagcctcgagttctacgataagtttcagaatctagtcggaggtgggaacccgatcgtgcatttcaagaaatggatggccact

SEQ ID NO: 83192 - DNA, 414 bp, Arabidopsis thaliana columbia
gttcatgaacgtggacagaattgtgcactatatacaatgggaaagaaaaaagagaagaatcattgcgaaagcgataatgttggtggattagtgaaaaatacagctgatattacacattgtgcgttgtattatcgtactacaagcaaaaaacttcaaaagggatatttttggagttggatgttgtctgtcatttcttggccagtaatttctttgggagcttatcgagtggcgttgatttaagtaaaaatagcctcgcagctcgctctcgcaatgtccctccgcacttcagaccacgtgactgaagctcagtcttcaatctctccatccccaaaacctccatgtctgctggtgaattgaagtcatcaaagttaagtggttcaacaggtttgcaacatactgcatcaacagacactg

SEQ ID NO: 83193 - DNA, 490 bp, Arabidopsis thaliana columbia
tgatttcatcatcatcactccgactaatatcaacggcggaccaaccgcccatgcgggaatcgaagctagcaacggtgtgaaaaacatcgctaacaagaaataaacagccaccgtaatcgccgttagacccgtcctccctccttctcttatccccgtcgacgactcgatgaaaacagtcaccggagatgtaccaagccaacgatccgatcacaatcgcagacgcgtcagacataaacgcgcaatactgtccggcgaaatctcctttctcgtcgacgaatccggcggatctagccattggagtacaagcgttcccgtccgtatccaacaatatcatacgttggagggattgtcaccctgagggcttccctgaaatgtcctttgtttatcccggagaagcttaaagctccggcggtatgtttaatgacgtgtacatcaacgatctttttgaaataatcatgagctgcatctccggccgatgtgttcggaaacg

SEQ ID NO: 83194 - DNA, 685 bp, Arabidopsis thaliana columbia
  unsure (1)..(685): unsure at all n locations
cagctctctacgactcactattagggaagctggcacgcctgcaggtaccggtccggaattcccgggtcgacccacgcggccgaatttttctacggtcagagattcaaaagagttctttctctctatcttattctccgatcatcatgatgcagcagccaccacccggaggtatccttccacatcacgctcctcctccttctgcgcaacaacagtacggttaccaacaaccttacgggattgctggagctgctccaccaccaccacagatgtggaatcctcaagcggcggcgccgccatcagttcagcctacgaccgctgacgagatccggactctttggatcggggacttacagtattggatggatgagaatttcctctacggttgctttgctcataccggagagatggtttctgctaaagtgattcgtaacaagcaaaccggtcaaagttgaagggatacgggtttcattgcaattcggcatctcaatgctgcctgctgaaaagagtttctaccaaaacaattcaaccaaacgcgttcctatccccgaggctttccttatatcaagcatcttttanggccttgaacttggggaatcaatttgagtttcaagggggggtaaaaccgnggncngggttnacccgggncttnaacggntnttttngncggggtngncttggctcctta

SEQ ID NO: 83195 - DNA, 1029 bp, Arabidopsis thaliana columbia
  unsure (1)..(1029): unsure at all n locations
ctggctgctgatgttacggattatatcttacttgagacgttcagagcctcttatccgtcagtnaagggtgcaaaggttgtnattgacagagtcactggacgtacaaaaggatatgggtttgtaaggttttctnatgaaagtgaacagatccgtgctatgacggagatgaatggcgttccttgttctactagacctatgagaattggtcccgctgctagcaagaaaggtgtaactggtcaaagagattcataccagagctctgctgcaggggtaacaactgataatgatccaaataacacaactgtttttgttggtggattagatgcatctgtcacggatgatcatctgaagaatgtctttagccaatatggtgagattgtgcatgtgaaaatacccgctggaaagcgctgtggattcgttcagttttccgagaagagctgtgcagaggaagctcttagaatgctgaatggagtgcaattaggcggaacaaccgtcaggctctcatggggccgaagtccttcgaacaaacagtcgggggatccgagccagttttactacggtgggtatggacaaggacaggagcagtatgggtacacgatgcctcaagaccctaatgcatattacggaggctactctggtggaggatacagcggtggttaccagcagacaccacaggcaggacagcaaccaccacaacagccaccacagcagcaacaagtcgggtttagctactaaccccgagagtattgcttgagttaatgtcactctgcttgttgtttgcgtactttgttatgaacttgtttctgcgtgccttgttatgaatattttcccaaacacagtttatttgtctttgcttttctctaggtgtgtgttgagtttttaactcttaataatgtttctgcgatgcttctgtttttaaaaaaaaaaaaaaaaaaaaaaaccanaaagnnnnnnnnnnnnnnnnnnnnnnnnnnnnnnnnnnnnnnnnnnnnnnnnnnnnnnnnnnnnnnnnnnnnnnnngatcaatcg

SEQ ID NO: 83196 - DNA, 1662 bp, Arabidopsis thaliana columbia
  unsure (1)..(1662): unsure at all n locations
gcagtacccgtccggaatttccgggtcgacccacgcgtccgcaaagggttatcaacaatctctcatctttagcattgttttgttatcttctttttcatcacaatttttctacggtcagagattcaaaagagttctttctctctatcttattctccgatcatcatgatgcagcagccaccacccggaggtatccttccacatcacgctcctcctccttctgcgcaacaacagtacggttaccaacaaccttacgggattgctggagctgctccaccaccaccacagatgtggaatcctcaagcggcggcgccgccatcagttcagcctacgaccgctgacgagatccggactctttggatcggggacttacagtattggatggatgagaatttcctctacggttgctttgctcataccggagagatggtttctgctaaagtgattcgtaacaagcaaaccggtcaagttgaaggatacggtttcattgaattcgcatctcatgctgctgctgaaagagttctacaaacattcaacaacgctcctatcccgagctttcctgatcagctctttagactgaactgggcatcattgagttcaggagataaacgagacgattcaccggactacacgatatttgtcggtgatctggctgctgatgttacggattatatcttacttgagacgttcagagcctcttatccgtcagtgaagggtgcaaaggttgttattgacagagtcactggacgtacaaaaggatatgggtttgttaggttttctgatgaaagtgaacagatccgtgctatgacggagatgaatggcgttccttgttctactagacctatgagaattggtcccgctgctagcaagaaaggtgtaactggtcaaagaggggagtcaagaggctctctatcatcttgaggcctggaactgatattcagctganatggttatctccttattgagtgcccatgcttagattcataccagagctctgctgcaggggtaacaactgataatgatccaaataacacaactgtttttgttggtggattagatgcatctgtcacggatgatcatctgaacaatgtctttagccaatatggtgagattgtgcatgtgaaaatacccgctggaaagcgctgtggattcgttcagttttccgagaagagctgtgcagaggaagctcttagaatgctgaatggagtgcaattaggcggaacaaccgtcaggctctcatggggccgaagtccttcgaacaaacagtcgggggatccgagccagttttactacggtgggtatggacaaggacaggagcagtatgggtacacgatgcctcaagaccctaatgcatattacggaggctactctggtggaggatacagcggtggttaccagcagacaccacaggcaggacagcaaccaccacaacagccaccacagcagcaacaagtcgggtttagctactaaccccgagagtattgcttgagttaatgtcactctgcttgttgtttgcgtactttgttatgaacttgtttctgcgtgccttgttatgaatattttcccaaacacagtttatttgtccaaaaaaaaaaaaaaaggcgcgccgctctagaggatccaagcttacgtacgcgtgcatgcgacgtcatagttcttctatag

SEQ ID NO: 83197 - DNA, 581 bp, Arabidopsis thaliana columbia
  unsure (1)..(581): unsure at all n locations
tttctttttttttttttcttacaacaaactcagagtttattcgaggacttactgtttttttttttttctttagttacacccaaatatacaaataataaaaaaagaaaagagattataccacaccattacttactttaatcacaacataaataactatataagaatttatttatcaaaggagctttaattacaaagctcaattcacaagtcctgggtcgaaactaacgcccgttgacggcaaccatatattcccgtcaataaaactcgccacagtgaatttttccgcttccggtcaccgtcaaagacggatgacacccactccatttaacccgacccgaaaccgatgatccaggaccccgaattcccatattctccgnaaaacagagatttgnaganccggnaaccaccccgnccaagggggccaacccgncggatggaatcgnncccgccggtaaatgattgnatcaccaacgncctcngatnatcccttccacgggcggccaaggtaaggcatcgnttccggcgggggtcctggaagtttgaatcgnggttcgggggtttnncccggnatggncggccnt

SEQ ID NO: 83198 - DNA, 454 bp, Arabidopsis thaliana columbia
cacgcggccgctcattcccacaaagagaggtacaacaagactcgtcgctcttcgctttttcttctctctttctttctcttgccagtagtgtgatcttacgaagcttttagtagagaaaaagcatatacgctttgtctttcttaatcgactgataagtccttaggatcagatggaacaaatgggtggctactcaaaacaacaaggtccatttttagtttgattaagggatttggatctgagcttacttcatcaactttgtcggaatatacatttgctttgtgtggatttggaagttgtccctgaatggcgtccgaggatttgaatattgttgcggaatcaaagaaaggggaagagaatgttattgttgataattccaaggacatgaatagacctgagaatcttgacttatctactgagaaaactgatactgccaatgagaatggtccaaaagatg

SEQ ID NO: 83199 - DNA, 415 bp, Arabidopsis thaliana columbia
gcaaaaccgttgctatacttgttatcaacccttgcaatccatgtgggaatgttttctctcgccaacatcttcaaaagattgcagagacggcttgcaagcttggtatacttgtgatcgcagacgaagtctatgaccattttgcctttggggataaaccatttgtgtccatggcagagtttgcagagctagtgcctgttattgtcttaggtgctatatctaaaagatggtttgttcctggatggagactcggttggatggtgactcttgaccctcatggcatcatgaaagattctgggtgtgttcagactcttatcaatgttggtcaacatgtcgacggatcctgcaacgtttattcagggagcaatgcctgatatcattgggaatacaaaggaagagttcttctcatcaaaacttg

SEQ ID NO: 83200 - DNA, 460 bp, Arabidopsis thaliana columbia
agctaacttgtcgttgtttgacggtaatgaagctgagaagtttccttctgctagtggaggatatggcttttcagatcaaactggattagcttcacataatgctaatggtaatagcttggctgataagagtagatatcccatttcttcatttggggaagatcctcagcgacagagtttcatgcaactgagtccaaagcccttgggataagcaaatcatgaatgctgagcagcttcttgggaatgacagggaaagaaacccttttagtgggaaatctcgacatggctttgttaacgacatgattactgagagtccaggggatatggaggtgaacccctgtggatttttctcgcttctcagattccccggacttcgccgctcgagagtcttagcagaagttttattttgctaatgggtgtgatttgcagttgacaattgagatgcttactcagcttgagctac

SEQ ID NO: 83201 - DNA, 317 bp, Arabidopsis thaliana columbia
accgacaaaggagaagtaaagtcaaatcccatacaacccaggaacccgaggaccgaaagaagctgatcagctactagagaaagctggttaccttcagactcacggctatatctggatccctcctacactataaaaccctacatatatataaatacacaatacatgtacctacatgtatatgtataaattatgctgaatagtccctcctcgagtttggtgtttgtacgtgaaacttgctacttcagctgttcactttgacacttcctttggtcttgtatttgcggctttgtaaaaataaaaataaaaatcttaccaat

SEQ ID NO: 83202 - DNA, 574 bp, Arabidopsis thaliana columbia
  unsure (1)..(574): unsure at all n locations
ctcaaacactccaacatttgccacaacaatccttcgcatacacaacgaaagatgggaaggtgttccatttatattaaaggccggaaaagcgttgaattcaaggaaggcagaaattcgcattcaattcaaggatgtcccaggcgacatattcagatgtcaaaagcaaggaaggaacgagtttgtgatacgcttgcaaccttcagaggcaatgtacatgaaactaactgttaagcaaccaggtctagatatgaatactgtgcaaagtgaactagacttgtcgtatgggcaacggtatcaaggtgtcgctatccctgaggcatacgagcgcttaattcttgacacaatcaaaggcggtcaacaacatttcgttcgtagagacgatttaaaggttgcgtggggggtcctcacgccgctacttccacaggggtccgccaaaggggaagttaaggccatcccattcaaacccgggtgccgaggcccgaaagaggctgtnccctcttnggnacctggttntttagcttcnggttttttggtccccccccntttaacccncctttttnagtccntncctnnt

SEQ ID NO: 83203 - DNA, 436 bp, Arabidopsis thaliana columbia
ctttcttctactctgtgatcaaactatcgaagaaaaaacaaaccctagatttatccgcccctcttcttcctctgatgataagaaagtcgaagactttgagaatctaaagctgaaaaattttgttttttttcattgagggaatcgaatcgagttatgtacaaggatcggagtggaggaggaataatgggtggtggtggatcatcgagatcggagatccttggtggagctattgatcggaaacgaatcaatgatgctttagacaaacatcttaagaaatcttcaccttctacatctagggttttcacttctaaggacaaagattctgtcccttctacttcaactgctaaatctcagcttcattctcgttcccccgatgttgaatctgacacggatagtgaaggatcagatgtgagtggttcagaaggtgatgatacct

SEQ ID NO: 83204 - DNA, 497 bp, Arabidopsis thaliana columbia
  unsure (1)..(497): unsure at all n locations
ctctctctcacctcttcttatctctctcgttctctttctctaaacttcaacaatcgcttctaatcgtttgatcacattgcacaaacattattaatagagcttatgatcaaagagtgttgccggaaatatggggaagaaagggagtggtggatggttctcgacggtgaagaagaaagtcttcaaatcctctcctaaagactccaagagagagaacaacattggtagtaataacgccgacatatggcagcagcagcatgatacgcaagaagtcgtgtcgtttgaacattttccggcggaaagttcaccggagatctcccatgacgtcgagagcacagcatctactccagcaactaatgttggagacagaaaacacgctatggctgtagctatagccacttcagctttctgcngaagccncggtttnaagccgaacaaagtntccgctnaaagtgggttngnttttcccggnttcaaaccttcaancnggnggaagaata

SEQ ID NO: 83205 - DNA, 387 bp, Arabidopsis thaliana columbia
aaggaaatcaaagtagattttgaccgtgacgttaaaaacttgagaagacatgttcaattattaatgtcatatacaattatgtaacagggaaaatatatttcaaacaagataattaaccaaccacacatgtaagtttttattcaagattacatatactttcttctaatgatcatgcctccagcctctctttccaaacccggtaggactttgactaggactaaccggtttacgtcggatatccgattttgggttcggactcctaggaccgggataaccagttgttattgctccacctgaacttgacgaatcacaacctgatccattaaccgacccgtttttggtcgaggagttccaatacggcataaacgaagttccttgtagtttgac

SEQ ID NO: 83206 - DNA, 601 bp, Arabidopsis thaliana columbia
  unsure (1)..(601): unsure at all n locations
cctggccataatccggcagcatggatgcttgatgtcactgcttctaccgaggtacaccggcttggagttgattttgctgaaatttacaggaactcaaatctttgtcaacgcaacaaggagctgatcgaagtactcagcaagccaagtaacattgcaaaagaaatcgagtttccaaccagatactctcagtcactgtatagtcagtttggttgcttgcctgtggaaacaaaacctatcatattggcgaaacccacaatacactgcagttcgattcttctacaccgtggttatctcgctgatgcttggaacaatatgttggaaatttggctccaaaagggacactcatcaaccagttatttaatgcaatggggatcgatgtancgctgcggtnctcttcaattgggattcaccaatgcaaccgctgcacaggcccgttgtttccattngaaagatttgttttaataccncggggagngcagcggggatttncttgggacttcccttttgcaatttcaacaggggttttngnanttcntnacgggttggcaaatccccanttcaggncntatttttnnaatggccgggtttnattggcccgntc

SEQ ID NO: 83207 - DNA, 651 bp, Arabidopsis thaliana columbia
aaacacaacacaagcttttattgatcccatacatgtaatgacagaggaagaataggcagtcccctgccttcttgggtataaaagccccaatatacaaataaacaatagatgattgttgtatacgtgtatatatgaatatgagagttgggaagtggtaatcaacccatcatcttctcgggaatttgaaacctttattggccaatgcaaacacaagggagaagaacgccgcaaaaggcgacacccataaatagctgagacacctaagaagtcatgtttataccccatcacatcctcaagcagttgtttcaccatcacctgatgggataccgtccgatagcttcaccgatctttcatcatcaccgtactgagacaccaatagaccgtacagtgtccaagccaccggggttgcccagtagtaccatctccaccacagaggaatcctcttggatggggtcatgaagccactgaaaaggttccagagcatgtagaagggtgctgctataatcgaggcgacattgtggtttggggtgattgctgtcgtcatcatcccgtagaaggtgaagtacattatcgaaaagtacatgaagaataagtaccacaagaacttcaccgcggaccattcgaacgcggccattgcatagaatatggtgc

SEQ ID NO: 83208 - DNA, 563 bp, Arabidopsis thaliana columbia
  unsure (1)..(563): unsure at all n locations
ggtnatatgcacttggccaaatatatactagcaaagatgtgtacaaccagtaaactagagatatatctctattacagtactggttcatgatcagtgattgttatagatgaccaatacacatttctcagaaaaaatgacaaggaacataaaacacaacacaagcttttattgatcccatacatgtaatgacagaggaagaataggcagtcccctgccttcttgggtataaaagccccagtatacaaataaacaatagatgattgttgtatacgtgtatatatgaatatgagagttggtaagtggtaatcaatccatcatcttctctgggaattgaaagctttaatggcgaatgcaaacacaagggagaagaagccgcaaaaggcgacaaccataatagctgaggcacctaaggaggcatgtttttatcccatcacatcctcaagcagttgtttcaccatcacctgatgggataccgtccgatagcttcaccgatctttcatcatcccggtctttggcaccattggccttcagtnccagnccccggtttcccgtgncccntntac

SEQ ID NO: 83209 - DNA, 979 bp, Arabidopsis thaliana columbia
caggtaccggtctggattaaaagtagtagaactaaaaaatggcaaacctcttggtctctactttcatattttccgcacttttgctcatctccaccgcaacagccgccacattcgaaatcctaaaccaatgtagttacaccgtgtgggctgccgcaagccctggaggtggccgacgtctagatgctggccaatcatggaggctagatgtcgcggcgggcactaaaatggcacggatttggggtaggaccaattgtaactttgactcctcaggtcgtggccgatgccaaactggtgactgcagtggtggactccaatgtactggctggggacagccaccaaacacgttggctgagtacgctttgaaccaattcaacaacttagacttctacgatatctcacttgtcgatggatttaacatacctatggagtttagcccaactagttcgaactgccatcggatactatgtaccgcagacataaacggacaatgtccaaacgtgttgagagccccaggtggatgcaacaacccgtgtactgtatttcagacgaaccaatactgttgtacgaacggtcagggatcatgtagcgatactgtgtactcaagattctttaagcagagatgccctgacgcttacagctatccacaagatgacccgactagcactttcacttgcaccaacactaactacagggtcgtgttttgtccaaggtctaggctcggtgctactggatcccaccagctcccgatcaagatggtcaccgaggagaattaatagactcgtatctactgtatgtgtgtgtgtgtgagggtgtacgtagatatgcgtacgtgtgacgtgatcatatatacgttaccataaacacttaatggattataataaggcatgcaataataattacgttagtcgaaaaaaaaaaaaaaaagacttatttttctctttccgatcaattaatgtaaaaataacaatttcgcttcgat

SEQ ID NO: 83210 - DNA, 465 bp, Arabidopsis thaliana columbia
tccctatgtcgagccgtgggagtttaccttcgaaagaacagatttcacaggtattatcacacattcaagatgagattgaggctgttcatccagatgctcgtttgactcttctagttttgcgtgagataggcaaggcccttagtaacctagctcaacgagctgagtgccagatttctacaggccctgagacgcggcagatatcaggtcctgcgacttcaacacagatcaggaacttcacattatgtcagcatctgcaaggaatccacacacatatctcatccatggtagcggaccttcccagtattgctactgatgtattgtctccttatctggctgcaatctatgatgcggcatgtgagccagttacacctttgtttaaagcaatgcgagacaagctcgagtcatgcattcttcaaatccatgatcaaaactttggtgctgatgacgctgacatggacaacaacg

SEQ ID NO: 83211 - DNA, 438 bp, Arabidopsis thaliana columbia
  unsure (1)..(438): unsure at all n locations
atgtgagagatatagtaactacaactgaatgaaaaatccatgagacaaaaaagttcgcaatagaagaatattgattcggtaacaaagcacagcttataagttttcttgtgttaaagatgaaccaatttgaagcattagaggataaactggactaaactctttgtcccctctcgatctgatcttcactgcataatcatccaaagttgcttttatccctttccagatctgatcctctctttggttatcaagccacagtgagtactgtttaggacttagtctgttcttctgcatcgggggactctaactcggcctggggcctcttgctgtagagatgcatgtaggacgatgcccgggggggaagaccattggatgagnggggnggnccccattggggaggttcccgggaaaccaanggcnaaagncncanagggcnntnaa

SEQ ID NO: 83212 - DNA, 514 bp, Arabidopsis thaliana columbia
  unsure (1)..(514): unsure at all n locations
cgtccgaacacaaatcaataacatactaaatggcttcaagaaaaccaaaggccaaaccggttaatcgccaatctgtgaggcacccaagtcacaaccatccgctgcgtgtctttaaagccaaagaagaggatgagaccgcatgctctggctgcgagctagagctgaccgggcaagctttcaaatgtataaagtcagagtgcgattacttcttacacaagtcatgtttcgaccttcctagtgagaccaagaacaagtctcaccaggaccaccctctgaccttgcttcattccccaccagatgatcggtctgtctacacgtgtgacgcgtgtgaccaatacggatctggattttcttaccattgctcaaacttgcaactacagtcttcatgttgggnatgnggcggttatncctgaatnccntagnatcggtgangntcatggacatcccactcanctcttcntttatttgnnaaccgtgtanagggnggtnnaggcaaggnncttaactttaancg

SEQ ID NO: 83213 - DNA, 544 bp, Arabidopsis thaliana columbia
tggtagagaggatagcacaagtcagctcgcccagatcatccagttcgcccagaagagccagctcatcgatagaagacagctcgtcgagagaagtcgcctcgtcaagatcatccagctcgcccagaagagtcagctcatcgatacaagtcggctcgtcgagagaagtccgctcatcgaagatcatccagctcgcccagaagagccagctcaccagaaccaccagctcgaaacagcatcgcctcgtagcgccctcaactatgctctcagttcgcaacaagcctttcagcccgtcgattgtccggcttcaagttcagctcgtggattagagattgattcttcaccttccccagagactcacccgtacttgtttaattcgtgcattaacagtcctctactacatgcaatattagaatgagtttgaacaaagttattcatctaccatacccatttattcatctgcactgtatccttagttatttattccaataaacgctgaattttatccaacccaaaaataaataaatagaaatttgtgttcgaaaat

SEQ ID NO: 83214 - DNA, 784 bp, Arabidopsis thaliana columbia
  unsure (1)..(784): unsure at all n locations
cgcgtccgcggaatatttgctttgatgatccagaggaaaacattttacgttcacctctcaagaaactgttcgttgaatccacaaccacagaggaagaagaagaagagtcagatacggtgggtccatattgttcatggacaaatcgtacggtggagcaagcatcaccagagacttgtcggaaaagtaactcaacagggctctcaaagctatggagatttagagatcttgttttgagaagtaacagtgatggaaaatatgcgtttgtgttttttagcaacggctcttcatttacatcgttcacgtcgtttacgacggcgagattgagtgttgtggttaagtcgtcggagaaagggaaagagaaatctaagacggataagaagaaggataagatgagaacgaaatcggcccatgagaaattgtatatgaggaccagagcaatgagataagaagggaaacgaagatcgtatcttccgtataaacatgttgggttattcactaatgttaatggtttaaccacaaatgttcatccctattgattaaaccgatctgtcgtaccaaaatctctaccgacaaatctttgccttttgtatagatctaaccttttttttggtttatgtgtattataaaaccttctttttgtaagtaaaagtgaaactttacttattaacttttcgtttgtatcaaaaaaaaaaaaaaaaaaaaaagnnnnnnnnnnnnnnnnnnnnnnnnnnnnnnnnnnnnnnnnnnnnnnnnnnnnnnnnnnnnnnnnnnnnnnnnnnnnnga

SEQ ID NO: 83215 - DNA, 1387 bp, Arabidopsis thaliana columbia
cacattgactgtgatctatctgttcatgggaacgagatggaagctagcgaggatgatgatgatgatggccgatacatgaatagagaaggagaactcagttttgattacagaacaactgagcagaaggtagaagcttcttctctctctacaccatgggccacaaagatggatgatacagacctctcgtttcctcgcccttctacaacaagaccagcagcggtaaatgctgatcatagagaagaatatccagtttcaacccgcgataagtatttgagcagccattcagctccgttgttcccagaaaagaaacctgatgtatcagagaggttgagacaggcgaatccatcttttaatgcctacgtattaccaacaccaaatgattcaaggtactcaaaaccggtttcccaagcattaaatccgaggccaacaaaccacagtgccggaaacatatggcattcatctccgttagagccgataaaaagcgggaaagatgggaaagacgccgaaagcaacagcttctacggccgcctccctcggccttctacaacagacacgcatcatcatcagcagcaagcagcaggaagacatgcattttctggacctctcagaccgtcctcaacaaaacccatcaccatggctgacagttattcaggcgctttttgtcctctgccgactcctccagtactccaatctcaccctcattcatcatcttctccaagagtctcccctaccgcttcacctcctcctgctttttccccaggctcaacgagcttcacgagcttccaagacccccaggccactttgcaccacctccaaaacgagccaagtcccctggtctggttggtcactcagcgcctctaaccgcatggaaccaagaaagaagcactgtcactgttgctgttccgtccgccaccaacattgtggcctcgccgcttccggttcctccgttggttgtccctagaagctactctataccttcaagaaaccagagagctgtttctcaacggctggtcgaaaggagagatgatatagtagcatccccaccgttaacaccaatgagcctgtctaggccacttcctcaagccacaggagttgctcagaccagtcaaatcagaggagtaggaaagctgatcgaacgatgaggctgccgcgtttgcgtcacgtttgaccaaaacgctgattgtacaaattcacggatcttcacaagtgaatatagaagtcagtatatgtattattctttagttggttaatctcctttttttttttcccattgtaaatctgaagcctctgctctttattcccttttcattttcaaaaaaaaaaaaaaaaaaaagggcggccgctctagaggatccaagcttacgtacgcgtgcatacgacgtcatag

SEQ ID NO: 83216 - DNA, 372 bp, Arabidopsis thaliana columbia
ccatgaggtactcgcaaagctccacatggtagcataactactttgcaacaaatgtgtctcttttgagatcagtcatgtactaaggaatttaaatgctgatgcggatgagcaggcaaacttggctgtccgtcttcccgaaggagaagttgaggtggcgtgaaggctaattatcgatgaactaatataaagatccggagttacacactagcgactagccactagaaactggtgaagaaccagaatgagcacagagaattctctgtcagatctcacagagaacagcagaaactgactcatcatttgtcttctctttacttcagatgatattttgccggcgttctaacgttttattttgctttgctcttacactag

SEQ ID NO: 83217 - DNA, 639 bp, Arabidopsis thaliana columbia
  unsure (1)..(639): unsure at all n locations
ancggttccancgaaagntccagaggtggccgtttcaactctncngctttcntgnctgcctatggaccacangcgnctcgngatccccgncttctcctgatctccccaaatctttcccgttcncgattccttccacgattcttacatgattttggatcttggcccatcaagctagggcacaacaccaattttctcgggcctctatcacccgacgacccgaaaatgcccggagaagaaatgaatatggatggaattgggagtaaaggtgaccccatccaggatggtggggcctcccctgagattgtgatagcaacccttgtgtgtaccctggcttcttttcttcgtggccccaaaagctgaaggagagagcacgaccagcttcaagggtgattcaggcgaaagtttattttaatgtgcagctttcataatatcagcattatcatctatgagatctggttatctatttaagatcagcattgtcattgttggaataagttttctttaccaaactctaaacccaaatgttccactattgaaacttttttttgtttttcctcctgttttttagcaacaaaatgtagggatatctgtttttttcttgtgatgactgtgaataaagaagaaaagagatttgtactc

SEQ ID NO: 83218 - DNA, 774 bp, Arabidopsis thaliana columbia
atctagtacgcctcacataaggataagctggtacgcttgcaggtcgcggtccggaattcggggttcaacccacgcgtccggcccggtgttttgtcattctctgtaatagagattctcatgatggttgtggcttcgtttgttccaaacttcttgactggtcttttcactggagctggccttattggaatcatcatgacgtcttctggattctcccgtcttcttcctgatcttcccaaaatcttttgccgtttctcgatttcctacacgatttcttacatgatttttggatcttgggccatcaagctagggcacaacaacaattttctcgggcctctatcaccggacgagccgaaaatgacaggagaagaaatgaatatgaatgaatttggagtaaaggtgacgcattcaggatggtggggcttccctgagattgtgatagcaatccttgtgtgtacctggcttcttttcttcgtggcccaaaagctgaaggagagagcacgtccagcttcaagggtgattcaggcgaaagtttatgttaatgtgcagctttcataagatcagcattatcatctatgagatctggttatctatttaagatcagcagtgtcagtgttggaataagttttctttcccaaactctaaacccgaatgttccactattgaaacttttttttgttaaaaaaaaaaaaaaaagggcggccgctctagaggatcccagcttacgtacgcgtgcatgcaacgtcaagatagtgtcacgtaaaacgaaaacctcaa

SEQ ID NO: 83219 - DNA, 761 bp, Arabidopsis thaliana columbia
  unsure (1)..(761): unsure at all n locations
tcgacccacgcgtccgcgaaaaaataaaagaggaatcaatttttcatatatagccagagtcacatagtgattcttctccaatcaaatctctatcaacaatgacaagcttgcacaaaaccctcttcacacaaaatcccactactttagatcaactcatgatgtgccacacgggaagagacaattcatggaaaaaactagaaaacatagacgaagaaggtccatcgacggtggcacgtgaagtgaggacggcgttaccaccggagacgccaacggagatgatggagttcttggggagatcatggagcatttccgccgtcgaactcacgagagcttttttcaacaattccactgccgacactaactcttttcttctatcttactatcgttaacaccaaccaaagaagacagagaagatgaagaagattctacttccatggcttcttctcgtgaccttctgctgccacatgtgggaaataagaccagccctccaataactccaagaaccggtagagaaatgaagcatttgtacaagagcatgataagaggaagaacaatgggaagaagattaaaggatcagaaggagaagaagaaacaagagaccagaactcgcaacgctgagattcacgccgcggtctctgtcgcaggagtagctgcagttgttgccgcaaccgcagcatctaacgctagtnnnnnnnnnnnnnnnnnnnnnnnnnnnnnnnnnnnnnnnnnnnnnnnnnnnnnnnnnnnnnnngacacgaact

SEQ ID NO: 83220 - DNA, 441 bp, Arabidopsis thaliana columbia
  unsure (1)..(441): unsure at all n locations
aaatcacaagaaaccatatcaagtccttgttcgtggtaaatgttcttcccttctaggtagatgcgtaagcggacaccattggtcgaaacatattgtggcatgcataaaactttaaacataaatctttgtattaagcttgtaagtcataaggaacaacaaagctaagacacttttatataggcccaaaaacacatgatacccttagatataggaaatatggaaatactctaataattgtttgttactacaggatcttgtcattgcagggactgacacctcggtgcaagcaacacagtggacaattgggggggctcatttacaacccctaggggctcttgcgggggtttgtggaggaggaatccgaatccggttttagggggggccccaangggtttttttnttgggnaannngtttttccccaanccccccctttnttttta

SEQ ID NO: 83221 - DNA, 537 bp, Arabidopsis thaliana columbia
  unsure (1)..(537): unsure at all n locations
gtgtaatctctaagaatacttttcattattaattataaatttattcttcatcttgtagaacaatatcttcttccttaataataatttgtttttttcactttcactctgtttttagcttattaattcctgctccatcactactcactcactcctcctacaatttcgttactcaattttttattatattttttgtaaagaacaccaaatccaccaaaaccttacttccttaaatcccttcaattctattctcatttccatatttatttatatactttggcattgtaaacaaaaagaaacattcattaggcaaaaataatgacggctgacatcgatttaggacaaggaggagcttttggatatcaccggaggcgttggacgggaagtgacgncagcgtatattattcagacgggtgaagatgtgatgtcatgctnctcttactttctattcgncggcctggnggancggatgatncgngggggnnnagccggggaagttnggcgggtaatnggccncgncggcgggntagatgatnntnt

SEQ ID NO: 83222 - DNA, 996 bp, Arabidopsis thaliana columbia
  unsure (1)..(996): unsure at all n locations
tcgcggnacggcgaatacggctggtacataatgttgaagctttggagatggtaccagcgatgcctgacggttcatcctgtgaaaactcaggtcatcagttctggatttctttggggatttggcgatgtcaccgctcaatacatcactcattccactgcgaaacgtcgtcttcttcgtctcaccgaaacgaataaagatgttgacgcagatgcagaattcaaggtcaactggaagcgagatgcagaattcaaagtcaactggaagcgagtagctatcacgagcatgtttggatttggttttgtcggacctgttggccacttttggtacgaaggcttggataaattcataaaactgaagcttcgatatgtaccaaagtcaacacgttttgtagctgccaaagttgcaattgatggtcttatctttggacctatagatctactggtgttcttcacatacatgggattcgccacaggaaagaacacagctgaagtgaaagaaggcctccaagagagattttcttccgggctctagctccttgaaggcggagcattggccacttcttcagcattgcaaacttcagatatgttcccgtgcaataccagttgctttacgtcaacatcttttgcctagtagacagtgccttcctctcatgggtcgagcaacagaaggacgcagcttggaagcaatggtttacttcatcatttcaaccattaaaagaacgaggaggccaaggcggagtatgatcgttttccctgtcataaactttgaatgaaaacaaaaacgagtgtaattggcgattttcaacaacgaaagttgcctaggatacagattcttgatcaaatattatttcgtttcacgagaattcagtacaagtgaataaatgtctgttagtttttnnnnnnnnnnnnnnnnnnnnnnnnnnnnnnnnnnnnnnnnnnnnnnnnnnnnnnnnnnnnnnnnnnnnnnnnnnnnnnnnnnnnnnnnnnnnnnnnnnnn

SEQ ID NO: 83223 - DNA, 1010 bp, Arabidopsis thaliana columbia
  unsure (1)..(1010): unsure at all n locations
gcnnnnnnnnnnnnnnnnnnnnnnnnnnnnnnnnnnnnnnnnnnnnnnnnnnnnnnnnnnnnnnnnnnnnnnnnnnnnnnnccacgcgtccgcccacgcgtccgcccacgcgtccgctctggttcattttccatggacggaccttgacctctctgcttcccttcgtgcattttctctctctcactatcctctctctttctagtgtttgtttgatcctctgcgtactctgttcttcttctctcttcagataaaacaagtcctgcatattgaagatctgatgtcttatcgattgctaagtgtggataaggatgaactggttacgtcaccttgtttgaaagaacgtaactacttgggtctctctgattgttcctctgttgatagctcaactattcccaatgttgttgggaagagcaatctcaatttcaaagctactgaactgaggctaggtcttcctgagtctcaatctcctgagagagagactgatttcggtttgctgagtccgagaacacccgatgagaagcttctcttcccgttgctaccttctaaagacaatggttctgctactacagggcataagaatgttgtttctggtaacaagagaggatttgctgacacttgggatgagttttcgggtgtgaaaggatctgttagacctggaggaggaatcaacatgatgttgtcgccgaaagttaaggatgtctcgaagagtattccaaggaggaaggcctcatgctaagggtggcttgaccaatgcaccagctgccaaggcacaggttgttggttggcctccaatcagatcataccggaagaatacaatggcttcttctacttcgaagnaccactgatgagggttgattggggaaacctgggtctttgggtgttctggtttgtgaagngtgagcatggatnggtnnctnccgtattcttgagaaaagntccgncctttnaggaccttttcanttccctatnnaanaagtttgttttcttnnnctttgngaaaattttncang

SEQ ID NO: 83224 - DNA, 483 bp, Arabidopsis thaliana columbia
  unsure (1)..(483): unsure at all n locations
ccacgcgtccgattcaccagggaaaaatgttgcagaagttttctcatgtctatttctttatgtaacggcgatcaatttaagccgttaatatacctcgccggagctccgacgaacttcatctcttcccctctctcaggcaagaagaaatcatcttctctgagaattaaaaggatacaacaacttcaaagtacattagaagatagaataaatccaccactagtatgtggaacagtatcgccacgtcttagtgttcctgatcatatactaaagcctctatatgttgagtctagcaaagttccagagatatcaagtgaattacagattcctgactctataggcattgtggaaatgcaagaaagcgtgtgagctcgcgggctcgtgtattagactattgcaggaactttggttagaccctttgttactacagatgaaaccgggtaagnagttcatcagcngggtattnagtttggtnnattcnntcac

SEQ ID NO: 83225 - DNA, 827 bp, Arabidopsis thaliana columbia
  unsure (1)..(827): unsure at all n locations
tgcaaagcaattactggagaatccactgataggtccagcttcttacgcagggttgagcccgtgggtttcaggaccagaccttaaagagaggatgattaagtacggaagaacagctcatctttttgctctggttcgggacttagggtcaggtgaggttatgatggaaaacgaagttacatacaggacaaccaagaaagatagagagaatctgagggcaggtcttagacaagctttgcggggtttcggttgcagctggtgcagttgaagtcggaacatataggagtgatggacagaagatgaagtgtgaggcaattactaaagaagccatggaagagtttctagacgaagttgatgctgttggtggggttggcacaaaaggagagtattggacgacgtacttctcggctcaccagatgggtagttgtaggatgggagtcaccgcggaggaaggtgcgttggatgagaatggtgagagctgggaagcagaggggttgtttgtttgtgatggaagtatattgccaccagctgttggggttaacccaatgatcacccattcagcctactgcttactgcatccccctcaaagatagttgactccgctgcaaaaccaaacccaaagtttttggggaggttaaaaaagaaagaactggaaccacccccgtagttcccataccgaataaatatgttttcccctgcaaagacaaattttgtttaagaatcatggaataacttatcttaaaaaaaaaaaaaaaaaaaaggacgaaggtcgaccgctttanagcatacgtgcgcgtgcatgcgacgtcatagctcttctatagtgtcac

SEQ ID NO: 83226 - DNA, 414 bp, Arabidopsis thaliana columbia
  unsure (1)..(414): unsure at all n locations
tcaacattcgtgaatctcctccactccctctctctctctctctagatttcaaatttgttatctcaatcaaaaatgggaatctgtgtgtcggttcgtcgggaagattcaaattcttcaccgacggtgaagatcgtgacggttaacggcgatctccgtgaatacaatgttccggtgatagcatctcaagttttggaagctgaatcagcggcagcttattcatcttcgtcttcctctagaccttcttcatatttcatctgcgattcagattctctctactacgacgatttcataccggcgatcaaatcggaagagccgttttcaggcggaccagatctacttcgttcctcccgntttctaaacggnnaaagtcgttttaacggcgtngggntntggcggctntcgcgtttaaagcaa

SEQ ID NO: 83227 - DNA, 494 bp, Arabidopsis thaliana columbia
  unsure (1)..(494): unsure at all n locations
cacgcgtccgcaaattcccattttaaccatgccaaacgttggttattcttagtgctattctcatggtgttttggtttagcattattgcctttaattcgaatgatttttgtttgaagtaaacaataggtgataggaaaccttgaccgacaccgagatagttgaaagtaaacatggaatagaactcacccggaaactggcttagaggaatagacaaaccatgctatactaagccgttgcccgatctaggtctagctgtttgggactctaacagactgagtggctgatatactagtgttagtgtagtacacctatgcagttaatctgatcataaagccttcttacagaggaatatttgttgggncctntataaaaggttgttggtcaggtgggtaattttntncggaatggcttttttttttttgnccccttnatctgnccantttcacggatnccncaccagtntttcagggtacatttcagggggggaatttttt

SEQ ID NO: 83228 - DNA, 489 bp, Arabidopsis thaliana columbia
  unsure (1)..(489): unsure at all n locations
gtagcagctggtggttccatggggagcaatcacatctgcttgcagccacttgctgcttgaggaaccatctgtagaaggaaaagcaagtcagtgggggagcgaagtcctaagtgttaaatcagatgctagtattcctgcacaagtggctattgagaaggcgatggaatcagtttgtcttattacggtcaatgatggtgtttgggcttctggtattattcttaacgaacatggtctcatactaacaaatgctcacctgcttgagccgtggaggtatggaaaaggtggtgtatatggtgaaggatttaaaccctatgtcttaggagccgaggaattttcttccacgggaagtaaaattttgggaacagaagagtcaaacattgccacgggaagctccacggaatcattattccgtctgttcggggggaccatcaggggatacaaacacanttttccttcanncttggaattgggcanncgnntgcgtttntt

SEQ ID NO: 83229 - DNA, 356 bp, Arabidopsis thaliana columbia
  unsure (1)..(356): unsure at all n locations
gagaaagtgagcatncctnctaatctcgtcaatggaaatnagcaacatgacctaaacattgctccaggtgaagatgcttcagcggctaagcaaccagaaaagaagcgatccaggtcttaaaagcgcaaatcaggcaacaacctgggatttggggaagatggaaaagagcaagccttccgatcttggcaaatgaggatgagcaaacagagcccaagtcaggcaacaacttggatttagggaatatgaaagagaacacgccttcggatctggctaatgagaatgagcaaacagagcttaggctacctaacaactgggattatgggaacatggaagagagcttgcctttgaatcttgct

SEQ ID NO: 83230 - DNA, 509 bp, Arabidopsis thaliana columbia
  unsure (1)..(509): unsure at all n locations
acnggatcaataatggcttttcttctttcagttacatgcgtatatcttaaaacgtttataacgatagaacaacggaagcactaagtgagaaatacaaattatctaacaaaattgttgaaattaagaatctgttacacttaggtagacaagtgccatttcaaaacttggtttcatgacaaacaccgaaatgctcattaaaacaccaaagtggaatgggcatcacacttctcttcttctttccggttttgccttaggttggtgcagtatttgagccacactgctcattgatcggaaggtatgctccggtttttcctcaatcaaacctgacttggtttccctgggctcaatacattaagtggaaggcattttcctcttccatattcgttaaccgaatcaaagttgctaagctaatttgcgctttttcttttttggctcctagcggggcagtgttnnggcaggtgncantccncnganagntcgnggatgnncttcncnaacgggcaaccgtg

SEQ ID NO: 83231 - DNA, 530 bp, Arabidopsis thaliana columbia
  unsure (1)..(530): unsure at all n locations
gtagaagaatagttttgatgttgtgattattataaaaacattcaaaatttgtcttaaatgatagcatatgaatgcagctttttctttgaagccttcttccatcgggacctatcttcttggcaggaaaggcttgacggattcgatcacaaccctaccgtcatatgacaatgatgcaaaaatccaaggctcacgcgagctccaagcaaggccgtagacactgtcttcgtagtcagtataagagtttagtaacgggttcacacgctgacgtgatgcttccaccgggctttctgatgttttatgctcactagatgctgaaagcaaaccacaagttgacagctgagtctgttccaacgctcngaattagctcttcatactcagggntacacctgacagnccatggtccagtgngnattaccagggagccctgacaggaactttgcttccgaagatccngngatganaccagntcannncgagaacggnatgtcnccctggnttgagcacntncgaangggccgnaatgnantaat

SEQ ID NO: 83232 - DNA, 496 bp, Arabidopsis thaliana columbia
gcgtccgggggaagtccctttgagttttgatcccttaaacactaccccttctgaaagccatggtgacaataccggacggaagctgaggatcttgtgcttgcatggatttaggcagaacgcgtctagctttaaagggaggaccggatcactagcaaagaaactgaagaatattgccgagcttgtgttcatcgatgcaccacacgaattacagttcatctaccaaactgctacccctccatccggagcatgcaataagaagtttgcgtggttggtgtcatcagattttgataaaccgagtgaaacaggctgggacagtggcccaatgccagttcgatccattggcagtaatcagactcaaactcgaagggttttgattaaatcggtttgacatacttgaacggacggcacttttgaagggaaaaggggcctttttggatggcattctccgggttttctctcaaggtgcagcaatggctgcggctgtatgtgggaaaca

SEQ ID NO: 83233 - DNA, 509 bp, Arabidopsis thaliana columbia
  unsure (1)..(509): unsure at all n locations
gtcgtcgttatagtttaataacttttacttggcaagagtacaagtacaagaaatatttgattgcaaaagcgtcttcttgtcttcttaataaagtcctcaaatgaattggtaaaggaaagctttaatctcatcaatataaggagactttgtaggaatgatgtggccaaaatcgtgctcaacaatggtggcgcaaccatcttcaaacaaccccgccaggtctgagctggcttgagtcacaatttgtctgtcttttccaggctgacttccgaatatgtgaagtgaagggcatttaatccgatcgtttctccttcatctccaacaatggccacggtgtgaacccgagcacaacacgcagaatctgaagccatttcacctacgagcgntcctgtttccacatacagcggagcatgcgnaccttgaggaaccgggatgcacaaaggccttccctcaatgcgctcagagcacgnttacaaccncagttggccgannganggnnatggatggnctnt

SEQ ID NO: 83234 - DNA, 625 bp, Arabidopsis thaliana columbia
ccacgcgtccgatcttgttttcttatcaaggaatcagtctctctccgtaaaggtccaagcgttagtgctgaaaccgaacagccaaaatggtgggagaggaaagcagggccaaacatgattgacattacctcagctgagcagtttctcaacgcgttaaaagatgcgggagatagattagttatcgtagatttttacggaacttggtgtggttcttgccgtgcaatgttcccaaagctctgcaaaacggcgaaagaacaccctgacatcttgttccttaaagtaaactttgacgagaacaagtctctctgcaaaagcttaaacgtcaaggtgttaccgtatttccacttctaccgcggtgctgatggccaagtcgaatccttctcatgctctcttgccaagttccagaaactgagagaggcgatagagagacccaatgtaggaagtatcagtaacatctcttcttcagcttctgagaaagttgaagattcaagtgaataatcaatgcctggttcagattgatcccagattattttgttaaatcgcttccctgtatatatgttgactgcattttccatgtggtgcatcataatttttgtacataaataaatgagtctgacttcgagtt

SEQ ID NO: 83235 - DNA, 580 bp, Arabidopsis thaliana columbia
  unsure (1)..(580): unsure at all n locations
atgannnnnnnnnnnnnnnnnnnnnnnnnnnnnnnnnnnnnnnnnnnnnnnnnnnnnnnnnnnnnnnnnnnnnnnnnnnnnnnccacgcgtccgcggacgcgtgggcggacgcgtgggcgagtttgattcctttaattgaaaatccaataaacaagcgggacctcgatttgaaatctctttatccagatccatctctccgtcacaatcttccatctaccgtcaccggaaccggcgagttagtcgtcgggattccagatctgtttgtctacgtcttccttctgtctctgtgttcatcagagtaccaattcgctcgattgttgctgcatttcgcgaattgtattaggtttatagcgtctatgaactcctgttttcgctcgatttgagtaacctaggtatttctctacgttgattgtttggatttgaagaaaaggcgcaaagtatgagtagaaatttcggaagtttcatgaagatttgagggattgagttaggtattgtagttgtagagagaatgcagagtttatcgagctcggctccgacaccggaggcgatattagaatggttacagaaggaaatggggta

SEQ ID NO: 83236 - DNA, 440 bp, Arabidopsis thaliana columbia
  unsure (1)..(440): unsure at all n locations
acgcgtccggactgaagatagtgggacttcagctacacttgaaggtgtgcacaaagcagtgggaccagtggtcagcagcttttgcaatctctcttttctggtagttctcgttcagatgagactggtcttagacgcgggcaaggttcagatgatcgtgtagatgtctcaagtgcaatgtctcaggtcctggagagccctgtattggatggattgctagcaggggtatctcgacaagctggtgttgattcaccaaatatgctgagaaatatgctccagcagtttacccagaatccacagatcatgaacacagtccaacagattgcgcaacaggtggatgggcaagagatagaaaatatgatgtcaggtcggagctccaaggccgagggcggcggcctttttaatttccgataggaatngtncancaaattaattnccttagt

SEQ ID NO: 83237 - DNA, 384 bp, Arabidopsis thaliana columbia
  unsure (1)..(384): unsure at all n locations
aaaganggaaatatcaaattgaatcggccctttagggaccagataaattacgtttgcttatgtttagcagagtatagaccatcccaaaccctaattcttaatacataagtgagggatctcagcaaataaacaaagatacttcaaagatatgacacttacagaaccaattcaaccaaatatcttatagaccttgatcatcttttagccggccttcgatatcacgtcttagcaactccgcatattcttgagaaagagcttcatcacagcaaagctcgttcactagttcgtcttggcttaacgcagcattttcgaccattgcacggaagacatccctgggtggatcagagggctcaatcattggagccatggattgaacatttacct

SEQ ID NO: 83238 - DNA, 330 bp, Arabidopsis thaliana columbia
  unsure (1)..(330): unsure at all n locations
aaacagcaaagcatttnttttacaacaatgggtaagagtcataatacacaaccaaagtctcgaattcaatgtgtaaagctttttaatntcaaatgtttgacgttttagnggcaagatggatcaatgctcgtcgatgataggtagtacgaagcttcttgtatttctgcacaaatgctgctgtatcaatctccttctctaggaacttttcttgcagggcttcggattcttcatccacctgattcatagcctcttgaagtttatgaacgaagagaaccaggaggagatagaatttgaggatctcctctttttgcctcttaagctcattaagct

SEQ ID NO: 83239 - DNA, 479 bp, Arabidopsis thaliana columbia
  unsure (1)..(479): unsure at all n locations
gggtacccaaatatacaataatattaaaaccagtttaggaatttctttatgtacaactttttccataagtttaaaaagagagtttcttttgttttcctagtacttatacttattgctattcttttgtacaaaatcctaaaaaagaagaaaactttttaaaaccatgttaaaaagaagaagaagagcttcctttcgtctcttctaacaatccactcttctcttccactaccgcttctgctaactttttacaagaacctaacttaagagagatggaaggaaccttgaccttccgttatggcataaatcagcttctccttcatcttctctttggatgaataaggaggaagcttcagataaattggcgcatgtcatcacactagggaggtcagtatcttgaagaatcgctaccatgccttgcggacgatttttagntttgggctntgagacgccaaacnccnttagggnaaccnngggnggcc

SEQ ID NO: 83240 - DNA, 384 bp, Arabidopsis thaliana columbia
  unsure (1)..(384): unsure at all n locations
taacataattctcggtgcaaattttcaaaccctgacacctagaaaggatgatggcaaaatagatcacagaaacaataatattctctgatcgccagaaaaaaataatatggcatattgatgggattcaaataaaaatgacaagttatcaatttggcttttaagcctgtaagcagagagcagtgttgagtgttgggatcgtactttaaatcatgatacgaaggacggcgagtcccactgctgaaatcgacacaagtgtacctatgcaatatttgatgacttcggattttgaagcttctaattgagctctcaacgcatgaatttccctggcaagccttgttgtgaggtttgttggttcggggaanccgattaancaggccanccgga

SEQ ID NO: 83241 - DNA, 446 bp, Arabidopsis thaliana columbia
  unsure (1)..(446): unsure at all n locations
ccacgcgtccggggaaagaccagttgacatggatactgtaagtcagtgtgccccaaggtgacaagaacactccgggttctgatgtcgccgctgaaaccgccgccgctctagccgccgccgccattgtattcagaaaatctgatccttcttactccaaagtcctcctcaaacgagccatcagtgtttttgcatttgcggacaaatacagaggaacttatagtgcagggttaaaacctgatgtttgtccattttattgctcttactctggttatcaggatgaatttgttgtggggagctgcttttggttacaaaaagcggcaaaggatttaaaaatattttggatttccattaaaaattnaatgggcaaaatnccttgggggcttgcnnggattatgggtnacnncttttttggtttggggtaacaagcancngttggggnccnnnat

SEQ ID NO: 83242 - DNA, 312 bp, Arabidopsis thaliana columbia
  unsure (1)..(312): unsure at all n locations
ggggaaatggtaacataactcatcagcagcagccttcatcatcttcttctgtctatggttcctcgtcgtctcctgtttcagctcttgaacttttaagaaccggagttaatgtttcttcaagatcaggggttaactcatcgttcatgccttccgggtcaatgatgggttcaaacactgtgctttacacttcttcaggggttccaacaaatggtggggttacaagcccaagtaatctcttccttctctaccggtcatcaaagggcttgggcaaaaatagcaaccaattagggntttangnnnttcaaaangggt

SEQ ID NO: 83243 - DNA, 511 bp, Arabidopsis thaliana columbia
tctaatacgactcactatagggaaagctggtacgcctgcaggtaccggtccggaattccggtcacccacgcgtgcgggcgcctttcttcttcttcttcttcttcttcatctggaaatcgatatacgattctcactctctacccgcgagaaaacactaattgattcatatcctccgtcaaggataaatctgtgtgtgattcaccatatctctttcttctccctccgccctggagctacgacgcctacagatctggctggtaaaaatcacgcagatagagactctggcccgatgctctctttacccattgatccaggctttttctgatttctctttggtcctagaaaccattaagctcctacctctttctaggtgatgctcgtgttctcttcactggctatgactccaggtgtgatccctcaaaatctccgtgtctttggccctggtttgaatccctctttcccttactgcattgctaatcacttcccttgattgagttgctccattccaact

SEQ ID NO: 83244 - DNA, 540 bp, Arabidopsis thaliana columbia
  unsure (1)..(540): unsure at all n locations
gggtattccgtaaagaaaggtcctaattatgctcccgagagaaagaaagtggctaccgatttgactcgagaaaatcttcaaaactggaaagagttagagtttaaggagtataacttcaaagctaaaggagcgcctgttgacgctgggcatcttcacgctcttctcaaggtgcggaagcagtttaaagacatatttgttcagatggggtttgaggagatgccaacaaacaactatgtggagagcagcttctggaattttgatgctttgttccagcctcagcagcaccctgctcgtnattctnatgacaccttctttctaaaaagttccctctactacaagaacacttccggaagattatngttgagagggtgaaacgtgttcatgagtctggtggttatggtcaagagggtataattatgattggaaaaagggnaggagcaaacaaggatntntttcgtacccacacaacgggtggcttaatttgggntncttttttgccctggncagaaanccntttntncccaanagnnctttncggtt

SEQ ID NO: 83245 - DNA, 491 bp, Arabidopsis thaliana columbia
ccacgcgtccgctctctctcttctttttccggcataacttacttaccgtattaccctaaactccataacctgtttcatcgataaagtgcctttgcttctatctctgtcactcttactacttgttgaacaatattctacaaaaaaatgtcgggaagaagatcacgttcgaggcaatcatcaggaacttcaaggatctcagaagatcaaatcaatgatctgattatcaagttgcaacagcttcttcctgagctcagggacagtcgtcgttccgacaaggtttcagcagcgagggtgttacaagatacgtgcaactacatacggaatctgcatagtagaggttgatgatctaaagtgagaggctatctgagttactagccaaactcaggcacttgcacaagctgcttttatccaagaagctttcctttaccccataattcctatctacctttttcttcttcttcttttttttggttactataataataataata

SEQ ID NO: 83246 - DNA, 510 bp, Arabidopsis thaliana columbia
  unsure (1)..(510): unsure at all n locations
ctctctattcatccatgtccttactctagccgtcgactctcgatccttcgcagccagacgaatccggcatcactcgcaacaccgattctacaggatgtgctgaaggagatatcggtgaagcagaagtggaatctagaggaagttagattttcgaaattggaagttaagaagattcgtattggtacgagtcggagatttgagatccggatccgattagggaagagcagattcgtattcatcttcccggatgaagtaacagattggagaagaagcggcggaggaagagatgttgagttgcaggaactagttcgggaagttaattcgagtaaggttcttgatccaccgcttgtactgaaaggtccatttgagctacgtgtcgatggcgatgatccgtctctcgcttttcgttgccnntgaacattttcaccatagcgggtttaaaacgngttntttntgagtaagggcattcnagtnggaaaaagggnagnccaaacagtcttntttttcctc

SEQ ID NO: 83247 - DNA, 508 bp, Arabidopsis thaliana columbia
  unsure (1)..(508): unsure at all n locations
gccgcgaaaatcaaaatcctccaaaactatggctctgattttnccctgtacattttgtacttcgcttcagaagaagaattttccgattaatcggagatatattacgaatttccgtcgaggagctacgactgcgacgtgtgagttccggattcctgtagaagtttccactccatcagatagaggatcgttggttgttccttcgcacaaagtcactgttcacgatcgacaacgaggagtggttcacgaattcgaggttccagaggatcagtatatattgcattcagctgaatctcagaacattagtcttccgtttgcttgcaggcatggtctgttgtactagttgtgctgtacgtgtaaaatctggagagctgaggcagcctcaaagcattggggatatcagcaggactgaagtccccagggggtatgcaccttcttggtggtggggtttccccacatctgacccttgaaggtaggaacacaagacggggccgggggctatttgttacaa

SEQ ID NO: 83248 - DNA, 805 bp, Arabidopsis thaliana columbia
  unsure (1)..(805): unsure at all n locations
gctaagggaaatagggccgaacgggggggtgaagatataccagagtagtgtcacggggagaaaaaagttttttcgccccctcgcctggcgagataaagagggggattcggatggggattgtttagcgttcgcgcaaaaaaagtccaccggttcaagggttgggcaaacgaggaagggggttcggaaattcgggggttccaggggatcaggaaatatggcattcaggtgaatctcagaccattattcttccgtttgcttgcagggatggttgttgtactagttgtgctggacgtgtaaaatcgggagagctaggcaagcctcaagcattgggaatatcagcagaactgaagtcccaggggtatgcacttctttgtgtgggtttccccacatctgaccttgaagtagaaacacaagacgaggacgaggtctactggctacaatttggaagatactttgctcgtggaccaattgaaagagacgattacgctcttgaactcgccatgggagatgaatagaaaccaaaagaagcatgtaaactgtaaagtggcagactttctgtattagaggtgactagtgagttcaactttcttagtcctgaatatcgtggtgcatcctcgtaaatctcttactgaactcaacgatattccgattaaacttctcaacaattcaacatttcatgaaaaactttacaatcatttaacaataaactccaaatccgaaaaaaaaaaaaaaaaaaagnnnnnnnnnnnnnnnnnnnnnnnnnnnnnnnnnnnnnnnnnnnnnnnnnnnnnnnnnnnnnnnnnnn

SEQ ID NO: 83249 - DNA, 3726 bp, Arabidopsis thaliana columbia
atggagtacaacgaatacgaacctgaacctcaatatgtagaagacgatgacgatgaggagattacccaggaggacgcgtgggctgttatatctgcttatttcgaagagaaaggtctcgttcgtcaacagctggattcgtttgatgagtttattcaaaatactatgcaagaaatcgttgatgagtctgctgatatcgagatccgacctgaatctcagcataatcctggccatcagtccgattttgcggagacaatctacaagattagctttggacagatttatctgagtaaacctatgatgacagagtctgatggagagactgccaccctgttccctaaggctgcaaggttgagaaatctcacatactctgcgcctttgtatgtcgatgttactaagagagttattaagaaagggcatgatggtgaagaagttacggagacacaggattttactaaagttttcattggaaaggttcccatcatgctccggtctagttactgtaccttgtttcagaactcggagaaagacctgacagagcttggagaatgtccttatgatcagggtggatacttcattattaatggcagtgaaaaggttctgattgctcaggagaagatgagtacgaatcatgtttatgtgttcaagaaaaggcagccaaataagtatgcttatgttggtgaagtccgttctatggctgaaaaccaaaataggcctccaagcacaatgtttgtgcgtatgcttgctcgtgctagtgcaaaagggggttcatctggacagtatattcgatgtactcttccatacatcagaacagaaattcctattatcatagtatttcgtgcactgggatttgttgccgataaggacatattggaacacatctgctatgattttgccgatacccagatgatggagttgctcaggccttccttggaagaagctttcgttattcaaaatcagctggttgcacttgactatattggaaaacgtggtgcaactgttggtgtaaccaaggaaaaaaggataaagtatgctagagatatccttcagaaagaaatgcttctctatgtaggaattggggagcattgcgagacaaagaaagcttactattttgggtatatcatacaccggctgctgctttgtgcacttggccgaaggccagaagatgatagggatcattatggtaacaaaaggctggatcttgctggtcctttacttggagggctatttagaatgcttttccgaaagttaacaagggatgtgagatcttatgttcaaaagtgcgttgacaatggcaaagaagtcaatcttcaatttgccattaaggctaaaacaattacctctggcctgaaatattctcttgctactgggaactggggccaggcaaacgctgctggcacaagagctggagtctctcaggttcttaaccggttgacatatgcttcgactttgtcacatctgaggcgtctcaattctccaataggacgtgaaggaaaattggcaaaaccaagacaactgcacaactcacagtggggaatgatgtgccctgctgaaacacctgaaggacaggcttgtggtctagtgaaaaacttggctctcatggtctacataacagttgggtcagctgcttatcctatattggaatttttggaagaatggggtactgagaattttgaggaaatatctccatctgttataccccaagccacaaaaatctttgtcaatggaatgtgggttggagttcatagagatcctgacatgttggtgaaaacgttgagacgtttgagacgaagggttgatgtcaacactgaagttggtgtagttagagatatccgtcttaaagagctccggatatacactgattatggacgttgtagccgtccgttgtttattgtagataatcagaagctcttaataaagaagagagatatctatgctctgcaacaaagggaaagtgcagaagaagatggttggcatcatctggttgctaagggctttatagaatacatagacacagaagaagaggaaacgaccatgatttccatgactatcagtgatctggttcaagctagactccgcccagaagaggcttatactgaaaactacacacattgtgagattcacccatctctgatattgggggtctgtgcttcaatcataccatttcctgaccataatcagtcacctcgtaatacatatcaatctgccatggggaagcaagcaatgggaatttatgtcaccaactaccaatttcgcatggatacgttagcttatgttctctattatccacaaaagcctttggttactacaagagctatggagcatcttcactttagacaacttccagcaggaattaatgctaatgttgccatttcttgctattctggatataatcaagaagattctgtcatcatgaatcagtcttcaatagatcgtggtttctttcgatccttgttctttcggtcttacagagatgaggagaaaaaaatggggacgcttgtcaaagaagactttgggcgcccagacagaggaagtacaatgggtatgcgacatggttcttatgataaactggatgatgatggtcttgcgcctcctggtactagagtttcaggtgaagatgttatcattgggaaaaccactccaatatctcaagatgaggctcaaggacaatcatcccgatacactagacgtgatcatagtataagcttgcgacatagtgaaactggaatggtggatcaggtgttattgactacaaatgcagatggtttgaggtttgtgaaagtgagggtcagatccgtgcggattcctcaaattggagacaaatttagtagtagacacggtcagaagggaactgttggcatgacctacacgcaggaggatatgccatggacgattgaaggggtcactccggacattattgtgaatccacatgctattccgtctcgaatgacaattggacagctaattgagtgcatcatgggaaaagtggcagctcacatgggaaaagaaggagatgctactccctttacagatgtcacggtggataatataagcaaagcccttcataagtgtgggtaccaaatgcgtggatttgagagaatgtacaatggtcacacgggcagaccactcacagctatgatattccttggaccaacatattaccaaagattgaagcatatggttgatgacaagattcactcgcgtggacgaggtccggtgcaaatcttaacaagacaaccagctgaagggcgatcacgtgatggtggtctccgttttggagaaatggagcgcgattgcatgattgcacatggtgctgctcactttttgaaagagaggctgtttgatcagagtgatgcgtatagggtacatgtgtgtgaagtctgcgggctcattgccattgcaaatctgaagaagaattcttttgaatgcagaggttgcaagaacaaaacagatattgttcaggtatacattccatatgcttgcaaattactctttcaagagcttatgtcaatggctattgcaccaaggatgctcactaaacacctgaaatcggctaaaggcagacagtgaggagcttgcaatctgattttgtagaaacttgaactttccttctctcttggtcatagctttgtaacaatactaaatttacaaatttgtgtaatatttctgtactaattcttaaagctagaaaggtaccttataagatatatttatggattctttagtaaa

SEQ ID NO: 83250 - DNA, 493 bp, Arabidopsis thaliana columbia
  unsure (1)..(493): unsure at all n locations
caacgaaacagtggtccctctgaggtacacgcctagaaagtttgttctccatcccaagcggaagttgttggttattatcgagagtgaccagggagcattcaccgcagaagagcgtgaagctgcaagaaaggagtgcttcgaggctggtggagtgggagaaaatggcaatggcaatgcagatcagatggagaatggtgcggatgatgaagataaggaagacccgctttctgatgagcagtacggttatccaaaagcagagtctgaaaagtgggtctcttgcatcagagttcttgatcccaagacagctacgacaacttggtctcctggaacttcagggcaacgaagctgcatacagtgtctgtacggtggatttcccttggttaaagggtttggtacctttttggttttggaccgncaaaggggtcaattnttgccccaaaagnattttgtngcttggtncaaaaantttnaggttttgggggtggaaacnttt

SEQ ID NO: 83251 - DNA, 502 bp, Arabidopsis thaliana columbia
agtttacgctcacaaggagatagctgaaggtgggaaagaaaacaaggacattacaagcctacggtgtattgggaagaccctgacaattggagaggacaccttcgaggatctagatgaggtcatggatcgatatgttgatcctttggtatctcatcttaagacaatgctcaactatcggaaattccgtaaggggaccaaatcagaagtagatgatcttcttaggatcgagaagggcgaaaatccttcaagaatagtttattgttttggggatttcacacggacactccaggcactttttattcttgtcttacataaggggcacaaaccccccatcatgagtatataaggtttatattcccaaggggtttaagttcaggaaaaggatgtttgaggacattgatcggcttgtggcatacttccagaggcatattgatgacccattgcaagaatcggcgccatcaatcaggtctattgctgccaaggtaccgatgagaagcccagc

SEQ ID NO: 83252 - DNA, 477 bp, Arabidopsis thaliana columbia
  unsure (1)..(477): unsure at all n locations
caagangttgtgatcgttggaggggctcatccattacatcgtcatgagaagttagctatagctgtctcaaaagccatgcgtgggcattcccttcaggaaacgaagaaggacggaagatttcatgtgcataccaaaacatacctagatggtgctatcctcaaagaagagatggaaaggtcgactgatgttctagctgctggtttgctcgacgtgtctgaccctgggctttctaataaatattttctccgccagagctgggatgatgaatctgaaggttcgagtaattccatagtaaagcacaggcctctctggtcatctttatagctcaaaacctcagaggggcaagaaaaaagaaggcggttaagaaaaaaggcgactctctcccgctcttttggaaccagggtttttcccgtgtttatactctcattagccgatgtggatccaatgctcatgatggaagatgagagcctcgtgtgg

SEQ ID NO: 83253 - DNA, 485 bp, Arabidopsis thaliana columbia
  unsure (1)..(485): unsure at all n locations
cagctcacttggtaattnatgtggcctctttgttttctgcttaacaagctattaagagttggggggaggaatcaggggatattagacggaaatggagattcgacttttccgaaatactgcctattcgatgatcccttggtgagtgatggaaagtacagagatgcagggttgccatcctcgtcccacatggatgtccctcatgtacatcagttagcttcatgggattgcggtctcgcttgtgttcttatggttctcagagcaagtggcatcgcaagctgcactcttgaggatttggctgagatatgctccacaaatagcatttggacctgtcgatctcgcatatttacctgcagaagttctgtgtgggaattttccatattacacggtaacatttggagcaaaccccaattattccatagaggaattttacaaaggagcagttccctgaanatcttggtcgngtcggatttcnnttcaaggaaagc

SEQ ID NO: 83254 - DNA, 425 bp, Arabidopsis thaliana columbia
gagagatataaaaaacaacaaaattagacgagaaaatatctaagaaaggcgtcggaaaattgcgggcagatagatatagagacgacgaacatgcatccgattaatgcggtggttgcggcgaggatgttagccggaatcagtcaatctaacgccttacaaagcgaggcgattccgtttggttcgcttgagtggatcacttacgccggaatctcttgtttccttgtcctcttcgccggaattatgtctggtctcactttagggcttatgtctctcggtctcgttgagctcgagattctccaacggggtggtactccaaaagagaagaaacaatctgctgcgatttttcggttgttcagaaacagcatcagcttttagtgactctgcttctgtttaatgctcttgctatggaggggcttgctatatac

SEQ ID NO: 83255 - DNA, 956 bp, Arabidopsis thaliana columbia
  unsure (1)..(956): unsure at all n locations
ggtggggggtagtatcgccggctactatacgactcatatagggaaagctggtacgcctgcaggtaccggtccggaattcccgtgtcgacccacgcgtccgcccacgcgtccgtacggctgcgagaagacgacagaagggagacaactcaagtttcttgcaattacctacttacaacaaagcaactcgactcgaacaaacacatccatggctccttctgcgcaacctcttcctgtgagtgtttcggatgaaaaatatgcgaatgtcaagtgggaagagttggcattcaagtttgttcgtacggattatatgtatgttgcgaagtgcaatcatggagagagttttcaagaggggaagattcttccttttgctgatttgcaacttaacccttgcgctgctgttcttcagtatggccagggtttatatgaaggactgaaagcttacaggacagaagatggtcggattctgctattccgaccagaccaaaacggtctccgccttcaagccggagctgacagactctatatgccttatccttcggtcgatcaattcgtctccgccatcaaacaagttgctcttgccaacaagaaatggattcctcctccggggaaaggaacattgtatattaggcctatcttgtttgggagtggtccgattcttggttcatttcccattcctgagaccaccttcacagcttttgcctgtcctgttggacgttatcataaggataactctggtttgaatctgaaaatcgaagatcagtttcgtcgagcttttcctagtggaactggtggtgtaaggggatcacaaaactattgncctggtttggntnccatttggnagnggggaaaaacaagggttcnctggaaanttggnttttnntcctgaacttgnaaaaacattgagggctttntgaantnatngttttttnnaagggaantttnatttgaccacaatt

SEQ ID NO: 83256 - DNA, 371 bp, Arabidopsis thaliana columbia
  unsure (1)..(371): unsure at all n locations
tgcaatgatccaccagaagaccctgttgtaactttntttggccatatattctgctagcagggtgtatcagattatatcacaggggatgaggacacgtgccctgcgcctagatgcagagaacagcttgcgcatgatgttgttttctctaaatccacgcttagaagttgcgttgctgatgatttgggttgtagttcctcagaggataatagtcatggtaaatcagttttccagaatggcgggctttagttcatcaaagatcaaagctgtcttagatattctgcagtcgctttctaaccaaggcacttcaaactcaacacagaatggtcaaatggcttcttcctcgcagcagccgaatgatgatgatgatgatg

SEQ ID NO: 83257 - DNA, 324 bp, Arabidopsis thaliana columbia
gaagactctaagatgcggggaatgcccaagcagtgagtccacggcacgcagatctttaagtgttgttatgccaaacttgagtgatgttgaaggagaaacatgggaagaaatagacacttcagagattggccatggtggtcaatcattgcgttggcttgtttggccacgaattgataaggattcactggagatgttatcctcggagtgtccaagaatagtggtaaatcccaagccatcacttgtcggcgtacagagcagacgaggttcctcgagaagcacttaccagatgttgccctggccggaccatttgtcaaagggattgtg

SEQ ID NO: 83258 - DNA, 314 bp, Arabidopsis thaliana columbia
  unsure (1)..(314): unsure at all n locations
agtcaccaaaaagctagggagatcctntnaggcggatcnggttgcatacgcagagtccggctctttggttgagtccacaaccatccaacgatcatcctctgattcaggtctgaccgagcttagcaaactaggagcagcaaagaaagctggcaaaaccaaaagaaaccgtctgtacagaacggaaatcgcactcgcgtttatcctcttggcagcctcggtgagaagcttgtngtctgcgnaaggnatccattttaattccccctggttcccagggaataangtccgaaattnggggtttaggttttaatcggggg

SEQ ID NO: 83259 - DNA, 753 bp, Arabidopsis thaliana columbia
  unsure (1)..(753): unsure at all n locations
atttccggggcgacccaggcggtccgtttccagctcgtgtccaagatcttagctttatccgacaaatataatgcatccgaactaaaaagcgtttccttaaaattcactgcagaaaacctagcagctgttctgcagacaaaagcatatgaagatctgaaggatgactgtccaaacctccagtctgagctactaaaggcggtcgctggttatgacgacacaagtagcagcggaggaggaaagtctcagagtgtttgggctcaactctctaacggtggtgagaccagtagccgaagggtcaggcagcgaaccacttagaagtgcttcttcacatgttgttaacaaactacttttgcttaccactcgtaaacagattaaccggtttatctagtatgtaccgaatgaaagggaagcggagccagaaatcttgtaccacaagagaagagctatgcggctgtgcactagtgattaaccggtgcttaaccggtgcttcacctttcagttccttcacgtctctgtggatttttgttgttgagtctttttttcaaattcttttcccagcttcaaattactagaaacttatgatgatataatagaaagagttaactatattcctgtatggaagttataatcttgcaacttgtaacacagtatcctaaaaaaaaaaaaaaaaaaagnnnnnnnnnnnnnnnnnnnnnnnnnnnnnnnnnnnnnnnnnnnnnnnnnnnnnnnnnnnnnnnnnnnnnngaaatccaa

SEQ ID NO: 83260 - DNA, 540 bp, Arabidopsis thaliana columbia
  unsure (1)..(540): unsure at all n locations
acgcgtccgctctctaaaactttttagagatgagagaaagcttttcccgaccagaatttttctggcttttgccatcctgatgtaatcaggctttcgtccagcatcttactttcatagtgattgatggctggctctatgtctggcatcgtccggcttctatagcggtgttggctggcttttgggtttttccggcgtagtccgacgttatctctccgtgtttcaataatttcattggttatgtgttggtggaagtgttttaagcgatcactcgcttaacggtgtttcttttccagctccttcctttgatctactggtttacaaaaactcatcgagtttggtaactaaagttgaaggaaataaggaattttccgtcgcttattttaatttgccttttagctgttatttttatggggcttcgattaggttagcaaaaagttgtgggttaatcagatttgggtttctcttaaccggccggtttnaaacccctgcgggcccattgggaagtaacgggnnggaccaaagggtnnaaggccggnanat

SEQ ID NO: 83261 - DNA, 514 bp, Arabidopsis thaliana columbia
  unsure (1)..(514): unsure at all n locations
agcgagagaccccgagacaaaaccctagatctgagccgccgccgcctcttcgccgcccgtggcttctgccggcggtgtgagagggcttcccccctttctccttttcgttgtcttgtctattagtgtagaaataaggtcgactcgttgctcctttctccggcggctaaggtgaagctaaacgacgacggtgtgacgatgcggaggcagtagctggaggagagagatctccgctcgatctttatccgggagactggtggggttcggagctgctccgagcagctgtttcgatccctgtatcccccaggagaaccaagccgacggaagaacagaggcagagtcgcagtcagagtctttcaaggccgtggggatggagttttggtcgccggtggccgagataatccggagatcttagtgaaccgtctcaatgtnttggccaatcccgcgattgagccaagnaaaaaggatttttcggcgagatcctttttggaattaaccctttattttaaggcntacc

SEQ ID NO: 83262 - DNA, 361 bp, Arabidopsis thaliana columbia
  unsure (1)..(361): unsure at all n locations
attttatatatctaatcttgaaatgttgccaacgcttcttgagagctgcccaaaacttgagtctcgcatattggtaatgagccgcttaaacccttcttgagagctcctatttacacatattgtttgagataacctcttatatgtatctctctactcaatttgttttcttttatttattcttttgttcctgtttttgcaggaaatggtcaagaaccaatccacgcgacgtcatggggagaagcgagaaccaaatgtgatggtttcaacagtgccttggtgtttgggatcgtcgctcaagtttgtgggattgaacggtcaatcccaagggntgaagggggaatggngctagtaaggtanttcc

SEQ ID NO: 83263 - DNA, 726 bp, Arabidopsis thaliana columbia
  unsure (1)..(726): unsure at all n locations
aatggagatggccagacaacgcaggacgtggctgaagctgcttcagctggagataatgaggctgtcgagtctgatccctttggactagatgcctggattcccagttctggaaagaaaaatggtaaaacaaagataaagagaacaaatgaagatccagatgccgaagagaataagaggtttctcaggtcaaaaagagaagctttgattacatgcttggagattgctgcacgccgttacaaagttccatggtgccaaacagttatagacatattggtgaaacatgcctttgagaacgtgtcaaggttcacatcacagcagagacaagcagtggagaaactctgggcttctgttcgagaacaacatctccgtaggaagcaaggcaaatcagtcacaggaaaactcgacgttacagcttttgaatcgcttcaggataaatacgccaacgagaaaatgagcatccgaagctcagttggagccagcggtgaacgccgtgcacagcaatggctcggttaataaaacagtttccaaaaaggtctgattggtaggatttgttcactaagacatgaactagaaaagcaaatagagaaaaatattgctctgtttctgattgtatcttagaacaaaaagttaccacctttatccaaaaaaaaaaaaaaaagnnnnnnnnnnnnnnnnnnnnnnnnnnnnnnnnnnnnnnnnnnnnnnnnnnnnnnnnnnnnnnnnnnn

SEQ ID NO: 83264 - DNA, 440 bp, Arabidopsis thaliana columbia
cctccaaggattccctcggtgaaccgtccggcgcgtgtttcagcacgaagaacgttggcgtcacgcgcctaggatacgccgtaccggagattcacctcgtgcttcatagcaaagacgtccgtttggagaatctttggagctaactcgatggtgagtgtcagtgatgacgtcatctgtttgggtttcgttgacggaggagtcaacccaggagcctctgtggtgatcggagggttccagttggaggataatttgatcgaatttgatttggcgagtaacaaatttgggtttagttccacgttattgggccgtcaaactaactgcgccaactttaatttcacttcccactgcttgattaaatttagttgatgccctttctccaaaataaatgtgtttcagtaaccctaaataaacgtattgtattatgtttaatttggtcagag

SEQ ID NO: 83265 - DNA, 1518 bp, Arabidopsis thaliana columbia
ctcaacatcgtcatctctaacaatggcgccttctccgatcatcatcttctccgttcttcttctcttcatcttctcactctcatcatctgctcaaacacctttccgtcccaaagctctccttctcccagtaacaaaagaccaatctaccctccagtacacaaccgtcatcaaccaacgcacacctctcgtccccgcttccgtcgtcttcgacctcggtggtcgagaactctgggtcgactgcgacaaaggctacgtctcctccacttaccagtctcctcgctgcaactccgccgtctgctcacgtgccggctccacaagctgcggcacatgcttctcccctccgagacctggctgtagtaacaacacttgcggcggcattccggataacaccgttaccggtaccgcaacttccggcgaatttgctttagacgttgtgtctatccagtccactaacggatccaatccggggcagggtcgttaaaatcccaaatttgatcttcggttgtggagcaacgtttcttcttaaaggactcgctaaaggaaccgttggtatggcgggaatgggacgtcacaacatcggtttaccgtcgcaattcgccgccgcgtttagcttccaccgtaaattcgccgtctgtctaacttccggtaaaggcgtcgccttcttcggcaacggaccttacgttttccttcccggaatccagatctcaagtctccaaacgacgccccttctcatcaatccggtcagcactgcttctgcgttttcacaaggtgagaaatcctcagagtactttatcggcgtgacggcgattcaaatcgtcgagaaaacagttccggttcaatccaacggtattgaaagattaacgcaagtaccggtatcgggggaaccaaaatcagctccgtcaatccttacacggtgttggagtcatcgatctacaatgcttttacgtcggagttcgttaaacaagcagcggcgaggagcatcaagagagtagcgtcggtgaaaccgttcggcgcgtgtttcagcacgaagaacgtcggcgtgacgcgcctaggatacgccgtgccggagattgagcttgtgcttcatagcaaagacgtcgtttggaggatatttggagccaactcgatggtgagtgtcagtgatgacgtcatctgtttgggtttcgttgacggaggagtcaacgcaagaacctctgttgtgattggagggtttcagttggaggataatttgatcgaatttgatttggcgagtaacaaatttgggtttagttccacgttattgggccgtcaaactaactgcgccaacttcaatttcacttccactgcttgattaaattagttgatccgttttctttttttaaaactgttttttagtggttattatattatgtttgatgtgattaataaagagccaatggaatcattatttggcatttgttataaaaaaaaaaaaaaaaaaaagggcggccgctctagaggatccaagcttacgtacgggtgcatgcgaagtaatagctg

SEQ ID NO: 83266 - DNA, 743 bp, Arabidopsis thaliana columbia
ttaaaagagggcctctttcattttataaagggcaaaaaaaattgggtaaacgccctagccaggttcccccggtccccggaaaattccccggggttggacccccccggggccccataaagtggtccaccctccctttaccgagttggggaaagaacccccccctcctaacagaggctctcagctcctccttcaaagtgacggctctctttctcatttcctctccttcttcgaaaaccgttaacctcttcacagctctctcgaccgctcctctttctagatcaccctccacttgaatcccaattttccaaacacactccaagtaccttgcgttcacccgaaaatggcctgcaaatcaccggaactccttcgctgatcatgttttctagtatcgagttgcatcctttatggctccaaaacgcccctattgcaggatgagcaagtacttccttctgtggagcccttttcacaatgtagttgatacatatgttttctacttgtttatagggcggaagctactgttactaagaaacctgcttttcctccatttccaaaacccccaagaaaactaataagtagctctctaagctccgggcttatagattactctgcttctcatcctctttgaacgttttatatatataaataccagattctcgcttgtggcccctaaaaaaaaaaaagacgaccgctgtcgggcgctctagaggacgcaagcgtgcgtacgcgtgccagctagggcatag

SEQ ID NO: 83267 - DNA, 746 bp, Arabidopsis thaliana columbia
  unsure (1)..(746): unsure at all n locations
caaagctttaatacgactccctataggaaaagctggaccgcctccaggtaccgggtccggaattcccgggtcgacccacgcgtccgactatggatgatcataatgaagtggaagatgaagacgccaaccctaattataacagggaagatgagatgactactcaagaagctgaggaacctgtggatgatgatgctcatgatcttctcgctgctgctgggctcgaagatcctgatgttgatgatgatgaggtacctacttcgggtgtaaggcgaagaagggcgttatcgtcatcagacgaagaaggtgaattaatggaggagagtcatccaaattcaagcccccagaaagaaaaagaagagagcaatggggaagctggtgatcctaacatggaggaagaagaggaagaggaagaggccaattgagagatatttcatacataacaacagatatctcttgtgtgtttgtaactttagtgacaaagatttcattgattcaatttctctagtagtcagagtgtgaagacaatttacattcacaggccaaggatgatcagtttgtattttgggttatttggattgagccttgtttttatttgctattgttactaatagaaaagcttttttctttaaaaaaaaaaaaaaaaaaaaaaaaaagnnnnnnnnnnnnnnnnnnnnnnnnnnnnnnnnnnnnnnnnnnnnnnnnnnnnnnnnnnnnnnnnnnnnnnggaatccaacccgggggggggg

SEQ ID NO: 83268 - DNA, 454 bp, Arabidopsis thaliana columbia
  unsure (1)..(454): unsure at all n locations
gagagagattcatcattataaattgtaatacatgatttaaagttagcgaaccaaanctaatacctagcatgcaatattatcaccaaaaaccaaacaaacactcacattttctctcaacgggcttcgttttgtatacaagggatgataagggacgtagcccaataagcccgtgacgttagccactacttcgttgcattttgacaaaaggttgagcatctggtgagagatgtccccagcgctaaccgctgggatcgggccacggaagtttcttgaaggtggcattggtggttcgacgtggtctactggtttaatgggaagttgttgtggttttgtgtattgtggagggagggggaagaattggaggcaatgtagaagcagcaagctgttcctgatgaacaacgttttgaaacntcttactnaanaattccattggnacagatgatgatgatgaaaa

SEQ ID NO: 83269 - DNA, 447 bp, Arabidopsis thaliana columbia
acgcgtccggggacatcatggttagggaagcttcctcatgtgaccttaaggatcttgttgctaagtccattcctgaagctattggcagggagattgagaaggcaactcagggcatctaccctcttcagaatgttttcatccgtaaagtcaagatcctcaaggcccctaaattcgaccttggcaagctcatggatgttcacggagattactcagcagaagatgttggtgttaaggtagacaggccggctgatgagatggctgttgaggaacctactgaaatcatcggagcttaagaaatcgagagatgtctttttcttctaaactttagctttttgatgctctgtcgtttcacacactcttttgttcccggtttaattctgctgtattgatgacttttctcagtgtaaacttgcgagtttttgataatttatggaacaccttttctct

SEQ ID NO: 83270 - DNA, 472 bp, Arabidopsis thaliana columbia
  unsure (1)..(472): unsure at all n locations
ccaacaactagttgatattgacgatcttttaaaagctcaaaatcttgaggtagttgatctccaaggctgtacaagactgcagagtttcccagccaccggtcaattgctacatttacgagttgtaaatctctcaggttgcacagagatcaaaagtgtcccagaaattcccccaaatatcgagacactgaatctacaggggactgggataatagaaccaccacttgccattgttaagccaaactacagagagcttttgaatcttctagctgaaatcccggggctttcaggtgtctcaaaccttgagcaaagtgatctctaaacctttaacaagcctgattgaaattttgccccatctttcccaaaatccgggcaagcttagttgcttggggcggaatattgtcnccgtttgnggggtttcccaanangggtaatttnggacttttaaaagcccttntttttntgggttcnaagg

SEQ ID NO: 83271 - DNA, 371 bp, Arabidopsis thaliana columbia
  unsure (1)..(371): unsure at all n locations
gaatttacagnaagccttttgattaccatnggtataagttgttacaacctaaagaagaaaatcaatggggagaagcaggacgaactttggttttgaagaggagaacgtagagtttgtccattgagaaataaataaaacaacctgccgaatgtgtcacaaacgacccgaaacttgatcccactatgcaatgccatgctggtccataccctttgtcaaacgcccttctcgagattgaaagccatgtgcttcgaactaaacgtctccaaactaatcctaaagtcattctcggcacaccctaaacgcatgtgccctgccataaaccccggcatgtccgcagctagatccccaccggcaaaatttccgcggggggc

SEQ ID NO: 83272 - DNA, 521 bp, Arabidopsis thaliana columbia
  unsure (1)..(521): unsure at all n locations
gattagagaaataacttagggaaacagaagcgatgcaattccattacatgaattatacatatgcgagcttcagtgatatatacaaaagaacagagttaaaaaaaaagaaacaaacagtttctactaattttcccaagtacatatctgatatgctctcataagttccattccaccaaaaaacatgtaaacaaagtatacactatcgtatatataaagctaaggagaaactcagtgtggcgagtgaggaaaaattaactgagacattgaaaagaccgcccattggaaatgcaaatatgggatgtgggagtgggcctaaagcaaccttcttactgtagatggaattagggtgcagagctgagaggaagacctaatggcattccagccattggtctgcgacaatctggtcggatggcttcttggcctagccatatggggggacgccgggncccttccttgngggtccccnaaaacccngcccgggngcttnnggcccagggatgccctgtngggcctanttggng

SEQ ID NO: 83273 - DNA, 430 bp, Arabidopsis thaliana columbia
  unsure (1)..(430): unsure at all n locations
ggaatccccttggtctcaaggctttgtnatgtcgagaatggntctnnngtcgagaacctgtacctgaagctgcttagttcatttaagatgcctactgaattctttacagagaatcttgaaaacccaactgaagaagaagccactgataaaacagataccgatggtactacttcagttgaggatacaaattccactgatgtgaaggagactactgaatctcttccagatcctgtgttgaggctttacctcaccgacggcagagggaactcggtagaagctgaaattgttgaaagaaaaagcctgtaaatcaaatccaagcggttgaatgtgcttgcacgttggcctgtaaaagagcttgacgtttatgatacttgtcttctgagctccttacctgaggtttccaaatctggaactaagagaccccaagaat

SEQ ID NO: 83274 - DNA, 463 bp, Arabidopsis thaliana columbia
  unsure (1)..(463): unsure at all n locations
caggnaagagcctactgaagatgaatgcactaactctgaagcttatggcattgaacacggagaaaaaagagttaaacagtctactgcgaaaaacttgaaagctaaagtttctgcgaaagctatctcgaaagaacagaagtcattgacgagaacaggtaagcagcaaattcagtcaaaagaagaaacatcatcgaccatctctagtaaattactgaaaactgaagaaattatctcatccccgagtcaaagtgaaccgtggactgtacttgctcataaggaagcctcagaaggacttggaaagctttataaccccaaggcaatgcaggcctccccctctttccagaggggtccccacatgtgttgaaagttaatgactttgggattgtttaatggaccttgggaggattggtttgaagtttgagagcttctccttgctctgcagcttgcccaaagagaaaatttt

SEQ ID NO: 83275 - DNA, 464 bp, Arabidopsis thaliana columbia
ggcaaacagacaaggacgtttctggattttaacttgaatgtacctgacgagagagtccttgaagatttggcttccgaaagatctggaaatgccacaaattgtacatctggtatcacaaataattttgaccaagtacgttctggggtcatgggttcagcccttgatcattcttctggaggccttgatcttgatctaaacaaagttgatgatttaactgatatgaacagctacacaatgaacagtagtcatcggctagattcatcttttcagcaggttaaattaccatcgaccttggtggtcgtagacgattttgatttaaattggatgggcccgtttggggtgatgatgcagcggttgagccatctatggttctaaatcaacattcacgaagtggcttgccatcacaaccatctctctctggaattcgagtgaatggcgaaaacatggctagtttctcaacttgg

SEQ ID NO: 83276 - DNA, 525 bp, Arabidopsis thaliana columbia
  unsure (1)..(525): unsure at all n locations
cagctcaaaaccgcgttttttcattcaactcctgtcttagaacgcaaacgtcgcacttcctgggaatcgaaagcaaatgttcacaagaagaggttcagaagaatgagggaaaagcaagagttattgcgtaatgtcaatgcttttgctgcaaacatgtttacgagctggcatgatgagtttgatgacgatggtccctcatcccggaagcaaacctcgtggttcaaaaaacagtactccaaggaacccaaaggaaaccagaataacaaacacggcccctacacttggggtaaaaggaattttgatttttgcgaagttgatgaggactttgatgtcgactatgtattccgaactgcttttggaggatcccgaggtttctctttttcattcactcatgaagaggatgaacctcgatggcggcatcactcttcaaaggtttccaacaactttaacaggctttggggntncgaaatntccggtnaggttaaggttnngaggngnggctttnnttanctccagtgcnttngg

SEQ ID NO: 83277 - DNA, 591 bp, Arabidopsis thaliana columbia
cgaatcataagagcaaaacttaaagaagtaaagaaccatgtcgctagcgcgaatacttgttctatcgtcttctttctattcttcactgtctctttcgccgtctccggccaaaagccaaccgcttacgacgccgtcaaactctataacttaccaccaggaatcctcccaaaaggagtggttgactatgagcttaacccaaaaacaggcaacttcaaagtctacttcaatgacacgtgtgaattcaccatccaatcctaccagctcaagtacaaatcaactatctccggcgttatatcacccggtcatgtcaagaatctgaaaggagttagtgttaaggttcttttcttctgggttaatattgctgaagtgtctcttgacggcgccgatctcgacttctccgtcggaatcgcgtcggcgagttttccggctgctaattttgaagagagtcctcagtgtggttgtgggtttgattgtaataatgggcttttattttcttcttgaatctgttgggccttgtgttgtactcaataaaaaatgcccttctctcatccttggcttatgagtattgattagttaattaataaattgatt

SEQ ID NO: 83278 - DNA, 475 bp, Arabidopsis thaliana columbia
atcaaagccaattggattaaatattttatacgaaaaccctaatctacaatatttatttattcatatcattgttttttcttagggagaggcatatgtctttcactatgtcactcttagacgtatgaccgtatacacacatacacacacaccacatcacacatgttattttctctctttttttataaggtcattcaaccctaagttcacgatcttaacgaacccggagctgattttctaccactccgatgatcccctcgaaccttcggggaaaccttcccgccctgagatttaggagacagtggccaatgaccagaagaaaccgccatgtccttataatgtatgagactctctagagcttccacaacggcaagcattttgggccggtctttagggtttgggctcacacattgtaaggctagaagagctgtatctttagccgccttgacggagtattgtccagcgagcctcgggtcca

SEQ ID NO: 83279 - DNA, 951 bp, Arabidopsis thaliana columbia
  unsure (1)..(951): unsure at all n locations
caagataacaacaacaacaaacctctccaagccgtagccatgaccaccactactgttactccctccagctattcgctcgttaccatcgccggtgaaatcccaaatctcagtttcaagatctacgaatcaaacgcagattcttggagcaaagaccaagaactggaatcagtcaagaacaatgattcatcattacatgatgattatgatactgacagtggcacagtctactttcttagcaaacaaggaaacgttgtcgtggcgagtaacaaatcttcagaggagtccgtcgaagcaaatactctttccgttatttaccgttacaagatggagcccggaaatcggcctattttctcaaagctcttacggggccaaattgtagcttgtgatctcactaaacgatgcttcaccgagctaccaaagcttcttcctccgttcctagagtactccatcgacttggtggaatgtgaaggaacaatgtatgtgattcttctctctgagttctttgaaagcgcaagtttaaggatctggagacttgacaataaccgggaatgggttcaagtcgggatgttgcctcccgcgttgtctcatgagttatacggtaagaaaggcgacataaactgcgttggaggagctggaaacaagatactcgtgtgcttcaatgctagtcctccagaagtgtattgtagatactttgtgtatgatttagttgcagaagagtggaacgagttgccgaaatgcttcaaggatggagaagctgtggattttgtttccgctctttctttccagcctaggatcgaggctacagtttgaaattttttagcttttattgtatggattgtgtgtattctttctattcaggaaaatccaaagtaaactcatctgtaatctgttgncattggttagnncgaaaggtgctctgtattatgcaaaaaacaaccaaaagggcggccg

SEQ ID NO: 83280 - DNA, 420 bp, Arabidopsis thaliana columbia
atcgagcttcagttgggaaacatggataggtgtagaaagttatatgaacggtatcttgagtggtctcctgggatttgctatgcttggagcaggtatgctgaactagagaggtctcttgttgaaacagaacgagctagagctatttttgaacttgcaatatcccagccagctcttgacatgcctgagctgctttggaaggcatacattgattttgagatatcagaaggggaattagagaggacaagggctttatatgagcgactcttggaccgtactaagcattacaaggtgtgggttagctttgcaaagtgttgaagcttctgcctgcggaactagagggaggcggggatgtaggtgttggccaggaagaagatgttattgaacacaagaaagattgcatcaaacgtgccagagcaattt

SEQ ID NO: 83281 - DNA, 964 bp, Arabidopsis thaliana columbia
  unsure (1)..(964): unsure at all n locations
ttggagctaaggnttctccggtctccgacgtgtttggcggaggtgcaggcgacaacnnggcaacggaacaatctgaacaaggtgctaaggagattcggatggttgtctctgatcaacctnganngagtaatgctagaggtggtggtgatgatatcggcggtcttgatagtggagagggagaaagagagatagagaaagctacagcagggctganataaaatggggtctaattccacggcggactagnaggcggctggtggagatggcggcggcaacaacggaacacatatgccgccgacaagtgtgatgacacgactgatattgataatggtgtggagaaagctgatcagaaacccaaacacgtactccagtctaatcggtctcatatgggctcttgttgcttaccggtggcatgtggctatgcccaaaatattacaacaatccatctccatactctcagatgctggtcttggaatggctatgttcagcttaggtttattcatggcacttcaacccaaaatcattgcttgtgggaactctgtcgccacgtttgccatggcggtcagatttataaccggtccggccatcatggctgttgctgggattgccattggcttacacggcgaccttctccgtatagccatcgttcaggctgcgttgcctcaaggaatagttccgtttgtgtttgcaaaagagtacaatgtgcatcccacgattctaagcactggggtcatatttggaatgttaatagccttacctataactctggtctactatattcttcttggcctttgaattggtcccttcagtatcaactggctttttagaggccctcggagattggtctatttatttntnggtaacggggnaataagcaaagcctttattttcggtgggaaanagtgggagggtgagaagaggtatgccntngggtttgggtccatatttttgggcccaccaaaag

SEQ ID NO: 83282 - DNA, 405 bp, Arabidopsis thaliana columbia
tttttaaccacttaactagaaacttcaattaataaaaaaaggtgcatattacatatctgcttagccaaaatctacacataaattaacaaaaacagaaaatgaaaaaataaaggtaaggaagagagattttttcttcttggcgtctaatgaagacaagatccttaatccattcaagtcttgttcactaaatcctaagtacttttgttgtgttccacaaatattggaaccaaaaaccaaaggcatatcttcttcttcaccttccactctttcccacgaaaaataaaggctttgcttatttcctcgttaccgagaaataaatagcccaatctccgaggctctctcaaaagccagttgatactgaagggaccaattcaaaggccaaggaggatatagtaggaccagagt

SEQ ID NO: 83283 - DNA, 494 bp, Arabidopsis thaliana columbia
  unsure (1)..(494): unsure at all n locations
acaagttgcagtgaagaggttatccaagacatcaggacaaggtgaaagagagttcgcaaacgaagttattgttgtggcaaagcttcgacatagaaatttggtaagattgctagggttttgtttggaaagagatgagaggatacttgtctatgagtttgttcccaacaaaagtctcgactacttcatttttggtcagttatgttcaatatttagcctaagataaattttttacaaattgcataccattcattgtttctaacattggaaattcatatgcgcagactctaccatgcaaagccttctggactggactagacggtaaaaaaatcattggaggatttgctagagggattctttatcttcatcaagattcacggctcacaatcatacatcgtgatctcaaagaaggtaatatcccccccgatgatggtatgaatgcaaaaatcgccgcctttggatgggggatttcgggtggcccnnagagccnttttggg

SEQ ID NO: 83284 - DNA, 387 bp, Arabidopsis thaliana columbia
  unsure (1)..(387): unsure at all n locations
ggatatnactatcgttgccgtgggcgacgcggctgaagattgcggtcgcagctgctgagggtttggcgtttttccatgatttggagagtccaatcatttaccgtgatttcaaaacttctaatatactacttgattcggattttactgcaaaactctcagattttgggttggcaaaaatgggaccagaaggatccaaatctcatgtcacaactcgagtcatgggcacttatgggttatgctgctcctgaatatgttttcaaccaggggcattttaaccaacaaagaggtgaccggggtataagttattgcgtcgttttactcgagctcctaacgggaagaagagccacagaaaagtcacggccaaaaaaccagcagaacatcatcgac

SEQ ID NO: 83285 - DNA, 403 bp, Arabidopsis thaliana columbia
  unsure (1)..(403): unsure at all n locations
aggaagaatacaaaacacatttcacagttttgacttttgatataacttaagaaaaaagcttaatctcaatcatcctcagaagcagcaaccttctgcttcttccatttgtatgcagcttcaagaatcttgagattcgctgtttgcgattcttctgggtataaataatcgatgtattcttcgtactctgttgacccgtcttctctagtgatcgcctttcttttcttgagcttctttggaagcttcgantggaacaatactaacatccccgagggtaccnaaggctactctccatggtccagccaatccnccnagagcgtancggntccttccctcagcncnggngnggagccttggaaaaagggtgggccnaccgaaaatggcccgggacgttgatggaaccttc

SEQ ID NO: 83286 - DNA, 666 bp, Arabidopsis thaliana columbia
  unsure (1)..(666): unsure at all n locations
gatgaagtttggaattcaatccagtaaggaaaccaaaaattgaaatgttataccaaaactaaaccattcccaaagggagataacagtcaaaagctctaaatggctaaatctataacaaatttaaagaaaaacatatataagccaaaatctttgtttctttgagccaaaaaccaaacccaacaaaatagaaattacaaactacttcttccgtagataaaggaagaagaactgaatcatttcattctttggtagcactaaaactttgacgagattcttttttcttttagcgaccaccaccgcggtagtaaccatttcctcttggcctgtagtcacctccatcctggtttcctctgccagacccacgcccaccaaaccggcctcttggtgcttctgttgggtaaccaccccttccacgtcctcctcctcttcttgctccgcgaacaccagcgggatttggcccgccgtcctcaatggatacttggccttccanccaagtatataggngaagccttaatcgnatctcaanggagcatgtcccaaatcaacaatggtaanaaagccanaaancttgngggtngagganaaccatcagggtgatgaccgagtctnaanctcccattaaagagatggggggatncacgaacggttnccaagttaacggggttt

SEQ ID NO: 83287 - DNA, 504 bp, Arabidopsis thaliana columbia
  unsure (1)..(504): unsure at all n locations
caaccnttttatagtcaagcagctctcaacgcttttttttcaaggtctgtgaagcctcgaaattatcaggattttcaatctccgtcgccgatgattgatctcacgtcggtgaatgatatgagcttgtttggtggttctggttcatctcagcgttacggtttaccggttcccaggtctcagacgcttcagcaacaatcggattacggtttatttggtgggatccgaatgggaatcgggtcgggtattaataattatccaacattaaccggcgttccgtgtattgaaccggttcaaaaccgggttcatgaatcggaggaccattgttgaataagtttaagagagcttgggagacaccttttagatgatgacgatgagagtggtggtgatgatgacgtgtcagttataacaaattcaaattccgattggattcaaaatctcgtgactccgaacccgaacccgaacccggttttgtctttttcaccgagctcttcttcttcgtcttct

SEQ ID NO: 83288 - DNA, 515 bp, Arabidopsis thaliana columbia
  unsure (1)..(515): unsure at all n locations
gtttggagcctgtttactgatagatatattattccatatttttacatgagcaagctctctttagaagcaaaacatgtgactctctagctacattctactcaagactttagcaaaaagctgggaatggtgaaattttgaacaaatcagagcttgagaataaggccaatggggcaatgatcacttccattgatatcagggaggatgtaagaatcatggacattggccgcaattgattgggacaccaagaagtagtccagtctccatcctttgttggttttgcggccaccatggcgataaccccaataagtgtacccgacaacaccaggatgttgttttctaaaggtatctacaaatccccttgtctaagaagtttgcaccaaaggactggcctttcctcctctggtaaaccagcactcctttggttccccgcaggtttgaagatgccaatttctccatgagcacagtttagatcacccgtcaagacaaagggtagcttcctgtcttgaggtgngggt

SEQ ID NO: 83289 - DNA, 556 bp, Arabidopsis thaliana columbia
  unsure (1)..(556): unsure at all n locations
gcggccgcccttttttttgtttttttatgattaaagatttgagaatttttttttccttcgcagacgaacacagtagagtttcacagaaaaaaaaaaggattcaaacataaaattctacaaacgacaaaaaataaacctaagcttaacaatgatgaacaagacaatgtccgaaatcacgatgataatttgaaattcattagtccattaaaagcttttctaacctttcttcactctcgcaaattcttcgccggaaaagcttctccgccggtatatatataatgattatcaatatatacacatcagaaaggacctcttccaccggaattccccggccaaccttccaccggaagttgcacatttggttgcatattcatcggtaaatttaaagaacggaggtcctcctcctcctcccagctgccacctccggaggaaaaaattacccccgccggtcagatcccccnccangcgggtgctgggtgggccacctccttctaagggaggccccccataggnaacnttggaancggggngggaancnatacggggncancgngga

SEQ ID NO: 83290 - DNA, 465 bp, Arabidopsis thaliana columbia
  unsure (1)..(465): unsure at all n locations
ggacatcaaattgatttgcacacaagattgtaattttnnaccgttacgccacacaagcacaattgatgactttacagacgacgcgagtacatcgtctacaccgcttaatattatacgcaacagagcacacatcaaacacctacgcttgtcaactccacgtggcactaatgacagcgctgagccagcagcgagtgaagctttatcacttgagtacgatgcaactcgcagcgatgtgcctggcaacagtagcttcggcatggcacataaaagtgtttcgatgtcgcgggcacctgtgtttcggtgctatgtttacacatgaggatgatttgattcacaagggngtttagttgagctnaccggcatcaagnanccaaacactttaacgnttncttcaantttatcntcttnngggngcattngggnntgancatacatacccttngtgtcccaccaacttttggaact

SEQ ID NO: 83291 - DNA, 471 bp, Arabidopsis thaliana columbia
gagagcttaagccaaagatctctcattgacctttgcttcttcatcttcttctccgatcacagtttctctctttctggattccaccattctcctctttgtcgtctatgtgacctattctcgattcgatccatggaataatctctgtccgaagaagatctctcattccccttcaaaagcagacagattcgaaactttcccccaaattcgtggaaattttgtgttagggtttgggttattctcaaatagaatcaatcagatcgtttttttttttgttagaagaagatgaagatagcggccaatggccggtttttcacaatcggactcgtagcgtcatggtattcatcgaacatcggagttttattgctgaacaagtacttgttaagcaactatggattcaagtatccgatcttcctcaccatgtgtcacatgacggcttgttctcttctcagctacgttgctattgcttggatg

SEQ ID NO: 83292 - DNA, 593 bp, Arabidopsis thaliana columbia
gcggccgcccttttttgtttttttttttttttaaaaaagagattttacttatgagcaaaaaaaaaaaaagtgggcgtacaaaagtcaacaggcagttaccataaattaccaaacagattaacaaaggaacttcggagttatggtcaaacaaagaaagtaaatgaaaaacatatcagtgtatgtgaggcaggcgtgtgatggatcatactactgcagttctttctccagttcatcgaattcccatccatcaacctcatctgcagagtaatcacgagccaccttaccaaattcagattccagctcggctagttcggcttcagggttaaactcttgactggaaccagctgcaggattgggtgcctgaggagaattgctcagctctggcttttgggtctgagtagattcagttgaagcattcatgctactactgctaggcttgggagatttgggtgatgtagcactgcttttaggggacgtaacactgcttctaggtgatggaatctctatctctaacgttggcctcgctatggattcaaattgctgcctcattttctccatgtcatcaaacagctctctcacacgccggtcgtcct

SEQ ID NO: 83293 - DNA, 453 bp, Arabidopsis thaliana columbia
  unsure (1)..(453): unsure at all n locations
tnaatgagatgaaattnattggatacagtcctgatactggaacctgcaattacttagtgtcctctctctgtgctgttgataagttggatgaggccatcaaagctgctgaggaaatgagtgcagctggctgcattcctgatgtggaatgttatggggcggtgattaattcattgtgtttggctagaaagactactgatgtggcgaagattgtcaaagagatggtgagcaaagctgggatctctccacggaaagggatcctgacaaaagtagcagcagctcttcagagccaccagggaaatttggaaagccattgagatgatcgagtttgtagaaagtcgggattaccctgtggagtttgagagttatgaggtagtagtcgagggttgcctggaggttagggaatacattctggcagggaaggtggtgatgagaatgactgatagagggttcata

SEQ ID NO: 83294 - DNA, 583 bp, Arabidopsis thaliana columbia
  unsure (1)..(583): unsure at all n locations
cgggnaagactagataatctctgcatgtcattttgctctctgaaggcacttatagatgcaacgtcatctggaagtgacttagaggatgaaagcggaataagaatggtggcactatttgggcatgaagaagttggctccaattcagcgcaaggagctggatcccctgtcatgattgatgctatgtcacacatcacaagttgcttcagctctgacactaaggtgctcaaaaaagcgattcagaaaagtttgcttgtctctgctgacatggcacatgctttacatccaaactttatggacaaacacggagagaatcatcagccaaagatgcacggaggacttgtcatcaaacacaatgcaaatcaacggtacgccactaatgccgtaacttcctttgtattcagaggggttagcaggggagcataatctgcctgttcaaggattttgtggtgcgtaatgatattgggttgcggtcggcccttggtccaatcctgcaagcagtntgggntaagnccgttnttttnggnnnctagcntcaatcatggtncggagtnttctcanttcgngnggttntgnccttaagttt

SEQ ID NO: 83295 - DNA, 540 bp, Arabidopsis thaliana columbia
  unsure (1)..(540): unsure at all n locations
ggnatgtatcctctggtaattnctattgtaaaatcaagttcaagagtttcccacgccagattgtttctgttcccgttctgttgcgaaccgaatcggaatcagagtctcggtgttgttccggtaacgtctcaaccgtcgctgcttgctttagtctaagtaagtctcagattgagacgtctcttaagaaggctaaatggagtgttctctccgtcgaggtttactctcgccgtagtgcgtcgtgtggatttgtcgctgcttccggtgagaagctgattggtcggtttcaggttacgcttgatttgaaggcggcggagtcaaagacgtgtttggcacacaacggctgggttgatttgggcactaaatcgaaggaataataagaaagtccgggtcggatcctgagcctccacgttagcgtacggggtgaaccccacaacgaggttttgtgtttcaaatcgacgggcgagcccaagtgtagnccccaagggttttnaagncnaaggaaccggaaaanaanctgttttnnnttncaancncgggtna

SEQ ID NO: 83296 - DNA, 394 bp, Arabidopsis thaliana columbia
ggcgtttgccaacacgacttcaagctccaacctttacctccatcgctgccgtaaaaaccatcctcttccatctccgtcgttcttttcaccgttccggtcgtctccacttccttctcagacccttttcctcgtccccactccaaaacctgtacgacgcatcgcggtcgctcctctcggccctccaacgccgcctagtcccgacccacctccgcctaaaaacacgactgagctcacaagtcttgtgggagtagcgtcgatgattcaagaccgtgtaaagatctttctttcagtactaatttggatctctctcttcttttgggcttcggctttacaaggaagaggcagcaaaggtaatggtaaagggaagaagggttcacgcttcaaatagtattag

SEQ ID NO: 83297 - DNA, 591 bp, Arabidopsis thaliana columbia
gcacgagaggaaatagaaaaaaaaagaagagaacaaatctttttgatctgtgcgtatggttgttgtgtctcttcttcctcgaatctcgatcgttacatcaccgggttctagccttcacgatgtgcttttgagcatgagatttggtttgacgcgacatctccctctcaaacgatctttctccaattattcaatcacttccgtatctccagaacaacagctcaaatctccggtgaccatggcgacgaccgagagcaagaatcttgtagaagcttccaaggaggagacaaacaagaaggagacagaagataagaaggaggtgggagtttcggttcctccaccgccagagaaaccagagcctggcgattgttgcggtagcggttgcgtccgatgcgtttgggatgtttattacgatgagctcgaagattacaacaagcagctttctggagaaactaaatcaatttgactgatttttcctcgcattgttaatggagaaattaaacatttgtctttgtcgatttgatgatacagtgcttttgttgaacaacatgatgtttctctctaaaaaaaaaaaaaaaacaaaaagggcggccg

SEQ ID NO: 83298 - DNA, 472 bp, Arabidopsis thaliana columbia
  unsure (1)..(472): unsure at all n locations
aaatacaactttggaaatattatattatatagagaggcccaataaaagagtatgttgaagcccaaacaagttatataacatatctaaaggcccattttatacaacaaacattcaaatcaaagaaacggtgcggtttaccgtttggctgaatcaagcacacaccaaacacatctagtcatttacaatctgaaacagctttcaataaacaatgatattgatttggcattttgacttaaatgcaaactactttagtttcatcacagtagagtaatctctatagctctaagctagaggatatcgtaagaagaggaacaatctagtttctagtataaaactggaggtctgacaagaaatttgctttacttggaaggatatttcctctggaatatatacacaaacgtgtagaggagttttcatccatcatcatcatcatcaccacaccatctactaaaccatttgnggcgggacccaa

SEQ ID NO: 83299 - DNA, 619 bp, Arabidopsis thaliana columbia
  unsure (1)..(619): unsure at all n locations
ctgttgttcacaggacatcaaaattcaaggggctattgggccatgctcatcattagagaagaaaggtgctagtgtggctgacacggttatcgcagaggggaatacttctgcttggaggttgtgtggccttgataaaactacgtgtttgacgatattttttgacatatcttcaagcgggtcaaatactcctggagctgcgaatccacagttttatttgcaagtttctcacaagttatcaaaaccctgaaggtcaaacattgctccgggttactactgtatgcagacagtggatagacagtgctgtgagttcagaggaacttgtgcaaggctttgaccaagaaactgctgctgtggtcatggctagattagcttctttgaaaatggagtcagaggagggatttgatgctactcgctggttagatcggaatctcattcgtctttgttcaaaatttggagactatagaaaggatgatccagcctccttcacgctgaatccctttttccggatatttcctcaatttatatttaatctcgggnggtcgagttttgtncaggnatttaccaaagccctgattgaanccgcatattttnncangtncntaanccgggggaannattt

SEQ ID NO: 83300 - DNA, 608 bp, Arabidopsis thaliana columbia
  unsure (1)..(608): unsure at all n locations
gagagagtgtagtagagagaggggttaagaaatggagaaaagagtagtgaagagaaggatagtgttggttccacttccattactaggacatttcactccgatgatgcaactcggccaagcccttatcttgaagggattctcaattatagttcctcagggagaattcaatcgagtaaactcttcgcagaagttccctggttttcaatttatcaccataccagattctgaactcgaggcaaatggaccagtcgggtctctaacacagctcaacaaaattatggaggcaagcttcaagggctgtataaggcagttgttgaaccaccaaggcaatggtattgcatgtatcatctacggcggggtccatgtatttttgtggggcccgtacctgaggggttgaagcttcccattttcatctttccagtgctcaaacctgctccccctaaagtttgctgcaatgttttaagcaaacttaatgccaagaagtacttgatcgacatggaagagcatgacgtgcanaacaaggtagtggaaaatatgcatccattaagatacatagacttaccaactgcaacatttggagaactagaaccttttttggagctctgtag

SEQ ID NO: 83301 - DNA, 650 bp, Arabidopsis thaliana columbia
  unsure (1)..(650): unsure at all n locations
cagagaatgaacgagatgagtttacgaaaggatgctggatgctcttggatcgaactaaacaggaaggtatttagctttgttgtcggtgaaagattcttagatggttttgaggaaatcaaaagtctttggagtatattggagatgaagatatcgaagatgggatacagaccagacacaatgtcagtacaacatgatctaagtgaagaggagaagattgaacagttaaggggacacagcgagaagcttgcccttacctacgggttgattaaaacttcagaaggaacaactattagagtttacaagaacctaaggatctgtgtggactgtcacaatgcagcaaagttgatctccaaggtcatggaaagggaaatagttgtgagggacaacaaaaggtttcatcatttcaagaatggggttcgttcttgtggagattactggttagtaggactgtaataaaattggtgaaaacagatgcattagtaatagtagctcttagtaaattcagtattgtgtgtatttatgttcaggcgagacaaacatcaatgttaatatgttatnnnnnnnnnnnnnnnnnnnnnnnnnnnnnnnnnnnnnnnnnnnnnnnnnnnnnnnnnnnnnnnnnnnnnnnnnnnnnnnnnnnnnnnnnnnnn

SEQ ID NO: 83302 - DNA, 541 bp, Arabidopsis thaliana columbia
  unsure (1)..(541): unsure at all n locations
cacgtgtccacactttttcacaaagttatctaaaaacaaaaaacaattttttttcattcgacgtgtacatatcactcgccacgtgtacaagagccttggcctttttgcttcttcttcttgtctattaatatcatctcctgattatactctcttttgaccaagctgcttcttctccatctatccaacatctcaaatctcagtaatcttgttccttcgattctgttttggacgtttgtaatggattctcaaggacatcagataccgcggcggagacgacagagacgctgcaacgacggctatggccgagacagagaggaaaagcgctgacgacaacaaaggaaaacgcgatcaaaagagggcgatggcgaaacgtggtctcaagtctctgacggtagcggttgcggctcctgtgctcgtaaacgctcttcgctacgtatttccctcgggcacaagcgacggntacggggnattcgagcttaagtccctcgtcgtnggtnccanctttttnggntcctncaaaaaaacgngttctccggttttt

SEQ ID NO: 83303 - DNA, 641 bp, Arabidopsis thaliana columbia
  unsure (1)..(641): unsure at all n locations
agaatctgaagatttcggtttggagacaaatattctgagaaacttacatgagaaggacgtaatggaaactccggtgcaagttgctgcttataagcaagaagagaactggacggatcctggtttaggtggtgtgtctagctctgggagaggaggtcgaccaccacgaggacgtggccggcctcgtgcccgtggcaatggcaagaaaccggcagtttctgttaaaccaccacgaggtgcagcaaactcaaatggtgaaaccatgttgagaccgagagcacaaccacgtgggggtagaaagaatgggcggcgtagtggcaccaaaggccgaaagaggaccaacgcaaggaacactcggtatatgtaatgaagtaggaggaggacgtcgggttaaggaagttgctgtaaccgccaaaaccagtcttcctgataacgatgacgattggttcgaaacccctgaactgcaagaccgatgacggagaagctagcaagctcggggagatcgnttcaagtatgaggcctatgatgatgnttgattgtcattggctcccgatttnatggttttaattggnggnggcgnantcaaagtaaattttgtaggtnaggggggaatttngnttncaatagtntngttgantccggga

SEQ ID NO: 83304 - DNA, 961 bp, Arabidopsis thaliana columbia
  unsure (1)..(961): unsure at all n locations
acttatgggacgctcttcacaaaggctttgttcatcttgagtggcggactcgtcatcaaatcgcggttggagtagctcaaggattggcttaccttcaccatgatctctccccaccaatcattcatcgcgatatcaaatcgacaaacatcttgttggatgttaactatcagcctaaagttgcggactttggcattgcaaaggtgttacaagctagaggcaaagattcaaccacaaccgttatggctggcacctatggttacttggccccagaatatgcgtactcgtccaaagcaacgatcaaatgcgacgtgtacagtttcggggttgtgttgatggagctgttcacggggaagaaaccggtggattcgtgtttcggggagaacaaaaacatagtgaactgggtgtcaacaaagattgacacaaaagaaggattttttgagcccctagacaagagattatcagaatcttcgaaagcagacatgatcaaccccttgcgtgtggctatccgctgtacaagtagaactccaacaatccgtcctaccatgaacgaagttgttcagcttctgatcgacgcaacgcctcaaggaggacccgacatgacctccaaacctacgaccaagattaaggattcaatagtgtcagatcatctcacgcaaacaagactctagtcatgctttcttggtgaagaggtgtagcaaacagttcgtataacttctaaagatatcatgtatttaaatatatatcatagaagaaactgcttatatatatagtcttttaatacttcaatgtattttaacatctatcctttaaagactttggttatttccggttttaattcaaaaaaaaaaaaaaaagnnnnnnnnnnnnnnnnnnnnnnnnnnnnnnnnnnnnnnnnnnnnnnnnnnnnnnnnnnnnnnnnnnnnnngagaannnnnnnnnnnnnnnnnnnnnnnnnnnnnnn

SEQ ID NO: 83305 - DNA, 742 bp, Arabidopsis thaliana columbia
  unsure (1)..(742): unsure at all n locations
ccccacgcgtccggaaaaactttggatcaatcaacaatggcggatctctctcttcctcccgattccctcttcctcggcttcgacagctctacccagtcaatgaaagcaactgtgttggattcgaacctgaacattatcaaaaccgaactcgttcatttcgattctgatcttcctcaatacaaaaccaaagacggggtttacagagacactactgtaaacggaagaatcgtatctccaactctcatgtgggtcgaagcatttgatctcattctccagaagctctctaacgccaatttcgatttcgccaaagttatcgctgtttcaggcagcgggcaacaacacggtagtgtgtattggtcaaaaggtagttctgaggtattgagatcattggattcaaagagatcattgaaagaacaactcgaaaacgctttttcggttaaggaatctcctatatggatggatagtagtactacattgcaatgtaaagagattgagaatgctgttggtggagctatggagttgtcgaagatcactggctctcgtgcttatgagcggtttactggtccgcagatacggaagctttttatgactcagggggaggtgtataagagcacggagaggatttcgcttgttagctcttttatggcgtctttgttggttggagattatgcttgtattgatgaaactgantgctgctggatgaatttgatggatattgagaaacgttgttggtctaaagctt

SEQ ID NO: 83306 - DNA, 529 bp, Arabidopsis thaliana columbia
gtttgaggcccctgcacctttcgcaagcacctctagtggcttcttcacctcataaagcaccatcacaaggatcctcagcaactacgtcagaagatctccagggaaaaagaggcatccaatcttattcttatcttttctatagccctggtgtgcttatacttgccataatcactgtacttgttatttgttcccgcgcactccgagaagagaaagctccagatcctcacaaagaagctgtaaaaccaaggaacctggacgctggttcatttgggggatctcttcctcacccagcaagtacacggtttctgtcatatgaaggactcaaagaggcaactagcaattttgaatctgctagcattctaggagaaggtgggtttggcaaggtttacagaggcatcttagccgatggtactgctgtagcgattaagaagctcacatgtggtgggccacaaggtgttaaaggaattccaggtggaggattgatatgcttaagccgtcttcatcatcgtaatcttgtgaaacttgtggg

SEQ ID NO: 83307 - DNA, 491 bp, Arabidopsis thaliana columbia
  unsure (1)..(491): unsure at all n locations
gaagcagaattaagttcgagtagattcgcggctgtcgacgcttctgaatttgttgtatttggcgttttttggaagagttcattgcttctttggttgaggattcttcgtgaatcgctgggattttgtgttctaaggtttttgaagcaagctttagcttagggaaaattttgagaatgaaaggtgaaagagaagtgaagaatggtgtttctgaggaagagagagaggtgaagaggaagagagtgatggaacggtctgattcgccacctccaccactagttgcgaaaggagaggggaatggtaacaaagtgaaaggagaagctcaaagtagaggtcgatgacggccgagaatnatgntgatgaatccttccaaagggagaggaaagcattcaccgccatnttgaagtccgncgtgattgnccnnatcctnanaaccgtaaccnccaagngttggattttaaattccagnggttttnccctgcccattgcaaaac

SEQ ID NO: 83308 - DNA, 942 bp, Arabidopsis thaliana columbia
  unsure (1)..(942): unsure at all n locations
ctgattttggtgggaagccatttgcatcagagactcctcgttcagacttcctgttcccaggaagaagcccctttatgttcgactctgtcccaagtacacccgccgcacacgatgacttctctaacaacagcttctcccgcttcgattcattcaacagcaacaacaacgatgctttctctctatcccgcacagactcgatgcgcagcacaagcgagcctgacccattcgcatcaaggtttgattctttcaactatcaaagatatgattccttcaatgcacaaagctatgattcctctagcaacaacaatgcatcggagacgcctaaagcctcattgacaagattcgactcaattggaagcaccagggactctgattacagtcatgggtttgggttcgacgaccatgacccgttcggttctacaggaccattcaaaacaacgacaactacagcagagacacctcggagttctgataattggaatgctttctagccagaagcccacgtgcgatatgaatatgatcacatatcatatactttgctgcttttatagtttgaatttaccagtcgaagagttatatgtatcttcatttctttggtttcacctgcttgcttcattttttattgttaatatataatagtcttttttgccattttttcttttaaggatttttcgaagagtgtcctttgttggtctctgcgtagtgtttctttttatttgtgtctttgtttgttaacttgaataatgaattattatttgtccctgtgaaaacttctattgtatctttgtaatcgtatggatacatttcagatgttgttatattagattgattggtaattttgggaataaaaaaaaaaaaaaaaaaaaagnnnnnnnnnnnnnnnnnnnnnnnnnnnnnnnnnnnnnnnnnnnnnnnnnnnnnnnnnnnnnnnnnnnaacggaa

SEQ ID NO: 83309 - DNA, 773 bp, Arabidopsis thaliana columbia
ctgcagtaccggtccggaattcccgggtcgacccacgcgtccggctagaggcattgtaaccgcagtttgttatcaacctgatgggcaggcagtgattatcggaactttgacaagcgattgtcgcttctacaatgtatcaggccactgccttcaacttgatggtcatatatgtctgcacaacaaaaagaagtcgtcgaataaacgaataatcggctttcagtttctcctgcagtttgattctactgacccaagcagagtcatggtggcatcagcagattcacaagtgaggatcattagtggtcgcaacgttgtccacaaatacaaaggatctcgaaatgctggaaaccagatatcggcatcttttacagcagacgggaagcatatagtctctgcgtgttgacgattcatcggtctacgtctggaactgcgttggacacgaccctgaacagtcgtctcctggttttttctctcacaccaaacgacttaaaatccgatcattcgaaaaattctctgcggatgtttcagtagctatcccgtggtgcggatttacgcctgtactctccggcggatccgagctatcgccatcgctcttctcattagggcgcgagtacgttctcgattctcccaagggatctgccacttggccggaagagaagctagcgagctcgttttctccggtgaaagcgatccgtagatcgcattacaaattcctccggtcttcgtgccggagaacgttggagtcatctcatctctggggattggttatagtcacc

SEQ ID NO: 83310 - DNA, 708 bp, Arabidopsis thaliana columbia
  unsure (1)..(708): unsure at all n locations
cagaagtaatggaaacaaggaaacacacacataaatccgatgtttactgtttcggtgtacttatactagagatgttaactgggaagtctccagtgcaatcaccaagccgggatgacatggttgatctcccgaggtgggtacagtcagtggtgagagaggaatggacaagcgaggtgtttgatattgagctgatgaggtttcagaacattgaagaagaaatggtacagatgctgcagattgctatggcatgtgtagctcaagtgcctgagggacgacccaccatggatgatgttgttagaatgattgaagagatacgagtttcagactttgagaccactcggccatcttcagatgacaatagcaaacccaaggactccaacgtccaagtttaaatcaccccttggatctcattccctttttatcaaggttttcaagtttgaatgtcttataaggctttatgttgattgtttgaacaccactcgcctgagtaataccgcagttggaggcgcggtaacatttacatagcaattattattgtaggctcctttttctgtatctcataatataaatgaatatgattcagttttatgcaagcttaaaaaaaaaaaaaaaaagaaaaaaaaaaaaaaaaaaanaaagggcggccggtttaaaagataccaagttacggaagggtggannnnnnnnnnnnnnnnnnnnnnnnnnnnn

SEQ ID NO: 83311 - DNA, 498 bp, Arabidopsis thaliana columbia
cccacgcgtccgcggacgcgtgggccagatcaattttctcgagaaaaagaaaatgtgattatccattcgattttttcgcagaagaagacgaaagagagaagaagagaaagagatttgaaatcatggcgaatgtagtgggacagctaaaacgaggaatctcgagacaattctcaactggatcgcttcgtcgtacgcttagtcgtcaattcacgcgtcaagcttcacatgatcctcgccggaacaatatgcgatttagttttggtcgacaatcgtctttagatccgattcgtcggagtcctgatggttctaacggtccgcagcttgctgtaccggataatctcgacgctactatgcagcttctatttgtggcttgtagaggtgatgttgaaggtgttcaggatctgcttgatgaaggtattgatgttaatagtatcgatcttgatggtcgtacggctcttcatatcgctgcttgtgaaggtcatgtcgatgttgtcaagc

SEQ ID NO: 83312 - DNA, 1061 bp, Arabidopsis thaliana columbia
  unsure (1)..(1061): unsure at all n locations
taccgcaccggaattcccgggtcgacccacgcgtccgaaagatgattccgaagacgattgagaatacaagagaatctgatgaaactgtttgcagacctgacgatgaagaattgtttgcggatattgatgctgatgagtttaatccagttctgagacgtgagattgcacctaaggtcttgctcacaacatgtcgtttcaattccactagaggacctgctttaatacctgagtcgctttcggtgataccaaactctcattatcaaaagagaggaacctatgatttgaagaagattgtagaatacgcaacgaagaaagattttacatctccttaattgttggttcatacaaatcgtagagaacctgatgcgcttcttatcatcggtttgccaaatggtcctactgctcatttcaaattgtcaaatcttgttctaaggaaggatattaagaatcacggaaattctacaagccatcaaccagaactggttttgaataactttacaacgcgtttagggaatcgtgttgggagattttttcaatcactcttccctccggatcctaatttccgtggtaggagagttgtaacattccacaaccagcgtgactttatatttttcagacatcaccgttacatatttgagacaaaggaaagcaagagtgataaaggaaaagaagagacaattaaaacctcgtcttcaggaatgcggtcctcgattcacgcttaagctagttactctacagcatggaacttttgacaccaaaggtggagaatttgaatgggttcataagcctgaaatggacacgagcaggagaaggttcttcttataaattctgctgtcttccgagtttcaccaagttttgtgtttattttgcattttcgaattttccctacctccgtccaaaattgtatgtctttaaaacttctcatttcttttttcaatatagccatgagccatcgaacccnnnnnnnnnnnnnnnnnnnnnnnnnnnnnnnnnnnnnnnnnnnnnnnnnnnnnnnnnnnnnnnnnnnnnnnnnnnnnnnnnnnnnnnnnnnnnnnnnnnnn

SEQ ID NO: 83313 - DNA, 477 bp, Arabidopsis thaliana columbia
gaaaaaggtagaagctttaattgtgaagtgatttggtgggttattggcgcttgcaaacatatctctgcgtttcaagtttccacctttacaatcttcttcttcttcttcttcctcgttcaatgctactttaatcaataccagaaaactctcttcaatcgtttgctcgaaaccctcctctaatgacggcggcaaagtggctaatgacgatggtggcgcaaagccgcggaagaagttgtcggagcaatcgtcatgggaagttaaagattcagaagggaaggattatctctataggcttggcgcggaatcggttaatgttaaacatacgccgttggggcacgaagcggcatgatccaggtggttttcttcggggacttccttggaaaagattctgatattgtgtttgattaccgtcagaaggcgacgaggtcctttgaacatcttcaaggagattattacattgctccatcgtttctggat

SEQ ID NO: 83314 - DNA, 623 bp, Arabidopsis thaliana columbia
  unsure (1)..(623): unsure at all n locations
gaaaatagtcctgctatattgcaggtccatccaggtgcctttaaacaaggaggcattcctttggtttcatgttgcatctctgcagctgaacaagccagggttccaatatccgtacactttgatcatggaactacaaagcatgagctattagaagctcttgagctaggactagattcagtgatggtagatggttctcatctttccttcacagaaaatttatcctacacgaaatccataacagagttggcccgttccaaaaacattatggtggaagctgaactaggccgactctcaggaacagaggatggcttgactgttgaagactatgaagcaaagctcaccaacgttaaccaggctcaggaatttatggaaactggtatagatgctttggctgtgtgtatagggaatgtccatgggaagtaccccaagtccggtccaaacctcaagcttgatttacttaaggaactgcacgccttaaggttcgaagaaaaggggttttntttgtncttaagggggntntnggtttttttngganccttnttcaaggnttnctttnggattggggttnggnagttaacgnggccccagggnnnagccggtttaatgggngcctttgctttggg

SEQ ID NO: 83315 - DNA, 623 bp, Arabidopsis thaliana columbia
cccacgcgtccgcccacgcgtccgcccacgcgtccgcccacgcgtccggaaggtttgggtttgagtagaaactcagatgaacgttacttggagctaggtcaattagagaatgaaaacaatagttttgctaagcatctagaatctgcaaatacgatgatctcatttatatggtgggttattggattttattgggtatcttctggtggtcaagagttagcacaaggatccccacagctttattggttgtgtatagtctttcttggtttcgatgtgttctttgttgttttctgcgttgcattggcttgtgttatcggcattgctgtttgctgctgcttgccttgcatcattgcagttctatacgccgtagcagaacaggaaggagcttcgaaagaagacattgaccaacttactaaattcaaattccgaaaggttggtgatactatgaaacacactgttgatgaagaacaaggacaaggagattctggaggagtgatgactgaatgtggtacagattcacccgttgaacatgctcttcctcatgaggatgcagaatgctgcatttgtctttccgcttatgaagacgagacagagctaagagaacttccttgtggccaccatttcca

SEQ ID NO: 83316 - DNA, 1162 bp, Arabidopsis thaliana columbia
  unsure (1)..(1162): unsure at all n locations
aaaggctgtggcaaaaaagattagagatgaaatcacaattgaagtttcatgaatgaaggaatcaattggtgtgattcctggtttagcagtaatccttgttggtgacagaaaagattctgcaacttatgtgaggaacaagaagaaagcttgtgactccgttggaatcaaatcgttcgaagttcgtctagctgaagattcatcagaagaagaggtgttgaaatctgtatcaggattcaatgatgatccttctgtccatggaatccttgttcagttgcctctgccatcgcatatggatgaccagaacatactgattccggttagtttggagaaagatgttgacggatttcatccgctaaatattggacggcttgccatgcgtggaagagaacccttattcgttccttgtactccaaaaggatgcattgagttgttgcatagatacaacattgaaatcaaaggaaagagagcggttgttatcggaaggagtaacattntcggtatgccagctgctcttttactgcagagggaggatgcaaccgttagcattatccattcaagaaccaagaaccctgaagaaatcacaagagaagctgatattataatctcagctgttggacagccaaacatggtcagaggaagctggataaaaccgggcgcagtcctcatccgatgtttgggattaatcctgttgaggatcccaagtgctgcgcgtgggatatcgattggttggagacatttgctacgaggaggctagcaaagttgcatcagccatcacacctgttcctggcggtgtaggaccaatgaccatagccatgcttctatccaacactttaacatcagctaagaggattcacaacttccagtgacgtcacttaaaaagaagattgctggccttttgggaaacaaacaaatcgtactctgttttttgaagccaatgatttactttggtctttaaagaaagttatcgttttgttctatgaaacaaaacatgtagtttttaagtcacataaattgtcttcaacattgtttgtctcttcttggtattttgagtcagaactagttttaactaaaaaaaaaaaaaaaaaaagggcggccgctctagaggatccaagcttacgtacgcgtgcatgcgaagtcatagtcgtgtaaggtaacggaattc

SEQ ID NO: 83317 - DNA, 383 bp, Arabidopsis thaliana columbia
gttagcaatcgcagcgacggtggcgataattgcaataatcgttagacttggctcgacacaatacggatggaacaaagaggcggcgttggataaagctaaaggaatggtcagatcggctggggatttgggcgattccaacgtatgtagcggttcacacaataaccttagctctttggctccctcacgcccgtcttctttgaagcttggtgcttctttgctctttggtttccttcctgctcttctctgagttttctctgctaaagttctcgccgcttctttctccttctggatcggcaggcttgtttttaagagttccaccagagctacagggtgggcgcatagcaacaagtacttcaatattctctcaagaggagttgagcgcg

SEQ ID NO: 83318 - DNA, 414 bp, Arabidopsis thaliana columbia
cggaaagttgtttaccagagcctggcccccttcttcggtgtccttatctggatgagatctctgattctagcactggcggcatcatcaaattctattcttcatctatttgggcgcataacaagcaatctcttaacctgtctattacttaaatatgtgtaaaaatatacatcgaaaatatcacccaatctagttgaagattttgggagcggctttcaccacactgtatgggctaaccgtactgataactttacgataatcttgttgatcgtgtttgcaaagtattacctgtatattgaaagaatcctgtgagccgaaatcttaattattgtgtattagtggttagagaaattttcgtattgctttatgagggtttgcattttttattgtctttcatacttctgcaaagcatataac

SEQ ID NO: 83319 - DNA, 650 bp, Arabidopsis thaliana columbia
ggctcgccaagccgacgcattcattgcccttcctggtgggtatggtacgttagaagaattgctggaagtcattacatgggctcaactcggtatccaccgtaagccggtgggtcttcttaacgtggatggttactacaactcgctgttaacgtttattgataaggctgtggacgaaggatttatatccccaatggctcgtcgaatcatcgtctcagctccaaacgctaaagagttggttcgacacctcgaggaatatgaaccggagtttgatgagataacatcaaaattggtttgggatgaagtggaccggataagttatgtaccgggttcggaggtagctaccgctacgtaaggatgtattatggggagtttattttttggtaaaagcagtgtacagcggaaattaagttgtttaacatcagaaggtaagggcggaaagaagacaaaagaaagtattggggtcgttttgataaacattattttgtaggggtggtttaaatgtgtgaagtggataaaccatgtgggtaactgctaaccgcgtatataccaaaccctatcactccccacttgtctttgtacattttggtttaatggaaaaaaaggatagggctattttcaagaaatgacaaaacgatccttttcttttggtt

SEQ ID NO: 83320 - DNA, 601 bp, Arabidopsis thaliana columbia
gacccacgcgtccgctggttagcataggtgttaaacctgattcccggacgtattcattactggttgatgctcatctcattaaccgggatcccaaatcagctctgaccgtcgttgatgacatgatcaaggctggatttgaaccctctagggagacattgaaaaagctgagaaggagatgtgtcagggaaatggacgatgaaaacgatgatcaagtggaggcattggccaagaagtttcagatcagaatgggaagcgagaaccgcaggaacatgctgttcaacatagactactccaggggccgagcattaaacaattgaaatccaaaatggatggttgtaataacgaacccttgtgagaagtaaggaatgaagccccggctcatctagttttgaagttatggatcatcatgcccagtgtttcattgatgtatattgcttcattttattcttccgagtctcttaatctgatttttatccaatacattacttggcttctttttttctttttcggaaaccaatagagttgggttcttactttcttaggatcgatagtcttaggaagatgcttttgcattgaccaataatgtcaaaacctttggaat

SEQ ID NO: 83321 - DNA, 515 bp, Arabidopsis thaliana columbia
ccacaacgccgcggatccaagactcaatagagattatgagcctacttctgtttggaaggctcttgagatagcaatgtcttgcgtgaatccttcttcggagaaaagaccaaccatgtctcaagttactaatgaactaaagcaatgtctaacattagaaaactcaaagcgaggagtgagagaagacatgggatcaagaagttctgttgaaatgagcacaagctttacgaccgaaattaacccacaagcacggtaacttgtgccaaaaaaaatcccatggttattaaggattttgggtttccctgacttacttttcaaaaatataaatttttgggtgggccatttattttgtacggccttcaattgtattttccttgtgattgtgggccggatgtgataattaggggggatgtttggttgggttgggttgggttgggttttatgtgggtgggggccttgggtgtgtttgggcggggatccatcataaatgattcttttgcaaatctctgatgattttt

SEQ ID NO: 83322 - DNA, 660 bp, Arabidopsis thaliana columbia
agctctcgcagagttgaagagggagcatgcggccatccttcaaaatagaaatggtaaaggagctggagttagctgggaagaatacagacaccaaatgactttcactaacatggtgataaatgagactcttcgaatggcaaacatggctcctataatgtatagaaaggctgtgaacgatgtcgaaatcaaaggttacacaattccagcgggctggattgtggcggttataccaccagctgtccatttcaatgatgctatttatgagaatcctttggagttcaatccatggagatgggaggggaaagagttgcggtctggatctaagacgttcatggtgtttggaggtggagtgagacagtgtgtcggcgcggagtttgcgagactccaaatttctatcttcattcatcatcttgtaacaacctacgatttctcattggcccaagaatcggagttcatccgtgcaccactcccatacttccccaaaggactgcctatcaagatttcccagtcactctagtatcttgtgtaatcatatatgtcactagtaaagaatccggggaagtatgttcaatggggcaatactaaaataataaagaaatctatttttcatattatgttttataaaataataataagaataatattaataatattccaagt

SEQ ID NO: 83323 - DNA, 733 bp, Arabidopsis thaliana columbia
tataccatatatatatacatatatgaacatataaggtatattgtatatctgaacagggaacagcactaggccatgactataaatatgaaaagagttgtagaatataatttagataattcttagttatggttagaatatacttttgattactacttcatttcttatgagcatatagatgaaaaaaaataatagtctcaagcatatgatacattaacgatttccatctttggactctttattatttgtattatatatgctccaagattaattgtaagttggtcaaatgaatttgctagatttaagcaaattagttgggtcatctttgtttttcagatggcacttgaatcactgacgctaggataccaatttttagaagctatggcttcttattcccaacataatgaggggttcattctgatgattttaggtaaatttaggatttttaatggtttattatgaaatcttttcaaatcccattttaaagcaggggatttagattggtctttttttttttaagagattggtatgcaagtttaaacaaaaaaaagctactaaaatccctttagaataattaagaatccaatacttgaagtgttttcaataatagcggattttaaaaaataatatttcaaatgcttgattgaatacacttccgcaagacaacatccccttttagtggttaccttagaccaactccaaaagaagtttcttagtagaaactcatacaattaac

SEQ ID NO: 83324 - DNA, 386 bp, Arabidopsis thaliana columbia
gagaccgctctctcttccttatcctccatcttccaatggtttaatccagcaactgtcgacgatgtcgataacgtactccgctatttcctctagtacagtttctgggttttcaccaaaaagtgtaccttttgctattcagagcgtaaccaggaggcaatttcttaatcccaacacgttttatagatttgggttctctccttctcttcagggaagtagcattgagtttagccttcagttgaattcaagagttgtgcttagtatagagcgtcgatctctgccattagttgtgagaaatgatcgtcctcagaatgaagacttacctaagcagtacacaaggcgagagaagaaacctttcccagtccctattgtggacctgagacgagctg

SEQ ID NO: 83325 - DNA, 572 bp, Arabidopsis thaliana columbia
gctgtgctggtcagaaagtagtcaaaggaaatccttatccgaggagctactataagtgtacaacaccagattgcggagtaaggaaacatgtagagagagcagcaactgacccaaaagctgttgtaacaacatatgaaggtaaacataaccatgatgttccagctgctagaaccagcagccatcagttaagaccaaacaatcaacacaacacctcaacggttaacttcaatcatcaacagcctgttgcacgtttaaggcttaaagaagagcaaatcacttgacagagaagaagaatacgacggcgcttgagcttttgtgagtttaatgaatcttctttttggttaatgaacctgtttttgttgcctcaaaacaccacaggtttctctggacagaatctctgatattacagtttcaaaaggtatgttcttttatttcatgttggaatcttctgtgtaatcttaagaagctttaggaggtaatgtaaaaaaccagattcaaagttatgcccttatgtgaattcttttgtacatgggataaacaaaatttacaggtatcctttttgttcttgttgt

SEQ ID NO: 83326 - DNA, 358 bp, Arabidopsis thaliana columbia
aagagaaccacttgattgattgcacaggaaaaccctcaatgttgagtcactgaggcttctcgatcaagtctattattcaagccaacttagttgcattgttagcctacaagcattgactagagagatagagagagaataacaatgggagagtctgcaaccagactgcatcaggatctctggctaaccttgcctcctgtcagcttcgctgactcaaacaacatgtgattgatgagtccccgagcagcatcatctttaagcttctgaatcttctcagggtctgtctcattcatgtgtttcttaaattgttgcctcaccataccaaccactagctcagtgttgtgttgctcggacgcgtggg

SEQ ID NO: 83327 - DNA, 598 bp, Arabidopsis thaliana columbia
  unsure (1)..(598): unsure at all n locations
nnnnnnnnnnnnnnnnnnnnnnnnnnnnnnnnnnnnnnnnnnnnnnnnnnnnnnnnnnnnnnggtttcactggtgcgaaactcgatggcgaggaggcgacgttcatcggcggcggagagtttgaaacggcggaacgacggatacgagtcactgtgtcaagtcgtacaacaagattcagatcggagactcatcaccattttcgtaatcttcttcattgtgattcccgccgtttcgattgctgtgtacaaagtcaaattcgctgatcgagtcatccaaacggaatcatcaatacgtcaaaagggaatcgttaaaactgatattaatttccaagaaatcctcactgaacattccaaggcttcagagaattcaactaggcactatgattatccagtgttagcttacattactccatggaactctaaaggctatgatatggcaaagatattcaactcaaagtttacacatttatcgccggtatggtacgacctgaagagccaagggtctggattggttttggaggggagacataatgctgttaagggttggattcaagggctttggtaagggggaatttcctttttttaccagggttttttta

SEQ ID NO: 83328 - DNA, 513 bp, Arabidopsis thaliana columbia
gacaatacaaccgctaatgactctttttatgaaatctctaactaaattctacaaaattcattttgaaaaaaattgctacaatacatggaatgaagatttcctgctctaatcgacgcttcattcactcttcttctccgacataagaggtagaaggcaacctgaatttaatttcaaagtatctcttcttctctctcaagttacataatgttacactcactcttcttcttcttcttcttcttcttcggaagattcttttgatttctcgatttctgtcacctcgttttctgaggttgctgtgtcgtctatcttctcatcatcatctcgtagtgtctggcttgacgcttgaggatctgatgtccgagtatggcttgttggttctggagcactcgagtccgacacttgaggggtttgactcatttcagactggccagtaccaataggactgctttgtgactgaccaataggactgctctgagattcactcatttcagatcttcccgtatctatgggact

SEQ ID NO: 83329 - DNA, 457 bp, Arabidopsis thaliana columbia
gcgataaatatccgcttacatactatttcttatttgcatgttacaaagcagacgggtcaatcgtgaatggctgtggcggggctggctcgttagcgtccacacccggcactagtgcagtcaatgtatcgtcactgactagcgtctccggctcacctggccgattatcacgtagcataacgaatccacctagatcgtgtatattcactggtgtgtaccgttgtttactacgcactcgcaacacatgtcgctgctccagtgtaactcgcgatgggttatgcaatatcgtatatttaggctctgggcttctttgcttcgtcctttcctttgtttcctcactatcctgccttcttctctggcggactcatcagtacttgttttcatctcagtatcaccgcctgttggctcagtcttcttttcttcctccacctccatagcctgggacgtgtcacgctgtaac

SEQ ID NO: 83330 - DNA, 535 bp, Arabidopsis thaliana columbia
  unsure (1)..(535): unsure at all n locations
aagagcggggctgcaagaaccgattctnagccggaggtttcgagtttctggactacttgtccatactgctacgtgctttacgagtatcccgtcatttaccaggaaagcgtgctataaatgccaaactaagagctgcaggagagcttaccaggcagcgaaagttccttctccaccgccagttgccgaagaagatagttactattgctgttggggtttctatccaataggattctcagaagtggtgactaaaatcccagtcactggtgtacatactaaaatcccagtgagtgatttacccaaatcagcacccaaaaaaccatcttccaaaggtatactattatgacggcggagaagaagatgatgatttcatacattggttctgatcctagtgaggacgacgacaatgatgactggctgatgaatggtacaaaaaggaggaagaatgtgaagcagagtaaagctaaagcaacaaccaaaccaaaacgtcaaaaagtaattgaggttgattgagtaaaatcagtcgggtagggaacag

SEQ ID NO: 83331 - DNA, 422 bp, Arabidopsis thaliana columbia
agaaacgtgagaaactttgagaagaccaagaagaagaagcagaagaagaagaaaatgaaattggtttggtctccggaaacagcatcaaaggcttatatagacaccgttaaatcggtaagttttttttttattttccggtgagttgtgaaggaataataacacacgcttcttctctccagttctcgaaaactcagatcttaattttgttaaagattcatggtttgttcttgtaacgatttttttcttttcttttttgttcagtgtgagaatcttgaaacgccggacgcggcggagctaatagcggcgatggcggcgggatggaacgtgaagctgatcgtggaaacttggtcagaaggagacgcaatagcttcaagtattggtttaaacgtagcaagcagacacgcaaacgctaaacacatatg

SEQ ID NO: 83332 - DNA, 611 bp, Arabidopsis thaliana columbia
caaaaatgatggaccgtaagtggaggattagttgtctgaagaccgttgacgaaaaaaggcggaccttttccacgcgctcaccacacaacactttcataaaatcaattcatcgatccatcgtctctatcagatcaattcatcgattgcgatcgctctttcaattttcttcatcaccggtgaaaataatcgaaacccagcacgagaaaaatgcatgatttttgcttcactatcccgtacgggatgcttctcatcggcggaggatttatcgggtacatgaagaaaggaagtataacatctttcgccggaggtgcaggcactggattattactcattctcgctggttatatcagtctcaaagcttttgagaagaagaagaattccactattgctatggttcttcagacagtcatcgcagctgctctcacactagtcatgggacagcgttacttgctgactggaaagattatgccggctggtttggttgctgggatcagtgctctcatgacctgtttttacgtatacaagatcgctactggtggcaataaatttccagcaaaagctgaatgatggttctgctacatgcagatgatactatccgttgttgaatttgt

SEQ ID NO: 83333 - DNA, 630 bp, Arabidopsis thaliana columbia
  unsure (1)..(630): unsure at all n locations
tnttttgtcatncccgtcggnnttcccaccgcggggtttccggtcctgnagaaggnagttaccactttcccccggngntccggccctggatattaccccatccccgcggttatacccggccccaaagcttttgagaaggaagaagaatcccactattcgctatggttcctccagacagtcatcgcagctgctctcacactagtccatgggaccagcgttacctgcctgactggaaagattatgcccggctggtttggttgctgggatcagtgctctcatgacctgtttttacgtatacaagatcgctactggtggcaataaatttccagcaaaagctgaatgatggttctgctacatgcagatgatactatccgttgttgaatttgtcgattagaattctttttggtgtacacaatgcggttgtcataacgccttaatagcttgtattagtcaaagaactgcatatggtcttgtgttttcttgtcatcgtgtttttgtaaccacaaactgttttgagctatactactatatatattgagataaaaaaaaaaaaaaagtnnnnnnnnnnnnnnnnnnnnnnnnnnnnnnnnnnnnnnnnnnnnnnnnnnnnnnnnnnnnnnnntgtcctaa

SEQ ID NO: 83334 - DNA, 444 bp, Arabidopsis thaliana columbia
  unsure (1)..(444): unsure at all n locations
gaaaaaaagaccaagaagcaatggagtcaactgatcgttcaagtcaagcaaaagctttcgacgaggccaaaatcggtgtgaaagggcttgtggattcaggaatcacagagattccggccctgttccgtgcaacgccggctactcttgcaagcctgaagtcgccaccacctccaaagcatctcaccatccctaccgttgatctcaaaggagcaagcgtggtggagaagatcggagaagctgctgagaaatggggattattccatttggtgaatcacggcatcccggtngaggttctngagaggatgattcaagggattcgcgngtttcacgagcaanaaccttgaagccanganacggtttctacctctagggntnacactagngacgtgctttactttagcnatnattgatctncaaaanttccgnggncgcccaatttgnaga

SEQ ID NO: 83335 - DNA, 577 bp, Arabidopsis thaliana columbia
  unsure (1)..(577): unsure at all n locations
aagatttactcaagcatcatcactgatgggcataaattcttcatatatatgcgaccaagaacccgatttggtggaagcgtatgtgaatttcgcatcagcacttatccgtagttgtcataaggagttgttgggtacttctggaacacttcttgaaatttctttccacaaagcggctatatgttgtacagctatgcacagaggcgctgctttagctgcaatgtcatacttatcaggtttcttggaggtttcactttcttccatgatcgaaaccgtgaatagcatatcagatggatcattcagcgtggtctctgtccaggtcgtatctcacttgtggagagggacttttgtctaatctggtctatgctctacttgggaggttgcagctattgtcaaaggggcccataaaggtgttncaacggtacctgcaagtttaattgtgnangagggccttnaatggnaaagggaattgtttgtgtttgggaaaanttntcccaaaggattggntaaacnntaancgggttttgggnaacttnccggggnggggnnttcnttaaaannaaaaggggnaaccccgntg

SEQ ID NO: 83336 - DNA, 562 bp, Arabidopsis thaliana columbia
  unsure (1)..(562): unsure at all n locations
ggtaactaatgggatgtattttatttatccttctcatcagatgaatctaagggagagtggctcaagattcttcatgaggtttcttttcctctcctactgtacattagaaacagagcatcgacagaaatgaagaagatgatggatcattgccctcattattaaggcaacaaaataaaataaacattacaaaaaaaaaaagtttatcgattgatttattcatatgatgtttggatttggatcgtttcgatgagaatccgcaaaatctctcactaatcgcttcaatgttcgaccgtgtttcccttgcatatgtcctcctggaactggttattgcttcccaaattgcagcttttggtccncaagataacgntcccggnacncctagagctttntggaccatncccccacaaggntttcngggttcccctggcttaggaacccgccnggaagggnccaancgngggngttagccccctggggggggttcccaacanaaaatcccttccagnngccccccaaaaacggggnacgggaanctnngggcctgnanggggacccagggggg

SEQ ID NO: 83337 - DNA, 935 bp, Arabidopsis thaliana columbia
  unsure (1)..(935): unsure at all n locations
ctaaggagatatgtggggagaaatagatacgaggttttngtacatagctatttcctgtctctnaatattnaaatgtnttgacaaaatcaatgtggagaaggccgttaagtacattgtnagcngcaaaaacctggatggtggttttgggtgcacacctggagcagagtcccatgcaggacaaatttcntcccgcgcggccgctcttgctatcactgggagtctccatcatgttgataaggactcacttggttggtggttatgtgaaagacaattaaaggctgggggcttaaatggacgtcctgagaaactcgctgatgtttgctattcttggtgggtcctatcgagcctaatcatgatagatagagttcactggatcgacaaagcaaagcttgtcaagttcattctggactgtcaggatttggacaacggaggcatctcagaccgacccgaggatgctgttgatatcttccacacctactttggagttgcggggctttccctccttgagtatcctggagtcaaagtaattgatccagcctatgctttgcctgttgatgtcgtcaaccggattatattcaccaaatgactgcaatgggtatatgatcttaatggtcaaacaatatggccgcaaggctctctatatgatttgttcattgaataatttacttggcggttttagaagttatgtatgctcaaggaggaggagattgcaatttgggtatgggaacagtctcaaatctcaatgttgtataacttgctacattattgaggtttctgatgtaatggaaacgaagttgtgttgctgctacattatataaatcacattaatgtgttttttctccccaacaagaagaaaactctcagtgataaaaagaacaaaaacaaagggcggccgctctagaggatccaagcttacgtacgcgtgcatgcgacgt

SEQ ID NO: 83338 - DNA, 747 bp, Arabidopsis thaliana columbia
tgtgtacactaccagctctgacgtcgcatgccccgcttccgtaagctgggatcctctagagcggccgccctttttttttttttttttttttttttttaaaccaataatgaaattgtacaactcgtaaaaaataaaagacaccccaaaaccctaaaaattgcaacagagtatgtggtaaaaaaaagagacagagagatattataaaaaaaaagaccctaccaaaattttctctagagttcccccacacaacttaacttatccaaattaaacaacacaaattctcagaagctaaacttcaagaacccaaactatcacaatccacaaaaatgccttttgactctttagattttgtcctccgtctcttccttctttggcctcttctacagccggttcgccaccagtctcttccttcttagcctcttctacagcctggtcacccccaggttcttcctccttggcctcttctacagccggttggtcctcaggcccttccttctttgccccttctacagctggttcctcctcttgagcatcctcctcagaatgctccgtgcttttcctccaacttttttcaatacgttcctcgtctttacggccattgccaagaccaaagcccatcttccctgagatttctcattaggcttctccatggcttgagcaatgtccttaagcttttcagcctcgagcttcttgtcaatctctttccaatcctggccttttttagccagaacttcctctttaggtctt

SEQ ID NO: 83339 - DNA, 484 bp, Arabidopsis thaliana columbia
ttcttcttcttcttcctctctgctttgtctctcttcttcttcaaagtcaaaattcaacagtggttcatgagtggtattgtgatcgatctgttactttcggagtgcgagcaataagaagaggaaggatatgtcgtcactcagcagagaactcgtgtttttgatacttcagtttctcgatgaagagaaattcaaagatactgttcacaggttggagaaagagtctggttttttcttcagcatgaggtactttgaagatagtgtaacagctggtgaatgggatgatgtagagaagtatctttctggattcactagagttgatgataatagatactctatgaaaatatttttcgagattcggaagcagaagtatcttgaagcacttgacaagaaagatcatgccaaggcggttgatattcttgttaaggagttgaaaggtgtctcgacattcaacgaagagctttttaaggagattaccatgctttta

SEQ ID NO: 83340 - DNA, 430 bp, Arabidopsis thaliana columbia
  unsure (1)..(430): unsure at all n locations
aaagatgagagaatacatggaaacttctccgtttggtcaatgacaaaggtttttgaaagggcggaaataaaaaaagacattgaccggtcagaccaaaacatggaggaagagaaacaaaccctagagacgattctctccgcaactgttaaaaatttcagttgcagagagattaatataagacactgaaattgaaagacaaactcctaaaagaaaaaggcttctctttgctttgtttaagattcggacaatttgctaatcggcatcccaatcaatctccacagaagggaacttctccagcccgaaatccccatctccattcaaatcccggatcccggaaaggnccaagacgggngnattnccagttncngggggaaaanttcccncnggggncccctnggaaagggtttcncngggtntngagnaccctttt

SEQ ID NO: 83341 - DNA, 611 bp, Arabidopsis thaliana columbia
  unsure (1)..(611): unsure at all n locations
cnnnnnnnnnnnnnnnnnnnnnnnnnnnnnnnnnnnnnnnnnnnnnnnnnnnnnnnnnnnnnnnnnnnnnnnccacgcgtccgatttcttcttcttctcctttttcaaaaatttgtcacctccgagatcagatctgatcgtcggaattgagatggcgaggaataaacttgtaagtggtagtcatgggatatggaaatatttcaacccagcgttttatctccgaagaccaagacgtcttgctttgctcatcatcctcttcgtctctgtttcaatggttgtttgggatcgtcaatctctttcccgagactaccagtttgaagtttccaagttaaatgaagaagttttgcggttgcagcagatgttggaagagataaagagcgtcactgaggatgtgtctgtcaatagtttgaaggatgttcaggaagatccagttgatgctcagcgaatgcagagagttaaagaggcaatggttcatgcttggagttcatatgaaaagtatgcctggggacaagatgagcttcagccccagacaaaggatggtgctgacagctttggtggcctgggtgcaactatgatagatgcattagacacactatatataatgggtctag

SEQ ID NO: 83342 - DNA, 401 bp, Arabidopsis thaliana columbia
aaaaaataaagggcatatcgaaatatataacaaagagaaaagaaaaacaagaactgtttgtgtctaaattaataaggtggggtattactacgtggtggaggggggtgtatgttgacgaagtcgaacgaccttattaagcattattcacaggcgtttttttctttaacagatttggcccaaagacttaggagagaaggaaagacagaatatgaacacgacagtgcaccagttggagaaaacagaatgtcttgggaaacaagatatcacttcccttcaattctcatagcatcaagataagcctctcctgtggagctcacgggaaaacaagccactcaagttggtcttttaggtttccaaggcttccttaacctttggaggcccctttgtcttttggacaaagg

SEQ ID NO: 83343 - DNA, 402 bp, Arabidopsis thaliana columbia
  unsure (1)..(402): unsure at all n locations
cacagttactttcgatcttccgatttcggagcttccaaaatgttctccagcagccaattcgagcctaattccggctcctccggcggcggattcatgtcttctcaaccttctcaagcctacgaatcctcctcctccaccgctaagaatcgtgattttnaaggtcttgttccagtgacggtgaagcaaatnaccgaatgtttccaatccagtggtgaaaaatctggtctcgtcatcaatggaatctcactaacaaacgtttcacttgttggattagtgtgtgncaaagatgnatctaaagtcacagaagttagatttcactcttggntgatgggacaggacgtatttgacttnnaaaanatgggttgantgaaacttttcgncggntagagaantgggagtttt

SEQ ID NO: 83344 - DNA, 456 bp, Arabidopsis thaliana columbia
  unsure (1)..(456): unsure at all n locations
ctccctcaacaacaatgcccgtcaagtgggttttacattggcaaccaaaccaaggatcaacagtaagcagccgaatcctaaacgaagcaacacaatgtgtagagagcatcaatggtgtgaaagaaggaagatggaaagcaacactcaactattacaaacccatgttaaaagaccaagcgaatcaattggagtttcctcgtgattttctagggatttcacttgcggatcagccgaataagtactatttcattatcaggacgcagaggattgtcttggaagctgattcttcgattcagttgattatggagaagcttcagtcttataaatctaaagtggctctttactttgatgggttnaagtatcagcttggngnnttttnnggttgagngttggtaagttgttccnnctcatnctgggatttaggggnatttgcatggggggtggggttcttcccnt

SEQ ID NO: 83345 - DNA, 837 bp, Arabidopsis thaliana columbia
  unsure (1)..(837): unsure at all n locations
caagctctcatacgactcacatgagggaaagctggtcacgcctgcaggtaccggtccggaattcccgggtcgacccacgcgtccgcccacgcgtgcgcggacgcgtgggcggacgcgtgggcaccgcacctattgatcccaatgccaaagaggtaacgaagcgcgtggactcaaacgagaaacattggtcgggatggaactggagaacggaaggtgacgttatggttaacggagcttttttcgtgccgtcaggtgacggagtgagcccagcgtatgccagagccaccagtgttcagcctaaagccgccgcgatcattgaccagctcacggtcaatgccggcgttttcggcgatccaagtgggagaaacggccaaggaggaagctttcccggaattacgaacggtggtgggaccatcacgcgcggttacagtaaaagtggacctgccggcggtggcagcggcagtgacagtgatgatgggcttttcacattgatattcggtaacaatagcggtgcggtggctctaaggccgggacaggtctggtcgattctattgattatcattttatattggtatattccacaccatacgagatcatagtttcattattggttcatagttacaaaaaaaaaatgaaaagacaaaaaaacgaatatacagatatataggtacacagcacttgcaagttgtaaaaatatgggaaatgtataagatattataaatcttgtttgatgcctaaaaaaaaaaaaaaaaagnnnnnnnnnnnnnnnnnnnnnnnnnnnnnnnnnnnnnnnnnnnnnnnnnnnnnnnnnnnnnnnnnnnnnnnnnnnnnaaaacg

SEQ ID NO: 83346 - DNA, 577 bp, Arabidopsis thaliana columbia
atttaaatgatacaaatgttattgctgtagtataaatttctaaaatatgtatgagaatgtcgtttgcaacatcacagcccgtttgcaaacatgaaatctaagagcaatagaaacaaaatataagaagccatatatatcgggtgatcaaaagctttacagaaagaaagaaactcataagagagcaaccatgtaacatatcatggcaagaagaagagaaaatcattcaaaaccaaataaacatttaaagatcaaacatattactatattagtgtcctcccaatttatttgctgatatcggaaaagccatatactacttctcctacctttagaaagattcaacagttccatttttacactcggtatgtttgctagttgagtcccccaagattgcatctgggagtaaagagctgtccccatgttcgtctgccgagcccacgtgctgaattgtcccgggtgaataccaatgggatccatgcatgcgatccccattaaaaccatgtgaaaggagggtctccaatgattcgagggaatcgtatgccgcttcttcccgtggaaatgttccgccttccaagctggt

SEQ ID NO: 83347 - DNA, 446 bp, Arabidopsis thaliana columbia
  unsure (1)..(446): unsure at all n locations
gtttcaaattgatttaccatatcaagatggtttaatattactttttgtaccctatgttttgaatgaaaaatgacagtaagagagatgtgagactggagagtactgaaatactaattagctctgaacttcattgaatttgaagacacagtcatagagccgtcctccgagaaactctgctacttcaagatgcttcaccattccaatcttgagagaatcacacttgaactgagcataaaggtttgtctcaattccacgacccangccttctacgatgacnaagtcggcatcagatgaaggtaagcaagcccctgtgatacgcttgagagatcgataacggggtagtcattncccggatttgcatcagagcttcgaggatcacaccnagcatnggcatttcancctcacngnncaaattngtaccggaatgntgctgnanggggccttgg

SEQ ID NO: 83348 - DNA, 679 bp, Arabidopsis thaliana columbia
  unsure (1)..(679): unsure at all n locations
aggtctaccgggcctgatccggcccatattttcataggaaccaaacttgcaacgtttgatacaaaaagtcaaaaagataaatcaaacattttctgtgtccaagaatcaatcacatgtgttcttgaccatttacataaatctcaaaatgttagatacactaaccgttgtttttagccagatttctggataatgtcatgatgattagatgagaaagtcagcattttttccagtgtccatcgacagttctttcaaacacacgtggttgcctccttgggaatgttttgctccattctgggatatttcagtaaatatccccaattcctaaaacacacaaaaagaaagagaatgcaatttttcccaatgtcctggattgtggtccaagataaatggtccagtgggaagcttcccaaaatggctaaccctcccttaaactggttacggagccctggggccttcaagcaagagggtgagggggganaagttagtgggggnttccttccancaggnaagcggnttaagtccccaaacaaattccaaccaagnggattggccagcgggaanggngcggtggtgagccnacccggttttggggccaaaggggcaaggaaattcccctncaggngggacnttcaaacgggggggaacccggggtctcnanngggncnacccggggaannag

SEQ ID NO: 83349 - DNA, 322 bp, Arabidopsis thaliana columbia
agattatgtgctttgtttccccttgttggaggattgctggcggaatttgtttggttccataagttatgtaaggctctagtcttccaagacccatcacgatttggctctctttcagaacgatctcgttgcccaagttttgttacattggcaaacatttgacagctgataaaatttagcttgtttctataaatcaagttattattattcgtatcatcaagtaacaaaattgatcttacactttgacgattaataaggcgggaacatgttatcgaaaaagtaaacttttttttttacattttaaaaaaaaaaaataatactaaaa

SEQ ID NO: 83350 - DNA, 542 bp, Arabidopsis thaliana columbia
ccagaatctccggtgttatacctcatgagctctctcactccaccaatcttgtgatgcttgacctcagcaacaatcaactgtctggtccaataccttcagaagtcggaagacttaggaaactgaacttacttgtactgcaaggcaaccacctcgattcttctatacctgattcactttctaatctcaaatctctcaacgttcttgatctgtccagtaatctcctcactggaagaatacctgaaaacctctccgagttgctcccaacctcgattaatttctccagcaaccggctctctggtcctatccccgtctcattgataagaggagggccttgtaggaaagctttttcgggttaaccctaatctctggatttccacccaaactgctcggttcatcagcatttgaaggtttcccgattgtgtccaagggcctcacgggcaaagaagaagttgtgcgccctctgggcggtacttgtcttagttttcatcctagtcctaggggtcatcatgttttacttgagacaacggatgagtaaaaacaga

SEQ ID NO: 83351 - DNA, 446 bp, Arabidopsis thaliana columbia
agttattaagcttttaaattttataaataattaattattatcttaactaatcttgatcttttttattttgtatttttttggttagctggaaaataaattgtcggcaattacagatcaaaatgaggcggagaaatatgtagatgtgattgacccaagggatattaagattgggagcagaaaattttatagatacattggatcacttactactcctccttgtacgcaaaatgttatttggaccgtcgttaaaaaggtaaatactcatcgttattttcttctcttttttacttaatcaaacatagcattaatagatcattacaaggtactaatagtgtgaatatccatatccaaaagggtttatccatctaccatgttacccagggtctcatttttcccaattttaaattttgacgttttattttaaaatcattcgtttaaatttattt

SEQ ID NO: 83352 - DNA, 580 bp, Arabidopsis thaliana columbia
caacaaagaaaggaatggacgaaaacgtcttttatgcggcagtaggtgctttgcaacacaagataagagcttcttattctgaggaacttaggatagaaaaatcagaactggtgtctatgatgattttggatgggtgcttcattctcatgttgttacttatcgtgtcaagaaagatagatttggatatgaataaggatccaatcttcacgatcccctggattttggcatctattcagagtgatcttctcctcttggaaaatcaggtccctttctttgttcttcgaactatatttgataaatcaggaatagggtcacctggtgatctaaacaggatggcgtttagcttcttcaacctctcaatagataaaccagatacatattgggcgaaacacagagaccgcggggctaaacatcttcttgacctcaaccgtaagaccttcatacctagcatgagatctatgggtgaatcagaaacaacaccatcctcgaaatttcaacactctaagggtaaatccggaggaagtatcatcgtcagagtctacatttccgttgatactgtcggccaaagacttcgcctcca

SEQ ID NO: 83353 - DNA, 618 bp, Arabidopsis thaliana columbia
  unsure (1)..(618): unsure at all n locations
tgacaagtcttcgtttttgaattagggtttttggacaattcttctcttcttcggctgcaaaaggttttcgcaagatatggctggctctgttggtgaggaaactgagccagaatggattaagagagtgaaattagagggagctgttccatgtcttaagccagacgacaactgcaaaaatggttggacgacgccatctcctgacacatttatggttagaggaccaaagtatttctctgacaaagttaagatacctgctggtgatttccttctaaagcctctgggttttgattggattaaaggtcctaaaaagctttctgagatcctgagttatccaagcagccgaatcagggaaagttatccgatgaggagtttcaaaaaagatgggactaaggccttttgtcctgggcattcaatcctccagcttcctcacaaaggcaattccagtgctgtggcttactttgttaccccagggcctttccttgaaggctccctgatggcccggtttttgaaaggagattattgggtccagaaatcgggcttancttgnttnaanaatttnaaagcccttggtttngnaacnttttgggnaancgcctttntttttgcgccctnttttgc

SEQ ID NO: 83354 - DNA, 399 bp, Arabidopsis thaliana columbia
cccacgcgtccggtcatggtttgcctttgtgaggaaggtcgttgcttgagaaaaacccattttctaaaacccttttctacctccatcgatggctctgtagccgagcttccccgtcttgatgatcaacaacgtctctctgattcttctctgcataatacctcttctgggttttgggctgcagatcatcatttcttcctatcatggcttggaaaaatgcaagctttgtatgaacccatttggaaaaaagctggaatttttgaagcaatcaaggcatccacttacaaaatcataaaagacacgtcctcgattctctccattgccgagaaatggtgttctgaaaccaaatctttcatctttccatggggtgaagcaacaattacgttagaggatgtgatggtg

SEQ ID NO: 83355 - DNA, 518 bp, Arabidopsis thaliana columbia
  unsure (1)..(518): unsure at all n locations
gcactggaatacatgccagagggtctaaggaggcaaattgataagtgcttgtctatgttgaaagaagcacagctaagcgggaatacaaaccttggtgtgtctgtgctattccctccttgcggactcgaaaatgtcagcttttccatgaatcctcctctgaatcagggtgatatgattgctcccattctgcatggtaaagtatcaagcaacactagtagtccacggcagactaatcattcatatatcacaacttataacaaagcaaaagaagctgagattcaacgggcacaagcgctacagcatgctttagatggaaagggaatggngncagagatgctaggaatttttaagggttcaaaaaccaaggggcgcaanaattgggtgggttcagcttttaaggcttncattcattcttttnaaggnaagggggaagnttntnaccccaattgntcccaggaagccttaggngtttggnttgnaaaaattcngcttttttcgnngctnttttggcaaaccat

SEQ ID NO: 83356 - DNA, 480 bp, Arabidopsis thaliana columbia
  unsure (1)..(480): unsure at all n locations
aaactgtgtttccatatctctagaccgtttagtcggagaaatatcaacgttggtcgacaaatagtcataattcgccggaataccaaaattagagaaatacccatcagtcccagaaccagacccactaagaaaatcagccggagaactattctgacggtgaaagccaccaccttgatgatgattatacaatccttgctcaacagaactcaggaactcgaacgagtcgtcacgactcgttatcactcctccagagttattattaccagtaagcagctctgttaaacaaaggttaggttttaaaccttcttcttcatcttcttcgagtagggtttcaatccaagtagctgggagctgaacgggtccggggataatccactttggctcacccttcctccttcttcaccaccaccacggtaattcccgcgggttatntgggggggtttcatcgggggcttccccggggaatntntttnnncgggg

SEQ ID NO: 83357 - DNA, 386 bp, Arabidopsis thaliana columbia
  unsure (1)..(386): unsure at all n locations
aagaacgtcaagggaagaggcctctcttgactggtgatgtgcaggtcacgttgtttgtaggtgtgggaacattaggggaacttatctttacggacaactcaagttggattagatgcagaaaattcaggctgggtttaagggtctcttcgggttactgcgagggaatgcgtgtacgcgaggcaaaaacagaagcttgtaccgtgaaggaccatcgtggagagttgtacaagaaacattacccacctgctttggatgatgaggtctcgaggttggaaaagattggaaaggacggggctttccataagaaactcaataaagcagggatctaccantgttaaagaaattcctncgtctttatggtcaaagactcttcagaaactaaaggg

SEQ ID NO: 83358 - DNA, 523 bp, Arabidopsis thaliana columbia
gcgtccggattctctctctagcgatgtcgatcaaaccggagaattctccgattccgttgattgggattaataatacgtgtgaaatcatggtgtctttgagttcatgaagaacggaggttaacctaatcgaagatttgatttgggactgcgaatgagagagaagacgttgaaggctcaaattggagatttctatgaatttgttgatttgagagaagaattgaggctcattcgtaacggagggaaggtgacggtgacggcgatggtgaatttatagttgtacacggagctggaactcatcaaggacaaagaaggcaaagctactcatctacttaagttctgctccaaagctgaaatacggagattcagatcctttgttcccatgaatcaactacagacgctttaataatctgagggaatcttccgtgccaatatggagagatcatcatcatcatcatcatcatcatcatcatcatcatcatcatcatcatcatcatcgtcatcgtcatcgtcatcatcatcgtca

SEQ ID NO: 83359 - DNA, 414 bp, Arabidopsis thaliana columbia
  unsure (1)..(414): unsure at all n locations
ctaacataagattgtctgaaattggcgtccaagaagcagatgttaagaatatattctacctaagagaaatcgaggatagtgatgagcttgccttggctatggaactatatgtgcaaaggggaaaggccgccatcattggcggcggtttcttagggcttgagataagttctgctctaagggctaataatcatgaagtgaccatggtttttccagaaccttggcttgtacaccggtttttcaccgctgagatagcttcattctatgagagttactatgccaacaaggggagcaaaatcatcaagggaactgcagctactgggatttagcaccaactcagatggggaggtcactgtgggggaacctgggagggttgggaggacccctggangttancataggttttcggcttggntt

SEQ ID NO: 83360 - DNA, 584 bp, Arabidopsis thaliana columbia
  unsure (1)..(584): unsure at all n locations
gggaaatcacagacagccattagcaaattcaagggatctgtgttagtttacccaaaagacaaactcccatcaaaaggggggaaaatcgattcaagtgtgatggcttttggtgcagcatggtgccaacggtcttaatcttctagaagcacagcattgttattctggtggagccacttctaaatccagctgcggaagcgcaagtgtctgggcgtgttcaccgaattggacaagagaagcctactctagttcatcggtttctggtatcgggcacagtggaagagagcatctacaaactgaacaggaataagaatacaaacttaagttcatttagcagcaggaatacaaagnatcaaggtcaacagttcttgacactaaaagatcttgaatctcctatttgcttcaccaacagcagnaaccagcagagntngaccaaaacccnggggggggggccaggngatnttgnggggtntttccccccctaagttggttnaagatttnccancccgnggggggnttnnggggaagnatttnacccctattaacttcaaacnggttntgcntttggaaaggttcagggggtttgt

SEQ ID NO: 83361 - DNA, 393 bp, Arabidopsis thaliana columbia
ctctctacttcgaacaggaagaagatagattctctcagttctttcttatccataaaaatatacctggaatcttgtttctatacttcttctgtttctcatactctctactaatactaacatttttccagaattttgttaaaccctacaaaaatttgaactttttaaaaccctagaaaattccaaattcgtaaaaccctagccaagttcctctattgcgtgaggggaactcatcagaacccacgaatcgaaatgaagaatccagaaaaacccttacttctgtttctaattttagcttcaagcttagcatcaatggcgactgcaaaatccacaatagagccttgctccagtaaagacacttgtaactcattgctaggctacactctctacaccgac

SEQ ID NO: 83362 - DNA, 424 bp, Arabidopsis thaliana columbia
  unsure (1)..(424): unsure at all n locations
gcgtccggacggttaagaaactatcagttgactacgactttcatcgtgtggatgaactgtcatttgacctgccaaatctcgagtgccttcactactctgatttcgccttggatgagtacccacaagttaacttgcaatcccttgttgaagctaagctggaacttcatccggctgaacatgtcgagaggccggatataacgaatctcattatggggataagaaatgttgagatccttcatctatctcctgtttcggttgatgtgatctcttcgtgttgtaaatatgggctacttctaccggtattcaacaagctggttnaattaatctttngggattaagantaaacgggggttggaaaattcctnggcaaaagatncttaagncagtnnccaaaggtttgaaanccttaaannatcccnggntc

SEQ ID NO: 83363 - DNA, 538 bp, Arabidopsis thaliana columbia
  unsure (1)..(538): unsure at all n locations
ccnttgggggnaagaatntggnccctcacnacntctgttccggtggagtgaccccccggttgtaaatatgggctacttcttcccggtatccaacaagctggttaatttatcttttgggattaagaataaccgaggttggaaattgctggcaaagatgcttaagcagtgtcccaaagcttgaaactctaaacatccctggatctcaagggttacagaagagatgtctcccatgcgtcggacccaagtgaagtttcaaattctggattatggaggaactgatgaagagtttgaacagttaaagagttttattgggagtaaacgtaatgcagaagctgtggtggatgatggcacaagattgcaaacgaaaagaggatgtaacgatgcttcttggagtttcactaaaagcaaattgccattccattgtcgcacaagtcatctagtttattcatactaccctatgtaaaaacttggtcacatccaactcacttatatgtgactatgggattggagtttgtttcccgttccttatgactctgtt

SEQ ID NO: 83364 - DNA, 382 bp, Arabidopsis thaliana columbia
tgatcaattgtcatccgaatgtctacgagacagattaatatctgatgaacgatatagtatggcggtgtatatgtgcaagaaatgcaagattgatgttttccccgtgtggaaagcatggggtcttgctttgttacggatggagcgctatgctcaagctcgagtcaaattcaagcaagcctttcaattaaagggggaagacattcctgatgtcattcaggagataataaatacaatacaaggaggtccgcctgtggatgtgtcaattgtacgttccatgtatgaccatttggcgaaaagcgcacctacaattttggacgattctttatcagcagactcatacctaaatgttctgcatatgccatccactttccctcgttcagag

SEQ ID NO: 83365 - DNA, 843 bp, Arabidopsis thaliana columbia
gcgcatctgaatttggtatggatccaccacgtatgggacatgcgctaccgcccggaagagaaacctttgaccagaaaatggaagtgcgtcaggcgatagaggctgccggaattccttacacttacgttgtgggtgcttgctttgccgcctacttcgccggaaacttgtctcagatggtaactttacttcctccgaaagaaaaagttaatatttatggtgatggaaatgtaaaaggtaaaattttcaaactcttttttaactctttgtggttatataccttttaagactttaaattagatcaagcccatctaaaccaatcaatttaaaccgttttatatttgtagtggtgtttgcggatgaagatgatatcgcaaaatacaccgcgaaaacgttaaacgatccacggacattaaacaaaaccgtgaatattagacctcccgacaacgttctcacgcagttggaattagttcagatctgggaaaagctaaccggaaaagaattggagaaaacaaatattgctgcacaagacttcctcgccaacattgaacaaatggagattccacaccaagcagggataggacatttctatcacattttctatgaaggatgtctcactgatcacgaagtcggagaagacgaagaagcttctagtctttatcctgacgtcaagtacaaacgcatggatgattacttaagaatgttcctctgatttgaccaagtcttatctatactaaatacacatatcaaaagtttgatgttttatattcattcatgttctgctatatatgcaaatttaaaaatatattcttcatgcaagaaaaaatattatctttggtttttaac

SEQ ID NO: 83366 - DNA, 537 bp, Arabidopsis thaliana columbia
  unsure (1)..(537): unsure at all n locations
acgttacgccccgggcttaccaaccgngnttttgccccccgnaacgttctccccggtggattggtccgatctggaaagcttcccggaaaggaattggggaaaaccaatattgctgcacaagacttcctcgccaacattgaacgtaagtccaagcaatagtgtaacgtaatctactttatgttcggcaacatatccttaatgggccaggctttaggtctatttgaaaaatatagcccatcaactttatttgatttcttttacatgtatgtagaaatggagattccacaccaagcagggataggacatttctatcacattttctatgaaggatgtctcactgatcacgaagtcggagaagacgaagaagcttctagtctttatcctgacgtcaagtacaaacgcatggatgattacttaagaatgttcctctgatttgaccaagtcttatctatactaaatccccatatcaaaagtttgatgttttatattcattcatgttctgctatatatgcaaaattaaaaatatattcttcatgc

SEQ ID NO: 83367 - DNA, 674 bp, Arabidopsis thaliana columbia
tccagcttgatctcatcaccaccgatgaagggttaaaagcggcagtgcaagaacaaagagcggcctcaacaacggggatgagctcaatggttgcagactcatcacctccgtatgtgaatctcaagaaagagaagagaagcccagaagaaaagttagaggcatcattaggacctcttcaggtccaacatattgttcttgaagagagaatagaaacaaaaggaggtgctccaagtgtcgaacaccagttcatgcccaccttcagcggtcaatgttccgcttctgcttggcctgagactgctagagaggatcttgttgccggctttacaaatggtagctgcgatggggatttatgtgttggactacgtttaggagacgatggagctaaacgcagacgcactcaggtggccaacgaaagaatgagacccgccgaatagataaaaatgctaaagaacttgaaagtttgtcttgctctttgccaacacttccattgagagctttggtttggatttgtctcatggcaatcgaacttgaacatagccaaatttagcctcagttggatgcggttaccattctcgtttattctgtttgtccaatcccatatctcagcatcattgtatcattgatgtccaaaaatgtacaagttatcaaagttgagaaaaaaattgttatgtaag

SEQ ID NO: 83368 - DNA, 739 bp, Arabidopsis thaliana columbia
  unsure (1)..(739): unsure at all n locations
ccagctacactctacacacattatggaaagctgcgccgcctgcgtgtgccggtccgctataccacgggtcgaccctacgcgttcgcatggccttgcaaaggcatgtatactccttggaatgccataggattctccacaggcccagcaactgagtaatgctatattctaaaccatatactaccatgcactcaaagcatctacagagcttgctgcgagactcgccccctatgaaacctatgctaggatgtcccagactgtaagggaatccttcaacctgacgtgtggaatgtaattccatcggaccgctggcactgggctggtcttagagatatgatgtcacagaatggagtgaggaactctctcttacgagcaccaatgcctatctgcttcaaccagtcagatccttcggtaacaatgaatgttttgagccctacacatcaaacatctacagccgcagagtcttgagtggtgaattcgtagtggttaataagcatcttctccatgacctaactgatatgggactttggacttcaacgntgaaaaacaaattaattaatgaggatgggtctatagtcaatgttgctgaggtaccngatgacttgaaggcggtttncaagactgtcttggggaatcnaacaggggaccagtnggtgggcatgggnttctgatcggngggngctntcaaangggctaaagcccaaaggtttaacaatncanattgggnaaacccnatttnngg

SEQ ID NO: 83369 - DNA, 2974 bp, Arabidopsis thaliana columbia
cagaagcgtgggcgggaaagtagataaaaaatttcggccattaaaggacaaaatcacaagaaagtagaaaccctagagattttgaaaccgaaaccccaaaaacccctttgacgcctccttcttcttatctctttataaaaaaccatttctttcctgcaacatcgttgcttatcatcagacgcacatcacctgttcgacaaaattacctctgagagtgttttttttgttttccttctgacaaagaaatatgtatgtagtgaagcgtgacggaagacaggaaactgttcatttcgataagattactgcgaggcttaagaaacttagctatgggcttagcagtgaccattgtgaccctatcctcgttgctcagaaggtctgtgccggtgtctataaaggagtcactacgagtcaacttgatgagttggctgctgaaactgctgctgctatgacttgtaaccatcctgattatgcatctcttgctgctaggattgctgtgtcgaatctccacaagaacactaagaagtcattttctgagacgattaaggatatgttctatcatgtcaatgatagatctggactaaagtccccactaatagccgatgatgtgtttgagataattatgcagaacgctgctcgtttggacagtgagatcatctatgaccgtgattttgaatatgattactttggatttaaaactcttgagagatcgtacctcttgaaagtccaagggactgttgttgaaaggcctcaacacatgctgatgagggttgctgttgggatccacaaggatgatattgattccgtgatccaaacctaccatttgatgtctcagagatggttcactcatgcatctcctactctcttcaacgcaggaactccaaggcctcaattaagtagctgctttctagtctgcatgaaagatgatagcattgagggcatatatggaacactcaaagagtgtgctgttataagcaaatctgctgggggtattggtgtttcagttcataatattcgtgctaccggaagttacattcgtggcacaaatggaacatctaatggtattgttcctatgctgcgtgtattcaacgatacagctcgttatgttgaccaaggaggaggcaagagaaagggagcctttgctgtttacctggagccatggcatgctgatgtctatgagtttctggagctgcgaaagaaccatggaaaggaagaacacagggctagagatttgttttatgctctctggcttccagatcttttcatggagagggtccagaataatgggcagtggtcactgttttgtcctaacgaagctccaggtttggcagattgctggggagctgaatttgagacactgtacactaagtatgaaagagagggaaaggccaaaaaggttgttcaggcgcagcagctttggtacgaaatattgacatcccaggtagaaacaggaacaccatacatgcttttcaaggattcatgcaaccgaaaaagtaatcagcaaaatctgggtaccataaagtcgtccaacttatgcactgaaatcattgagtacactagtccaacagaaactgctgtgtgcaatcttgcatctattgctttacccagatttgtaagggagaagggtgtcccattagactctcatccacctaagctcgctggcagtctggactcaaagaatcgttactttgattttgaaaaattagcagaggtgactgctactgttactgttaatctcaataagataatagatgtgaattactatcctgtggagactgcaaaaacttcaaacatgcgtcatagacctattggtattggtgtacaaggccttgcagatgcatttatcctccttggaatgccatttgattctccagaggcccaacaactgaataaggatatattcgaaaccatatactaccatgcactcaaagcatctacagagcttgctgcaagacttggcccctatgaaacctatgctggaagtcccgtgagtaagggaatccttcaacctgacatgtggaatgtaattccatcagaccgctgggactgggctgttcttagagatatgatatcaaagaatggagtgaggaactctcttttagtagcaccaatgccaactgcttcaaccagtcaaatccttgggaacaatgaatgttttgagccctacacatcaaacatctacagccgcagagtcttgagtggtgaattcgtagtggttaataagcatcttctccatgacctaactgatatgggactttggactccaacgctgaaaaacaaattaattaatgagaatggttctatagtcaatgttgctgagatacctgatgacttgaaggcgatttacagaactgtctgggaaatcaaacagagaacagtggtggacatggctgctgatcgtggatgctacatagatcaaagccaaagcttaaacatacacatggacaaacccaacttcgcaaaactcacttcgctacacttctatacttggaaaaagggtctgaaaaccgggatgtactacctgcgatcccgtgctgcagctgatgcgataaagttcaccgttgacacagccatgctcaaggagaagccgagtgtagcagaaggagacaaagaagtagaagaagaggataatgaaactaagttggcgcagatggtatgttccttgacaaaccctgaagagtgtttggcctgcggaagttgaagctctaagttatagtttgggtcttaaaaagttagaaagtaaagcatgtctcttggacggtcttttttatttacttgcttatctgggtgtattttgttaatagtttcctaatgcttaatgttgcttgagtttttgtgtaatccaatttcgtttttaccttttctcttgaaacaataaggatttgtaacgagaattatgtataaccaccaccaccttacggtagattttactatccatatataaatattttaccatccattaaaaaaaaaaaaaaaa

SEQ ID NO: 83370 - DNA, 534 bp, Arabidopsis thaliana columbia
gcgggaagaaaaaccaaggaagagcctgaccagcagtgtcagctgtggttcactcaaaaccaagaatccgtttagccgtgtgaaggacgaaggtgagaacagaaacaagacgggattgtcgatgaggaagtcgtggtccacggactcccttggtctgctcagccagagcaaccggttggggaagacggtctgtatctgtgctcctacaaagcatgaaggctcattccgttgcaggcttcaccgttcatcagccacaagccatggtgcagcaactgcagaacttcatcttccccaaagcccttgctttcttctcgtcgtctcggtgaccaataatgtcacatagtctctctttcgttattcacaaaaccagtatggtgccgtcctgattgtctagaagattgttttttcctatccatgtgatgaatccatttggtatccatgtgttcatataaaacatgtgcttatgtgtatgttgatgcacttctaaatctttttttttttggtggtggaaatttcacatatatgtttcttgcc

SEQ ID NO: 83371 - DNA, 747 bp, Arabidopsis thaliana columbia
ctgggttttagttagatggatctctgttgcgaccttctgttgatgattctacttttcgaatgtggagtagatgcaatagtatggggaaatcgtggattcttaatgttgtgaacaaggagatttatgacagtatactttattatgaagatgctgttgagatgtggactgatctatttactcggtttagggtgaataatttgcctaggaagtatcagctggaacaagctgtgatgacactgaagcagggatctcttaatctatccacttactttacaaagaagaaaactctatgggaacaggtgttgaatactaaaactcggagtgtgaagaagtgtgactgtgatcaagtgaaggagctgcttgaagatgctgaaacaagtagagtcattcagtttttgatgggtttaaatgatgactttaatactatcatgagtcagattcttaacatgaagcctagacctggactgaatgaaatttacaacatgcttgatcaagatgagagtcagcgattggttggacatgcttcgaaacctactccctctccggctgcttttcagactcaaggtttgcttactgaacagaatccaatattgatggctcagggaaacttcaagaaacccaaatgtactcactgcaatcgtattggtcacactgttgacaagtgttacaaagttcatggctatcctccgggacatccaagggcaaatcaacagagttcttgtgtaggcagtacaaatctaacaagca

SEQ ID NO: 83372 - DNA, 509 bp, Arabidopsis thaliana columbia
  unsure (1)..(509): unsure at all n locations
ctggttccatcggaaccatttggcaagggtctagaatctgnaagngcttattctccagcccgggttccaagattgggggtagaattcttacccggggaagtcgagatggttctgaaacttgggttactctgcaccaaatgctatgccagaatcaaggcctgcgatggaacaagtggtgcaataccttaaccaagacttacccttaccgattttctcgccgtctactccaggtatcggggcttttatgcccagtttctatggaagcattatctgccattggggtctccagtgtaaggaactcatcagtttctatgtttgttactcacacaatcttggacgggcatggaagataagatctaagaaattctatactctatactcttttactctctgcatctaaatctgtttagctacgtaaatgttttaacttaatgtattgactatgttgttggttgatgttgtactcaaacttctttaggtcatcaattgacaaataaaacagttcttct

SEQ ID NO: 83373 - DNA, 416 bp, Arabidopsis thaliana columbia
  unsure (1)..(416): unsure at all n locations
tggccaggctgaggatgtgaacactctggtccaaccacaatggtgctttacttcaccggagccaccaacattctctacacctttggtggccacgccgtcacagtggagataatgcacgctatgtggaaaccgcaaaagttcaaggcgatatatctactagcgaccatatatgtactaacgctaacgctaccatccgcgtctgcggtttattgggcgtttggcgataagctactaactcattccaatgcgctctctcttctccctaagactggttttagaggtaccgcagtgatcctcaatggtcaattcatcaatttataaacgttcgggnttnnggcttaaaacggttataatttttttgggggggaaatttttangggttcnanttgnnccggnggncttttttaaaaagggcc

SEQ ID NO: 83374 - DNA, 1001 bp, Arabidopsis thaliana columbia
  unsure (1)..(1001): unsure at all n locations
antcctcccatttcatgcntgcgtcccttctatccgntgggcccctntaggcaaaatttgtggccncaacncctgcgntnnttgccanaatnttacgggcttccccngangacccntagggcgattttnttcgaacnatgggnacatgtgtggagcaaatgtctcatctcgtcttggacatgcggnaggaggattatcaattcccaaccaccacgcctgatggttcgaatcccanttgctacattgattactcaggttataaacaatcatcgtggacatctagagagctgcgtgatcatgcatgtcccatatcaaggtggaaatggaatgctcaattcttggattcgattactgagttgcatgaaacgcacgaaagttctcacacttagaaccattatgatacttgggatcgaaagttcaaaacttttaacttttctcccgactccttgtcccatccaagtcttatgtcactctcgctacattcatactttctcgaaagctcacatcccttgagaaactgctcgaagctttggaccctcaaactattatcaatcttcgctcccgagattggagtattaacagggtactcgcatcttgcccttgtctcgaggtgcttgtactaggcatctgctgcttcaaaaaaagtagggttcctttgaagattgagaacaaaaaattaaagctcttgcaagtgtcttctcttgaacgcattgatgccattgaagtgtcaacaactagtctagacattctcgccatcatagatatctgctgtcggagagatgacctttccctccagtccccccaactccaatttaatagaaacttttgggttctagggccttacgtgcctcacatcagctacaacatatcagaggaaaagagcattgggaattgaagaattttgtgaacaccatatatgaaggtgtgaagacggttacgccaagtctttagggtttatggactcgtaaaatactggagctcgagattatatttaaggataa

SEQ ID NO: 83375 - DNA, 560 bp, Arabidopsis thaliana columbia
  unsure (1)..(560): unsure at all n locations
gacctgaagaaaaaaatattattgtgaagttcgtatcaaaagtgttaatggggtatgtaccctaaaccactttcggcaaatttagattgaaaagatttgaacttttgaaccaattaaattcgattagaaacatttgatggtaagcttagtttgaagtgcctgtagtttggccactgccgcttctatctttaacctcttccttgcaggaaaggttgacgtcttgatcatcatcttctcgaccacagtcccttgcctaatcaaacacgtcatcaagggcaaactcttcctctggagccggctggaaggttatacatccacacaggtatccacgcggggaatttagcatggggggacggggatctttcctattattagcccccccacaacttcttatcccaggacctatttcctccctagggacattggtaacccctaaaaaaaacccggggncccggttttacgggggccanaacnaagattggnggaaccccncaanccaanggggggnccaaatnttatccaaggcttccccgaagggnncgtggggnccganggccttc

SEQ ID NO: 83376 - DNA, 427 bp, Arabidopsis thaliana columbia
  unsure (1)..(427): unsure at all n locations
cccacgcgtccgcattgttggcgttggacttttgagcatcatttctggtgtggttatctttatcatccgaaaaagaagaaagcggtacacagatgatgaagagatacttagtatggacgttaagccttacaccttcacttactcggaacttaaaagtgcaactcaagattttgatccctcaaacaagcttggagagggaggatttggccctgtttataagggaaaactcaatgatggaagagaggtagcagtgaagctattgtcggtgggatcccgacaagggaagggacaatttgttgcagaaattgtagcaatttctgcagtccaacatcgcaacttagtaaaactttaatggggtgntncntattgaagggngagnatcggttntnttggtatntgaatanccttcctaaacgggngtntttta

SEQ ID NO: 83377 - DNA, 500 bp, Arabidopsis thaliana columbia
gtggacacacgttttcataaagtaaattccactcggttggggctaaagctaaacatagcagcccaacaatacataaccataccggtttcaacaaaactaatgataatgtttgttcatttatatttatgagtaacaggtttggaaattttaagccacaaaaataaaagagatcgtcacttgtgaagtatgctcttcttcacagttttttgcttcttattgctgtgatgcttttgtctttcagcagcctcctgatctgttctctctttccagctactctttcgtagttttatcggacgatttccaacatacttaccattcatttcttttaaggctgctgctagatccgcaggttttaagaaactcacaaacccataacccctgggtttaccagtccgcttatctccaatgaccttggccatattgaaggtgggggatctagcaaatgcttgggagacaccctcatcattcacttcgttcccaagatcaccacagaacagacg

SEQ ID NO: 83378 - DNA, 375 bp, Arabidopsis thaliana columbia
ctctgaccatttgaacttttgatgtttgaagtctataattacctacgcgagaccttcgaatcttcccaaagtggcgaccttgaattaacacctgcataaagtttccatttttcattcttcgtttcgtgatcatggaggaagaagatagcgtgattcctaagaatacagaaggagatgggcgtgttggaagtgatcttgaaggaatccgtaagccaaagaagatgaagaagatgagaagcaggaagagtgatgataaagagacgtggaagatgatggaaaagttttggatgggttgtctccagagctgaatcagacgaaagtggaaacgtcgatttgactggtgatttccctggcgaacgcactgagccgactcac

SEQ ID NO: 83379 - DNA, 870 bp, Arabidopsis thaliana columbia
gttctagatcgcgggcggccgccctttttttttttttgttcttttttttttttttttttacactaaaactgattcttatattgttcataaagttatatcatacatgaacaatcccacaatataggatccgtggagtacattttactgtatattactcttagagaagaagaagaagaagcaaaatggccacaagcgcatcagctttgctctcaccaaccacattctccactgcaatctcccacaaaaaccctaactccatctcattccatggccttcgtcccctccgtctaggtggctcctcctccgccctacccaaactatcaaccaccgggagaaaatcctcctccactgtcgtgagagctgagctaagcccttccatcgtcataagtctcagcacaggtctctccctcttcctcggtcgtttcgtcttcttcaacttccagagagagaacgtagcaaaacagggcttaccggagcagaacggaaaaacccatttcgaagctggagatgatcgtgctaaggagtacgtcagtctcttgaaatcgaacgatccaattggattcaacattgttgatgttcttgcttggggttctattggacacatcgttgcttactacatcttggctacttccagcaatggatacgacccaagcttctttggatgattcgtttcaatgtcaatctctcgtatatgtatatgtatatgtttgacttgtgttgcaagctatctaatctgttctctatctctgtttcttcttctgttgttgttgttgttgtctaagacttgtccctctttttgcaaatgttttatttctccatttacaaagattggtttgcagagttttataaggaggacataatagtatataa

SEQ ID NO: 83380 - DNA, 610 bp, Arabidopsis thaliana columbia
  unsure (1)..(610): unsure at all n locations
ccggaccgaagtcccggccggcgacgcgcacattgtgccaagcccatcaatttagattttactatccacattctccactgcaatctcccacagaaaccctaactccatctcattccatggccttcgtcccctccgtctagggggctcctcctccgccctacccaaactatcaaccaccgggagaaaatcctcctccgctgtcgtgagagctgagctaagcccttccatcgtcataagtctcagcacaggtctctccctcttcctcggccgtttcgtcttcttcaacttccagagagagaacgtagcaaaacagggcttaccggagcagaacggaaaaacccatttcgaagctggagatgatcgtgctaaggagtacgtcagtctcttgaaatcgaacgatccaattggattcaacattgttgatgttcttgcttggggtctattggacacatcggtgctacaaatcttgggaattccagcaatggtacgaccaagcttctttgntgatcggttcaatgcaatcnccggaaatggaaatggaatggttncttgtgtgnagcaatnaaacggtccaacccggtctctccgtgtgtgtgtgtngggggatnng

SEQ ID NO: 83381 - DNA, 679 bp, Arabidopsis thaliana columbia
tctgggggccccgccccgaaattccggggtcgacccaccgggtcgcccaaaccttcagatcataaatccaaaaccactcatttttctattactgaaatttttcttagagaagaagaagaagaagcaaaatggccacaagcgcatcagctttgctctcaccaaccacattctccactgcaatctcccacaaaaaccctaactccatctcattccatggccttcgtcccctccgtctaggtggctcctcctccgccctacccaaactatcaaccaccgggagaaaatcctcctccgctgtcgtgagagctgagctaagcccttccatcgtcataagtctcagcacaggtctctccctcttcctcggccgtttcgtcttcttcaacttccagagagagaacgtagcaaaacagggcttaccggagcagaacggaaaaacccatttcgaagctggagatgatcgtgctaaggagtacgtcagtctcttgaaatcgaacgatccaattggattcaacattgttgatgttcttgcttgggggtctattggacacatcgttgcttactacatcttgggtacttccagcaatgggtacggcccaagcttctttggatgattcgtttcaatgtcaatccccggtatggaaggaaaggttgccttgggtaaggattaaccggtcttttc

SEQ ID NO: 83382 - DNA, 533 bp, Arabidopsis thaliana columbia
  unsure (1)..(533): unsure at all n locations
gatgaataaagaagtttactgctgagttttgttcaaagtacacgttaatcggatttatgaggcggcgattacacagactgacccaaagttggtaattgcggcatccgacttacccgaactgcatgccgttttgcaaaatctcaaaatgaaaaacggcatggtttccttagtaattcttactctagttctagcaaacctgacttgttcaattgcacatagagatgatcaactacaaacacagctaatgtttcaaactataagatgctgactacgtctgatgtactcaagcttgaggacgttccgaaattacggtgctttccatcggctaggttagccagagagtagccttgttcatgggagttgattaatcaatagagtctccaaactgacaagccatgctcttaccttgancntaagggatagaaacttgaccctgcagtccttcctttgctcgtgngacgatccgcctcaagatatcgnctgccatgaancctnacngggncgatnanacgctgagccactgantggggggc

SEQ ID NO: 83383 - DNA, 743 bp, Arabidopsis thaliana columbia
caacccacgggtccgttcaaaaattgaaattcttaccaggaagaaccgacaacgagatcaaaaactattggcattctaatctaaagaagggtgtaactttgaaacaacatgaaaccacaaaaaaacatcaaacacctttaatcacaaactcacttgaggccttgcagagttcaactgaaagatcttcttcatctatcaatgtcggagaaacgtctaatgctcaaacctcaagcttttcgccaaatctcgtgttctcggaatggttagatcatagtttgcttatggatcagtcacctcaaaagtctagctatgttcaaaatcttgttttaccggaagagagaggattcattggaccatgtggccctcgttatttgggaaacgactctttgcctgatttcgtgccaaattcaggatttttgttgggtgatggggtatcatctgggatcgggttctgtacctcattttcagacaactttttgttcggggggctcatcaacgagctacgaccaatgtaaatgttcggagagaggtccaagtaaatatagtttagggtttaatttaagtagacggggataaaaaagagtacataaacaaatactttgtatgcccaacaaatctgtaatttcttcactatataaagttataaacattccttttaaaaaaaaaaaaaaaaaaagggcggccgctctagaggatccaagcttacgtacgcgtgcatgcgacgtaatagctcgttgatagtg

SEQ ID NO: 83384 - DNA, 367 bp, Arabidopsis thaliana columbia
agaccacgcgtccgggctacttccgtcttccggcgactcgcgaggtcagcgcccattacattccctgtcgcatttggatctcaaagcaaatctggttctggcgctttccggttctccaccggtgcaatcgcggcactttccggtggattctcctattactacttgacatccggcaacaatctggtttatctggatcaagctaaggaagagacaggaccaaaaaccgctctaaaccctgataaatggctcgagttcaagcttcaagacactgctagagttagccacaacactcagttgttcaggttctcatttgacccctcagctgagttgggtctacatgttgcttcttgtctcctgacaatggctc

SEQ ID NO: 83385 - DNA, 398 bp, Arabidopsis thaliana columbia
ataagaatgcgtttgcattcataaagaaactgtagttatttgtggtatagttagaattcctttgggggttatttgaaaaaaacattggcgcaaacagaagataacccacaaacttgaaaccaataatgggttggaacttcaatgcccaatttgggcagaggaaacccccaaacttgaaaccaatttttaacacgaaattgcggcgttcaaaaatcaattgaaaaattgcttgaagtcactgatcttactcttttggttagatctccaagaacttgttcatatttgttccaaaaacatatgcattgcttgtttggattttggttcatggaactgttctttgcagcttcacagaagattactacagggtcaacattccctttgacttggtcattttggtt

SEQ ID NO: 83386 - DNA, 589 bp, Arabidopsis thaliana columbia
ggccgccctgttgggagaggtcctggcttttgggcttgaacctaatacgtttatttaatttctaattataccttgcacactactctgggtacccaactcctatgaaataatctgggtggggagggaattaataactcaaaatgacggtatacagttcttggaaccaagactaagtatctcgattcacgagatgattttaaaacataaaggaccagctttttaaccttgagagaaacgaacaggtaccatcttccgatgagaatacaacgccgtctcagcaccaccgccaccacgtgcagcttatttagaaaatgggtactcactcaagtggtgggttgggctttctcaacactggtcctcagaagggagatgacatctcctggctccggagctccaaacactgaacttccagcaacaatacagttggcgcctgctgcagccgctgtgtcgatcgttgaagggcctaagccgccatccacctgaatatcaagtgttgggtatttttgcctcaatgcccggaccttgtccatcatgtcaggcataaacttctggcctcccggacgcgtggagtcgacccgggagattccgg

SEQ ID NO: 83387 - DNA, 763 bp, Arabidopsis thaliana columbia
gattgtcccagaaattagtccacaagcaaaagcacacacagagtcattaatacattgaagagcataaataccacacaaagaactaggaaataaaccatcaaagtttacacttgggtttgattcttgtaagtaaataaacaaaggtcactcatctttcctttagttggcttccttggatcatccctggaccttcgttaattgcaggcttgaaggtgtcttccataacttaaaacctggtcaggttctcctaccatgtggttgcacggtttcaaatgcctctacgagtaatgcaactttcctcttccttggctggggcaagtttgctcaacagcacgctgcagagcataatcaaacatccaatccctctgaatttctcctctcacctatggccttgatgcttgagggccacttttttcagcatcctcatccattacagctggaaggtaatttggttcccttggattaaattctcttaaatcctcggtctctgcaacgggtttcttgcatttgatgatagtccatgaaatggtagagcctgactcttcttgtttgcagggttttcgtgtacggttaaatggaacctttgcattttcttctgtcatcaatataacttcagtctggcctttagacacctctttgcaatcttcagctttatcctttagtgtctcattcaccagtagcatctttatcctcaatagcatcacttgcagctcggacgcgtgggtcgagccggaaattccggaaaggtactgcagacggtcac

SEQ ID NO: 83388 - DNA, 677 bp, Arabidopsis thaliana columbia
atatgaaaacacgtttcatatcctataatttaggaacatcgatcatagcggcggaaataagactgaaagccgatcgggagatctttggaccaagtaattattggcaacgtacagcgctttatccactattgaataagtgaatcagagactctaatttgttgcctttaccaaatcaaaatacatatactaatgggaataagttgagagaaacatgtaagggcttttgaatgcacatggaactatcaaaactagtccaagtaccagaatatcgccatatctatctcggcaacgtacagcgctttatccactattgacataagtgaatcagagactctaatttgttgcccttcctatcaccaaaacgatttcatataacatgtaacacataagatttcaaacaaacaaactaggctcagattataaaaaggagtttacatcaacgagcgaaaaacctctcaaagtttgatggtaatcttgtttcatcatcatcgccgaagtaaaaataaaactaatgatcttagatctaaagcctcagaaagtggaggtaatcgtcaaggagaaactcagatggtacggacaatatcaaacatcacaggctacgatcctaagataacctctaacaataactaaaagatgcggacgcgtggatcgacccgagaattccggcgaagggccgc

SEQ ID NO: 83389 - DNA, 756 bp, Arabidopsis thaliana columbia
atggaaactgtaaatttatttttacctaacctttttggtaaatttggaatatctttcctgaaaaaacagtgcccacaaattccaaatccaaaggatactaacggtaacggcagtaacaataacaacggtccacgaaacccaaacccatctgggtatgacgtcatcagcgcctccgctgacgtaaaaccacgtcatcttaacgataagcaacggcgctagaacgcacctgcagacgctataggacgcgtaaaacggcaccgtaacgaaccggtgcaaactcaccgctagaggcgcgtctttcccacgcgcatccgcgagcgtccacgtgttctgacacgcgctcgtggcctccgcgacgactagcagcgcgagcagagcgcaggcgccgtgagcaaccatgtaacggcaggtgaggaaaacgaaaagcacggcgaggtgatgagcggcgaaaagcgagtctccgccggcgggagaaggaaacacggcaaggtggacgagatcagcgaggaaataagcggagctgaaatcgagaattgagttttgagattgggtgttgacggaggagaatccacggttaggatcggagagtaaggcgttcgtggcgaggacgacggcggagacgccgtggaggagggagattaaacagctggaagctaaaggacgagtctccggagtccattttttgaaaatgaataagtaaccgagaagataaacgcggacgcgtgggtcgacccgggaattccggtccggtactgc

SEQ ID NO: 83390 - DNA, 424 bp, Arabidopsis thaliana columbia
  unsure (1)..(424): unsure at all n locations
aggatcaaatgttatatttacatagaatggaaattaattccggggatttttgtgttttggcaatggtcttgtacaatacacataacaaccaaataaagaacatattacccaccaaaaagataaaatttggaattttgtttttttctcaatctatcaaaaaggaaacttttgaaatttggagatgaataataattattatctcaaacaacgattcttttgcctttgaccttagaagccattcttctctctttgttaatatcgtttcttctccttgtggttgantcaggtgctccaatggganccaaaggggctgaccaatttgaaatggntctttggagtatgangangtnaatgantttgtgctatacggnatctctganggatccatccctgaaattcccctgaaaaccaatgaaccgcctga

SEQ ID NO: 83391 - DNA, 569 bp, Arabidopsis thaliana columbia
  unsure (1)..(569): unsure at all n locations
attcaaaaagagtttgtattataaacctttcacttcatggattggggtaatctactcattataaaagcacatctaaagagtttataaaacaacaaaacacaattatttcaccaaggctcatcaggataatcgaacggtacaggttgaagaggggaagtcttgcctagatccgagtgtacgaaaccatatttacgcatcacttgattatcagcgaaattaatggctttgatcatcccattccaacacgtgtcaccatcgtacatcttgttatgatcaccactacaaggttgacatcccgtaaaatgcgtcacgaacggtctccgtttgcttcctttcccggcctctttctccttttaaaaaccggtcctcacgaaacgcagcgtatcgttcggtcactttctctggngggcgggctangcaagngggggcttctctttccatnccagaaccgtccgttacgtnggtaaccnggangnttttaancaanacctcgaaaaaagncctccgggaaacttgggaaaanctnccgggtgaaggaagaanaggngtgnaactgccnggnggtnctt

SEQ ID NO: 83392 - DNA, 456 bp, Arabidopsis thaliana columbia
  unsure (1)..(456): unsure at all n locations
cccaaattatgttgggaacattgatatatatgataaagcgggttacacaacatacatatatgggctgcaaaaaacacaagcattcattaacaatattctgcaagccatcttagtatgttttaataggccttaaaaacacgtatagcataagtatgtttaatagagaagaagaaaacacaaattgtaaaagacaatgttatataggccttttgagtggactgcaaagtttggaggcaaaaccataaaaacttcaacgtctagggggtccttccgggttttaaagaacctttcccctgattggagatccaccccttttggcgacttcactcggttgccaaccgggtccgtaggganatcctccaaaggnccctaagnccncctccaaaccaggggcaagcncncggcgnncngggaccanccttaggccatgggagnaccncttgccgaattcggaac

SEQ ID NO: 83393 - DNA, 572 bp, Arabidopsis thaliana columbia
  unsure (1)..(572): unsure at all n locations
ttttttaatagaacattcttcttttatttaagttaattaagggtaataaataacattcactgctaattcttaagaccccaccccaaataaagagtacagagtatatatatttctacaaatacagagcaattacaggcaacgatttgtcttcttgtctgattcacaacaagaacagcagaaactgatagttgttgtggtgtttcatttgagctccaagaaacttggatttggattgtaagagttatctgatgaagaagacattgaagacacattaatgggatatacctccgttacttcttcagtcttctcatcaaagtagaccacatcttgcattgttagctgggggatantcgacgactcccccccagatagagggtttcgcggggggnanaccgngtttccatgggccaaccggggccttccccagctaacaggggttccagttgaagccgcnccagancatcggcaaccngcctgactgcggcacaacgggtccccccagancctaattcctctccagcgggggatcgtgntcngaaancannagnctaccacctcgncccgggaaagtt

SEQ ID NO: 83394 - DNA, 937 bp, Arabidopsis thaliana columbia
  unsure (1)..(937): unsure at all n locations
agaaagctctgaaagacatagtgggcnnggaaaatggcttttctctcttctctctttcgtccgcgcttttctctcttcagtgatttcacagatctgttccgacatcaatggcttttttagcgttgattggtcggctctactccgaaatcgtctgactttcacagcagcgatgttcggctcttacgtcccgttttaatcgggctctcgttcggcacctccagctttttcagtgaagatgaccgactcttttcccgacagcatacggctccatcagcggtgttggtcggattttagttttactttggccatagatgagttactctcaccttttggtctttgttttcccttcaataatttcagcaattatgtgttggtgataacgatttaggtgctatgttgcttaaactgttgattatccgactcatgttgtttgaagcttggttttacaggaattattattaagatttgcagtttataattgaagagaagaagaagatttcgaagcatattacacaattcctttagctgctatatttcagtttggagtttcgattgtcctatttctggtgaaaactcaaagattcatgtttcgatttttgtatcgacggtgactctttcaccagaatcgagctcgtacggcggaggctgaatcggaatcctttaggttactcatccccacatgtctgatttgtatttcactactgacacgttgcgtttggatggagacaagatgccaactcttcttcaatataatgtgatcttgggctttacttaatcttgtaaaatttaagtgtgggctgtggtttgttttagcccatttatgtatggtttgttctttcaataaaatatgagacaaaaaaaaaagatatcatgtgggtttaagcaaaaaaaatnnnnnnnnnnnnnnnnnnnnnnnnnnnnnnnnnnnnnnnnnnnn

SEQ ID NO: 83395 - DNA, 596 bp, Arabidopsis thaliana columbia
  unsure (1)..(596): unsure at all n locations
agtagaattatcagcaattatttgggtatgctgtaacgaagagcgaaaaacaatcgggttgtaacacacatatatgatgttgggtaattactcgccaaaagagaattgttcctctagctagctaggattaatctgaagaacatatgcaggtaatagatgatgaagttgtgtatactatagcaatctcattaattggcatatatgaacgaagaaggtcagagcttggggatatagtgagcgtcactccatgaacgcccgcactcaacatgggggctccaattgctgttgacatgggaggctttgtagcgtttccagtcacgaagaacaagagttagatcaggggatcttagcaaggatgtggcggcaacagtnggcctgggacggtggtgacaagcccatgtccatggctgtcntggccanaagccactggaattncggtaatngttgaggaagcaaacgttgaggccaanctggtaaaagaaccngggctnggggnccntaagggcatctggtcntcatgccgccgattnngcccatgcgacattctggaagggnntgctnttgtgccnaccggaaaccggtncaaggcccacagc

SEQ ID NO: 83396 - DNA, 518 bp, Arabidopsis thaliana columbia
ggatcaaacataaagcaaaataccaatagcactacaaagatctgtctaagtagggaatatcaatctgaggcaaacaaaatatctgatcaaacagaacaagactgaaaaactgaagagtagagagatacatggtgttaaatcactggcttggagaacggtctccattttgggctccacgagggactggggtcgggctcctgctctgcctagggacagggctttggctccttgcttgttctggcgtgtagctcctgtttttctcttgggctcacgcttcttcttgggcttctgctggggctcttaactctcccaggacttccactgggaacccttgagccattatggggtggtgagcgagagtatgacctctccttctcatatcgtctatcctgaggtgagacagacctagattgatgtcttttagcaggaggagaattatagccgcggctacgtgatcgtgatctacgaccacggcgaggaggagaccgagagtaccgaggaggagaacgtcttctctc

SEQ ID NO: 83397 - DNA, 557 bp, Arabidopsis thaliana columbia
  unsure (1)..(557): unsure at all n locations
gcctcattaattagagctaatagtgatgctgcacatgtaaatgaggttcataaagcaggcacatattttcttttcaccagtggatgaaatgactaccaaataactaatgattgagctgaaacgtaggtataaacctgatgatctcggggaggtcagaactcgagaagcatcaaggtctcaagttttggattgatgagatgtatgagcaaccagttcttcggaatatcggatatgatctctgtgcatgtaggaagtcttaacaatagtttcccacttggtaccatttctgtagttttctgtaagatcctgcttttgggggttgaatggatgatatctacgtgaagtgatctgagaagttcctgaaggccagattatgacaaagccaagatccagaaggcctttgggaaaggtggtgccaaangngaccgntcnaaaccnctacggtcncaacaacccattcccctcaccattcacnactccaaacctnatttcccanagcttcagtcngggtggacccgggnccnccngcnaacnggncccnggaagncggnttngga

SEQ ID NO: 83398 - DNA, 556 bp, Arabidopsis thaliana columbia
tttaaaaaataacgcagtaacttattataatcttggcatacaaaaatacataacgcgacctctaacattttaaacaagaacacaaaaaacttaaaattgagttgtagaagtttaaaaggttgatccatatccttttttaccagctcacatgttactttgagcatttgcatcggtttaccgatgaatctaatcggttccttggataccaaactttcatcaacctgcatcattcaggaacaacttcttgtttcttgttgctccatttgtccaaccttttggaagcttcttccacttcttttgtccaatctgttctaaacgtgacccacgccaaaataaacgtttgtataaccgtaccaccgatcatccccgtccatatacccttggcaccgaagttaaagtaaaacccaaagagagccccaagaggaattccaataatgtagtaacatccaacgttaaccttcgccacaaacgtttgccaaccgcatccaaccgccacaccagagaggacaggttggattccgttaaggacaagtgttacggcaagaagcggacagag

SEQ ID NO: 83399 - DNA, 397 bp, Arabidopsis thaliana columbia
gtaaagtgaaagaagctacaagcgacaaaaagtgggagtttagtattctgtgcgggtgaggcacacgtttatacgatggaccaactaatgacagcatcagctgagttattaggtcgaggaacagtggggaccacttataaagcgttgcttgatagccgtttgatcgtcacggtgaagagattagatcccatttagtttagcgggtgtagggagagacaaatttgagcatcacatggaatcagttggtgctttagggcatccgaatttggttccactcagagcttattatcaggccaaggaagagaggttattgatttatgattatttgccaaatggcagtctctcgtctcttgtccacggtacaaaatcgtcgagggcaacgccattgcattggaca

SEQ ID NO: 83400 - DNA, 406 bp, Arabidopsis thaliana columbia
acggacgcgtgggcggacgcgtgggttgcgatcgagttaccgggaagcgatggatactgccagagcatggctgaagaaattaaagtctaaagggaaagagaaatcttcgaataagaaggaaacttctagaggaaatgttaaggagggatcaaaaacagctggaggtgaagaagctgtgtctaatgtgacaaagcagaaggctgctgctgcgaaacagtatattgaaaatcattacaaaaaacaagttcaaagtcagcagcaaagaaaagagcggcgtgatatgctggaaaataagttagctgctgcagaagtctctgaggaagagcaaaagaatctgcttaaggatctagagaagaaggaaactgaatacatgcgccgtcagagacataaaatgggaactgatgac

SEQ ID NO: 83401 - DNA, 444 bp, Arabidopsis thaliana columbia
  unsure (1)..(444): unsure at all n locations
cactgcttcttcttctctactttccacaagactttgacttttaagagcagaaaatggaaggaagaggtaaagtcagcatgatcaacggtggagatggaactagaaaaggtggtagagaacacagtagccgtccgatcccgaagagagggcaagtcaaagttgggatcttgcttggttttgctaattcttttgcttccatctttggctcaacgagaaacttccatggatcctaaacttaatcttctatcttctcatttcccacagaaatattttcattcactttttagaattttctgtggctttattggagtgagataagattggtgatcttgtagtgtctagtttgttgagttcaatttcattttgtcatttcatttttgtacaaatcctatgtaggcttcccttggtaaaatatatataaaatggggggggccnttccccctt

SEQ ID NO: 83402 - DNA, 438 bp, Arabidopsis thaliana columbia
attcgaatcagattatgttatactgccctaagagaagaaagatttaagatttacaaatcacagaagaaaatgtcaacaaaatgctataacaaattgccaaaaccattaaagcgattcctataaatactaacacagattttaacaccagaagaaatggtgaacaaatgtaacccacctcactgtcttgctctctcttcgtctcgcctgtgatctgttaaaggccagacgtgagttctcctttgcatgactctgaaagactgaaacaggtcttgagtcagatatgggatcctccttgggagctccaagggtggctgatttcttccggacattggcgcccattgttgagtttcagaacatttttgtcacgcttgaagcacttgacaatgcactatatggctcttcaaagctctccctgcaatactcgaccatatattactg

SEQ ID NO: 83403 - DNA, 522 bp, Arabidopsis thaliana columbia
  unsure (1)..(522): unsure at all n locations
agggtttggatttgttatgttcaagactaggaaaggagctaatgaagctcttaaagaaccgaagaagaggattcttaatagaactgccacttgccagcttgcttctatgggtcctgcggcttcaggaaaggggcatgatcaacctggtccggtgaagattagtatgggttcgatggctaatcatggacagtctcagcaacagcaggtacaaggtcaacatgtgtttaacggtggtggaatggctgcttcgccgtttatgttagggaaccaataccatccgctttatggagctggaatgttgggaaatccagctttagcagcagcagcagcagctgggggaggttacatgtatccgatgttagcgggtgctcttagcacatggcggggttggggtcctgatatggtacagtctagtcaaatgggtgggattggtgttgatccaagcgttggtgctgctgggctttcaagctctanggtcnttnctttaagggccagggttnccnaganntntccctnattngg

SEQ ID NO: 83404 - DNA, 572 bp, Arabidopsis thaliana columbia
  unsure (1)..(572): unsure at all n locations
aanccagncagcacattttacgngngatgccncccntatttggaccatcccccgctttagggagccggaatgttgggaaacccagctttaccagcaccagcaccagctgggggaggttacatgtatccgatgttagcgggtgctctagcacatggcgggttgggttctgatatggtacagtctagtcaaatgggtgggattggtgttgatccaagcgttggtgctgctggtctttcagctctaggttcttactttagaggtcagagtctgcctagtacttatcctgattcggatgctggtggaaaaagagggacgggtaaagattcggatgctggtggctcctcctttcatggctactcaaactattcatgatggtgtgggctgagcatgagaatgataaacatgcagtttctggggatttctttttaacatttctatcaaagtcagtacgttttagtttttttttgtattgttttttcttcctttcttttttttctgtttgatgtcactcttgtccgataacatacgatagacagtctgtggataaagtaatatcattgtgattattcgtt

SEQ ID NO: 83405 - DNA, 484 bp, Arabidopsis thaliana columbia
ctcttcgttcccattgtcgatgacgagtctggtaagcacgctctgcatcctcaagtttcctcctttgctctctctctttccttgaccgttctctttcagcctccctctcgtatctatccatttcttgctccttctcacctctttctctgcttcttcggtcatttctcttactccaatcaggtgagcttgtgtcaggcctattgtgttctccagaagtctcaacatcatttgctgcggcatcactcctagctacgtcagtgttggagtcaccatccttagatttgaaaagcaaattccatgccttgaaccatcagcaaggttggtgggtggtggaggaggcaaagggttggactttaacctttcttcaatagcagtttcaatcttttccatagcctctctgtctgcttccctttcttcatcagttaggacagcagaattcgcaatatcgatgttttctttaatcttcgattctccatccttccct

SEQ ID NO: 83406 - DNA, 470 bp, Arabidopsis thaliana columbia
acaagaaagaagaagaaagcttcaatggagaagagtaatggccttcgagtgattctgtttccacttccattacaaggctgcatcaaccccatgattcagctcgccaagatcctccactcaagaggtttctccatcactgtgatccacacgtgcttcaacgcgccaaaagcttcaagccatcctctcttcaccttcttagagatcccagatggcttgtccgaaacagagaaaagaactaacaataccaaacttctcctaacgcttctcaaccggaactgtgagtctccgtttcgtgaatgttttgagtaaactgttgcagtctgcagattcagcaaacagggggaaggggaaccagagggttaagctgtttgatcccgctgattcctggatggttggtcccacaaccccttgctcagagtttgaaactcccaatattggtcctcagtgtgtttacagtctccttctttcgc

SEQ ID NO: 83407 - DNA, 328 bp, Arabidopsis thaliana columbia
cacgtcacatgaacttaggccaatgcaacaagcccttcgaattttagaggtacggtctgcttattgtaaaaacgatttcgaatgggataatatgaagcgcctcgccttcaagaacgtagatgattccaacacaagactcatgcgcgagtacgtcttggagactagccatgtcgaaaccgattctgataagtgaaaccgaatatctcttcgaatcacattcatatatatagagtcttgagagtatacacacttgaaaccgtttgtacatacatatacataccattgtgctatgttactcccaggtttttgataccttaagttttttttt

SEQ ID NO: 83408 - DNA, 542 bp, Arabidopsis thaliana columbia
  unsure (1)..(542): unsure at all n locations
ggtcaacatctgagggcacttccaaatgagaaactaacaaaacttgttggtgagcgatggaagagcgctggtatcttaatagaatccgaggggagttttgtaaatgaagctgtcgagcttctcaaggatgggattgagttggtgacagattcagacaaagtacttttgaacttgctttcatatcctctacacgctacattggctagccctgaagctaagcctgctgtggaagacaaacttcatgaagtagcagccagcctcatagctgcttatgacagcggagagattccaagcgctttagaagaaggacaaggtgcttggcagaaatgggtgaaagcctttggcaaatccttgaaacgcaaagttagtcatctctctaatgcagttaataccggaacaaaatctactttacttgggtgaacaaaccttccaagagattcttctgatgctggttccagggtaaaccacttttcatgccactccgagtgttgttaacggggaaaccccctggccngaaatgggnccaaattttctgtttaant

SEQ ID NO: 83409 - DNA, 575 bp, Arabidopsis thaliana columbia
  unsure (1)..(575): unsure at all n locations
aaggcaggctgcnatgggaccntggaacctgacccaagtgccccccctangcngtatccggacaaantcttnctgggngacacccttcaaggatctctgacctggttccagggaaaatccctttccatgccccttcgagtgttgttaacgggaaaactccatggtcctgagatgggcaccagtattgttctgatttacaaagctggaagtcctggtatagtggttccctcaaagctgggtttgtgtcccatggaggaacggtttaagattcttagggagatagactgggaagctttgaacaaagatgagagtgtgcctcttgaatctacagccacagtatcaacctgagaaaactcccctttttttttttttttccttcaatatttggttagttggtgagagaaagacagcccagagattttgattcctcgtgcatttcttgtttcccgaaacaaatggcacaaagaaatttgtagattataatgtatcagcaaagcaaacttaggaacaaaccagagagcttgtaacattatcaggccagttttaatttgctttcaatgctctgttttcttaac

SEQ ID NO: 83410 - DNA, 745 bp, Arabidopsis thaliana columbia
attgactgcattgtttagtcaataacttcaattgttttgcccgccttgaaggctaagattatgcaaggaggaaaaagacagataaacaaaatgttgcacaagtgaaaatcaaaaagccttttgaaaacaatgatctaaaattagtctgaaaccaacaatggcagctccgaatctataccagaactgaaaaaatgccagcttgaatcatggaatgctgcaaaataatcatctgattccgtctcaatagcaaactcgcttgtgactctttgtgcagctatgattcgtttggtagcacagatgacttctgcgtcaaatgaaacttgctcctcatacatctgaaagctggttcccaaacaatgcgattttcgacagtcgatccattctccaatttgcttgcaataggttgctgtatagattggcctcacagtgtggcatgaagaaaagagtaggctttaaagcttccctacgagcttgctcattcacagatagaacactgcatcccaaagattctaggtaactagattcagttgcagagagaactgggtcaaacacttcaatgttatcaccaacccaatcaaactctctcttcatcaagattgcaatgctcagctgaaacctcggagattcataagactcaatgctacctataccgtacatcaccatctgcaactgtgtttcagaccctaacacgaggcgaatctgattcgaaacctcaggagacttaagctgctccaagaatgctgtg

SEQ ID NO: 83411 - DNA, 380 bp, Arabidopsis thaliana columbia
gagaagacacaggcgaagcagaagcagaagcggaagcaggagcaggagatcacgcaggcacagttcaaggtcacggtctaggtccccatctaggtcgttatcacgctctccgaaacgctcacgcagacgctctccatcttattggaggtctcccaggcgaagaagcagcaggtcaaggcactgaagagaggaaactctaattgttgcggcagctttttttgttgcctctgttcatgtttttttttttttttctgtgtgttttcgtatccttacgattcagtggtaaaatatggttttgtgggtttacatgggataataacaacgttttcatatgatgttttagaaatttataagatgttataaaaaaataattatttttt

SEQ ID NO: 83412 - DNA, 685 bp, Arabidopsis thaliana columbia
  unsure (1)..(685): unsure at all n locations
ggctgtcagatggacatagccttatgttgtctacctactggcgcagttgtcgagttatactcagcgtaaatttgctaagcggtgaagtgtcacgtgccagccctagtgattcagattattcatggaacgctcttgcgctagatggtgatagtattgttgctgtgtctagcagcccggcgagtgttcctgaaattaagtatggaaagaaaggtctcgattcagctgggaagccttcatggctctggtcgaatattcaaagcccgatcagatactctgagaaggttatggcagggctttcatctcttcagtttaaaattctaaaagtaccaattagtgatatttctcgaaggtcttgccgaaggagccaaaaatcctattgaagctatatatgtatcgtcatccaagtctaaggagaatgggaaatggggtcccctaaattgcctgttcttcatcggggggtcctctttcgtgtttcaccttgcagcttcttccaggactatggcctatctctcctcaattggatatagtcagctgattataaattacaggggttcattaggatatggggaagatgctttgcagtctctacctggcaaagttggtcccaggccgtgaaagattgtctcttggctgtagtcatgccattgaatngggattcagnccgttggataaccgtgcnggtggt

SEQ ID NO: 83413 - DNA, 496 bp, Arabidopsis thaliana columbia
agatttttatccattaatggaagataatcagcgaagcggattcagaaaaatctgtgtcttttgcggaagccactctggtcacagagaagttttcagtgatgctgccatcgaactcggcaatgaactcgtgaagaggaagatagatttggtttatggaggaggaagtgttggattgatgggtttgatatccaggagagtctatgaaggtggtttacatgtacttggaatcattcccaaagctttgatgccaattgagatatctggtgagactgtgggagatgtaagagttgttgcagacatgcatgagcgaaaggctgcaatggcacaggaagctgaggcccttcattgcactcccctggggggtttttggaacaatgtggggagctgttggagatgattaacatggtcacaaaccttgggatcccttaagaagaccgggttgggcttttgaaattgttgatgggtactataacaatttgcttgctttatttgatac

SEQ ID NO: 83414 - DNA, 561 bp, Arabidopsis thaliana columbia
  unsure (1)..(561): unsure at all n locations
aggtgaagtctttttttttttttttggttttttacccaaaataccaaacttaactaacataatcagcaacattttcatgttggggacccaatgtgctgtttcatattgcaacaagatttgagttttcttatacacattgtggattctgcaaataatttagagactaaacttgaaatggaaatagcttatgctaaacaataataattgcttttattgcggcttgttttcttgtcccgggtaatctccgagttcttcaactttccagctttcgtgcgatgcaacatgcatgtgtgaaaggggtaatattcctccatccttctcccataagctccttgggctggtggagcagaaaccacaatgttacgngcacccgggcttgataaaaccctcctcggaaaccggnatccaataaagcaagcaaatggtanaagnacccancacattccataggccaccggctcctaagggaccaagtggggccaggtncatcccaaaggccccatgnccaaaccccagggngaagangccactcnggnatggcttggcaganntgaaaaccta

SEQ ID NO: 83415 - DNA, 523 bp, Arabidopsis thaliana columbia
agagaatccatctaatgtcaaggcagcaaaattcttatctatggggcacaagactttggttcggtgtaaagaagaactggggatattaaagaatgcatcatcaattgttagagagtcgaactcatttgacaaggccctagaaagtgtagatgaggccctcgttagactggaaagcctgctacaggagttgtatgtatcaaactcatcgtctggaaaggaacaaataaaagccgcgtgctctgacctagagaaaatacggaagctttaagaaagaggctgaatttctggaggcaactttcagagccaaagcagcttcctttgcaacaagggaggtgacaaaaatgattcttcaaggaatcctaccgggggtacaaaaaacgggatttttaaaggggaagggccccaaagatccgcaaattagttcttggggttcaaggcaaaagttttagtccgggggtctggggggtctttgtacggccttcaaggaagaagcttgatcctgagttatcgggagatgaatata

SEQ ID NO: 83416 - DNA, 572 bp, Arabidopsis thaliana columbia
aacgaaaccaacacggttttcctggatgattctccttacttggttttgcttaacccgccatatacagcaatattccctcattcatacaatcatcagaacaagacagatacatctttaggtaatggaggtgatctgagacttcatcttgagaagttggtagaagcggaaaacgttcaagatttcatcaagaaaaaccctttcgggcaagaagctatcacggaagtaagcgaatcgtgggagttttaccgagagatcattcgtatgctacgtatatcttctcaaacgtacagattaaggaacttcatacggtagaccacacgaggattgcttcatacggtagataacaaacgtaaaggaaagtagaaagattgactaaaacaacgtgatgttctgatgttgttgttacagatgtattggtgttttattttataagttgtataaccacaagtagttgcattttttcttgtgtagttatttattattaaaacttgtatttcatatctttattctcggttgtggtgttacttttttctttttaaacaaaaaaatttatttcaattgtaactttagac

SEQ ID NO: 83417 - DNA, 498 bp, Arabidopsis thaliana columbia
agactacttcaacgctgactcttcctttactcttgctcatcataagtatccttatgctttggaaggaatggatacatactccactgttctttatcacctgaaagaagagatgaggttgggctatctggctcaggaactgatttcagttgatcgcctgtctccagaatcctggtgtgcagttgggaactgttacagtttgcgtaaggatcatgatactgctctcaaaaatgtttcagagagctatccaacctcgaatgaaagattcacatattggcacatacccttttgtgggccacgagtttgccgcattggaagaattcgaggatgcagagagatgctaccggaaggctctgggcatagatacgagacactataatgcatggtacggtcttggaatgacctatcttcgtcaggagaaattcgagtttgcgcagcatcaatttcaactggctctccaaataaatccaagatcttcagtcatcatgtgttactatggaa

SEQ ID NO: 83418 - DNA, 648 bp, Arabidopsis thaliana columbia
gaacgctcttcaacacttaggtggacctcatgtagctacgcctaagcaaatcagggagtttatgaaggttgatgggttaaccaatgatgaagttaaaagccatttacagaaatatagactgcatacaagagggccacgccaaacagtccctaacaacggaaactctcaaacgcaacatttcgtagtcgtcggtggtttatgggtaccacaatcggactactctacgggcaagactaccggaggagccaccaccagcagtaccaccacaaccaccggcatctatggaaccatggccgcaccgccacctccacaatggcctagccattccaattatagaccgtcgattattgtggacgaaggatcgggaagtcatagtgaaggggtcgtggtccggtgtagctcgccggcgatgtcttcttctacccgtaatcattacgtcaagaataattaatttgtttttactgtactctaatgttttgtggtcatttaatactattattttgtttattctctctatactgtattagaatttgatgccgggattaaagagtgtatagagttttgcaccaaatcaatctttctattttacttataatgtatttcatatttattttggagttagttaataaccatcttctttttttgggt

SEQ ID NO: 83419 - DNA, 409 bp, Arabidopsis thaliana columbia
ccgagccggttcataaggagcgattcggaatgtcaaacattacaacccgggatctggtattataagatagtggaagcagatcacataatgttcatagtgaacagagagagagctggtgttcagtttgatctgatatacgacagcatcttccaacgttgcaggaaacatgtttttagaaagattcctcagactctccccaatcaatctccttcttctcctcgttcatcatcatcacccagaataaacaactttgtacattgatcacatgcaaaaaaaaaatgttttagggttgttacgttgagggcttaagtttttgtttaggctatttactactaatacagattattcattgttcttcttgttctcctctcgatttgttgtactgtaaaaaatatatcttccattttgg

SEQ ID NO: 83420 - DNA, 585 bp, Arabidopsis thaliana columbia
  unsure (1)..(585): unsure at all n locations
agaaaaagactaatataagttcaaatttacacacatagcaaaaaaattgaatggtaatcacattggcacacaaatattttgtatatataagaatcatcaacaaaaaaaaatcccatcaccaaaacaaatcaaaaccatccataaaacacaaaccttcttttaggtttcaaaaatacacaaatgaataaacgtactaaattaaatgaattaaaattcccaaccatctttcttgtttcttcattcattcaaagatcggacacataatcttatgcttgggttttggacctgtagagcaccttcttcttcttaaaggtttggttgtcaatcgtgatcacgacctttcccgcctcacttgccttgaaagaatcggttatcaccgggtcatcagttaaaccgaccttccgggtcttagagacaatcacggtgtagcttgcctcattgcttggctcaaattgagctccgtagctcacgtccgcacccaaaaccctaagctcccatgagagcgtggaaccctctgtagcaggcaaatcaatcggcgcggggcgccgggatccgncggactgagggacagntnccaaaggggcg

SEQ ID NO: 83421 - DNA, 485 bp, Arabidopsis thaliana columbia
  unsure (1)..(485): unsure at all n locations
aagaatccaaactaggaccaaactcattataatatttttgtgaagacattacagttttttttaactaaaaccaaaagaaatcgaataccaacaccttatagatacaattttcatcaacccacttttgggttttttctttgtatgtcgttttctattggtttatttattgttcagattaaaaccacactcgaaacaagtactttgcgtcatgaaagtttatcacgacagattctaatcggttaattaattaaccgcagagcaaaccctacggatttccccattagctccggtaaccacaccgatattactcattctgaccattgacctcgcaaactcaacgttgaagggtgcttctaggagccatcaattgttgcactatggggctagtggctggatcgggtccaaaggacttgatccggattggagaactccacggcccacggcttaaggttgttgttgtaagaagggcccaagggnttcgnttc

SEQ ID NO: 83422 - DNA, 482 bp, Arabidopsis thaliana columbia
gcaaaccctaaccgccaaggctacgatcacgaccacgaccctaccgagtcacgacgagaccaagacagaatcaacagagttcgagaaaaatcaaaaacggtatcaagacctcatctccacgtttcctcacgtgaaaggctggagaccgtaagagcccctgatcgagtatggtggttactggtggctaccgtctctcctcgaaggttgtattcacgcgcaagagttctttcaagcacgacccagtgacttcctcgtctgtagctacccaaagacaggcaccacttggctcaaagccctgactttcgccatcgcaaatcgttcccgcttcgatgattcctccaaccctctcctgaaacgtaaccctcacgagtttgttccttacattgagatagatttccctttcttccctgaagttgatgttctcaaagacaaagggaacactctgttttcgactcatatcccatacgagttattacctgatt

SEQ ID NO: 83423 - DNA, 512 bp, Arabidopsis thaliana columbia
gttaactctactcttcaagcacctagaagaaagtttgtagatgaaggaaagttacgtaagatttctggcagactattttctgattctggtccacgacggagttcaagactgtctgctgattcaggggcaaacattaattcaagtgttgcaacagtaagcggaaatgtgaacaacgcttccaagtatttgggaggttctaaattgagttctttggcacttcgttctgtaacacttcggaagggacactcctgggcaaatgaaaacatggatgaaggggtccgtggggaaccttttgatgattcaaggcctaatacttgcctcaacgcctggtttctatggcttccaatgatcaagaaggcggaacaatgtcgattggtcggcatagcaatgagttctcaaacaatcacaatttggtgtttcggaaattttaaacctccttaggacactcggagaagggtgtagactttcatacatgtacaggtgtcaagaggcactggatacgtatatgaaac

SEQ ID NO: 83424 - DNA, 850 bp, Arabidopsis thaliana columbia
gtatgttagatgtgggagaggaatggtgaatggagcagcagcaacacaacagatgatagatgtgttcaatgtgaaagggatagtgcattttgggattgctggaaatatgaacaactcaatgtccataggagatgtgagcatccctaagcaaattacgaatgctggcttgtgggattggctgaatccagacaaagtaaagggagttgaggatatagcgtacttagatgtcggaaactataatgttccaaaaggagatggcgacaatgagttagggagtattggatataattacgggcaactatattcagtcactggtcacatcaatgcacctcagaatgtgttttggatcaacacaactcaagagtggcttcatcttgcagctgatctagagaagatggagctatcgcagtgtgtaaatgcaagtttgtgtcttccaaagaaaccaaaattggtagttggattgaaagcagccactgcttacatatttgtggataatgcagcctatagaaatttcttatacgatacttttggagtctcctcctctgatatggagagttctgcagtagccttgacatgcgcatcaagggggtccccgataattgtgatagggggtttatcagatttagctggagaaggaggagataccactgtccataagtttggatctttggctgccactaacactgccaaagctgttttagagttcattaggaagctcccaccgtactaattcctctagtgtaacctatttatcatgaatgtttgaatctagttctctagttcatatcaacgaacccgtgacaacaaatgatttggattgttatcaaattccattttccatgatcgtaac

SEQ ID NO: 83425 - DNA, 436 bp, Arabidopsis thaliana columbia
aatatcaattaatcaattcactttttaaaacatatatcaaatgttaacggtcttttaaggtacggtgtcttcgtttaggttttcttgattttgtgcctgaaacaaatttgcaccaaagttacaactcaaaacatatagccgaatatgagttctcttgtctcaaacataacgttttttgaagatattgtgtcgtttggttgggtctttaggtttcttggattggttaccagatttttgacgacctgagttgtatcccatgtagacccttccatttgcaccagacattgcactcatcgatcccatgctttcgtcgcgtcttctagagcctttccatctggggcttcttcaagttgttctaaaccaaccatatcgtctccagcattcaacacctttccgagaagagacaactgttcttcttgactgtggtagcccaagc

SEQ ID NO: 83426 - DNA, 932 bp, Arabidopsis thaliana columbia
cggacgcgtccgcccacgcgtccgcggacgcgtgggctgtgcgctcttgttatctctgctttgaagtgaaatcagctttggctatggcttcttcgacagctttgtctctctcatggagctcctctccttgttggtcacacagcttcaatggcggtgcaaatgaaaccctaaaagtatctgagcgaaggttcaattttgaagttgtttcccagaagaaagctaagaaacttcgcaaggtaattttgaaagaggatgtgacggatttgggtaagcaagggcaattacttgatgtgaaagctggatttttcagaaacttcctcttgcctactggaaaggctcagcttatgactccacttctgctcaaggaattgaagatggaagacgaacggattgaggcagagaagcaaagggtgaaagaagaggcacaacaactggcgatggtattccaaaccgttggtgctttcaaggttaaacgcaaaggcggtaaaggcaaactgatatttggatctgtcacagctcaagacctcgtcgacatcatcaaatcacagctccaaaaggacatcgacaaacgccttgtctctctcccagaaatccgtgaaaccggagaatacatagccgaactcaagcttcaccccgatgtcactgctcgagttaagatcaatgttttcgctaactaaaccttcaacgattcaagactcctactgcatcccaaggaacgtatagagagggaaaagagagtagcctcttgtggtgaggattgaaggttgtgaagtttttcctttagattgtttgatgcatttgtatttttgctatttttggaatctggaaacgctaaaagtataatattctcttgcaagttatgatatttacttgaagttatattgtattcatttgtctgttgaagtgatgagaatgcttaaattaacactaac

SEQ ID NO: 83427 - DNA, 585 bp, Arabidopsis thaliana columbia
  unsure (1)..(585): unsure at all n locations
gctggnacgcctgcaggtaccggtcccctattcccggggcgacacccgcgtccgctcacagaaaaccaaaaaaaaaatggactccaaaacaacttttctcacatttctcctctgtattttcattttctctcatttttcaccctcaacttccaaatctctgacagaaaagcccttatctttctcaccgtcggcgagtttgccgactctcacggcggagagacttatcaaaggattcaatttgatgcctacacgcgacgtcaatgtcatcgatgaagaaggttctgaggctccgagactggtcgagagagcattcgatttgccggcggcggttgaccgtcgtggctccggtggttctccgtcggttcaagattttggtcaccatgctggttactacaaactccctaactcaaaagcagcaaggatgttctactttttcttcgagtcaaggacgaacaaagccgatccagtggtgatttggctaaccggtggaccaggttgcagtagtgaactggctctgttctacgagaacggaccgttcaccgtctctaacaactcatctctttcttggaacgaatttggttggga

SEQ ID NO: 83428 - DNA, 618 bp, Arabidopsis thaliana columbia
acggacgcgtgggcacaaaacagcgacattcgacgccaaatacataacatcgtcgtcaacagcaaaatggctaggtctggggttgatgagacatcagaatctggagcttttgtaagaacagcatcaacattccgcaactttgtttcacaagatcctgattctcagtttccagctgaatcaggaagataccatctttacatatcttatgcttgtccatgggcttgtagatgtctttcttacttaaagatcaaaggacttgatgaagcaatcaccttctcgtcggttcatgccatttggggaagaaccaaggaaactgatgatcatagaggatgggttttcccggattcggataccgagctccctggagctgagcctgactatcttaatggtgccaaaagtgtgagagaactctacgagattgctagcccaaactatgaagggaagtacactgttcctgttctttgggataagaagcttaagactgttgttaacaatgagagttcagagataatccggatgttcaacactgagttcattggtaatgcgaaaagcccgtcacttgacctttatccttcacatctcatagacgtactcagcgagactaactgatgggttttc

SEQ ID NO: 83429 - DNA, 523 bp, Arabidopsis thaliana columbia
  unsure (1)..(523): unsure at all n locations
cagaacgaagagcttcgtggtaaagtggttctcgtgcagtttactaatcctgctcgtagttcaggtaaggatgtgcaagatgtagagaaacagatatatttgatcgctgatgagatcaattctaaatttgggagacctggtggttataagcctattgtgtttgtcaatggacctgttagtactttggataaagttgcttattacgcgatctcggagtgtgttgtcgtgaatnctgtgagagatgggatgaatttggtgccttataagtacacagtgactcggcaagggagccctgctttggatgcagctttaggttttggggaggatgatgttaggaagagtgtgattattgtttctgaggttcatccggttgtcctccatctctgagtggtgcgatcccngtttaatccgtggaacatcgatgcagtcacttaacgccatgagctnctccaatnccggtgtccgccaaaggggaaaatctttgccaccagaagcatcataagtacataaagnncctcacaat

SEQ ID NO: 83430 - DNA, 502 bp, Arabidopsis thaliana columbia
  unsure (1)..(502): unsure at all n locations
aaaactcttattttcttcgtaagagatggaactagcgttgtctctaggcgacaatactaagaaacagttctcttttatggagaagaactcgaagattaagaatccctctgtctcgtcgacatctatttccgagaaggatcttgggttctgcatggctttagatgttgcttttggtggtcacagatcgttgtcatcctcttcgtctccgtcggtagaggatgagaagaagaaaccggcgcccagaacaaaaacttctgacgaatttagggtttcgtcttctgtagatccaccattacagcttcagcttcacttccctaattggctccctgaggaccagtaaaggtcgaccaaggagggaggaattccccttaggagcagctacggtttntgggaggaggaagaggaggangnnggaagncggtgcctaggnatgtcagtntcgcccnccggntaagtttaacggcnggnngttnaaatttggcntttttgggttaaaaagtna

SEQ ID NO: 83431 - DNA, 733 bp, Arabidopsis thaliana columbia
  unsure (1)..(733): unsure at all n locations
gcgtgcttgatggcaatctcgaggcacgggtatcggattttggtctagccaagttgttggaagacgaagaatctcatatcacaaccattgttgcaggcacatttgggtacctagctccagaatatatgcaaagtggtagagcaactgagaaaaccgatgtatacagttttggggttttggttcttgaagtcttgagtggaaaaagaccaaccgatgcttccttcatcgagaaaggccttaacgttgttggttggctaaagttcttaatcagcgaaaaacggccaagggatattgttgatccaaactgtgaaggaatgcagatggagagccttgacgctctactatcaatagcaacacagtgtgtgtctccgagtccagaagagcgtcccacgatgcatcgggttgtccagttacttgaatcagaggtcatgactccttgtcccagcgaattttatgattccagctctgattaattgcataaacccaccagtccaaacgtcgagaaaaaaaagtaaactgaatctggtttcccgggggaaaccttcaaatggtattcgntttccggttttgntcccccgggaaaacctgnaaattccaacgggccttcattttccagtaatggganaaagccttggttttgggtccaattantttgnccccccagtttaaaaagttngggcatcntacagncctttncttttggccggttttggaaaaacttttttaaaaaaat

SEQ ID NO: 83432 - DNA, 576 bp, Arabidopsis thaliana columbia
gcggatcaaggagagaactcttgatgttgaagcaaagttcattggttttggccgaatagctgccaggttgtttgaaacgaaaggacgcacaacttggatggataaactatggtgcgagtggttaggagacgagggtccttcagatgaggagaaggctacgatcccggagcatgactttgccattgtcacattctcctacttctacaatttgggtaggctgggtttgcttgatgatccgggccgtcttctcacatctagtcagtcagaatcagggaatggtgaggacagtggcaggaagagaaagaagtctttctcggatccagaggacaccagtgaatctctgtgtaatcagtatgactctccttgaggagggttcttcaggccataattcaaactcgtcaaggggtcttatagccgattatgatgatagtctcatgagcaaaagagtcgtgaagaacagaacggtaagacgggagctgaggaggcaacaacgaatattttctgaaagaatatgcgaagtctgtaaacaaaagatgcttccagggaaagatgcggcagcaatactaaacatgaaga

SEQ ID NO: 83433 - DNA, 426 bp, Arabidopsis thaliana columbia
  unsure (1)..(426): unsure at all n locations
ttcccgggtcgccacgcgtgcgagaaataggcttccttgcataacaagaaatcttgattccttgtaagacaagaaaaccgaagcactaaaacccagtggcttctttccgccaaacccgttaaacccgccatctatcatccctccaaacccgctcattccttctatcccaacccctactctccctccaaacccgcttattccttctcccccaagtctccctccaatcccactaatccctactcccccaactctccctacaattccgttacttcctactcccccgactcctactctgccaccgattccaacaaattccgactctttncaactctttcgggttcttcaactgtccntatcggtaaantccggtttgaattacggcaaccaccaacttttttttcccntgttnnggtttcctttcnggnt

SEQ ID NO: 83434 - DNA, 450 bp, Arabidopsis thaliana columbia
gcgccatgtatcttcaattgctaaggtccctaccttccaaactggtggagctccatcctcctctgaacagcctaagcctgtggtggtgaccaccagtggtcccaaggttacgccgcttcagcagaaaaaagcagacactcttgagcggttgaaggagactcttcgtaaaaaacaggaaatgctggagcagaagcgtaacgagtaccgcaaaaaattggctacacttgaaaaacaaggtactgttgtcaagagggaggaagcagatgagccagatgctaagcgtgttaaactagacacagcctctgattcgggagctgcaattgcatcaccaaaaacagagtcatcgacagataagaaagtgcctatcctgaaaccactttccaccgccaaactaagcacagaaacgccatcacccgattcaaaaaactgtaagcaaagaccatattcgtt

SEQ ID NO: 83435 - DNA, 421 bp, Arabidopsis thaliana columbia
gcgatcaaccaaatggtccctggaattaataaacctctaataataatggctttgcttttactctgatgacaagttcaaaaatggaacaaagatcactcctttgcttcctttatctgctcctactattcaatttcactctcagagtcgctggaaacgctgaaggtgatgctttgactcagctgaaaaacagtttgtcatcaggtgaccctgcaaacaatgtactccaaagctgggatgctactcttgttactccatggtacttcggtttcatgttaacttgcaatccctgaggattcaaagttaactcggtgtttgaccctttgggaatgcaaaactatctggaaagttggttccagaacttggtcagcttttaaacttgcagtacttggagctttatagcaataacattacaggggagata

SEQ ID NO: 83436 - DNA, 433 bp, Arabidopsis thaliana columbia
ggagttggccataagctcggacaaagggaaatcatgcgggctatgctaggatcgtaaaggaatcagctgggtcagctcgtccgaagctcaagctcagctggaaggagtgacggttactcgggttgagtgacagtccacctcgagcagctgggcgagtgacggttgagctcgaggcagctggtcgactgtctgaccagctgggcggttacccggacggttacttgggcggttacggtcgaacgggtgctcgcccaaagggtggataagggcgagcagttacggaccgagagatgcaactctttcggaaaaggtgcaaaggaacggaggtgactcctttcgggaagcatcaattttcgccccttatatcaagggaggggctgcccaagacctttagaggcaccagaacacacagaaaataccggatactcactat

SEQ ID NO: 83437 - DNA, 436 bp, Arabidopsis thaliana columbia
  unsure (1)..(436): unsure at all n locations
tgacataccaaactagtgaactacaacgtgtttcatgttatttatttggttatatagttaagcccattaattgtccctagcccctaggcccattatcaacctatcgtcgaagtttgatggaattttttacagagctcgacggaatgttgcaaccccagcggcgagtgtttccgattccgttcagtaaacaagcctgaaaatcaagacttgcttctccaattcctttgaaaacaacgagtcttccattgagatacggtggtccagctcttgcagctatcggtttaccccaaccggaattaattacagtacacatngnaccngcccancctagtccatggtncncaagtttttaaaccgtggccgnngntattccgggttnggtttaaatttctccaaaaaaatntttttttttngggggggttntcncnnccctncc

SEQ ID NO: 83438 - DNA, 549 bp, Arabidopsis thaliana columbia
  unsure (1)..(549): unsure at all n locations
gncccccttttnngnaggnngtnantgcccgtcggnaattgcaccnngggtacggtaaggcttggnatccctnttaggancggccgcccctttttccccttttttttntattgggctttgttaaaattcacatttgctgctaaacccaaatcatctcataacaatggctttacatattccggttaaattcagcatctttgactaatttttccactacctgaggcagtaaacaagcctgaaaatcaagacttgcttctccaattcctttgaaaacaacgagtcttccattgagatacggtggtccagctcttgcagctatcggtttaccccaaccgaaatcattacagtacacatcgaaccggtgagagtttgtgacaactaaatctttgctaccaacagaaaccggaatcttgatatttttcacccaattctctgcaaatgctttggctttttcatcagtttgtgacagctccatgttgttgatttgcattgcagcccagcctagtccatggtccagcagctctccaaccgtgaccgtagctatccccg

SEQ ID NO: 83439 - DNA, 507 bp, Arabidopsis thaliana columbia
  unsure (1)..(507): unsure at all n locations
gccaaagatgcaatgctacttttggaagtggatcgtgttctgaaacccgggggatactttgttttaacttctcccacaaacaaagcacagggaaacttaccagataccaagaaaacgagcatctcaacacgggtgaatgagttatctaagaaaatctgttggagtctaacagctcagcaggatgagacgtttctttggcagaaaacttctgattcaagttgctattcttctcgttcgcaagcttctatacctctttgcaaagatggagatagcgttccgtattaccacccattggttccatgtataagcgggaaccacgagtaaacgctgggtttctatacagaaccaggtctgctgcttgcagggaccaacctctgccggggcttgaaattcatggtttaaaaccgggaggtttcttcggggggtacccaatttgggggttcagctctgaaaaactattgggccttggtttaaccnaaattttntttngccccnccngggggncng

SEQ ID NO: 83440 - DNA, 455 bp, Arabidopsis thaliana columbia
  unsure (1)..(455): unsure at all n locations
ggagattaagccgttacagcttgacgaggatttgcctggaatgggtcaattctactgcttacactgcgatcgatgcttctccaacgcatcagtgagggatgatcatttcaagactaagagacacaagaagcgtgcgagtatgatgatgggacaagcgccacactcgcaactcgatgcagatttagccgcgggaatggggatgccgcacaatggcccaaagctgatgtctaatttggtacttcacagagttgcgtagtccagagacggaggatgcacctggaatgggtcaattcaactgcttactctgccatcggaacttctccaattgcatcantgatgggttatcatttcaaggctaaggaaccacaaaaagcgtttttagnaggtnngggngcccaccnccacantngnaacttgnttnagntttngctgggtggatnggnttcccntnccct

SEQ ID NO: 83441 - DNA, 304 bp, Arabidopsis thaliana columbia
  unsure (1)..(304): unsure at all n locations
gcgaagaatgggaccaacgacggagaaggatgaggaagaagcggttcgagctaagtgcattccgagaaaaccaaagccggtggctaaaaggaacaatggtgggcagcagtaacaaaaacggcacgatgagtctaacaagcttattttgggtttaagtagaagagaaaagtagaatagggaatgatgagtttntaaagcattgtgaattgtgtaggtaaactataacaattcctttgcatgctaaaaaaattaagagttaacatgatgggtgaatatataatatataatgttgtagtctgagcct

SEQ ID NO: 83442 - DNA, 521 bp, Arabidopsis thaliana columbia
  unsure (1)..(521): unsure at all n locations
gagaaaatattaccattgatatttactatatcaacaggcattattcaacttcaaccgggtttcaacatcaactaacagcccttcgatacaacagttcaatccaaaagaacacacggtatgtccaatgtcctgcacggagccattgactcattgtgcttacacttcaagttgttaagaccactcctctcttactcttatgtcctgcaacaactctccaaaggctgtcggacccatctctgtaatggtcaagagacatacaaagctgtcttatagcttctcttttctgctcagccatttccgatgnagacactctcggcctttccacttcttccngtaagctcacttgaccggctttctcagcctcanttggcnccatgggaaggnccnccaaaagggtttccgggttcccttaacctcccctccctcttcccaattcntncntagggaaatgggcccgggcccaatcgggggngtttccaagncccccncaaggtcccccgggtaaggttcctcccggaagg

SEQ ID NO: 83443 - DNA, 520 bp, Arabidopsis thaliana columbia
  unsure (1)..(520): unsure at all n locations
gcgggtttcggtcaaaatacttgataaagatagttactcagacccggaacgcataaacgcatttagacatgaattgacgttgctagaaaaagtccggcatccaaatgttatccagtttgttggagctgtcactcagaatataccgatgatgattgtagtcgagtataatcccgaaggagatttaagtgtatatctccaaaagaaaggacgtctttctccatccaaggcacttagatttgctcttgatattgccagaggcatgaactacttccatgaatgtaaaccagatccaatcattcactgtgatctaaaagccaaagtggcagaaatattttgcctggatagaggaggggcaatttaagggtcctcagggtttgggactgataaggttttnggaaatttcccaaggcaaggggggaagtgggcaacccccnaaggccctttgggtcctcctnantnnntaatttncccngggnttttaaaanggggaattttcncccnaggngttgtcccccccnct

SEQ ID NO: 83444 - DNA, 405 bp, Arabidopsis thaliana columbia
  unsure (1)..(405): unsure at all n locations
atatctncttgatggatatttgaataaaacctttcaaaatgattcttcatctgttgtttgttcatcctctaattgcaacgagccggagttcttgtgtttgttatacagtaacgcgtttataaactatacaaacttatgcatacagccccataaagatgtggaatgacaaaaagaagaaattatcttctgttttttgttctacacaaaaaatatacatagcaagtgagtttggccatgtccatatgactgaggaacactgaaccggattttgtccacaaatctcacgcccctctggtttctcccccctcctcttcccctttaatnccaggggacttgaagggggcttccccccaccccggttaggnaattgccancatttgggcaagcggaaaanttccgggaaag

SEQ ID NO: 83445 - DNA, 452 bp, Arabidopsis thaliana columbia
  unsure (1)..(452): unsure at all n locations
ggtgatgcttctttgattacaaatcggcgttgaacaattctccgtttttacactctaatcgaatcactttggggtgttttgttaatcgctgttctcaagatctgagatttacagggagaagtgagctggaacaaggtgccggagtagatggcgatcatatttgcgttggtggctcgtggaacggtggtgttatcggagtttagcgctacttcgactaacgctagctcaatctcgaagcagattttggagaagttgcctggaaacgatagcgatagccatatgtcttactctcaggatcgctacatcttccatgtgaaccgaccagatgggcttacccgttctctgtatggccgacggaaccgccggaaggaatattcccgtttccgtttttggggggtatccatcaaagggttttggaaaaaaaattggccccggncttttaaancnnnnnt

SEQ ID NO: 83446 - DNA, 484 bp, Arabidopsis thaliana columbia
  unsure (1)..(484): unsure at all n locations
cacagccacaaattcctcaatactctatatttctcttcccgtttgaaactccaaagcttgtttgatgaaaacagagtaaacggttctgttcaaaacatttttcaagctctgttactttgttttttcaacgatgaggaagttaagaggaatcaaaattagaagaccgattaaacaaatctcaagatggatcctccggagaattaagattcgtcgttcaagatacacccggttaagcccaaaccgcccggtttgcaagccgagagccatcacaaaactcataagttgggggtcgaagtctcacatcccacagcgccaggtttattgggtctaaaatgctccaattcagggtaccataccatttggtcaaggaaccccttcggggaaacctcgacccggtttccgaaaggtcacttnggngggtttcatcgggtaaaaaaggcggggggcttttanaggggttttggggcctntcggttnntttacc

SEQ ID NO: 83447 - DNA, 491 bp, Arabidopsis thaliana columbia
cagggtttatttatgactcatgtcctgtggatttcactagcgacttgggagctcgattagcggttcatccaactacgcttaaaatgtctagtccacctaaaccgtttgtatgggcagcgaatggtattgcttcgagtctcgattatgtttttctcaacaggtttgaatcacagcgagccgagtactggcagactctttactctactataatcatgagagtaccttatctcattctatgctctgaaaacgatgaccttgctccttatcaaactatacacaatttcgctacacgtctccaaggactaggagggaatgtaaaaccttgtaaaatgggatggttcccctcattgtgggcattatcggtataaccaggtcggctttaaagctgctggatccgagttcttgtccaaagcagcgtcggtttttccgcagaagacgagaagtcttgacagagaagctatgaaaggaacatgtcatgatgagataacaga

SEQ ID NO: 83448 - DNA, 737 bp, Arabidopsis thaliana columbia
aatttttcaccacaagggaaacaagctatgacccatgatttacggccaagttttaaataggacttcactataaggaaaagctgggtccgcctgcagggtaccgttcggaaattcccgggtcgacccaggcgtccgcggtttattcgcaaaagacgagaagtcttgacagagaagctatgaaaggaacatgtcatgatgagataacagagccaattcagagcttggggcaatcaacctctggtcttaaccgaagcttcaacggaactccacttgtcacaaccgatcatttcttcgtacctagcaccgtaggttactacgtgggcagagacggcggatatgtgcaagatgaacacaaacaagatttgatttgtttgtccaatactcaaaccaatgaatcggttaagcccaatggagttctaggccaaatcttatttgatgtttatattccgaagaatgttgaggattgggatataaagctatcagaaaccgggcggtctaggcggagaccggggaagagatttatacgtagatcgagattgtaacatctgagttatatattatatataccatgagtacccatttgttttcttcagatactgttgcagaggtattccatttggttttccctcgcaaagattaataaattaataaaataagatctattttaaagccaaaaaaaaaaaaaaagggcggccgctctagaggatccaagcttacgtacgcgtgcatgcgaagtc

SEQ ID NO: 83449 - DNA, 410 bp, Arabidopsis thaliana columbia
acctggcaaaagcttttgcaattccttcaatctcttcttgatctctcctccttcttcttcttcgtcgctgtcttggtgtttttctccaccttgtctcttgctcgatctttctagaatctcggaaggagaactactagtgctaattggatcatcataaggggaagataatagcttctgttgcaagaaacggctcccacgcgaattcttgagcagacaatgcgaaagccatgtctacttcatgtttcacggtttgttctaaactttgtttgttggtttttgaagaggatttgttcatgttgatctttttaagagctggaaccaagtgactcacgtatcttcttgcgaaaactgccttagggttcttgtttggttggagagaaaagactcgctttctcttgtttattaatttg

SEQ ID NO: 83450 - DNA, 541 bp, Arabidopsis thaliana columbia
tccaatctcactcaaaatctcctccatgttcatctcttctccacctggcaaaagcttctgcaattccttcaatctcttcttgatctctcctccttcttcttcttcgtcgctgtcttggtgtttttctccaccttgtctcttgctcgatctttctagaatctcggaaggagaactactagtgctaattggatcatcataaggggaagataatagcttctgttgcaagaaacggctccacgcgaattcttgagcagacaatgcgaaagccatgtctacttcatgtttcacgggttcttgtttggttggagagaaaagactcgctttctcttgtttataatttgcctctccatgtgaaattcgtttgcttcgtcggaactctaacagggagatacttatatagagcaaaaactcacgagagagagaaagagaaagagatggtttggtaatgtatgtgaaaggagtaatgctatatatattaactcatgtgatatttgacacgatcgatcacactttatgaagttatttcttttgaaaaaaaaga

SEQ ID NO: 83451 - DNA, 567 bp, Arabidopsis thaliana columbia
  unsure (1)..(567): unsure at all n locations
nnnnnnnnnnnnnnnnnnnnnnnnnnnnnnnnnnnnnnnnnnnnnnnnnnnnnnnnnnnnnnnnnnnnnncccacgcgtccgcccacgcgtgcgccagaaatagccaacggatccgccatgactgctcgtaagagaactccttcagtgtccaattcggagaaactagctctacctgaacctgcatcttccccgacggttcagaagacctctgtttccggagaggatttccagctcgcgccgccgaaattgggcgtgattttcgtgatctcttcgcttctgtgttcgctttatctttaccttctctgtttccactacaatgttgacaatgagctcaagcgtccgatcctcattaacgctgggcttagcttggttggattctttgtcacactcaagttgattcctgtagctgctagatacgttctgaggcgtaatatgtttggttttgatatcaacaaaagaggcactcctcaaggagaagttagagtgcctgagtcattgggaattgttgtcggtattgtcttcttgatagtggcgattgtatttcagttctttaatttcactgaaga

SEQ ID NO: 83452 - DNA, 652 bp, Arabidopsis thaliana columbia
  unsure (1)..(652): unsure at all n locations
tgttaattctagggtttccattaacaatggcagattcttcttcttgctccttacattcacatggtgcagcacatgatagagaaatgtttgatcttccatatgagcaaagaagagtgtgtggaagctctctctaagcatgcaaacatcactcctgtcatcacctctactgtgtggaaggagctggagaaagagaacaaggaattcttcaaggcgtatgaggagaggcaaagcaaacaagagcaaatgtcggaggaagagacaaaccagatgatccagaagattatctcggattcatctaaagaatccgacgactgatcgcgatgttcgatcgttagatttcgaaaaccttatagtttatatatatgaatctcatgaaaacgatttatccctgacgcatgcatgtttataagtaaatcgttttttcatcttagcatcggtccaacaagcaagacagcaaaaaaaggagtgatgacactctttttggtacgttatacgtacgtggtccacataatattgcctctgtttaattatatataatgaaacggacgctagctcatacatggatcgatggtgtggtgttttaattgaatgtatcgtgtgtatatattttcgaataaaaaatttatttnnnnnnnnnnnnnnnnnnnnnnnn

SEQ ID NO: 83453 - DNA, 492 bp, Arabidopsis thaliana columbia
  unsure (1)..(492): unsure at all n locations
gaagaagaagatgtcttatcaagacccacaacatcccgttagtgctcctcctcctcaagggtatcctcctaaggaaggatatccaccagcaggttatcctccaccagcagggtatcctccaccgcaatatcctcaagcgggatatcctccagcaggttatcctccaccgcagcaaggatacggtcaaggatatccagcacaaggctatcctccaccgcaataccctcaaggtcatccaccacaatatccttatcaaggtcctccaccaccgcattatggtcaggctccaccgaaaaataaggaagataagaagggattcaggaggcttcatggaaggatgtttggctatgctctgctggttgcggttctctttgggagcttgctttttgatccgaagatgagcttatatttgccgttgaccgtntttggggntntttttnaattttgtnaaanattttaaaaggggnttttnanaanatttaggcncttnnt

SEQ ID NO: 83454 - DNA, 490 bp, Arabidopsis thaliana columbia
  unsure (1)..(490): unsure at all n locations
agaaagagaacaaaagtgggttgctttcttttttggggttcctctagttggaaagaatgaatggcttttatacaaaagataaaacacacatatacaaaagatggggaacataccctgaatcaatcaatagtcatgaaagtaaacaagacctcaagtcaaattcggattcattcataaaattaaagaaaattaaagaaacaaacccaaaacgtggacacacataaccagaagaagagatctaaaatgtatatcaaacacgtctttttaacatgtttgacaaaattgaatagcatcctcaagacgggcaacggcaaatatcagctcatcttccgatcaaaagcaagcttccaaggggacgcaacagcagggatagccaaacatccttcctgnngctcctgatccttcttatctcctattttcggtggggcttccntnattnggnggtggnggccttttaaggntttttgggggtncctttnggttttcgggg

SEQ ID NO: 83455 - DNA, 825 bp, Arabidopsis thaliana columbia
aaaaagcgattttctaaagtctcgctctcttctctctctaacattcttcagagagggagactttatccttattctgccgtccagcatgattgctggttttccgttgccgtgttcttgtcgtccggtttcatgccgacttatgtaccaaatctccggtaagttaaatcttttatcggtgaactttgtgccatggcttatgtgccatgtttcttttggtttgaatagtttccatgataaaggagatgatgttgtcgatttgatagcttcttctcgtttagttgtggattctctttatgtttttgttgaataaacggtttacaacaacaaatcaatgatggttacgactaagaagttgaaaagaagattggatccttgcaaatttggattgcctgtagctgttattacaagaaattggagctttgattagagcaaatttatgtggatcaatcagattttcatcctttgattacccgattttcgccaaatttcattgttgatgatttggcaaacggatgaggttgaagattctgttatttgtatcccttctaagctgattttgcagttttcggtgagaaaaaacgaaaatcgacgatcacaaaaaaaaattctgacgtcgatggaggtcaccggaatcgaagacgttgacggcaaaggatgatggggaaagttacgcagctctcatgcaacacgtgtctttgttatctatttgctggatattgtgtttgcttgagtatatccttctttttcttagaattgtaatcgtatgggctttatgggcctttttgggattgtaaaccttgaatattaataaaggtcacttatgag

SEQ ID NO: 83456 - DNA, 550 bp, Arabidopsis thaliana columbia
aaacatggtgttaaccagcacagaccgtttggttgagaaaaggaatcctataaaaagatttgtttccttccagaaagaggaaagttgcattaccaatggagagatatctctcaggagtgatgcagatatcagtgattctggtgaagatgtgtgtatttctgataatttttgggagaataccctgtcaagggtttgtagtagtagtagtaataggagtatcaaatttttggggactgatagaacacttggagtagaggaatatttttcagcaaaactgtcagtttccagctctcaagaaacttgtaggccgtacatgatttgtgatcttatactacagaaaaggttccacattcaagcaacgggaagcagtgttgctgcttgagtagccaggacaagttgtacgtgctactggtgggtgtgactactgattatgaagggagtaccttaagtgtacctgtgttcccatgaaatcaaggatttacaagacgtatcagttggtctaggacttcaatttgtgaggctaccctttttggaggatgtagaatacatt

SEQ ID NO: 83457 - DNA, 453 bp, Arabidopsis thaliana columbia
  unsure (1)..(453): unsure at all n locations
ttntncgttaaaaagccnntnggatcccgtttngaaanggttctccctttccggaaccgttgggcaaccgattgtggtggtaaaaggccccttcccaaattcccgttggggaacccattctggtggtaaaaaagcgccggttggaagaaggccgttggggggattgacccccagcagcccgggaagagcgatgccggtggttggtggatggtgaagaaccacaacctcggctacaaatgttggttgggtaattaaattacgaaggcaaaaggcaagacataatagtataaacacattagtagtaaattagctttctccctaaatgccttttacttttactttgattctctgcatttttgtcttaacctgtcggtattagtatcggtttatgtcttgtcccgactcttaacgttccaggaaagtctttttaagtcgatgcttacaaaattttag

SEQ ID NO: 83458 - DNA, 753 bp, Arabidopsis thaliana columbia
  unsure (1)..(753): unsure at all n locations
cgcgtccggagattggggtaataatgatactggaactgcagatggaggttggggaaatagtggtggcggtggttggggaagcgagtctgctggtaaaaagactggtggtggcagtactggtggttggggaagcgagtctggtggcaataagagtgacggtgcgggcagctgggggagtgggtctggcggtggtggtagtggaggttggggaaacgattctggcggtaaaaagagcagtgaggatggcggttttggaagtggttctggcggtggcggaagcgattggggaaacgagtctggtggtaaaaagagcagtgcagatggcggttggggaagcgagtctggtggtaaaaagagcgatggagagggcggttgggggaatgaacccagcagccggaagagcgatggcggtggtggtggatggtgaagaaacacaacctcggctacaaatgttggttgggtaattaaattacgaaggcaaaaggcaagacataatagtataaacacattagtagtaaattagctttctccctaaatgccttttacttttactttgattctctgcatttttgtcttaacctgtcggtattagtatcggtttatgtcttgtcccgactcttaacgttccaggaaagtctttttaagtcgatgcttacaaaattttagaaaaaaaaaaaaaaaaagnnnnnnnnnnnnnnnnnnnnnnnnnnnnnnnnnnnnnnnnnnnnnnnnnnnnnnnnnnnnnnnnnnnaa

SEQ ID NO: 83459 - DNA, 511 bp, Arabidopsis thaliana columbia
  unsure (1)..(511): unsure at all n locations
agccaggagactcttccaaatatagcttccaaagcataaagagtttttcaattagtaacaaaggacaaacaacagaaacaagagaatcttgatttgagtttttaagataattttagtaactacaaatacttgtagccatgagcacatccatatattgcttccaagtggtaatcgaggcatgaccgcattactaattccacgaaaccagtaaggttcttctacaggtgaaatccattttccatcgacaaggaatggggcaaagtgggatgacaagctaagggtatccagggattacttggaatccttgcacttgaggggaggctcctgtggggacctccctgaagttgggcttgataccccaaccaaacccttaccggttggggggtccggggaanataagggggngtccaaatnggngtttnccccaaaatttgggtgggnccncccgggngggggggcccccgggatccnggnggggnccnggggggnacaggttccccnangggggcgg

SEQ ID NO: 83460 - DNA, 469 bp, Arabidopsis thaliana columbia
cgaatctacacgacgatgccgtcgaagctccgatcttcttcttctcttcttccacgtattctgctcctttctctcttattactccttttctattccttaattctccgccggccgattacttcaaacattgcctctcctccgccgtgcgatctcttctccggcagatgggttttcaatccagaaactccgaaaccgttgtacgacgagacttgtcctttccacagaaacgcttggaattgcttacggaacaagcgagataatatggatgttatcaattcatggagatgggagcccaatggatgtggattgagtcgaattgacccgacccggtttctagggatgatgaggaacaagaatgttggggttgtttggggattctctgaatgagaatttcttgggttcgttcttgtgcatacttagaggggctgatccaagggcattaagtgaagaggaaaagttgggtgggttt

SEQ ID NO: 83461 - DNA, 940 bp, Arabidopsis thaliana columbia
gagagagagagagagagagagagagggtttcttcgaggactttggcatactgcaggttgttggagctgtagtgcttaaaaaccctacctttatactgtttagagcagcagtccctccatgtcaggtctttgtggcgttatgcagagctcgagcttctgcttcgtcttctttattcaacagcgttattcgtcagcattcgcattctctacacctttccgctgatacacagaacaaatcattggtagcacaaatgaaagaagagatgctccacatggacatcaactcaatgataggaagttccatgccactaggtatgatgcgtatcggaacaatcatccacaacatcgagatgaacccagggcaaggcgcaaagatggtccgagctgcaggaaccaacgccaagatcctaaaggagcctgctaaagggaaatgcttgataaagcttccgtcaggggacaccaagtggatcaatgccaaatgtcgtgctacgattggcacagtgtcgaacccgtctcatggaacgaagaagctatataaagcaggacagagtaggtggttagggataaggcccaaagttagaggagtggcgatgaatccgtgtgatcatccacacggtggaggtgaaggaaaaagcaaaagtagtggaagcagaggaaggacatcggttagtccgtggggaaaaccgtgtaaaggcggttacaaatcagctagtgtcaagaagaagaagaagcgtttggcagaagcagcagccaaaatgtgatatgggtgaacaagtttcgattttcttcaacgtttctttcttttaaaaagcctccaatgttatttggttacgttattgaatctgttttttgagagttttttaggcttcatgaaactagaagatctttgatcagttgagaataaatatggttacgtgtttacttttattaaaaaaaaaaaa

SEQ ID NO: 83462 - DNA, 230 bp, Arabidopsis thaliana columbia
ggcattcaagaagagttggtgtgctaatgtatgtcattttcgcggtgatcctcttctggggtttggtcactggtgtgtttcacagattcaagatctatcggaaactctaagttgaccgtgaaaatacctaactctatgttgaagttgttatagttgaggatatataaaatcaaatccatggtcagtgatgtagtcaaattcatgataagttatgtatattttccgtaaaa

SEQ ID NO: 83463 - DNA, 536 bp, Arabidopsis thaliana columbia
agctcctcctgatggtcctccggtccacactttcaagcaagcttgtgtagctgtttacccgagtactgtgcagcatgagatcatttggttttggccaaacagtgatccaaagtacaaaaacattattgaaaccaacaagcctccttacattccagagttagaagacccatcattcactaagttgatggggaatcgtgatattccttacgggtacgatgtcttggtggaaaacctcatggacccggctcatgttccttatgcacattatggactgatgcgggtttcctaaaccaaaagggaagattgccagagaagggggggaaacccctcggaaatcaacggtaaaaaaacttaggcaacaaaggggtcttttcaaaaacaaggatcggggcttattctaatttttttgcaccatgtgtgtatcgctcttccacagaccctctaccagagcaggaacatgagtatcccgcaccagctgcttctgacaaggcggcattgtcaaagcggagattggctttgatctctatatgtattcc

SEQ ID NO: 83464 - DNA, 488 bp, Arabidopsis thaliana columbia
gacctattcgtgtggccaaacaccagaatatcgccaaaatcgttgaaacttgaacgaagaaacagacttgtcacagctcagccgccggaagactttaaggaggtatggatttggtgtggttattaagtgttttacttgttggagctgcacttggatattacatcagcactttacgacaaacccgccgaatctttctctcctccaaatctgtcgccatagatgcaggatccagcgggaataagaaaaccaagtccaaggaacccctcgagatagagaaactcgctgattttcgcaaaattttcaaaatgggttttggttgtgaggaatcgttctttaaaatcgggtaaagggaagattgcatctcaatgcagtcatgcaactttaggtttatacaagatactccttcaacgggcgccaaaagccttgaacagatgggaatattgcgctcagccaaaagttggtgtcaaaattgaaagtgaggaagagat

SEQ ID NO: 83465 - DNA, 631 bp, Arabidopsis thaliana columbia
  unsure (1)..(631): unsure at all n locations
agcttaaacgcttcagtttatagatacaatagacaaaacaaaggagagcatcaaaacttcatctttaaaatgttgtgggataatcagcaaatgttgtcatatgattatcttctagtaagacaattgtacaaatccatgtaaaatggagttatctactcagaagaagggaaaacagatttgtcaccgagaaatgtcgaaaacttgggagccaattagcatgctctcctttctgccagagtgttggtaatgtcgaatccaagagttattacataagctttagtccacctgttacttcatcaacattatcaacaggtccaagaatagccattactgtccttgaatttgggagcgatctgtgtttttccccgcatcaatgggtgatatggggtggcagtttcaggggnctttgcccctttccttgcaaactagcatctcttcctcactttccaattttgaccaacaacttttgggctgngcccaatatncccancggtcaaggntttngngcccgttgaangnggtcctgnaaaaccctaaagtggcagnnngcatgngnggganctccccttacccntttnaggcatncccaaaccaaccntttgaattttnggaacangggtcccanccggga

SEQ ID NO: 83466 - DNA, 568 bp, Arabidopsis thaliana columbia
ataccatcttctacggttgtatgattacttttactaccgcgagctcttgctaattgtatgtgaatttcttaaggccaatctatacgaattccacaaatttaacagagaatcaggtggtgaagtttatttcacgatgccaagattgcagtcaatcactatccagtgtctcgaatcacttcaatttctacatggccttggacttatacactgtgatttgaagcctgagaacatattggttaaaagttatagcagatgtgaaataaaggtcattgaccttggaagtagctgtttcgagacagaccacctatgctcctatgtccagtcaaggtcatatcgagcaccagaagtcattttgggacttccttatgataaaaggatagatgtgtggtctcttgggtgcattttggctgaactgtgtacaggcaacgtcctcttccagaatgattcgccagccagtttgctagcaagggttttgggaaccgtaggatccttcggtatgaaatgcttaccaagggacgtgattcccacaaatacttcacaaaaaaccgaatgctctatgagcggaacc

SEQ ID NO: 83467 - DNA, 447 bp, Arabidopsis thaliana columbia
gatcgccatatcgttgatcaagaccagagcgtcgtcgatccggccgagtttgcagagacgagcgatgagagtttcgtaggagtgtttccgagtgtagccggcgtcggtctgaggcaaaatacggcggagatcttctaaggaggaggagtaagagtctgtgtttgttaggaatttgaaagtagctgtcgtgttgaaacacgcgtttacgacgcggctgttgaggagacgacgtacggcttcgaaatcgccggagcttccggctttgaagctgacgttatcgaattcgacgcaagtacgacgaccaggtgaagcagttggattgggattcacggtggagaatgtacgtcccgagattgattgaagcagaaatctggaattggtcgcatctttacacgaatcgtcggagaagagacatcgtgtgattcaggtcaacggagattaggggtt

SEQ ID NO: 83468 - DNA, 517 bp, Arabidopsis thaliana columbia
agaacattatacggtgcaggagagaaagagtgataagttgtttgtgaagcgatctgttcacagacaccatggttcacagatgtccccagtagaaaattcagaaggaaggagtcggcctgtttctagtaaagtgaaagacagtgagcaggttgagaaagaggataacagcgacctggatgcaaacctttcctgtgattctaaggataccatcagacatcaaattaaggataaaattagaagcaagaataaaaggtcttcaagggaagaagtatcttcagatgataatggcagctctgattccgacgtagatgataggaaggaggctaataggaggaggaaggaggagaagacaacgagagaggaggagaagaaacgtacgccagaggagagacatcgtccaagggaagaacgtcgtggtggaaaggagatgcataagagactagagctttctgatacttcagaaggtgaagttgaggcccgttctaagattaaaaaaggggaggaatctgatccaaag

SEQ ID NO: 83469 - DNA, 530 bp, Arabidopsis thaliana columbia
actgcatatacaggggtcttgtggattcagagatgcaatttttcacgattcctgccaaacgcaaccactcggaggtgggccgcagcttatcaagagattgtccttcggaaatagatctcaacacacgtcaacattcagatattgagaattatagcatcaagagcatgctcgatggctcactcacatatgacactgaaatgtcttgcgaagacggaggtgacgttggcacacgttatggcagtgaaccaaccagtgtttgtgaagattgcagcactagctgggtcaaatcaatgtgcaaaattccaagagctcttcttagaattagatcccatatgaatagtgaggggaataaacgcaaaagatggtgtgggcgtactgctgaaatggattgtcttcctcgtatttcatttgccaattccgagtcaggcacacaccctatagaggacaagtatgagatagcgttggcactgaaggaattggctagcagaggaatggcagcagaagcattttccgaaatcagcaccatggat

SEQ ID NO: 83470 - DNA, 424 bp, Arabidopsis thaliana columbia
  unsure (1)..(424): unsure at all n locations
aaactggagtggttctttcattacatagtaagacagataacaaagattcaaagggaaccaaacaaaagaagctaattcctattgtgcactcagactcttttccaaactggtgagaattgagcataatcggtgccatctacataacgaaattgttgtgtttttatcactaaagctttgatcgaaccatcgagtttgtgactcatatcgatctttttattctcccgtttgccatttgcagactgtaacctcttcaaagctgtgttctttaagcttccttggttatctgatgatcactctcttatagtctttggcttcaaacaaagacatagaaactgcttcttcttctccgtctttctcttattcctgccccgattctgatctggggtttagcatactaggaaagccaggccgancggggggacgg

SEQ ID NO: 83471 - DNA, 708 bp, Arabidopsis thaliana columbia
  unsure (1)..(708): unsure at all n locations
acaagaaacgcggattaaagcccgcgaaacagccttggcttaacctttacaattacgacccaccaaaatacgcaaactccaagctcaaatacacagaccaattcagatttcttgataaagccgctatcttgactcctgaagacaagttgcagccagatggtaagcctgctgatccttggaagctctgtacaatgcaacaagttgaagaagtgaagtgcatcgtgagagtgcttcctatatggtttgcatcatcaatttactacttaaccataactcaacaaatgacttatcccgtcttccaagcccttcagagcgaccgtcgcttaggctcaggaggttttgtgattcccgcagccacctacgtggttttcttgatgacgggaatgacagttttcatcgtagtctacgaccgtgtacttgtgccaaccatgagaagaattactggtctagacaccgggataacgctctttgcagagaattggaactggcattttcttcgctaccgcgagtttagtagtcgcgggatttgtcgaggaacgaaggagaacattcgctctgactaaaccaacactcggtatggcgccaagaaagggngaaatctcgtccgatgtcaagctatgtggctgattccgcagctcttaactggcgggtttngncaaaaggccattttccagccatttnggncaaantgggngtttttacctncaa

SEQ ID NO: 83472 - DNA, 450 bp, Arabidopsis thaliana columbia
  unsure (1)..(450): unsure at all n locations
cgaagggcaaggttcgtncgacctctcataagcaacatatggctgtgtttctccctcccctctcttgtacattacatcggaagactggttttgatttccctgcttttttgggtttttatgatctgacaaagccgaagataccccaaaatccaggtgactactgttgttctcccggagactttgtaatggaggggatatagggttgtgacttgtgatgtaaattttgtctttgcaggctctgcagaaggcgccgccattattgtgtagataaagaaagatgataggcttatcttttccttcctttttttttttttccccttctttcttcgtttcttagattccctctatgtaaaagatcggtccatttcatttggtcggtcaaaactctggaaactcaagttcgatcccgtctcagaaaactagaatntggacggcnctttgaatatgttt

SEQ ID NO: 83473 - DNA, 683 bp, Arabidopsis thaliana columbia
agcagatcagcagagggctttctgccaatttgtaactggtgcttcctaggcttcctcctggtggcttagctgttctgaacccaaagcttacgattgtgagaaagcactcatcgacctcaagtgcagcagccaacggagcaggggcttcggagacagcagatgatgatttgcccagtgtcatgacttgcgcaaactaccttaaactccctccttattctacaaagggaaatcatgtacaaggaaactgctctacggccatcaacgaagggcaaggatcgttcgacctctcataagcaacatatggctgtgtttcttcctcccctctcttgtacattacatcggaagactggttttgatttctctgcttttttgggtttttatgatctgacaaagccgaagataccccaaaatccaggctctgcagaaggcgccgccattattgtgtagataaagaaagatgataggcttatcttttccttcctttttttttttttcttcttcttcttcgtttcttagattccctctatgtaaaagatcgatcatttcatttggtcggtcaaaactatggaaactcaagttcgatccgtctcagaaaactagaatatggacggcactttgaattatgtttaacactgagttacttttttagcttagcttcattatataagctctcttattacatc

SEQ ID NO: 83474 - DNA, 777 bp, Arabidopsis thaliana columbia
acggtttaaaagctgttttttaacgacccttgccagcccaattgtttccaaagggcttgttgttttttttgtcaagtagagaaagcaaaggaagacatgctgaatcaattttacagttctataagtgcaataggcaatgaaaggattgagtcattgatacaagaggatcagaatgtcaaaagacgaagagagcgttaccagaaacaatcctctcttctttctaaactcacgaggcagcttagcattcacgacaaccgagcagcagctgcttcaagttattcggacaacagtggcactgagagtagcccaagagcaagtggaggttcttcaggggacgactggatgaatgccttcaactccgctgctaatggaccctcagactcattgtcaaagtacggttccggtggtcacagccgccgttacagtgaccctgcgcagaacggagatgcagcatcaccagggtctggtagcaaccgccgcaccacccccaatcggttgccaccagcaccaccgcctacaggttcagcttataggtattagaacctgaagaaaaaaccctggaagcgcattgtgtcccgttttctgggactacgttactcttattttttctagtttaagacagtgattggatgattgtactactgttttttggtctttgtagatagatattatcacacacatgtgttggcagctaaaaaagagtttggtctcatgagtcaaatgtctgtttgaatttttggtttaaaaaaaaaacggccgcggattcgatatctagct

SEQ ID NO: 83475 - DNA, 634 bp, Arabidopsis thaliana columbia
  unsure (1)..(634): unsure at all n locations
tggggaacaatntgnttncgcaactctctggtttagaggntttgggnacactatnttgcttgcgaaatctgaatattcgnggaaacccgatttctnataacgataagtcagctaagaaggtgagaacgttgcttctcccttcagtgattgttttcaacgctcaacccttagaaaaaaagctcaaggaatgcaaagcattattcggcttgatgccgatgatgaaacctttgatgcctatcacaataaatcagcagaagaggaacaatctaaagaagatcgaaaacgcaagaagagctctaagagaaataagtcagaagaagaagaagtcaacaatgaggatcacaaaagcaagaagaagaagtctaagagcaacacaaatgtagatcaagttgcaacaaaaaagaaagaagaacataaagagaagacaatcccaagtaacaatgatgatgatgatgatgctgagaagaaacagaaaagggctactccaaaggaggaactcgatgctatagatgatgctgaaacctctttcgcagaaatcttttcccgggaaaatgtgccaaagggttctgaagacggtattgagaagaagaagaaaagcagcgtccaagagacaggtttagtaaaagtgatagat

SEQ ID NO: 83476 - DNA, 745 bp, Arabidopsis thaliana columbia
  unsure (1)..(745): unsure at all n locations
aactatcnatgagctatgacgtcgcatgcacgcgtacgtaagcttggatcctctagagcggccgcccttttttttttttttttttacatgaaatttcacaaagatctattaacaccacataattaatcaatatttgaacaaaataatagaaatttacaaaaccttatactacattcatgtatgtacattatgaactattatgatggctgagattcaaagtccatcgtagtgacccccaaaagatatttgagctcttacgacaggaacacctttcataccaaagattgcttcattgagctttgttgcatgattcacaacttctttcatcctcttattatcatcggagtaaatctgggaccgaagcatctggttcttgttcttacagattttgatattgttgtgtccgagggaagaagacacatacggtaagcagcagcagcggcaaccccaaaagaacaggttgctccaatcccattgagaccagccttccacagattcaatctctcaccaccactaccatcttcatcttcttcctccaaaacaacttctttcttgtctcgcaagtcatcccctccttctaaatcagagggtttcgaagcagcatcatcgatctgaggcagaggactcgtgatcctcgctggtgggtcaatttttcatgtcggcaaattcagggtcctttcatgatctttgaagggaaactttttggtgaacaaaacaaaaatcccgttgaaaagggtccgggttt

SEQ ID NO: 83477 - DNA, 956 bp, Arabidopsis thaliana columbia
gacgcagttcttttctaaagcaccggagaggaggagaagcaacgatggagaatgattgcacggtgaatattgtctctctggagaaggatcgcgatgtttcggaggcgtcggctgaatctcagagcgagtcgactctttcgaactcgctcgattccggtgttacggctgagacctctcgttctgatgctgattccaaactggatgaatgtactgcttggacgaatgagaaacacaactcatatcttgattatttagagagctcgtttgttaggcaattatactccttgcttggaggtgggactcagagacttttctagaactcgtgcatgtgcagtcttaactctccataaatcagctgatcagtttaccgtcctacaaaatggttgctggcagaaggttaactttggaaagaaacaatcttgtttggagacttcatctgagtttcgttttcacagaaattcattgagaaataagcctgaaaattccaacggaaattacaccatgggaactactgtccaaggagatgtgttatgtcatgacgaaaccaaacactcagaggcgtcagggcagaatttcagagaagaagaagaagaagaagagaagggagaggtgagcaaaaaacgagaaagagaagcaaataacgatgatagttcattgaaggaggatcaggttgtgccggtaaggatggtgaagcccagaacgtgaaagcattaggaagtgtagatgaaatactatgaatagagataaagaaatagaagaaggtgtggttacgaatgtggagagggttttgtttgttgtatagcgtgaggctaaagagagccttccttataaagggatccaatgggatatggaaataggattggtgtttgttttcgttaaattttgtctaatgttaactaggggaaaagttatctgatagtattagcataaaatggcaattttattcttttgaattc

SEQ ID NO: 83478 - DNA, 429 bp, Arabidopsis thaliana columbia
tagcatatagtgaggccaaaggaaggatcaagaaaggtgatagaatttggcagatagcttttggttcggggttcaagtgcaacagctcggtttggagagcggtaaggtcggtaaaccctaagaaagagaagaacccatggatggatgaaattcatgagttcccagttgaagtccccaaggtctccacaatctagaaaccacttagtggcaaattttcagaagaggtttttgagttttcagcttttgatattttgtgtcttcccagtgaatttacctttttcttgatttgataatcagatacaccaaactggttaacaatatttttcttcttttttgcggaaaaacttgttgtagtcagtagcagaccgtcaatggtcggtccagcttgtgtttttggttgttgtgtctgcatatatatttcctttaagc

SEQ ID NO: 83479 - DNA, 484 bp, Arabidopsis thaliana columbia
  unsure (1)..(484): unsure at all n locations
tacctcaagtctccacattccaactcttctcctcctacactctttttcctcttctccttcttcctctctcctttgttctctcccctctcctctcccccactccactcaacatgtccggcaaggctacccctgctcccactgatgcggctgccaaggtgatcaaggaggtcgctggtggtaagaaggacctgaagcacgtcagcgccccctccggtgggctgtcagccgcagagaaggaggcatacctcgcagagaagaacgggaagaagtaaacatcaaccaacgtgacaccaaccttgatgacccaccccctgccctgcacttgacctgtgccatcggctgatgccgtgtgtgaatggtggagagtttngggttaggggtgggtttnatgttgttctgattttgntncccttncattttttttttccagtgngggngggaaatgtttagntaatttaatntccnttttgaaaagggtnagggg

SEQ ID NO: 83480 - DNA, 854 bp, Arabidopsis thaliana columbia
cttagaattcctcgagcttcgaaaacaatggcgtcttcttcagcgacgctctctctctgctctactttctctgctcattgcaatgtcaattctcgccgttctagcactatcctctgttctctctctaaaccttcgcttaatttggctaaacctctgactggatttctttctccttccactgcgtcgacgtctcgaaccgcattcaccgtcgctccgaaattcgcggaatcagtcgtcgaagctgaaccggagactaccgatatcgaagctgtggtggtttccgatgtttcggaggttactgaggaaaaagctaaacgagaagagattttcgctgttattatggttggtggacgccaatacatagtgtttccagggagatatctctacactcagaggctaaaagatgcaaatgttgatgaccagattgttctcaacaaagtgttgcttgttggaacaaagacacacacttacattggcaagccggttgtgaccaatgccactgtacatgctgttgtggaaagtcaaggtttgaatgataaagtggtagtcttcaagtacaagcctaagaagaagtaccgtagaaatatcggtcacagacagccgaatacgaggattaggattaccggaatcacagggtatgaagagtatccagcctcgcccaatgttgcagttggagaagtaaatctttgacacaaaatgtttcttgaatgttaaaatttttctgatcttctctatgtaattttgtaaggaccctggtcatttcatttctgctgagattccttttattaatatgtaccttttgccattctttgaaaaaaagctacgtcagggccctgacgtagctcgaggaattc

SEQ ID NO: 83481 - DNA, 461 bp, Arabidopsis thaliana columbia
  unsure (1)..(461): unsure at all n locations
actgctgtatgcgcagcattcaaggttttcatacttggtctccagggatgctgagaaagctaggaggattattgtcgaagcacttgaccatgtacaaccgtcaaaacctctcatggaagcactgattcattttgaggcgattcagccaccaccaagagagattgattaccttgagccacttgtagagaaagttataaagccagatgcagatgcccaaaacatcgcaagttccactgagagggaagagctatccttaatatatatagagttcctgggtattcttggagatgtgaagtccattaaaaaagcgggtgatcaacatgttaaactgttttaatccccaatcggggcacggtgggggctaaaaaaagggtcngcagnttgttttttncngnaancaaannngggcggnaaattggaaaaaattttaaagggggttccccccnttttgncngnntttc

SEQ ID NO: 83482 - DNA, 543 bp, Arabidopsis thaliana columbia
  unsure (1)..(543): unsure at all n locations
ccccgaaatcatcgaattcaacattgttcgatgattatggacgatccattagcttttcttcttcagggagagattcttctgttagctcgaattctgctaagatcgtgagagctgttcctaaggctgatgtgcaggaagattccactggtggtgtgcagaaatttcgtgtcaaattgttggctgagacttatggacaaaccacaacagatgttctttgtcagattggtttggatggccttcgtatgcttgatccaagtgctagccgaactttgagaatatatcctcttgaggacatcacaagatgcggaaaactagattcggcctattcctggctttctgggctaagactccggtagacattgaagctaaacgtatcagattgcaatcaaatagttacaccaccaacacccttctggacactgtgacggctgcaatgtttcaggccaaggagatcgngggaagtagcaggcctcccacctctggaaaactgattgaacaaactgctgagaagaaaaaaggattgggtgattggatgaacattat

SEQ ID NO: 83483 - DNA, 484 bp, Arabidopsis thaliana columbia
  unsure (1)..(484): unsure at all n locations
cagtaggacaacagtcttcatgaaaagtataagatgttcatcactcaaaggactttcatatacacacaagggggaaacaccatccacatgagacaggacaagaacttattttgatgtgatcaaacccaattcaataaccaaatgaaccaaatctcatacttataattgatatatatgtcaagcaaaaaagcgggtaggaagatcaatgtgcgctaacgaggaaagggttttggcaaactccgcactcaatggtctctgatcctgagactggaacctggacctgtaagtgcacagggcatgttggacaagctacttctttcatccgcctcccagatcctttccctcaaaccagacgaagacttgngggttctcnccatttccnccnggaactttctagcagggcttcatggctctgagggtcanatcctgccangggttcctnggattaccaccttggganctttgcatgacggnnaaannggtt

SEQ ID NO: 83484 - DNA, 445 bp, Arabidopsis thaliana columbia
cccacgcgtccgcccacgcgtccgcccacgcgtccgcccacgcgtccgaaagaaaagaaaaacagaaagtaacatgagatctctcttattagccgtgtgcctggttcttgctttacactgcggtgaagcagccgtgtcttgcaacacggtgattgcggatctttacccttgcttatcctacgtgactcagggcggaccggtcccaaccctctgctgcaacggtctcacaacactcaagagtcaggctcaaacttctgtggaccgtcagggggtctgtcgttgcatcaaatctgctattggaggactcactctctctcctagaaccatccaaaatgctttggaattgccttctaaatgtggtgtcgatctcccttacaagttcagcccttccactgactgcgacaggtaaagagtacatctcactctctctctttgtgattactga

SEQ ID NO: 83485 - DNA, 629 bp, Arabidopsis thaliana columbia
  unsure (1)..(629): unsure at all n locations
ggaanttgtcccntnaggtccggncggaatcccgggngnccncggtccgaaaaaaaccggaagtacatgngaccccttattacccgtgtgcctggtcttgcttttacactgcggtgaagcagccgttctngcaacccggtgattgcggatctttacccttgcttatcctacgtgactcagggcggaccggtcccaaccctctgctgcaacggtctcacaaacactcaagagtcaggctcaaacttctgtggaccgtcagggggtctgtcgttgcatcaaatctgctattggaggactcactctctctcctagaaccatccaaaatgctttggaattgccttctaaatggggtgtcgatctccctcacaagttcagcccttcctctccctgcgccagtatccagtgagccaagcagataatcttaaagggggctactacaagacctattttaacctaatgattaataaatgagggcattggtttgctagttgctaattgatcagtgaatgtattgtcattttgtttgttctaatatcagcaggcacttatctctgaaaaaaaaaaaaaaaaaaaaagggcggccgctctagaggatccaagcttacgtacgcgtgcatgcgacgtcatag

SEQ ID NO: 83486 - DNA, 787 bp, Arabidopsis thaliana columbia
  unsure (1)..(787): unsure at all n locations
nnnnnnnnnnnnnnnnnnnnnnnnnnnnnnnnnnnnnnnnnnnnnnnnnnnnnnnnnnnnnnnnnnnnnnnnnnnnnnnnnnnnccacgcgtccgcccacgcgtccgcccacgcgtccgtacggctgcgaaagacgacagaagggataacacaaatacaaaaaaaaaaaaaacagaaagtaacatgagatctctcttattagccgtgtgcctggttcttgctttacactgcggtgaagcagccgtgtcttgcaacacggtgattgcggatctttacccttgcttatcctacgtgactcagggcggaccggtcccaaccctctgctgcaacggtctcacaacactcaagagtcaggctcaaacttctgtggaccgtcagggggtctgtcgttgcatcaaatctgctattggaggactcactctctctcctagaaccatccaaaatgctttggaattgccttctaaatgtggtgtcgatctcccttacaagttcagcccttccactgactgcgacagtatccagtgagacaagcagaaaatcttaaaggaagctactacaagaactataataacctaataattaataaatgagggcattggtttgctagttgctaattgatcagtggatgtattgtcattttgaatgttctaatatcagcaggcacttatctctgaaacattctccatgcttccacccctaaaaaaaaaaaaaaaaaaaaaaaaaaaaagcgaccgctctagaggatccaagcttacgtacgcgtgcatgcgacgtcaagactcttcta

SEQ ID NO: 83487 - DNA, 776 bp, Arabidopsis thaliana columbia
cactctagtaccagctatgacgtcgcatgcacgcgtgcgtgagcttggatcctctagagcggccgcccttttttttttttttttaaagcaatgagaagtttattgaagagtgagatggagaaatctgaaaccttttcattggttcttaacaagactggatccaagattgaagagatcaaccataagttgtcgtctttagaagctgatcttaaagttgagagatggaaggcttctcctttctctgatcatatccgtcacaccattgctccaatatccgctgtcctgagagtctttgctacggttcaagagcttgagagatctctcgtgtcctctgatggagtccttggttatgtttcggatgttaaacgtcttggagaagcgatgaagcttctctccagtagctgtgttcttgctcttaactggctagaagatacgatcgagtacctaaccgaaaagggaatgcctgaagatcatccttgcggtttgcggttcaagacttccatagagcttctccgggaattgcaaatgaccgagtctcgtgcttatctcaaaggaggtattctttacacagcgctgaagaatcttgaaacagaattcaagcggattctccaagagaagccggttttctcagaagacaacttgagaaaattggcaggctatcatgaaagagattacatgcttacacgccgtttaacaagctgcgttcccagtttacatcaaaggtccgcaccaagggtcattccagaaaccggtttgagattaatttatgagttttg

SEQ ID NO: 83488 - DNA, 745 bp, Arabidopsis thaliana columbia
  unsure (1)..(745): unsure at all n locations
gacgtcgcatgcacgcgtacgtaagcttggatcctgtagagcggccgcccttngcttttttttttttttttttttttttttaaccaggcggagccatagcttacaaagtcttaagttcattacaaccatcgaccaaaaggcttacaaaggccaaagttcttaagttccttagctaattctcacacaagaaacaaaaaaagaagactaataagaaccagaaacatagatgagaaacatatatcctacgataaataacaaaagaggcattacatctccattaaacctaaacaatccaagtccttcttcttagatagtttcagcaatcacagaagccacctccttcaaaacatctatcttctgcgacaacaactcaagttccttagcctccaccatcttcatcttctcttcaatcctcttcttagtctccttagacaccttactccatttccactgcacaatacactcatccacaccaagcctggcaacaacccgaaccaaaaacgacttctcaaaccaattcgacgtctccgaatctcctccaagaaccaccacttgcttaccatcaagtccccaaatagacttagccaatcccaaacatttgttatcatgatccaagtctaaaccttgtcttgttctttacaccaaaatactttttgttttaaacctctaatcttgtcacccgaattggatcttactaacatcaaagcttatgtatcttttagcaataataaaaaaaccccatttc

SEQ ID NO: 83489 - DNA, 777 bp, Arabidopsis thaliana columbia
tgacgtcgcatgcacgcgtacgtaagcttggatcctctagagcggccgcccttttttttttttttttcgttaaaatattctctatttcttcgaaagtcttacactttgcacaacatttcagtggaaaagtaaaaaagacaaaaaacacaagtgaatttaatatcaccaaaaagtattacatggtcaaaagagaaaattaaaaatcaaacgaggacctctttgtgaatatgcacacttaaataataaaattaggaaataatcaaacattcgttaattacggaatctacccatcccggcgaaaacgccgatcaaatcttgcctgtaaggtaagtaagactttcttctcttatccacatcaggcttatacgccgccgttttattcctccctttcactaccagagagccgtttccactcgtcgaaatcgaagatccctcgccgccgccatcgctgtggcttctccttagaagacccttgaaactgcaccgtttagttgctctcacggtcaaaacggctccgtcgctgtggcttctcctcagaaattcctttatacgacaccgtgtggaagatcctttactcttcaagctatcgtctctagccggggatctgatcggactccagaaacagtagaatttgctcggagaaatgttttccgaatcgtcagaatccgacgatgaaagtgattcccacggcgaagttagaaatggaggaacaacactccatccaccgtagaaaagattctttgaggtgactcgatcgtctgccacgtcatcgtcgtc

SEQ ID NO: 83490 - DNA, 797 bp, Arabidopsis thaliana columbia
ttacctctagaccactatgacgtcgcacgcacgcgtacgtaagcttggatcctctagagcggccgccctttgtttttttttttttattcctttgaccgaggttgatcctcccatagtatataactatatatccatgtcaggactgatgaatcaaagaaaaagatacaacagcctcatgcaacaactatccattttctgtctaccaaaacttgtcatttcgcattaatttacagtttcagttcgtaaactccacctcttctctttcctttattaaaacccaagaccccactgttttgtgtcaaaagttataagggattccataagccgcagtatccaaccccgctgcaggttcttagtctacaagtagtggcatcaactccgcactctttgttgctccaacacttatgattgatttgctcgtcaagaacatggcaagcactctctctttgttgctcaggatgtctagagttaagagatatcagtggacagacttgtagtgacaatgcgctagctcgactttcccatgctccactctttgaaagggtccagttgcctgagaaataagtttctggtagtttctcatgccaggagctcacaacctgtataggatggccctcggttggaaatatataattccttttggccacaaatgagtcatcgaagaggagatataggtacttgcacgtttcagcgagaaagaaactgtgctgatgatcttccaattgcatggtcgtcacatctctaacacttgcaaatccccctggcacctttgtgtagagattaagagattttaccat

SEQ ID NO: 83491 - DNA, 719 bp, Arabidopsis thaliana columbia
  unsure (1)..(719): unsure at all n locations
nnnnnnnnnnnnnnnnnnnnnnnnnnnnnnnnnnnnnnnnnnnnnnnnnnnnnnnnnnnnnnnnnnnnnnnnnnnnnnnnnnnnnnnnnnnngacaaatatgaagtctttacatatataagaaaaggtcttataacgaatacagattatcaattaatccataaaacatgaattctttaaaaagattcgtttcgattacaaaaaaaaaaaaaaaaagattttgggatgaatttgtttgaaataaaaattaagccaagagccagaaatctttgtgacgtttcggggggatcaagtaacctccattgttactcttcttccttacggcaatagccatacaatcggagttatgaatacaatactcgaccactcctcctcccattcctcccttggtacgccatttccaaatcacgcgccacttcgaggttctctttctctgccctaacaccaaaacgcctgctccttgtttctttgattcctccactatcggcttacctttctcctccgccgtttcaaccaccactatctccgttttgacgttaggtttcttgagttgacaaaaattcttcaatggatgaactagttcatgagcccttgagtttctctccctttgtgtctcatctatagctgggcctacgggtgttcttgtgacatggagaaaaagggatattatctttcatcttggaacacaatggtgtttaaaggccccatggaaagagcaat

SEQ ID NO: 83492 - DNA, 809 bp, Arabidopsis thaliana columbia
actatagaccagctatgacgtcgcatgcacgcgtacgtaagcttggatcctctagagcggccgccctttgttttttttttttttattttaaagacaatggtattatttgaattgaatttccatttaaaaacccctaaaacttgcaacaactttgagtgtctaaaagtaggggaagcataaacagattcacttccccacttctgcatacttttttatataatatgatccgacaattaacgtttataaaccctaattctattctaagaattcaaaagagttatgttgcttttatgtcagattttcctcatgatcttgggttgggaaagaattgtgtaccggccatgaatgtattgatcggagttggataaagagcggctggatcaatgtacgtggctgccgcggctgatgagctgccaataccacccaggtttggagtagaggaagaagcggtagcaacggttacagagccagctgttatgagattcagctgttgagctccaccaccaccagaggagctctcaccggcgggaacaacgttgtagcctccgccaccactacttgcaggaccgaggtcgtattaaatgcctttgaaaatgtgaccaccaatgcttacagctggttggtaagaaaacttttcttcttcatcttctactgagcttacacgcacgcacctaaaacacccgcgatgaaacttactcccgccgggaaaattgcccaccttcttaacccttgaaggaaaaggtattgcgagtgccagaccaagaagaccatgaaagttgcccgggaaaattttttaccggggggcgttt

SEQ ID NO: 83493 - DNA, 799 bp, Arabidopsis thaliana columbia
cacgtaggatgcacgcgtacgtaagcttggatcctctagagcggccgcccttcgtcttgtttttttttttttttttttataaaaacttgaaaacatttaaaccaaaaatgtatacatccacttctgtctcttgtttaacaagatcccaaataaccgtgatgtttgttttggtatgtagaacgaatttcgatttctataaaaatacacacaaaatttcaagagtaatttagttacaagcaaacacattcatatgatttgggaaattgatcatcatcatctagagaagagcctggtgaagaaatttccagagggaggattttgaagacaagagacatgagcatatctccctaacttgtccacttgtcttgcctcaccctttgtgtcctttttgcatatcttacatgttttggccacccatccctcctccacatattgcccatccacttcaacgtaggatttaaaaaagtccttgtatgttcccccgatttttgtcctcaatgccccatactgttcttgggtcatcttgccaccagatttgggggctttttcagcctcgaagagaaactcaaggcttttctccgatcgaacttgagagaagtccaaggcatgcgttattgagtgaacaaccaagggctcctcttattcttgtgtttacccacaactttctttggctttggtgagaacaccgaccccatttaggggttcccggaaaaaatcctggggcgaagttttctttgagaagggaacacttttgggcccggggaagaaataaaacccccacttttcttttgttttgaaa

SEQ ID NO: 83494 - DNA, 780 bp, Arabidopsis thaliana columbia
  unsure (1)..(780): unsure at all n locations
cttacactatacaccagctatgacggcccccgcacgcaagcttgaatcctgtagctcgacagcgcccgcccttttttttttttttttttttttctgaaaagattttccaatttctgtaagatctatagcctaaaaagcttattgtgttcgaatgttcagagtagcaaaagagactgttttgcattcatcgaacaagaatctgagtcttggcagcgactcgggagcatttcttccggtcagattttctaagaccacatgcacaaatatcgagaagttcgtaatcttcttcccagaataacagtgatgccatctctggatttgctaggaggagtttagaagtcaagaatccagcgactgtccatgtctggtagaggcgagactgctttccaatgaatttgccagatcgggtgtcgtagtactctggccaacgatctcccaacagtctcttctcagccactgcaagagccttttcagctagctctggtcttcccatcttcatacatgctaatggggaactgccaaagaagtgttggccaggatccactgttgtgatacgaccaaggcgtgttctttgggtcgcttccagttattatacgccaatcatcgtactctaatgcagggtaacagatcttaagaagcatattcccaataaatatcgcccatttaacttcaattaagttcaataaaagctccattctggctttggtngaaacccaagggacgaaaccaattggacccagaaggttccccaagcggggaaagaaatctggaaaatcccaa

SEQ ID NO: 83495 - DNA, 570 bp, Arabidopsis thaliana columbia
  unsure (1)..(570): unsure at all n locations
ataaaaatattattttcttagcaagatctgatttatttgacaaggaactcggagacattgatgatatattcatgattcagacaacaatctagtctcgaggtcgcgtgtgtaatcttcaacgaacgcagtgtatctggtagggggaggaacgtcgtcatttaacttctcgtattcccatgtccactttgcaatacaaactttatgatccttaggaacaacgtcaagtgttatcttatagctcttatattgctttaacacatctccttcaagagctaagaaagacaccgacttgttctcttcatctacgtctatcttctctttgatctgctccatttttccatcaacgatgaaattccagatctgaatagaggagttggatgtgggatcgtcacgatgaacataaactgcctctgtcttgtccgtgaaatttccttctttcttcttgaaagtcttgaagaatctctcggcggtnatattcacttggatctctaattcgagagtctggacaccagccatggctctaagataatccagtctctcacgctgacttttctgttgtttatctttacc

SEQ ID NO: 83496 - DNA, 794 bp, Arabidopsis thaliana columbia
  unsure (1)..(794): unsure at all n locations
ctatgacgtcgcatgcacgcgtacgtaagcttggatcctctagagcggccgcccttnncttttttgtttttttttttttttcggaaaaataatgtgcaatttttcattaataaaattaaaaatattgagcagagagaagagaacaatcaaagcattggaggaggttagataaataaattaactttcacagtacagatatatgagaaggttctcccaggaatcaagggtcaagatcatttgataagacccataagataaggaaacacaaatctaattccattgaataataaaaatcttctgcatcttctcctctttctacttcttcttctacttcttctttctcagggtccaaagagactcagacaaactttttttgttacttagacttcactcaaacaaagaaaagagttttgtcttttgggtttatcttcttaccactttactcactttttttcataagactattattatagtttactcaaaagcccattttttctcatcaatgtcttgaatccaaaacctgctctgcacttcacagacaccgacaaaaagagaaaccaatttctgccacaggggaaacagagatggatgcaaagctcaaaaacactcttgttttgtcactaacctcaatgggtcctttcttccataaaaaaaaggctttcctcttttttgtcacttccaaaaatccaaaaaaccaagccccatggggaaaaagcctttgggttctcccagggaataaaaagggaaaaggaagggggggagaaaccggaaaggccatttaccaaccccaaccc

SEQ ID NO: 83497 - DNA, 610 bp, Arabidopsis thaliana columbia
  unsure (1)..(610): unsure at all n locations
cttccgaacctttttggttccgccttctccgattcgctttacactacttcttccctcgtctctctctctcgcgcttcactgtgaattaatcgagagatctaaatatccgccatggacagagcacaattgatcttgttaggtctacctatattcttgttttgttcggatctcttcaacctcttcactcctccgcctcctaaacctcagcctcaccgtcctcatcagccaccgcatattcctcaccagcatcgtcctaatgcgatcatccccgaaaccctagactttccttcacagaagacaagtggcttaggaggagcaattggatatggaaatacagtagagatcaacttctgcgtctcctgttcttacaagggaactgcagtcaccatgaagaagatgttagagacggcttttcccggtttagatgtgattctcgcaaattacccaccaccagcaccaaaacgcctttctagctaaagggttgtacgccgggttggtccagatcggggagttatttgggaatgaatagnttgcanggtngatccgnattcccttccaatgnttgggattacggacccacctngtttnggttccactcctttnggggcaa

SEQ ID NO: 83498 - DNA, 802 bp, Arabidopsis thaliana columbia
ttcccttagactatagaccactatgacgtcgcatgcacgcgtacgtaagcttggatcctctagagcggccgccctttgtttttttttttttttttacagacaaacaaagtccatttatttctgaccaacaaacaaaacattgtcacagcttgtacaaaccgatcttatttccagcaacaactaaaaccaaacggtaataaaacatttgttaattttaatctcactcgcgagcaacttcgacaagttgtttcccgacgttcttaccgtggaagagtccgatcaaagcagaaggtccattctcaagtccttgggctatatcctcaacatatgttatcttcccttctcttacgtgtggaagtatgaagtccaaaaacttggagtatctatcaaaaaattcgacagctgcaaaaccttgaacacggatgcgtttgtggacaatggtggctgtgttatgtaaaccttctggttcctttagattgtattgtgaaatcattccacacgctgcgattcggccatgtgtcctcatgttttggagcactgcgtctaacattttgcctcccacgttctcaaagtatatgtctattccttctgggaaacacctctttagggcagcactaagattcttttctttcttataattgaaaagcgtcatcataccccaactttagtttggaaaaaacaacccttctttttactgcttagcgtttccaacgacataagaatgccgcctctttcgcaaacggcccacaggtggccctactgggcccgaagcaggtgatacaaaaacaggcttttttttttt

SEQ ID NO: 83499 - DNA, 791 bp, Arabidopsis thaliana columbia
ctatgacgtcgcatgcacgcgtacgtaagcttggatcctctagagcggccgcccttttttttttttttttttatcacagcaagaattcattccagcgaaaaataacatttgtacaacaggcaagattgtttaaagtttctatgcctgcaaaaccgaaggagaaactcttaaaacatgagaacaagagcaatagagcaagaagaaactgtgttcacaccaaagaatgaaaacgtgcattactggtataacatatggctggctatcataactttgaatattgtggagtcttggaaatgctgatgatctctttcagggtatccttaaggctgtgattatttgaggccatcattttgttaactttcctgaacccgtcaccgaagaatggtgactcatctgtttctatctgatgcttgcagaaatttaccagcctcttctcaaaatcagatgggtcaactttctttgatgtggctgtagatagaggagtgcgggaagaagaagaagaagaagctattgtggcagtatcaaaaacgtatgtctgacactccaaccacatgtagcctaacacttggcataatccttcttcaagaaccatgttaagattcctgtaaccattgggtctaagataagcatgcatcatcttatgggccaagatatatcctgtgagtaacctaggaagcccatataagatgagaattgcagtgaccttccacttgcgaacaaccctttgagactctggaaccgtatctagtatctgcttattcaacatcctccttactccttgtgagacactt

SEQ ID NO: 83500 - DNA, 740 bp, Arabidopsis thaliana columbia
  unsure (1)..(740): unsure at all n locations
gactttaccaaccggtagacttcttctcgcccaactcagaaaacaaccacagagaaacattaccaaaacaagttctagaaaaggagaatcaaaaatctcacgggtttatgaaatcattaaaaacaatctgaacaaaaaatacgctttcaaatgaaaactcaacattttgttcccaagactcaaatcaaacagtgacacgacaatggtttcttctcttagtatgatgcttcagagtttttccagcccccataggactcctcgtccatacccctgcttcggttttccgagggcttgaaggagagagccacccaaatctctcctttgtactcttcatctttcaccacattgtatgcagttggtggaatacttccttccacgaaaaccggctccaacggaatagttgcttcaccaaccgcatcatcctctgtaccgacatctttgtcgaagattttcgcttttaactctgtagttccttcagacacagtgaagataaatgtctcattccattccggagttgtccccattccttctgcaacgttgctcttctgatcttgagtccgacaagtgagttgcacataaggatccatgttattcagaaaatctgcgtcctcgagacctttggcgctgacaagaacaacttcaagagttccatgaggcatttttttttggttttttctcttgtgatctttttgttttcaatttgaagattcagatcccaaganaganagatgcgaggcttt

SEQ ID NO: 83501 - DNA, 519 bp, Arabidopsis thaliana columbia
  unsure (1)..(519): unsure at all n locations
acctaaaccatatatcaaaatttcgttagattagaacttttaaattcattcaaaagccatgaagaagatcgagttagggcaccatagcgaagtccctaaaccggactgcattaaagccctcattgtcgaattcatcactacctttctctttgtcttcgctggtgttggatctgccatggccactgacagtttagtcggaaacacattggtgggacttttcgcggtcgcggtggctcatgcattcgttgtggcggtaatgatatctgcgggccatatctccggtggccacctcaaccccgccgtcaccctcggtctactcttgggtggccacatcagcgtatttccgtgcattcctttattgggttgaccaatttgttgggctcctccgaagcatgctttcctcctcagtttaccttaaccgggggaattgggaactccggttnacaaaattggcaaagggggggttggtttaccccggaaggggcatatgggggccaccttaaatttnaattnttttaa

SEQ ID NO: 83502 - DNA, 430 bp, Arabidopsis thaliana columbia
  unsure (1)..(430): unsure at all n locations
atcttatttgacaacatcttgatatctaaagacgagaaggttgctgttacttacagacaaagcacttggaagcccaagtttgatgtggagaaagagaaacaaaaggcagaggatgaagctgctggtgaggcagatggtctcaagagttaccagaagaaggtgttcgacctcttggacaaggttgcagacatttctttccttagtgcgtacaagtcaaagattatggaacttattgagaaagctgaaacacagccaaacttaaccatcggtgtgctcatttccatcgtgatcgctttcctctctctctncttcaagctcatatttgggtggtgcaaaagnctaagggttagaaaagaagnaacccggnancagcttcagagnccctcgncangcgnnggcaaangccagagnnggaagcagaancnggtgc

SEQ ID NO: 83503 - DNA, 584 bp, Arabidopsis thaliana columbia
  unsure (1)..(584): unsure at all n locations
agacttcctcntcgccgancggnccccgccnntttncaccctgttntagcggaggtctgacttcagcaacccttgaccccagttnattgggaagggaccaaaggcagngatgaacctctggtgagcaatggtctcaagggtcccagaagaaggtttcgcctcttgtacaaggttgcagacatttcttcccttagtgcgtacaagtcaaggattatggaacttattgagaaagctgaaacacagccaaacttaacccatcggtgtgctcatttccatcgtgatcgtcttcctctctctcttcttcaagctcatatttggtggtgcaaaggctaaggtagaaaagaagaaaccggaaacagctgcagagacctcgacaagcgaggcaaagacagaggagaaagcagaagcggtggctgcaccacgaaagaggcagacgaggcgtgagagttagataaaaagaggattagattttgatttttggggctttttgttttgatttatcaccgtatagacaaacagtagtggacctgatattaagacgattattgtaacatgttttttttgtatgcttttagtttcacatg

SEQ ID NO: 83504 - DNA, 676 bp, Arabidopsis thaliana columbia
cggacgcgtgggaaatcactcgagaattcgctattttatcaccaatcttcttgaatcctctcatccaatcgtctgattctcatctttctccgttacttgtggatcttacgcaatgtatagagtttttgcgagccgagcactgagagctaagtctctctgtgacaaatcatccacctcgcttgcttctttgactctctccagattgaatcattccataccttttgctaccgtagatgccgaggagctctctggtgctcatcctgctgaagtacagagctttgtgcagggaaagtggataggatcgtcaaatcataacacgcttctagatcctctaaatggagaaccgtttatcaaagttgcggaagtggatgaatcaggaactcagccatttgtggacagcttatcccagtgcccgaaacatggtctccataaccctttcaaatctccagagagataccttttatatggagatatctcgacaaaggcagctcatatgctcgccttacctaaggttgctgatttcttcgcgaggttaattcaaagggttgctccaaagagttaccagcaagctgctggagaagtctttgtcacacggaagtttttagaaaacttttgtggtgatcaggtgcggttcctggcacggtcttttgcaatccctgggaatcatcttgggcag

SEQ ID NO: 83505 - DNA, 831 bp, Arabidopsis thaliana columbia
  unsure (1)..(831): unsure at all n locations
ccnnnnnnnnnnnnnnnnnnnnnnnnnnnnnnnnnnnnnnnnnnnnnnnnnnnnnnnnnnnnnnnnnnnnnnccacgcgtgcggtggaattcactaaaccaatgaaaatgcaagcagttcttgttatcttggttttctccggtttactttcggttaagacagcgttagcagcacgacatgtgatcggcgggagccaaggctgggaacaatccgttgattttgattcttggtcttctgatcaatctttcaaagtcggcgaccaaatcgtttttaagtattcagaactacacagcgttgtggagctaggaagtgaaacagcatacaagagttgtgacctgggaacatcagttaattccttaagctctggaaacgacgtcgttaagctttctaaaaccggtactcgttacttcgcttgtggaaccgttgggcattgcgaacaaggcatgaagattaaagtcaacgttgtctcttctgactccaaatccgcttcctctccttcaggttcgggttcgggttcagattcagggtcgggttctacatctagttcgggtgatgggctacgcgcttcccttgggtacatgttcgttgttggatcgttggttattggtcttatttgggctcactaataattgtctagggcttttttgtaatgtatcgaatatatttggccggggagagaataaatatttttggaattattaattcgtacttgttgttgtattttatatagttcggatatttgcatttctgatctaattttctataaaaaaaaaaaaaaagggcggccgctctagaggatccaagctcacgtacgcgtgcatgcgccgtcat

SEQ ID NO: 83506 - DNA, 399 bp, Arabidopsis thaliana columbia
  unsure (1)..(399): unsure at all n locations
aacggcggatcatgcacaaccaccaccaacaacacctcatctttagacggagtccccaaaggattccgattcagatccactcaacagcagcaacaacaacatgatcctagtcctagccgtcgcggcggtgatgtactgttacagtggggacaacgaaaacgatcgagagcctctagagctgagatccgatccaccaccaccatcacaaccaccgccgatgattcttcgtcttcttcaggtcaaggtaagatacaatcaaacaaaccgcaaagaagatcgatgaatccttctatgccacctncaccaccagctccgnngntttttttgggccggagtacaaaccctagnaacggtttcnttatnggcaaggantcttttttccctttccagggntctagg

SEQ ID NO: 83507 - DNA, 576 bp, Arabidopsis thaliana columbia
  unsure (1)..(576): unsure at all n locations
agacagagaactttttttttcttcataattataaaaggggaattatgatttatgaagaagggatctccaccatttttttttgtacacgaaacaaaagaaaaagaatttaggaaccccccaaaaaaaaaccaaaagaaggaaaaataagagtaaatattaaaataaaaatagagtaatttctcgatcgatagctcgctctgctggttctctgttggcatacttcgcacgctcttcacaagcaagccacacgtgcatcttcatatttgttttcctcaaaagagaaatcgtaaaccatacaaaaagaaaatgaaaccagggaccaaaaatttactcggagtcggtgtccatattctccatgcctttcaatcctctccggttctgcttcttcacattttccttctccctaacttcataacgggtcttgggcaaatccggtaaccaatcccgggaaacaaactgagggggttacaaggtctagccgttcnggggcntggggagttagnccttanacngantctcctccttccagaaagatgagccggcactggggtccctccatancncttgggccggggg

SEQ ID NO: 83508 - DNA, 537 bp, Arabidopsis thaliana columbia
gaaacataaagcttgtggtggtgaagagaaggttgcggaagaaggatctattggttcttctggtagtggttcctctggtttgtctgaagtttatactctccctccttctgttcaagcaacaacaaacaagtccgtggaaacaagcccttcaagtgcccaatctcagcccgtgaatttgggcaaagaagcgagccgaaacatcatagaagacatgccatgcgtgtcgacaacgggcgatggaccgaacgggaaaaagattgatgggtttctgtatcggtaccgcaaaggtgaggaggtgaggattgtgtgtgtgtgtcatggaagcttcctctcaccggcagaattcgttaagcatgctggtggtggtgacgttgcacatcccttaaagcacatcgttgtaaatccatctcccttcttgtgaccctttgggtctcttttgaggggtttgttgtttcggaacaatgttacaaatcctcattatctcccaggtgtataaacataaatttatcgaacaaaaaaatttcagattttatactt

SEQ ID NO: 83509 - DNA, 371 bp, Arabidopsis thaliana columbia
gaagaccatttcctacatcaaaatttatggaagagccaaaaatggatgagattgcagatccagaaatgggcgaaatttcagaagaagagctttgtcaaatgaaagctttcctattgctctcactgagatgcaccggtcatgttggggaagctccaactatggtggaagtggctaaagaactaaagagtattcaaagatgtcttcacaatgacactttttctccttcagttgaaacccacttcggctctcatcaagacatttcttcctcggtaatcctctcaaaccaaactaaaggcactagggcattgctaagatgtattgcctgccacgtatttgacgaaatgtttcaatgggttatgatgaattggttt

SEQ ID NO: 83510 - DNA, 570 bp, Arabidopsis thaliana columbia
  unsure (1)..(570): unsure at all n locations
ggccaatgnggtcaccggatggcgattcggagagcctncaatgagctccttggccncctgggtccccggcatttgggnagccnactntggngnagngctaaggactaagggtttccaaggtncttccccatggcccttttccccttcaggtggaacccnattcggctctcatcaagncatttcttcctcggtatcctctcaaacccaaactaaagacactagggcattgctaagatgtattgcctgccacgtatttgacgaaatgtttcaatgggttatgatgaattggtttcgttttttcagaagaaatcgaagaatatgctgaaaataacttcggttcttgttttttttattcagacattatcaatcgcaaagctttagtttctttacctttgtcagatcttgttgggaaaaatgaccaaagagattaagatggcaccgagacaactagagaggcaagcatatataagtatttttgtgtatttgtgaagagaacagaacaagagtagttaactttgtaactcttttattgcttacttcagatgattacaaatgccaagcacttctaac

SEQ ID NO: 83511 - DNA, 542 bp, Arabidopsis thaliana columbia
  unsure (1)..(542): unsure at all n locations
gatcaaagaatcttctttttgccctgatatgagcttgttttacaaagaactacagtacatgcattgtttacatcagtgttatttgaatcaagctgaaacatcttcctcttcaacagaggagaaaaagacaattgaatagtgttttttagagacttgcacattaggccaataactcaacacgaatcacttccagctgaactttaggttgagactaaaaaaccgggttcaagtaaggctaacttcccgcataacctttgctacatcctctgggaaaacagggtttatgtaacaacctgtgccaatctcaaacccacctacccccagaaagctgagggacaatctgtaagaaccagtgcgtataaggtaattgtgattctggtaccttgagtggagaagtatgggtcatatagttatacggtggatcgttaagttgccttgcaacctcctgagcatgagttcagaagccccaaggcaaagcctaacgcaccgngtgatgaatgganatgtcttcggaaaccatccaaggncgtncnnaggnactt

SEQ ID NO: 83512 - DNA, 694 bp, Arabidopsis thaliana columbia
  unsure (1)..(694): unsure at all n locations
acgactcctttagggaaagcacgtacgcctgcaggtaccggtccggaattcccgggtcgacccacgcggtncgaacatagggtcttatcaatattttgcaaataaaccaaaattaaatacagacttgtttaatttctgaatctctctcttcctctttctcgcgagctttttctctctgggtttagggttccggtaattttgcgacgacaccgagcgattcgtgcctccctccccttcctttgacttcggttctaacttgattaccagtgagaagtaggctaagatggaaatcatgtcaagagagaatgagactgctttgtcaggtcctaggccgatggaatggtctaccgtcccacacagtgcttctcaaggacctggtcccaatggcaagaaccggacctcgagcttggaagcacctatcatgttgctaagtggacatccgagtgctgtctataccatgaagttcaatcctgctggaactctgattgcatctggatcccatgacagagaaatcttcctctggagagttcacggggactgcaaaaacttcatggttttgaaaggtcacaagaacgccatccttgatcttcattggaccagtgatggctcccagattgtatcagctagtccggataaaactgtaagggctgggggatgtgagacttggaaacaaatcaagaagatggctgaacat

SEQ ID NO: 83513 - DNA, 419 bp, Arabidopsis thaliana columbia
gatgcagatatggcggggtttacctcgattctgatgtgatagttttgggttcattatcgtctatgagaaatactattggcatggaggatcaggtagccggtgaatcactgaacggtgctgttatgtcattcgaaaagaaaagcccattcttacttgaatgcttgaacgagtactacttaacttacgatgataagtgtttgcgatgcaacggagcagatctcttgacccgagtagctaaacggtttttaaacgggaagaatcggcgtatgaatcaacaggagctgaacattcgaccgtcctctgttttcttccccaatcaactcacaacaggtcacaaactattttgcataccctgcaatagaagatgagagatcgcagcaagacgaatcgttcaagaagatactcaatgagtccttaac

SEQ ID NO: 83514 - DNA, 358 bp, Arabidopsis thaliana columbia
  unsure (1)..(358): unsure at all n locations
agagtgaagcattacctgtatggattactggaccaggacgagatgtgccaagctctttctatggtttacagcaccatgggcaacacgtgacttatgctccagcacaagctggtcacgtcgcattcccaggtatgtaccatccgggacaagcagtaacagcaacaggagtccatcatccgcttttacaacatgtctcaaggtgtggctggagctgaaatggttgcacctgcgcctaacgttttccaacagcctcagcaaacacagatgaattggccaagtaattactgaaacaggntgtataaaggnggaaaanatttttanaggtttcanccangtttcaaatttcctgggggattca

SEQ ID NO: 83515 - DNA, 477 bp, Arabidopsis thaliana columbia
gtccgaaacacaggagaagatgaatagtacagtctccggatgaaagactattcatttgctatggaattgggctgaagaaaccatcatcactggatgttgatgtcgtggaaagatggcaagactgcaaccagaggatctccataacctacggagtctgtttgcacacgaagcatgagttcatatcaattcacttatataatttctgaatgttcatactaaatgaaacggtttgaatactcaaatgtttacctccgtcatctgaaagaagcttaaggacttctccagctacatctgactgctcgacaaatagcaagatcgatgagtctgattagatagtttcaaagaagagatggatatattagttaagatattaccgtcactggaagttctgttcccaactgatgtaagtatccaataacttggccttcctttattgtatcaccctaaggagtttttttcacttagctctttgatctt

SEQ ID NO: 83516 - DNA, 648 bp, Arabidopsis thaliana columbia
  unsure (1)..(648): unsure at all n locations
gagccttgattttatttgatgatcggagaagataagatagccacgtcatttctataaaaattccacaattgttttttttctctggtgcagaaaatccacattacgtgacaaatgatgagagcaagatcaaagtagactctttgcaactaaacagattacaaatcttcattgaacaaacacaggagaagatgaatagtacagtctccggatgaaagactattcatttgctatggaattgggctgaagaaaccatcatcactggatgttgatgtcgtggaaagatggcaagactgcaaccagaggatctccataacctacggagtctccgtcatctgaaagaagcttaaggacttctccagctacatctgacgtcactggaagttctgttcccaactgatgtaagtatccaataacttggccttcctttattgcatcaccctctttgcagctaggagattgtttctttccttttacagttctgctcccctgaaacctgcccactgccggagatgggactaacacatagttggtgganccagatgcctccaaagcagccaactttgctggtttcccatatgatgtattcttaaatggagacactttctcagaggaaggctttgcttgagatgggctaggagccgaagaagc

SEQ ID NO: 83517 - DNA, 482 bp, Arabidopsis thaliana columbia
gggaaacaagagaatgctcttgttgcggcgactcaatcgtgttcggattgcttccccttactccggtcggcttctgtcagtaaaacctatttcatatgtcgatgatgcgaagtttcgatctcaggaagaagaagatccgtccaggtacgatcagaaaacaggatgcgaagctctcacatgttacagcatcgattggcatatggcgttggagtttttcaactgggtcgagagagaatccggattcagacataccaccgagacattcaatcgggtgatcgatattctgggaggctattgatgcgtatgataaattggatgatgtcaatttgaggggatgaaacatcattttataatctggtcgatgcgctttgcgggcataaacatgtggttgaggctgaagagctttgttttgggaagaatgtcatgggtcatggttttagtgggagtaatactaagattcataatctgattcttcgcgggtg

SEQ ID NO: 83518 - DNA, 507 bp, Arabidopsis thaliana columbia
ggaaggctggtccgcctgcaggtcccggtccggatttcctgggtggacccaggcgtccgattcaatcgagtcgggattgcttccccttactccgttcggcttctgtcagtaaaacctatttcaaatgtcgatgatgcgaagtttcgatctcaggaagaagaagatcagtccagttacgatcagaaaacagtatgcgaagctctcacatgttacagcaacgattggcaaaaggcgttggagtttttcaactgggtcgagagagaatccggattcagacataccaccgagacattcaatcgggtgatcgatattctgggtaagtatttcgagtttgaaatttcttgggctttgattaaccgcatgatcggaaacacggaatctgtgccgaatcacgtcacgtttcgtatagtctttaagcgttatgtgacggctcatcttgttcaggaggctattgatgcgtatgataaattggatgatttcaatttgagagatgagacatcattttat

SEQ ID NO: 83519 - DNA, 493 bp, Arabidopsis thaliana columbia
  unsure (1)..(493): unsure at all n locations
ccaaacaaacaaaaaatcattattcgttatacttatacaacatgatgatatggggtccaaaccgtacaatggtgtcaaaataaataaaagtgtaaataagaactaaaacatggagaatttatttggtgactaaaaataatgggcagggaaggttcttaggccgttccgacaaaaccaaaaccggagacgaaaaaggctgtggcctgaagaaaaagatagaaatgtaaccatgtgtgcccatagatcaggccatagagtgcacatcctaatatgtatacccccaccatcacttccttggaattcactctttgataacaagattttctttggactacccgagagagtagcttactcttcaaagcatctcccagtttttcggtcacaacccattcgtttactcttcctccttcaagaggccatgcacgacctttggtcgtgcnagcattaaattccgacagccnattccggganaggttngnttcagggngaaaac

SEQ ID NO: 83520 - DNA, 565 bp, Arabidopsis thaliana columbia
  unsure (1)..(565): unsure at all n locations
tccaatggcggattcatcatcaggaacattccggccagctccgccgataccgattcccaaatacgcaccatccaatagaaatcgtaatcagaaaactaatcatcaaaccgatacaaacccgaagaaaccacaatcaaatccagctcttaagcttccgcatcaccgaaccagatactacaaaccggttaaggaaggagttatctcctcagacggtgaccgcacaatcttaatcggcgattccggcgtctcgtatcagcttcccggtgcaccgttcgagtttcaattcagctattctgagacaccgaaagttaaaccggttgggattcgtgaaccggcttttatgccgtttgctccaccgacgatgccgagaccgtggacttggaaagcaccgttgaggaatcgnggaggaagnttccattgtttgnttcttttaatccacccgccggcgggggggaaatttggggttaggatttaggnatacctgggccgtancgntttgggggttccaaagnaggnntnantggggangggttttggggncntttagggttgggnaagattttta

SEQ ID NO: 83521 - DNA, 475 bp, Arabidopsis thaliana columbia
  unsure (1)..(475): unsure at all n locations
agaagatgttgaggttggacccgataactacccaatggttcttatccaaataccaatgtacaatgaaaaagaggtctttcaattatctatagcagcaatatgtagtttggtctggccatcgagccgtctagtagttcaagttgtagatgattctacggatccggccgtaagggaaggtgtggacgtagagattgcaaaatggcaaagccaaggcataaacataaggtgtgaaaggagagataacaggaacggctacaaagccggagctatgaaagangctcttacgcagagctacgtcaagcaatgcgacttcgtagcagtcttcgntgctgatttccaacccgagcccgattatctnatccgcgntgtccctttccttgtccacanccctgacgttgctctngttcaagcccgatgnntatttngttancgngaacanntgcttgtngtcgnggntgcaagtgntngtcttgtt

SEQ ID NO: 83522 - DNA, 644 bp, Arabidopsis thaliana columbia
  unsure (1)..(644): unsure at all n locations
tgatactccnnnnnnnnnnnnnnnnnnnnnnnnnnnnnnnnnnnnnnnnnnnnnnnnnnnnnnnnnnnnnnnnnnnnacgccacgcgtctcgctgtctgaactgaaaaataagatcgcattaactcaaaactctcacaaagacaaagatcttctcctccttctcttctctttttcacttttctctcttcccctctctcgaagcttgaaaggtaacaacaatggagaaccctccggatcaaacagagtcaaaggagactcttcaacaacccattacaagaagaagaacaaagggtggtcttctcactatgcccttcatcattgcaaacgaggggttcgagaaagtggcgagctatggattattacagaacatgattctttatctgatgagtgattacagattgggacttgttaaaggacaaactgtcttgttcatgtgggttgctgctactaatttcatgcctctcgttggagcttttctctcagattcatatttgggtcgctttctcaccattgtcattgcttctctctccagtctcctggggatggtggttctttggctaacggnggtnttnccgaaagnaaaccataccgttgtngaacagccgnnccacttnanttccggggattttttaattggtttttc

SEQ ID NO: 83523 - DNA, 483 bp, Arabidopsis thaliana columbia
  unsure (1)..(483): unsure at all n locations
ggtaatttatctttgagatttatgatatcaccaaacaaaaaggtaagtttacttgaacgttaaaccaaggcaaaagacgagttagaatgagatttgtgaatggaatacgtgaaagaagaaacaaatagcatatcacacaaggttcaaacttcccactcagtaatggaatataagtctactattcttcggcttcaggttttactgtccctcgattaaagcaagccaagaactctatgtttccgtctgcgccctttatgggagattcgataaagcctttgttggtaaatccatagcgctcaacaccgttaattacctccccaagaacctcttgatgtacttcggggtctcccactatgccacccttcccgacctggtggcttcgggcttcaaattggggttttaacaagggtaactaaagccgcaatctctttcatcacatcaaanaggggganncctaagatggnatgaagangggaagggcca

SEQ ID NO: 83524 - DNA, 381 bp, Arabidopsis thaliana columbia
  unsure (1)..(381): unsure at all n locations
attaacatagctttgcttaactgttactcgcagttgttgtctgaacatgagaactggttctttgtttggcaaactggtgttgaagctttcgatgaaatggatagtcttgttagaagtcatcctcgtctctttctatctccgtttttgaggtcgataggtgtggcgtatgcggctgcagatttggttatctcgagagctggtgcaatgacttgctcagagattatggctttaggcaaaccttctattctgataccatcaccacatagcgatgaaggggatcaagtaaggaatgcttctttaatggcggacatttttggatcaaaggttaataacagnaagagganctagatacggttcaccnnttagnngctgccatgggag

SEQ ID NO: 83525 - DNA, 526 bp, Arabidopsis thaliana columbia
  unsure (1)..(526): unsure at all n locations
gaaacaaaattattatttttgagagcatgggtgaaaaattgcattttgcacgttcaaaagtacgccgataaataaaatgacatcgggtaaaaatattttttcaacatgacaacaaacttaatacatgcctaaaagcattacaataagtaactaggcttgagcaattcacacaagataggttatgacccataggatgtgtttcgttactggtcatcacctctacgtgacaaccgagcagaaccagctttagccaaacccgaatagtagtctccgacgtttgcaacaaatagaggatctctctcttcaatctttagagagtcgtaacgttttgaaccatgatcgttcccttcatcagattgctccaagtcttctgttaaatcttccatggctttcttgagattagccttactcatcggtgcagcttccccggttgaaatccccaccatggctaccttgggaagatggactccgagattcccttcccaggtccaaccctgcccgggccctgggagggggggctttnnga

SEQ ID NO: 83526 - DNA, 423 bp, Arabidopsis thaliana columbia
  unsure (1)..(423): unsure at all n locations
ggcgagaattcaatatagtgatcagagaagagagagcaaagggaaagggttaatcctcagcaatgggctctcacctttccaaacaactcgagcggcgaaaagccatctccacggagaagaaagccctcaccgatctcgagaaatcgtgcggctgcgagtttccggggtgtgattacatgccttccgatcgtaaaaactggatggccggcgttcgacctgaaaagcttcacatcaacaagatcgtctggcctgggacgcacgactctgccaccaacaaaatcggtatccgattcgtgtctcgtcccttttgttaagtgccaatctnttctccatctataaccagctcgtggcgggtactcgagtccttgaaaattcngggtccaaggagntncgccgtttnttccaanggtntcctaaaggctt

SEQ ID NO: 83527 - DNA, 362 bp, Arabidopsis thaliana columbia
gaatagggtgctaatgagtaattactgtgttatatattgtcctggttactggacattcatgtgatcagaatctagctgctttgtcttttgtctgactgggtatttattattattaagtttctaaataagaagaacaagattagtttcacgtgaaaactaaatatgttcaatctaatttaagcttaatgtgatcttgcaaagaaaagaaaaatcaatatggcgtcttcttgcttttttagtacttttacagttttactatataattggcgttgttttagtcaatatattttgaaggcatgaactaatataaactatgattatgcagtctcattcgaaactatcatccgaggatagaacaaaac

SEQ ID NO: 83528 - DNA, 501 bp, Arabidopsis thaliana columbia
  unsure (1)..(501): unsure at all n locations
acaaaatatccattttatttgcatccacaaggacataattatatgcattctcaaaactacgtaaaatacattttgcatgaaaaagcttataatatacacgagacgtgcatgtgtgtgatgatgatatgatgacataaaaatctatatctagagaaataagaaaaaaatgacgagtgaattaattatttaacaaagccttggaaaactagaacttgaatgtgtatgtccatgtctcacagatcttgacattacttcactcttcttctccttactaactttttcagaattattccattgcttcctctccaaattccatccattagatcatcttcaaacttctccgacatatcaaaacctttcaaacacaccggtatgggttcccctcctaagtacctacggggattccagacctggtttacttgggcctggcccccctgaggggggccggnccggtggaaatggtgggcctgnggctgacgnaaatngggggctggggttttt

SEQ ID NO: 83529 - DNA, 475 bp, Arabidopsis thaliana columbia
  unsure (1)..(475): unsure at all n locations
aaactatctcctatatacaaggttgtaaaaactgtatatgcatcacctagtcgtgttaattttcatctggactcaaagaaggaagtggaaacaacacctgcctacccagaaatttgttttgccgtagatgattttgactcaacctttgatgctgtggttctgacagataaagatcattgctattgcgtactacttaattctcacgatggggcagcctttccaagtgcaactgttaaagattcgagtgattctaatacgaatgctgaccctagaactgtgaaagatcctaaggttactctgttttctgggtttgtcagctatcagatggttcgagaagcctatgacaggggggaggaatcggttttggaaggtctcctatctctcgggtcactattaccaggaaaagcaagacaggactttatatcgagaggcccaaggaggaccgttgacgaagtttaagtaaccttgtnncttg

SEQ ID NO: 83530 - DNA, 419 bp, Arabidopsis thaliana columbia
  unsure (1)..(419): unsure at all n locations
gatgaaagggtctcttgggtcaaaaatgtacataatttataactgaaaaaaagaagaaaatttgatggaagaaacgtgtggaacattaggagaaagaaagagagggatataaataacccaaatttagaagatttaaaatacccgaaaatatgtgaatctgttttgattcggctgttacatatattgagatgataggcgatgtgttgaagctcaagagttgttatgtgggagaagctaaggtaagttttaggatgaaaccgatgatgagtccgatgagtccaaccatagctgccaacttccaggatagcccatttccgctgttcccctgggtttctccgcctccttaccggttccaattatgttgcacctgttggggtttgcttaanggggggatncgnccttcctaagncgnggaaaaa

SEQ ID NO: 83531 - DNA, 495 bp, Arabidopsis thaliana columbia
aagtcgttagaacctgtttccaagttctcggatttgaatttgcccacctactacatgctagctgctggtttcctctggatgtctatgtggattttcggtgtcatcggtgccttgaacttctattttccgccacttgtgattattggtttggtgttaagtctggcttggacgacagaagtgatgaggaatattgttaatctaactgtgagccgggtcattgctttgtactatcttaggggaatgcagtctagtaccaggtttagtttccaaagggccttgtctcgtaacctcgggagcgcgtgtttaggatctttgtcttgttccaacaatagaagccttaagaatcttggcaagaggattaaatttgtcctaaaggggtgaagatgagttcatgttttgctgcgctaattgctgtctcagactcatggacttcatatttgaacatggcaatggctgggcctttgtacagatagcggcttatgggaaaggatttgt

SEQ ID NO: 83532 - DNA, 778 bp, Arabidopsis thaliana columbia
atctcaatatatagtttcttactttaaggaaaaataaagttccatatctcttaatgggtcttacaatggttcacaaccctagaaaataaacatacaagaaatttcttttaaaaaacacttaaagagttgtaattagcctcttatacgtctatttttgtttgcttcctcataatcttatttgaactaattaatggattatgtccaaaacaatacaagcttcttaaatcttttgctggtcttcctcggagaaccctcagtatcactctttagtctcatctcctccatctccagtctactctctttctgcttcatcatcaccggattcgattccttagattttagcctcattttctctaaaacattcaccaaaccctctagcgccacgtcagcatcctcactcttcatcagctcctctgctacttgtgccggcgtcattacttccccgtcaatcaaacgctcaatctccggaaatagacggtgtggcatcgcagcatcactcaaacccaagtagttagaagctaaagtcttgaatccttgaaaagagcaatgccccatgtaaatgtgcatatccatacgtcctggtctaagcaatgccgggtcaagcctatctttatggtttgttgtgaatattataatccgctcgtctccacagcttgaccatagtccgtctatgaaattcagcagccccgataacgtcaatggtccctgagactcgccacggttcttgccttcaacaggctgctcaattctgttgggtaaatccactgcacaatcgatt

SEQ ID NO: 83533 - DNA, 387 bp, Arabidopsis thaliana columbia
ggttcttgtgactcagtactttgacacattgaaggaaattggtgcttcttcgaagtcaaactcggtgttcataccgcacggtccaggcgctgttagggacattgcttcacagatcagggatggtcttcttcagggtaactctgctgctgagtagagaaatgtctcaaagtacaaaaaggctttttcagagttttagagttgtgttactacttgctactcagtttatcttttagcggttggctctatatgggttcttaaatttcttatcgtttctctcttctaggcttgtggacttgatccattttcttgttttatgggtttgtggatagagtttgggcttgaaaaatatttgtgttattttgggttttaatgtcgttaactcgttat

SEQ ID NO: 83534 - DNA, 467 bp, Arabidopsis thaliana columbia
  unsure (1)..(467): unsure at all n locations
caacaactcgattacttccaacaataccaacaacgtgtgagtcgcttgattgggaaaccgcaaactcagcggctcgtgagtcaagcgcttgtattaatcacggtcggtggaaacgattttgtgaacaactatttcttgtttccatattccgctagatcacgccaattcactctaccggattacgtccgactcctaatttctgaatacaaaaaaatactattgaggttaaattcacttggagtgggtcgagttctagtgacaggagctggaccactaggatgtgcaaccggccgaactggcgagatcaaggtacgtccgaatggaagatgctcggccgggctacaacgagctgcatctctatatgacccccgagcttctttaaagtgataaatgacacttcaacaaaaatttggggagaaatgtgttttttgcgccgaacactaaccacctgcgaggggatttttnaa

SEQ ID NO: 83535 - DNA, 465 bp, Arabidopsis thaliana columbia
  unsure (1)..(465): unsure at all n locations
ggagttgacattgatacaagtcgcattgaggatgctcactggcatcttaggaagtttgtcagaatgcagaattctactaagcctagtgaaaagaaatctagttctgagggtgccgatggagtacatggatcgaaggagccatctgtttctctctccaatggcgaggcaaaggcagatagtgcagaaactaaagacttgtctcagattgtgtcgtttcagaaagagaattttgttcaaacccgaaatcttgacgacaatcgttatgatacaattctatgtttgagtgtgacaaaatgggttcatttgaactggggtgatgatggtttaatcaccttattttcaaagatttggcgtcttcttcaaccggggtgggtatctttgtaattgggaccccaagcccttggaaattcttttggaaaacaatccgtcggtggtctcangggccaactnnnaattgttttcccg

SEQ ID NO: 83536 - DNA, 719 bp, Arabidopsis thaliana columbia
  unsure (1)..(719): unsure at all n locations
atacgaatcaatttaagggaaaagcttgtgccccctccggtacccgtcccgaatttcccgggtcaaccaacgctgccgggaggctaaggtctgacgacgaggcctttggtatttatgatgagctcttctcttacgcatgccccaagtttatcaccccttccgcaccaccaactttcgaggaacctcttgtcaattacaatcaggatgcatacaggcttcagctgaagatgttcctttacgaggtaaagcagcagcagctcttgtcgggagtgcggactttcctgaaagtctactcctccatttctcttgctaagctcgcaaactacatggaagttgatgagcccactctaaggaccatattgttaacatacaagcacaagacccattcagttgattccgatggtaggatcatctccaatgcagacattgatttcttcatcaacaacgacatgatctacgttgtcgaatcaaaacccgcaaaacgttatggtgatttcttcttgcggcagattgccaagcttgaaggtgtgatcaccgacatggatcgtgtcaagctggaatgacgacttttctgtgttatacctaatcatcaatgcccaatctgatatgatgctttctcttataaaccatatgnttacttaaagccaaacacttttttgaggtagctgtcttcatgtgggcaaatggtaaccataaatcatctttcttagggatnggac

SEQ ID NO: 83537 - DNA, 415 bp, Arabidopsis thaliana columbia
  unsure (1)..(415): unsure at all n locations
acgcggacgcgtgggcggacgcgtgggtttcgagaaattcgaacccatatttggagaagtcgtacccgaacgttcggatccgggttcgggtctactccggcgatgtctcttccacgtctacgcttccgattcgtataacttaacagttcatgtcactgacttcatctccggtgtctggacgacgatcctctccgtctcgcagctagacgatatgagggatactgttgggattggtggttcgtggtctgagttcgtcgattatactgttgcttccttgaaatccgacaatgtgaagcttctcttgggagaaacttcagtttcaaatggtgtcaaaactgcgcgattagtttctcagaaagccaaaggaatgcctcgcataaatgttcctttaacanagatggtggaatcatctgct

SEQ ID NO: 83538 - DNA, 452 bp, Arabidopsis thaliana columbia
  unsure (1)..(452): unsure at all n locations
atgttcattagatcagagaagagcttcgcaaagaaacgttacatctagctagagaaaacttggagaaggaaccacagatcgtggagctcagaaaccaagtgaatgatatcattcaatctctgagtgagttaattaagtataggacacttctctccattcgtataatctttttaaaaacagtgcagaataatccgtacatccgagcttgcgactgctcaagagaagctcactgagcttgagaatcaaagagaagagatcctcacattctactctccaggttctcttcttcatagacttcaaggtaagtaaaaccatttagctgcttcactcaaatatccttccattgtgtaccaacataaatggtacatgtggggttataatacacaatcccgggggtttntttntcgcaggtnnctnttnnccccggtgggttnanggatntantggnggnt

SEQ ID NO: 83539 - DNA, 534 bp, Arabidopsis thaliana columbia
  unsure (1)..(534): unsure at all n locations
gnccgnanaccccgtcccccggnttccgctncccangggancccatgggcttngggatccaaggggnggggccccccaaattcntacccntcccnggttctccttccttccatggacttccagggtaaggtaaacccctttagctgcttcactccaatatccttccatgtgtaaccaccaaaatggttaccatgtcggtttctaatacaccaatcccgggtttgtttatcgcagatgctatgaaccaggtgcatgaagaatccacaggagctgcaaccgaagtttatggagaaggatattcactcagctgcatttgtgcagaaatacaaaaagtctaagaagcaagtatcatcgacgggctttgattcatctcgctgctaaaacttcatctattggctgaaaacaaacttacacgttttgttttttttgcttccgaccttaattcgatgtgtaagtaaacaaaactggttaaaagtcgagatctatattcgagatcaatatatatcattgtattacataatcatgttatgctct

SEQ ID NO: 83540 - DNA, 708 bp, Arabidopsis thaliana columbia
  unsure (1)..(708): unsure at all n locations
ggttagcagctgagaagctaaatgctgaagcggccaagaagatcataggtataacaaataaggataatgacatatggaagttggacctgcatggtctccatgccacagaagctgttcaagccttacaagaacgtttgcaaatgattgaaggtcactttactgtgaaccgttcagtatcaccaaatagaggtaggtcaaagaatgcagctctgcgatctgcatcacaagagccttttggtagattagatgaggaaggcatgcactgtcaaagaacttcttctagagaactgagaaactcattgcaggttataacaggtattggtaaacacagtcgcggacaggcttcacttcctctagccgtgaagacattctttgaagataacaggtataggtttgacgagacaaggccaggagttatcacagtgcggcctaaattccgacacagctgaaaatttgtttgatctcaaacttagcaaatacttttgtgttacttcattgttgttgtatcatatccccttaagacttgtcatatcattcttctttgtaacatagtcaggttggccaattgtttagtgtactcaaaaggtcgataaaatagaatgtaatgtggaagagcagtggtatttgtagtgagatcaaatgtaacttaagtggggcttttatataaacaaagattgatttttttctcatgaatnnnnnnnnnnnnnn

SEQ ID NO: 83541 - DNA, 849 bp, Arabidopsis thaliana columbia
ctgcgagatgtttacagaagggggggagtgggaatcgatttcttgtgtgtctgtagctacggattcgattcgagtgaccaaaggaactcgatttattggttctaaagtctccaaatcagaaaattcagagacgagccctaaatggcagctccggaagattcaaagatgtctccggcgaattcgtttggagctgtcgttctcggcggtacgtttgatcgattacacgatgggcatcgaatgttcctcaaggcggcggcggagctggccagggatcggatcgtagtgggagtctgtgatggcccaatgttgacgaaaaagcaattctctgacatgattcaacccattgaagaaaggatgcgtaatgtggagacctatgtcaagtctatcaagcccgagctggttgtacaagccgaacccattacagatccatatggcccttctatcgtagatgaaaatttggaagctattgttgtcagcaaagagacattacctggtggcttgtcagttaacagaaaaagagcagaaagaggtctttcacagcttaagattgaagttgtggaaatagtttctgatggatcgagtggaaataagataagttcaagtactctgagaaaaatggaggctgagaaagcgtctaaacaaaaacaaccagcagaagaaaaagcatcatgaactcatcatatataaactctcaactttgcatgtaatttaatactcttttgtatactcaaaatgctgtaaattggatgcaatagatcaataaaggtccaagctttgcattctttaactcggaatatgaaccagtcctgtaaaatcaacttttggccaataaaggtcaagactttttgc

SEQ ID NO: 83542 - DNA, 497 bp, Arabidopsis thaliana columbia
ggagaaacttacatatgttgacaaagtgcagtgtaccgtccttgaggtcaaagttattgaaggccatggtattacagttgatgttgttttggtcaacggtgtactccgtgaaggtgatcaaattgttgtttgtgggtcacagggaccaattgtaacaactattagatcattgttgactccttatcctatgaacgagatgcgggtgacgggtacctatatgcctcacagagaagtaaaggctgcgcagggtatcaaaattgctgcacagggccttgaacacgccattgctggtactgcccttgcatgtgattggaccctaatgaggacatggaagaagccaagaaaaatgccatggaagatattgagtcagttatgaaccgcattgacaaaagtggtgaaggcgtttatgtacaagcatctacattagggtccttggaagcattgctcgagttcttgaagtcctcagatgtaaaaatacctgtcagtggtattggcat

SEQ ID NO: 83543 - DNA, 431 bp, Arabidopsis thaliana columbia
cgattgatggatgtgtgcttcaatgtgagacaaaccctttggatcatctctcatgcccaatcgtgagcactgctggagatgaagacattgaaaatatcttaagccatgtggaagtgaaagaaactgttactggaaagattaaagcaaacagtgtaaccgttttgcagacaagaatcgagggaggtgcaaaggctgtttcaacaaggggagacttggttctgcagcgtgttcgagtcatgtattccaaggcttacctctatttctggtttgatgtagattatgaatgatttttgctggttttatttatttttcttcttctgtctgtaacattagtaatctgtgtgatgatgggaaatgatccatcttcatttgtactttgtgtttccccttaagaccagacaggtcctttgttgtatgcttattatgttcag

SEQ ID NO: 83544 - DNA, 526 bp, Arabidopsis thaliana columbia
  unsure (1)..(526): unsure at all n locations
atgatttgccnnnnnnnnnnnnnnnnnnnnnnnnnnnnnnnnnnnnnnnnnnnnnnnnnnnnnnaccacgcgtccgctcatccacgcgtccgaataagagtttctctgtcttaaactcattcattctttctctctctataaccagagttctgtctgtgaaaacacacaaatctaagagaagttatgaataaacaagatgttatgaaacttcagacttgtgttctgaaagtgaacgtacactgtgaagggtgtaagcataaagtgaagaaacaattgcagaaaatcgaaggtgtttactctgtaaaagcagatgtagaacaggggagagttactgttacagggaacattgacccagctcttctggttaagaaacttagcaaatcaggcaaacatgccgagatcttaggcggtggtggaggaggaggcggcggaggtggaaaggggtttcctaatctgaatgggcaatttgcaaatctcaacatgggtggaaacaataagcctaaaggtggaaaagagagtaaccaag

SEQ ID NO: 83545 - DNA, 495 bp, Arabidopsis thaliana columbia
cgaaacgaacaaggattgtggatttcactcagccttacatagaatcagggcttgtcgtggttgctcctgtcacaaagctaaatgatactccgtgggcgtttttacgcccttttacacctccaatgtgggctgttacagcagcttttttcctcatcgttggatcagtaatatggattcttgaacatagaatcaacgatgagttccgcggacctccaaggaaacaaattgttactattctctggttcagcttctccacgatgtttttctcccacagagagaacacagtgagtacactcggtcgtgctgttctgctcatctggctatttgtggtactaatcataacatcaagctacacagcgagtcttacatcgattcttacagtgcaacagctaaactcaccaatcagaggagtagacacactcatcagcagcagtggacgagttgggtttcaggtaggttcttatgcagaaaactacatgattgatgagcttaaca

SEQ ID NO: 83546 - DNA, 488 bp, Arabidopsis thaliana columbia
  unsure (1)..(488): unsure at all n locations
aggataccaagtaattcttttttttaagaactatgtatgatatagctttgccttacaagtttatgcttcactttctttggttaaaaaatgttccgtattcttcaaggcttattcttgaagtacagttaaaatcaaaatctgccttctactatataaggatgaggcatgtgtgtctgcatttcttcatctttcatgcttgagtcttgatggatctgccatattggtctagaaggctttaaagaaagatcatcgtttcgtttacgcttcatccttctcttggattcgtcttctttttcatcaaaataagctagaaatgtctgcaatgatttagaacgngaactttcnggggaaganactggggctctccncanattgccggggggaagaagcgcgganaactgaagaagagagaaggncgtaacaaggnnccccncaggaancccgagtcgggtaancgccgacncacgacgaccggggacgggaancna

SEQ ID NO: 83547 - DNA, 488 bp, Arabidopsis thaliana columbia
  unsure (1)..(488): unsure at all n locations
gaaaccaagaacgagggggttgttgtagaagaaagccggacactttgagtctcccggtaaacagtcatgatttagccttcacgaagctgaaggaaatgaacagctgggcggatgataacttaataagggatgtattgttatccacagaggatgattttgaaatggccttagcttttttgaaaggaatggtttcttctggtaaggaggatgaggagccaacttcaaagattgaggggtattcatccgataacagaagatcggaatatagaacatttgagaaaacagttacaagttcggtgaagatggctgcaagttccacatttgaggatgctggcaagtatgatctggaaaatagtgatggaagctcgtttctggtcaatgcatctggccaatgaaaagttccctgatggtattcctgaacctgatagtttcattcagcggcttcagtccattcccgnnngncctaattggnngaagtggccnttnct

SEQ ID NO: 83548 - DNA, 467 bp, Arabidopsis thaliana columbia
  unsure (1)..(467): unsure at all n locations
ggttgctcaccatgcgatgttagagcttggcgatgttcaacttgtgacctaccttgctgagaaaaaaccaacaggacaagtatttttcagaaaaggccttccttcaatcttctctttccccccaaattgtaaaaccgcagactgcctcatcaggtagctcactgactgaacccttcagtttaacggacaaggtttgaaggagagctgtcagcacatgcaattaccgattggttcgcgaccactgtactgggcttacctagagtattctatcacacaaaagaaacactggtatctaagttcctctccaaagttccacctaataaggtgaaaggccattttattctcacaaacaggtgagcgagcttacttcctattgttccgccaggctgcccaaaggttattgggaattttggcctctctatctaacgtggctttgggggaaggngggtgcatttttntggtngaat

SEQ ID NO: 83549 - DNA, 533 bp, Arabidopsis thaliana columbia
  unsure (1)..(533): unsure at all n locations
cgccctctttttttttttttttttttttttttttggataaacagaaaatttagtactatatgtttgatgatttgtataattacttggtaactttaactatacaccaaactggtaatcacacaacaaacaaattgaacaacatttaattacatgagactttaaatctgcaggacagttgcatatgcttcctcgacactggtttgtcggtggatgtagatcctttaattttcaatctgagtcactcgaactagagcttgagcttgaagagttggacttcgtcttcttctcctactttcctttttgctctgcaatgggtttccaccgaattctctggagtttcttcggacacgggactctggacatttgcatcagtgttgcttgcagtgggctcagctttcgctttcncgggaanaacctcatcacttaggggtacattacanggctagcagcntccggggggataaccacnccctcagggatactccatggcaaccctttttagtcaaaggtggggaatctccanggccgggtcc

SEQ ID NO: 83550 - DNA, 982 bp, Arabidopsis thaliana columbia
ctctgtttaaaaaaacctatctctctctctctctctcgccgccttcctctcaccctcttcgcatagcttcactttcgccgatggctctacctaaccagcaaaccgtggattaccctagcttcaagctcgttatcgttggcgatggaggcacagggaagaccacatttgtaaagagacatcttactggagagtttgagaagaagtatgaacccactattggtgttgaggttcatcctcctgatttcttcactaactgtggcaagatccgtttctactgttgggatactgctggccaagagaaatttggtggtcttagggatggttactacatccatggacaatgtgctatcatcatgtttgatgtcacagcacgactgacatacaggaatgttccaacatggcaccgtgatctttgcagggtttgtgaaaacatcccaattgttctttgtgggaataaagttgatgtgaagaacaggcaagtcaaggccaagcaggtaacattccacaggaagaagaacctccagtattacgagatatctgccaagagcaactacaacttcgagaagccattcttgtaccttgctagaaagctcgccggggacgctaatcttcactttgtggaatcacctgcccttgctcccccggaagttcaaatcgacttggctgctcagcagcagcatgaggcggagcttgcagcagcagcaagtcagccacttcctgatgacgatgatgacaccttcgagtagagaaagagagatgtgatctgtcactgattacccgttagggcttgtctgaacttttttttgttcatggtgctatttttatgtgtccgtactttgaaatgaatcgatgacattagtaattttcatttttaagtttttaactgtcgctatgaaagtgaaaaccttttgattacaaaaaaaaaaaaaaaaaacgaccgctctagaggatccaagcttacgtacgcgtgcgatgcgacgtc

SEQ ID NO: 83551 - DNA, 584 bp, Arabidopsis thaliana columbia
  unsure (1)..(584): unsure at all n locations
ccgatttgctctctcaaatctcaaatctcattccttgatttctcttggagacaacggatccaaaaccgacgacactctcaaaccaaatccatggagattttccagattccgattcagtttctccttctctaatcaatctcataagattcgcccaccaagtgtttgttgaaattcctgagagagagatgaaggattttccttcttgctttggtgaaaatggagttcaagttgcggattcatcgtcttcttcgaactccggtaaaaacgctcagaatttggttacttgtatctaccaatgtcgaattcgcggaagaaattgtttgatcactgtgacatgggctaagaatctgcatgggtcaaagtgtaccagttggtgttgatgatttctggtaaccaaaggcttttgtaaagccggggttaagccgtggctggttttctaaacggaaaggggcctaaggggtttgngggggattcggggaaaaaccgnttgtttttnggggccttncggtttnnaaattcgggncaggcccnaaggtttgggggggttnnttttggggtttttttnnaanaaangttttctttta

SEQ ID NO: 83552 - DNA, 511 bp, Arabidopsis thaliana columbia
gtgtaaggaaatatatattgcagaatccaatcatgaatcaacaaaaaaaatgtcgataaggaatcaacaaactcttataaggtttttgttagcacccagaaactctctcttttgttctactcgctcttccaagcgtacagaatcaacgaaaagccaaaactatgagacttggagtttgttgttgtcacgtcctgtgagaaagacaagctcttctcagtagattgacaagtcctgaacatgaacacagcgtttcccgttgtaggcaacccaaagagccaactatgaacatcccatagaacttccacagtcattttattaacaactatcgtatcgttgccacgaaacttccacttaagccgcttcacctgcaacaacgtcttaccatccacacgaacaacgaggcaaggatcggggacattcgtggcacactcaatcaacagatcatggaatttcccatcagcaaaaagctgtggtttcgtgcaaacccttccaaaatggccttttggatgaa

SEQ ID NO: 83553 - DNA, 552 bp, Arabidopsis thaliana columbia
  unsure (1)..(552): unsure at all n locations
ttttttttttgaatgtaatgtgtaatattattatcaatttctttttttttttttcttcacaccaactaatcattttacatgatcataataatcaaacaaaacaaaagaataaacacacacaagacacaacacacaaattacacgatctgaagcaaatgtaaaaccgcttttaagaagaatcatgaaactcaaactctcccaagatgaggcctttctccggaggcgactgtttctccgactccagcatgaatagctccggtgcacaacaactggggtagcactcacaattatagtcagaacttcaagagttcttagattggcttcggtccagcctatggttgatctccttgcaggccaatcccatggcgaggagagtgagagaccaggggattagagagggagccgcggcggagtggagattcggggagtcccttggaagaacgttgatgatcccggtgagtgatgtggccattccgacgacgccggggttacgggatttttcgaaaacggcgcatnnccncgggagtatcggganttccgnggaatttccna

SEQ ID NO: 83554 - DNA, 463 bp, Arabidopsis thaliana columbia
gttgagccatgtgaaggagagagccttgtggttactgtcttcgtgttctaaagctcagagattccggcttttattggaagggagcttgagttccggtttcgcgctgttgttcctgaaacattggaaggcaaaccttacaccaattctgcggtactttgtggccgatacagcgatgaggagtttttccagattagatgcagaggaaacaaagagatttactttcaacattatggaagattcaagatcgataagatatggcgggacgacatcttaccttgtcgtctctatctaagacactgtgtgttggctgctaagaatctgggagatgaagcttataataactttcttggatcatacattcttggggggtcgcaataacaaccatctgagagtatttaagcagcacagggtctggtatcatggcagaagaaccaccggaggctctaaagtctagatatggagg

SEQ ID NO: 83555 - DNA, 446 bp, Arabidopsis thaliana columbia
ctcgcagtacatattgatgcggtggacaaaagatgcaaaaagccggctttcttcaggagaacctcagcagttgcagactaggctgctgcggtataacgatttgcgcgaacgagcattcaagctgaatgaagaggcatccctctctcaggagagttacaatactgcattccttgctctcgaaggagctataggaaactgtgctggtattaatacttccggcagaagtcttccagatgttgtaacgtcaccaactcaaggtctgattcctgtggaggaggacaaccatagcacaagtgcatggaaaaccaggcagaaatagaatccaactaagaaaagacaagcgaacccagagcaggatgttatgccagttgcagcgccagagagcttgcaacagatggataagctgagcccatggacggttggcattgaaagctattatggaacac

SEQ ID NO: 83556 - DNA, 353 bp, Arabidopsis thaliana columbia
  unsure (1)..(353): unsure at all n locations
aaagacaacaacgaagaaggagaatcaacaatagattcattcgctgctgagattcagattctcggtaacatcagacacaggtgcatagtgaagctattaggcggctgttcgaacaaatcagtgaagctgcttctatacaattacttccctaacgggaatctacaacagttggtgcaaggaaatcgaaacttggattgggaaacacgttacaagattgcaattggagctgctcagggtttggcttatcttcatcatgattgtnttccggcgattttncatagagatgtcaagtgtaataatattcttctggnttcggaatatgtagcgattctttnctgnattttggncttgcg

SEQ ID NO: 83557 - DNA, 895 bp, Arabidopsis thaliana columbia
  unsure (1)..(895): unsure at all n locations
gagaaaggtacctcctttcatcaatctatagtcagaacaaagaactatctctctctttctcgttcataaatctccaaaaccactcgagcaagaagagaaccgagtcgggcaatcgcaaatttagtttctttgttcactgaagcttcaaagtgttctgagtaattggaattgaaggaaagatgagcaatggtggtttgagcattgatgagaaagaagggttgatagacaaagatgaagtcatgatccgtcgaatgaagaacagagaaagccaacgtaggtatcgagccaggaaacggatgcgggaagaagaagcgggtaacgatgataatctttcgtttgagacaatgggaaaacaagaagaagaagaagaagaagacgagggactagagtttaatggacctagtgggtaatgttgtagaacctttgttgcggcggggtttattccgattagaaacttggaaaaaacgaagctagaagagctcatttgattatgaacaaggctcaagatagttcttgtgagtcggttaaacggaagataaggccgcatcgtcgagattggaaagctgaagctagaaagaagaaaacttgattcttgaggattggtcaggttgctagaggatcttgcgaggtgatcgaggaagagaatgcacaaacaaagcagatttcagattcaataatctcttcaagatttctatttttgtagatattggaaatgatcaagacaaaagcaagtgatttgctttttcttgtctgtgactctgtctgtgtattcgaagatccatgtagtattatactaaggtttatgtgaaaaaaaaaaaaaaaagnnnnnnnnnnnnnnnnnnnnnnnnnnnnnnnnnnnnnnnnnnnnnnnnnnnnnnnnnnnnnnnnnnnnnnn

SEQ ID NO: 83558 - DNA, 1401 bp, Arabidopsis thaliana columbia
  unsure (1)..(1401): unsure at all n locations
gagtgtttctctctacagnttttagagggaaccgtcggttcacggacgcgtgggttcagtgggagttgttgggtgatcggtccgaggcgacatacaagatgaccggaaactcttttaactcgatgaaagatttcctgaagcagacaggcggctatgcggtaatagacggagggcttgcaacggagttcgagagacatggagcagatctcaacgatcctctctggagcgccaaatgccttgtcacctctcctcacctcattcacaccgtgcatctcgattaccttgaagctggtgctgatatcatctccagcgcttcttatcaggccacgattcaggggtttgaagcaaagggattttctagagaagagagcgaatctttgcttaaaaagagcgtagaaatagcgactgaagctcggaactcgtattatgacaaatgcggaactagctcttccatggatgataagattctcaaaaagcgccctatattagttgcagcatcagttggtagctacggtgcatacttggctgatgggtctgaatacagtggaatctatggtgattcgatcacgctggaaaagctgaaggattttcaccgcagacgactccaagttctggcggaatctggtgctgatttaatagcatttgagaccattccaaacaagatagaggctcaggcatttgctgatctattagaagagggagatgtgaagattcctgggtggttttcattcaactcaaaggatggcgtaaacgtggttagcggggattccatcaaggagtgtatctccatagctgaaaattgtgagaaagtagtggcggttggaatcaactgtacccctccaagattcatagaggggctagttttggagatagaaaaggtgacaagcaagcccatactagtgtacccaaacagcggagaaagctatgatgctgatcggaaggagtgggtggaaaacacaggagttggggatgaagactttgtatcatacgtagagaaatggatggatgcaggagtgtctctcctgggaggttgctgccgcacaacaccaaccaccatcagagccatccacaagagactcgtcaaccgcagatctctttagcattcaacttcactctcttctatgaatctctagaaccttggcaatagatttctaccaaaaacatgaatgtttgtcttccctttgccaattacaaatctaatttcaaggataggcgtgactgcatttaagcttggatgttaatttgaaagttttcatcttgcatgagaagaaatcttggatgttttacatcaacctcgcctggatacaaggctgttgatttatatgtgcttgagagatctctgctcttaatgcattctatatgcggaaatgtggtgagagcgattgtaaaatacccttcatt

SEQ ID NO: 83559 - DNA, 658 bp, Arabidopsis thaliana columbia
  unsure (1)..(658): unsure at all n locations
catacaaggactatggataaaaggtggagtctccaaggtttgactgctcttgtgaccggtggagccagcggaatcggtcatgctatagtagaagaactcgccggttttggggccaaaatccatgtgtgtgacatatcgaaaactctgctcaatcaaagtttatccgaatgggagaagaaagggtctcaagtgagtggctcagtctgcgatgcatccaatcgtctcgaaagagaaacacttatgcaaactgtcaccacaatatttgatggcaagcttaacattcttgtgaacaatgttggcacaattcgcacaaagccaacattagaatatgagggcagcaagatttttcgttccttatttcaacaaaacttggaatcttgcttatccatctaaggccaactttcacatccactcctaaaaggcttcaggcaacgggaattatttacttttaatttcctctgctgccagggatccgtatcattttgatgctgcatccatttatggcctancggaaagnnncttttgaatcngctngcccgnaantttggggtgtnaatggnaaaaanccgggattngngccaacgngggttcgcctaatttntcncnctngcntggnaaacctttttngaagcgntggtttacggggttttncggtttc

SEQ ID NO: 83560 - DNA, 638 bp, Arabidopsis thaliana columbia
  unsure (1)..(638): unsure at all n locations
agaagtagagattttaggtagtgtcaaacacatcaatctagtgttcctacgtggatactgccgtttaccatcttcaagacttctcatatatgattatctaaccttaggaagcttagacgatcttcttcacgaacgagctcaagaagacggtttgttgaactggaatgctcggttgaaaattgcgctaggctccgcgaggggtcttgcttatctacaccatgattgtagtcccaaaattgttcaccgtgacataaaatcgagcaatattctactcaatgataaactagaacctcgagtctcggactttggtcttgcaaagcttcttgttgacggagatgctcatgttaccaccgtggtagctggcacctttggctatcttgctccagagtatctgcaaaaatgggagagcgacggagaaggcttgatgtctacagctttgggggttcttctccttgagctcggttaccggaaaaggaccaacagacccgatattcgttaaaagaggcttgaacggcgccggatggatgaaccctgttttaaaggnatcggtngggggtntattggcaanggntcncccgtttcnncgagggctttttggnattcccgaananttnggggttccagtcntcccgnnntgc

SEQ ID NO: 83561 - DNA, 520 bp, Arabidopsis thaliana columbia
  unsure (1)..(520): unsure at all n locations
tcacttgtggtttcttcgttggtttgacttccaaggagtgaggaagtggtgttgagctttggtctctgaagtcaacactggtgtcggcggaataattgagaaacacaagatgaagaagggtaataatctcaatggagaggaaaatgacttcgttgatgtcttgcttggcttgcaaaaggatgaaaagttgtctgattctgacatgattgctgttctttgggaaatgatatttagagggacagatacagttgcgattctagtggaatgggtgcttgcaagaatggttttgcatcaagacatccaagataaactctacagagagatagcttctgctacaagtaacaatattagatccttggctgattccgacatcccaaaactgccgtaccttccagctatttgtcaaaggaacccctaaggntccaccccccctggnncacttttnttttttgggtncggnttcggtatccatggcggccccggagggtcctaaccttttncccnnctngaccatagntgc

SEQ ID NO: 83562 - DNA, 544 bp, Arabidopsis thaliana columbia
  unsure (1)..(544): unsure at all n locations
caaactcatattctctattttctgtctagttattatactatccgcctgtaattcaacggcggagctaccgcggctcgtccaaccaccagaacccgatgggtcactcagttttctcgttgtcggcgactggggaagaagaggttcttataatcagtcccaagtagctcttcagatgggaaatattgggaaggacttaaatattgatttcctcatttcgactggagataacttttatgatgatggaataatcagtccatatgattctcaatttcaagattcgcttaccaatatttacacagcaactagcttacaaaaaccatggtacaatgtattagggaatcatgattatagaggtaacggctatgcgcaacctcagccccatactcagggatttggactgccgttggggttttttttagatcttatggttnttaacgccggggattgttggtntttnnttcgtgggtcaaanaccgtccgnggtnggtatttnnttnacccangggccntgtttttgttgggggggggatttccgngaattaat

SEQ ID NO: 83563 - DNA, 478 bp, Arabidopsis thaliana columbia
caagttcggaaagctgatggtatctcaaagggaatatatcaagtggcttaatggaatgggactaaggtttctgtaaagatgcttgataaggatctctacaaggattctgacactataaatgccttcaaacacgaacttactttattcgagaaggtacgtcatcctaatgttgtgcaatttgttggagctgttactcaaaatgtccccatgatgattgtgtccgagtatcatcctaaaggggaccttgggagctatcttcaaaaaaaaggtcgtctttctccagccaaagttctaagatttgccctcgatatagccaggggaatgaattatcttcacgacgtgtaaacccagaaccagtaatccactgtgatctaaaacccaagtgccagaaatattatgctcggtagtggaggacatctgaaggctggcggcattttggtttgataagttttgcaaagttatcatctgataaatcaaa

SEQ ID NO: 83564 - DNA, 503 bp, Arabidopsis thaliana columbia
  unsure (1)..(503): unsure at all n locations
tgaagatgagttttgaagattatttggttgtgtataaatcgtgggagtagaaactctcagcgagtggatcggtctctgtggttgatatatattgaaattcgaaggttgaatttgagtagttttgttcaggctttaggttttacgttgagatctgtgagaagcttcgtgaaattgattgtgaaggagatggaatcagcgagctgggatctagacgccgccgcttccgccgctgcttcggtgaacgttaaaaacgcttccaccgttttcgcgaggccgagtcaccgttgtttcgcgtttgaatcgtttgtttgtgggaaaatgtttgagaattttggagctccctgatttctcgagacgtgaggaaattcgaaaagnttnagatcccgttgacccgnttcagtactttgaccccggancccgggttncgtcttttttccanggttcgnnggtnaaaaagaacntnaagcgttnnacaatccgaanntnggggntncttntttngg

SEQ ID NO: 83565 - DNA, 526 bp, Arabidopsis thaliana columbia
  unsure (1)..(526): unsure at all n locations
ggatggtgaagtcgttaaccaaaagataggctgaaattttaagaatccattgagaatccatggataagctgaatttgtgcgaagaaattcgaaaagacgctggagagacctacaagttaaatccagaagatgcagattatttgatgagatggggagaagctttactagagttatctcagtttcaaaacgttatagattcactgaaaatgattcaagatgccatctcaaaactcgaagatgcaatattgattgacccaatgaaacatgatgcggtttngtgcttggggaatgcatacacttcatacgcgcgtttnactcctgacggcactcaagctaggattaanctttggcttagcttatcttttnctcccgggatagctgtagctcagcaaccgggtantcaaggcttccctaaatcacttcgnantggcgggccaagggtccncaactncncacgggggtttttaaaaccngtttncnctcactnttgggtngnggttnancttttngcaatccctgnccntta

SEQ ID NO: 83566 - DNA, 503 bp, Arabidopsis thaliana columbia
  unsure (1)..(503): unsure at all n locations
gaagaatcaaagagaatcagattagagtgtgagtttttagaagttactaaatggagggtaaaggacgagttggctcatcttcttctacttcttcttcttttacagccgaactcttcggttccaaagatccttcgccaccatcttcatcctccgggcatcttcttccaccatggttccctcatccctccaaggggtcttgcaaagagattgggtccaaactcccaaacatggcttcacaagctcaaccggtaggggattctttcaaatgcttcaaaggaggcagagcgttttgggccattgtcatctaaggtctttctcttttaactangggtgggtcaaagacggtattacggttcgnttccacccatccaacccaaanntttccccttccangnttaaaaaattnanccnttagnaaggaagccgggtgaangncggccggttaattgggcaanaancccncaaagatttttttnaaaggggggaacttggtnggaaaggtt

SEQ ID NO: 83567 - DNA, 853 bp, Arabidopsis thaliana columbia
  unsure (1)..(853): unsure at all n locations
ccgtccgtctaactctcttacggaagaagaatcaaagagaatcagattagagtgtgagtttttagaagttactaaatggagggtaaaggacgagttggctcatcttcttctacttcttcttcttttacagccgaactcttcggttccaaagatccttcgccaccatcttcatcctccggcatcttctccaccatgttccctcatccctccaagggttctgcaagagatggttcaaactccaaacatggctcacaagctcaacgtagagaatctttaaatgctcaagaagacagagttgagccatgtcatctaagctcttctctttactacggtggtcaagacgtatacgctcgatccaccaccaaccaaacttaccctccagttaaaaatgaccgtagaagaagcggagaagatgacgctaattggacagaaccccgcaagatgtttcaagggggaactggtggcaaggttctctttattactaaagaaccacttccctttagtttctttgtaaatctctccaggaacacctgaagctcaagccaagtactaatatctacttaaccaagactttgtataaataagtttatgcagaaaaaaaaagttattaggagatttctaggttaagtaataatatcgaagaattctcctagtagtagtgtcctcaaaatagatttctctagtacttgttataatcaactgtatcaatatttactctgtttttctctgtctcgtgccaacaaagtgatgaaatcattagccttttttaccaaaaaaaaaaaaaaaagnnnnnnnnnnnnnnnnnnnnnnnnnnnnnnnnnnnnnnnnnnnnnnnnnnnnnnnnnnnnnnnnn

SEQ ID NO: 83568 - DNA, 564 bp, Arabidopsis thaliana columbia
  unsure (1)..(564): unsure at all n locations
accattccccnaaacggtccggatggggccnnnccccnccattccccgttnagctggtaaatccggnncatttggcctnngccattgggagcccgggggccccaacatttacttttccaccgatctgtcagaaaccgagatctcaggggagtcttacatggttcttcaaccctagcgcataccctgtatggagtttcaagcggtcaggggaacaaacttcggattcgacatggggaagctgaatttaagtgagaggctagaaagcctcgatctatcaaggaatttggtatttgggaaggtaccaatgaccgtggctaaactgcaaaaattgaacttgagtcataaccatctttgtggaaagcttccagtgactaaattcccggccagcgcgtttgtcggtaatgactgtctctgcggctctccgctttctccttgtaaaatttagcggcaaaaaggtacaattttgtagttgagtactgtaacacatagctctgaataagatttgtaataacaaaaattagcctactcggctacgccatacatggacatgattttttttttttt

SEQ ID NO: 83569 - DNA, 953 bp, Arabidopsis thaliana columbia
gtctctctgaaaaccataccggatattttcaaatccatgcagaagctcctatctctaaccctctcccgcaacaaattctctggaaatcttcctccgtccattgcatcactcaaaccaattctcaattacctcgatctaagccagaataatctctctgggacaatcccgacctttttatcaaacttcaaggtactagactcattggttctttctagaaataggttctctggggttgttccgaagagtttagccaatatgcctaaacttttccatctcaatctctcccacaattttctaactggtccactccctgccatgaagaacgttgatggccttgccactctagatctttcatacaaccaatttcacctcaaaacgataccgaaatgggtgacctcgtcgccgtccatgtactcgttggagctggtaaaatgcgggatcaatatgagcttagacaattggaagccagtgagacccaatatttacttttacatcgatctgtcagaaaacgagatctcagggagtctaacatggttcttcaacctagcgcataacctatatgagtttcaagcgtcagggaacaatcttcgattcgacatggggaagctgaatttaagtgagagactagaaagcctcgatctatcaaggaatttgatatttgggaaggtaccaatgaccgtggctaaactgcaaaaattgaacttgagtcataaccatctttgtggaaagcttccagtgattaaattcccggccagcgcgtttgtcggtaatgactgtctctaaggctctccgctttctccttgtaaaatttagcggcaaaaaggtacaattttgtagttgagtactgtaacacatagctatgaattagatttgtaatttcaacaaaaaaaaaaaaaaaagggcggccgctctagaggatccaagcttacgtacgcgtgcatgcgacgtcatag

SEQ ID NO: 83570 - DNA, 722 bp, Arabidopsis thaliana columbia
  unsure (1)..(722): unsure at all n locations
atgatactgccagctctaatactgactcactattagggaaagnctggtaccgcctgcaggtacccggtccggaatccccgggtcgacccacgcgtccgcaaaaacggaggaagaaaaccgaagcgaaagctgtggagacggcaaagactgaagtgaaagcagaagataagaaagagagcgaggcagagaaatctggtgaagcaaagaaaacagaagatagtggtccctcaacataagaagcgtcatcatttaagttgccaaatcctggcgaggtaattaagcctcgaaatgttttgatgcatcatgagtctaccattgtcttggcactatctatctatacatgttttgtcgagtcatatcaagtggttgggggatcgcttggggtcgggttttactgaatgctgagtcgttatgggtctaatagtttttgagtctaaagtgtcgggtgatatgagagatttgggtgaaatattttttcatgttggttatctgaaagagtacattggtttcattggtttaagttttctccatggatccctttttggatggtctttattttgaggagtacaaatcgtgtttgtccaatggacaaagaatcagaaagtctcccatttttttttttttccaaaataaaaagaaaaaaaaaaaagggcggcnctctagaggatccaagcttacgtacnnnnnnnnnnnnnnnnnnnnnnnnnnnnnnnnnnnngtcc

SEQ ID NO: 83571 - DNA, 1234 bp, Arabidopsis thaliana columbia
tacaactcattatagggaagagctggtccgcctgcaggtaccggtccggaattcccgggtcgacccacgcgtccgctccatcaatctctcttacacactacacaaattcaacaactgaaaccaactcagagcaaaagcttgatttgacactatggcgagcattagcaacgagcccgagcgtgagaacagagacgaagaagagactggagccaacgaagatgaagacaccggtgctcaggttgctcctatcgtcaggcttgaagaagtcgccgtcaccaccggtgaagaagacgaagacaccatcctcgatctgaaatcgaagttgtatcgatttgataaagatggaagtcagtggaaggagagaggtgctggtactgttaagtttttgaaacatagagtttctgggaagattcgtctcgttatgaggcaatcgaaaactttgaagatctgtgctaatcatcttgttggatcgggtatgagtgttcaggaacacgctgggaatgataagtcttgtgtatggcacgctcgtgatttctccgatggtgaattgaaggatgagctcttctgtatccggtttggttcagttgagaattgcaaagcatttatgcaaaagttcaaggaagtagctgaatctgaagaagagaaagaagagagcaaagatgcctctgataccgctggtcttcttgagaagttaacagtggaagagaaggaaagtgagaagaaaccagtggagaaggcagaggaaaacaaaaagagtgaagctgttgaagaaaagaaaacagaggagtctgttccctcagcttaagatgcatgcttacacacacatacggccaggtaatcaatagcctgatgtgttttaaatccatcgaaggaagacttggcttttattttcaaattgaatacatgttttgagtcgtgttgagagtctatatgtttagtgtcacaaaagtgtcacaggtgacattttgcatattgcgagattgattttcgtgcttgtttgggtttcattatctggaagaaaaaaagagtgtattttgagctctcttatgatttttttttggaaaaagtgtggactcaagagaagattttattttgagttcacaaaaatttgtatgcatggatgattcgcgtgttctctttttaatgccagtcgtgttattgaatcaaaaaaaaaaaaaaagggcggccgctctagaggatccaagcttacgtacgcgtgcatggtacgtcatag

SEQ ID NO: 83572 - DNA, 1343 bp, Arabidopsis thaliana columbia
  unsure (1)..(1343): unsure at all n locations
nnnnnnnnnnnnnnnnnnnnnnnnnnnnnnnnnnnnnnnnnnnnnnnnnnnnnnnnnnnnnnnnnnccacgcgtccgtgcgccaaattctcttctctctatctctctcgcgtacgccgcaccgtagcgaccaattgaatccacgaggaaatctcagtaaatactatggcgaccaacgaacccgagcacgagcacagagacgaggaagaggccggagctaacgaggatgaggacaccggagctcaggtcgctccgatcgttaggcttgaggaggttgccgtcactaccggcgaggaagacgaagatgccgtccttgatctgaaatcgaagctttatcgattcgataaggatgcgaatcagtggaaggagagaggagctggtactgtgaagttcttaaagcataagaacactgggaagattcgtctcgttatgaggcaatctaaaactttgaagatctgtgctaatcacttcgttaaatcgggcatgagtgttcaggaacacgttgggaatgaaaagtcatgtgtgtggcacgctcgtgactttgctgatggtgaactcaaggatgagcttttctgtatccgatttgcttctattgagaattgcaaaacatttatgcaaaagttcaaggaagttgctgagtctgaagaagagaaagaagagagcaaagatgccgctgacactgctggccttcttgagaaattgactgtggaagagacaaaaacggaggagaaaaccgaagcgaaagctgtggagacggcaaagactgaagtgaaagcagaagaaaagaaagagagcgaggcagagaaatctggtgaagcaaagaaaacagaagaaagtggtccctcaacataagaagcgtcatcatttaagttgccaaatcctggcgaggtaattaagcctcgaaatgttttgatgcatcatgagtctaccattgtcttggcactatctatctatacatgttttgtcgagtcatatcaagtggttgggggatcgcttggggtcgggttttactgaatgctgagtcgttatgggtctaatagtttttgagtctaaagtgtcgggtgatatgagagatttgggtgaaatattttttcatgttggttatctgaaagagtacattggtttcattgttttaagttttctcatggatcctttttggatggtcttattttgaggatacaaatgtgtttgtccatggacaagaatcagaagtctccatttttttttttttcaaaatttaatgcatgttcagattttttaatcttaaggtaattgccaattgtttgacaaaaaaaaggtaattgccaatctnnnnnnnnnnnnnnnnnnnnnnnnnnnnnnnnn

SEQ ID NO: 83573 - DNA, 586 bp, Arabidopsis thaliana columbia
  unsure (1)..(586): unsure at all n locations
nnnnnnnnnnnnnnnnnnnnnnnnnnnnnnnnnnnnnnnnnnnnnnnnnnnnaagcggacgcgtgggtttttaaattagggttcttcagatcgacaaatctttctctttctctttccccgatcggaatcatgctaaagatctgaactttttctcagatccgtgaataagtaagtacggagagacagaaacatactcagactgatctgaggaaaacaaagttgatggtcgcaaacctgtaagtgaaatctatagagagagacgttgaagaagaaaatgggtcaagatggttcgccggcgcataaaagaccatccggaagcggcggaggacttccgacgacgacgttaaccaacggtggaggaagaggtggtcgtggtggtttgttacctcgaggtagacagatgcagaagacgtttaacaacatcaagatcacaattctctgtggtttcgtcacaattctcgtcttacgtggcactatcggtgttgggaacctaggaagctcaagcgccgatgcagttaaccagaacatcattgaggagactaaccggattctagctgaaatccgatctgattcggatccaaccgac

SEQ ID NO: 83574 - DNA, 420 bp, Arabidopsis thaliana columbia
  unsure (1)..(420): unsure at all n locations
agaaaatgcagatcttcgtgaaaaccctaacggggaagacattatccttagaggtagaatcatcagacacaatcgacaatgtgaaagcgaagatccaagacaaggaaggaatcccaccggatcagcaacggttgatcttcgccggaaaacaattggaagatggaagaacactagctgattacaacatccagaaagagtcgacgcttcatttggttctacgtctganaggaggtgcgaagaagaggaagaagaagacgtacacggaacctatgangnttaagcatacgcacaagaangtgaagctngcagttctncagttttncaaggttgatggaagtggggaannttcagnaggtttaagnaagagtgtccntcttgttagtttgtggtcctggacttttcatggtggtgtcattnccg

SEQ ID NO: 83575 - DNA, 574 bp, Arabidopsis thaliana columbia
agccaattttcatcttcccttttaggttggaattttgagttttatcttcccatttctggattttgtttctctctagtctattccttcaaaaccaagaacccaactttgttttatattcaaaagttgtttgctttcatcgcgtttggtgttcatcttcatctggtttgagattataataacatggaaggaatcattgtgagaagagttataccatctgataacagttgtctcttcaatgcaatcggttatgtcatggacaaggacaaaaacaaagctcctgagctcagacaggtgatagcagcagcagttgcaagcaacaaggagaaatataatgaagcatttctagggaagctcaatgaagaatattgtgcttggattctcaatccagacaagtggggaggtgcgattgagctttcgatattagcagattattatggtcgagaaattgcagcttacgacattcaaactagtcgatgtgacttgtatggacagacgagaaactacgacgaaagagttatgctgatctatgacggtcttcattacgatgctcttgctctgtctccatttgaagggg

SEQ ID NO: 83576 - DNA, 420 bp, Arabidopsis thaliana columbia
  unsure (1)..(420): unsure at all n locations
anttagggattgcgacagcctcactgaagcattacaggcagggattggctctgatagcttggtgtcagcaagtactgcgttaaaagcaattgctgtcaatgatgaaatatgtaaatctattgctgaatctggtggaatagatacacttcttcggtgtattgatgatagcggtgagcaaggcaacaaaactgctgctaagacatgttgttccctgttgtctaagttggcaggaagtgactctaacaagagtaccatagttgagaagcgaggtctggacaagcttatcacacttctcacaacggattctcctgatgatccctctagtcataccaagcagggtcattgttgataatcctcctataatctgtctgagatcaccagaccacgcagccaaggctatagaagctggagctggtgatc

SEQ ID NO: 83577 - DNA, 494 bp, Arabidopsis thaliana columbia
atccaagtgctgctttagatcctggtcttatctttgatgcaggttatgaggactatctaggattcttatgcacaaccccagggatcagcgcccacgagataagaaattacacaaacacggcctgtaactacgacatgaaacatccttcaaactttaatgcaccatctatagcagtttctcatctagtggggacccagacagtaacaaggaaagttactaatgtagcagaggtagaagaaacatacacaataacagcaaggatgcagccgtctattgccatcgaagtgaacccaccagcgatgacactcagaccaggcgctactagaaccttctcagtcactatgaccgtgagatcggtttctggagtatacagcttcggggaggtaaagttaaaaggtagccgagggcataaggtcaggattccggtggtggctctaggacatcggcgatgaacaaatcgtgtgggtgttggaatataatttttttgtaatatg

SEQ ID NO: 83578 - DNA, 761 bp, Arabidopsis thaliana columbia
gtgtcaacggcccctggccaagagggtaatccccgggttccctgggaaaatttcccccggggggtggagaacaccccacgggcggtccccgtctttttgtattgccagggttttattggggggcaccttatttttggggattttttttaaggccccacacccccagggggattcagccgcccctccgaggataaaaatattacccaaaccccggcccggtaactacggcatgaaacatccttcaaactttaatgccccctctatagcggtttttcatttagtggggacccacacagtaccaaggaaagttactaatgtagcagaggtagaagaaacatacccaataccagcaaggatgcagccgtctattgccatcgaagtgaaccccccaccgatgacactcagaccaggcgctactagaaccttctcagtcactatgaccgtgagatcggtttctggagtatacagcttcggggaggtaaagttaaaaggtagccgagggcataaggtcaggattccggtggtggctctaggacatcggcgatgaacaaatcgtgtgggtgttgtaatataatttttttgtaatatgcagtaataagagggtagttctagagaactgtgtctgctaaaaagaggaaaatgcttcatagcagtttgtataattagttattgatataaaactcccaaattatgataaaaaaaaagggcgagggcggccgctctacaggatccaagcttacgtacgcgtgcatgagacgtca

SEQ ID NO: 83579 - DNA, 599 bp, Arabidopsis thaliana columbia
  unsure (1)..(599): unsure at all n locations
ccgtcntttgtnangcngtcagggaccnggcctgaagtnccngggctacccactctgtcctgggccacaagcgttcacgattcatcatcagatcatgctttggtgggtataaacaagctttcatcgctagcggaagcggggactctcaggtatatatatggcacagatctacagggaagttaatagttgagctaccaggccatgcaggagcagttaactgcgtgagctggagcccgacgaatctacacatgttggcttcagcaagcgatgatggaacaataaggatatggggacttgaccggattaaccaacaaaaccagaagaagaagctagtgcaaggaagtagcagtaatggtgtgattcaccgatgcaatgggaattgattatggtaaaaaaaaaaggaatgaccttcttaaaactatttaacagttatgttgtttctcctttcttcatcagcctctttttgtttgctccctttggtatggaaagcaaccggaaggaggtaaaagctgttttttttttcaaatcctggccccttaagtggggggccaaaggggaaaggaaggaatccatttcacctattcccctaaanaaaaaat

SEQ ID NO: 83580 - DNA, 546 bp, Arabidopsis thaliana columbia
  unsure (1)..(546): unsure at all n locations
aaaaccaggtgcnnnccgtntncatnccgcaatgtancaccaccctgggattctgagtttgggatgggtgtgtatccaaacccttttgagccgagcagctgtacagggaagttcctcgctttttcaattccccttcagatacagaatcataagaggagatggggctggaagaagaaccagcgaaggaaacacaaaaactcgtgtctcctatgcatcttgaagtagtagaaaaacagattgacgattgcaaaaagagtgtatatagaaaggccggtgtgaccaggccaagaacttagggacccagtacttttcttcctgtaaattttttttctacatttttctctggtctgattgagacaacaaaacttgtggtatgtagatgagagtagcagctggaatatattcagagttgctttggacagggaagagagcatcatagtatgtgtgtaaaagtgtgtgtgcatgatttaggatatttcttcttgtattagagaacagtgctgcagtttctttgttatcatcatggtccaagatagggaagtggac

SEQ ID NO: 83581 - DNA, 516 bp, Arabidopsis thaliana columbia
  unsure (1)..(516): unsure at all n locations
gagcttaagccggccactacagcgaccgacttctctcgccgtcgattaccggatcgtctccgttattgcgtgcttcatttaggtgtatcaagtaagcaatgagttcttcaccgtcgttggagattttagttagagaagctgaaggcttcactgtgtggaatggtcctccatttactaatggccagcccactctcaagcttgaacgagtttcatgctctaacacgaagttcagtgttgatggatcgaagttaatggcgatgaaatctgatggagttattagtatctatgatgccaccagcttgacagaagtgcggtcattcactatagcaaatgttacagctgctgagctatctcccatgtggggcttatctttcagacttttcaaaaaacccactanttcccaagggnagnatgtntccatttgggaatacttnngacagggggtcttgcncacagtcattncccaaaaatccntttcttaaggcntaatggccataaattnggttttttcccnnt

SEQ ID NO: 83582 - DNA, 421 bp, Arabidopsis thaliana columbia
cactcaagaaaccttcttccttgaagagagggttatgggatctctaagagagatcaaagaagaaagctcaagtatggaagaaagctgtgatccatttctctctatgttttgtaatgggtttcttcactggcttcgctcctgctggtaaggcctcattttcctctaatttcgaaacgacttcttatacttctacaaaatctccgattcctccccaaccttttgaaaacgctacatacacacaacattccctcctcaatagaaccttgatcaattcccaaagccaagctccagctcccgcagagtcgcgagaagctggaaggagaaacaagatctctctccgcgaaagaagatgagaatcaagtaaaagtgacaccaagaggactagtgattgttgtaactccaataataactaaagatcgct

SEQ ID NO: 83583 - DNA, 760 bp, Arabidopsis thaliana columbia
  unsure (1)..(760): unsure at all n locations
accgcagcaaccactcagccgctatgaatcgcagaaacgccgcgactggaacacgttcgtccaatacctaaaatcacaaaatccaccgttgatgatgtctcaattcgactacacgcacgtgctaagtttcctaaggtacttagatcagtttggtaagaccaaagtacatcatcaagcttgtgtcttcttcggacaaccggatccaccaggtccgtgcacgtgtcctctcaaacaagcttggggaagcctagatgctttgatcggacggctaagagctgcttacgaggaacacggtggcgggtcacctgatactaacccgtttgcaaacgggtcgatccgggttcacttgagggaagtgagagaatctcaagccaaggctcgtgggattccgtacaggaagaagaaaaggaggaagcctaaaaacggggtcgttgttgtcaagaaggatgttgcaaactctttcggctcctaatcagtcgttcacttgataaatttatcatataaaaaatttccaatataggtaatcaattttcaattctcttttttttctctctaatttaaagtttcgtatgatcttttaaaaaaattgaaattattctctttggatatctagactacaaaacttataatatcggattaataatagtgattgattccatcaaaaaaaaaaaaaaagnnnnnnnnnnnnnnnnnnnnnnnnnnnnnnnnnnnnnnnnnnnnnnnnnnnnnnnnnnnnnnnnnnnnnngaaaacgcacctaa

SEQ ID NO: 83584 - DNA, 456 bp, Arabidopsis thaliana columbia
  unsure (1)..(456): unsure at all n locations
cgacctggcacaaggttactttgtactgttgaaggaacatacttggttcaggaagcaacacaaggagggatggaggagagagatgatctataggagaataatgagattgattttgtcaattttccctgcgagatgcctattgcaagtggccgaggtttcatggaaattgaagaccaacgtgggctaagcagtaggttcttccctttcatagtatctgaagacgaagatatttgtcctgaaatccgtagactcgtcagcacattagagtttactggaactgattctgcaatgcaagcaatggntttnatccacggaatcgggttgggcttctttcacaggaggtnacctcaagtcaaggctttncagcatcaggtncaaatcccnngggccttttttttttaaacngggtnaagtttnaaaaangggtctcaatgnccccggnatggnnnttttttt

SEQ ID NO: 83585 - DNA, 329 bp, Arabidopsis thaliana columbia
cccacgcgtccgctatgaataacgatctcattgagacgacgatcacttcaccgtcccagtcatgggtcgaaggcatggtatcggtaaaggtatctcggcatctgctttgccatataagcgttcatctccgagctggctcaagacagtccctcaagatgtcgatgagtctatctgcaaagttgcgaacacaggtttgaccccagcgcatattggtgtcactcatcgtgactcacacgggattccatatgtgaaaagtgttactggcagcaatattctcacaaatttgcaagctcatggtcttgcacctgatatgtctgacgatctgtatc

SEQ ID NO: 83586 - DNA, 497 bp, Arabidopsis thaliana columbia
  unsure (1)..(497): unsure at all n locations
cgcaacacccgtcggcggaagaattagcgacaaaggcgttacaaaagcgttacgaaggtttaatgatggtaagaacaaaagcagttaaaggcaaagggcggcgtgggtattggagtcaccttgaaccaatcttactacacaacaccgacactggtttccctaaagccgttaaactccgatgttctttatgcgacgccgttttctcagcttctaatccttcccgaactgcttctgagcatcttaaacgtggaacttgtccaaatttcaactctttacctaaacccatctccacaatctctccttctcctcctcctcctccgtcttcttctcaccggaaacgtaattcctccgccgtggaagctctgaatcatcatcatcatcatcctcatcatcatcatcaaggggcttataatgtgacggctcttagtgtcgttntcccccggggttntgtggggagttccggtaaanaggagccgatttnatgtttncggngggga

SEQ ID NO: 83587 - DNA, 473 bp, Arabidopsis thaliana columbia
ctgtgcttgtacctgaaccggttacatctggagttccggttgttactgttcaaaactcagctacttcaactactgttgttcttccctttatagctcctccttcatctccagcttcgtttttgcaatcggatccttcatcggtttctcactcgcctgttggtccactttctcttactagcaatacattcttcgcctaagggggcctcaatctgtctttaaccgttcggaccatatggctaatggaactcaacccagtcactccttccggtgttctctgcggttaataactgggccatctcctgcaccggatcactccaacctcctgaatcaatcaggcccatataactacaacccttcttcaacctggaggtggccctttggctcaagttgcttacttcttcgttggagctaactcggagggatagtagtagtgggatgaatcaaaagttttcgtcttcgcactatgagtttcg

SEQ ID NO: 83588 - DNA, 526 bp, Arabidopsis thaliana columbia
  unsure (1)..(526): unsure at all n locations
ctctcgatcaactttgatcatcttctttgcttacacaacattcatattaatcggttctatcaactgtagagacaacaacaacaacaatctggtaacaaaccaatccgcttgttcgtgtttggcgattctgtgttcgatgccggaaacaacaattacatcgatactcttcccagtttccggtctaattactggccatacggccaaaccactttcaaattccctactggaagagtctccgacggtcgtacaattcctgattttattgcggagtacgcatggttaccgttgatcccagcgtatctacaaccaagtaacgggtaaaaatcaatttccctacgggagttagtttttgcttccgccggtgccggagctttagtcgggacctttcccggaatggtgataaattttgaaatcacatttaaacaattttaaggagggtgaaaaattgttgagacttcggttagggggagcccaagggaggtngtnttnaagggnagttnntgttnaatcggggnacggtntantc

SEQ ID NO: 83589 - DNA, 500 bp, Arabidopsis thaliana columbia
ggctagatgaagaggaacaaactgtgacaaaggagtttcttctgttacttgaggatgaagaaaccgagaagctgaaattttatcagcacaaaatggacatctctgaactgcggtctggcgaatccgtagacgatgaatcggagaattacctctcggatctcggtaaaggcattggttgcgttgttcagacacgagacggtggttacttagtctctatgaaccctttcgacacggtggtcatgaggaaagacactcctaagcttgttatgcaaatctccaaacagattgtggtactaccagaagccggaccagccactggattcgagctatttcataggatggcgggttcgggtgaggaacttgggtcaaagatatcttcgcttatggcggtagttgacctaatgggggaaaacaggggggcaagtggcttttgaaggaatagcgtcagcgattatacaagggaggaacaaagagagagctaacacgagcgcagcgcgaac

SEQ ID NO: 83590 - DNA, 437 bp, Arabidopsis thaliana columbia
agttgaaccaattcctgaaatttttaaatttggtaaaaagacatttgactaatgtttgttgcaggtaaaatttgaaactcttaaaaaataatatacaaaacataaataaacaaatgcatcctattggatagtatgaatacccccaagatccactaatgccatttcacatcaggggtccctataggtttaagccacatatccgccatgactccaggtggcaagctccacaacatctcctcttcctcctcctccctctccctcctccttatattactcctcctcctccccttcctttcccattccggggtccacaagccattgcgccgcggtaagcctccgcttctccgccgcatctttcttcactcccccaatgtgcaaacttcctacctttaaccctttctcctcctcctcttccgcttgtactgctaccacaactg

SEQ ID NO: 83591 - DNA, 564 bp, Arabidopsis thaliana columbia
  unsure (1)..(564): unsure at all n locations
tatnnnnnnnnnnnnnnnnnnnnnnnnnnnnnnnnnnnnnnnnnnnnnnnnnnnnnnnnnnnnnnnnnnnnnnctcgcaacgtagatcctggtgaagccaaaggcatcgtgagcaaaatccgcagttttctacattaatggattgtttctgttctagagcttctcttccgtctctgtgatttctgggtagattctaggatttctatttgcatctctaacctgagagctgctaatagtccacacaactttttagtttgtgagttttcctaatttagggttaggacaaatttctgtatttttcatccaaggggataaagatgtatgctgataaattggaggctgagtctggaagcaggaaggtcgttaaggatcgtatcaatggcggttctggagacatctctactcgcgtgcgacaagtgactgggaagaggcaaaggcaggacgacaaatgggagcatgatcttttcagtagtgacaaacctcaactttcaaatcgcaggggtgatcctagagaacttcgtttgaagctccaaaagagacatcatgggtctcaaagtgggcgag

SEQ ID NO: 83592 - DNA, 479 bp, Arabidopsis thaliana columbia
tcacgaaactatacacaaattcacacataaaatttagaaaatatgggaggcacaaaattgacccatgtgaccaccactaaccctaataactccaacattcatggaccagtcgtagcgaagtagaaggccttattaaagtttacaaagatggccacgtggaacgttcccagctcttgccatgtgttgatccctcactacccctcgagctcggcgtgacttgctccgatgttgttatagacaagttgaccaacgtatgggcacgtctctatgtcccgatgaccacggccaagtcgtcgggtctctaagctccctttgattgtttacttccacggtggaggattctgcgtcggctcggcttcttggttgtgttaccacgagttcttggctagattgcccgctcgctcgcggtgcttggttatgtctgtaaattaccgtctagccccagagaaccctcttccagcagcttacgaagatggggt

SEQ ID NO: 83593 - DNA, 477 bp, Arabidopsis thaliana columbia
  unsure (1)..(477): unsure at all n locations
ctggaaataagtcccataagcatgatgaagtggcaactgtttcagcaagttgatcaatctttccagatgcagcgtagctatcggaagcatgcttgacggtgaatctgacgaactaaagaaggtgtttttggaaggaaatccctatcttttggggatcacgatgtttgtttcgatgcttcattcagtgttcgacttcctggcattcaaaaatgatatccaattctggaacaaaaataaatctatggaagggctgtctgcaaagtctgttgtactgaactttatctgtcagtttgtcatcttcctctacttgcttgacaacggcacttcatggatgatactggctagttccggagtcggtgtctgcattgagttctggaaaataggggaagcccatgcgcataggggttgtccgagggggattgtccaaggttngggtccntnccggnanccgtttnaaanaataaaccccgggggttt

SEQ ID NO: 83594 - DNA, 408 bp, Arabidopsis thaliana columbia
catgaagatcttggtttttttaattttaaaatggtctctatgaaaagaataagaaaaaaaataatccaaaagtctttaagaaaaccagttcaacattccctgaaaaagaccaccaaaccgagactaagaaaagagtaaagaaaaaatgtttgattcagttccttaaaaggaagagcagagtgatagcaaagcatcaaaaacctaaggctcaacagcagtaacttgttcccactctccatcaacagcctctttccacacagtcacgttgttgttcccatcggatacggccaataagttaccggtcaacgaccacgagacccgccacacaggagtcataaagtccttgagaaccttaccttcccattgctcaccttcttttcccactgtccatatgataactttcccatc

SEQ ID NO: 83595 - DNA, 561 bp, Arabidopsis thaliana columbia
aacagaaatggctattcctctgttccaaatcaacccaattattgttatgattcggatacacgatcgtcgggttggcgagttcctgctttctcttcgcggaatgcttggtctaggagtaattcaatagttaacagacacttgatcgatgatcccatatccgcttactcaagaacatcgatttcatcaaccgtgtactaaaaatcatcatcctctgattattcctggttttgattttgtttcaaaagtatagtctttacatcctctttcagaacttgaaaaattatatattgttcttggcagagatttagtaccaccatcacatactcggcatcagattccaatccgtaacagcaacaacctgcgaaggcaacacctcgtggcactaaggcaaagccggttcacaaccaatcaacttggacccgaggagcagctcaaggtcatcatcacaaaccaatgtggaagacggggtcctcaaacatctttcaaaagggccttataaccccgttccaaaaagcacccttctcagaggctggattttctacagcacaaaacccggggggg

SEQ ID NO: 83596 - DNA, 419 bp, Arabidopsis thaliana columbia
  unsure (1)..(419): unsure at all n locations
aataaatttaatatcatttgagagaattcaagtacaattaaagattctagcggcgacgaggattaccgaaaaggaaagtttcttccattgctcttaccacagagagtagctctaatgtgaagagatcattcgttgtcatgtctccggtgagatttgatccattagccggaggagaagagtcttgttttgtcggcttgagtatgacgaatctacagacaggacattgtcctttggtctttaaccatgggaactatacattcctccgtgaaacatgtggtttgcaaggagtgagcatcactggttccttggggctcgaagccttctaaacacacgggggcatcttttggccgccttcttcacccgggagattttgagggggttcttgagctttcngctncccgggggttttnntccngaag

SEQ ID NO: 83597 - DNA, 985 bp, Arabidopsis thaliana columbia
caagagtgtctaagtcagcttcaacaataagttcaatgtctacttctcgctcttcagtaaagaaggaaagtgtctctgctttactgagaaagaaacaaaccgctccaaagtcattgcccatttctctcaatgtggatcagtcggtctccgatcctactgctgttccaacaacaagaaaatcgttgatcatggaacgaatgggagataaagacatcgttagacgtgcatttaagagttttcagaagagtttcgaccaaatgaaatctactgatgatgggcaagatacagctccaaagcaggttcttgcaaaggcaactgctgttcagaggttaggtacaactggtcagaaaaatgtcaggcttgcaaaatcagatggcacggagagaaaaggtcctaactctcaccgttcttcatctgttgtatcaaaaagcaacgggacagccgagaaacagaaggacccttctaggcttggcacaagagctgtagagaggatacatttacaggcgaaaccgaaggcagaagcaagcaatgtcaaaactcggaggcaaagtctaaatccaaaagaaaaccccattcaaggacctctcccaaaaggctattcagacaaagtactatgatgtagcagtcttcatttcacgaactttgatatgtaacaggtgactattgtttttatctgatcttctgaagcacaaggctaagggctccaccaacatttttcagcaaaaagatcaaatatctccaaactttcaaatgatgtttgttatatagagaagtcattacgtttgtggagaagtaagtattatacagtcttgtgtcaatgtatgtgtatagagtctgtagactataaacgtgaggatgatgttattaacatacttgaatatccatcctgttatttttaaaaaaaaaaaaaaaagggcggccgctttagaggatccaagcttacgtacgcgtgcatgcgacgtcatgcttcttcataggtcacgca

SEQ ID NO: 83598 - DNA, 553 bp, Arabidopsis thaliana columbia
  unsure (1)..(553): unsure at all n locations
ctcattctcaaatctctcattgtgtgtctgtgactatctctctatacaattcaaactcttcaagattacttcctcttcactttgagaagaagaacaaaccaacaaatctccaaaatacaccgaacaacagaaatggcgttggtgagttcaagagcaacgcaagactcaaaactctccagggaacggatagtccccgtcgtttattatctcagccggaatggccgactcgatcacccacacttcattgaagtacctctctcttctcacaacggtctctatctcaaagatgtaatcaatagattaaatgatctacgaggcaaaggaatggcttgtctctactcttggtcatcaaaacgaacttacaagaacggtttcgtctggtacggtttatcagatgaaggtttcatttttcccgttcatgggccaagaatatgtactcaaaagggctctcaaaattcttcggcccttggataataacccccggtaactttaccaccgtaaattaacgggggtaaccagnntttggggnnnttttgnccattncaaaggcttc

SEQ ID NO: 83599 - DNA, 605 bp, Arabidopsis thaliana columbia
  unsure (1)..(605): unsure at all n locations
taggtaccactatagaagagtctatgacgtcgcctgcacgcgtacgtaagctcggaattcggcgagaagataaatccgatctaggtctcttcttccccaatctctctgtgtctctctcgatcgaagaaagaagacaatggacaaaggcaaagcagtgatgggtactggtcggagatgggccgtcgaattctccgatcaatctactgttccatcttcccgtgacatcctcgatccacctggcttctctcgtgcctctcaggaacaggatgattcagcaaacagccgccaaaagaaagacgctgaagctacttggaaacttcagaaagcgtgggaagtagcgcaatctccatttaagaatttgatgatgatgggtttcatgatgtggatggctggaaacacagttcatctttttagtattggtattactttctctgctctttggcagcctatcagtgctcttcagagtgttggaaagatttttgagcctttcaagggttacaaaaggtggaccttccttatgcccgaaatttagggttccttccctaaaccttttggggggaantttggggctttgagnttannctttggggtntccacaatatgta

SEQ ID NO: 83600 - DNA, 683 bp, Arabidopsis thaliana columbia
atgactcactatagggaaagctggtacgcctgcaggtaccggtccggaattcccgggtcgacccacgcgtcctcccacgcgtccgcagaaaccctaacttcaacgggaactcaaaaatcagaatctccagatcgagagcttaaaaagtcgatttcaattcccctttaagattttttgcttttggaatgtagtgtgaagaagaaaccctagttttttctcacttgaattctctgccttctttagtaatgtcaagtgagcagcgagaaggttcgcaagagacgacgacgacgacggtggaaggtaacggaacaattgcaggtcagaattctcattcggcggctcccacgacattgagagctacctctacgatggtttcttgccagagactaaggctaaaccctaacaacgagcatagacccgatagttatgaagatctgcagcttgatttcccaaactcggtatattctagtctggagaagtacttgcctccgaatatgctcgtctcgaatcgtgatgagaaaatcaaattcatgactgatattatgcttatgcatcttcctcatggagagcgttccagagctcaaaggcacagtgactataggctgaagattacaacaaattatcagccacttcacatggagttgtatactctatttcccacagtatggttccgtcctgctttc

SEQ ID NO: 83601 - DNA, 450 bp, Arabidopsis thaliana columbia
  unsure (1)..(450): unsure at all n locations
nnnnnnnnnnnnnnnnnnnnnnnnnnnnnnnnnnnnnnatatataaaggtttcagatcttgattttaaaaaccgggccaaccacaaaatatcatgtttttacaaattacataaaacattattcgggagaaactttaaaacttagccgagggttaattataaaagatgggatgttaaggccggttaatttttgacgtatttatatatgggtcggattaaatacgttaaaaactaaccgtttttaaacataaccaaagcgatttaataaaataaaaataaatgttaaaaggttaaattatgggtaaactaatattgaacataacacatctcttaaggattttgggatatttttttaaatccgggtagatttaacaacggcctattaattaatatttatagaaaaaaaagagtggaaaacctttagggaaaaaaaaaaaaaangccaattccc

SEQ ID NO: 83602 - DNA, 643 bp, Arabidopsis thaliana columbia
  unsure (1)..(643): unsure at all n locations
gacttatataatggattctctttttccttctgttccatttggtcacaaatcaagaaaagaagacttggacgcaagaacttttcaaagacttgcatacaggacaaatcttagtgaatacatcacattctctacacaaactcaagtgccgacatggcactatcaacaccgatacttccttgacgttgcacattgtgcatctcatcctctgatgaatccccatgttgttgttgttattgttgtttggatcgatgtatgatgaagctgcatcatctatttcgctgtctccaaaaccttctttgccttgatctgcagcagctatcacactgttgttgtgtgacattgcttggttggagatttgcctttaagacattaaccacagactcattggtactttgctctgtagngncaattctgagcttccnttggcacttggttttatccccctccacaaagctctctattccttcttngttcanatcaatngatcttcgnnatctttctcttggaaggttccttggtcactccctttctcttatgttggggaaaaaaggangggagtgnntcttttttcaatccncaaaccntcgccantggggtgctggtctgaganttggcaactaacttngggtttggggtcaaccna

SEQ ID NO: 83603 - DNA, 333 bp, Arabidopsis thaliana columbia
ttttaaaacaatggagatatctaatacagtcaaagagggaaacacagagttaaccgggacagtgagctaactagaagaacatgtagtgtttctggtttggttttttaaggatcaatataaaccgtccgattgtttcggattgctttgattttattacaagcgagatggcttcttcttctattgtttcgttgtatggtgtaatgttgggttttgtcttcatttttttttttttggttttgtgttgtgcttatgatatgttttgcaatttgtaatcattggcaaaaatgataggtttgattttatagtgaaataagaaaaccgggatacccgatg

SEQ ID NO: 83604 - DNA, 695 bp, Arabidopsis thaliana columbia
cggtaacttccatccgtagtaaacaacctttacttggcaaagtggttgattcagttgtcgataaggaaaatgctccaggaagttgggttctcaacaaaaaaaacagacggaaatttgctggttggagcattatgttcacttgtattggaaacttccttttaagctatgcagcgtcaagcttcctcttgccaggactcctccgatattctctatgtggtgttggtggattgtcccttcttgtcggtttgattgtcctgatttgcatagatcaggatgatgctagacacagttttgggcattctggaggcttcatttgcccgtttgttccgcttttgcctatagtttgcattcttatcaacatgtatctcttggtaaaccttggagctgcgacgtgggttcgtgtatcggtttggctgttcctcggagtggttgtttacattttctatgggagaagaaacagctctcttgtgaatgcggtttatgtctccactgctcatctccaggagattcgtcgcacttctggacattctttggcttaagtctacatgaaaccatcaatggaagctcaaggaagtgggagtttcctttgtaaaatatgttcaacaaaatctgtataataatatatttttgagattggattatcctgtgtaaatacaaagttcaatgccactgctcataggcattgtatatttttt

SEQ ID NO: 83605 - DNA, 561 bp, Arabidopsis thaliana columbia
  unsure (1)..(561): unsure at all n locations
gatatatacactctgtttctactgctttcttataataaaataatatcacattacagggaagctaaaacgtgaaaagatttgattctatgatgatatataatctttgaatcaataaaatacaattatttttcactcaaaatacgccgtgttaaaaggtttcaggcaaatgaggttcggtttgatcatttacttttgcctcactgatggatcaacggctagaaacagatgagggatgattggttgcgacttgttggctcgaagcttcgtcagcttgaagtttcttgactcgagccttatcgattcgtgctcttctcacagcttcttggatatgtcggtcatggtctttcaacacttgatccatgtttcctgatggaaccactaacggtcctgagtaatgaatcttgtgcccttttgatccataacccaagagaatggggtctttcttgttgcttcgaccattctcttcctggttgcttcttcagacgtttccttgaatgaacctggaagcgagtcattcctctggaagtcnctggtgtggnngctgtcctgtgcggnaaacag

SEQ ID NO: 83606 - DNA, 659 bp, Arabidopsis thaliana columbia
acatttcctcgataaactctctctcccacaagaagtgactctgtatactgatgaagatgaatggtctagctggaacaagatcggtgatcctgtccttcacatcgagcttagacgttgggctgatgttttagtcattgctcctttgtctgctaacaccttaggcaagattgctggtgggctttgtgataatcttctgacttgcattatacgagcttgggactataccaaaccactgtttgttgctccagctatgaatactttgatgtggaacaatcctttcactgaaaggcatcttttgtctcttgatgaactgggaatcacacttattcctcctatcaagaagagacttgcctgtggagactacggtaatggagctatggctgagccctctcttatctattccactgtcagactcttctgggagtctcaggctcatcagcaaaccggtggaactagttaaacccatgatttccacaacatgcattttgtggaaaatcatctgttttcactatcttagataatagtagattttatcagtctgtttgcttttcttgtacatctcaaaatagctgtctggattgatgtatctggaggaccatttgcactactagctccactctgtttctgtagaaatgtctatgtttcttttcctcgctctt

SEQ ID NO: 83607 - DNA, 1556 bp, Arabidopsis thaliana columbia
cgcggtaccggtccggaattcccgggtcggacgcgtggggttaaagccactcatttgtttcatcgatcctacttcctcctgtgtcactgcaatcactcgctcgtccttttctctatttcttcaccgatcgaatcaatcagagatggagcatgaatctatcaccgctcgacgcaggctcgctgccttcgccgctcacttcccggcaaccagttacgattccgcctccaccgcatctctcgtccccttgaactgcagcagcagtttgaacactgtcatccaaaggtgtgacaacaaaatctcttttgcccggcaagcatcatctgaacagggcttttttatgaggccagcttcacccgatgatgtccttgagaacttaggtatgaatttgaagaacactgtcgttagaaggggtgacaacaggctgtattttgctcggcaagcatcttctgcacaaggtttttttatgagacaggcttcgactaatgagaggaccataccacatgatgctgctgcatctaccaagttttctgctaccaaaacaactggcttcgattcttcttcacctgcgtacgctgcaccacacttttctaagcctgcaaaagaggacatcttttttccttctttatcaccaaatctgcaaaaggaagggcctaagcttgatcttcctaagttagccaatttaggtactgtttggtctcccagatcgaatgttgctgaatcgacacacagctatgttgtggcaatagagctaccaggagccagtatcaatgatataagagtggaggttgacaacacaaacttgactgtgacaggtagacgcacatctatctgtcaaaaagttgatgcaggcaccaaagcttcgatccttggatatcataagcaagaaatactacaaggaccattcaaagtttcctggccactccccagcaatgtgaacaaggataatgtttccgctgaatttatggatgggattctgagaatagtaattccaaagctttgagggttcatcgttctgaaaccatatatagatacggtaaacattgtgtgtgatatagcagtttgtgtggaaaagaaaaatatcaaatcatgaagaaagtttggtcttttatgtaaaatagtttggtcttttatatatcacagattgtagacaggcattactcaaagtgaagccatgtaaacaatccataaatatataaaaataaaatcttcattactactaccaaaagccagaaaagaaaaagaaaaaaaaaaaaaagaaaaaagctcagaagcatctaatcatcctaaagctggggaaatctcaatctactcaactacgtagcaagcattattgttgtaataattaggaacggggtccaagattatccaccggtagccagatgggcgtcctgagacggggtatgccaaaagtgcttgcacggtacgatggggctaagctgcacatacgtaccggtagcattacagaacgcccatggggcacctgaaggatcgtaggagacaagctgaggctgctcatagttctggacatatccattgtggaacacaggatatgaagc

SEQ ID NO: 83608 - DNA, 648 bp, Arabidopsis thaliana columbia
ctttttttcatttcaatcaacacaaccaccaacataaattattctcatcgccgaaaattaaatatctccaaatgttttagtaacacgattctgaatactacttagttgaagaagtctccggttcaaatacttgctgctatacgaattacaccattagatcaacgttgagtgatccgaaacgagacgctgcagatctgtatgagcttaaccaaatagtttcatgcgaattatatcatacacgtgacacgtcgtaacaaattagagaatttaaagaccaattacgagaacaacaacacggactagagtgctttattagacctgctaaggttatgtaaatgggaaattttgaacaggcgattcgagcaacggaaatagaagaaaacttagttttctcatacatcattactgtataagaagttgagagatatgattgtggaaatagagactccttcgaatctcataaagctccatggtacctaaaccatgataactttctttctcatgattcattcgcctgaaaagctttatgcccttattcaacaagatagagacgtgcatttgaacccatctctaacaagcccgtttattgcgtccctgagcctatgataatcctcaggtttgctgtaaacttgaaaagaaatacgcaca

SEQ ID NO: 83609 - DNA, 434 bp, Arabidopsis thaliana columbia
  unsure (1)..(434): unsure at all n locations
gtttgtttttcgtttcttctccgattgttcagaggaattgcgaattaagataaagatgaggccagtgttcgtcggcaatttcgagtatgaaactcgccagtcggatctggaacggttgttcgacaagtatgggagagtcgaccgagtggacatgaaatctggaacttttcttcaaaggaacaagatttgccatcttcttcttcttcctgcaaaatcatttctacattttcatacctgcctttatcatcttgtgcctaccaatcttcactgactctagagaaactttggaatttgtctgtctattaccaatcatcgatgcttcagatggaagtctattgaatccatcattgccatgccttgccttccatatctgaactcctccactcagaatgtttaagcatgcctggcanatcactcagattttttaaatataa

SEQ ID NO: 83610 - DNA, 1043 bp, Arabidopsis thaliana columbia
agtcgtcgtcgtcgtctagggtttgtttttcgtttcttctccgattgttcagaggaattgcgaattaagataaagatgaggccagtgttcgtcggcaatttcgagtatgaaactcgccagtcggatctggaacggttgttcgacaagtatgggagagtcgaccgagtggacatgaaatctggatatgcttttgtgtactttgaggatgaacgtgatgctgaagacgctattcgcaaactcgacaattttccttttggatatgagaaacgcaagttatcagttgaatgggcaaagggtgaacgtggcaggcctcgtggtgacgcgaaagccccttcaaatctgaagcctacaaagacactgtttgtcattaactttgaccccattagaacaaaagagcacgacattgaaaaacactttgagccctatggtaaggtcaccaacgtgcgtatcagacgcaacttctcatttgttcagtttgaaacacaagaggatgctacaaaagcccttgaagctactcaaagaagcaaaatattggatagggttgtttccgtggagtatgcgttgaaagatgacgatgaaagagatgatcgaaatggtggtcgtagcccgagaaggtctcttagtcctgtgtatcgtaggcgtccaagtccagattatggcaggcgtccaagccctggtcagggtaggcgtccaagtccagattatggtcgtgctcgaagcccagaatacgacagatacaaaggtccagcagcttatgaaagacggaggagtccagattatggacgaaggagttctgattatggtagacaaaggagccctggttatgaccgatacagaagtcgttctccagtcccaagaggaagaccttgatcaatgcagaaaacagaagcttcgaagaatgagtttttcgaaagggcaaatttatctatgttgtgttttgagttagaagatgctttttgatgttttgaaatccttgttaactttgggatcttagacttttatcttaaaatcagtagaaacttcataatggcgctttgtcacga

SEQ ID NO: 83611 - DNA, 625 bp, Arabidopsis thaliana columbia
aactcctccgcagctctgtccacgtggcagctttccatcgttccggtgctgctagctacgtcgggaaatactgccgccgctacgtgtcggtcccagatggagtcacgaaccttgggaagtgtgttgtaacggatatacgcttggcgttggcgcttgttgatgagcggtctgttatgagatccgttactacgtcgtcctttgcttacggtggtggcgtaggaacgtctcggtggggtgctgctgcagctgaactcgtactctagctggagcgggacaggggagatgaaggatgatcgcacatcttggtggtcggaaggacggcacgtaatgcgtgagtgggaggttgaaacggcttcgtttaaggatttgcgtaggatcttgccacgtttcccgagtagatgtggatcgagggttgtgaggagtttgtgacgtaaggcgttgaaaccttctgtatggggaagggaattagcttggccaggcttgagagcttcttcgttgtgcctgttgagcaaacctccatgtcggcgggtatttgcatatgtgcgtgtgtaagggagagagagggtttggcaattaggattgtagagagatgggatttaaagaaaataaagtgggattaatgaag

SEQ ID NO: 83612 - DNA, 474 bp, Arabidopsis thaliana columbia
cgagagaacgatttttaggtcggttctttgaattaatttctccttgttattggtaattcgttacgattgagagagggaccgtgaaagcaacggacgagcatcagttgacgatgtagaagatgcagaaaaaactcatcgagtttcttcgtcgacaaacgggagcagagaacggctgacgactcgcattaatgggccttgtcaatgggctttactgtgagattgaagaagatccaaaactcatcgagtttcttcgtgttcaaacggggcagagaacggctcaaggcttaaggttaattctcagcccattttcttgtttacttaaattcatatattttataattttcagttaatggggttttttcctacgggtttttaaagtttttttgcaatttttattcaaggttttgtttaaagggaatttttaatatttttcaggtaaaaaattttattaaatatacataatatttttttttt

SEQ ID NO: 83613 - DNA, 953 bp, Arabidopsis thaliana columbia
acttgctgtaaatgaatgatttttctttttggagtttaacgttcgtcggtaagaggatctgttcccacatccaaatcctagacttcgtataatgcaatgccaataaaatggcaagttcagacaaatgtcatttgttcttctttctctataagcaccaaagagccaagagcctcacactttggattcgtctttggttctactacactcctgcgcatatggcttctgaggaccacgcagaacagcaaaactttccttcatctacatgcttaacatcaagacccacaaaccatgaacccgtgctgacgtcatcatgagcatacgaatgaagaatgtctctattgatcgatacaaatctagccaatgcgtgcgttataacatacatctccccataagcatgccggaagtatgctttcttggcaccggatttccaccactctgggtcataccatttgtgggtccggtctgagaagacttcgcctgatttcatgcaaccgatgtaagcccgggggttttccagaatgtgcctgcaaagcgtagttcccagagcatcttatatttacgtagatattggtcgatggcttttgcataaaactgtgcatcccacctatctgcagcataggcaaagaacagttttaccttcttagaagcttcctcgggtgcctcaactacatcatcgagaataatgaagtcatcggtttgactattttcagtatcaatgctcttgtccatgctgtcccctttatttgcacttcttccaataacaaatcttgcaatcacacccttttcactttcaagttttttaagtgatgcaccagtccccatccatgcttgacgaactgcatccctcttcttcttgttacccaaacttgtcattatcccggataaccactaacggtcttttcttggtttcagttccatcagcaagtttgggactttttgaaacaaagccttct

SEQ ID NO: 83614 - DNA, 554 bp, Arabidopsis thaliana columbia
  unsure (1)..(554): unsure at all n locations
aaataagagacaaataatatttagtttcatgtacacactaaccattaatggcgaaacggttggctctcataaagaaaagaaagaaatttcgatggggttgagaaaagaaaggaagatttttttttttatgattatttagcaggaggaggaattgaatgaaaagagacaaataggggaagcaatttttgtttttgttttaaggttgagcaagtcttttgactattgcagccatgtagtttccttgatgttcagcaagagccaattctgtttctgttgcttctcttgacccatcaccagcgaacacacctgctccataaggagagcctccacgtatcgagtccatcttgaacattcccagctccaaatgtggtagcctattggtacaaatagcatcccatgggtgcaccaagctgtggtgattgctgtccatgcagtggggccncttgggcanctccttgagtgccagtgctccacaaagatccagcagncttaccagcaagactcggcccttccanatganccggcgatcaaaaaagctttattgggcgatanaa

SEQ ID NO: 83615 - DNA, 713 bp, Arabidopsis thaliana columbia
atggaacttctacttaaggtattaatggattctcacaagactctggttccctccatttatcgattatcaacaacctaaggaagaaaatagagacaagagaagaagatggtgagtatcgttgtacacaaaccaagcttctcttatccatctgtatcggcttcttcaatgaaaaagaaacccaggcactcaccaacagttgtagcaacacagacaaaaccaatacaacaacaatggattcacttccctctctttcaccaaaccatcccccactccttttttgatcgaaaaacaatccattcaccggacccaactcgaagctttagactctgtcattacagacctcgaaacctccgctcaaaaaggcatctcattaaccgaaccagagatcttcgcttctcttctcgagacctgctacagcttaagagctattgaccatggcgttagagttcatcaccttatacctccctatctcttgcggaacaacctggggatttcatcgaagcttgttagactctacgcctcttgtgctacgcggaagttgcacacgaagtgttcgatcgaatgtctaagagagactcatcgccttttgcttggaactctcttatctcagctacgctgaattgggtcagtacgaagacgccatggctctttactttcagatggctgaagacggcgtgaaaccagaccggttcacatttccacgtgttttaaag

SEQ ID NO: 83616 - DNA, 364 bp, Arabidopsis thaliana columbia
atcaataattaattattaataaacaatttatatttttccgatgtttttattacaaacccgattgggttttaccaaaaatagcggaaaacactatttaagtatcacaaataacaaatcccacccaacaaattttcaatttccccactccactccttaaaaaccctcccaaggtcaacaaaaaaattacagagagctttgtcttagtaactaaaaatacatatatatatatatatatatattaatacaaactggaatatccccctaaatttattcttataattcaaatccctattactaaccagaacgcagacttcactagttcaactataacctaaaccgaaccaccttctaaactaagacgctc

SEQ ID NO: 83617 - DNA, 477 bp, Arabidopsis thaliana columbia
  unsure (1)..(477): unsure at all n locations
atgaaagaaaaaaacttaaatatccaaattgtcaaagtttccattctatgacaatgaaaggctgtacctaacatttctgccttgatgcgaaaaccaaaaaaaaaaattcaaaatgaatccaatcgttctctcattgcaacctcgaagaagaagaattactattcgtagcctcctttgactgacggagcagatcctcctccaccagaaccatccaccgtcccaaacacaccgggaaaccatcggtattagggttggttcatggttactatatccaaccacggggattcacgttggttcaaaggaaacatgtaanggccggttccggtgggcttnaaccggcgngttaaggctggggaattttatttgcccanggggctttttttnnaangatccnccggnngggtcccgcctttaannnggggggnaaaaaggggggtttttttnngggccccnnaaaacatggggggggggcccccc

SEQ ID NO: 83618 - DNA, 313 bp, Arabidopsis thaliana columbia
  unsure (1)..(313): unsure at all n locations
tttttttttngaanggcgntnnccngggcccctaantgggattttaatactaatccaatggtgacgacgcatacaacacatgaatcttttcttttctaatcaacacaggagtctttcctttccttttgtaacatcaacacaagaatctttcattttattttatttgattctacttttccatactaatggttgggtcatcaataaatccattcctcggggagaagtttctccggcgaatcaataggattttctgcttcaatcttgataggtgttgttgccaacatttcgctcttcttcttcgaatcattttctc

SEQ ID NO: 83619 - DNA, 355 bp, Arabidopsis thaliana columbia
agaagaccaaaatgggcattctgatttgttacccaagtaggagttggacattcatacattcgtatgttcatatacggaaaaacgtcttctcccgttaagtgagcactgttatgcttgctacaccggccatttaagacaactttgattcctcagcttttccatgatccgagtaaagaccttttcctacaactaaaatgacaccacttgctcgttgagtatgaagtttggcaggctggatgattctgatggtttagggttggtttcttcaatcacgatctcagttgaagaatcacttgagaatcctagcttctccattattttttctaatcttttcccgtttgtcagataccggacg

SEQ ID NO: 83620 - DNA, 397 bp, Arabidopsis thaliana columbia
aagtggctctcaacgttggtgtaaaccaacttcgtcttccgtgtgttgcgtgatctcattgctctctccattcttgctcctcttgcttatatccgtgataagagaacaagacctcctttgaatcgacagtttctcttagctttcttcttccttggtttaacagggatatttggcaatcagcttttgtccctcattggtctgaattacaccaatccaacttatgctgcagccattcagccgtcgatcccggtttatactttcatcttggctctcattatgggagagactgaatttattcaagctagcaaggtcaagctaaggtaggaggcacactgatttgtgtcgctggggcggtgctgatggttttgtttcgtggaccggctttgtttggggaaac

SEQ ID NO: 83621 - DNA, 443 bp, Arabidopsis thaliana columbia
  unsure (1)..(443): unsure at all n locations
aagacatggagtcactcgccacagtacaagatcggttattgccaacagtgtccggacaaggtgacatggccagaggccaagcttggtcctaagccgcctttgcacttcaacgccggtatgttcgtttacgagcctaacctctccacttatcataacctcttggagacggtcaaaattgtgcctcccactctttttgctgaacaggattttttgaatatgtacttcaaggacatatacaagccaataccaccagtgtataacttggtcttggcaatgcttttggaggcatccaggggatatagggctttgacccaagtcaaaggtgttcacctactgtcctgcttggtgctaaaccccggtggggctttcaactggggggagggngggggnaccttgggcctgggtggnccttttagngttncttnntaaagaatttggggggg

SEQ ID NO: 83622 - DNA, 751 bp, Arabidopsis thaliana columbia
gcaacttacaatatgtaacaacggctacaactgttttgttccattactcaaaaactcttaccaaagccggggttggttcaatccagtgcggttcgaccaagttcaccgtatctcaaattcgaaattttgccaaatcacaggttgattatatccttggaaataatccaatgaatttgtcttacatggtccggatttgggacaaagtatccaacacaacctcatcatagaggctcatctttaccatcgatccaatctaaaccggagaaaattgactgtaatggaggatattcatactacaattctgatacaccaaacccgaatgtgcatattggtgcaattgtgggcggaccgaatccatccgatcagtatagcgacaaaaaatcagattactctcatgctgagcccacaacttacatcaacgccgcctttattggacctgttgcagctctaatcagttcttccggataaactcacgtttagattggttgtggggaaacaaatattagcgaaggagaatcattactcatcaacaaactattatgactacaaacttaaataattagtcaggggatgtctcgtttgctttaaacatatatctctatatagatagtatatacctaccgcacatacacacactctcatatttttcattgaatcgcatatctcagcctaagatggaaactatttaatcacagatggctatataggcttccttatctcattgtattgtatagattttttatgatacatt

SEQ ID NO: 83623 - DNA, 490 bp, Arabidopsis thaliana columbia
  unsure (1)..(490): unsure at all n locations
gccaaatcgactggtctcagagttttctcgattttttttggaaagatgcaggtaatagcatctttctgttcgaaacctaatgagaatgaatttgttggtcgacgacaacttctttcttcagtctgttccaaaatttctcaaggcgacgtcgtttcacacccacccgtttcttctgtcaaggttactcaagattggaagtcgaatttacatgagttagctgtgaaaagtgtcccttcgacgacaaggagaatcttgttgacaagtttattcatgaatttgtgctttaatccttcaaggtacttatcagccttagcacttggtgatccatccgttgcaaccgttgaagatgttagtccaactgttttcccagctggaccttttttccctactgagggggggaattgtgcaactgtttgagaagaatactttttccgttgtcaacaactttnatgnggcatnacgggctaagccaaaanaacggggtnggtga

SEQ ID NO: 83624 - DNA, 258 bp, Arabidopsis thaliana columbia
gcggttacatgagagcgtctgttgatacagaggtgttcttgagtgggatgatgcagattgaaacattcaatgatcttaccaatgactgtagagatggaatcggcacttgcagcgtagcagcaagctgatcgctctggtaagtatttcaaaagcttgttatcagagacagttgtttgtttgtaggttgatagaaaacttgaaccgtcttgttccacttgtttccactttggtacctatagaatagctgtttgtatgttc

SEQ ID NO: 83625 - DNA, 384 bp, Arabidopsis thaliana columbia
gcaggcagtaatctcctccaagtctcttctaattagctgcaacagagccagccatatgattcttgttgctactaaacctaaagactctcgcggaagcagcagcgatgagatgatgatgaatgatctggatgagataatatttggtgagaatagtttgggtcattcttcatctgcctctggaaatgatcagaagaagcagaaatcgtctaaaaacaatgagctcattcacttgtgagatgtgttttgtttttcttagtggatttggattggtgtttagtctttgggaatatgcatcaacagttgttatgtaagtaaactaaaattagcagccttgtgggattgaaatatatttagggtgtaacctgtatatttcgctgcaaaaaa

SEQ ID NO: 83626 - DNA, 1150 bp, Arabidopsis thaliana columbia
  unsure (1)..(1150): unsure at all n locations
tagggaagcctggacgcctgcaggtaccggtccggaattcccgggtcgacccacgcgtccgaggagatcctcatccagcatgagaccttccaagactctctntgtgattaactttgatgcggataatactaggacccgggatctagagaaacactttgagccgtatggaaagatcgtaaacgttaggatcaggaggaattttgcatttatccagtacgaggcacaagaggatgccaccagagcattggatgcttcaaataacaggaagctgatggataaggtgatctcggtggagtatgctgtgaaggatgatgatgctagaggaaatggacacaggtcctgaaagacgccgtgatagggcacctgaaaggagaaggcgatcacctaagtcttacaaaagagaaagagggaagccctgactatggccgaggtgctagtcctggttgctccctacaaaagggaaagggctagtcctgattatggtcgtggaagacgcagccccagcccttacaagagagccaggcttagcccaaattacaaaagggatgaccgtaggagggagagagtggctagcccagagaatggagctgtaaggaaccgaagcccaagaaaaggacgtggtgaaagcaggagtcctcctccatatgagaagaggagggaaagcaggagtcctccgccatatgagaagagaagggaaagcaggagtcctcctccatatgagaagaggagggagaggtcaaggtcaaggtcgaagtcaagccctgagaatggtcaagttgagagccctgggcaaataatggaagtagaagctggaagaggatacgatggagcagacagcccgatacgcgagagcccctctcgttcgccgccagcagaggaatgattggagatgcagacagatgattgtgttggattcacaaacaaaagatgtctctcaaagtagttgtatccgaaactgaagtcttttgctatgtcatgtagtatttagtgtgttattttgggtctttgttaagtgttttgtaaactttattatgactccattcgaaatcgcttgtcgtagtataagttaaaaaaaaaaaaaaagggcggccgctctagaggatccaagcttacgtacgcgtgcatgcgacgtcatagtatgctatagtgg

SEQ ID NO: 83627 - DNA, 402 bp, Arabidopsis thaliana columbia
acttcttctagggcttccacgcgactacgcctgccaaaatcattctacaggaagcatgaagccagtcttctgtgggaactttgagtatgatgcgcgcgaaggtgacctggaacgactattcaggaaatacggcaaggttgagagggttgatatgaaagctggatgtgtttgataatcttgggacgcctatactcacacctggccatgaatggaccatagggaaatccatctcttatccctcaaaatcagtcactttccatccgcattagcactgccatcttaattgcatttcattcctcatcactttgcacacttggacatgcctctgcaatgggggaacggctctctattttcattcatatccccgtctgacttccacattttcagttgttccttgacata

SEQ ID NO: 83628 - DNA, 432 bp, Arabidopsis thaliana columbia
cacgcgtccgaacagataaaatctagagaagcttgtttctagggtttcgactctcgacggccggtacgatttttcaactgcttgttctaaggaatcatgaagcctgtcttttgcggaaactttgagtatgatgctcgtgagagtgatcttgagcggcttttcagaaagtacggcaaggttgagagggttgatatgaaagctggatttgtttcgatcttgggatgcccattctcccacacagcccattgatggacaatatggaaaatccatttcctgcccaaaagagtcaacctcatccacgcaatggcactacgttcccataaccccgactttagttgcatttcattcctcttgacttttctcctcttcgagatgcacatgcctctttggtagacttataccaacctctcacagcagaggcagcaaatcaaa

SEQ ID NO: 83629 - DNA, 1508 bp, Arabidopsis thaliana columbia
  unsure (1)..(1508): unsure at all n locations
nnnnnnnnnnnnnnnnnnnnnnnnnnnnnnnnnnnnnnnnnnnnnnnnnnnnnnnnnnnnnnnnnnnnnccacgcgtccgtacggctgcgagaagacgacaggtcgacccacgcggaagaaagcaaataaaatctagagaagcttgtttctagggtttcgactctcgacggccggtacgatttttcaactgcttgttctaaggaatcatgaagcctgtcttttgcggaaactttgagtatgatgctcgtgagagtgatcttgagcggcttttcagaaagtacggcaaggttgagagggttgatatgaaagctgggtttgcttttgtctatatggaagatgaaagggatgctgaagatgcaattcgagcgcttgatcgctttgaatatggtcgcacaggacgcagactccgtgttgagtggacaaagaatgaccgtggaggtgctggaagatcaggtggttcgaggagatcatcttctggcttgagaccttccaagactctgtttgtgatcaacttcgatgcacaaaacactaggactcgggacttggagaggcactttgagccgtatggtaaaattgttaatgttagaatcagaaggaattacgcattcatccaatatgaagcacaagaagatgctaccagagcactggatgctacaaattccagtaagctgatggataaggtgatctcagtggagtatgcagtgaaagatgatgattcaagaggaaatggatacagtcctgaaagacggcgtgataggtcacctgataggagaaggcgatcaccaagtccttacagaagagaaaggggaagtcctgactatggccgaggtgctagtccagtagctcacaaaagggaaaggactagtcctgattatggtcgtggaagacgcagccccagcccttacaagagagccaggcttagcccagattacaagagggatgaccgtaggagggagagagtggctagcccagagaatggagctgtaaggaaccgaagcccaagaaaaggacgtggtgaaagcaggagtcctcctccatatgagaagaggagggaaagcaggagtcctccgccatatgagaagagaagggaaagcaggagtcctcctccatatgagaagaggagggagaggtcaaggtcaaggtcgaagtcaagccctgagaatggtcaagttgagagccctgggcaaataatggaagtagaagctggaagaggatacgatggagcagacagcccgatacgcgagagcccctctcgttcgccgccagcagaggaatgattggagatgcagacagatgattgtgttggattcacaaacaaaagatgtctctcaaagtagttgtatccgaaactgaagtcttttgctatgtcatgtagtatttagtgtgttattttgggtctttgttaagtgttttgtaaactttattatgactccattcgaaatcgcttgtcgtagtattggttaaaagattgctttttagtttggattacaaaatccgactttagatg

SEQ ID NO: 83630 - DNA, 1435 bp, Arabidopsis thaliana columbia
gctctaatacgactcactatagggaaagctggtacgcctgcaggtaccggtccggaattcccgggtcgacccacgcgtccgcgagcttcttcttcttctagggcttccacgcgactacgcctgccaaaatcattctacaggaagcatgaagccagtcttctgtgggaactttgagtatgatgcgcgcgaaggtgacctggaacgactattcaggaaatacggcaaggttgagagggttgatatgaaagctgggtttgcttttgtatacatggaagatgaaagggatgcggaagatgccatccgagcacttgaccgctttgaatttgggcgtaagggacgcagacttcgtgttgaatggacaaagagtgaacgtggaggtgataaaagatctggtggtggttcaaggagatcctcatccagcatgagaccttccaagactctctttgtgattaactttgatgcggataatactaggacccgggatctagagaaacactttgagccgtatggaaagatcgtaaacgttaggatcaggaggaattttgcatttatccagtacgaggcacaagaggatgccaccagagcattggatgcttcaaataacagtaagctgatggataaggtgatctcggtggagtatgctgtgaaggatgatgatgctagaggaaatggacacagtcctgaaagacgccgtgataggtcacctgaaaggagaaggcgatcacctagtccttacaaaagagaaagaggaagccctgattatggccgaggagctagtcctgttgctgcctacagaaaggaaaggaccagtcctgactatggtcgaagacgtagcccaagtccttacaagaaatcaagacgtggcagtcccgagtatggtcgtgaccgcagaggcaatgatagccctcgcaggagggagagagtcgcaagccctactaagtacagccgcagtcccaacaacaagagagagaggatgagccctaatcacagcccgttcaagaaggagagtccgagaaatggggttggtgaagttgaaagtcccattgaaaggagagagagatcgaggtctagccccgagaatggccaagttgaaagccctgggtcaataggaagaagagacagtgatggtgggtatgatggtgcagagagcccaatgcagaagagccggtctcctcgttcgccaccagctgacgagtgataagagtggatccacaatctctatcaaagtaggatgttgtaactgtttgtagtcaacaacgctatgtcgtcgtgattagtttttgtcgtttggtttttgatagattcgaactcggatcacttttattgtcggattgaaaaacttatgtcaagttactacatttccggtttcaaaaaaaaaaaaaaaagggcggccgctctagaggatccaagcttacgtacgcgtgcatgcgacgtc

SEQ ID NO: 83631 - DNA, 476 bp, Arabidopsis thaliana columbia
  unsure (1)..(476): unsure at all n locations
aaagaagcaggtgagtatcaatggagaagagctacatgaagcatgagctatggggagatggagattttcaagaagatgatgtgtgggatgttcttgatggatatcaatcaccgtttatgattagtagtaaccatacgactaaaccttctttctcaacccaaactttacttccaagcgaacctagaatgattcctgagaggcagaggacagaaggaatggcacctatgagacaacagtcggtccctgtcaatgtccctgattggtcaatggttcaaagaaagaagacaaagaaagttgttgatgatgagaatgtgtcaccggaggaatatttcctgcggcgcagtcgatcatcatcgtcgtcttcagttatggaaggagttggaaggaaactgaaaggaagggggtttgtgcaaaggtaanggaatncaattttttagccaacctgggttnctttngntgnccaggtttttttaaat

SEQ ID NO: 83632 - DNA, 513 bp, Arabidopsis thaliana columbia
gataagtgttacaagatcttggggtattttaattgtacgcgtagactcagcgactctctccaggaaggttactaccaagctgcgatctacgagtgtgcatcgcaggcgttcaaatttattgatacccctaaccctttcaacctgtggcccaacaaggatcctttgtccgtgaacgggaatctttattggcttgctcataaccaccctgagactcttgagtatttcatcgaaacctttgatttctccatggagattttcaaacccttttgtctactgccgtgtcggaaggactttggtagcaatgaacttgtcctggcggtttttaaggaagatcggttttcaattgttaaagcaatgtttcggaacaacggaggttttgagattttgggtaacaaaggttgaaggttgctagagagggggaagtggggtttgggataaagtttatgacattgccgacaaccaacttgcctaatctagatgatacttattgtcgcagtagttacttcatctttg

SEQ ID NO: 83633 - DNA, 421 bp, Arabidopsis thaliana columbia
  unsure (1)..(421): unsure at all n locations
gcttataatgagaccagccatgcagaactcaacatcacaagaaggtaatatcaggcatttggtgtatctncttgaaaatgcaatcataaatcttcccaagggacaaaaacaaatgtcttggctcattgatttcactggttggtctatggctgttaatcctcctatgaaaacaacacgcgaaatcattcacattctacagaactattaccctgagagactcggtatcgcctttctctacaatccaccaagactcttccaagcagtctacagggctgctaagtacttcttggacccacgtacagctgaaaaggtgaaatttggggacccaaaagacaaagcaagtgatgacctgttgccggcacatttngcngttgggatnttccccaggnatttggggggttaggaacacttgggnntngtc

SEQ ID NO: 83634 - DNA, 450 bp, Arabidopsis thaliana columbia
  unsure (1)..(450): unsure at all n locations
tnttgccattggtagctatgatcaaatgttgcgggtcctgaatcaccttacttggaaaacattcgctgagttcttacacctatcaacggttcgtgcgccctgttctgcggctattttcaaggaaatcgatgaaccattacagcttgatatgtctgagttatcgttggatgaaaactttatgccaagcaattatgatgcttcagaaggctatataagtgtcaggtatgaagtcatggaattaccggtagcttttcctttccagaaacctcctgcggacaagcctaacccaaaacaaggagtcggccttctagcttggagcaaagacaggccagtacatatgcacacggaacggcagtatgcccactgctctgtggntatgggacatgcggctnctcgaggttgcagccatcctggtccagaaggnacccatccgagcagctntgtgggatg

SEQ ID NO: 83635 - DNA, 478 bp, Arabidopsis thaliana columbia
gacaatattgttcataactgtattgcaaacaagattatcccttctctgcctcatatcaagcatacatggggtgatgaatttccaatttcggaaccagattgggatttgatcatagccagtgatatccttctatatgtgaaacagtacccaaacttgattaagtctctgacttttcttctcaaaaaatacaaaccaaccaatgtcgttagtccagcagaagacacagaactgcctcgtcctgtgttcttaatgagctggagacgaagaattgggaaagacgatgagtctctattctttacgggctgcgaagaagctggcctggaggtgaagcatctcggaaaccgagtttattgtatcaagcttagaggaagcaacctctgaaggataggctgacaaactcatgaatcatccacatgctcgcctctgaaactaaaggacggtttcaaaaaggtaaggatggcaaagtgacaacaattag

SEQ ID NO: 83636 - DNA, 393 bp, Arabidopsis thaliana columbia
  unsure (1)..(393): unsure at all n locations
tatcacacttgtactgtggattctccaagacctctgcagaatgcctgtggtttggttcggttacatggcatacttgtnctatctcatattctttccttggttctccggtgaagtgtttactgattctggagacagagcatacatgactattatgggatgggtggtgacgagctcaggcgcagataggaaacatgaatacattggacaacctgatgtaatggttgtggtgatcccacatgtggtctttgttgttatccccagtgtcttggttgtgtgttgtctggttgctgagagagaaatctncaangtcacattcgaactgttntnctggtnagaaagaggttgnccatnnnccggggaaggaagaagggtcaaaacgncggtnactgttat

SEQ ID NO: 83637 - DNA, 670 bp, Arabidopsis thaliana columbia
cacagttcaagcttcacgccaagttaggtggaggagatggagaagtgaagcctaaagataagaagaagttcattaccaaagatgaagaaccagaacagttagttcatcttaattctcaattttttccatcatgagattgtagaaaataaacagaaactcattggatggtaatgtaattttagtctcctttgcagaatttagattttgtttggtatgtgacaatgacatgtagactagtggtttgtgttagtattgtatcaatacacgaaccataaatttgatcgaaaatatttggtttttgtaagttagtcaaaagaatcttaaactcttgcatgcacatttttcataaacatgcaatattgtgactgacgaaatggttatggatgagatttgcattacaactttataggtattggcaaagcgttggagaaagagaaggagagaatccgatgaagacgcctcttccttacattatcatcttcggtatgtcaacgccattcgtcatcttagccattgcttttgccaatggttggatcaaagttcccattcgttgatagcctttcttttttgcttctgctacacttgtgtaaggctgaatcttaaacatgcctattccactccccttcttcggctgtaaaaatagcaaaattaatagaatggatcatatgtt

SEQ ID NO: 83638 - DNA, 525 bp, Arabidopsis thaliana columbia
  unsure (1)..(525): unsure at all n locations
ccacgcgtccgagtatgttggaaatggcagcaaaactctgcattccctcttcttcgtttagccacagaactaatgattccataacctcatcatcttcttcatattcatcattgcttgctttgcctcaattcttctgtccaccatctccattaggattcccacagttcaagcttcacgccaagttaggtggaggagatggagaagtgaagcctaaagataagaagaagttcattaccaaagaggaagaacctgaacagtattggcaaagcgttggagaaagagaaggagagaatccgatgaagacgcctcttccttacattatcatcttcggtatgtcaacgccattcgtcatcttagccattgcttttgccaatggttggatcaaagttcccattcgttgagcccctctctttgttttttcttcacttgtttaaggctgaatcttaaacatggttcctatactcttcctcttcggctgtaaaaaaagaccaattatagatgcaatccnatatatatggggcttgc

SEQ ID NO: 83639 - DNA, 465 bp, Arabidopsis thaliana columbia
  unsure (1)..(465): unsure at all n locations
aaaattaagtaaattaaaattaacaaaactggtaatgtacaatttgctctattccaaatgggtaacatatatatatatatatatatatatataaatatataaggaaatggagtccagcagctttgactacatccacaactatttatacctaagcaaaccacctggtaactggtaagggctatctctttgccaataacaaagttatggctttctcgggtaagccagcgtcanatcagctagtcgggtatgccaatctccaatatgagcnaccaaaaccggacactgctgccgtgtttccgactttttaaaaaaaatggggtttccggggaaccaaggttgttgagcctcctgaatcggtgggtcaacccagggttccaccgggcaaatgncgggcnnaatgtatnggnnccngaaccggggaaacttttntgggggggaancccggtttanggccccagggggttt

SEQ ID NO: 83640 - DNA, 420 bp, Arabidopsis thaliana columbia
  unsure (1)..(420): unsure at all n locations
aagcttcacatacgtactattcctcttggagagcatnctcgtcgaatttnccatcaggagcagacacgtacatttggtatctgcagtttgggaaaccagtcaaattccgaagaatctgaaatgcactttgtccgtcttttggacgaccagactttcgagtttatgtcaacttaccccttggattcctttgaatatggttgttcaattctgagctgctcattcaccgaagataaaaatgtctattactgcgttggaaccgcatatgttttaccggaggaaaatgaaccaactaagggaaggatattagtatttatagtcgaagatcgggaggttgcagctaatcgccgagaaagaaaccaaaggagctgtttattctcctcaatgcctttaaatggaaaacttcttgctgctatttaatng

SEQ ID NO: 83641 - DNA, 454 bp, Arabidopsis thaliana columbia
  unsure (1)..(454): unsure at all n locations
caaacatataaaccataaggaaaacagagaaagagagagatggaggacgacaatagtaacaacaccaacaacaacaacgtgatcgcacctttcatcgtgaaaacatatcagatggtcaatgatccttccaccgattggctcatcacttggggacctgctcacaacagtttcatagtcgttgatccactcgacttctcgcaacgaatcttacctgcttatttcaaacacaacaatttcagcagttttgttcgtcaactcaacacctatgggtttaggaaagtggatccggaccggtgggagtttgcgaacgagcattttctaaggggtcagaagcatttgttgaataacatagcgcgttggaaacacgcgcgggggatgttcggtcaagattttgggggccggttaggtttttaggggggtcgaccggtttaaaagagggcnnaggggncttgng

SEQ ID NO: 83642 - DNA, 544 bp, Arabidopsis thaliana columbia
  unsure (1)..(544): unsure at all n locations
tagaagaccaagaggaatgtacttcagcgccaaagacaaaggagagatgatgtctatgatttataactggcctgctccgcaggtaggatatgattgtcatcactgatggtagccgtattttgggcttaggagaccttggagtacagggaattgggattcctattggaaagctcgacatgtatgtcgctgctgcaggaatcaatccacagagagttttgccaattatgttggatgtaggcacaaataatgaaaagctcctacagaatgatctctatttaggagtcagacaacctaggttggaaggagaggagtaccttgagattattgatgaattttatggaagcttgcatttacacggtggccaaaggccgtccgtaccagttcgaagattttccaaggcggaaatgggcttttcggaaccattttggaaagattatcgggaggaaatttttccatttcccaaatnntggttgtccccgggnanctncctgggttttnacctggcttggcctttttgggnnccttaaggncncaagggntggcc

SEQ ID NO: 83643 - DNA, 529 bp, Arabidopsis thaliana columbia
  unsure (1)..(529): unsure at all n locations
caaaatcagggagaagctgaatatatcgtcagtgtctatatatacatgagattgttaggatatcctgcgaataagatatcaatattgacaacatataacgggcagaagctcttaatccgtgatgttatcaaccgacgatgtgttccgtatcctttcattggcccgccgagcaaggtgactacagtggacaagttccaaggacaacagaatgatttcatattgctctctcttgtacggacacgcttcgtaggtcatctacgtgatgtaagaaggttggtagttgcaatgtcacgtgctcggctcggtttgtatgtgttctgccgccgttcgctctttgaacaatgctatgagctgcaaccaacgtttaacttctttcttnaaagacccgtccggttcgggctcaaatttaaatgggnccacaggctttanaagatccgttttgggtggnggnaggttgaaaatntttatntnggncnannattttnaggnngtggnacananagtttccgcaaggttnacaagtttttcc

SEQ ID NO: 83644 - DNA, 535 bp, Arabidopsis thaliana columbia
  unsure (1)..(535): unsure at all n locations
aaggataaacaagcttgaatactcaactagaagttacaaaaagtcggtgtggtaaggtcagacaatgctatttttttcctcatgtcatgtatcacttaccagaatttactcaaatgcagtaaaattatcttacagtagcaaaaaaaatccatgtttcaaacatcaactcacttatcaccctcccgaaaggataactttgaaattcccagtttgttttgtcctaattcttctcatcagcctttccattctcactgctaaatccattattgtccacctccattccaaccacctccttcggataattcaccgtctatgtctgggagattgggttagctgctgcatatttttttcagattcatcaccatctactactggatcactctccagncggggataccatctccatcngggccaagtggtttgggatggccaaaggccctgggccgggaanactggtaanccggngnaacangggggcaccntcaaaatcnggcggggaagattcantccccccacggtggaagggggccaaaat

SEQ ID NO: 83645 - DNA, 464 bp, Arabidopsis thaliana columbia
  unsure (1)..(464): unsure at all n locations
aatatgaatgaaatcgccttttatattccgttgcaaaaaacaatctgatttcattcaagaagaaataattaataataatgaattcaagaaactgaaaccacacttgcacacacagagctctcttcagcaaccacaagcatctctttaatcatctcttgactaggaggagactgtgaacggtcagcgggtgaagaagtcatcaacgtcgatacgaaaggggaaacttgtgtcacctcttcactgccctcgtctatgtacacaacgtcctgcattcgtaagctggtggtattcaactatctcccccaagaaccgggtttncccccgcatacacagaantttcatgngccaaccgngctttctctgccagnagggctccagctggngncgatcaaatctcggntgcagggngngtccttccacggggggcccnncanngttggccntcccaagtgggaaaggcttcg

SEQ ID NO: 83646 - DNA, 780 bp, Arabidopsis thaliana columbia
  unsure (1)..(780): unsure at all n locations
gagaaaaagaagaagaagagcaagtcgaaatctgttgaggctgatgatgataaggagagggtgtctttgaaaaggaaaagaccggagcctgaagagactaaagaagagactgaggatgatgatgaagaatcaaaacgtaggaagaaggaagagaatgtagttgaaaacgatgagggtgttcaagagacacctgttaaggagactgaaactaaggaaaacggaaatgctgagaaaagtgagacaaagtcaacaaatcagaagtcaggaaaagggctttctaactcaaaagagccgaagaaaccgtttcagagggtgaacgttgacgaaattgtgtacactgagaatagcaactcgtactattcaaagggtggtgctgaaattggctatggtcttaaagctcaagaggttctcgggcaagtgagaggaagggatttcccacatgagaagccgaagaagaaccgaggaagctccagaggaggattgatcgatcaagagtcccattcgactaagtttaataactcagacgacgaagaatgattgataagcagacaaccctgcctttttgacattgcttcgtttcgatttatctttttcttttcttttgctttgatcatttcaatacccgtaatagggctcaagttttgtgtctgtgcactcctttgatacttatatgaacatgattcagtttcagtttcttgttcaaaaaaaaaaaaaaaaaaaanaaagggcggccgctctagaggatccaagcttacgtacgcgtgcatgcgacgtcatagc

SEQ ID NO: 83647 - DNA, 440 bp, Arabidopsis thaliana columbia
gagatttgctttctctaccagagagactgttacagtagtagtagctacttttgcttgttgtcttcatttcaaatctgcaattttactttctttttgagttctaagtgaactcaacatttagcttctttttcttttctaggtttcataaaaacagtttggatcttaagctcacagctgaaaataacccgactttgattactgggtatataaaagccgccattgttgttcttttcactctttgggttattagggtttacgatttctgggtggtagataaatttgttcttcaaaaaagtttccttttttaaaaaatctcttagattcttaaagaattgtaatttagggttttaaatgcatggatgggagagaagctatggcatttccaggctcgcattctcagttctatcttcagagaggagtttttaccaatcttacacctt

SEQ ID NO: 83648 - DNA, 522 bp, Arabidopsis thaliana columbia
  unsure (1)..(522): unsure at all n locations
aattctcaaagtggttataaactattagaagcacttcctgagcatcaagaatttccaatcacttctnttcctccaattgagaagaagttatggtcacgattatggaaagtccaaaccatgcctaagataagacatttcatgtggaaggctctagcgggagcattagcagtttcagacagattgcaatcgagaggtatccacatagacctaacttgtaaaatgtgtgggaaggaaactgaaaccatatgccatgttctcttccattgtcatgtggcaaaacaatcttggggactctctaatatccctgctcccgagatgggtttctctaaaaactcagttttcttaaacctttttcaccttcttaatcgtgctgaaagacggtgacagtctcaccaataatacacaagtttttcccttggctttttgtgggcantaatggnagnccnggaaactcattttgtggtttnaagggnangcnctttgatgctaacaggatttnggtnaagcccnngaaggtcnntc

SEQ ID NO: 83649 - DNA, 478 bp, Arabidopsis thaliana columbia
  unsure (1)..(478): unsure at all n locations
caacaacagactaaaaatataatataacaaaaacacaagaccattttatgacgaaattaagaacactaagtaaatggactgataaaacaaaacaaaaacaagtccagtaggactgcaacaataaaacgtaaaggcacgaagtccctgaagaagaatctcaaaccaagagcttagattcctctatgatgatttctcgtagccacaatggcccctcccgtgcaacataagattggtaacgatgatctctcgtgaaacttgttgctatttcattagccacccgnttacattcagttgcagaattaactataactggaaactccaagggatccaaaatcttccaatgtctggatcaagtgtcgaaanngggggntctatgtgggtacgcattgcttccctaanttttggggngaatcccaagtgacttgtttgncanggactaagntcactgnccnagngggcaggtcgttaaaggtgattt

SEQ ID NO: 83650 - DNA, 686 bp, Arabidopsis thaliana columbia
  unsure (1)..(686): unsure at all n locations
caatagaaaagttactttatttccaatcttaactattcttacaaactgtacaaatcaatgcactatttaagagaaacaaaatgattattctaaggaaatagaagaaggctcgcataaacacgaaccactagatgaagagcctgattcactactagagctactcgaactgctgctttcattatttctacatgcagcatctttttctatcttaagaggaggatggcttgagaccgaggggtcattcccaccaactatgtcaacatcccccggcaaatttgcagatcacctttactaggctgcaaaggggaattactgaatccagagtcatgaacaatctccatctcacaaggtccgctcttttccatggattccttttccccccttaaataggcatccaggagtttccggaccatgaacaagatttcatcagaaagcgcttctatatccttctcattctcaccttctccagattgaccatcactgccactttgctctctcaggagatcagcaatcttttgagggaaatcttcttctaatgccatcagatcttggcctaattttttcttctcaccatctgtcatgaccaacttagcaggttccaccctcagcttgttatcgttcattgcagcttccttctttctcatcggtgctacttcgaaagggatttcagactccanagaagcaga

SEQ ID NO: 83651 - DNA, 488 bp, Arabidopsis thaliana columbia
  unsure (1)..(488): unsure at all n locations
aaaacacacaaagctgcaccaagtagaggatagaagagaaaatcctgttttaacaaaaaaaagaagcaccatgaaatcaataacctattcgagtctaatgtttttttcatacaaaagaacaaattgaaacgtattccaaagtcttagtatttgaagtcactaaaaattgcagtcagagttggtgcaccagtgtccaacattgttgcttggctagctgaacttcctttcgcccattctactcctctgatttcatctctgtacatcacaattgttaagagtactaggctctactaggctctacgagtcgcgctgctaacccacaagaatcttcatcacttggtccttcacnaatcttcaaacccttgggtgggagcgtcccatagggntctcncgcggtcgnggttaaggccaagtcncgctagnaagcctaaagggggncggnccattaaaccccnggcaanggngggaccccanatgtgnaaagnggg

SEQ ID NO: 83652 - DNA, 328 bp, Arabidopsis thaliana columbia
  unsure (1)..(328): unsure at all n locations
agaggaatcacacagacaacatttccattaaaaatgaaaacaaacatgaagaagacaaagttagtaagcaaattccacaatgataaaacaaaccctagctaggattcgctcgaaatcaaacaaacaagtgaaaaaaacacaaagaatctcttcttaaaaatttcaactttcaaaacataaaagattagatctcacttagcaaccatccttgctatgaaatcttcataccggatctttccatcggatccaacatccacctccttgatccactcatcgagctcattaggcgccagctgtctcttcgatactggtcagantatgcctcagg

SEQ ID NO: 83653 - DNA, 361 bp, Arabidopsis thaliana columbia
aggtccaacaccaaaataaaaaatgtcatctcttcactggtttcccaatatcttcatcgttgtcgtcgtcttcttctccttgagaagttcacaagttgtactagaagaagaagaatccacagtcgttggatacggctacgtcgttagatcagtgggcgttgattctaaccggcaagttttgacggcgaagcttgatctgataaaaccatcgtccgtttacgcaccagatattaaatcgcttaatcttcatgtcagcttggagacaagtgagcgtttgagaatcagaatcacagactctagtcaacaaagatgggagataccggaaaccgttattcctccgtgccggaaacactctcctcgc

SEQ ID NO: 83654 - DNA, 440 bp, Arabidopsis thaliana columbia
  unsure (1)..(440): unsure at all n locations
caaagtacaaagtagttcgggttgacttgaaggaaccgagcagttggactgatgtnatcgctgaacatgaaaagnatgtnctctcaacagcttctgcagttaatggagaccaactggttgttagctacatgagtgatgtaaaacacatcctgcagattagggacttgaaatccggttccttgcttcatggattacctgtagatattggctcggtatgtggagtttttcctcggcgtaaagacaccacgtttttctttaggttcacaagcttccttacacctggcgtcatttacatatgtgacttatcccatgaagctccagaagtaacggtatttcgtgaaatcgggtgtacctgggttcgatagaaccttgcatttcaaagtcactcagggccttttatccgggtaaggacgggaccaggttttcccggtgnttttnng

SEQ ID NO: 83655 - DNA, 558 bp, Arabidopsis thaliana columbia
  unsure (1)..(558): unsure at all n locations
actctagtacattttctttataaaagaggagggactgtataattataatatagnagctctctctaaaacataacaagaaagaaaagctaatctctttgggtaaattctagtcgatccatgaagcatccaccatcttcgccatgaacgaatatctatcagccgcttcatcaatcatcttttgcgttggacgtcctgctccatgcccggcttttacttctattcgagcaattatagggttcgtctgtggactattctctaaactcaaacctaattcatattgcattggcgcaagcaacttgtaagaatgaagtgggacgactctatcgncatgatcagcagttaacaacatgggtgatgggnactgaaaaaacagatctgtcttctggtccccangggctcttcacattatgcagnggnggatactttatcagccaatgggannccccttcctggtcggacaaccaattccggnggcccagcangccnagggaaactttgnaccgggnatgcctggcccaaanggccngggncccaaaggccggnccggtatgagnccnc

SEQ ID NO: 83656 - DNA, 488 bp, Arabidopsis thaliana columbia
  unsure (1)..(488): unsure at all n locations
gagacgagaaatgtctctaaaaccttatttctctctactatactcatctcccactaatgtaaaactttccgacttcttaatcgctcaacaaccctccggtgacctgaaaactaccccggccgaggagttttctccactggttgagaaattcaaccgacggcttcttctgggtgtaggatcgtcctctgttcttgcgattggtgcgaatttcggaggaaccacgagttttatactcggtttatcgccagggataggccggaatctaaaactcgacgtcatttatccgattggaggatatagcagatgttatcgatacgggttgaaggattcgaatttatatatccggctacgtgggtttggagaccagacgcttttgttatagagcggcggagaagatcagaaccggggggaattncgttagacctttcttncgggaangaaaacagtngccggaaaaacgttnattnacccgttttttgattttggtc

SEQ ID NO: 83657 - DNA, 476 bp, Arabidopsis thaliana columbia
  unsure (1)..(476): unsure at all n locations
gcagnattncaacacaaaacnnaatntaggaatggaaancgtggaaaacncttccncnagcctaccacaccaaatgtacccaaacctaaagttaaagttgaggaaatatatacatacagttacctaactagatgtttgatcaaactgaactaaaaccatattgaagttaaccttttgattttatttcaacaagttaacctgaagatgtgtctgaggaagaagcatcagcttctgcttctgtattgttcctcttcattttcttctttctcacatgttcggaagaagaacataagccagaagtggaagagtccaagctaacaaactcgtcgtcggaagaagacttcgagttcgaaccatcaccaccggaatcagaaggatgaggactcaccgtgattttgattggcggaggaatcgggnacagaaacttctcgaaatcaaaagaaccgagtttgtttttcgattccaatcgactttgg

SEQ ID NO: 83658 - DNA, 553 bp, Arabidopsis thaliana columbia
  unsure (1)..(553): unsure at all n locations
caagctaattgtttcaaatttaggaagtgagagggtttttctttcacatttccacgcatgccaacccaaaatgcaaaatatatggtaatgttgtgaacaagaacttagatatataatatagaagaaagaagaagaaaatcaaaatctagtcaacttgaacaaagatggagatcgaagaagcttgtatgagccgttccgtttcatggccagaggatccgtaacaccaccaccgtatgatctatagggactacagacaaatccgcaaatcggggaattcgtgaaaccatcatcatcatcataatcatcatcatgatcatgatgaccaggatttagacttcatatccgccaaagccttggaagaagaagtcaacctcacaaggaaggacaatgggnccatccgcgtctatatccatactcagtctcagcatcttctaaacaagttcttgaccaangntgggtcagaagttttgnctcccaacaatccttgttcgngggccancgtaaaccgggaaaaccatggcgggggncttcttngggtcccttgatcggggnc

SEQ ID NO: 83659 - DNA, 438 bp, Arabidopsis thaliana columbia
  unsure (1)..(438): unsure at all n locations
aaaacaaagtctacacttctattattcagcgatacattcttgaactaacaaagatccatctctcaacaaaaccaatttagcaatgagaaagaaagagcaagtgtaacaactatgaccctttataaaaccttaatcagctttgtatcttgagctcatacacggaacaaaagcagaaaaatcgaacctttagatgatcactccaacacaactttagcaccaagtgctttcaacttctcaagaatcttctcaccttcttctttagacaaaccagctttcaaaatagcaggagtcttctcaacccaaagctttagcttcctttcaaacccaaatcagtaaaactccttaacccctttaatatcttaaccttagcagagggttcaaaggcncccacctttatccccaanacgggcttcnccactttagggtnctncacncaac

SEQ ID NO: 83660 - DNA, 611 bp, Arabidopsis thaliana columbia
  unsure (1)..(611): unsure at all n locations
acaaaaacagagaaagtgggagatagaagatgacggcatcaggaggaggatcaacggcggcgacggggaggatgccgacgtggaaggaaagagagaacaacaagaagagagaaagaagaagaagagcaatagcagctaaaatcttcaccggacttagatctcaaggcaattataaacttcctaaacactgtgacaacaatgaagtcctcaaagctctttgtcttgaagctggttggatcgttcatgaagatggcaccacttatcgaaagggttctcgaccaacagaaacaacagtgccgtgttcgtcaatccaacttagtccacaatcatcggcctttcaaagcccaattccttcgtatcaagctagccctttcatcgtcaatcttacccaagtccgacccggttttgacccggaatcaaatcctcggcttatctcattccctatctccaaaacctagcttcggcttngaaaccnggttctttacggatttccaaatagnggcccttgttcaccggccgntttttttancttggaggttaaatccggggttccgnggtggaaaggagaanttccngtttnggttcgtaagccaaagggggttttttttagc

SEQ ID NO: 83661 - DNA, 495 bp, Arabidopsis thaliana columbia
aactttcacacacttgcatttttcattatccaccattacatataaaaaaaaatactagattttgtgaaatgaagcattgataattgattatgactgtacaaaatagtcatgaagacaaataccaatctattagctacgatttaaccggaaccaatctcgttccggacccgactaaatagttaaaccacgatattaacctagccgcgtcctttggtgttgagacctagcgtcagctccaagtcatggataccaacatcgtgaatcttctcaccttcccacggcttcaccgacacatctactccgacggagctaacgctttttccgaccaggttaaatgtcggcgacggaggacatgtctgagaaacgttaaccgattggaaatttccccatcgacaagaatcaaccgtcgaaacatccgattcatcgcattctggaatcgatgtgtagtgatggagacgccgtgttgggcttgacggagctgagactgggaaatta

SEQ ID NO: 83662 - DNA, 593 bp, Arabidopsis thaliana columbia
  unsure (1)..(593): unsure at all n locations
gncaacgcaaacaaaccaccaatcaaaatcgagttcaatgaccatcaccgtactactgatgacgaccactcgccacttgccagtgcatacgagccaataccatcaagtagatcaacatttcgtacacatgatacgcataagccaatagagcaccgcaccattgtacaatcaccatactcacgcagcgagctgaagcaacgaggcggcagccttgtagcgctgttctggggcatgggcgaactcacgatcgcagtcggcttgattggcgtcatgggctacgtcgcatggacgttcatggacataggcaggatacaaggtgcaatcaacaacacaacgaagagcatacgcgagaaattcaacgaacgcaaaagcacgccatctgatgacgggcctgagtcgcgccatgctgctgatacaacggttcaacccaactgttcgttgaacccagnaacccgttgcggattggatnaaatgctttgcaacaacncctttgcnggttttctntttcggttttncgttnacgancgtttcnggttggttattcctaatttttttgggtggatttatttnttnttttnggtaattngnncgtc

SEQ ID NO: 83663 - DNA, 497 bp, Arabidopsis thaliana columbia
  unsure (1)..(497): unsure at all n locations
ggcatcatcagccaaattgtgtcattgaacattagtttttttcatgttgcatctcgatggtcatatcaaacaaaacatcacgcgcctgtgctcttgcctgatatgaagttgaacttcttgtgtgcaaccgccattatacgcgatgccttgctccagctgctaggtgacacacgcttgttgatatatgcttgatatgctgtttcagctggtgatggtatagcagcgctacgagacgtactagcacggaaaagctatcagacacggctgattgagcaggtatattctgtttgtgtactacgcctgctttgtcacaacgatgtaatgcgtgcatgacatcctccctcacatcattgcactccttcaagtaactcngggggcnccncatcanctatgtcaaaacgccgnaagtacgnccaaaaacncangcagnaattggcaaaancggttgccagnggatggnngngcangcagcctntggaaagnggatatttatcgtt

SEQ ID NO: 83664 - DNA, 749 bp, Arabidopsis thaliana columbia
taagggtaaggagcttaaaggtatagttttcccggttcttttttctcttgaaaaccagttgaacgagagcttgcatagtgtcaaggttcaaaagacacaaatcctgctcaaccagattgagagatccaggatacaggagaaaaaagcattggaagaaaaccaaatcttgcgcaaacaggttgagatgttggggagaggttcaggaccaaaagtgttgaatgaaaggcctcaagattctagcccagaagccgatcccgagagctcttcatcagaagaggatgagaatgacaacgaggagcaccattccgacacttccttgcagttggggttgtcgtcgacggggtattgcacaaagagaaagaagccgaagatcgaactggtctgcgataactctgggagtcaagtggcttctgattgatggaatcgattatttttctaattctgggtgtttagggggctctatgtgtcttcttgtttctggctgttcttttgctttatttcatctcaagtagagttttcttaatgtttaggtggaacatttttccataatcaagaagggatttgatcaatcaataacattagattttcttagttaaagacttaaagttgcccacacaccacaccatatgtgattatgatgaatttacattttataaaaaaaaaaaaaaaaaaaaaaaaagggcggccgctctagaggatccaagcttacgtacgcgtgcatgcgacgtcatagctggtcgatagtgtac

SEQ ID NO: 83665 - DNA, 451 bp, Arabidopsis thaliana columbia
  unsure (1)..(451): unsure at all n locations
attgcggaaagaatgaaagctcttcaagaactcgttcctaacggcaataagacagacaaggcatcgatgctcgatgagatcatagattatgtcaagtttttacaactccaagtcaaggtactgagcatgagcagattgggaggtgctgcttccgtttcttctcaaatctccgaggctggtggatcccacgggaacgcatcctccgccatggtcggcggtagcaggacggccggaaactccaacgacagcgttacaatgacggaacatcaagtggccaaactaatggaagaagacatgggctcggccatgcaatatcttcaagggaaaggtctttgtctcatgccaatctctttagccaccggcattctcaaccggcacgtgtaattccgtaacctttnatccctggggcttttccgncggcggngntcttccctnccantntttttgcatg

SEQ ID NO: 83666 - DNA, 1007 bp, Arabidopsis thaliana columbia
ggaaccctaaaacatcccgcttcgctgctcaggaccaagaatctcagattcaactgatctttgcaacatgacgagggtttatgtcgggaatttggacccacgcgtcaccgaaagagaactcgaagacgaattcaaggccttcggtgttcttcgcaatgtctgggtagctcgtagacctcctggctacgcattcctcgagttcgatgacgaaagagatgctttggatgcaatcagcgcattggatcgaaagaatgggtggcgtgtggagctttctcataaagataaaggaggtcgtggaggtggtggtggtcgtcgtggaggtattgaggattccaagtgctatgagtgtggtgagcttggacattttgctcgcgagtgtcgccgtggtcgaggctctgtgaggcgtagaagccctagtccccgtcgtcgtaggagtccagattatgggtatgctcgcaggagtataagcccgcgtggaagaagatctcctccaaggcgtcgcagtgttactccacctcgccgtgggaggagctacagcagatcccctccttatcgtggttcacgccgtgattctcctcgccgcagagactcgccctatggtcgacgttcgccatatgccaatggggtgtgaaactggaccctgaagagaaagaagctattactaagctatgatgctatatctactctgtggcgccttttaggatagatctttatatctgctattatggtattagctcttctaggtttggttgttgagcatggacatgtcatggtatgttcgagttttattagacaattggatttggtgagttctccttcatgctgttttccaacagccgtcttgacttattctctataacacgcactggcctgctgtcttcacacagcgtccttgaacccctacacttgaggtcgttctttcgtatccataaatgttttgtctcttgttgaatgcactttccttattatatagacatatctaaaaagctcaactgtttccactaaaa

SEQ ID NO: 83667 - DNA, 530 bp, Arabidopsis thaliana columbia
gcgcgagacagagaaagaaacctctctgagatacatctctctctctctctctatcccctcttaaatacactccataccgacaaaccaacttttttctcagtactaaaagaaacctctattcgatttctaaacaaaccctagatatagactactctacattcttccattaagttaatctctttcgtcttcttcttcttcatcctctcataattaaagatctctatcaagagagagatcttttattgtcttcttctgttaaaatcttttgatagatcttcactctctgaaagtcaagatcttagtctaggcaagtaaatatgtggtaaagcaaagcccttcttgaaattggtcatatatggctggtggtatcggaaaatggcaggatttttctcgttaggacacggcggaggaggaaacactccagacaaccacagaacaaacactaataatccttcttcatcgggaacagaatcttggctttggtgcagaaaccctaactctaacgctgacggtggagaagctggtccttc

SEQ ID NO: 83668 - DNA, 462 bp, Arabidopsis thaliana columbia
  unsure (1)..(462): unsure at all n locations
actagttctagacccttctcctatactcgattacagttccacaagttgttcaacttgcgcccgtgagtccactggtttcaggtacaaatgttcaaaaactgattgcgatgatgagataacaattcagatagattttcgatgcattttagttcctgattgtttcacccacaaaagtcatgaacatcctttattcatctccacatcatattctagaaaaggaaacatttcttgtgatggttgcaaagatagtgttcgtgatgagtattatctgcaatgtactatttgctcatttgctatgtgttatcgatgtgcgaccattccatatgaggttatactacaaaatatgatgcacatctttctgtcgctttgctatggggaagggtccaggggaaggcatatttggngttaaggtttcggggaaaggatttgatnccaggggatgggtntccnatngacaaaang

SEQ ID NO: 83669 - DNA, 711 bp, Arabidopsis thaliana columbia
  unsure (1)..(711): unsure at all n locations
attatttgtttcagtgggcacacacttgctgtgacttgtgtcaaatggggcggagatggaattatttatacaggttcgcaagattgtacgattaagatgtgggagactactcaggggaagcttattcgtgaattgaaggggcatgggcattggattaactcccttgcgttgagcacagaatatgtncttcgaacaggagcttttgaccacactggaagacaatatcctccaaatgaagaaaagcaaaaggcgctcgaaagatacaacaaaacaaaaggggattcccctgaaagattagtctcaggttctgatgatttcactatgttcctttgggaaccatctgttagcaaacaacctaaaaagcgcttaaccggtcatcaacagcttgtaaatcatgtctatttctcacctgatgggaaatggattgcaagtgcatcgttcgataaatcagttaggttatggaatggtatcacaggacaatttgttacagttttccggggccatgttggacctgtttatcaggtcaagttggtccgcagacagttagattgcttttgtgtggcgggcagtaaaaggcctctaactcttcaaagatattggggaaatttagggccggaaaaggtttaaaccaaggtcttcccttgggccatgcctgnttagggtttttttccggtgggntttggggtccncattgggggggaangttgnttt

SEQ ID NO: 83670 - DNA, 513 bp, Arabidopsis thaliana columbia
  unsure (1)..(513): unsure at all n locations
cccgggcngcccactgtgtccaatggcctaccaaccnggtaacgatgtcgccgccgccgcaacgtatcggcttgccatggcctgagcttaacgatggtttggcatacaaggatgccatctcttcttctgaatcagagttaacgacggtgtcagaattctacttcaccaaatacaagagttcagctccattgctagggtggattcaacgaatccaaaacggacagatacaaattgacggtgaagttgtaaaagatcccaacacacttcttaggagtggttcgaaattagtttacagtaggcttccttggaaggaacctgacacgccatactcgcttgaagttttgtatgaaggtgatgatttgatcgctttaaanaagncttctnggcttcaagtatttcccggnggctttttccagaacggntttttttnacggagctnnagtggtgttttgggaaaantnncttttaaanggntcgggggnatccccaatctntccctntaaatngcttggt

SEQ ID NO: 83671 - DNA, 499 bp, Arabidopsis thaliana columbia
  unsure (1)..(499): unsure at all n locations
agctcaaatattgttcaatttccaaggactgttcatctcaaggtatacggaatctatgaggatgacgcctgatgatctaattttggacccatcttcggcaaaggctgcggcatcatctacaagatcgggatcaaagcactttggttggccgcccgctacataaagagggtcccctaccaagggatgtcccatgtatgcaagatgaatccggatttgatgtggtcttccagattgtatctctaccttaacaagcgagcaatttttttccctgtccctctccagaacaaatactttactgaaagcagggttcccttccgggaggaagcaacatataatccttgtgcggaccccagggatatcgaaccactcccatacggcggtttgattactacctcggcttcttcaactataccctccgggaaggggccggaaaaaccttggaaaggtttctcccgggnccaancnnnttnnaaaaggtngggggggccnaaaaaaggtt

SEQ ID NO: 83672 - DNA, 481 bp, Arabidopsis thaliana columbia
  unsure (1)..(481): unsure at all n locations
aaacatcatcgtcctcttcaggtacctgagattctnactccagacattggtgctggtgctggattcagtgtgtataacaatcaagttcaagctcagagtcgtcatcatctgacggttgaaatcccagattcatcgtctcacaatcttacatctaagagacctgtggtggttcaatcttctaatccggtcaacgttgacgatttccgaagacagcaacgcacaagcttgggttcgatttcatcttattgtccgtcggatctcttatcgtttttttcttcttctcttccatcgatcccatcggcggctaatcagaagcttcttcggcatgttcttagagnccggtttgaaaatgtttcccaccttcggtttctnaattcttncnctccggttccccccnccccaaaaactttttccccggggggataaggtttcaanatnnttccctcccctttgggcttnnnngngnaaccggnttnctttt

SEQ ID NO: 83673 - DNA, 503 bp, Arabidopsis thaliana columbia
  unsure (1)..(503): unsure at all n locations
ttcaaatggcgatcctcgacacaaagtccagccgttggntcccacacaaccttctntttcttctcctcttgctcttgctccagtcagtaccgtatggattcggtcagactcagaccacaccacccggaacaacaaaaacgaaacctaacgatccagttgttgttgtaatcacggttttgtttttagtgatctttttcatggtcttcggttccatcttctgtcgtcgaagcaacgcacagttttcacgttcttccattttccgatccacctacgcagacgccgagtctcaggtcgtcaggatcaggaggttgaccgcgcgtgggctcgacgcggaggctatagaaactttcccgacggtttctttactcggnaggtgaaggcggtgaggntcgggaaaggttggttttgnagttttcgggtttntntntttnnaattnnaagacggcggaacgnttcggtttaatgcctccttnttnccacgggttnaaggcgatttnttttta

SEQ ID NO: 83674 - DNA, 518 bp, Arabidopsis thaliana columbia
  unsure (1)..(518): unsure at all n locations
aaaataaaacccaactccatttatccatcaaatgtgtaaaacccatctgctacatttcaaagattcacaatctcacacatacttttttctttctgaaaccttcaaacgatttgttttgacaaaaaatagttgtcatttttgttggtcatgctcaaaagaaaaaaaacgcaaataagaggcatgacaacattaaatcccaattacaaattgtaaaaaagaaaaaaatatatattatttacactcgttcatctggtcggagccgttcgaaagaccgttcaccagcttcaatcggatgtcgggaagattcttcggcgcatctccgggagaaagtagaccggtacnggaaccactccgggnaangggattgaaaaaagacagcgaatggaagccggccgattggnaataattaccccttacgncccgnacgggggaaagnggttttttngggccccgggggtaccgggttntaaaacgggcccggggnannccccnccngggggnnnaacncccgggnccca

SEQ ID NO: 83675 - DNA, 519 bp, Arabidopsis thaliana columbia
  unsure (1)..(519): unsure at all n locations
gtacatttttttttgtatttcaggaaactccgatggcggatctcttcggtggtggccacggcggcgagcttatggaagcacttcaacctttttacaaaagtgcttccacgtctgcttcaaatcctgcgtttgcgtcctcaaacgatgcgtttgcgtctgccccaaacgacccattttcttcttcttcttactataatcctcatgcatctttcttcccttcacattccacaaccacttacccggatatttattctggatccatgacctatccatcttcattcgggtcggatcttcaacaacccggaaactaccaatctcagttncatttaccaaaacaactatcactttnanttnaccaagggcaaacaaacanttnnaatggtcaaacttcaatttgnggccgnggcaaaccggntttttntgnnccaaccggggtncgggttngggnttgggtttaaaaccgggtaagggtttttagggggggtngggnaagnaatttgggaaatgggttggggggtc

SEQ ID NO: 83676 - DNA, 567 bp, Arabidopsis thaliana columbia
  unsure (1)..(567): unsure at all n locations
ctgagaaaacgttaacnagtctctaatagacaccaacagcacagccaaggttcatgtcttcatgagatacaacaagcaaaccaaactaagataggagttaccatcaaagattcttcatggatctgaaaagccataacggatcaaatgattgccaaaagaagacgatcctacagattatttggtgagacaagaaaggcgctaaccgggaaaagttttgttcaagcgttgatggcatctgattctttagaccttatgatcttggcttgtagtttctgcataaaagctggattggcacggagtctttgttttacatatggaagttcttatgtcttcagcgatcttgttggctttcccagcttcttcctatcaacccgtaaagagtccttaagcagtctttnccggtttnccncccggnggtcnaaccnctcgctggggattgaaagcncgctttccccgaatggganctttncccaaaagnnccctagcctttagccngangcttgnggcccagccttcccggaaagaattaacttccgccttggngccgnnccccngggaanacctgnt

SEQ ID NO: 83677 - DNA, 895 bp, Arabidopsis thaliana columbia
gcaagtaccatttggagaaattctggtttttcgggggccattgcaacgacgacgctaggtatcttcgtgattccaaaagccatgattggcctcattcttgtcgataaatggggcagacgtcctctcctgatgacttcagcgttagggatgagcatgacttgcatgctacttggggtcgccttcacattacagaaaatgcaattgctttcggaactaactccaatattatcgtttatatgcgtaatgatgtatattgcaacttatgcaataggcttgggaggtctacccttggggaattagggcggagatatttccaatgaatataaaagtagccgcaggaagtacagttacgttagtctcattttcaagtagttcaatagtcgctaacgctttaaactttctgttcgaatggagccctcaaggaacgtttttaatattcgcgggaatcggtggagcagcgttgctttacatatggttgctcgttccaaaaactaaaggattatcactcgaagaaatacaagtttcacttattcatcagcccgatgaaaaaaatcaaacttaatttgaattatttttttttattataaaaatgctcaaattcagtttatggtgttatatatgtttatttgcaaacaaagatttttttttttcactatgtaattacgactttatttttctgggtaattagccccatttttatgatgtatatttccgacgatgtaaaacttggcctacgtacatgtgtattttatctctaaaattgcaaatgtaatatttttcggacatatattaaagaagagtttgacttcaaaaaaaaaaaaaaaaaagggcggccgctctagaggatccaagcttacgtacgcgtgcatgcgacgtcatagctcttatagaggtc

SEQ ID NO: 83678 - DNA, 475 bp, Arabidopsis thaliana columbia
  unsure (1)..(475): unsure at all n locations
caacatcttccttctcatcttacaaccatatctctagtatattgttttttggaggaggatccgatgccaactctagagaaactcctacaattgaaagtggtttctttatggtacaacgcctatgttgggaggagaatggtttgctccggcggtgggtttcctcaattgcagaggctttttttatgggaactatatgccttggaagagtggatagtagaagaaggctctatgccacggcttcatactctgcatattgaattctgtaatacattaaaggagattccagatgggctgagatttatcacttcattaaaggaattggttatcaacacaacagaaagagaatttcagaaggaagtatccggaggagggagcaagattactataaaatccaacacattaccccttattcgggtatggaccattaccacaagaacccggaaaccaccgggggcaattaanannntcnncagnt

SEQ ID NO: 83679 - DNA, 524 bp, Arabidopsis thaliana columbia
  unsure (1)..(524): unsure at all n locations
ggatcacgatctcgacaaattccctttactctcttacgtccttcatcaacatgactccaatctccacgcgccgccgtctatggccgcgcaagaaactctccttccttcttttcctcttctctccaatccacaaatcatgtctacgttgactcaatccatcccctcaacgatcacacagacgcttttcgtcttcaactctctcggctctcgccctgatcccttagcggtttcctctgctcggtccaagatcgctcagattatggattcactctcgcctgaagatgcggcgaaggagtcggagatttatgccggagttgtgcggttggatgaagtgcacgatagttacgagaagaagttgaaaggattttggaggaggagctttctaggggctattctacggaggtggaatcgatgtttaaaagcggcgagaagtaaaacgngaaggttctttcgggnntcaaaggnggcggaatccggngnaccnttaaagggtttnctntcttccaaaagtaaggtntccnttc

SEQ ID NO: 83680 - DNA, 406 bp, Arabidopsis thaliana columbia
cgcgtccggacgcgagaaatcacatagtagtcaagcgttatttatatctaattggatggcttttttgaggaaattcgggaacatattgaagcagaccacaaacaagcaactcaatgctcaggtttctttatcaagcccttcgctttttcaagcaataaggtgtatgtcatcttctaagctctttattggaggtatggctttgtcctcccctgccttcgccggaaaggctgtgaagcctgccgcatcagatgtcctcggaagcggccgtgtgaccatgaggaagactgtcgccaagccaaagggtccatcaggcagcccatggtacggatctgaccgagtcaagtacttgggtccattctccggcgagcccccgagctaccttaccggtgagttccccggtgactac

SEQ ID NO: 83681 - DNA, 570 bp, Arabidopsis thaliana columbia
  unsure (1)..(570): unsure at all n locations
agttattgatgataagacttgtgaagagaggctttggaagatgaaacaccgtggcgagacaaacttttatttatgggagataaccggagatatgcatattgatgctactcataagggaaacacatcaagatatattaatcatagctgcaaccctaatacgcagatgcagaaatggataattgacggcgagaccagaatcggcattttcgccacccgtggcatcaaaaagggagagcatttgacctatgattatcagtttggtcagttcggtgcagatcaagactgccattgtggggctgtaggttgcagaaggaagcttngtgtaaaacctagcaaacctaaagatagcctcggatgaagcttttaatctagtggcaccatgaaattggncccagacaacttccccagggtgcatcaaaatgggcttttaaattggcacatnggttcagggnaatccttggncaatctnggcaaagggtncaatntccgnggaattccatttggngtnggnnncngggtttttnnccccgggttataggggttttgccncntaggcanttttntngggtt

SEQ ID NO: 83682 - DNA, 870 bp, Arabidopsis thaliana columbia
  unsure (1)..(870): unsure at all n locations
nnnnnnnnnnnnnnnnnnnnnnnnnnnnnnnnnnnnnnnnnnnnnnnnnnnnnnnnnnnnnnnnnnnnnnnnnnnnnnnnnnnccacgcgtccgcggacgcgtccgcccacgcgtccgacttaattaagatacgatcatggcgtcgtttgtctttgtgatttctcttcttcttctctctttttcgtcggctgttttctccgatgatgcttcttttcagaaacttccggtgcctgacaagaggtcaggccctgaatctttcgcctttgactctaccggcggattctacaccggagtctccggtggtaaaatcctcaagtacgttcctgggaagggttatgtcgattttgcccagatcacagattcctcgaactcggcatggtgcaacggagcattaggaaccgctttcgccggaaagtgtggtcgaccagcgggaatagccttaaacagcaaaacaggtgatctctatgtcgccgatgctccgttgggtcttcacgttatctctcccgcaggaggtttggccacaaagctggccgacagtgttgacggaaagcctttcaagtttcttgacggtcttgatgttgatcccaccaccggcgtcgtctacttcacttccttcagttccaagtttggaccccgggaagtgttaatcgcagtgggattaaaagacgcgagcggaaagctgttcaaatacgacccagcgaccaaagccgtgactgagttaatggaaggtctaagtggtgctgctggttgtgcagtgagctcagatggttcattcgtgctagttagcgagttctaaagagtaactcaagaatattggattaaggcccaagctggacattgaaacttctcagcctgctcgaccccgacac

SEQ ID NO: 83683 - DNA, 1213 bp, Arabidopsis thaliana columbia
  unsure (1)..(1213): unsure at all n locations
tccggaatttccgggtcgacccacccgtccggaattcggcacgagggtatgacgtcgttttgctccatgatttctcttcttcttcttctctctctttcatcgccggttttctccgatgacgcttctttccagaaacttccggtgccggaaactaggtcaggtcccgaagctttcgcttttgattccaccggtaaagggttctataccggtgtctccggtggtaaaatcctcaagtacctccccgagacgggttatgttgactttgcccagatcactgaatcctcgaactcttcatggtgcgatggtactattggaacggctttagccggacgctgtggtcgaccagcaggaatagcattcaacgagaaaacaggtgatctttacgtcgccgatgctccgttgggtcttcacgttatttctcccgccggtggtttggctacgaagatcaccgacagtgttgacggaaagcctttcaagtttcttgacggtcttgacgttgatcccactactggtgtcgtctacttcacttccttcagctcacgcttctccccaatccaagtgttgattgcattggggttaaaggacgcgaccggaaagctctacaaatacgacccatcgaccaaagtcgtgactgtactgatggaagggctaagtggttcagccgggtgtgcagtgagctcagatggttcgtttgtgctggttagtcagttcacaaaaagtaacatcaagaggtattggatcaagggacccaaagctggttcttctgaagacttcaccaactcagtctcaaaccctgacaatatcaaaagaattggctctactggaaacttttgggtcgcttcagtggtgaacaagatcatcgtacctacgaacccatcagcagtcaaagttaactctaatggtgaagttcttcaaaccattcctctcaaagataaatttggagacactttgctcagcgaagtcaacgaattcgagggcaatttatatataggaactctcaccggaccatttgctggaattcttaagatcgaaaagggttcttgtcctgccacttagatctcttatttgaatgcagccgatgtgttacaatcatatatatatatttgagctttttatttatttctgaataaaatagccacttagatctcttnnnnnnnnnnnnnnnnnnnnnnnnnnnnnnnnnnnnnnnnnnnnnnnnnnnnnnnnnnggaat

SEQ ID NO: 83684 - DNA, 498 bp, Arabidopsis thaliana columbia
  unsure (1)..(498): unsure at all n locations
gccctcgtgcaagatcttccctcctccaaggcgccgcagtccttctcctcctcctgcccgtggccgcagctacagtagatcaccaccctccatacagagcgcgtgaggaagtgccatatgctaatggaaatggactgaaagaaagacgcagaagcaggagctgagtgagtgattttgcaagaaaacgagtgtgtgggaggatactttggaagagaagaagagagggactaagggaagttactatcatctatgaatttcagtaagagaacatgttttaggtctgctgggttggataaagcttgcaacttttgcttttggatatgaaacgtacgtagttgtgtatctaccaataggtaaaagaacacttgattcgtaccctagtttcttaaagacataatgtttgattggaaattctgctaaatgcataagcgtttcttgtcttaaaaaggttaaaaaaaccaggngcagccgctctagaggatccaagcttacgtacgc

SEQ ID NO: 83685 - DNA, 1028 bp, Arabidopsis thaliana columbia
  unsure (1)..(1028): unsure at all n locations
acgcctgcaggtaccggtccggaattcccggttcgacccacgcgtccagttccacaaagcaaaacacagaaaaagccattctttttgccccttgagtgctttcagctcttcccacaaggttacagaagtaatgtcacgtgtgtacgtcggaaatttggacccgcgagttactgagcgtgaacttgaggatgagttccgtgcctttggagttgtcaggagtgtttgggttgcccgtagaccacctggttacgcttttctagatttcgaagatcctagggatgcccgtgatgctatccgtgctttagatggcaagaatggctggagggttgaacagtctcacaatcgaggtgagcgtggtggcggcggtcgtggtggtgaccgtggaggtggtggcggcggccgtggtggtcgtggtggctctgatttgaaatgctatgaatgcggtgagactggtcatttcgcacgtgaatgccgtaaccgtggtggaactggaaggcgtcgcagcaagagccgtagtcgcactcctccaagatacagaaggagcccaagctatggacggaggagttacagccctcgtgcaagatctccccctcctccaaggcgccgcagtccttctcctcctcctgcccgtggccgcagctacagtagatcaccacctccatacagagcgcgtgaggaagtgccatatgctaatggaaatggactgaaagaaagacgcagaagcaggagctgagtgagtgattttgcaagaaaacgagtgtgtgggaggatactttggaagagaagaagagagggactaagggaagttactatcatctatgaatttcagtaagagaacatgttttaggtctgctgggttggataaagcttgctacttttgcttttggatatgaaacgtacgtagttgtgtatctaccaataggtaaaagaacacttgattcgtaaaaaaaaaaaaaaaaaaaaaaaaaaaaannnaagggcggccgctttaaaggattcaagcttacgtacgcgtgcatgcgacgtca

SEQ ID NO: 83686 - DNA, 513 bp, Arabidopsis thaliana columbia
  unsure (1)..(513): unsure at all n locations
gcattatccacctgctctgaatgatgatgtgtggagattggacaagatcggcaaggatggggcattccattaaaagcttactgctgaaggtataaacactgcagaagattttctgagagtaatggtcaaggattctccaaaattacgtactattcttggaagcggcatgtcaaacaaaatgtgggatgcactagtagagcacgcaaagacgtgtgtccagagcagcaagctttatatctactatgctgaggattcaaggaatgtccgtgttgtgttcaataatatctatgagctaagcggccttatttctggagatcaatacttctctgctgattcacttacctgatagccaaagggtatatgttgaggggcttggtgaggaagcatttgaaactggacccagtcatagngtntgtggaaaanctctttngggctttaggagccccnaggttgggtttnccnccnctaacctggaaaatacncggctgngccttacccccantnanntngtng

SEQ ID NO: 83687 - DNA, 1060 bp, Arabidopsis thaliana columbia
  unsure (1)..(1060): unsure at all n locations
ctttgtcatctttcttagcgttatcccactctgagaatttcgaaatcaaatcagttctcgttgttaaagaccgtcgcagagtcgaattagcgggaatcagaaagaaagaatcaaaaacccttaagcttgtgtttaggaaccgtttattctgaaattgaagtgtgaagaaatgggaaatgatcaacataaccacagtgacagaggattcttccacaacttagcagggtttgcaggcggccaatacccgcctcacggtcatggttacggtcatcatggtcacggttatggatcttcttatccatacccggctcctcctcctcctcatggcgtttccaccagttgcttatcctccacatggtggttaccctcctgctggttatcctcccgctggttatcctccagccggttatcctgctcacggttatccatctcacggttatccccgtccatctcactcaggacatcaccatggaggcataggagcgattatagcgggtggagtggctgcagcagctggtgccccccatatgtctcacccccccatggacacttatggtccacccccccatggtcatggcttatgggcctacggggtatcacgggtcacgggaacgttcaaaccaccggtaagttcaagccacggaaaattccggtaaacacggcatgtttgggaagcataaagggaaattcttcaagaaatggaagtgattgttttcccaaaagattaatccaattcaaagaccatacattatcattacataaaaataaaaaaattaaagtctttgtaattgcattatggttccaagcctagagattagaaagttgtgatctttcttttctgtatttggttgtatcaagcttgttataaagtttgctccttttggtagttggaaactgagatccacttgtttgaaaacgatcactctttaatattgttgttgatgtggaatcttcaataaacttctttccactaaaaaaaaaaaaaaaaggncgagggcggccgctcaacagagactcaagcacgacgtcagcgtgcatcaacgctcgtagatagtctaaa

SEQ ID NO: 83688 - DNA, 446 bp, Arabidopsis thaliana columbia
ctcacaaccagaattagtggagataaacttgacgcgtcccttcttcattctccggcttcttcacgtcaccggaaaaacgacgagtctcattgcctgagattcttcatcggagttaaacctccggaggagttaatcacgagagctcaaactatggcgtggaaaatgcaatggaatggggggagacgagcccattctatatggggcaggagattaacaaacaacactcatttgcgatcatccttctattccaggctcacattttttcaccatggcgagtttggaggagccgctaagctttgacaagttgccaagtgtgagcactatggataggattcagagattttcttccggtgcttggcgccccagggatgatgtcgggatgggacaccgttggattgagggaagagattgcactacctctaacagttgcattgatgatgataaaa

SEQ ID NO: 83689 - DNA, 481 bp, Arabidopsis thaliana columbia
  unsure (1)..(481): unsure at all n locations
aaaaggacccctcccaaccagaattagtggagataaacttgacgcgtcccttcttcattctccgtcttcttcacgtcaccggaaaaacgacgaatctcattgcctgagattcttcatcggaattaaacctccggaggaattaatcacgtctcacattttttcaccatgtcgagtttggaggagccgctaagctttgacaagttgccaagtatgagcactatggataggattcagagattttcttccggtgcttgtcgccccagggatgatgtcggtatgggacaccgttggattgaaggaagagattgcactacctctaacagttgcattgatgatgataaaagctttgctaaagagtcattcccgtggagaaggcatactcggaaattatctgaaggagagcatatgtttgaggatatttcggtttcnggaagnncttctactgtttngggggcttaagggntccaaaagntttnagggg

SEQ ID NO: 83690 - DNA, 414 bp, Arabidopsis thaliana columbia
aaacagataaagcatgcgttttcccgtaaaggatccatgaaaccatgtgttgggcataaagaaatcgttcctgaatctgattctggaactgattctgaatcttctgatgatgatgatgcgtttacctgtgtaaagaacctggcaacagaaccaggaaaacttacacgcgatgggaatattgaaagaacaggagatgatgatcatgtagattcaacaacattagcaaccgctaaggaagattcaagtggtgatatattagaggattcgacagatgttgaagctaaagaggagaaattaaaggaagcagcagagtcagaaactagagatatggacaccgccatgaacatcaaaactgaagatgagaaaggagagacgcttaaaaatatcgaaggaggggaagaaaaggaatcatct

SEQ ID NO: 83691 - DNA, 583 bp, Arabidopsis thaliana columbia
  unsure (1)..(583): unsure at all n locations
aagtaaaaccgcatgtatgacatctgctgacatcttcagctcatataatgaccatacaatcgatcaattggatctcttgcttactcaactcctccttaaatcttcccaagacaagcgatttgtttgtgaagcagcagaaaaagcattagtagcaatgactgcacatgtttctcctgccttgctgttgccaaagcttcaaccttttctcaagaataggaatcctcggatccgcgcaaaagcatccacgtgcttctcccgatgtgttccccgactgggcattgaaggcattagagaatatggaattgagaaactagtccaagcagcatcgtctcagctcagtgaccaactcccagaatctcgggaggctgcacgggcagtcttactggaacttcagacagtgtacaagaaaacttctaatgtcggaccgaaggaggagcatccagagccagtcacttggcaaatcttctgccaatcaaacctctcacctcttggggcaaggttttgtacgggtaccaatttngcagttttgcttanngggcttgttnggggtnttgnagnnaaagccaatgttgnttttntgctc

SEQ ID NO: 83692 - DNA, 549 bp, Arabidopsis thaliana columbia
  unsure (1)..(549): unsure at all n locations
aaccccncntngcccccnggttccttncctcccccccntttnngggattnggccngntccattncccccgggaccgcttgcccttgttcccccagcnttattcggccccttttnggnaagctggtccccctgcagtncccggtcccggattcccnggtcggcccccacgcgtccggggaagccgtgatggaggagaagtcggtggagttgagggaaaacctcaaagaaatggaagcgtttagcgatggaagcgggtagagaaggaggatcttcggataagaacatggaggcttttgtggaggatatttgtggagaaactcttgttcaaaacttgtgtgaagcagaggaggttaaagtaaagtaaataaaggacaaaagagttggtgtctagaagtggcggagtgttatttgctaatactgtcactttgtaatatcaaattcaattaaacataaaatttactccatctagataaatatgttttttgaataatggtcaattacaaaacatgtttgattgaaaaaaaaaaaaataaataaatatttacaaaa

SEQ ID NO: 83693 - DNA, 528 bp, Arabidopsis thaliana columbia
  unsure (1)..(528): unsure at all n locations
accccnttttnggatttggcggtncanttccccgggacccntttcccntttttccccaccctttncccccccctttgggganccttttcccccccagttcccgntccggattcccgggtcgccccctgagtccggcagacctggggcaggtcttgttcaatctccactagataggattattgtgagctgcacttcagaagatcgccgtgagaagctttctcgatacaagaacaagaagagcaggcgaaatttcgggcgtaagattaagtatgcttgcaggaaagctcttgcagatagccaaccgagagtccgaggaaggtttgcgaaaacagaggagaggaaatagaatggttcaagaaaagggctcaaaggaaggagactaagcaaaaggaagaaacatgaagaataaggagataaagcccatctcattagaaactagttttgttttatatatctatgtataaactttaaaatcttataagcatccaatttagttttttgtatataaaagggtttctctnaaaaaaa

SEQ ID NO: 83694 - DNA, 362 bp, Arabidopsis thaliana columbia
  unsure (1)..(362): unsure at all n locations
actactaaccagcaaatgggtcttaacgttataacagaactgatcatcgggtacttatacccaggaaagccactagccaatggcgctgtcaagacatacggatacatcagtatgtctcaagccttgtactttgtaggagacttcaagcttggtcactacatgaagattcctccaagatcaatgttcatcgtccagcttgttgcaactgtggttgcatcaactgtctgcttcggaacaacctggtggctcattacatccgtcgagancatatgtaatgtcgatttnctcccggtgggtagtncatggncttttcctngngatgaagtgttctacaatgcatcaatcatatggggagtgattgg

SEQ ID NO: 83695 - DNA, 234 bp, Arabidopsis thaliana columbia
cgcgtatttcctgatggaactatgttgaagaagggagacaaagttatatacgcgatttacgcaatgggtcgtatggaagctatttggggaaaagactgtcttgagtttaggccagagaggtggctaagagacggacggttcatgagtgagtcggtctacaaattcacagcctttaacggtggtccacgcctttgtcttggcaaagattttgcctattatcagatgaaatctacg

SEQ ID NO: 83696 - DNA, 386 bp, Arabidopsis thaliana columbia
  unsure (1)..(386): unsure at all n locations
ttcaaaatccaaaagcacacaagaataagagaccccttggctctcttggttgctatgttggttgtgaatagaattgagctgaagaggtaaaagagatgaagagaagaaggagggatctgaaacaagcggcggagtcagagcaggaggaatgtcagagcattgcccaggtcgtctctctcggagattccgatcaaattcagccgccacccaacaagaaagaagaagaagatatatgtnaatacttactgcagaattttnatcttgatcatgtgatggaaattcttatgagatttcctttaacctccctgacgggggttcaagtncggtctctaagcagttggtcatccctcatttctaggncggtattttngcaacctttttatatt

SEQ ID NO: 83697 - DNA, 424 bp, Arabidopsis thaliana columbia
  unsure (1)..(424): unsure at all n locations
ggaacaatgacggatgcatttctaagcaattgccactccattgagccagttttacaagaatatccgtatcgttattttgcgcactgcttatccagagtttgttgaggaggacttgaggtttacacgtttggacttggattggtggagatgagtgtcttggttggacaaagttttggcgtaatctcaagggtattgggaaattttgtggaaccggaggagagttccaaagtgattgggaactaagtgaggcttagaagcttatgattggttctctgaagtctgcaggttaggtttttcttttgcattctctcctttgaaaggcacagtgtgtcggaggtttcaccatttagtaaacatatactcgttttacgttttttttttttccgtttgttttttggggaaaaaattccttgatattaaaang

SEQ ID NO: 83698 - DNA, 541 bp, Arabidopsis thaliana columbia
cgcgaaggttgggcttcttttgacaatcccatgcctgctgcaaaatctactttcgttattacctcccctggagatttccagttggaactgaaaattgaagagattctacagcctagcacaagcatgcaattgccaccctatccatcaactgtggaccagcatgctttgtcgataccaagtccatggcaggaagatctctcgaatgtcctaaaagatgttgtcgataacccgcagccgtggaatgcctttcccgactctattgaggccaatcctttggacagcagtaggaatattcaccaaccaggtagatggagcaagtacttcgtcatataacactgatcaccagcatttggaatcacaagttttagaggaattaagcaatgatggcacccaaacaaccagaatccctgctggctcttctgcttttggttttccaggaaatattggcatggcaccatcatacttggaagaagcttggcagcatgtaaatgaacaaaagtcagctaaaccatttgatctcccctatgattctgagttcgac

SEQ ID NO: 83699 - DNA, 712 bp, Arabidopsis thaliana columbia
  unsure (1)..(712): unsure at all n locations
ctctgatcggaggaaactatgggctgctaaatactactaacttcacaccaaatccagactattacagtgctctgatctggcgacaacttatgggaagaaaggcattgttcacaaccttttccggaaccaaaaagatacgttcgtacacccattgtgcaagacaatcgaaagggatcacagttttactgatgaaccttgacaatactacagcggttgtagcgaaagtagagttaaataacagtttcagtctgagacatacaaagcgcatgtaagtcttataaaagagcaagttcccaactttttgggggtcccaatggagtaatccaaagagaagagttccatttgacagcaaaggatggaaaccttcacagtcagactatgttactcaacggaaatgctcttcaggttaattcgatgggtgatttacctcctatagagcccatacatataaattcaacagagccaataacaatagctccatattccattgtgtttgtgcatatacggaatgttgttgcacctgcatgtgcttaaggtaactgcatatggaacttaagacagttccttcattcagttatttgattagacaaaaataaagaagggtccctttctcccnnnnnnnnnnnnnnnnnnnnnnnnnnnnnnnnnnnnnnnnnnnnnnnnnnnnnnnnnnnnnnnnnnnnnnnnnnnnnnnnnnnnnnnnnnnnnnnnn

SEQ ID NO: 83700 - DNA, 525 bp, Arabidopsis thaliana columbia
  unsure (1)..(525): unsure at all n locations
aaccaagaaaagtttttattaagcttttgaatttcttctcatatggtctaatctttattgactagttttgtgtttcaagtacacacataaacaacccatgtttcaccacaatcatggcaaaggaaaaaatgaacaaaataggcaaaatccaaaaagaaatgaagaagaaaagctcaaaaggcagagaaaacgcctcaatgaaatgactctgaaggtgcactcatggagtccgcctttgcagctaaaatctgcattttctgtgtgcaaagaactccagaccttcagagaattgagaaaagcataaagaaacaagaaaggagggcaaaaagcacccttctcatctcagttcacaagatacatacatacatacatccatacatccatatatagggagagtttgacggggggctaactcccagtgtagctgtcggggggtttgcccggaccttcttccccaaggggtccttaggtatgggtccanaagtgccncannggnnttcccttcccncgggggggaacctcnct

SEQ ID NO: 83701 - DNA, 444 bp, Arabidopsis thaliana columbia
tttttttttaaataatcatgtttgtaatacataagccaataggctgcagagtcagatctctgaatcaagtattcaatatacaaagccaatcatggttcagtaaactagctacacaaacacttactactacaagggggtaagagaagctctcaaatcgaaggcaataaacaaatcaaagccagagttagcggttttaagctccgcgatgttgcaggaacaatcttcttcttttatcttgagctcataaacacctttgaaatgctgccatgcgactgaaaggtgctgctcatcaatatctatataaatgattatactcttcagtcttcgactcttcattcatatactctctttctctttagaagggcagggaatatggagatggatccaatgaggaacagcactgacaagggcttgaaatcatacaaatcctttactgatctgaga

SEQ ID NO: 83702 - DNA, 529 bp, Arabidopsis thaliana columbia
  unsure (1)..(529): unsure at all n locations
ggtgtagatgtttatttatatctcatgtctagaaacactaaacacgaatatatgtgtatatataacaatgtgttcatgatacatacaaaccataattatcttataatatataatacttgtgtaacaaaacacacatatttgtcctgatggttacatcaagaacataaaattagttacacatgtatatagcaagtaggtccaatttaacaaaaattggttaactgtttttatttttgtaaatgctaaactattgacgtggtttaggagcaggagaaggagaagaggaagaaaagaagagaagagaaaagatgatcggctaggatttgattagccgaatcgggacggatgaaatgcgtcccagaagacaaagtcttgaccggggttttacacaccttgggaattggggggacaaagaccnccaaacctgtgggccccattgcacatgacggggttgccaccttaanccgcagtgngggggtttttgtgagaccanacgcggggnaangcnccgaaaanatnnccccggggg

SEQ ID NO: 83703 - DNA, 483 bp, Arabidopsis thaliana columbia
  unsure (1)..(483): unsure at all n locations
ggatgtttatgttaacgcaaacataataattcattaccaaacacaaaaccatgatgttttacccaaaaactggcttcaagcaacaaaacttattagtagtctccactgaaccaaattattaaaacaaaaaaaaaaaatagagcaagcaagccaaaaatagtctcggaaagagacagcgacaggggcagagagactcaccatccctttgtattgcccctagttctgtcgtctgaactctctccgggacatgataaataagacaagacacagattcatatacgacgctgttctttttgtttttttattccagggattagagacagtaccggtagcccgaggaagaggaggaatgggatggagacaggaatctcccaaatccttccttggttgaaagggagctgttacgggggtataacctccttggaagngaaaggcagcnaatttgaattagcgggnttagccctgctagcnctctgnggggat

SEQ ID NO: 83704 - DNA, 378 bp, Arabidopsis thaliana columbia
  unsure (1)..(378): unsure at all n locations
nnnnnnnnnnnnnnnnnnnnnnaacaaaaatataatactacttagttatgatttatgtatatttctggttgcatttatatatctatgaagcatttcttcaaaccggactcaaaactaaataaccaaaacaacaaagccagataaacccaaagggcacatttcccaaatctctcaatcatcaagatcgaatctagctgatgcatgtttcgccattttaatgagctcagctgcttctttcctcctcctctggtggtccccttgcgctgtcttcaacattttcctttgatcttgcactggaaacgcattcaaatcagataaaaactcatcggaatgaacgatcctctctcgaccagaagagtaagtcgcaccaccaaatga

SEQ ID NO: 83705 - DNA, 1019 bp, Arabidopsis thaliana columbia
  unsure (1)..(1019): unsure at all n locations
gcagcaattaaacaatttcttcactgcaattcacaagcaaccttcaaactaaaactcgagagacaagaaatcctcagaatctttaacttaatggcgctcgaggctcttacatcaccaagattagcttctccgattcctcctttgttcgaagattcttcagtcttccatggagtcgagcactggacaaagggtaagcgatctaagagatcaagatccgatttccaccaccaaaacctcactgaggaagagtatctagctttttgcctcatgcttctcgctcgcgacaaccgtcagcctcctcctcctccggcggtggagaagttgagctacaagtgtagcgtctgcgacaagacgttctcttcttaccaagctctcggtggtcacaaggcaagccaccgtaagaacttatcacagactctctccggcggaggagatgatcattcaacctcgtcggcgacaaccacatccgccgtgactactggaagtgggaaatcacacgtttgcaccatctgtaacaagtcttttccttccggtcaagctctcggcggacacaagcggtgccactacgaaggaaacaacaacatcaacactagtagcgtgtccaactccgaaggtgcggggtccactagccacgttagcagtagccaccgtgggtttgacctcaacatccctccgatccctgaattctcgatggtcaacggagacgacgaagtcatgagccctatgccggcgaagaagcctcggtttgactttccggtcaaacttcaactttaaggaaatttacttagacgataagatttcgtttgtatactgttgagagttgtgtaggaatttgttgactgtacataccaaattggactttgactgattccaattcttcttgttctttcattttaaaaattattaaaccgattctttaccacatattttacaaaaaaaaaaaaaaaaaaagnnnnnnnnnnnnnnnnnnnnnnnnnnnnnnnnnnnnnnnnnnnnnnnnnnnnnnnnnnnnnnnnnnn

SEQ ID NO: 83706 - DNA, 514 bp, Arabidopsis thaliana columbia
gttagagtacttaaattatggttttatttgaaagatacactttattctagcttgtaaaaccaaacaaaaactatataggtttttaaagcacatacccagtcatggcaagcggtgaagaaatgatcggagccacaagttctattccaggaagggtagttggaagcgatgagatcaatgtagtttccaagatatttaacaagattattacgactgtgagagtcatgaacgtaaagtttctgttgaagaattcttgaactgaaaggtatgtagaataaatgagctttggtgggatcttttgtcaagaatctatggctactctccattagtttcataaaccatccttctgatgcgtaaaccccttccattattgcctcaggctgatgggaaattggcctatccccttccgagtagacataccctttcagagttggttccattagcccatagccccttttgaagatgggaagtttgggaaaagggcgaaaggacaccttctggccaacggttctgactg

SEQ ID NO: 83707 - DNA, 609 bp, Arabidopsis thaliana columbia
  unsure (1)..(609): unsure at all n locations
aaaagttaataataattaaaaaaattgtgacctttttttcattttgtttacaaaatcacgtcttcagctatactactgtccaaggaattatccctccgatgaatttctgatcgtaatgatccgtttgcagttaactcaccttctgactcctccactatcggaggaggaggaggaagccgtggagacggcgacggagaattcttctgccgctttctgcaatgtctcactttaataacacgagtcaaaacctgaacaatgtccctcatgttaggacgttttctaggtgcacgagagatgcatttgtaagcaaaagctgctacttcattcacttcttggtaaatcatatctccccatcctaatcctggaatctactaatctccttcccatccggacttttttcctctggcattcataagccggcagnttcnanccaattccattaagaccctggtggaggggttcctnccgggcanaaggcccgaaaggcaaacnccggagccanagaancnggtttctnggggaaagnccctggtgaaaagatccggggccnggggngccaaggtcccccggggaagcgnnagttggcacaatttnccngggggggaagna

SEQ ID NO: 83708 - DNA, 911 bp, Arabidopsis thaliana columbia
  unsure (1)..(911): unsure at all n locations
nnnnnnnnnnnnnnnnnnnnnnnnnnnnnnnnnnnnnnnntccgtgagagagttttgttcttcttctttctggttccttcgctttgctttggttgcgtgatctcctctctcatcaatcttcttcatcatcattctcatcatcattagcttcttgatttttttttccttctttttttcgtttcaagaaactaaacaaagtttctatttatggttttctgattcttcttctatagatctattatttgattctccttcgatcattgtcaacgttttcttcttttgtaatcatcacagttttttttgagaatttgttcatttttttttctcatatattgattcgagttctttcttcttgaatcttgttcttcatagatctagtttttgttttttactctctagatctatagatctgttgaattcacttctttaatccatctctgtgttcttgagttcctatggtctaagtcaaactcaagttcaagatctgttgaatttggaatcttgctggtgaagttagagatgaattatttcccagatgaagtaatagagcatgtattcgactttgtaacatctcacaaagacaggaatgctatatctcttgtatgcaaatcatggtacaagattgaaagatacagtaggcaaaaggttttcattggaaactgttatgccattaatccagagaggttgcttcggagattcccatgtctaaagtctttgactttgaaaggaaaacctcattttgcggatttcaatttggttcctcatgaatggggaggttttgtgctaccttggattgaggctttggctagaagccgtgtaggacttgaagagcttaggttgaagaggatggttgttactgatgagagtcttgagctgctttctcgttcttttgtcaattttaagtctttggt

SEQ ID NO: 83709 - DNA, 542 bp, Arabidopsis thaliana columbia
  unsure (1)..(542): unsure at all n locations
aatcaatgaagtcacatgaaactttttccttgagagaaccggttctggtcataaaatcctgggaaaacaaaagagaaaagaaaagaaaaaaacccaacatttcactctattagctagctgaacaacacagatcaaccactaatccttttacaatgacaaatacacaaatctttactcttctaaaattctgtttacttcaccatcatcttctcaggctctcgaagtgacctctctctctctctctctcaattagttgctaatgtaaccgttgcttcacacgtctcccatttaagtcacaaccatcagcaaataactcctttcgatgccctgatgatgttaaagagtgctcactcagcctagccacatactccaatagctcactttgtacgggacggggcagctttcccttcaggataatcaaacccacccgtttccatcacagctttcagggtttctggcgaagctataaatttggggcgggcggtttcaggtggaaaaaagggngggggggcnccgggattccggcngggcctgngggggga

SEQ ID NO: 83710 - DNA, 476 bp, Arabidopsis thaliana columbia
  unsure (1)..(476): unsure at all n locations
acaaaaacaaattttatttcctcgattgtgatagtcaattcaaaaacataaactaaatactgttttaatgagacgaaacctcacaaaaagatgacgaatggtttgattttacaaaggcgaaaggtagaatatgggttaaagggatatagtaaggagagaagatttcatcaagaggatgtgatcaatcagatgagaccttggcgttgaagatcagagtaagtcttcttgttgtaaatgttaccttcacgatcttcatattcttccttccaagttctgggcctccatttggtcacgcccttggcctctccctgtatcccccttccacaattccttggcggttcctcaatcgaagggatttccgttgaagtcctttgggttggggattcctaggcaacgcattcccgggttggggggcgccattctttaaaaaagggnnccnaaaagcccttttnccccaaaggnaaaggnccccaaaa

SEQ ID NO: 83711 - DNA, 564 bp, Arabidopsis thaliana columbia
  unsure (1)..(564): unsure at all n locations
aaaaaaaggttataattttattggattttgaaggagatgacttcaaacaaacaaaaatgaatcccagtaggtcgtggcattacaaggcatctctactcaatgcaaacaatgtctaatagtcttatctaaagcctgcaactgcaagattctctatatgttgtataaatatatatatcatgacagtcgctctccattacttcgataatggttctttttttcttcgaattctttctatttacactgactaactcctgtattagcttcgttgactaacctgggtcacaagtccttgaagcctctgagctccaaagctagggaacaatcttagccacattaccgaccctgggagcattttggggttcccactgcaccatccaccaggggtaaaactaatctttaaccatnccccggtttaagnaatcccttatcgggcctaattaaggagcctcatcacccctcccggattccctagcaaaggggcccgggcccaatcacggggatgggccctgggggaaaccggggggggccccctggggggttncccaaaaaggnggggncnggtcc

SEQ ID NO: 83712 - DNA, 452 bp, Arabidopsis thaliana columbia
acggacgcgtggggagaagctccacgttctctcatacccacactccaagaacgacgctagcgttccggtgttcgtcatgttaccgctcgacacagtaacaatgtcagggcatttgaacaaaccacgagccatgaacgctagtttgatggccctgaaaggagctggtgtggaaggtgtgatggtggatgcttggtggggattggtggagaaagatggacctatgaattataactgggaaggctatgccgagcttatacagatggttcaaaagcacggtctcaaactccaggtcgttatgtcattccatcaatgtggaggaaacgtaggagactcttgcagtatccccttgcctccatgggtgcttgaagagatcagcaagaaccctgatcttgtctacacagacaaatctgggagaaggaaccctgaatatatctccttgggatgtgattctg

SEQ ID NO: 83713 - DNA, 1155 bp, Arabidopsis thaliana columbia
  unsure (1)..(1155): unsure at all n locations
nnnnnnnnnnnnnnnnnnnnnnnnnnnnnnnnnnnnnnnnnnnnnnnnnnnnnnnnnnnnnnnnnnnnnnnnnnnnccacgcgtgcgggcgcgcgtacgcccacgcgtgccgcttctatcaaacaccaacagctctattctctacctcatttctcatcataacaaagagagagaaaaaaactatggaattgacactgaattcctcgagttctcttatcaaacgtaaagatgccaagagttctagaaaccaagaaagttcctccaacaacatgacctttgcgaagatgaagccgccaacatatcaattccaagcaaagaactcggttaaggaaatgaagttcactcacgagaagaccttcacgccagaaggtgaaacccttgagaaatgggagaagctccacgttctctcatacccacactccaagaacgacgctagcgttccggtgttcgtcatgttaccgctcgacacagtaacaatgtcagggcatttgaacaaaccacgagccatgaacgctagtttgatggccctgaaaggagctggtgtggaaggtgtgatggtggatgcttggtggggattggtggagaaagatggacctatgaattataactgggaaggctatgccgagcttatacagatggttcaaaagcacggtctcaaactccaggtcgttatgtcattccatcaatgtggaggaaacgtaggagactcttgcagtatccccttgcctccatgggtgcttgaagagatcagcaagaaccctgatcttgtctacacagacaaatctgggagaaggaaccctgaatatatctccttgggatgtgattctgtgcctgtcctaagaggaagaacacctatccaggtctactcagatttcatgaggagcttccgtgaacgatttgtaaggtcttctacatggggggagttattgcggaaattcaagtaggaatgggaccttgtggagaattgagatacccatcataccctgagagcaacgggacctggagattccccggaattggagagttccagtgctacgacaaggtattttaaactagcagaaaaagccttggaattcattagaacacttgtcaagagattagacatataccagagaagatcatgtatacttatgcttacttatactccatttgctt

SEQ ID NO: 83714 - DNA, 1217 bp, Arabidopsis thaliana columbia
  unsure (1)..(1217): unsure at all n locations
ctatacgacttacttagggaacgctggtacgcctgcaggtaccggtccggaattcccgggtcgacccacgcgtccggtaggaatgggaccttgtggagaattgagatacccatcataccctgagagcaacgggacctggagattccccggaattggagagttccagtgctacgacaagtatatgaaatcgtcacttcaagcatatgctgagtcaatcgggaaaactaactggggaacaagtggacctcatgatgccggcgagtacaagaacctcccagaagatactgaatttttcaggagagacggaacatggaatagcgagtatggaaagtttttcatggaatggtactccgggaagctgctagaacatggagaccaactcctatcttcagcgaaagggatctttcaaggaagcggagcaaagctatcaggaaagggagctggaattcactggcactacaacaccaggtcacacgcagctgagctaaccgctggatactacaacacaagaaaccatgacgggtatctgccaatagctaagatgttcaacaaacatggagttgtgctcaacttcacctgcatggggatgaaagacggggagcaacctgagcacgcgaattgctcaccagaaggtctgggtcaagcaagtacagaacgcgacaaggcaggccggaaccgaactagcaggggagaacgcgctagaacgatatgactcaagcgcattcggacaagtggtagcaacaaataggtcagattctggaaatgggttaaccgcatttacttacctaagaatgaacaagcggttatttgagggtcaaaattggcagcagttagtggagtttgttaagaacatgaaggaaggtggtcatgggaggagactctcaaaagaagacacaactggaagtgacctttatgttggatttgtcaaaggcaagatcgctgagaatgtggaggaggctgctttagtgtaatttcccacataggtacatacatatagtgtggtgtttattgtattcctgtctgataaataactagagagatcaacccagtaagagtgttanagctatagatttgcacaattctgggtcagagtcagagcaaagagaagcanaatcaagatgatgtcactaaaaaaaaaaaacaaaggannnnnnnnnnnnnnnnnnnnnnnnnnnnnnnnnnnnnnnnnnnnnnnnnnnnnnnnnnnnnnnnnnnnn

SEQ ID NO: 83715 - DNA, 950 bp, Arabidopsis thaliana columbia
  unsure (1)..(950): unsure at all n locations
ctgtaccgcaccggaatttccggtgcgccccacgcgtacggttagctggaatatactggccctacaacaccaggtcacacgcatttgagctaaccggtggatactacaacacaagaaaccatgacgggtatctgccaatagctaagatgttcaacaaacatggagttgtgctcaacttcacctgcatggagatgaaagacggggagcaacctgagcacgcgaattgctcaccagaaggtctggtcaagcaagtacagaacgcgacaaggcaggccggaaccgaactagcaggggagaacgcgctagaacgatatgactcaagcgcattcggacaagtggtagcaacaaataggtcagattctggaaatgggttaaccgcatttacttacctaagaatgaacaagcggttatttgagggtcaaaattggcagcagttagtggagtttgttaagaacatgaaggaaggtggtcatgggaggagactctcaaaagaagacacaactggaagtgacctttatgttggatttgtcaaaggcaagatcgctgagaaatgtggaggaggctgctttagtgtaatttcccacataggtacatacatatagtgtggtgtttattgtattcctgtctgataaataactagagagatcaaaccagtaagagtgttaaagctatagatttggcacaattctgggtcagagtcagagcaaagagaagcaaaatcaagatgatgtacacttagatgtttcctatgagttttccttgtacatcatcttcatactcttaatctcaaatactattgccttttttctcctacaaaaaaagagaaaaacaatcaatgtgagtttctcttatcatcaatcaaaaaaaaaaaaaaaagnnnnnnnnnnnnnnnnnnnnnnnnnnnnnnnnnnnnnnnnnnnnnnnnnnnnnnnnnnnnnnnnnnnnnnnnn

SEQ ID NO: 83716 - DNA, 449 bp, Arabidopsis thaliana columbia
ggtaaaaaaattggatttatggcctttttgataaatgtaagcttaatgcagatagagcggggcacatacaaatgatgatcttctttttaaccaaacccacaaaaaagggtaacaaaacatgtttatacaatgatcatcagaacttcaggatggctttgtgtatgtatgaaaaatttctatccaagctgattcctgagaatacctgcgatgattccctttttcttctcaaaattggggattcaattgatggctatgatgagaaaaccgactgacacatacatgaggaagacggagtatagagcgagtgcttttcttcttgggttaaccgctgagcttataaaagggtaagcagtccatgagctccaggcaagggttacagacacaaccaccatcttcagtatcacattgactttcaacatgcagatcacggctccaacgtctagcggaaa

SEQ ID NO: 83717 - DNA, 815 bp, Arabidopsis thaliana columbia
ctcgtgcgtttattgaatcatatttcattaacgccacattacactcacaagaacaacgagaatacaaacaataaagattacaattctcacaaaacatgaaaactcccatgagttcttctatcacgtttgcactcgtcttctttctcctttctctcaacccaacttcatcattaccgtccaaacgcgaaagctacgttcaaaacgcgtgtagtgttacacgctaccaagacctctgcgctaaaacgctattgccgtttgcatcagtcgccaagaacagtcccagcaaatgggcacgtgccggcgtttccgttgccataaccgacaacaaagacgtccttagacaccttctcaaaacgaggctttcaacgattgggaaacgagaccgaatcgctttgtcggattgtcgcgaacttctccaagactctcttgatagtctccacaagtccttggccgtcctccggacactcagagccagcgagtttcagcagcagatgagtgatcttgctacgtggcttagctcttccctcactgacaaggacacgtgtcttgatgggtttgaaaagacatcgacgaggtcatcatcaacggtcaggatgattcggaagagagtcacgacgtctatgtacttgtccagcaattctctcgcactcctcaacaagctagcggctaatggtttgtaatctcttaaatcataaacttttacaaaagctttaattttccatgaaagtgtaagatcatattattaataaggtggttcatggctgatcactacgataactgtatctctcccattataatggaattatttacaggcg

SEQ ID NO: 83718 - DNA, 937 bp, Arabidopsis thaliana columbia
  unsure (1)..(937): unsure at all n locations
acttcagtcaaaattcaggaagtgccacgattgattgttgctgttgtcgccttctcaggctatgttaccgatgaagagatcgagagacgggagagagaactaaggagagctcttcaaaatgacaagaagttccgagtgagagatggagtatcattttgaagttgcacagtataatccaccattcactctcccgtttatgcgccgcaacgaggtctctctcgaagttgaaaccaaggaggattagccccatcacaggtccatacatacattttcaggaattgctatctaccaagggtctccagccttctttatgacactcatcatcatcatcacacagatgttgcttagcaagagtcttatacaccatttcatgaacagaacctccttggaccagcttctccagctcttgcttacccacacccatcttcactctaaaaaccccaattggcttccccctgggnttngccccaacaatctggtaanccaaccncctcntggnccncctttttcccccccnctgggattngcaaacccnngactttcttcaaccgncttccttcaaggggcctggattggaggtagtccccctggggccaattggattagtaggagacggcccnccaggagaagctttggcttgggggatggaagatgaccaattggttcgtgagagagtccaaagagagagtngtgaggagagaattgggtgaggatgtgatgaaccttcataggtcctctgtattcaactactttcccatcatttctcattatctttatcactttcttctccattactaaacagttccccatactttttgtttgtttgttttttcttactttagtttctgctttcttctgtatatgtgtttagagatttttttgtttcttgagttttggagatttgtggttgcatatttatagaacttaaggttatgtg

SEQ ID NO: 83719 - DNA, 991 bp, Arabidopsis thaliana columbia
  unsure (1)..(991): unsure at all n locations
attttcgttnnnnnnnnnnnnnnnnnnnnnnnnnnnnnnnnnnnnnnnnnnnnnnnnnnnnnnnnnnnnnnnnnnnctttttttttttttttaacttttggaaaattccgtcctaacaagtttacatttttgggttttaatacaaatttttaaactttctacaaaaagggtttcatgtactaccaacccttggaacagtatttctgggaattacaagttttcttcttttctcttgaacaagcttgtgttatctatctatgtatataagtatatgtcacatatatatctagatataacatcccatgggggctaatcagtttcagggatggcgatctaacaaagggctccagccttctttatgacactcatcatcatcatcacacagatgttgcttagcaagagtcttatacaccatttcatgaacagaacctccttgaagcagcttctccagctcttgcttactcacaaccatcttcactctcacaacaccattagtcttctccttggtgttgtcacaacaatctggtaatctatcttcttcttgttcttctttttccacctctggatttgcaaacctgactttcttcatcgncttcttcatgtgcttgattgaggtagtctcctggggcaatagatagttgagaccaccacagagaagcttggcttggggatgaagatgacaattgttggtgagagagtcaaagagaaagtagtgaggaaagaattgggtgagaatgtgatgaaccttcataggtcctctgtattcaactactttcccatcatttctcattatctttatcactttcttctccattactaaacagttccccatactttttgtttgtttgttttttcttactttagtttctgctttcttctgtatatgtgtttagagatttttttgtttcttgagttttggacatttgtggttgcatatttatagaactttatgttatgtgaaaaaaaaaaaaaaaaaaaaaaagggcggccg

SEQ ID NO: 83720 - DNA, 409 bp, Arabidopsis thaliana columbia
gaataaatatattcctcagtattctcaggtttcaatatgacacaaacctgacaactttggttatccaaagaaaataaaattagcatctctcaaatttaaacttggtgctcatggttacaccaatatatacatatacaacaacaactcattatatataaaggtaaataatgacaaacaccaatctccagctacttggatagcctacaacaccattgatactactattactactacattggccttaaaaggggaaagtggattaacctttggggaagtaggaatccattccggatgatattctccggattgggccaaactagctatctgcaactatatgactgatcttctccatctagaagatggatttggtgagctttggccgcggctttatgatgatgctttcataggg

SEQ ID NO: 83721 - DNA, 510 bp, Arabidopsis thaliana columbia
acgcgtccgtgataattgagaatgatgaccgtcatgcttttgttggagcggtggaagataatgaatgttctgttacggccgtggaagaaaataaaacggaagaaagctctgatccgcaagctcacccaaatgattgtgaaggagcaacctggtacggctcatactcacccgcaggaggaccaaaccttaaaccaccaggaggagctgaaagatgataatgagcttgctgaaaaatctgacttggaggttttgaaggaaggcaatggagctgctgatgaagtaaatcttgtagtgattgacgatgtcagtcaaataccgtctgaggaaaaactcgaccgtgtagaggatttacaggttgaagaatcccatgaaaaccatgatggagaaggcgggcaggatgtttgtgcggatcctaatgaaaaaagttgcactgacgttattgaaattgctgaaggcgatatagatatcaaccccattttcaatgagatggacttgaaagttgaagatctc

SEQ ID NO: 83722 - DNA, 446 bp, Arabidopsis thaliana columbia
  unsure (1)..(446): unsure at all n locations
cggccgccctttttttttttttttttttttttaaggaatttaatattttatattttatttttcatttatataaaatataattatgattacataacaagaagatacatacttgccaactaaaaattaagatttgtcgagaaatttcctgaataattatgtcagagatattctccgggtaaaaaaaaaagcaattacatataacccgggatatttttttttaattattatttggataatttatttgacagatacctaaactacgacgtcgtatgtacttgagttggttctgggtccgtttggtctgattcgtgcacaagctcgacgaaggaaggcctgagtgtatctgtccctaaatctcgtccagatgcagcggctctttngcctnttcctnacctntatcatnanccggttcgccgttagctgggtttntttaanccncctttgng

SEQ ID NO: 83723 - DNA, 557 bp, Arabidopsis thaliana columbia
  unsure (1)..(557): unsure at all n locations
gcgtccgcagacgctagacaaaacatagtaccaaacttcttgtcttttgtcttctatctccaccatgggagccaagaagtcaaacaagatcagagagatcgttaagcttcaacagcttctcaagaaatggcgaaaacaagcaattgcatcaaaagcagccaacaacaacaacgaagacaacaatagcagtggcgggggaagcaagagcatcaagtttctgaagaggacactgtcatttacagatgtaacagctgtgcctaaagggtatctagctgtttcggtcgggttagagaagaagcggtacacaataccaaccgagtacctcagccatcaagctttctatgttcttctgcgggtagggcaggaaggaggagttcgggtttcaacaagccggtgtcttttaggggtttccttgtgaagtttctgtttttnngngcatatttanggttaatgnnggggaagaccgaggggtcctggttncggcaataaccannnttgncagggntntnaagttntaattnagncccaggttttttaggcggggttccagnntcctt

SEQ ID NO: 83724 - DNA, 568 bp, Arabidopsis thaliana columbia
  unsure (1)..(568): unsure at all n locations
cggccgccctttctttttttttttttttccaggaacagagatacatcatcacggtttcaatgatctgttggggcatttcactatttagaagtctctccccttactcagaattaagaaaatttaaagcacacaaatccatattcctagagaaaaagtgggaataagcagaatggctcaaattagcacaagaggaggaaaaagaagatgcagaagcaagcaatgaacaaaactatctgcacattgggctgttgtgaggttggtgtgaaggagtcttaggacagtctgatggatgctggtaactcgtcttatcatctgctgctgcattgaacttacattcctgcttagctgttattggcgtcaccaggtacccttcgttcttctcctccattatcttcaatatgctctccaaaacagaacttcacanggatcccccaagacaccggcttgttgaacccgactcttctttgctcacgcgaagacatagaagctnatggcgaggaccngttggatnggaccctctttcaaccgccganagtagaccctnggcagngtaacngnangnaggcct

SEQ ID NO: 83725 - DNA, 874 bp, Arabidopsis thaliana columbia
  unsure (1)..(874): unsure at all n locations
nnnnnnncactaatacgactcacttagggaaagccggtacgcctgcaggtaccggtccggaattcccgggtcgacccacgcgtccgcggacgcgtgggcggacgcgtgggcggacgcgtgggttcaggtttcttttctaacaagcaaaaactccaacctttactttatttttgttttgttttgtaaccctctcagatcttaattctcaaagaagtatgaagagagaaagatctgatttcgaagaatccctcaagaatattgacattgctaaatgtctgatgatactagcacaaacctccatggtcaaacagatcggtttgaaccaacataccgagagccatacaagcaaccaattcgaatgcaaaacatgtaacaagagattttcttcgtttcaagcccttggtggccaccgggcaagccataagaagccaaagctcaccgttgagcagaaagatgtgaaacatcttagcaacgattataaaggaaatcattctcacaagtgttccatatgcagtcagagttttgggaccggacaggctttaggtggtcacatgagacggcataggtcaagcatgacggtcgagccatcgttcatctctccgatgattccatccatgccggttgtgaaacgatgcggtagtagtaagaggattttagagtttggatttgaatctgactcccgtagagaatgatcttgaatatatctttgggatgacatttggcccaaaaatagatatgaagctcgtcctttagtttttttttcctttatctttaagaagacatttgtccaaaatgatcatttgatggaattcctatctttattctcaaccgtacgctcatctcacgaacttatggtgaagaaaaagagactgaa

SEQ ID NO: 83726 - DNA, 483 bp, Arabidopsis thaliana columbia
  unsure (1)..(483): unsure at all n locations
cgcgtccggtcttacttagaggagttgcaagctcagtacttggtagtgttggagagagttgagcagaagaagcgtctgaaaacaaacgggtccagtaacgggaataacaagtctggaggtattgggcgaggcgagcgactcagtgctgcacagagggagagaatgcgtctgctgacgacagcagcctttgatagagggaaaggcgaggatacgtttggttctagagatgaagattggcagctctacaaacttatgagcaaggataatgacgatgatgacgaacaacctgattcagacgaggcagagttggctcgtttatcatctagacttcaggaaattgatccaacatttgtgcaggaaagtaggagggtgatttgagtcagacatcagggggaggtgccacgcggtacgcccctttaacagggggaggcttcaaggtagtgattngtntnggaaaagttcccgttnccnaagancctnttc

SEQ ID NO: 83727 - DNA, 629 bp, Arabidopsis thaliana columbia
ttggttttctgaccaaagaacctgaacctgatccaaatgatccttcaaaacttgtccagaaggaggaccctgttattttacatacaccaacaggtcgaataatcaactatgtagaggatgaaaaagcatggcattcgactattttggcagctctcctctggaggaaggagaagaagtggatccttcaaaagttgagtttctgccacttgggttcgacgagttctatgggaaagaagtggtagtgaaaaaggaacacccaataaaaagctttgtacttggaatcgagaaatcggtgaagccgatgcttgacggattagagaaatggacagaagagaaaaagaaagcatatgaggagagaaaggagatgatacagcaagaacttgagttagtagaggctgagatttgcttagaggaagctatagaagatatggatgaagaattgaagaagaaagaacaagaagaggaaaagaaaactgaaatgggtttaactgaacaggatgaagatgttttggtcccggttttataagaagagaaagttgtcactgccaaagagaagatacaagagaatatacaagaagagaaatacaaagatgatgatgatgacgatgatgacgatggtgatgatgatg

SEQ ID NO: 83728 - DNA, 476 bp, Arabidopsis thaliana columbia
attttcgaacctgtgcatggatctgcacctatacactacgggaaggttgcctctggatcttgatatgcatgatactgtatgtgaaaccactcgtttaatatcggttgcagtataattatgtcgacattgcgaattgcaggacacagtgaatcccattgcagctgttctatcagctgcaatgcttttgagatacggattgaaagaagaaaatgcagcaaagagaatagaagaagcagtatcggatgtcttggaccgaggattcagaactcgtgacattcacactcctggacctacgttggtaggttgcaagagaatgggtgaggagatattgaggatcccttgatgctaaagtctctgcttcgacctggaaacttggtttagctgcaaaaactataaacaaaaatatgcagagagtgacattgagaaattcaatgtttgtttctatccgataaattgataagttatatatacatata

SEQ ID NO: 83729 - DNA, 580 bp, Arabidopsis thaliana columbia
  unsure (1)..(580): unsure at all n locations
ggccgcccctttttttttttttttttttatttttagaataatatatttttgtatgatttatagatttttgggtttgtccaaataaattttggtatttttgtcctaaagcatcgttcattgatctagagacagctaaagctaatcaaataagaaactccacaattaatagcaactggaggaatcacaaatagttgtatcgaatttgataatttctaagccaatcttcacctttctcgtcgtaatccatcttagtaaaggcattccccaagaagttcaaattagcagcaaatgcagatgctcctcgccatgcatccagcactggatccatagctctaaccacgttaatgggtgatccgcaaggtcttatcatcctaatcccacattccaaccgctcgttcatccctggaagaaggctacacccgcccgtcattagtatcgagctcgtagcctctcctctaactcttctcgtcggggggagccttcctgattgatgggcagccacccgccaaagcnacttgggcaaaccataagggtgggtggaagggctcctggggaaggacttcaaaccanacnctgngnt

SEQ ID NO: 83730 - DNA, 543 bp, Arabidopsis thaliana columbia
  unsure (1)..(543): unsure at all n locations
ccacgcgtccgatgccatgtggtgttcagataacaagattggtacatatcaaagtcctctccagtaacgtggagtaccttgcttcaagggatgcaacaatcatgggaagtcgtaacgggcatgctcctttgttcctctggtacaccttaaacaggaaaggttacaaaggattccagaaagaagttcagaaatgcttgagaaacgcgcattacctcaaagaccgacttcgtgaagctgggattagcgccatgcttaatgagcttagcagcactgtggtctttgaacggcctaaagatgaagagtttgttagaaggtggcagcttgcttgccaaggtgatatagctcatgtggtggttatgccaagtgttacaatccggaagcttggtaatttcctgaaagaccctgtcaaacacagatttgttctggtacgggggtggatctcagcctccttgccttgcaatcggaggtagggaccaacaaactgcatcttccgctcacaagtgcgggncnntnttaantttttggnattgtgttttttgtagc

SEQ ID NO: 83731 - DNA, 635 bp, Arabidopsis thaliana columbia
attccatggcatattttggttagccgtctcattgctccccacgttcttaaaggcacacccctatttcagggaaaggtggtcttagtatttccataaacaagatcagaaaatgcttgaaaaacgcgcattaacctcagagaccgatttcgtgaagctgcgattagcgccatgcttaatgagctgagcagcactgtggtctttgaacggcctaaagatgaagagtttgttagaaggtggcagcttgcttgccaaggtgatatagctcatgtggtggttatgccaagtgttacaatcgagaagcttgataatttcctgaaagaccttgtcaaacacagattgatctggcccgagcatggatctcagcctccttgccttgcatcggaggtaggatccaacacctgcatctgtccagctcacaagtgtcggcaccatttctcatttgttggtattgttgttttctagtaagccacatctagtttaaattcctcatcactgtattcctgaacttggtttcaatcatcgtaaaattttggcggccgcgaaataaaaacaaaacgggggatccactagttctagagcggccgccaccgcggtggagctccggcttttgtaaaactaaagtgagggtggtttcc

SEQ ID NO: 83732 - DNA, 493 bp, Arabidopsis thaliana columbia
caaatcgtctccttcatttgttgaatatggtatcatcgccagggaaatactcttatcttggtcaaggagaaagcacctcctacagctatataatgtatagatcagggaagatacatcataccgtcattgggccattggaagcggatactgtttattattaccgttgtggtggagaaggacctgagttccatttgaaaacaccaccagctcagttcccgattacttttgcagtggcgggggatcttggacaaaccggttggactaagtcgactctagatcatattgatcaatgcaaatatgctgtgcatctactttccagggggtctatcgtatgcgggctatatgcagcataaagtggggcacgtttgtgggacctagttcagcctctggcaaagtgtaaggccccggatggtgacaccagggaaaccatgggaaagagagtattccttttatagttgatgaatttgtgtctttcaactcgaggtggaagatg

SEQ ID NO: 83733 - DNA, 477 bp, Arabidopsis thaliana columbia
  unsure (1)..(477): unsure at all n locations
gcgtccgagaagttgcagtcaagaagctcttaaccttttccaaaggatcatctcatgacaacggggtagccgcagagattcagacattaggtagaatcagacacagaaacatagtgagattgctcgctttttgttcaaacaaagacgtgaatctccttgtttacgagtatatgcctaatggtagcctcggagaagtcttgcacgggaaagctggagtgtttttgaaatgggaaacacggttgcaaatagcgttggaagcggctaaggggttgtgttatcttcaccatgattgctcgccacttataatccaccgtgatgtgaagtcaaacaacatcttgttgggtcctcagtttgaagctcatgttgcttgattttgggcttgctaaaggtttttgatgcaagacaattggagcttccnnagtgcatgtccncgatccgttgggtcgtncggggtacatcggtcccnnaatnttgntt

SEQ ID NO: 83734 - DNA, 637 bp, Arabidopsis thaliana columbia
cttggagttgtagaaacatacagaaaacgtgttttcgctaaggcacttattaacgaggtcgtcaaatactcttctggtatccctgtgtgccgtggtgtttaccttcacgtgattgcacacaacaatcccgcaatccggttgtacaaaagaatgtctttcagatgtgtaaggaggttacacggattctacttaatcaacggccagcatttcgattcttacttgttcgtctactttatcaacggttctcgctctccttgctcacccttagatcttgcggtgttggttctgaattatatgaggagcggaatcaaatctttcgcatcaaagctgacggtgaaccacgatgagaaaggctcgaaatggcttaaaagcaaagacaacacgcggtgtctcttgcccactcagactaaacgaaaccttgcatcggaaagagtatcatccgggtatgattacgtatagtgtccgtctcccattcatagactttgtaaaatcattcattttaatgtcttccattaagctctggttgtgatcctattgtgtgtgttcgtgtagaataataatgtgataaaaatgtaaatattgtgatgtgatagttgaagacaactctttgggacggagggttcaatccactgttagt

SEQ ID NO: 83735 - DNA, 404 bp, Arabidopsis thaliana columbia
ataacaaaaaaatttgtatattagttaatccaatgaagagtgacgtttttatacaccccaagaggtcccactccaaaaatagacaaaacaaccttatttgaaagccacacaacttattaagtttagttaacttaatgcatatgactcaagggatctaacttattaaactgattccaacactttctcataaccagatcttctactttgagggctaaaacattccgtggcaaaattcattgctttatatatacaaagcccactcgaacgcagcagaaatgtcgtctctctttttaaaggccaatgatcggaagctacggcaaaatttctggaatgtccaaaactcagcttcgtagacaagctgtataccataaggaatcaacaactgcttatcttttgtagtgatg

SEQ ID NO: 83736 - DNA, 463 bp, Arabidopsis thaliana columbia
  unsure (1)..(463): unsure at all n locations
cacgctcatattcaacactttcgcgctctgtcttgtttttaacgaattcaatgcgagggagatggagaagaaaaatgtgttcaaaggccttcacagaaacaggttgttcattggaataatagcgataactattgtgcttcaagtcattatggtggaattcctaaagaagtttgcggatacagtaaggcttaacgggtggcaatggggaacttgcatagcacttgcatccctttcatggccgatcggctttttcacaaaattcatacctgtttctgagacaccattcctcagttactttaaggatccaagatcccttatttaaggggttcaagaaggcccatctcttcaagaaaccttgaggaaggcctaccattagcagatgcagttctctacgggatggctgggtaatttaatggttcagggggcnccagtgtgggccncggncttntaagntnacttccca

SEQ ID NO: 83737 - DNA, 600 bp, Arabidopsis thaliana columbia
cgtccgaagaactcaacctacaatctccggtaagcatcttcttccacaacttccgatgacgcaactgaagaaatcttcgtcatcaacgagaggaagcaaagacgtatggtatctaacagagagtcagcaagaagatcaagaatgagaaagcaaagacacttagatgagcttctctcacaggttgcttggcttcgaagcgagaaccaccagcttttagataagcttaaccaagtctccgacaacaatgatcttgttattcaagagaactcgagtcttaaagaagaaaacttggagcttcgtcaggttatcacatccatgaagaagcttggaggaggcatacatgacaaatattcttctccgtcgtctatggatgaattggatcaagacttttcttctatcacagatgatccaagaactcatcatccatcatgagttgttctgatcgagaaaaacattacttcaaggttcttgcctctaatcctaatctattttctttccttggggaccccttttttaacccgttaactacgggcccaaagtttgggggtttatttgggtttctgttgttttgtcagaagataattatatgaaggatatttg

SEQ ID NO: 83738 - DNA, 578 bp, Arabidopsis thaliana columbia
  unsure (1)..(578): unsure at all n locations
cgcgtccgaactattttattcttaagacggttcacatcttattcatttaaacttgtaattgttttataaattatctatatcaatctcgtccgacagttgacttagttgtaaccaccagaaaagtaagatgataatttatgtttatccatgttcattttcttattttggcggctcatcttctctttctgagtagtttagtgaaacagaagctgacaaacaaaaaatgaaaatgccaggaaacacactagagcagaagactcctagttcaacttctcttgtgttaatgtgcctataaatatcctttgagatattcatagagtatcaggaataaaaaaaaatgtcttctgctactgcggccttataactacggtgtttttctgaggttcagaggacccggcactcggccgcaagttcatcagctttctcttacaaaggacttgttgggaggggcattcggaccttcaaagccgccaaggagcttgggggttggcccattggtttttcccgggggnanaacgggccatcggggggnccaaatncgccggcggttgtttntcagngnccttcggtgggnttnc

SEQ ID NO: 83739 - DNA, 546 bp, Arabidopsis thaliana columbia
  unsure (1)..(546): unsure at all n locations
cgaagttacaaatccactcaatctcaaactcctataccactgcaacaacaacacacaactacagaactggtcactactgtcccttcctctcttttgtcggtaaatggagttacccgtcgtagatctgtctagttacctcgacttctccggtgatgaattaggatccgatctactcgaatcatgccgacaagtgagtcggatcctaaaagaaaccggagctctcattgttaaagatcctcgatgttgcgctcaagacaacgatcgattcattgatatgatggaaaattatttcgaaaaacctgatgatttcaaacgattgcaacaaagacctaatcttcactatcaggttggtgcgacgccggagggagttgaagtgccgaggagtttggttgatgaagagatgcaagaaaagttcaatacaatgcctaaatggtacaaaccccatattccggaagggccngatcataagnggggggnttttttggggggttggcctaggcatttacnccgggttaggggttaattnttgngcctttttccggnggc

SEQ ID NO: 83740 - DNA, 576 bp, Arabidopsis thaliana columbia
  unsure (1)..(576): unsure at all n locations
acgcgtccggagtcttaaagatgatcagtcggcgagttttgtgataagcaatttgggttcatccgcaaaagcagatatcaaggttagttttaatgtgaacgatatttgggatctacctgtcacgttcgagagaagcaatgttggtaaattactcaccgggctctcaagcataagggacctaactataagtggaacaactttgatgatcatttgtcactacttgaagcacgaaccgatgcctcagttttgtaacatggtgcggttaaatgcgagattctatgattgtgatttggaaatgttgccatgcgttcttgagagctgtccaaatctcaaatcccttgtcttgggtctactatcttccgctgagacggaacaacaatcaagagtctcgtctgtgcctccgtgtttcctatcatcgctagagtttgtaggagataagaagcagactctgtagaaagcgttatgtgatgaaagtagcaaggtactttgcaaagaaccctgtaatgctgaagaaatttgtataggttggganagttccatcnannagaagtctnctgnattncnggggnnnaatcc

SEQ ID NO: 83741 - DNA, 587 bp, Arabidopsis thaliana columbia
  unsure (1)..(587): unsure at all n locations
anaggcctcttagggncncttgggccattgccctcttganccgaccgnccccagtttgtacntngccggttaatncggatcctatgatgtgattggaaatgttcccatgcgttcttgagagctgtccaaatctcaaatcccttgtcttgggtctactatcttccgctgagacggaacaacaatcaagagtctcgtctgtgcctccgtgtttcctatcatcgctagagtttgtagagataagaagcagactctgtagaaagcgttatgtgatgaaagtagcaaggtactttgcaaagaactctgtaatgctgaagaaatttgtatatgttgggagagtttccattcaagaagaagatctacttgcattgctgtggcgatatagcatatgtgaaatagaggttcgtggactgcgaagatgattatgtttatctgtgatgagaatttagattcgattaaaatcataaacatgttcgaggatttggaaaactttggtttgtaatttggacagaactcatggatgatgcttgaggattccaaaactctttcaagtattgtttaatcatctattcaaaataagtcgttgactc

SEQ ID NO: 83742 - DNA, 484 bp, Arabidopsis thaliana columbia
acaacattgtcaggaacagctccacttgtttttctattcgctaaactctatggaggaagtttaggatcttatggaggaggatcatataacccttatgaaactacaaaaccagcagcttcatcttacagagcaacaccaacagcatacagcccaaagcaatcaggtgcacaaatcgagtttcttcattccataactagcaactggatagccgggaacacaagatactataggcacagagtgatcatcaaaaacaattctcaaaaaccaatatcagatctcaagcttaagattgaagatctctcaggacctatctggggtttaagacccaacgggacagaagtatacttaccagcttcctcaatggcaaaagactttgagagcaggacaagcttatgattttgtctatgtacaaggtggccctcaagctaaagtctcagttttgagttacaactagtgagaaaacaacactttcttcaatcttttt

SEQ ID NO: 83743 - DNA, 547 bp, Arabidopsis thaliana columbia
  unsure (1)..(547): unsure at all n locations
tgcctccncnacnttggggganttnggcttngggggggnnctttaccnttnggacctcaaacccggcgnttcatcttccaaggcaccccnaccaccttccggccaaaggcaatcngggccccaaatcgnggttcttcattccataacttggcaactggatagccgggaccccaggatactataggccccaaagtgatcancaaaaacaattctcaaaacccaatatcagatctcaagcttaagattgaagatctctcaggacctatctggggtttaaacccaacgggacagaagtatgcttaccagcttcctcaatggcaaaaggctttgagagcaggacaagcttatgattttgtctatgttcaaggtggccctcaagctaaagtctcagttttgagttacaactagtgagaaaacaacactttcttcaatctttttgtttatgcttattatgagtgaaagatgtgaacatagccaaccaagttgagcctaaatatgagaaatgtaaatttgtgacccttggtagagaatgcttttttgtcttcct

SEQ ID NO: 83744 - DNA, 476 bp, Arabidopsis thaliana columbia
  unsure (1)..(476): unsure at all n locations
aactttctttgcttcctctttcaaagcaacacattatattaaatctcaagaaacaaagtaaagaaaaatgaagaacgaatctaccttcattgatgtccctgcagaatccagctcagccatgaaaggcaaagctcctctaatcggtgtagcaagagaccacactactagtggctcaggtggatacaacagaggactcgccatctttgacttcctcctccgtttagctgccattgttgcagctttagctgctgccgccacgatgggaacaagcggcgggactcttcccttcttcacacagttcttacaagttcggagctagctacggacggtctaccaacttttccagttcttttgtgaatttgccatggcccttgttggggggggtaatttcggttctggctttttccaatttccggtggnaaaaatccttttggccttttggcaaccgncccaaggattcnntttggnttggtntt

SEQ ID NO: 83745 - DNA, 556 bp, Arabidopsis thaliana columbia
  unsure (1)..(556): unsure at all n locations
agcggccgccctttttttttttttgggggaaagaagaaacatatacccgctaaattgtttcaaaccggagattcattgcgactttgtgagaaaatgaactagagagtttactacaaagtgtgtccactatgcagttagctacgaaagcgcttacagacttacagtacactgaacttcaactttctgctatcatcatctcaggttatattgctacaccagcagttccagaaacaacgcttcttgtttgttggtgaggctgagttcctcaaaggttaaggcaccgtcttgaatgctgaaagcccgtcgaggatatggtctaaccactctatatgtgccaggtttgactaatccagcagcatctatgaagtcaaaaaggtacttaagcttgtctgatttgagaaagcgacgaccatgacggctgctatcctggcattctaacaagtagagtgatggcacttcattttcaccagacggtcatgggagcgtgccttctccaggtccncctaaaaccctgatcgggatgngncctgggatccagtggtatatggagctccga

SEQ ID NO: 83746 - DNA, 455 bp, Arabidopsis thaliana columbia
ccagaaaagcagattttcaatcacactttcattttcctttttaaaaagattaatacaacacaattcacaaggccatggatgagtaataattacacaatggtgacataaattttacaataatgatgaacacacatataaggttttgattagtgtcttttcagagcgacgccggagatgacaacgaggatggtgaagaatacgacggagacaaaggcagagacaacagctccgctggatttttgacagaaagtctccaaactgttggcaaatggggagccagttcgtgttctggcttaccactgtgtgctagatatgatattgctgccgccgatgatgcagccgccgtgttcaacgccaggaccccagtgtcaagaacgagcaagaggagtcttgtggcggtggcgagagggcgaaggattgtgacgacggagattggaagagacagaacgagatat

SEQ ID NO: 83747 - DNA, 996 bp, Arabidopsis thaliana columbia
cttagaagcaagagttgaagaacgagagttttataatcgggtcattgataaaggaaaccaacgcacagagggctcataacgtgaagtcacttgaaaagctgttggatgaagagcgtaaggctcatatagctgcaaatcgaagagccgaagctctttctcttgagcttcaagctgcacaggcacatgttgataatcttcagcaagaattagctcaagcaaggttaaaagaaactgcacttgacaacaaaatcagagctgcgagttcctcacatgggaagcggagtagatttgaagatgttgttgatatggacattggagaaggaagtgacagaatcttgaggactaataaacgagctcgaagcacaagaggagatgatcacggtcctactgatgaaggcgacgaggactttcaaagtcatcaagacaatggcgaggaggaagaagaagaagattacaggaagcttactgtgcagaatctaaagcatgagctgaccaagtacgattgtggacatttgttattgaacagaggccatcaaaacaagaaagagattcttgcgttgtatgaagctcatgttcttcccaagaaagctttagcgagagaggaagagagaaagaaacagagagaagtcacttcttcttagaggacaagactctgtacagagtaaggagataaacatgtttaatctcaaaaggtttcgatctctagagatttagtaagagttggaattagaaaaggctcgtatggtttctctcttttaatcggttttaccggtttacctggtactgcagaaagtaaaccgaattagccatttgtattgaatctgagggtttaggtttttttatgagtgtttttttttgtgtgtttggtatttaatttgtgtggggtttgagtcggtttggtgttttgactttttgatttttagattcaagtctttttcagaattctgttactcgtttgagatcgaccgtttgctaaaaattttactcttcaatcct

SEQ ID NO: 83748 - DNA, 568 bp, Arabidopsis thaliana columbia
  unsure (1)..(568): unsure at all n locations
cttagaagcaagagttgaagaacgagagaaagaaatcgggtcattgataaaggaaaccaacgcacagagggctcataacgtgaagtcacttgaaaagctgttggatgaagagcgtaaggctcatatagctgcaaatcgaagagccgaagctctttctcttgagcttcaagctgcacaggcacatgttgataatcttcagcaagaattagctcaagcaaggttaaaagaaactgcacttgacaacaaaatcagagctgcgagttcctcacatgggaagcggagtagatttgaagatgttgttgatatggacattggagaaggaagtnacagaatcttgagggctaataaaccgagctcgaagcacaagaggagatgatcacgggtcctactgatgaaggcgncggggncctttcaaaaggcatcaaggcaattgccgaggagggtggaggaggaggtgcttcaggagctttcctttgcaggatctaagcattgnctgcccaaggtcggttttggcatttttctttacngggcctcaacagaaggttccttcgtttttagcctttttcca

SEQ ID NO: 83749 - DNA, 539 bp, Arabidopsis thaliana columbia
  unsure (1)..(539): unsure at all n locations
aggcttggtttggtgggatcggtttacttctcattccttaaagtataaccgtcctcacctcatcgagtttctttcttctgaaaatgtaattgtctccaatcttacgttcttgaatgctcctgcttattcaatctattcaatctactctagccatgtatatattcataagatattggcccattcttctcctaaatctccttatacaatcggtattgtaccagattcttctgattacgtctgcatccaaaactctaccattaacgtggggtatgacgcgatttccctcaaaagcggttgggatgaatatggaattgcctattctcgtcccactgaaaatgttcatataagaaatgtgtaccttcgaggagcttctggttcctctatctcctttggcagtgaaatgtctggtggaatatctgatgtcgtggttgataacgctcatatacactactcgttaacccggcattgcctttagaaccacaaaaggcagaggtggttatatcaaggggacgtattcaacatcggtatnttngnanggc

SEQ ID NO: 83750 - DNA, 564 bp, Arabidopsis thaliana columbia
  unsure (1)..(564): unsure at all n locations
gaaactatctctcctttttattattaatggcttgtggaaaactgctgaaacaaaatttctttgtttacacatgaatgaagaaatgaacctgtacagatttcttatctcagaatatgcaaacaacataaaaataggaaaccagaataaccgaaaggaacatgtatgatctaaagacaatgtggtttacttgaggaaagaatctgaccttctctaactccacaaaatatgaaatgattgatgaattgaatcctatcaaagaatcccaagatatgtttcttgctttttttttcttttttcttttgcagtctgtttcactagactgcagctctaccgtaagcatcagcatctctcttcagctcgggacacggttcaggaatgactgactccgaggacccgtaaacgtaggagcattgccaagaaacagaagaacctgggctcatcggcaaagaaacattcgccaaagccactgggctaaatggggatccttggacccaaanattccccgcaagccaaggnccccccaaaatgtgcnaaccggnggncccaggggggnctccacnnntt

SEQ ID NO: 83751 - DNA, 474 bp, Arabidopsis thaliana columbia
aagagactcgttggattcgtgaagccgaaaaaaaaaaaaaaaatggtaattctcagcaacgtctcgttgttctcctgctgcaacatctctcagaaaccatctctcttttctccgtcttctcgtagttctcattgtcccattcgttgctcacagtcacaggaagggaaagaagtggttaccagtcctttgagaagtgtggtttggtcattaggagaagaggtttcaaagagaagtctatttgcacttgtctctgcttctctcttctttgttgatcctgctcttgcttttaagggtggaggtccctatggtcaaggagtcaccaggggacaggacttatctggcaaagatttcagtggccagactcttatcaggcaggacttcaaaacgtccatcctaaggcacgccaccttcaagggtgctaaggtggtaggtgctagcttctttgatgcagatctaacaggtgctgatttatcg

SEQ ID NO: 83752 - DNA, 577 bp, Arabidopsis thaliana columbia
  unsure (1)..(577): unsure at all n locations
tctttttttttttttttaataattccagacctatatttgctaaaacagacgaagcaacaacaatatagggttttaccaaacatagataaagcatgatacatacgcatgaaacgagcatatctgaaacacatgacctattcattgacttgtgatgatgatctctcacaaagaaaaagaaacaaaacaaacaccacgagacacaaagaaaacgctgcaagcaatcaagcgcattacagatggaaaattattaacaaaagggtcactttagaagaaagaacaagtccagaggctgaagcaggatttggatcacttagaagcagtacttgataccccatccaacacacaatggcagctccctattaaagattttcattcacctctcaaacagtggncctagctagaaccncccgngaagatctggcggaaatncggcgaagagcnccggcaaatgncccgttcccccttggggttcccgnttccccaccncccatggctttgggangggnggacccaagnaagccccgggganncccccccnattcangtcaaggggaaaaggncngtaaccgggaatngg

SEQ ID NO: 83753 - DNA, 507 bp, Arabidopsis thaliana columbia
  unsure (1)..(507): unsure at all n locations
gcgggattccgatttcatccgacggacgaagagcttgtcaagttctatctttgccggagatgtgcgtcagaaccgattaacgttccggttatcgcagagattgacttgtacaaattcaatccatgggagcttccagaaatggcgttgtacggtgagaaagaatggtacttcttctcgcatagagaccggaaatacccaaacgggtcgagaccaaaccgggcagctggaaccggttattggaaagcgactggagctgataaaccgatcggaaaaccgaagacgttagggattaagaaagcactcgtcttctacgcaggaaaagctccgaaagggattaaaacgaattggattatgcacgagtatcgtctcgctaatgtcgatcgatctgcttctaccaacaagaagaacaacttaagacttgatgattgggttttgtgtcgggtatacaataagaaaggacaatggggaggttttccggcgnggttanaancnccggaaantngtccg

SEQ ID NO: 83754 - DNA, 311 bp, Arabidopsis thaliana columbia
ataataaaaacttgaaaacattatcttacaatagtaaagcttgtttcaagtaatctctgtaaacaaacaaaaatcccaaaatgtgtgtttttcacaattcggctgcaacaatcaaacactaatgttgtggcggaacaataaatataacgtgaaaacattattctttgatacattttgggacagaaacttcgatgggtctctttagccagtgacatactaatccattttctccggtggcaagttcagaaccgattcggcaacctcttcgaaaggaacgaagacgaatgcagtcatacccctcttgtgtgaga

SEQ ID NO: 83755 - DNA, 740 bp, Arabidopsis thaliana columbia
accaaactcaaaaaacacaaaccacaagaggatcatttcattttttattgtttcgttttaatcatcatcatcagaagaaaaatggttgcgatatcggagatcaagtcgacggtggatgtcacggcggcgaattgtttgatgcttttatctagagttggacaagaaaacgttgacggtggcgatcaaaaacgcgttttcacatgtaaaacgtgtttgaagcagtttcattcgttccaagccttaggaggtcaccgtgcgagtcacaagaagcctaacaacgacgctttgtcgtctggattgatgaagaaggtgaaaacgtcgtcgcatccttgtcccatatgtggagtggagtttccgatgggacaagctttgggaggacacatgaggtgacacaggatacgtgagtggggctgctggtggcgcgttggttacacgcgctttgttgccggagcccacggtgactacgttgaagaaatctagcagtgggaagagagtggcttgtttggatctgagtctagggatggtggacaatttgaatctcaagttggagcttggaagaacagtttattgattttatttattttccttaaattttctgaatatatttgtttctctcattctttgaatttttcttaatattctagattatacatacatccgcagatttaggaaactttcatagagtgtaatcttttctttctgtaaaaatatattttacttgtagcaaaaaaaaaaaaaaa

SEQ ID NO: 83756 - DNA, 426 bp, Arabidopsis thaliana columbia
gtgtacaaattgagtgtgttcatatcaataaccactaaaagcaaacgatgtttgtgtacacaaaaagatgaagagatgggaggaaagagaaggaaccaaaacacacccaactactagaaactagggtgtgtgggtcgcaactacgtgtcagagtcaaaatagacttttgtgtatcatctgcctttgcaccatttatatctgatccacaagccaaactactgattcgggtgtttaggtttgggaaatgtaagatgacagaatcagtcttggtggatttcatcgaaaggcgcagcagcaaacctcacatcttctggccgtgcaaccacaactggttcatctgcaaataacgctttgaggaatgatggagtctttaatggacgacgattagtcattcgcggataaacctcagccagaaagtagtaagcg

SEQ ID NO: 83757 - DNA, 466 bp, Arabidopsis thaliana columbia
gcgtccgaggtagcagaaggagcaaccgctctgtacatggtctcaattgagaggaatccaatacatttcagaccgaggagcacaacaactctctgtagatattgagtacttgagcaatgtgctttcggctctgtccatgccaattccgccagttcttgcaacttttcagacgtgtttggctacaccgagaggtgagctcaaagatgtgatgaaatcagaagctggtaatgaactcgactgccctacagctaatcttgtttgtaagatgcgtcgtatcagtttcgattagtctcaaatctacttgggtttcgataagactttgctaacaaatcggctcgtccattgtcatatttgtattccagcattgtctaatgttttaaggttacggagttttttccggggtttttatatgtttaggaaatagtttgttacttaaataaaatgtactcgtgacaagccgttttag

SEQ ID NO: 83758 - DNA, 776 bp, Arabidopsis thaliana columbia
caaaatcctcttattctacatcaaaccaagatgttataaaagatggaaagaatttctgatcatgctaatgataatcgcatctacgatgaatttgagccactctcaaattggaaaactgaacaaggattcgaagctctcactatttaccttccagggtttaagaaagagcagcttaaggtgcaagtaaccaccacgaggaagctgagagtgatgggagatcgtccagcaggagccaacaaatggatccgtttccgcaaagagtttcctattccgccaaacatcgacgtcgactccgtctctgccaaattcgaaggcgcaaatctcgttgtgaggcttcctagaaccgagccaatgggcaaacaaccttcacctattggtacagccacaaaacctcctccagttcctaaagaaaaccccaaccttcctagcccggcagcgaaagaaaaggtccaaccaccaaaggaaacaagagagaatgaaacggaactagaaaaacaggccgagaagattcaatcaccaaagccagcaagagagaacgaagaagctcttaaccaagattacagaagtaaagtgaatgaatacaaggagaatcttggaggatatgtggcactgatgaagaataacagaacagcacttacggctggtgtggttgttcccgcagctgcggttctgttgctgtctcttggattctatgctggccaaatgtttacttcttaattcttacttacctatttgcatgattctcaaaggaaaataaaatgtactaaaatttgcat

SEQ ID NO: 83759 - DNA, 612 bp, Arabidopsis thaliana columbia
ctggacatccatcccagatctccaccagactcattactctgcctgctcgggtctagtggtaaacgggaaagtccacgtcttgcacaaaggcttgtccacggtgcaggttcttgagagcgttaaactcgggtgggatgtcaaagactatggctggccgcaaggtccaatggtggtcgttgaggacgtgctttacgtgatgagccatgggctggtgttcaagcaagaaggtgacacgtggaagatggttgcatcggcctcagagtttaagcggaggatcggaatggcgatgacgagtttgagtgatgaggttttgatcgtaggaggagtgatcggacctgataggctcaattgggacatcaagcccttgtcagatgtcgacgctttgacagttgggaatgatcgtccggcctggaggagtgtggcgccgatgacaaggtgtcgtgggacgatccttggctgcacgcagttgacaatctgatggatgggaatgtggcttcattatgacgtctttcagttcttttttgttttgtattttcttcctgtttgttaactgttgtgagcaccactgtttttaaatcttctttgagaaatgataataagcgaatagcagct

SEQ ID NO: 83760 - DNA, 514 bp, Arabidopsis thaliana columbia
ctccgcacaacccgaccgggaagatgttcactagggaggagcttgaaaccattgcatctctctgcattgaaaacgatgtgcttgtgttctcggatgaagtatacgataagcttgcgtttgaaatggatcacatttctatagcttctcttcccggtatgtatgaaagaactgtgaccatgaattccctgggaaagactttctctttaaccggatggaagatcggctgggcgattgcgccgcctcatctgacttggggagttcgacaagcacactcttacctcacattcgccacatcaccaccagcacaatgggcagccgttgcagctctcaaggcaccagagtcttacttcaaagagctgaaaagaggttacaatgtgcaaaaagggggactcttggttaaggggtttgaaggcaaggcgggatttacaagtgttcccatcgagcgggacttactttgtggttgctgatcacactccatttggaatggagaacgatgttgctttctgtgagtatc

SEQ ID NO: 83761 - DNA, 520 bp, Arabidopsis thaliana columbia
  unsure (1)..(520): unsure at all n locations
gaaagactcactctcttttctctctctatgaaaaagctttgccggaaaggaaccgttcatccgtcgccaccgccggcgataaagaccgacgaacagtttctatctcttctccccgtagctatcctctctctcgtggcggcgctctcggtggaggatcgtgaagttcttgcttacctcatctcaaactccggcgactcaaatcgtatctctcgtctcaagaaaaacaaagaagataatcatcactctcctctctttctttgtgattgttttagttgttacacgagttactgggtcagatgggacacgtcaccgaggcgccaactcattcacgagatcatcgatgcttacgaagatagtttggagatgaagaaggaaaaagaaagatcgggagaaagcgatcgggaaaagcttctggacgagttaactcgataggaacgagtcgactcaaggagtttgggggagttcggccgagtttccttgtggtgactcggtgaaanatggaaatttcggcggnttaaga

SEQ ID NO: 83762 - DNA, 588 bp, Arabidopsis thaliana columbia
  unsure (1)..(588): unsure at all n locations
attnccngggnctgcccactgtgtccgggggatggttcttgagaacacttatgtcacctgggaataatttactcgctgacccgcatgtccttccagccacacagctcacttctaaggatagttttgctgtgtcaagatatatcagccaaaccaagaagccgattgcacacattactccttcaaggacagatttgggactaaaaccagcgcctgtaatggcttcattttcttcaaaaggtccaagcatagtggctcctcagattctgaagcctgacataactgctcctggtgtgagtgtgatcgctgcctacactggagcagtctcttccaacaaacggacagttttgattcctcgacggcctttctgtttaatgctatttccaaggaaccctctatggcttgtcctcataatctctggcaatttgcgggtcttctcaaaactcggtaatccttcttggggccccgcagcttattccgctcttgccatcatggcttccgcaacaaaaattgggtgaaattcctgggccnttccaaaatgnaccancatgnggaacacntttagttttgggggaggnaaggccaccaatt

SEQ ID NO: 83763 - DNA, 330 bp, Arabidopsis thaliana columbia
  unsure (1)..(330): unsure at all n locations
gtaacangtaccaaacaacnttggtgcangggaacntggagtagacaaaagtgaaatagcactgtggtttactgataaccagctggatctcgagatgggaaaagttgtggtaaaaccagctaaagcaggttcaagcattggtgtcaaggttgcttttggcgtaaatgattcaattaaaaaggctactgaacttattctagagggaattgatgatagagttgttgttgaggtgtttattgaagatgcatatgagttcactgccatcggtcctggatgtgggttctggttctgtttgccatcctgttgctttgatgcctactgaggtgcaac

SEQ ID NO: 83764 - DNA, 543 bp, Arabidopsis thaliana columbia
  unsure (1)..(543): unsure at all n locations
gcatttttgtaggtaaaaacgctgaagaaggataaggagcatcctttttcaacacaaaaatgcgcgtctctctgtaccatccctccccaaagaagatcaagagaaagatagaaagaatcccaaaagattgaaaacaggttctgcaaacaaattccatatatatgtgcatcaaatcagcttgctggatagaagttctgctgctgcatcccttagatcttcgtactgataacatccatcgaagaattctgcaagcttcattagttcttgatcttccatgtcatccataaatggcttaatggggactccattgtctggctgcaacgagtaggagaaaggggttatcgtcaactaggaaaacaattccgagggcattcttnggcacccaaagntaaggctttggnatatcttccattcaatttcttgtgcatgaatcnnggtntagcccnctgtgggntcacacgggtnntngtcaaggnttttccaaaacctntgnaggatattcgggaacccgnntttaaggttccccngntagtttnctgtctc

SEQ ID NO: 83765 - DNA, 459 bp, Arabidopsis thaliana columbia
  unsure (1)..(459): unsure at all n locations
agggattggnctttcttctaatgggcctgatagaaaccaatgggcttggaattggcgttgtccattggaggtgttcccagccgtacactgcccgtcaaactggtccgggtcccggtcccggacagtacaatcctcctccgtatccgccttttccgacagctgcggcaaccaccacatctgatgatgtatcggagaagacggtggaaatggacgtgaccactccgactagcctcaagggcaatataatcgggcttattgatcgagagtatatagacttaggatcatataggcaaggccataagcaacggaaaagcccaacccatataccaagctatatggctccaaccggatctgcttaaggntaaagttcgggnttaagggccnnccggtaaacttcaagggactttggtttatgccggttttggnncttcttggnccaaacggggnnnggttattggt

SEQ ID NO: 83766 - DNA, 820 bp, Arabidopsis thaliana columbia
  unsure (1)..(820): unsure at all n locations
tcgtgttggaggctgatggttatcaaccttatcttatatctccagagaaagggttgagatcgttaataaaaaccgtccttgaagttggctaaagacccagcacgactatgtgttgatgaggttcaccgagtgcttgttgacatagtttcagcttctgcgaatgccacacctggtcttgggagatatcctccttttaagagagaggttgtagctattgcaagtcccgcacttgatggattcaagaatgaagctaagaagatggtagttgcattagttgatatggagcgtgcatttgtaccacctcagcacttcatccgcctcgtacaaagaagaatggaaaggcagcgtcgtgaggaggagctaaaaggtcgttcctctaaaaagggacaagatgcagagcagtctctcttaaacagggctactagtcctcagccagatgggccatcatcaactggtggtagcttaaaatctttgagagacaaattaatgccacaagataaagataaagataaagaaaaagagactccggaggtgtctggtctgaaagacttctggacctnagggagngataacttcagggtacttaattgaaggaaaagtgcnanggcaaattgggtngagtaggccgtttggttttgtcctgaattgnaaaaancttggaaaggtttgggttttccaaaaaaccaaggnggaangaancttcccgngggacttttaaccttttggggggtttcagnttcgagnaattnctnntgttnagggggaaatcaanggcncgaagttggatcnaatggcccgtntaaggcccgccttttttagg

SEQ ID NO: 83767 - DNA, 515 bp, Arabidopsis thaliana columbia
  unsure (1)..(515): unsure at all n locations
tacacaagccctaacgagaccatcctttgctctgactcttaccagagcatgtactctcagatgcgttgtggcttatgtcaacaccaggaggttcttagagtcggcgctgtcttcgcctttggattcatcagagccatcaagtttcttgagaaacactggatcgagttggtccgtgacatcagaaccgggactctaagttccctgatcaccgatccttcagtgcgtgaggcggtcgccaagatccttaaaccgagcccaaagctagctgatttcggtggaatttgagtgcaagatagtcgtcctggcaagggattattactatggctgtggcctaacacaaagtatgtggatgctgattgtgaccgggacaatgtcttcaatacattcccactttgggctacttacagtaatgggtttcctcttggnntgancantgtatnnttcccctgagggttactttngggtgaantnagggcnntttggaaaccaagggggggtttttaaaggttatatgc

SEQ ID NO: 83768 - DNA, 583 bp, Arabidopsis thaliana columbia
  unsure (1)..(583): unsure at all n locations
ggcaactttcatcagattcactgctcctttgttttgcttcttcttcttattctctctctttgctgaccaaaccatgtcccaacctcaacacatggccactttctgcgacgacagattatccgacaacttcacacaaaccagctcatacaaagcaaaccgtgaaaccctactttcttctctccgtgaccgttcctcccttggaacctattccaatgccacaatcggtcttagccccgacacagtctatggcatgtttctctgccgaggagacctcaccaaaacatcatgttcggactgtgtcaaaaccgcaaccctagaaatcactaaaaataataactgcacttccagaaaaactgctctaatattctacgaggagtgtatgggttcgatactccaatggtttccttcttcacgctcgtaggacctggcggcgcccttgggggggtaaaaacttttttggcacttttccaaattcncttttngggnnttccacaaacggttncatnaggnggggacnnttttccannggtaaaggttttgtttttttgngctttnggggggtttccgggaaannattgggggg

SEQ ID NO: 83769 - DNA, 1245 bp, Arabidopsis thaliana columbia
ccggtccgcaattcccgggtcgacccacgcgtccgtctctcttctcttctgtctctctcttgttagttcactccacataataaacaccaaagatttcattctcttctccataatttcgaagtttcttgaattgggtttgtttcttgatttgtttcttgaattgggttttggtcttcttttcttactatatttggatatgatgatgggtcaagatgaggttgggagtgatcagacgcaaatcataaaagggaaacgtacgaagcgacaaagatcgtcttcgacgtttgtggtgacggcggcgacaacagtgacttcaacaagttcatcggccggtggaagtggaggagaaagagctgtttcagatgaatacaactcggcggtttcgtctccggtgactactgattgtacgcaagaagaagaagacatggcgatttgtctcatcatgttagctcgtgggacagttcttccatcgccggatctcaagaactcgagaaaaattcatcagaagatttcgtcggagaattctagtttctatgtgtacgagtgtaaaacgtgtaaccggacgttttcgtcgttccaagcacttggtggacacagagcgagccacaagaagccgaggacgtcgactgaggaaaagactagactacccctgacgcaacccaagtctagtgcatcagaagaagggcaaaacagtcatttcaaagtttccggctcagccctagcttcacaggcaagtaacatcatcaacaaggcaaacaaagtacacgagtgttccatctgcggttctgagttcacttccgggcaagctctcggtggtcacatgaggcggcacaggacagccgtaaccacgattagccccgttgcagccaccgcagaagtaagcagaaacagtacagaggaagagattgagatcaatataggccgttcgatggaacagcagaggaaatatctaccgttggatcttaatctaccagcaccaggagatgatctaagagagtccaagtttcaagggatagtattctcagcaacaccagcgttaatagattgtcattactagttgttttttttactacataatatgatgaaatatttgtgaattcttcttacttactactatattgttgatcaaaaaaaaaaaaaaaaaattaaattgaatcaaatataatcatttttaagaaaaaaaaaaaaaaaagggcggccgctctagaggatccaagcttacgtacgcgtgcatgcgacgtcatg

SEQ ID NO: 83770 - DNA, 608 bp, Arabidopsis thaliana columbia
  unsure (1)..(608): unsure at all n locations
aacatggcttcaacaaaaataaactctttaacaacaacaatctacaattacaaatccccaagaggatacattaaccacaaatcccaaaaccaaatcaaactaatttcaaattccctaaacccaaaacccaacacaacacagcttcccaacactctctacagtgtcagcttcaagactattggaacaggtaagcttggcatctccagatatcccgatttcgaatactctcctctaggtggctctggtgccggaaccgccaagaaaatcgacggcaaaaacagagcatcaaactctgaattgctctgttttgtttcaatgtggccactctttatattccttctctcactagccaaaccacggaggtttctcgggctttccattgcccaccggtttctaaaaatcggtatctcaccgggggttttttccaagggaccttttnaaccaaggatccggggaaggttggnattgggggttnttnggggnaggtcttttttacgggnggggnggngggggtttncaaggntcccgnngttggtgggnanacttttttacgnggggggatcgntnggggggancagggngggaaggggaacttgccgggggnnttc

SEQ ID NO: 83771 - DNA, 553 bp, Arabidopsis thaliana columbia
  unsure (1)..(553): unsure at all n locations
aagaaatttcgtctccatcatcaaagccaaaatctcaggcagcggacgaggatttcatgtcaacttggcagagaattatccgcctagatgctgtgagagcaaatgacgaatgggtgccctactcaccaactcaagctgctgtttctgagacaaaagcccggggaatagccattcaggttggtctcaatgactatgaccacttggaaccctgccggatatttcacgcagcccgcctggtcgggatccttgaagcctacgcagtctatgatccagaaattggttactgtcaaggaatgagcgacttactatctcctttaaatcgcagtgatggcaagacgacgtcttaggaattctggtgcttttgttggcttcatgagtaaagcacggcataattttcccggttagacgggggttggaatcaaggngggaacntttccaattgggttcgnaaattcctaaaattcaaaggccatttacttttcccngcacnttggggaccttntaggaaaagcnttttttttttntcccnaanggttaaagntttttaannggg

SEQ ID NO: 83772 - DNA, 555 bp, Arabidopsis thaliana columbia
  unsure (1)..(555): unsure at all n locations
gaggctttgcgnccatnnccgntcgnanttgacctcngngcgccgcgcccctgtggactccggcagattgtggagcttgtaacttcattaacagcatcaatttgcttacttatctcggatagtcctgaagtagtgatttccaaagaaaggaaagagcgagtatggtcatcattcacaaagacttcccacttattgaaatctatcaagtatctcttctgcaactgaagcttttgccgaagcatagaaatcaccgagttaatctgatgaacacgtagtggaacgtttcttcctaagcttatgtggaactctctccccaaggcacgctcaaacttctgatcatccttgcatagaatgctgagtggcacatcagcctctaccaaatgaagatgaggaacaactgatgcaaccttctttaaaaaacatacaatctccttctttggcagtggaggtatacaaacaggtacgtaaacgtgcaaagcgtaatttccatcgacatgaggaaagtttcttacacgaactccaggctctgttgagaagaaatccagtgaacctgtg

SEQ ID NO: 83773 - DNA, 516 bp, Arabidopsis thaliana columbia
  unsure (1)..(516): unsure at all n locations
agttaattcggctttttaaagatgtgaaccttttaggaaggaagctgtatgttcttggaatttgagtgttgtgtttactttgaagggtaaattacaacaggagcttctacttgcattgttaagcatttgaattgaagagctatgattggtttcgatagcatcacggctttgcttagctgcctttcattttcaagtgactcttgtgatgtgtgattctgttctgtaaacttctctgtctcatcttccaaagcccctgatacaaccgcaggtctcaccggcctcaccctgcagtggagatggcatgagtacttgagcaagtttgagttgtaaattgtattgccactaaaacttgggagagccattttgattgcaggtcccatccagtttccaactttggtctcgtctgatctaatttggatgttgcagatatcagtagaagcagcactatcaacttcactacctaaccccatnaatcncaggtgggcagngagtccaacaatggccagaccaagctgc

SEQ ID NO: 83774 - DNA, 445 bp, Arabidopsis thaliana columbia
atcaaagaaaaaactttattgatcagaccaaagagagtataaagggcaacttcagccattttaataagttaagccagaaactctgtaacactaaacacaaaagcatcttcagtcttaagaaacgaaacatagttaaagataaaagaagatgtgtcaattggtcgacgtgagctgcctgaggttgtactttgctagctccttgtacttctctaccactccaattaagcacactgtcttaataatttccaccacgatcgtcatctccggattgctcaaatcaacctttgtgaaggggcaggaatagatttggcgatcgtggttattattttcaccctatcaagccctgggttagcacgcgctccatacaacacagcaaattcccggggattttcgggcccaatggggaggtactgccctacaagcggcttgatggctcttgaaattt

SEQ ID NO: 83775 - DNA, 589 bp, Arabidopsis thaliana columbia
  unsure (1)..(589): unsure at all n locations
ccggccgccctttttttttttttttttttttttaaaccaatgcaaataggtttcaacttaagtgatggaaaaactacaaaaaatgtctctgcatcaaaataaaaccatatccaagaaaatccgaatttgtgggccctcctcaaaactatcaactatctaaaaccattttggtaacattgaagcatcacaacctatttgtaggaggtttaactctgtaaatacgaactatccagttggatgttgtgtaagcttcttctaagtgttcaagtttgatatctttgttccctatctccactcctcttgctctatcatacccgggtggcttgccgtattctgtggtcagctcaccggaacctgtaatagcattacttgtacctgtagacagttcagcatcttcggnggatgcacctttgtctacacgggaattcacccattcacaaggnaatcagggtccttganactgggggancccanctcnatcctcaccatccaaaagaacttgtggtaaacctgagnataccagtancccccaaggggccataaangnccancanggccntgtggncggcactcaaangngatggnggna

SEQ ID NO: 83776 - DNA, 573 bp, Arabidopsis thaliana columbia
  unsure (1)..(573): unsure at all n locations
ttggatcctatgaccagagcggccgccctttttttttttttttttctttaagaaaaatatttataaaagaaatcaaattacacggcgatcttagctagtgtcttcaacattacacagtatacgaaacaatacactatatatattagttattaattaatggttacaaggacataacaacatcaaacccaacatacatactgcataaagatggtaatgttaaaaaaaataaaatatgctatttgtcaatatgatcggcatacaattaaaaagattcaaatatttatgtatttgtgtgatagacctaatattaagagaccgttaatttggccatgcaaacggctgattcgatgacgggtgctgggctgggtagtaaaacggggctgccgggatgctgccacttcttaaaaccgggggggttccccgcctctttacccccgggggccccccccccctttaataccgcggggggnttttggggggggcccccccgggggnnaangggggggancccccttcccatcncnccgnggggggtttttaaggggggggnccccnggggaaccanctntttgg

SEQ ID NO: 83777 - DNA, 557 bp, Arabidopsis thaliana columbia
  unsure (1)..(557): unsure at all n locations
gatttgtaacagacgctgcgtgtgagtgatcgattcagtcctacaaagcatagtatgttcactgtggtacattgtacaatgacaatatatatgtgtataatataaagtgtcggtatcaatgactgtcttagtgaaacaaagtaacatttgagatatttgtgcaatcagctgcttctgctatttggattttcattgaacaaataatctcaccgtgaatcgccgccgccattaccggagacaacgagcttcatcagatcaaccgctttcttccttcctttcagactaccattctcagctacatacacgatcccttccatgggctccttcatcagcaccagacgcaaccgccgccggaagcttcagacctcggctggcagctcctccacatctcgccaggtttcaaaagcgcaccaacggggtccctttgatcggagggcccgaaccagtgcaagggtntaaagntccggannacggtagccccgnaaccnccnanccggccnggnatttngatccagggttgggcaaacgnggggggttttaaggtccggccgggtttt

SEQ ID NO: 83778 - DNA, 777 bp, Arabidopsis thaliana columbia
  unsure (1)..(777): unsure at all n locations
annnnnnnnnnnnnnnnnnnnnnnnnnnnnnnnnnnnnnnnnnnnnnnnnnnnnnnnnnnnnnnnnctttttttttttttttagttaaaacaaattttactactttcaactttggggaggttacaataaaagaggatttgataagtttattcctaatagcataacaatgtccccctccagtggaaatcgttgaaaataaaggactttattgatcgaaataaaaaagatagtgggtttcttttgaaatattattaataatggtcgttgcgtgtaaatttggaggcatgtttctgtataatctgccatgcttcagtgacatgcttctcttccgttaacggtgcaccaacagcaaatcgtaaaacgaattttccagatagagccgtgtgagagatgaatatcttgccagtggagttaacagccgcaagcagttcacggttacgttcgttacattggtcttcatcgccgtcaactggcgcaaggcgaaagcaaacgagtgaaaagtaccgagtagtgacaacctcaaaacttggatcttgagctacataatcttcaaaatgcttagcgagattgacatggtctcttataaagtttcttaagttctcggaaccatagagccgtaaaaccatccataacttcagtgatctgaatctccgagagagagaaatttgccaatctttataatttacgaaccgtatcttttttggaaacctgacatttcccggacgcgtgggtcgacccgggaaattcggaccggtacctgcaggcgtaccagctttc

SEQ ID NO: 83779 - DNA, 499 bp, Arabidopsis thaliana columbia
accggacgcccttttttttttttttttttttgtgaaatcatgctccaagcaccaatgacattttctcttcagagttagagaattatgcaggcaaatcaaatgtctgatatatatacaaaggattattaccaaccacttaagggtgttaaagcaagagtaagtgttgataaaaataacttacagatgaaacagctactacttttcttggtcatagcaatgtgagccttgaccataagcagtgtgtcacaattgtttgcatatatacatgcttcaaatcacttgagcagattctccctcaaaggaacttagagcgccgataaccgattcatatacgtctattcctttccatgaatacagtatccctttaggaacccgttatgggtcatgcaataaaataggcgtattggtcattggagagaacccaaaagttggaattcccaaagtgcgaataaagcgtgaatctgtagttgaagccaaaatttcaggctttgcgagtttt

SEQ ID NO: 83780 - DNA, 384 bp, Arabidopsis thaliana columbia
  unsure (1)..(384): unsure at all n locations
aattcttctcactgtgaaaatttgtcaacatataactttctaattgtctccatgactgtttttaaactccagcgtaaaccaagtattttttgccccaaactgcccaagaagggaatgttaattgttagattcataatcaatcacaataccccgaactcgtcgctgtccatgtcctaatacttgtgatgatggttcatatatcaccgatacattctctgggatccgcatctccgccgagtgtccagaaatgcacatcgatcctgacccggcttgttgccagtacacttcccaccattaattccncctgggattctcngnggntttctggtncaggggggnaccnaaaaaattttggcncccaaagggnattccgacnggggnggc

SEQ ID NO: 83781 - DNA, 388 bp, Arabidopsis thaliana columbia
aagaaaactaggctctcataaatttcccaagtatgaacatttgaatgttggcaaattgcacttgtgtcagatgctcattaagaaatctacatcatttgcaaaaaaaaacacaggagaatgtacaactttgtctcacagaagaaacgtaaataaggtatggaagatagacttatgtcgaatcaatttcctcgaagtcgtcgaactcaagaagccttgatgattgccctgctgctttcccttcgcagcatccttaagaggtccccaacactcgatccggattggacttaggggggccttggaatgggaaataaacccctacctaagccccccttagcgcaagattctctctaaacataactgaatctccatgcaccacagctttaagtac

SEQ ID NO: 83782 - DNA, 721 bp, Arabidopsis thaliana columbia
cacccagaaatcatacgtccagttcctaagcggatggctcactaaatgccttcactatgaacccgaggcaaccgatgacggaatcgctcctttctctcctagccagatcggtgcaccgcccatctttatcatttgcaaagattggcaagaagcaatgtgtagaatatctggagagaatgtgaccaatgcaatgcaaggttttgcttcaagcctacacgagctatgggagaagcaagaagaagagcaaagggtaaaagcgcaatctgagcagcgagatgcagagtcagagagaagtgtggtttcgaaaggtcggtcagagagcgggatatcagctttggatgatttgaaagtggatttagattcaatgaggaagaggctagtcgaggagagaggtaagggtaaagaaaccattaagcttgtgaacaacgcgtcttcgagcagcttaaaagctggtttagttcccattttcggggcactgagaaaattcacatcagaagttgtgaaagctcatgaaattgttaggcttcaacatcctcagacctcttcttgagtagagagtgtggacttaccacatttttgcaccgttttgaagttttgttacttgcaaattagacataggtctatatagaaggaaattgttgtatagatgagttcatattcaattattggttggttagtttcccttgtaacccgtttttaaatggtgaagaagaagatatct

SEQ ID NO: 83783 - DNA, 416 bp, Arabidopsis thaliana columbia
  unsure (1)..(416): unsure at all n locations
tactttnatgcaaacgagaggtttaatgatgttntgctctttggtgtggctaaattcgctggaagcaaaaggctgcgagtatccagtgttccgagcaggctgaagattaatcctaaggtcgccaaaaaggcctatagttgtgcaatactcagcaggctttaggattaggaagtgggactcaaagcacttacttctcatagtcaagaaccatctcgaagctaaagaaaatctaaaatatggaagacatagatacaagcttacgtgttgaaaagccgagcactaaaagtataaaaatgaaacaaaggtggaaagaaactgctttctctatctcatgtctgttttaaggattcttcggtcacttaagagacaaaaggcattgttttgatcactctttgaatcactcttatttttgaatt

SEQ ID NO: 83784 - DNA, 684 bp, Arabidopsis thaliana columbia
tacggctgcgagaagacgacagaaggggctgcttcgaaccaaatcgaaaccctcatcatgatagaggagcattatgtggctcaaggtttaagtattgttggatactttcatgcaaacgagaggtttgatgatgttgagctctgtggtgtggctaaaaacattggtgatcacatttctcgctatttccctcaggcaccaattctcttggtaagtaaatgtcttatcctttgtttatggaatgctttggccaggcaggaagcaaaaggctgcgagtatccagtgttccgagcaagcttaagattaatgctaaggtcgccaaaaagcttaaagaaaggcagtggtgcgactatctctggtttgcatcaatgtctgactccaatttgttatctatttgatagggaatatagttgtgcaatactcagcaggctttaggattaggaagtgggactcaaagcacttacttctcatagtcaagaaccatctcgaagctaaagaaaatctaaaatatggaaggcatagatacaagcttacaagtgttgaaaagccgagccctaaaagtataaaaatgaaacaaaggtggaaagaaactgctttctctatctcatgtctgttttaaggtttcttcggtcccttaagagacaaaaggcattgttttgatcactctttgaatccctcttatttttg

SEQ ID NO: 83785 - DNA, 728 bp, Arabidopsis thaliana columbia
  unsure (1)..(728): unsure at all n locations
nnnnnnnnnnnnnnnnnnnnnnnnnnnnnnnnnnnnnnnnnnnnnnnnnnnnnnnnnnnnnnnccacgcgtccgaaagaaaggtatcaagtaacagatatgaggaagctggccaacagaatggcgtttggtacacctgaagagagctccctcggtgatggactaggagaaggttatggaatgcttggccaggcaggaagcaacaggctgcgagtatccagtgttccgagcaagctcttcgccttcctaaggtcgccaaaaagcttaaagaaaggcagtatgcgggtggtgcgactacctctggtttgacatcgagcctggctttcactcctgtgcagggaatagagttgtgcaatcctcagcaggctttaggattaggaagtgggactcaaagcacttacttctcagagtcaggaaccttctcgaagctgaagaagatctaaaatatggaagacagagatacaagtcttgaaaagccgagcactaaaagtgtaaaaatgaaacaaaggtggaaagaaactgctttctctatctcatgtctgttttaaggtttcttcggtcacttaagagacaaaaggcattgttttgatcactctttggaaacgttttataaattttatttttgtattagagccataaaaaaaaaaaaaaaagcttattaccnnnnnnnnnnnnnnnnnnnnnnnnnnnnnnnnnnnnnnnnnnnnnnnnnnnnnnnnnnnnngcatt

SEQ ID NO: 83786 - DNA, 968 bp, Arabidopsis thaliana columbia
cccacgcgtccgctcgatttgcttttgcgacattataattttcctttcaattgactcagtgagtcgccgatcgagttagaaatgggaatgggaagtaacggagaattgaagtatgagatctcccagaacgcgtacatcaaactcgttcttcactcgctgcgacacaagacggcggcggtcaacggagtcctcgtcggtagaatcagccctaaggacgacggagttgtagagatctcagattctgtgccgctctttcactctaacctcgctctccttcctcctctcgagatctccctcatcatgatagaggagcattatgtggctcaaggtttaagtattgttggatactttcatgcaaacgagaggtttgatgacgttgagctctgtggtgtggctaaaaacattggtggatcacatttctcgctatttccctcaggcaccaattctcttgttgaacaacaaaaagcttgaagccttatcaaagggtaaagagcgaagccctgtgatgcagctctgtgtgaaggatgcttctaagaactggagagtagttggagcagatggaggaagcaagctactcttaaaagagccatcggccaatgtagttttgtcagattacatttcatctgagaaatggaaggacgtcacagatgttgatgatcatcttgatgatgtaacaaaggactggctaaaccctggacttttcaactgaagatgggtatgcgacatagctaaactagacttttgctttcatcatcttctgtcgaaaaacaaaaaagttcctcggagaccattgtttaaaatttcccttgaatcttgttaaagtattatccagctatgcaacagagctcaaattacttttaattggtacacatcttaaaccttagttatatcatttgaatgatatcttttggagcttgttacattttgattatatagttccaatcaagaaagctctactttatttggct

SEQ ID NO: 83787 - DNA, 721 bp, Arabidopsis thaliana columbia
  unsure (1)..(721): unsure at all n locations
nnnnnnnnngccgagcctaatacgacttatatagggaaacctggtacgcctgcaggtaccggtccggaattcccgggtcgacccacgcgtccggatttcttcgtggtcgccgacggagaccccaaatcgattctgcttcgaaccaaatcgaaaccctcatcatgatagaggagcattatgtggctcaaggtttaagtattgttggatactttcatgcaaacgagaggtttgatgatgttgagctctgtggtgtggctaaaaacattggtgatcacatttctcgctatttccctcaggcaccaattctcttgggaatatagttgtgcaatactcagcaggctttaggattaggaagtgggactcaaagcacttacttctcatagtcaagaaccatctcgaagctaaagaaaatctaaaatatggaagacatagatacaagcttacaagtgttgaaaagccgagcactaaaagtataaaaatgaaacaaaggtggaaagaaactgctttctctatctcatgtctgttttaaggtttcttcggtcacttaagagacaaaaggcattgttttgatcactctttgaatcactcttatttttgaattagagcaatacctaaaaaaaaaaaaaaaaaaaagggcggccgctctagaggatccaagcttacgtacgcgtgcaggcgacgtcataactcttctatagtnnnnnnnnnnnnnnnnnnnnnn

SEQ ID NO: 83788 - DNA, 773 bp, Arabidopsis thaliana columbia
gatctcgttgttcgtctcttcttctagatcaatcatggaagctagctcccaatcgcatcttcgcttcctctccctctttttcttcaaccgccgggatctctaatgtctcagagattctcacacttcccgaagtggagaagattctcgccgacgtgaaagctgttaacgtgactgtgattcctacacataatcattgtttctgggctgatttcactgtcatcgccaccggtagatccgattggcacttaagaaacatcgctcaagctttagtttatagggccaagcaaaagcagaaaggagctaaacatgtaatgttaccttctgtgcaagggtacaatagcaagtgggattgtcatagactacggaaagtttgtagtccatgcacttgatgagaaagcccagaggttatttcaatttggaaagcctttggtctgctgaatcctctggtactgatacttcagatcaggatctccaaaacgtttttgtaaaggtccgaccaaagaacaattcgaaaaggaaaccggctaaagtgagttcttgatcctgtccgatggatacaatttctcataaacttctcgagtctagacgagttaagaataggaggattttaaagcctattaagtatttatctccttaatatttttttttggtaagttttatctccttaatatttgtagtcatctatctattttttccctcaaaactttacataaaaaaaaaagaaaaagggcggccgctctagaggatccaagcttacgtacgcgtgcatcaag

SEQ ID NO: 83789 - DNA, 365 bp, Arabidopsis thaliana columbia
gggaagagaatagaaaaccttgtaatggaaaggcaaaaaagaatcgcagagagatcagccatgactgcatctcgtaaagtttctctagacaaaggttcgagcagagctcctttggttcgcgaaagggctacataagtgaagaaaaccgttggagctgcgtcaaatgagatactcaaaacgcttttctttggtcacttcaaaaattcttttacattcatttggtggtgatacaagctcttcttgattttgcttgtgtcacgactatttatttattattttctcaaacgtttttcttttctgaatattaatttgtaatttatttgggtaagacactgaggtttatatatttgtaatttttggtttat

SEQ ID NO: 83790 - DNA, 464 bp, Arabidopsis thaliana columbia
atactctcatatatatttgcatctaatcttgtaagcaaacgtttatcacttgtctacacaacattctttcatttacaataataatatgggtgtaacattagaaggacaaagaaaggaatcaatttgggttttgatgagaagacaaagggctcgaagggcacttgtgaagaagatcatgatccgaccaaggaagagtgtagaagcttctagaagaccttgtcgcgcaatacacagacgagtgaagacgctaaaagagcttgttcccaacaccaaaacatcagcaaggtttagatggactctttagacaaacggcaggttatatcttggcttttggaaatgaaagtggaagttattgcaggcaatggttcacggttttgacccgaaactaacctggtgtttaaaagccttcatatatttttttggatatcttgttggattttacgttctttttagtttttatttgt

SEQ ID NO: 83791 - DNA, 902 bp, Arabidopsis thaliana columbia
  unsure (1)..(902): unsure at all n locations
ggatagtttggctgctttacgaacctgttttcaacaaaggtcgggaaaattcaaagtgagatctgaaagaagagggttcctctgatcgctcacgatttctcctgaattctccattagattttgcagagaaaatgatccgattcatattattgcagaacagacaaggtaagactcggctagccaaatactatgtccctctcgaagaatccgagaaacacaaagtcgaatacgaggttcatagattagtggtgaatcgcgacgccaaattcaccaacttcgttgagtttagaacacacaaggtgatatacaggcgttatgctggattgtttttctctgtgtgcgtggatataaccgacaatgagttggcttacttggagagtatccatttgtttgtggagatattggaccatttcttcagcaatgtttgtgagctagatttggtgtttaatttccacaaggtgtacttgatactcgatgagttcattcttgctggggagctccaagaaacaagcaaaagggcaatcatcgaaaggatgtcagaactcgagaagctacagtgatgacggttaagaatcacattctacttggttaactgcgtacctgccagatgtttcttggcatgttcagagatttgctatactttgttgagttgttagacaatggtgtagcgtttacattgtgaatgaagaatttagagtgattctgctaaagatctctcatccaacattttgtttacctgtgagattttcatttcaactagtgatgtactatttgtttcgtagaactatgataccacacatgctttgagaaaaaaaaaaaaaaaaaaaagnnnnnnnnnnnnnnnnnnnnnnnnnnnnnnnnnnnnnnnnnnnnnnnnnnnnnnnnnnnnnnnnnnnaacgga

SEQ ID NO: 83792 - DNA, 482 bp, Arabidopsis thaliana columbia
ttcatggcggatgagaaacgtgtatctgaagatgaccggtacatggagtttgttttaggaaatggaattttgttgagtgtaggaagattgattgatgcttatctcgctcttaactctgaacttacactctctagctttgttgagttatctgagttagtcccggaatcagctaggccgatacacgacggtctctacaaagccattgacactttcatgaaggaacatcccgaactaacaaaatccgaaaagaagaggctttgtgggttaatggacgtgaggaaacttgacaaatgaagcatcaacgcacgcttgcacagaacgggggactttccacctacggagttggtgggtgcaagtcctcctactttgagcagctccgagcaaatcacagccccgtggcgtctgttgcggcttcgtcacactcgccggttgagaagacggaggagaacaaaggagaagaagcgacgaagaaggtggagctg

SEQ ID NO: 83793 - DNA, 1075 bp, Arabidopsis thaliana columbia
  unsure (1)..(1075): unsure at all n locations
nnnnnnnnnnnnnnnnnnnnnnnnnnnnnngcaaaaccctccagcgccgcttggatctctctctcctctgttctctcttcccttatcttcttcttatacccttcgaccaacgaagaaccctagaaatcgattaacaagatgaatagggaaaagttgatgaagatggctaacactgtccgcactggcggaaaggggacagtaagaagaaagaagaaggctgttcacaagaccactacaaccgatgacaagaggctccagagcactcttaagagagttggagtcaattccattcccgccattgaagaagttaacatttttaaggatgatgtagtcattcagttcattaaccctaaagttcaagcttcaattgctgctaacacatgggttgtgagtggtacaccacagacgaaaaaattgcaagacattcttcctcagattatcagccaacttggaccagataacttggacaacctgaagaagctagcagagcaattccagaaacaagctccaggtgcaggtgatgtcccagcaacaatccaagaagaggacgatgatgatgatgtcccagatcttgtagtgggagagactttcgagacccctgctactgaagaggctcccaaagctgctgcttcttagaggaggaggaagaagaaggagaagagctcacctgcaaaacccatcataaaaatgtttgtcgctcgacctcttctgagcactgtcagattcttgttttctctaatgcttgcgaacagaaagacttggttttattatcacttgatgctttttggtccgaacagcaattttccttttattaaggttagatcgctttttgtttaccacctgttcaaatgagtactactatgtcctgtcgcttcatacacttcttgcaacacaagtcctttgttttgagtcaacgatgtcttgagatgaacaatcaacagtttcgtacatttaaatggaaattccaaagattttacatatttccaaaaaaaaaaaaaaaaagnnnnnnnnnnnnnnnnnnnnnnnnnnnnnnnnnnnnnnnnnnnnnnnnnnnnnnnnnnnnnnnnnnnnnnnn

SEQ ID NO: 83794 - DNA, 578 bp, Arabidopsis thaliana columbia
  unsure (1)..(578): unsure at all n locations
cactttttcaaccattgataaaccgaaactccttagccagctatcgtccctgcttggtgagcttggactgaatatacaagaggctcatgctttttccactgtagatggtttctctttagatgtctttgtagttgacggttggtctcaggaggaaactgatggcctaagagatgcattgagcaaagaaatactgaagcttaaggatcaacctggttcaaaacagaaatctatttctttctttgagcatgacaaatcaagcaatgagcttatacccgcctgcattgaaatacccacggatggaactgatgagtgggaaatcgacgtgactcagctcaaaattgaaaagaaagtggcatctggttcatatgggggtctgcatagaggcactttttgtcagtccaggaagtggctatcaaatttnctcaagcctgtccgggtaaacaaatgnggttgctctggaggatttttttccaaggaagtttttttaaatggggggaaagnttcgtcacaaaaacgtngttcaaattttttgggnggnattccncaagatnctnccaaaccctcttgtttaggtgncc

SEQ ID NO: 83795 - DNA, 492 bp, Arabidopsis thaliana columbia
  unsure (1)..(492): unsure at all n locations
tcttaaagatggatcgccataaatacgtgtaagtagcttaccttgggtttagggagctctctaaggaagataaagttggaatctatgggagcagcctagtacgagattcttttgatgaacccgactacgctctcatagatactctcttttcactggccgaagcctatttgttcgctcaacttgttgactttaaagataataaccctgaaaaagttcccaaggacgttgattatgctcggatgtataaagatgttcgtgctgctgttgatttgtgccaccgtgacggaactttaaagcagatggtggcaaacgaacctaataggtatatcaattgaggataccacggtagtaccccttatttaaaatgatcagagattctggccgttctacattcttaggtaaccaatagttttttggggcctccaaaatattttattganctttnttttnggggggggcncannacaaggcccgatnnnttcaactttttnt

SEQ ID NO: 83796 - DNA, 653 bp, Arabidopsis thaliana columbia
  unsure (1)..(653): unsure at all n locations
atcggatgaatctcgcagccatgaaggtgtggtttaagatgcgtcctttggaccgtggtgcccatgttgagatcaagtccgtggaggatttcaagttcttaaactcttcctatgcgccggtcttgaggcagcttgagtctgccaagttgcagtaagttttactttgagaatcaagctgagaacgcaactaaagattcacataacctcaagttcaagaaccccaagtatctctcgatgttgaaccatctcagattttacttaccagagatgtatccgaagctgaataagatttttttcttggacgatgatgttgtggtgcagaaagacggtgactggtttatgggaaatcaaacttggactggccaaggtgaatggagccgttgcagacatgtttttggttcctttccatcggtatgggccatacttaaacttctctcatcctttgatcaaagagaactttacccccagtgcctctccttggccctttgggatgaacatattcggtctcaatgcctggagacgcgagaagtgcaccgatcaataccattactggcagaaccctnnatgaagncagnactnctcttggaaattgggacttttanctccgggatttatcacatnctattcaaagncggaatcattgggcaaattca

SEQ ID NO: 83797 - DNA, 774 bp, Arabidopsis thaliana columbia
aagctggtacgcctgcaggtaccggtccggaattcccgggtcgacccacgcgtccggataaatcagaagtatgcttcctccttcactgtcaaaagttcattgaattagtacggattggagcactagaagaggctgtgaaatatggacgaatggaattagccaaattcattggtttaactacattccaagacattttagaggactgctttgctttgctagtgtacgaacgccccgaagaatcgaatgtagggtatttcctagaagagactcaaagggaagtagtggcagacacagtgaatgctgcgattttatctacaaaaccaaagggcaaaaatcaatcgcattctcatctagagacacttctccgacaactaacagcttgctgtctggaactgcggtcgcttaacgatggtcaaggagaagcgttctcgcttaaccgacttcttagaaccaacaattggaagaggacaaaaaagactacttagctgtgtccattctttggaaacaaacttggctttgattgttgacagtggctgggtttgaactgttacaggcagctacaataagcggtcaaaatagatgattgaaacagacgggttggagttgaacctgaccgttggattctttttttctctaaagtttgaagaaccaaaattgtaaaatttagttatttaaatttagcttgccaatgttcatcaaaaaaaaaaaaaaagggcggccgctttagaggatccaagcttacgtacgcgtgcatgcgacgtcagagcttgttct

SEQ ID NO: 83798 - DNA, 430 bp, Arabidopsis thaliana columbia
cgcccttttgatggctgtttggaaggtggctccttcccttgctgctgggtgcactgcgattctcaagccatcagagctggcatcagttacttgtttggagcttgctgatatttgtcgagaagttggtcttcctcctggggtcctcaatgttttgactggtttcggttcggaagctggtgctcctttggcatcacatcctggcgtggacaagattgcatttactggaagtttcgccacaggaagtaaggtcatgacagccgctgctcagttggtgaagcctgtttctatggaaccttggtgggaagagccctctcaattgtgttttgatgacgttgatcttgataaagctgctgaatgggctcttttcggttgcttctggacaaatggtcaaatctgcagtgcaacttcccgccttcttgttcacgaaagc

SEQ ID NO: 83799 - DNA, 641 bp, Arabidopsis thaliana columbia
  unsure (1)..(641): unsure at all n locations
ctacgattcttctttttttcaacgactgctcggatctttctcagtagagggaaccatgaatccctcactcgtcaccgccattaacgctccaatttcaccttctcctcggtctcctcttctttctcacttcctacctactttacctcaccgtttctccaagtctgagtgtctatctcgccgtcgttatcgagtttcgttccctcgtagctcagctgcttcctccgaccaactatcagtatctacgcaggcgaagaatcccggtatccatgggaataagaaggagctcactggattgcaaccgattgttgagaaaatgacaccgccggtgaggctagcgacttcagctgttgtattagcggcgtctttagctactgggtacggccttgggctccgtttagccggctccaggaatattgcctttggtggggctgctgttgctggagccgccggtggagctgtcgtatatgcggttgaactctgctgtaccggaggtggctgctatcagtttgcataattatgttgccgaattcgaagatcctgcctctgtgacggaagatgatgttcgaaagatcgcttgatagggacggtgtcaacaaaggagacgaggcattccaggtgagttttttgattttttncngaat

SEQ ID NO: 83800 - DNA, 452 bp, Arabidopsis thaliana columbia
  unsure (1)..(452): unsure at all n locations
ctcgggagggaagtacctgaaggaaactggtactgtgaaggttgtagacccgttgcacttggatcagctagttcccaaacgcatattatatccgagcaacaaaggggtagtggcttttacagtagaccgtcacctcttgtagtttcagggcaatatcaagatgtgtctttaatagtctccccacgtacaccatttttcaatggagagaacctattttctccaaggattcctaatggtgatgctcaaggttcttctccatccggcttaggggcaaccacattatccagaagaaggacgcttcacagacacatacaaaatattatcaacggtgataggcttattaaatatgggtgctagaactggtgggacatccgagtgatggtttcggggacttcacaaataagggcatggcaggacattcgacccattttngcctttngggggnccagnaa

SEQ ID NO: 83801 - DNA, 380 bp, Arabidopsis thaliana columbia
cctctatttgtgctagttctttttgtgcggtagaaaattttcaattaatcggatttgaaaagtatatagtaaaactgacatttttgtttatctacataaaaagatcaaaatctaaaggaatcgaaaaaaggaaatttacgaaagaagaggaactcaaataatttgatcggaatcttgatcttgatcttgatcttcttcaccacaatcataaacagatctaaccaaaaccaactgatcttccaagtatctctgaagcaaaccagcttcttccggttcatcaaacccgccgcaaccacatccttcttcacatctccggagcctcaaatcatcttcatcggcggtggatttagcaaaccaaggatgacgactacggagcggac

SEQ ID NO: 83802 - DNA, 694 bp, Arabidopsis thaliana columbia
cattgagtcaaaccaaaccaatgggtatatgcagctcgtacgagtcgacacaagtcgcaacggcgaagctgatcttacacgacggaaggatgatggagttcacaagtccggtcaaagttggttacgtgttacaaaagaatccgatgtgtttcatatgtaactccgatgatatggactttgacaacgttgtatccgccattagcgccgacgaggagtttcagcttggtcaactgtacttcgctcttcctttaagttcgcttcatcattctcttaaagccgaggaaatggctgcattggctgttaaagctagctctgctcttatgagaagtggtggttcatgtggccgagataaatgtcggtgtcgtcggaaatgtgtgtctccggtgatcttttctgctcgaagagtggcggcggtgggagctaatggagagacaaggaatgggaaaagacacggtggtggtggtagcggtaggagcaagtatgcggcgaagttgagtaagatagaagaatgaagggtagtttggtgatttagttattattgtagggttaagtttgtaaatatgtagttattatcggagaagtattgttgtgcctaatgcaaattgcgttttgcaacgtgggaaaacttattgaacttggtttactaatcatatgagttgagaaaaaaaaaaaaaaaagggcggccgctctaagg

SEQ ID NO: 83803 - DNA, 438 bp, Arabidopsis thaliana columbia
  unsure (1)..(438): unsure at all n locations
ccatgaggatcatgaagcagcaaatcagcaaactgtgaactcgaaagatgaagaagctgcaggacaatcaatgaagtcagacatatcagcagactattactttccctactcagcaaacgacggaaatgctgccatggaagctggtcgagatgcagagtcgatgagctcgtatctggattcttgctcaatgatgtcaaccatttacaatctttccatttcagacaatgattacccagaagatctcaagacagaactaaacctgatcgagtcacagtttaaccagtccttccaagatctgctgaaactgaaagaggatgcaatagagaacgctaaagcggaaaatggatttcgggaaaaaccaaaaaaaaagggcggnccgtttttnngnggntccnaggtttaggtcggggtncantgnggcggnaanagnnnttcctt

SEQ ID NO: 83804 - DNA, 612 bp, Arabidopsis thaliana columbia
  unsure (1)..(612): unsure at all n locations
agtttttcgccggcgacgtacttcgacggagatggctctgtcttcgtcgactttccaaatcccgttcctcaaacaccgttacttcggaatgtctcaaaatctgaggacacctattttaacgatgtctacaatccccagagatcgtttgatttcgtcatttcatacggcgcgaagcaaactctgttctcctctccggaccatcagctgcgtcgccggagacgatgaaaccagagaagcatcttctcttccttcttcgatatcttcgcttttcgtgaaagggttttcggattcagtgagtgaaggacgtttagagaaagtcttctccgagtttggacaagttaccaatgtaaaaatcatcgcaaacgacaggactcggcagtcactaggatacggatatgtctggttcaacagcaaagaggacgcacagtcgggctgtcgaagncattgaacggaaagttctttttnatngcaggttcattcttgttaaaatttgggtcagcctggttttttcccntngcggggnccacatttccgatttccttntttgnaaaanaaatggtnttaacccnttttnctgtatgnnnntttatggggggnggtatttttanaana

SEQ ID NO: 83805 - DNA, 414 bp, Arabidopsis thaliana columbia
cggacgcgtgggtgggatcgttgccaccggggctgataacattttacaacctgacgcgatgcaatggataggagctggcacgtactagggctgggatatgacccagcgctaaaccaaacagcaatagagaatgcagcggtagtgcattacaatgggaactacaagccatggctgggtttagcattcgccaagtacaaaccgtactggtccaagtacgttgagtacgacaacccttatctccgacggtgcgacatcaatgaatgattgaggagatggtggaggtagtatacatgatgaagcactcaaagggaactaaataagtaaaatttgttttcagtttacccataatacttgggatcagcaggcaattcacacatgacggttaattaaattaggattcttttgtttttcctt

SEQ ID NO: 83806 - DNA, 372 bp, Arabidopsis thaliana columbia
ttttcattatgcacctaaaggaggagccgtatgagatgaaaatctcacatacggttctgaaacggagagttcgttaaagcgaatgacgaccgtaacggatgtcggctcaatctgaaggaaattatgcggaagcattacagaattattatgaagctatgcgactagaaattgacccctatgatcgaagttatatactctataatataggccttatccatacaagtaatggggaacataccaaagctttagaatattattttcgggcattagaacggaacccctttttaccacaagcttttaataatatggctgtgatctgtcattacgtgcgactatctccactttagaaaaaaagaacgaacgctagtcaat

SEQ ID NO: 83807 - DNA, 553 bp, Arabidopsis thaliana columbia
  unsure (1)..(553): unsure at all n locations
aaagaaagttgtatttcagcttcattctagtttcaatagcccgactagagttatcgaggagcctccattcgaggtatcggaatctggttggggagaattcgagattgcaatgacattgcatttccacagtgatgtctgtgataagccattgagtttatatcatcatttaaagctataccctgaagatgaatcaggtcctttgacaatgaagaagcctgtggttgtggaatcttatgacgagattgtctttcctgatccttcagaaagtttttcagctagggttcagaatcatccggctttgacctttccaagattaccctctggttacaacttgcctgctcctatgcaagtccgaagataccgggaaaaaagaaggagaggtgattcgggaaggtccataggtttgggccaatgggtccatggggtttntctgaaggcagatgnggtnttacagtttcaagctgtnngtcaacagggtcaanncatatttcgnacctnggngcaaanaagtttcttgggggccannncagcccgttaaanngggcagccctaa

SEQ ID NO: 83808 - DNA, 557 bp, Arabidopsis thaliana columbia
agctgctccgccagtccgagattgctctcgcagcactcgacaacggcgcttccgacaaggacaagggcttctacgagggcaaggtcgccatcgcgtccttcttcgccaagaacgtcctgcccgagctcaccgcttcacgcgagatcatcgcgaacaccgagaacgacatcatggagatcgacgaagcagcattctgattcgttcctgattcatgaagagtgccggtcccgagaacgtttcggggccggcattttcggttgtcggcactcggtggtgactggtgtcatctgcgctcgaatggtcgggcaacttgatctgcgcggacaagtaaccgacgtcgtcggttgctcgcccggtcgtgccgccgtacccgccagggaaagcgccacgcgcctgcggtccggagaactgactatttcgacggacttgtcgtcgccaccgccgaaggacacgaactgtccgctctgatccgagaacttcatgatcgcggacccgtgctgacctggttcgggtttctcgttcacgtagacctgcaactggaaatcacgtcccggata

SEQ ID NO: 83809 - DNA, 930 bp, Arabidopsis thaliana columbia
  unsure (1)..(930): unsure at all n locations
cannnnnnnnnnnnnnnnnnnnnnnnnnnnnnnnnnnnnnnnnnnnnnnnnnnnnnnnnnnnnnnnnnnnnnnnnnnttctgcatgtaattcgcggccgccatcatcgtcacccaaatcctcctcatcgcagccgttgtttccgcccgtaaaggcgaaaactttgcaaaaaccattgacaaaaaacattttggcctccgtaaggagaaactcactcatttccgtgtctactggcacgacattttaagcggctcaaaccctagttcggtcgtgatcaaccctcctatctccaactcttccttcttcggatcggtcactgtgatcgataaccgattaactacggaggtcgcggtgaattcgactttagtgggacaagcgcaagggatctacgctgctactggtcaacgtgatgcatctgcgcttatggtgatgaactttgcgttcaagacagggaagtataaccggaagttcgatcgcgattcttggcccgaacgctgtgttgaccaaggttagggagatgccggtgattggaggaagtggactcttccggtttgctagaggttatgtcgaggctcggaccatgtggtttgatcaaaagtcaggagatgctactgttgagtacagctgttatgtcttgcattattgatgatagtgatgaattattatgcctctcttttttaatgtttgataaaatactttttgttggattttgtctgcttaaagtgatggatgatttttgggggactatgtcttttaatagattttgatacttcttttttttttgacgtgatttttgtttttgtatttgctacatctcacactaccgtttggtcttaatctaatggccaagcgagtattgaaagaggcaattcctttttaaaatatcttaatggccttaaataaacatcatcggaaaattgttttccttttt

SEQ ID NO: 83810 - DNA, 695 bp, Arabidopsis thaliana columbia
aaaaaagaacgatagagatatttagtgataattttgttgggtcaacgtaatcaacggtcagaaatagatcacggtgcgttcgtctggcggcttcatttggcacaaggagtttactagtctggacaatatgtccttaattgctcttatcggagaaggcttactctgtttttcaggcgaactctgtttatcttctccgagctcgtacgagaatattcgtaaaggtttcttgtgagcttaaacgatgagtacccttgagaccacaagagctgagcttggtctggtagttgtgtatttgaataaagcggaggcgagagacaagatttgtcgagctattcaatatggttccaagttcttgagtgatggccaacctggcactgctcaaaatgtcgacaagaacaccagcttggctaggaaagttttccgtctcttcaagtttgtaaatgatcttcatgctctcattagccctgttcccaaagggactccactcccgcttgttctgctcggaaagtctaaaaacgcgttgctgtcaacgttcttgttcctagatcaaattgtgtggcttggcaggactgggatttacaaggacaaagaacgtgctgagattcttggacgtatatcacttttctgttggatgggttcttcggtttgcacatccttggttgaggttggggagcttggtaggctgtcagcatcaa

SEQ ID NO: 83811 - DNA, 437 bp, Arabidopsis thaliana columbia
  unsure (1)..(437): unsure at all n locations
gttattacggatgcgattaggcatatgtattcgccggatctgaagagtggttgggggattcatattgtccaggaagagaagttgttggcgaaaaaagatgaacgtgagagtcttgattccgccattgaagagcttttacagattgggatgcatagagaaactgctgcagagtcaatctatagagagaggtgtcttccggtgaatgatggacttagttggtctaagtacatgtcgatttcaggctcaacagaggatgagtatgatatcattaccttgcagtatacggaagatgggttgttatctgtagatgagaaccgagaaggacgtgcagctgcgtttggggatgacatagcaatcgagtgtctaggccactnanttcaaacgggnaatctatgttgggtcaagcccatggttcanntnggnatgnttagangaag

SEQ ID NO: 83812 - DNA, 560 bp, Arabidopsis thaliana columbia
  unsure (1)..(560): unsure at all n locations
gccnaaggattccgccccnctttganccaactgggcgngnaagtanccntgttcacgcctgacncggcacaccnccggtgaagaatgttgcgccncgattaaagaaccggtggagagggacttacatgtctctgtacaatctacaccagtccaggtttgctcgctcagttcaacgtcaccactgagaaagctctcggtcttagccgtcgttgcaacgtcaccactgatctctccgcttgtaccgctaaaggagctccatcgccaaaagcttctttacctcctccagctccagcagggaataccaaaaaagacgccggagctgggaacaagctcgccggttatggagtcaccaccgtgatcttgtctttgatctcatccatcttcttctgaattcctttacccggttttattattattagctcaataaattctcgagatttgtttgcttttggcttaacttatttaatatttaaagaaaaacaaaaagtattttttgttcacatgttatgtattatcattgattcattattgagtcccatgttagtatatttaccggttat

SEQ ID NO: 83813 - DNA, 470 bp, Arabidopsis thaliana columbia
gcagacacctggaggcattgtgagcacagcacgcaccgtttttgtcagcggaggaaccggcggaatcgggtcggcgatcgccttgactctcgccgaacgcggacacgacgtcgccttcacctaccgaaacaacaaggacgccgccgagcagctgagcgagcagattcgcgcgcatggcgtacgcgcccactcgtaccctctcgacctcaccgacgaatcgtcgatcaacgccgccgtcagcgatgcggtcagtgatctgggtgggctgacgaccctcgtccacgctgccggaccgcacgtcccgatgacgcacctctcacgcgtgactccggcgttcttcaccgaacaactgaaccaggaagccgcggcgttcttcacgctcgtccacaccgccctgcctgcgctgcgtgcatcctcgggttcggtggtagcggtgacgaccgcggctacggatcgttttcccgtgcgcg

SEQ ID NO: 83814 - DNA, 501 bp, Arabidopsis thaliana columbia
accccattgaaccattcagcagctcctttcttcaattccgggccagttccaattttccatccgtttgctgaaaccaacacaatgaacactgttgaccaagctcaacctcttgagccattggaacacagttttttgaaggaagcaaatgagaggagatttaacgaaatgcctttaatggaaactccaaggaaaagatgtccacaaactgatagtgatgagaacttctccttgttccactttggtggcccggttgctctgtccacaggaagtaaagcgaatcctgctcgatccaaagatgggattttggaggatttctcgttgcagttctcaggagatcatgtttttggtgatccaaccggcaatagcaagaaggagaaagagaacacagttggtgaagagtacaacttgtttgcgacaagtaacagtttgaggttttctatcctctaaagtttttttatacaatttcttggattgtttggcgtcatggagaacgcagtaaaa

SEQ ID NO: 83815 - DNA, 412 bp, Arabidopsis thaliana columbia
atgaagacaatgttttattggatctcatgtgtttttataccgaagttccaatgatttaaggcagagatcataagacgagaaagagaagaagaagtcttaatctgtagagagatgatgttactcagatgatccagctgctatcatccttcaccattgtttctttcgaccaggtttgttgtacatgttcccacaccaatccctccccttcctttgaggtgaatttgacagttgttgtgcagcatcttcgttcgtccccatcttgctcccatttatcaagctttactatccatgtcccaggagtagtgtctgttgccaggacttgatctgcccaaacgcgaaacttcttcccttgtttgtctccatggtacttgcgcagctcatcgatggtatctcaatgaaatccttcttccct

SEQ ID NO: 83816 - DNA, 483 bp, Arabidopsis thaliana columbia
gaatgcagcaggtggggagtcaaaggcatcaaaaaagaagaaattgaaggataagcagaaggaggtaaaagaatctcaagagcaacaagcaaacaacaatgccgatgctgtagatgaagctgctgggtctgaaccaactgaggaagaatctccaattgacgtcaaggaaaggataaagaagcttgcatccatgaagaagaagaagtcaggcaaagaggtggatgctgcagctaaagctcctgcggaggaggcagctgcaagacgtaagaagctggccgcggcaaagaagaaggagaagaatcactataaccaacagcctgtccggtaaaatcctgaatcaccaccattttgatcttgatggaaatgcaaatatgaacatgtatttcgccgtattgttcatatgagtctctgtcctaataaatcttttgaagggtctggttcttagagttaaagacattgaatcctttgtctagtcttattaca

SEQ ID NO: 83817 - DNA, 681 bp, Arabidopsis thaliana columbia
gtggtccaaaaggtccagcttttggaacaaaagtggctaaatacccagaatgcccacgtcctgagcttatgagagggctgagagaacatacggatgctgggggaatcatattactcctgcaggatgatcaagtgcctggtcttgagttctttaaagatgggaagtgggttcctataccgccatccaagaacaataccatttttgtcaataccggtgatcaactagagatactgagtaatgggaggtacaagagtgttgttcaccgtgtaatgacagtgaagcatggaagtagactgtcgattgctacgttttacaatccggctggtgatgccataatatctccagctccaaagctcttgtatccaagtggctaccgttttcaagactacctaaagctttattcaactaccaagtttggagacaaaggccccagacttgagaccatgaagaaaatgggaaatgcggattcagcctaggatgcatctggaatttgacgcttctgtactcacatcataaaaactttgtcttcttcttgtgtttccttataatttaaataaccagccatgtcagaatcttgctgattcagctatactacttcactcttctttattcaaaaaaaaaaaaaaagggcggccgctctagaggatccaagcttacgtacgcgtgcatgcgacgtcatag

SEQ ID NO: 83818 - DNA, 644 bp, Arabidopsis thaliana columbia
  unsure (1)..(644): unsure at all n locations
gcncccaannnccgaattcctccccttcnccaccgggttattcccaaccccaaccttggaccaaaaacaaacggaaantcnaaaaaaaggtgacggnctcccaanccattggataaaaaggttnnatncctncacttgggaaaacntggacccagccttacaaagcttgtcaaaggaccaatcttcctaccgtcagcattcccaattgggggaccatacaagcctccctcactacaggtactgagagagagagagagagccgacaaagcggttcaggttcggatctacttgtggttttgtgttgggttgtggtgggagagtggaacagtttgagatattggtcttctgatgaagttgaccaaatatcagtattaataagggttattggcttttgaaggttgtgcttgttttctccatttttcatgaaacttaaattagtttttggtttagtttccctcttgattttattttgtgtgttctgtttagcgttgtactcttcaaactaatgagaaaccaaaaaaaaaggggaaacttgttttcggcatcccaaaaaaaaaaaaaaagggcagaccgctctagaggatccaagcttacgtacgcgtgcatgcgacgtcatagtcttgtatagttcacataaatcattc

SEQ ID NO: 83819 - DNA, 723 bp, Arabidopsis thaliana columbia
tcgtccgtgaagaacaatgccattgtctgtaacattggtcattttaccaatgaaatcgacatgcttggacttgagacctaccctggtgtgaaacgtattaccatcaagccacagtccgataggtgggtgtttcctgataccaactctggcatcattgttctagctgaaggtcgtttgatgaacttgggatgcgccactggacacccgagtttcgtgatgtcgtgctcattcaccaaccaggtgattgcacagcttgagctctggaacgagaagtcaagcgggaagtatgagaagaaggtctatgttttgcctaaacacttggatgagaaggtagctgcacttcacttaggcaagcttggtgcaagactcaccaagcttaccaaggaccaatctgactatgtcagcatacccgttgaaggtccttacaagcctgttcactacaggtactgagaggataaaagagccaagctttggttcttcgtttggttttctgattaagccgtttattggcaattgtttgagtcggattgggtctggtttggtcggagaaatatgagatattggtcttctgatgcgtgtgaccaaatattggtatgaataaggggttgtttttgatttatgagaggctgttttttttgttttctcctcctcctattttaaaaatcctcccccaaaaaaaaaaaaaaagggcggccgctttaaaggatcccagcttacggacgc

SEQ ID NO: 83820 - DNA, 1506 bp, Arabidopsis thaliana columbia
  unsure (1)..(1506): unsure at all n locations
aaaangtncgaacggtgatcgntnaagtttgnatcatcgtaattcgccggccgcatggcgtttgctcgtcgagaagacctcaagtggccgtgaatacaaggtcaaagacatgtctcaagccgatttcggtcgtctcgaactcgagctcgccgaagttgagatgcctggactcatggcttgtcgtaccgaattcggaccttctcagccattcaaaggcgctagaatcaccggatctcttcacatgaccatccaaaccgccgtactcatcgaaaccctaactgctctcggtgctgaagtcagatggtgttcctgcaacatcttttccactcaagaccacgtcgccgcagccatcgctcgtgactccgccgctgttttcgcctggaaaggtgagactctttaggagtactngtggtgtaccgagcgtgctctagaattgggtccagggtggtggtcctgatctgattgtttgatnatggtggtgacggaactcttttgnttnatnngggcgntaaaantttaggcgttttctgcattttttcgcggccgccctgatcctacttttactgataaccctgagtttcagatcgtgttgtctattatcaaggaaggtcttcaagttgatcctaagaagtaccacaagatgaaggagagacttgttggtgtctctgaggaaactaccactggtgttaagaggctttaccagatgcagcaaaatggaactcttttgttccctgccattaacgttaacgactctgtcaccaagagcaagttcgacaacttgtatggttgcgcgcactcactccctgatggtctcatgagggccactgatgtcatgatcgctggaaaggttgctgttatctgtggatatggcgatgttggaaagggttgtgctgctgccatgaaaactgctggtgctagagtcattgtgactgagattgatccccatctgtgccctttcaagctttgatggaaggaccttcaaggttcttcccccttgaggatggtgtctcagaagctgatatctttggtcaccaccaccggtaacaaagacctcatcatggtcgcccacactgaggaagatgaagaaccacgcttttgggtgccacattggtcactttgacaaatgagattgacatgcctgggacttgagacttaccctggggtgaagccgtatcaccatccaagcccacagacctggcaggggggggggttccctcagaagacccaaggctgggaatcattgtcttggctgagggtcgtctgatgaacttgggttgtgccacttggtcacccaagtttcgtnatgtcttgctcttttaaccaaccaggtgattgcccagttgnagctttggaacgggaagcaagcggaagtcgggagaaggtgnncgttttcccagnatttggntggaaggttgattnnttntttnggaagtttnggcaggttaaaagtntaaaggccatttttttggggattcatttgggcctnaagtcttttaaggntnnntc

SEQ ID NO: 83821 - DNA, 787 bp, Arabidopsis thaliana columbia
gccccccctcgttgtggggggaatcgataagctggatatcgaattcggggccgcccgatctctactgataatcccgagtttcagatcgtcctgtctattatcaaagacggtcttcaagttgatcccaagaagtaccataagatgaaggagagattggttggtgtctctgaggagactactactggtgttaagaggctttatcagatgcaggagactggtgctctcttgttccctgccattaacgtcaatgactctgtcaccaagagcaaggtaatgtggcacattatagctttagaagacactagatctgatattgttttgcctaatttgtggataatacaatgttttgaaatcaccaaaatatgaatgatattgttaatggatccatttaggtggaagcaagaactctgttttttgctctgtttctgctctgcatttctctgtttcactgatgatttgtttgctttatagtttgacaacttgtacggatgccgacactcgcttcccgatggtctcatgagggcgactgatgttatgattcctggaaaggttgcggttatctgtggttagggtgatgtaggaaaaggttgtgctgcagcaatgaaaaccgcgggtgctcgtgtcatagtgactgagattgatccaatctgtgctcttcaggctcttatggaaggtcttcaagttctgacccttgaggatgttgtctcagaagctgatatcttctgtaccactactggtaacaaagatattattatggttgatcacatgaggaagatgaagaacaatg

SEQ ID NO: 83822 - DNA, 480 bp, Arabidopsis thaliana columbia
gctatcaaggatctaagtgaaataggttgtcggaccatcaaagggcccatcaagccctgttcactccaggtactgagaggataaaagagccaagcttgggttcttcgtttggttttctgattaacccgtttattgccaattgtttgagccgcatggggtctggtttggccggagaaattatgagatattggtcttctgatgcgtgtgaccaaatattggtatgaataaggggttgtttttcatttgtggggggctgttttttgtgttttcttcttcttctattttatatatcttcaacataaattagcttatgctttccattattgttaggcttatttatgctttgttctgtctacttttccaaccaagagtgcggcccgccaaaaaaaaattcctgcaaagcccggggcatcctctagttctagagcggccgccaccgcggtgcagctccagggttgtctcctctttagggagggttaa

SEQ ID NO: 83823 - DNA, 683 bp, Arabidopsis thaliana columbia
  unsure (1)..(683): unsure at all n locations
cgtttggggattggtgtcctcaagagagcttaaaatggtttgtcaccaccgccggttaaccgaagacatcntggatggtccggccacatggagggagatgaagggccaactcgagtgtgtgcaacaatgttgcactgtgacaatgagagtgacaagcttgggagccaggcttacaaagctgtcaaaggaccaatctgactacgtcagcattccaattgagggaccatacaagcctcctcactacaggtacttgagagagagagagagtgtcgccaaagcggttcaggttcggatctacttgtggttttgtgttgggttgtggtgggagagtggaacagtttgagatattggtcttctgatgaagttgaccaaatatcagtattaataagggcttgttggcttttgaaggttgtgcttgttttctccatttttcacccaaacttgaaattagtttttggtttagtttccctcttgattttattttgtgtgttctgtttagcgttgtactcttcaaacaaatgagaaaccaaaaaaaaaggggaaacttgttttcggcatcccagtgttagcgacttttgttgaatgaaaaaaaaaaacccagagggcgaacgctctagaggatccaagcttacgtacgcggnnnnnnnnnnnnnnnnnnnnnnnnnnnnnnnnnnnnnnaatcg

SEQ ID NO: 83824 - DNA, 715 bp, Arabidopsis thaliana columbia
  unsure (1)..(715): unsure at all n locations
nnnnnnnnncagctactccatacgactcacttagggaaagctggtacgcctgcaggtaccggtccggaattcccgggtcgacccacgcgtccgcccacgcgtccgcccacgcgtccggttgtgccactggtcacccaagtttcgtgatgtcttgctctttcaccaaccaggtgattgcccagctcgagctctggaacgagaaagcaagcggaaagtacgagaagaaggtgtacgttcttcccaagcatttggatgagaaggttgcattacttcacttgggcaagcttggagccaggcttacaaagctgtcaaaggaccaatctgactacgtcagcattccaattgagggaccatacaagcctcctcactacaggtactgagagagagagagagtcgacaaagcggttcaggttcggatctacttgtggttttgtgttgggttgtggtgggagagtggaacagtttgagatattggtcttctgatgaagttgaccaaatatcagtattaataaggggttatttgggcttttttaaaggttgntcctngttttcnnccattttttcaatgaactttaaaatagggtttttggnttaggttnccccctngattttnaattttgggnggtnctggttaagnggtggacntttaaanaaantgggnacccaaaaaaaaaggggaacttttttcgganccncgtttcngcntttgttgaan

SEQ ID NO: 83825 - DNA, 672 bp, Arabidopsis thaliana columbia
  unsure (1)..(672): unsure at all n locations
gcacgtaccggtccggaatttccgggtcgacccacgcgtccgcccagctcgagctctggaacgagaaagcaagccggaaagtacgaagaagaaggtgtacgttcttcccaagcatttggatgagaaggttgcattacttcacttgggcaagcttggagccaggcttacaaagctgtcaaaggaccaatctgactacgtcagcattccaattgagggaccatacaagcctcctcactacaggtactgagagagagagagagtcgacaaagcggttcaggttcggatctacttgtggttttgtgttgggttgtggtgggagagtggaacagtttgagatattggtcttctgatgaagttgaccaaatatcagtattaataagggttattggcttttgaaaggttgtgcttgttttctccatttttcatgaaacttaaattagtttttggtttagtttccctcttgattttattttgtgtgttctgtttagcgttgtactcttcaaacaaatgagaaaccaaaaaaaaaggggaaacttgtgttcggcatcccgagttcgttagcgagcttttggtgaatgaatgtctcaaatgctcatctttaataatgtgtgttaggacacgaacaacaaanaaaaacaataataaaaaaatataaaaaaaaaaagggcggcg

SEQ ID NO: 83826 - DNA, 919 bp, Arabidopsis thaliana columbia
tacgcctgcaggtaccggtccggaattcccgggtcgacccacgcgtccgaaagacatcatcatggtcgaccacatgaggaagatgaagaacaacgctattgtgtgcaacattggtcactttgacaatgagattgacatgcttggacttgagacttaccctggtgtgaagcgtatcaccatcaagccacagactgacaggtgggtgttcccagagaccaaggctggaatcattgtcttggctgagggtcgtctgatgaacttgggttgtgccactggtcacccaagtttcgtgatgtcttgctctttcaccaaccaggtgattgcccagctcgagctctggaacgagaaagcaagcggaaagtacgagaagaaggtgtacgttcttcccaagcatttggatgagaaggttgcattacttcacttgggcaagcttggagccaggcttacaaagctgtcaaaggaccaatctgactacgtcagcattccaattgagggaccatacaagcctcctcactacaggtactgagagagagagagagtcgacaaagcggttcaggttcggatctacttgtggttttgtgttgggttgtggtgggagagtggaacagtttgagatattggtcttctgatgaagttgaccaaatatcagtattaataagggttattggcttttgaaggttgtgcttgttttctccatttttcatgaaacttaaattagtttttggtttagtttccctcttgattttattttgtgtgttctgtttagcgttgtactcttcaaacaaatgagaaaccaaaaaaaaaggggaaacttgttttcggcaaaaaaaaacccaaagggcgaccgctctagaggatccaagcttacgtacgcgtgcgtgcgacgtcatagtcttctatagtgcacctaatagaatcg

SEQ ID NO: 83827 - DNA, 1969 bp, Arabidopsis thaliana columbia
  unsure (1)..(1969): unsure at all n locations
nnnnnnngcccgccccaaattttgaatttccgtggccgtccgcgggaccagcgcccgcgcttctctctctctctctctctgcctcctttcggattcaaatctcagatctagctcaaccatggcgttgctcgtcgagaagacctcaagtggccgtgaatacaaggtcaaagacatgtctcaagccgatttcggtcgtctcgaactcgagctcgccgaagttgagatgcctggactcatggcttgtcgtaccgaattcggaccttctcagccattcaaaggcgctagaatcaccggatctcttcacatgaccatccaaaccgccgtactcatcgaaaccctaactgctctcggtgctgaagtcagatggtgttcctgcaacatcttttccactcaagaccacgccgccgcagccatcgctcgtgactccgccgctgttttcgcctggaaaggtgagactcttcaggagtactggtggtgtaccgagcgtgctctagattggggtccaggtggtggtcctgatctgattgttgatgatggtggtgacgctactcttttgattcatgagggtgttaaagctgaggagatctttgagaagactggtcaagttcctgatcctacttctactgataaccctgagtttcagatcgtgttgtctattatcaaggaaggtcttcaagttgatcctaagaagtaccacaagatgaaggagagacttgttggtgtctctgaggaaactaccactggtgttaagaggctttaccagatgcagcaaaatggaactcttttgttccctgccattaacgttaacgactctgtcaccaagagcaagttcgacaacttgtatggttgccgtcactcactccctgatggtctcatgagggccactgatgtcatgatcgctggaaaggttgctgttatctgtggatatggtgatgttggaaagggttgtgctgctgccatgaagactgctggtgctagagtcattgtgactgagattgatcccatctgtgcccttcaagctttgatggaaggacttcaggttcttacccttgaggatgttgtctcagaagctgatatctttgtcaccaccaccggtaacaaagacatcatcatggtcgaccacatgaggaagatgaagaacaacgctattgtgtgcaacattggtcactttgacaatgagattgacatgcttggacttgagacttaccctggtgtgaagcgtatcaccatcaagccacagactgacaggtgggtgttcccagagaccaaggctggaatcattgtcttggctgagggtcgtctgatgaacttgggttgtgccactggtcacccaagtttcgtgatgtcttgctctttcaccaaccaggtgattgcccagctcgagctctggaacgagaaagcaagcggaaagtacgagaagaaggtgtacgttcttcccaagcatttggatgagaaggttgcattacttcacttgggcaagcttggagccaggcttacaaagctgtcaaaggaccaatctgactacgtcagcattccaattgagggaccatacaagcctcctcactacaggtactgagagagagagagagtcgacaaagcggttcaggttcggatctacttgtggttttgtgttgggttgtggtgggagagtggaacagtttgagatattggtcttctgatgaagttgaccaaatatcagtattaataagggttattggcttttgaaggttgtgcttgttttctccatttttcatgaaacttaaattagtttttggtttagtttccctcttgattttattttgtgtgttctgtttagcgttgtactcttcaaacaaatgagaaaccaaaaaaaaaggggaaacttgttttcggcaaaacaataaaaaaagcggccgcgaattcgatatcaagcttatcgataccgtcgacctcgagggggggccnnnnnnnnnnnnnnnnnnnnacaatc

SEQ ID NO: 83828 - DNA, 682 bp, Arabidopsis thaliana columbia
cgaagcgccgcccaccgataccttcggcgaacgtgaagtggcaatcctgcgcctgctggccgggggctacagcaacaaggagatcgcgcgcagcctgttcctggccgagggcacggtgaagaactacgtgtccgccatactcgacaagctgggcacccgcgatcgcacccgtgcagtgctgaaggcgattaccctgcgcatcatctgagtggacgtggcaaggaatgtcagtgaacccgatcctgcatgtggaaatcccggccagtgacctggaccgggccatcacgttctaccagcgatggctgcaggttgcggtggacgaacccatcgtgctgcacgactgccggatggcctatctaccgttttccgatgaggccgccggtgccagcattgcgctggtgcacggcgcggactatctgccttccgagcagggcgcgcgcatctacatcggcgtcgatgacctggatgccagcctcgaccgtgcgctgcaggccggagccgagctgcgcttcggcccggccgatgccggcgattggcgcgtggccgagatccgcgacagcgaaggcaaccgtatcgcattgcaggcgcgcacagcgccgtaacgtcaacgctgcggtgcgcgcatctgtagagtcgagcttgctcgactgattttgacgtcgccgtagatgcatcagtcgag

SEQ ID NO: 83829 - DNA, 691 bp, Arabidopsis thaliana columbia
ttgatttgcttccgtttgccgtaccggtccggaattcccgggtcgacccacgcgtccgggaagaaccgtttcgtgcatctctgagatcggacattgtctcggcggtttcgctgctgaggaaagctgagaggccgttgattgtgtttggtaaaggagctgcgtattcgagagcagaagatgagctgaagaagcttgttgaaattactggaataccctttttaccaactccgatgggtaaaggtttgttaccggacacacacgagttctcggcgactgcggcgaggtctcttgctattgggaaatgtgatgtcgcgttggtggttggagctaggcttaactggcttcttcatttcggagagtcgcctaaatgggataaagatgtaaaatttatattggtggatgtctctgaggaagagattgagctaaggaaacctcatttggggattgttggagatgctaaaactgtgattggattgttgaatagagagatcaaagacgatcctttttgtttagggaatgtttaattcatgggtgtgaacttcacttcgaaagaattggcaatcagtgtaatggtctgagcaaagaattggtagattaccagcctttggcctaaaaaaggatggttgggtctccccctttttccaaatcttttccctaggaaccttttctttattggaagggaattaaatct

SEQ ID NO: 83830 - DNA, 676 bp, Arabidopsis thaliana columbia
  unsure (1)..(676): unsure at all n locations
gcaatcattgataaatcccctagacccgacgttgcattcactcaccatttaccngcctctggtttaaaagcaaaagactttaagtctctcgtctcttacatngagtcccaagattctccacaagcggctgttctaaaaacggaaacaatcttcaataggacatctcctgttatcgcttccttctcttctcgtggtccaaacaccatcgctgttgatattctcaagccggatataacagcaccaggagtggagatccttgctgcattttcacctaatggtgaaccgtccgaagatgacaccagacgtgtgaagtactctgttttctctggaacttcaatggcttgtcctcatgttgcaggggtggctgcgtatgtcaagacgttttaccctagatggtctccttccatgattcaatctgccatcatgacaactgctaaggggcgtggcatcgcatcgacccgagtttgcttatggagctggacaatgtcggcccggtgggcccgctttaaatcctgggctttgtctatgaatttggccaaagcttgccacatcggcttttttttgggggatgaacctncanttnggagggcccttaaaaanaantttnggggggttcccgtnaaggtnttccaaggaaacaaaaatnttngcctaggaanctttactntncntnaat

SEQ ID NO: 83831 - DNA, 807 bp, Arabidopsis thaliana columbia
  unsure (1)..(807): unsure at all n locations
ctcggaagctctactgtcttcgttcgatgacgcgattgcagacggtgtagacctcatcaccatctctattgggtttcaattcccatccatattcgaagatgacccgatagcgatcggagcttttcacgctatggccaaagggattctcactgtaagtcctgcgggtaacagcggtccaaagcccaccacagtctcgcatgtagcgccatggatctttaccgttgcagccagcaccacgaaccgtgggtttatcaccaaagttgttctcggaaacggcaagacacttgccgggaggtcagtgaatgcttttcgatatgaaaggaaaaaagtaccctctagtgtatggaaaatctgcagcttcatctgcttgtgacgccaaaacggcagcactttgtgcgccagcgtgtctaaacaaaagccgtgtgaagggaaagattttagtgtgtggtggtccgagtggttacaagatagctaaatcagttggagctattgcaatcattgataaatcccctagacccgacgttgcattcactcaccatttacctgcctctggtttaaaagcaaaagactttaagtctctcgtctcttacattgagtcccaagattctccacaagcggctgttctaaaaacggaaacaatcttcaataggacatctcctgttatcgcttccttctcttctcgtggtccaaacaccatcgctgttgatattctcaagccggatataacagcaccagggagtggggatccttgctgcattttcccccttgtgaccgtcgagctgcacngcggtntgagnctttttttta

SEQ ID NO: 83832 - DNA, 690 bp, Arabidopsis thaliana columbia
gcgatcacaacaccaagaattggcttcttggatgtctctacttagtcataggaatcgtgttgctatctctatggatattgtttcaagggactttaagcatcaagtatccttgcaaattctcaagcacttgtctcatgtcaattttcgcagcttttcaatgtgctctattgagtctttacaagagtagagaccttaaacattggatcatcgacgatggatttgtgattggggtcataatatatgctggagtgataggacaagcaatgtcgactgtagcagcgacatggggaataaacagattaggagctgttttcgcatcagcaattatgccagtttctctcatatcggctactctattcgatttccttatcttacacactcctttatacctcggaagtgtgattggatcagtagggacaataataggtctctacgtgttcttgtggggtaagaacaaagaaacggaagcagacataactacattgtcttctcggatgaacaacgaagatcaacgagtctaggtcgcccatttaatcaaataatattgttgtcatagaaagattcatatggcttcattgtcgtaaattagtatttactactgaatacatttaccgtaaagaccagtcataaatatttagatttaaattgtgcaagcacactcacgttaaagaccagtcataaatattcaga

SEQ ID NO: 83833 - DNA, 516 bp, Arabidopsis thaliana columbia
  unsure (1)..(516): unsure at all n locations
tcttcttcacttccgccatagctgaaaccttcagaagcctcgattctcatccacagttcccttgtaaacctcctcattttagctcttagcccttctgcagtgtctctttatccataacacaacgagcaatttctctcgtctccctcctcatgctcccagagaagataggtcagctctcatacacagctgcttcagtaccccgtctcggtattcctccgtacgagtggtggtcggagtctttacacggactcgccgataacggtcccggagtttccttcaacggttcgatctccgccggntactagttttcctcaggtaatcgtatcttgtgcatctttcaatagaacggtatggtacgngattgggatctgctgttgcgggtggaaggtcggggntnattgtacaaacggtgggtaaagcntngggttgacggntttgggnttccggantattaaaatggggttttggggnnccgannatnggggnangggggccaagnnagcttccttgggnngg

SEQ ID NO: 83834 - DNA, 444 bp, Arabidopsis thaliana columbia
acttctctatcgagtacaaaccgcaagtgaaacagagtaacagagacgcgtcgtcttcaacgatgctctcaacggtgacggcgacggcggtttctcgaccgattctgaaggtggaatgtacaatcaaaaggacgtttaaagtgacggcggagaagtttccgacgtttctgccgaccgatgtcgagaaaattaaagacacgtttgctctaaagctcgccgccagaatagagaggcttcctgtatctgtgagcttcagggaagatagtattatgagcagttgcgtgacaccgctgatgcggaacgagacaactcctgttgtgcttcttcacggatttgatagttcttgtttagagtggagatacacttatccgttgcttgaagaagccggtttagaaacatgggcatttgatatccttggttggggtttttctgatttagacaaac

SEQ ID NO: 83835 - DNA, 649 bp, Arabidopsis thaliana columbia
agatactgtagcatggacggtgaagcttttgaaatctcattacttgatggagaagaagacagatttggaggtactgtggtgaacttgatggaagtggaatccatgactattggtgattttgattcacagcttgatgtttcacttaaggcttggaaggatcaggggaagaaggggatttggataaagctgcctagtgagctatctagtcttgttgatactgcaattaagaaagggtttacataccaccatgccgagaatgagtatgtgatgcttacattttggcttccagagccacctagcactcttcccttgcaaatgcttctcaatcgtatttgggatccggtgcttttgtcctaaacaaagaacgggggagattgcttgttgggttcaggggaactagtgggtatttcacaagataaaaatgtcttggaaggtcccccccggtactattaaagagggtgagagtatctgggctggagcagttagggaagtgaaagaagaaactgatattgatgcagagtttgtagaagtcttgtctttcatggaaagtcaccaagcagtgtggcaaagaaaaacggatatatttttcgtctgcgagttggaagcaagaacttttgaaatccagaaacaagattctgagatccatgct

SEQ ID NO: 83836 - DNA, 507 bp, Arabidopsis thaliana columbia
  unsure (1)..(507): unsure at all n locations
ctttacacgtccttgcatcgccgatgaagcttgaaaaagcaaatttggtgagctggtgtaggcaactggctcagtcagggaacgttcttgagctggtcgacgagaaattgaaggatgggtataacaaggaagaagcaggattgtncattaacttggctttggcttgtctgcagaaagctccagagttacggcctgatgttagtgaagttgtgagaatcttgagaggggaaatggacatttcctccactgctttcgagttttctccatcgccaccgggaaaagtttacggcagtagatcgaagcggagaagctaaaacagggcaatgcagagtagtagttcgaggtttgatatgatcttttcattttcgaaattgttgggtgtaacttgaaagaggttttagcttttgggaattgtattatgggtgtaattttggcaacccctatatatatttaaacccctatttataaatatttaacctttaaccttaaaaaaaaaaagggngccga

SEQ ID NO: 83837 - DNA, 428 bp, Arabidopsis thaliana columbia
cgctgttaaagctcataattggtcggaatattctcaccggtttttaaaaaggtgtgtcgacgccggaagtctcgaagcttgttacactctaggaatgattcggttttattgtttacaaaacagaggaaacggcgcgtcgttaatggctaaagccgcgattagttctcacgcgccggcgttatattccttagcagtgattcagttcaacggaagcggtggttcaaagaatgataaagatcttagagccggtgtggctttatgcgcgcgtgccgcttttcttggacacgtcgacgcgctacgtgagctaggtcactgtctttcaagatggttatggagttcctcaaaacgtctcttgaaggtaggaggtttttaagttcaagccaaccgctcgggaacctcgccgccgtttttattttccggtattcaaa

SEQ ID NO: 83838 - DNA, 460 bp, Arabidopsis thaliana columbia
ccacgcgtccgggaagatgcaaagattgattggggttggagctgagttgaagctgaaaagagctcacgcgattttcgatcgtgtttgctctaagtgcatagcttctaagagagatgagatcagccaagggattgattcttcttcttctaaagatttgttgatgtcttctagaaatgtggacacgactaagtacaagttgttgaatccaagtgatgacagattccttagagacacaatcttgtccttcatgttagctggtagagacacaacaggctcagcgctcacttggttcttctggcttctatgcaataaccaagaagccatgaccaagattcgtcaagaaatcaacacaaatctatttccaagacacaagaccgacgacggttctgtttcgtatgattctgattcattcaatccccaagaggtaaagaagttggtgtatttacacggcgcggtttgt

SEQ ID NO: 83839 - DNA, 596 bp, Arabidopsis thaliana columbia
agctctctacgactcactattgggaaagctggcacgcctgcaggtaccggtccggaattcccgggtcgacccacgcgtgcggttttgtaaccaatctcagctctccctctcaaacaatccaggattcttcagattcctctcctttgatcctctctttaacaatctctctctctctgttttcttcgatccgttgtaggagaaaatggtcgttatcaacagtctccgacgcttggcgcgtaccactcaggttcatttgcacagtaagtatgccacttgcatgtctgggaactccacttccaggaggattttcactactgaggcagcacctgagaagaaaaacactgttgggtctaaagggcatgatatgcttgcaccttttactgctggatggcagagtgctgatttagatcccttggtcattgcaaagtctgagggaagttatgtgtatgatgatactgggaaaaaatatcttgactctctcgctggtttatgggggactgccttaggaggaaatgagccaaggcttgtttctgccgctgttgaacagttgaacaccttgccgttttatcactccttttggaaccgtactactaaac

SEQ ID NO: 83840 - DNA, 464 bp, Arabidopsis thaliana columbia
  unsure (1)..(464): unsure at all n locations
ccccttattatgatagtagagtctcaccatcgggctcggattcgcttggtgcaggtcgggaaccaattcggctgacacagcctcgtgacttttaaaccttcattggtttgtgagcagggattggatcccgccttgcatcaactgaatcggatcctcgaggtgtaaaaaaactcgtaaatcctatcagatctggaagatttctacgcttctccttctttatattcgttttcttatgcttttaatttttgatataacctagaaaaaggtttttaatatctttgaatctgaaattgtttgttttagaatattgtatatctgntttttaatcccnntttnatatttgaatggncttttagncnnccttttgttttgcccaaatggttgaancttttgcttttgggccttggatttnaaaggccaagtgatngttgncctttgnttcggaaantttagggggtttnnng

SEQ ID NO: 83841 - DNA, 392 bp, Arabidopsis thaliana columbia
  unsure (1)..(392): unsure at all n locations
aactctttgtatttcncccaacctcttatgacccagatgaaaggtctttgggattcctctaggcctagtcccagctcaaggagctgagacagaggaagattacaaatacttccaaggcaaacgtagagcacagatcccggttccttagaatcgagccattcaaggcactcatcttgatcaatatctgatttgtttcccctctctgctttgtctacncctaccttgttgcacaaggaaacaggtccaatggtccatgctttaccagaccttgcctccttgaaagtctttggcatacggaggtttcgagntttttgaaatnagttgnctttaacancnttagngggtnttatccggtttttaccnatancntccaagatntttttccaggcctt

SEQ ID NO: 83842 - DNA, 536 bp, Arabidopsis thaliana columbia
  unsure (1)..(536): unsure at all n locations
ctgagaaggaaggtcactttatgatgtgggatggccccatacggacaaactgaagcatttactaaagtctgtcgcaagcacaatctgtggacttaaaaagaggtgtttggcaagtaaaaatctgtttacgtcttctgttcactttctttcttgctctccacgcatcttgttctatatataagcttacacagatattaaccgaaaacgaaacaaaacttgagaggttcttactaaagttgcatcgtcatggctttcgaaaaaaacaacgaaccttttcctcttcactttgttctcttccctttcatggctcaaggccacatggattcccatgggttgatatngcaaggntccttggctcagcgnagggggnggcttataaacaattgtcacgacgccttcacaatggcagccaagggtccaagaatgnnctaaaancggggccatggngnctgggttngnccatcaaacccaggggaaagccaagttcccanatccagaagnngggnctnttgaaggggtgggnccgggncaagnng

SEQ ID NO: 83843 - DNA, 207 bp, Arabidopsis thaliana columbia
cacgcgttcggatcgcgagcggttcgctcttttttttttttttttgataaaagagtaaagatgatcaaattttctttcacaagtttggaattaaatcaaaaaacctgaatgaaaaataaaatgacatttgtacaatctacactcagtttttattctatgtaacacaaactgtagttctcaatgctgctgctgctgctatctgtatat

SEQ ID NO: 83844 - DNA, 463 bp, Arabidopsis thaliana columbia
  unsure (1)..(463): unsure at all n locations
gatctgaaaacataatccattggctaattgatatttctgatgtacaaaagaggagcatctacctcaacaacaaaccctaaattttctcagtcgatttccgaggaagacgatgatgagaagagagagcgagcgagtcagctttacagagaggattctaaaaaaacatttgaaaaaaaaagagagagaagaaggtttcggttttaaggctgtctcgcttgccggacgacagaccaatgatctgtctccacgtggacaccggattacgccgatcacagtttgagaaatcgggcaagctgggcaggattgacgatgccgggcagttgggccccatctgaccggggaagattagcacccncccaatacctcttcggttcggntcaaattcctcagccggntcaanagnngggncngnntaacctaacnggacccggntngggcccaaccnggtccantgcnncccaaa

SEQ ID NO: 83845 - DNA, 598 bp, Arabidopsis thaliana columbia
tggcgattgatacgatacaaaaaacaaaaaagcttcggtggggagaaattgacgaagaagaaggcgactatgatttccttcttccgcctaagcagatgattagtccggaccaaaacggtgtaaagaaggtgattgagtacaaattcaacgaagaggacaaaaaggtcaaaatcactaccacgacccgtgttcagaagcgagctctcaccaaacaagccgtggagcgacggagctggaataagttcggagacgcagctcatgaagaatccagtagttacctcacaatgcgttcaacagaggatatcatcttggaacgaattagagctcctggtagcaacgcggaaccagtcgacccgtatcaggagatagcatgtctcagttgggcaaaaccgggtgcggtccttcatgggctgcaggttatgccaaaagaaaggtgcccactggacatcaagatgcccacagaaggatctcttatccttaatggacgagcctttaacagcagaaacttctacatcgaccataactggaactggcagggcggcttatgtcccgccaagcatgagagaaggtgcagacagaaaagctggtggttcagaca

SEQ ID NO: 83846 - DNA, 518 bp, Arabidopsis thaliana columbia
ggagacttcatctcattcgatgcctaaacgttgctagtgtagagtggttggagtatttcggaaagcttgagactttacaagaactctgtatcaagaactgcagagccattggggaaggtgatttgatcaagctgaggaatagctggcgaaagctgacaagtctgcagtttgaggtacatgccaattacaggtacatgaaggtttaccaccagttagatgtggaacggtggcccaaacagttggttccctgtgacagtctggtggagctcagcctccgtaactgcatcatagctcctggtagagggctcgctttgtgtgctgagaaattgcaaagaaccctggagaaggcttcatcttggacatgtgtacccggtgtcagcggcctcacgcatcataggcattggttccagaaacgctaggtcaccctaagaagcaatcttcgctcccgtgtccccgtccgatttttctctgcccctctttaacaacatcacgttaagattaaccgatgaaagcctcag

SEQ ID NO: 83847 - DNA, 507 bp, Arabidopsis thaliana columbia
  unsure (1)..(507): unsure at all n locations
aaattaaagagtaacaacattacttcatccatgactgtggatatacaactgctatgacgtcattttaaacttgatcatcactgaggcattagtaatttttctgtcccaaagatcgaacatttacacttacttacacatgagtaaaattgtacataggaagcaaatcatacgatctcaatacatccatgacaaatcttgcttaaacgagacagacgttgcagcaccatgaacacctcttcttgaaacctgaggacaatcttcaacaacaagcaactccaacttgtgagatccaacaagtggtctcattccatcgtctgtcactcccagacattttgataacttccaacacattgagagaggggaccgggctcaccagaatcaacccctcatggctcacttcttggcaatgggcaagctctaggttctcaaggttcggggcggaaatagggccccncccaggggngggnaaacccctgggnaggaagccggccggggttcggnnanggg

SEQ ID NO: 83848 - DNA, 779 bp, Arabidopsis thaliana columbia
  unsure (1)..(779): unsure at all n locations
ccggccccgttgaggtgcgatttcnnnnnnnnnnnnnnnnnnnnnnnnnnnnnnnnnnnnnnnnnnnnnnnnnnnnncatgcggagcggccgccctttttttttttttttaacagagttgccaaaacgtattataaggttttatatatgttacaaacagaataatccagaaacagcagcaacattttgtaatttctctatctatacaaaagttaaagttgccactccagcaaaaggagtaaaagaaggcacaaattctgcaaagaagccaatcttgtcataacttgctagggatcacatcacgggaaagcttggtcggctttacaaacatgtcttgggtctctgcaatgaacttggcaaactgagatcctttcgtttgtttgttattaccatctttgagtaacttaggcagattgggtagagactgctcagtctttggtgatagtgatggcatcaaagcccaaatggatgagagttcttcgctaggttgatcaagtgtttgaaggatcgttgtgttctgcatatcttctgcaaacttgaagattggtgccaagactgcacatgggatgctgaagttgagatgcggtatcaccccccccgctccatgtcttgcgttgctggtaacaagtccaatcatatggccacttgaattgagaacagcaccaccactgccaccaggatgcacagcagctgttgtttcgagcatagcggggaactctgcgacttcttgagaaatggattgcgtattcaatcttctctttgcgtgaactacctttgcta

SEQ ID NO: 83849 - DNA, 550 bp, Arabidopsis thaliana columbia
aacgagagaaaaagatatactatcgatcaatggagaaaaaggttctttacggtttagtaatgctaatgtacttggtgggtagtggctttagtcaaggggaagtgacatggttgagtaacgaagttgaatggcgacttattctgaccacgactcaacttcctatagtggttacggtaacatcctcgttgtgcggtgaccgatgcactatattggatgatcaactggcccgattgtctgaaacctatgtcttccaaactggaaaagaaacagcacgtttagaaagtgatttatcttggggtgcaatcactgacataatcgacaatctttcactcttcgccccgaccccctcggatattgtgcagccggcctccgattccggccccagtcccctctctcggagagtaaatgataggctcaatcttgagtcagtaacttcaaatatttgcctatggatttcctgtttgctgcttccgctatcaaacaatttgcctatattattggattatatggtcatattatgtttaatgtgctaatataacaagtcgatgat

SEQ ID NO: 83850 - DNA, 512 bp, Arabidopsis thaliana columbia
ttcaaaaattgtgaccaaaacaaaagttaaagataagaagaacgaagaagaataagcaagattttcttatctagatatctgcaaggtaataatacagttccttaaactcaggaagaaaagagaaaacgacagaggcagaacatgtggagattctctccctaaaacctgtccaaaacgtgacgtacaatgcatttttatcttctccttacgagttatcgtctctatttttgccttaataaagaaattttgagtctttgagtaaaaagatgttggaagggaaagcgaaggtggaagaggcagacatgcctgtgaagatgcaaatgcaagcaattgaagattgcttctcaatcccctcgatccttttttgatgtctttgattctatatccatcgctgctcacatcaagaaggagtccgttgagagttttggaagtgggtggcaatgtgtcgggggaaccaattttgggtgtttcttcacacattctaaaggaactttcatctattttcatttggg

SEQ ID NO: 83851 - DNA, 527 bp, Arabidopsis thaliana columbia
  unsure (1)..(527): unsure at all n locations
aananggggtcccccnaacctgccaaacggcgtcaaccatttacnccccttcgnntacctcccaattttgntttaataaggaattttgagtcttggagtaaaaagatgttggaagggaaagcgaaggtggaagagacagacatgcctgtgaagatgcaaatgcaagcaatgaagattgcttcccaatctctcgatctttttgatgtctttgattctatatcccatcgctgctcacatcaagaaggagttcgatgagagatatggaagtggatggcaatgtgtcgtgggaaccaattttgggtgtttcttcacacattctaaaggaactttcatctattttcatttggggactctcaacttcctcatcttcaaaggcgccactctttagtttcttctaaaccacatccatgtttcatttccttttcttttaacctcaaagtagctttgtctgtgtaggaagaagctgttctttttttctttttctgttaacagatcttgtttccaataaaattgtaagatgttgtatt

SEQ ID NO: 83852 - DNA, 842 bp, Arabidopsis thaliana columbia
acgcgtccgcattctctcctctgattccgaatcgggtaaattattatggattcttcttcttcgtcttcctccgccgccgcacgccgccgtatcaacgctatccactctcacctcgtcacctcttctcgctcttcccctctcctccgctccaatcccaccgccggcgagttctgtcttgataatggctatagtgttgttcttcccgagaaactgaatactggcagttggaacgtctacagatctgcaaaatctccgttcaagctcgttagcagattcccagatcatcctgacatcgctactctccatgacaattttgagcatgctgttcatgattttcgagattacaagtatttaggaactcgtgttcgtgtcgacggaactgttggagactacaaatggatgacatatggagaagctggtacagcaagaactgctttaggttctggtttggttcatcacggaatccccatgggatcttctgttggaatttacttcatcaatcgcccagagtggctcattgttgatcatgcttgttcttcttattcttatgtgtctgttcctttgtatgatactcttggtcctgatgctgtgaaatttattgtcaatcatgcaactgtgcaagccatattttgtgtggcagagactttaaactctttacttagctgtttgtctgagatgccaagtgtacgcctggtggtggttgttggagggttaattgaatctttaccctcgcttccctcatcatcaggagtgaaagttgtatcctattcggtgttactgaatcaaggtcgtagtaaccctcagcgattttttccaccaaaacccgatgatgttgcaaccat

SEQ ID NO: 83853 - DNA, 534 bp, Arabidopsis thaliana columbia
cgcctgcaggtaccggtccggaattcccgggtttgacccacgcgtgcgatgataatggctacagtgttgttcttcccgagaaactgaatactggcagttggaacgtctacagatctgcaaaatctccgttcaagctcgttagcagattcccagatcatcctgacatcgctactctccatgacaattttgagcatgctgttcatgattttcgagattacaagtatttaggaactcgtgttcgtgtcgacggaactgttggagactacaaatggatgacatatggagaagctggtacagcaagaactgctttaggttctggtttggttcatacacgggattccccatgggaaccttctgggggaaggtacttgatcaatccgcccaaagggggtcattgtgtgataatgcttgggtcttatttatacttaaggggccggacgctttaggattgaaactcttggcgctgatcgctggggatattactgggcaatgatgcgagtgggcaggcccttttgtgggatgggagaagtttta

SEQ ID NO: 83854 - DNA, 555 bp, Arabidopsis thaliana columbia
gcgtgattttgcgttttgacttttgatctcgagacaaacaagaaactaaaacagacagtgtttgtatatttcggacaaacaagacgttaaaaagctgccttgtcttacaagaaactagattttgtctcggggtcgatcttatctccaaacagagagaaattaacagagacatgggaggtgcagtgacggaatctgaaactctgcaaaaagaatgggttccagagacaaagttggaggctaagatcatagaagccgtgcaacgcagggcatcgaggggcaccacaatgaaatctttcaacagtattgttctcaagttcccaaagatcgatgatggtcttcgaaactgcaaagccattttccaagaattcgatgaggattcaaacgggtcaatagatcacacggagctaaagaattgtatcaggaagctagagatctcgttcgatgaagaagagattaatgatttgttcaaggcttgcgatattaacgaggatatgggaattacatttacagaattcattgttcttctttgcctcgtctatcttcttaaagacgatt

SEQ ID NO: 83855 - DNA, 615 bp, Arabidopsis thaliana columbia
ccctctaacaatgtggaagcagcggagccatgaaacccaaatactacgtccctcaccctcacttggcgacaatccacctacagtttcggctgaagcaaggtcgtctttctccactggacaatccatgggcaaactgaaatctgatgtaattattgcgaaggagagaagtacctccaatcatggagtttctgccctgacaactgcagaaagctcgagcagcagtacaacaggaggaactttgatgggggtgatgagaggttcttttggaggaactttgggtggagcttcttcttcagctagtgtacaaatgccgccaatattaccttctgcttctccagcttcggtttcagtttctgggagtgggagaagaaggttctctgaaacaccgacttgcagggcctactcatagagaacagcctcagacatcataccgggaccgtgctgcagaaagaagaaacttgtatggctcatcaacatcaagtggaaatgatgttattgattcaagtgaggatttaatggggttgaggaaaggttcatcggatccaacaccatttcctcctggtgtgggtggacgtgggattacaacaagcaccgaaatcagtagtttcgatgtga

SEQ ID NO: 83856 - DNA, 909 bp, Arabidopsis thaliana columbia
  unsure (1)..(909): unsure at all n locations
tgcaagcaatccacgtggagagatttgcatcaggggaaagactttgtcctctggatactacaaacgtgaagatctcactcaagaagtcttcattgatggatggcttcacactggtgatgtcggtgagtggcaaccagatggagccatgaagatcatcgaccgtaagaagaacatctttaaactgtctcaaggagaatacgttgccgttgagaacttggagaacatatacagtcatgtcgccgccattgaatcgatatgggtatatggaaacagctatgagtcttacttagtggctgtggtatgtccaagcaagatccagatcgagcattgggccaaagaacacaaagtttcaggggactttgggtctatctgccgaaaccaaaagactaaagagtttgtccttggagagttcaacagagtagccaaagacaaaaagctgaagggatttgagctgatcaaaggtgttcatttggacacagtcccgttcgacatggaaagagatctcatcactccttcttacaagatgaaaagacctcagcttctcaagtactatcagaaagagattgatgaaatgtataagaaaaacagagaagtgcagctacgagtgtaaagaaaggaagttgttggacaaatctctcaggtttatatgtttctcttatcactctaattcatattgttatatgtctctacgctgtgttaatatcgaagggtttttttctttctttgcttgtaaacaaccaaatcttttattgttcttaacattctcctgttttatgtatttgtattgatattttaataaagttctctgtcccctaaaaaaaaaaaaaaaaaagnnnnnnnnnnnnnnnnnnnnnnnnnnnnnnnnnnnnnnnnnnnnnnnnnnnnnnnnnnnnnnnnnnnaacgaaagt

SEQ ID NO: 83857 - DNA, 550 bp, Arabidopsis thaliana columbia
gtggtaattaaactctccagtcttgttttgaaacaacaacagttacattgtttgttccctaagatgaatcggatgcttatgagcatttgcagaccgttaatagaggtgcttaattatgatttagattcccaactggattccatctctgggtgttcttcttgccaaaagatagaaaacaaccaaacagtttcttcttatgtgatatagtaggccatatactttgtttccagctacgtccagtctgattacttgtgtacaaatgacctaaccaaacaacttccttctttctgaacatgagagtatgaggaaagagtttggagattgcttgcttttccataattcataacatcagtttgtacgtaagtgggccaattactcttgtgtgtatccttggagttgctgtttcatatgtaagtggccaattactcttgtgtgtacccttgggggtttttttatttaccggtacttttgggcacccgttaaattattttgcaaaaaatggaatctggtttttgccccatgcccccataatccatttcgcaattttaat

SEQ ID NO: 83858 - DNA, 484 bp, Arabidopsis thaliana columbia
  unsure (1)..(484): unsure at all n locations
cttaactgaatttatttattattttggatacacttattaccgaaataaaggattgtttatttcttacaactcgtcttattagtgttgcatagcataacaaggtgaaagagaaaacatgttacacaaccgaagatggaaatgcaatgagagggaatttgcggcaaacatcgataccaatggcttcagttagatcaggttgatccccatttggtccagcctctaccctccagtcaaatcggcctacaaggttggccactgtcacctctgccagacccaaagcaagatttatcccggggcatatccttctccctgatccgaatgggatgtagtccagattttttccgtgataatctaaagctgaaccaagggnccncccggttgaatcctcagatccgggcccanncggagggnnccgtnggangncccagcattggtaanccccngnccngggggaaggaaaccctaacttgnaccnccctaaggc

SEQ ID NO: 83859 - DNA, 548 bp, Arabidopsis thaliana columbia
tgctctctctctccttcaagcttcatcaacagaaactgaatcctctgtatctccgactgtaacctcccaatcttctctgttcctctcctcgcatgttcgaatattctccttcttctatcaatatccttctctgattcggcctttggggccagcttccgattgacagtatacagttcctctattggcttcctctccttcttcaagctggtccttggaccgttttataactcgttttctcctacttccgtctttcccttctccactgtttcgactttgcttttcaaatcttctacagtgatctgaagattctccagcttctgtaaatccgaatcaagtctttctagaactcttctcttgtttacttcacggtttggatccatgaatccgtcgaaaatctctactttctcgacaatcagtggctcttcagacaaggctttagtttctgtcttgtgagtcttcactggctttagctcaacaaaaccgagatgatccaactccgaattccctttcttacttacaatctcatacgatgatccatcagacgtttg

SEQ ID NO: 83860 - DNA, 518 bp, Arabidopsis thaliana columbia
  unsure (1)..(518): unsure at all n locations
gcagttaaacaattaacattggtttcttgcgagtgaagtaacaacagttttaataacttcaaggagactctggctgctgaacgcaaccacaaaacacagaccgcttcttcgtccttttcttcatcgatacgcttctagttctcccatagatatagtctcgaagaagaactttggtatctgaaatcttcgacctaagtcgatgctctctctctccttcaagcttcatcaacagaaactgaatcctctgtatctccgactgtaacctcccaatcttctctggttcctctcctcgcatgttcgaataattctccttcttctatcaatatccttctctgatccggcttttgtgggcagcttccgattgacagnaanagttcnnnaatgggtccccccctcttnaagcggccttgggcgggtaaaaccggntccccaantnggggtttcctcccaagggttggactgggttnaaaacnccaagggggnggagggcccagntnggaaaccgacaagcttcngag

SEQ ID NO: 83861 - DNA, 521 bp, Arabidopsis thaliana columbia
  unsure (1)..(521): unsure at all n locations
ataaacgaaaaacataactgtgttcagatctcgaatatacatttccaaaacgtgacaagtttatgtttttttccgtatgtttgcttaataacactcacattattgttctaacagatataaatggttgagaattgtacagagaagaatctacagaccatgaatcatgtattgtcggctgttctttgagcttctgctgttcactgtttgcaattttatcctcctcttctgagaagggtttgaatgaggatagagaaactgattgaaactcttgagctaagcagtactatacctaggagcccatccactatccggaattcttgctcaagcccatgaaccctcttacttagcttaccggatttatccttcagatcctgccattacatccaacaaaccgcagcaactcaaccagacggccgaaaactggggggccgaaggaaaanncctttcttaagaaatccggggcnccaaatcttccaatccnggtnctnggaggncccnncanactggggaaggggcccctt

SEQ ID NO: 83862 - DNA, 487 bp, Arabidopsis thaliana columbia
  unsure (1)..(487): unsure at all n locations
actgggaacaatggtccttcttattagttaagtgggcaacacacagatttgaaagtataactacacatgtaaatcaatctgagggattacgtgttaagtgttctaagggtcacaaaagaaactgcggttttcttacgtcgatgaaattgtaattcaacgtgatgatccatcccaagggagcttcaaaccactaagtttttgattggcaagatgaatgagcaacgagttcttcagaatagcgtatatgatctctgtgcgtataagaagtcttgactatagtttcccacttggtaacacttgtggagttttcttcaacattctttttttggggatgaaacaggtatctcggtgaagggatctttgagcttactgacggcagattactgaaaagccaggacccggaaggcttttgggggggcggcggagcaagtggagatagattccagccctgtgggctttccaaccaanggcttaaaacntggncccc

SEQ ID NO: 83863 - DNA, 455 bp, Arabidopsis thaliana columbia
  unsure (1)..(455): unsure at all n locations
aatctcggttccaatctgtgaaaaagctcgctcttgattataagcaaaagttgggaagtatagctcagtctccagtacacccaagtnttgggaagaagtttaactttggttctgaacaacatgaatcgaagagttctgcaggtacgccatcatctccttacagacaaaatggctgtatgtcaccggatcgctgtgtaggaaacaggtctcctcttcacgctgcgggtttccctgggactcgtaaggaagcagaggttatgagagctaacaggttgaacaagcatatcaggaacataagcaagtctcacggatcactctatccaaaaaagttcaaaacatggcctgtttcaacggggctcctgccatgggagaagccattattatgttggcctccagaggattcttccgacggcccnnccaattgnggnttcgnaggtctaattgtcanggaattt

SEQ ID NO: 83864 - DNA, 423 bp, Arabidopsis thaliana columbia
agcaacgaatctgattatttgattagacagtgaaaggcatcaataatgaacataagataatttttcctattaataatgaaattacaacaacagaagacgacactaaaaggtacaaatacaatgatccgagaaaattacaagtgcaaaagtgatgaacgctctttaatgtgcttcacaatgctctttcaacatagtttgctaaaaacgtcactttcgacatatatcctcaaacatcaatgatgtctttggtaatttcgtcatcacacaaccatataccgagttttctttttgcatatccatgaatatggttagggtgacaaaagatataaaatgaatcctatatggttacgaaaaccaaggttatccagatccaccttccccttttggatatactcgaatacctatatgggattaaagacctat

SEQ ID NO: 83865 - DNA, 473 bp, Arabidopsis thaliana columbia
  unsure (1)..(473): unsure at all n locations
cgaataaaaaaattggtattttagaagaagaaacaaattgtctggtgacaataaatattccataataagaaaacgaaaaaaaaaacagacctaaagaagtaaagatttttgaatcaatctgtaatgtcgaaaatcatctcaattctaagaaatctccaaattttaagtgttcttctgttggtgtttgtagtggagagtatcaatgtgcggcttcactttttttcctatttctacgacttttaacctgtttgaattctttctcgccatcttctgcggagccatttggccttgctgtcatctgcagagccattctcagtcttgctgctatctgcagagccattctgcgtcctgttcgcttccacctttgggtttaccagaagggttgcttccatcataaacaacttccttttccttacacgagctacggnngnagcatgaaggggggntctggnagcngaagncgncngatgnga

SEQ ID NO: 83866 - DNA, 535 bp, Arabidopsis thaliana columbia
  unsure (1)..(535): unsure at all n locations
aattttgtctatagctaaaaaaaggttcaattgtaaaaggaatatggagtcttaccaaaaccagtccggagcgcagcagactcaccaacagcttgaccaatttggaaatccatttccagccaccaccggagcctatggaactgccggtggagctccagccgtggctgaaggtggtggtttaagtggcatgcttcaccgttctgggagtagctctagctctagctcggaggatgatggactaggtggaaggaggaagaagaagggaataacggagaagattaaagagaagctgccgggtcatcacggctccaacaagacttcttctttaggttctacaacggcggcctatgataccggcaccgttcaccacgggaagaaaggcatgatggggaaggtcaaagagaagctttcgggggggtgggcaatcaattaggttttcattttaaattaaccttgtttgggggtggggcggtaaccgggttnattgggccgtttcaatgggcataaacttttaaaccccccnttttttggaaag

SEQ ID NO: 83867 - DNA, 1532 bp, Arabidopsis thaliana columbia
acaatctccaaaatacataaatttgttcacatccttccgtttttggttaggccgagaaaaaaaaaaaatgttgccggtcacaagtcgccgccacttcacaatgtccctatatatgctccgttcatcttctccacacatcaatcatcactctttccttcttccttcttttgtttcctccaaattcaaacaccatactttatctcctcctccttctcctcctcctcctcctcctatggctgcgtgcatcgacacctgccgcactggtaaaccccagatttctcctcgcgattcttctaaacaccacgacgatgaatctggctttcgttacatgaactacttccgttatcctgatcgatcttccttcaatggaacccagaccaaaaccctccatactcgtcctttgcttgaagatctcgatcgcgacgctgaagtcgatgatgtttgggccaaaatccgagaagaggctaaatctgatatcgccaaagaacctattgtttccgcttattatcacgcttcgattgtttctcagcgttcgttggaagctgcgttggcgaatactttatctgttaaactcagcaatttgaatcttccaagcaacacgcttttcgatttgttctctggtgttcttcaaggaaacccagatattgttgaatctgtcaagctagatcttttagctgttaaggagagagatcctgcttgtataagctacgttcattgtttccttcactttaaaggcttcctcgcttgtcaagcgcatcgtattgctcatgagctttggactcaggacagaaaaatcctagctttgttgatccagaacagagtctctgaagccttcgctgttgatttccaccctggagctaaaatcggtaccgggattttgctagaccatgctacggctattgtgatcggtgagacggcggttgtggggaacaatgtttcgattctccataacgttacgcttggaggaacggggaaacagtgtggagataggcacccgaagattggcgatggggttttgattggagctgggacttgtattttggggaatatcacgattggtgaaggagctaagattggtgcggggtcggtggtgttgaaagacgtgccgccgcgtacgacggctgttggaaatccggcgaggttgcttggtggtaaagataatccgaaaacgcatgacaagattcctggtttgactatggaccagacgtcgcatatatccgagtggtcggattatgtaatttgaaaaagtctttgtttttggttgttgttgttgtttatggcttttcattgttctctcggcttcttctgttattgaagctggtgaagtatatgatatgcgatgatgctgtttccataatcagatcatttgtctctccataagataacactgattaagatgggattggaaagtaaactcggaaactctgaactctgtttagtggagtttcctgtggttggtttctgattagcagagacttaagatatgtttagtatgtaagtgcttatttggttaaaccatgatttctgtatca

SEQ ID NO: 83868 - DNA, 516 bp, Arabidopsis thaliana columbia
  unsure (1)..(516): unsure at all n locations
tacnnnnnnataaccctcccatagggaacacagctggagctccaccgcggtggcggccgctctctactagtggatcccccgcgctgcaggaattcgcggccgctttttcttcaccattgttgattgatggatgagaaagcttattcacacttcatttctttgcttttggtgagagaatgaaacagagaagaagagatgaagaaaattaaagttctttccttttctcttttggatctaatttcatcttgagattttctcatagcttgatactaaagctacataaaaaacaattaggtgaaatgaaagtttgtgtgttttgataagttttcagagattttcggttgcatgttgttatcttgctcttgaagtctatcgaacccttttagattctgattttgttctcttcttatccctcctcctataagttagccatttagggtccccatcgaattttactaagttaaagtcagagtctttctggttaagctatggatcgaagagacgcaatggcgttat

SEQ ID NO: 83869 - DNA, 896 bp, Arabidopsis thaliana columbia
tttccgtctgcggtaccggtccggaattcccgggtcgacccacgcgtccggaagcattcaggggaagcgtctggaagtgcaaaagaggacgatatagtctcctgctgcttttgctctagttttgttcctgaagccaaaccaaaacagttagatccttttgacatgtaccaacaattcaagatccatcaaaaggagccttcctcgcgttgttactacgcaacatctgtcgctcctgacggggtcccaccatggtttctgaggaaaaaagagtggacggttgaatactcgaggttccaagactttgaactgagagatgatgcaaaaggactcatcacagagcttcgtactgagcttcctcttcttggtatgagcactgtggttgggaagtggtatgtccctttcatattcgtgaaagaaagagaggtaaaggatcagatcaagaattcgatgtattacagcatgactcttgaacaaagttggaaagagcttttttctgatgagaccgccaaaagcgagaaccgtgatgttgtcgttgatgtagaagtagaaacagaagttgttaagcttgagggacaaatgattgaaagaggtctggaagcaaatgggtttgtctggtttggggttggagacaaaaagatcggtttaggatcagttgttgttgagaggatgaaatgggaagaagagagattcgggtggacaggcaaaggcgacaatgagcgatcaatgacagttaagagattggagaaatcaacagatggtagcctttggaagcattatcattgttatgttctgatagagagctttgtcttgaagagaatggatgagagtttggtcttaacatatgagtttacacatgtagataagctcaaaaccaaatgggattaagcttatcacgc

SEQ ID NO: 83870 - DNA, 534 bp, Arabidopsis thaliana columbia
  unsure (1)..(534): unsure at all n locations
cccccgtccgagaagatgaagaagcttctaagatggaatgtatgtgctttggggatctagctcttgcccacaaaacgtgcactatcaaatggtttacaattaaagggaacataacatgtgatgtgtgtaagcaagaggtgagaaatctcccggttacccttctacgtgtgctggattctcaaaaccggtctagagcagccagggatatcgagatttcacggttcaataatgaatggcaagatattccaattcttgtcattgtaagcatgcttgcatacttctgtttccttgaacagcttctgattatagatatgaaatcttagcgccgttgcaatagctttaccggtctcttgcattatcggtcttcttgcaacaatgntatcaacaacaatggtgnagaggactatgtattgggtcttcggcaccggtcagttcgggttttntggncctttnggtcagctttnttcaagggtttnaggtttatnttanagccggnatgtcattgntngcncntgancggttttggccccctnc

SEQ ID NO: 83871 - DNA, 477 bp, Arabidopsis thaliana columbia
  unsure (1)..(477): unsure at all n locations
atgtaaaagtgatcacaacttcttagaaacaccccatgcaatagcagcagtacagatacagaggaggagcgaattagggtttactcagatcacagtacataatctaaagggagaatgagtcatgcatatttagatccaacgattataagaagacataacgaacagctgaggaactgctaatgctctgtctcaatcaggatgtgcagtttaggaatgcaagtctactaaccttgcattacatatgatcttctagcgagccacatcataagcctggtctgcattcgtactggatttgagcgacaatgatatcactgtgctgttcctggagcagctgcatagccagctgattggagttgctgaattgctcatagccggcctgaggaggtgcagtctggggaataagcgggttggccagaaggngcagcatatgctgatgnggttccccnccatagcaaggnactgngngcatgatcccta

SEQ ID NO: 83872 - DNA, 439 bp, Arabidopsis thaliana columbia
aagatcctttcctctacgctcctctttatcgcaatgtttccatgttcaaaaggagctatgagttgatggagaagatattaaaggtttatgcttacaaagaaggaaataaaccaataatgcatagcccaatactcagagggatttatgcatcagaaggctggtttatgaatattattgaatccaacaacaacaaatttgttacaaaggaccctgcaaaagctcatcttttctatttaccctttagctcccggatgcttgaggtgactctatatgttcaggactctcacagtcaccggaatcttatttaagtatcttaaaagacctatattgggcttccattttctgctaaataccctttttggaatcgaacttacggtgccgatcatttccttgccgcctgccatgattgggctccatcggagacgcggaagcatatggc

SEQ ID NO: 83873 - DNA, 592 bp, Arabidopsis thaliana columbia
  unsure (1)..(592): unsure at all n locations
taagaagtgaaaatcagatcgctggcggagaagcggcgatggtccgtcgtcggagaggctaatgttaccgccgtggaaggattgcgaaacatcttccactgagaaaggaatgctgaaacatgcattgagagtaattagggagagaaactgagaagaaagcgagaattttgttttttgcgtaccttgaatcgacgtctagcaagaaagaaggatatggttcgatgctataccagaaacatcactgcttgccttatgtgttgaagttcatcccatggtgatcgtgttgcctgtaggagacaaaaaaggacagaattatgtattctccatttgctaactgaacaacactctcggcgaagcaccaaacttccagaaggtaaactttacaagtcaagctacgtcataaccaaacataggtggggcctggggntcatttaagntcagnaaggaacaggnaaagccaatttaagntttngcttggaatcttcgaagtcattgttttcatggtnnttnccntaaaagtnaagcgggaaacnttttnggggnattttttnttnngcnttctncttcgaggttntttnccttgatcaccttc

SEQ ID NO: 83874 - DNA, 424 bp, Arabidopsis thaliana columbia
tttttttctgtcaagactgtccaatatttcaaacaaattcagtttcttacgggcaattttttacacaaattttatcaaagagtgttgtgaagaacaataactcaaatatgagtatcacaaatcagtcatcttttacttctttctctttgctgttttggagcctaccctaactttcttgcgcacatacaacaaagagaagccaaactcatcaaacactaaagtaagatgtaaaagatgaaactgaaacagaataagcagttactaaacagccacctcttgagggagatttcgggctgtaaaatggaaactcgaagggaaagaccgtcttgaaccatcctggtaagttcccatacactcctcttgggaacagaatcagaggacttgttgacttcttgtaggatctggaagctcctgagtttccatg

SEQ ID NO: 83875 - DNA, 376 bp, Arabidopsis thaliana columbia
gcaaacaccgcctttcatgtcactgggacagacaataaaaaaacctttttcgtttatgttccatgtctgaaattaaaacattttcaagtctcgggtagttcagattctccatcttagttcttgtaacctctccctcttcttctccaaattccacctgagagaagagaacttattccacccaaaaagcaataatatatagtaccgtactttgattttttcgataatctgttgattgaagttaagccaaaactcagctctgttcttattcttcttcaaacccaagtttcccacttcactgattctttcatcttagctcgttttaaccacaaagttcagttcttttttggtgtgtttctttttcgttattggcttttgc

SEQ ID NO: 83876 - DNA, 445 bp, Arabidopsis thaliana columbia
cctgtgaaaccaagaacggctgtagccaatagacttgccactctttgtattctaccgcttctcctggcaggagttcttggtgcgccaagtaaacgcgaagaattaactatcttcttacgacaacttagttgagagcaaaaccaaggaaaaccagtcgaagcacaacaacgaggttttggatgcagttcgcttcctttgcacatttgaggtacaccataacatgatattcggcattttgtgggaaatggtcgttgattccactgcagaactcaaaatcaacgctgctaagttgttgaaggccatcgttccatatatcgacgcaaaagttgcttccgccaatgttttaccagccttgatcactcttggctcggaccagaacctgaatgtgaagtacgcaagcatagatgcatttggatctgtagcacagcatttcaaagtcgacatg

SEQ ID NO: 83877 - DNA, 438 bp, Arabidopsis thaliana columbia
gttaaaaccctaaacccttaatttgagctctctgctctcctggttttagttttcctctatttcgtgctcaattcgcttgttctccagttccactctatcagtgccggcggcgatattgtccgaggataaaacatgtttgctctttccaaggttttgcggagaagtcagagtctccgcctaggagcttgcaatgctgtctactctaagctagatataccattgggagaaagaaacattgctattgaatcaaacgctttgattcatgataaacacgaagctttgcctagattttatgagctctcttggtcttcctctaccggaagacgttcactttcctcggacgctggagctaaaactaccggagatgacgatgacctcgaagacaagaatgtagaccttgcaactccaaacgagactagtagtgatagtgaagatggt

SEQ ID NO: 83878 - DNA, 537 bp, Arabidopsis thaliana columbia
  unsure (1)..(537): unsure at all n locations
gtggtggaaaggtttcgttattcaatatgatgactttcaaagtaatgacaactttcatgccaccgccaccagcttcaactttcttggcatttcatcctcaagataataatattattgcaatcgggatggaggactcgagtatacatatttacaacgtcagggtagatgaggtgaaaacaaagttgaaaggtcaccagaagcacataactggtctagcattctctaccgcgctcaatattcttgtctcttctggtgccgatgctcagctcttcttctggaccgctgactcgtgggagaaaaagaaatcttcagcggtacagctaccacctggcaaagcaccagtaggcggcacacgggtccaattccacaacggccaaatccagttattggtttcacatggggcacagctcgccattttcggtgcttcgaggatgggatgcattcataagtggggtcccccaagggggttttttttggccctaatccttggantttcntttgnaanagccacttgtttcngggnatttnttttggggc

SEQ ID NO: 83879 - DNA, 648 bp, Arabidopsis thaliana columbia
  unsure (1)..(648): unsure at all n locations
gcaagcgaggctaagaaaaaagaattgattctgaaatcctctggttatgttaatgtacaaggntctaataatttagcctctcttttctccaaacgcggcgaaaaaggcgttaatcaggattgtgcactcgtttgggagggatttgggtgccaagaagacatgatcttctgcgggatattcgatggacacggtccatggggtcactatgtagccaaacaagtaagaaactcaatgcctttgtcgcttctttgcaactggcaaaagattcttgctcaggccactctagaacccgagctcgacctcgaaggctctaataaaaaaatctcaagattcgacatatggaagcaatcctatctaaaaacgtgtgcaacggttgatcaagagcttgaacatcaccgcaagatcgattcttactatagcggcacaacagctctaaccattgtgtgacagggtgaagttatttatgttgcaaatgttggccgttcaagggcggtccttagccatggagtcgggttgagggaagtttggttgcggttnagnttaccctnggttttaaaccggattttccncaggtganggngncggttatttgcttcaaaagggcgggtttnnttcntnggtttttnnccgggngncatcgtttttgga

SEQ ID NO: 83880 - DNA, 586 bp, Arabidopsis thaliana columbia
  unsure (1)..(586): unsure at all n locations
atgaggttggtgccgccatataccaaaagccaacttcttatatttgttacaacaaaagacctcaaaatgagccacctctctgcaaggattccgatgatcaaaatgcagcctggaatgttccacttgaggcatgtatgcataaagtgacagaagattcatcaaagcgaggagcagtgtggccaaacatgtggccagagagggttgaaactgcgcctgagtggttggattcgcaggaaggtgtttatggaaaacctgcaccagaagatttcacagcagaccaagagaagtggaaaactattgtctcaaaggcataccttaatgacatgggaatcgattggtctaatgtgagaaacgtgatggacatgagagcagtctatggaggatttcctgctgctttgaaggatttnaagttatgggtgatgaacgtggttcctgtggatgcgccagatacacttcccatcatatatgancgtggtttatttggaatctatcatgactggtgtgaatcattcaacacttatcccagaacttacgaccttctccatgccgatcatcttttgtctaccctgaggaagaggtgcaattt

SEQ ID NO: 83881 - DNA, 538 bp, Arabidopsis thaliana columbia
  unsure (1)..(538): unsure at all n locations
ttgtatacattttgagagctaacggtatgattccagaatttatgtatgcaacttttctcaaagccaaaagatacaaatactactaagaaacaaggtcaaatgaatttgataagcaagccttaaaggcgtgaaagaaccaacttttttactgaactatattcaagtgatgcttttcttttcttttctgacttgtttaagcgattgccgatttgattgtctcagtttcttcaggacgccaccatgacttttcaattgaaagcaagccttcattgtctttggactgcgtcattttaaccttccatttcatagatttcaccattttctcaacttctcctaatggttccatggcatcccttatgatgaaagtcccctgtggcctaagaaccgntcaatctcaggcattancggcaccaaatgnacctctccccaggggagagaaagntggtggnatggggaaggccgnagtccnggggaagngtgaagntcccccagcatgggaggtccaaaaaccnggcnnnttggnggnagggannggggc

SEQ ID NO: 83882 - DNA, 1070 bp, Arabidopsis thaliana columbia
cttcaatttcgtaaacttctaggggagaaacaagggagatagagaagtgagagagggggaaaccctagattcgatctccattcgatttgattcgtttctcgaatcgaagcgatggttttctacttcaaggcccgtcctgatgctggcgactacaccatcttcatggggcttgataagttcgagaacgaggagctcatcaagtacggcttccctgaagatgtctggtttcacgtggataaaatgtcgtcagctcatgtttacttgaggcttcatagaggccaaagttttgatgacattagtgaaggtgtgctggaggactgtgctcagcttgtgaaagctaactccattcaaggcaacaaggtgaacaacgttgatgttgtgtacactccgtggtccaacttgaagaaaactgcctccatggatgttggtcaagttggtttccacaattcaaagatggtccggactatcagagtggagaagcgagtcaatgaaatagttaacagactgaacaaaacaaaagttgaaagaacccctgatctgagagccgagagagaagcagtgaatgccgcagaaagggcagagaggaaacaacatctgagggagaagaagaaacgtgaagagatagataggcttgagaaggagaggcaatcagagatgaggagttacaagggcctaatggtaactgataaaatgacatccaacaaagacattgcttcaagcaacaaatcgcttcaagaacttgaagacgatttcatgtaaaagctctgaagaaatgagaaacaaaacaaaccaagtcggtaacattctgccagagatgatctggtaccgtccttcaaagaaggcttatgatgttctactcgccttaactatgatgttgatggttgtccggttctatgttttctttaaaaaaatcttgaatacctaaaaccctaatctggttcttggactccctggtcccttgaaatggttcaaaaggattgaatctgacctgtgggcaaaagggaggcccgctctagagatcccagcttagtacgcggcagcgacgtcatagctcttctatagtgtcacct

SEQ ID NO: 83883 - DNA, 406 bp, Arabidopsis thaliana columbia
acttaagcaaaggtagtagaactaatttacaatttgttgaatgttaattgatatatatatattttttaataatgatacattggcaaaacttacaatgtatataaactatagatgcttatttttttctcccctgaaatacagataggttctgctttctgagctcgtagattctgtaatctctgcgacaggaaacttaaaccttacccacgttgatgatgaatcatcacttgcttttcttttaccaccactggatagacagaaccagaaccagaaccattcctctgacatcattgtcagcttcaacctcctgagataggacaatctctgtgttaaaaactttatcagcttagcgcgatgacatatcagcttcttcgatactagaaattgcagattcgccatcagtttc

SEQ ID NO: 83884 - DNA, 1479 bp, Arabidopsis thaliana columbia
  unsure (1)..(1479): unsure at all n locations
tttagggttcacaacttgattcggatcgaaagcaccgagaagaagaagccaatcaatcatgtctagacaagtggcaaggcttatcggatctctgtcatcaaaagctcgccgttgttctaccggcggctcagaggtttttccgtcatgccagtctctcacttcgttgacccaatctcgctccttcgcgtcggatcctcatcctcctgcggcggttttcgttgacaaaaacacacgagtcctctgtcaaggcatcaccggaaagaacggcactttccacactgaacaagccattgagtacggcaccaaaatggtggcaggagtgacaccgaagaagggtggaacagaacacttgggtctcccagttttcaactctgttgctgaagctaaggctgacaccaaagccaatgcctctgtgatttatgttcctgctccttttgctgctgctgctattatggagggtattgaggctgagttagatcttattgtgtgtatcaccgaaggaatccctcaacatgacatggtacgtgtaaagcatgctcttaacagtcaatcgaaaactaggctgattggtccaaactgccctgggattatcaagcctggtgaatgcaaaattggaattatgccgggatacatccacaagcctgggaagattggaattgtctcacgatctggaaccttgacatatgaagctgttttccaaacaactgcagtgggtctaggccaatctacttgtgtaggaatcggtggggatccttttaacgggacaaactttgtcgactgcttggagaaattctttgttgatcctcaaacagaaggtatcgttctcattggagaaatcggaggcactgcagaagaagatgctgcagcattgataaaggcaagtggtactgagaagcctgttgttgcttttattgctggacttactgcaccaccgggtcgtcgaatgggtcatgccggagccattgtttccggtggtaaaggtacggctcaggacaaaattaagagtttgaatgatgctggagtgaaggttgttgaatctccggctaagattggatcagcgatgtatgagctctttcaagaaagaggtcttttgaagcagtgaagtgaatttcactagctttcgcttctttttttccatcttgaaaccttcaagaaaaaagaaaagaaagaaaccctaattccacgccattgatggctgcacacttttttggggtttggtttgctatactcatatgatttttccaattgaacagtgataattaaaagagattcaaatcttatggcattggattatttttaatgttatcttccagtacaagaaataagagtgaagcaatgtttctttacacaacaaaaaaaaaaaaaaaaaggnnnnnnnnnnnnnnnnnnnnnnnnnnnnnnnnnnnnnnnnnnnnnnnnnnnnnnnnnnnnnnnnnnnnnnnnnnnnnnnnnnnnnnnnnnnnnnnnnnnnnnnnnnnn

SEQ ID NO: 83885 - DNA, 317 bp, Arabidopsis thaliana columbia
aaaataacaatactaccatgtaaacatacgatgtcttaccacaataaatttacagggaagtaagttttcttaagactcaccactgactttggcgacaataactgaagcatagtgagcaatgttagcctcaggggattgtttaagccttgcaatgaccgggaacaactctgatgacttcacaaactgtctgcaaatctggtggttcgaacacattttagccaatgagaagagtgcaatcttgagcggtgactcactcgctgtctctttcttgcttgggttcaaggcaagagtcgagcaatccgcaactagcctcagta

SEQ ID NO: 83886 - DNA, 503 bp, Arabidopsis thaliana columbia
gaacaataaaacagcctttaccttccccaaagtttgaaaccaggggatgattgaagaagaagaagcagaaattaaaagttattataaggagtgaccaaatgcagaagaagaagaagaagaagagtaaatttcaaatctgaggtaatctactcatgatctggttatataccgattgtcctgaatctggaaccgggtcaacctttgggtcccatcccctctcctgcatccattgcttcactcatcccaaccggttgtgtcatatacgggtgaggcaaacccggcattttcccttgaccatacgctaaaccaggcattgaaagattaaccaaaccggtttgtcctaaaccgaaggagaaaccagaaggaggacccaaatgtggctgaaagctaaagggacggctaaaaggagactgattgttagttgtgacttgtctgtcgaatctcccacgtggcggctctgagtgatgaccgttgtggtaatggtgagaaactgcggctgaacc

SEQ ID NO: 83887 - DNA, 863 bp, Arabidopsis thaliana columbia
ctgtaaatgccttttttattcttatttcaagagataattttgttcatgttttgaagttgtcctctctctcactcttcatttcaaaagccaagattaaacctaacttctgtctcacgtctagtttggaacatgggacattggtttcccgtggctacggggccattcgagcttaaacaacatcaggaaccttggacaaagactctcgtatcttctcttcgctgaatgataaatctaccaactcgccttttaaatacttgtcgtaagaagtaaggtcgaaatggccatgtccacacatcgccattagtatcacttttgcttctcccgtctctttacatcggagagcctctcttatggttgcagcaatggcgtgggccggttctggggcgggtaatgaccccttctggtcttgcaaaactcgaatagccccttggaaacactcaatttgggggaatttgaaattcgctcccatgaatccttggttcataaacatgtgagatcaatggtgccaatcccatggtaccttaatccaccggcatggatagggatcaggaatgaagtcatgtcccaaagtatgcatcttcatcaaaggagtcaatccagccgtatcgccaaaatcataagcataaacccctttggtcaaggaaggacaagcagatggctcaaccgctcttataacagggttgattttgcctttgagtttctcccggataaaaggaaaactcaaaccagcaaaatttgatcctccaccagtacaccctatgatcaggtcaggtgtttcaccaaaattctccatttgttgaatgcattcttctccaataattcggacgcgtgggtcgacccgggaattccggaccggtaccgca

SEQ ID NO: 83888 - DNA, 370 bp, Arabidopsis thaliana columbia
cacattaattcacacctctctcccttctctctcctatctctcagtcaaaccctaattccgatgacggtacctaattccgacgatggtgaccggagtttaacggaggttatcacctctcttatcgactctatacccaaccttcttagcttcaagtgtaaatggtcatcaattcgcgccaaactcgccgatctcaaaactcagctctccgatttctccgatttcgccggctcttcttcaaacaaactcgccgtagatcttctagtttcagttcgcgagacgctaaacgacgccgttgccgttgcggcgaggtgtgaaggaccagatttagctgaaggtaagcttaaaacgcagagtgaggttgattcagtca

SEQ ID NO: 83889 - DNA, 390 bp, Arabidopsis thaliana columbia
  unsure (1)..(390): unsure at all n locations
caatnttnaaaangngtnaaaaatantggttacccattttaacctacanctaaaaaaccgaaagtatccgattatatagttggatggggaatactttattggatcacaaattcaaacatccatctatcttttcatctctctgatgagtggcgactcttaaattgaagaagtgaattagattccctacagcttggccgagaggtaatgaggagtgtcccaatcagtcttgatgtgggttcggctgatctctctcagtgaacggcaaccacttagtgccattgtaagctcaaactcgtctcttagcatttgtagcatcttcctaactcccgcttctccatccgctgcaagcgaggacaagctcggcctcccgaaaaagacacctgaagcgcc

SEQ ID NO: 83890 - DNA, 595 bp, Arabidopsis thaliana columbia
ccgaactattccaatatatatttttcagatcatcccattataaattgggttattatataaaaaatttctggtcataaactttccagaaaaaggaacgttacaaagtttacggaacaaaagaaaacttaaagagcatagtatgcttataaggttcccccggttcaattatctgcgaagaacgatattgggaactgactgcatgggattctagacataaaccagagtaagctttatgaaccgatccattttttgggttaggggttttcaaccttagaccggattggtctgtagataactccatttttatcttcgatttattgtccacaagctccacgacttttctcatcttatttgcaacaccatctagacaataatttataccataccctgtcttaagctcattgatgttgtctttaataggtcggagttggcgaaaatcgaagggtgttcctttaacggcgaggattttcccggttggagtgagattatcgtcgagatgagtataaccggaaccgagaatttgaatttcttcagagaagatatcttcattgttcggacgcgtgggtcgagccgggaactccggaccggtaccgcg

SEQ ID NO: 83891 - DNA, 431 bp, Arabidopsis thaliana columbia
gtttctgaagaagagacagagagagaaggatagagtaaaagctaagagagagagcgagactgagagagaaagaaagagatatcattttggttattaagtaattaacttatgctaatcatgggttttatcgatggaaagtgggcaccaatgatagtcttaattgtttctaacatgattgcgggaatggttaatgctttagttaagaaagttcttgatggaggcatcaatcatatggttattgctacttatcgtttgggtatatctactcttttccttcttccagtcgcttatttttgggaacggaaaacacgaccaaagctaactctaagcatctcatgtcagcttttcgtcagtgccctttttggggcgagcttgatgcaatatttctacttgcttggactgtcctacacgtctgcaacgctgggatctgc

SEQ ID NO: 83892 - DNA, 415 bp, Arabidopsis thaliana columbia
tgatgctgatcaggtcacaggcaatcctgaatcgatccaggttctcaagagagttgcgaaaacagtctcgagctatctaaacgaagaaaacgctctagtgaaagcagagcaagcttgtttcttgcccagcacagaagatggagttcctgtgatcggagagattccaggaatcaagggatgttatgtagggcaccaggggcatagttggtggggggattcttaaatggtccagccactggtgctgcttcggctgaagcttatttgtagaccgggtattgccacaaagtgtcggtcttaagccggttttagtccttcccgggttagcaaacgaagatgaagagtatagtaatagagagcgttcgctgagatatcacatagaagctactctgttctttgaagtctaagcaaacagaat

SEQ ID NO: 83893 - DNA, 409 bp, Arabidopsis thaliana columbia
  unsure (1)..(409): unsure at all n locations
atcaagactgcggatgatgggatccacgtgctcttcaccgaatacatggcgctcccgtcgccccaaaacacgacatctgaaggtgggaaagcagatggactgtcggattttgacacgtacatagtggagacaacggggcagaatctgaaatcagagctggaccagtaccttgatgaaaccctgcttcccagggttcaggagtttgatgttcttgactggtggaaacagaacaagctcaagtacccgaccttgtcaaagatggctagagacatcctttcaatcccggattcagctgcagcctttgactatgtctttgacatggaaccgagggaaatggatgagtacaagacgtcactgagggcccagacattgggggttttattttcgcaagggattgcnttttttaggg

SEQ ID NO: 83894 - DNA, 514 bp, Arabidopsis thaliana columbia
taagaaaggctcaaacactgaagatacaaagctcatgaaaggctcaaagtctgcgccagaagacgggaaccagaaagggaaaagccagaaatcttcgatggtatctgatcatgcaaatgaggatcatggagacgcaaagaaaggaaaggagaagaagaagaagaagaaaggtgttgccggagatgaggttaagcgtgagagtgaatacaagaaaggactaagaccggtcttgtggttaacaccggactttcctcttacgacagacgagcttttaccgctccttgacatattagctaacaaggttaaagccgttaggagactcagagagcttctcacaactaaacttccgctaggcacattccctgtaaagctcgccattcccattatttcctacggttcgagttgttgttactttcaccaaatttgagggacttcaggcagctgaggaggggttctcaacacctccttctagtccgggatttcttgttgcaaagtcgtcttcttcagagaactc

SEQ ID NO: 83895 - DNA, 390 bp, Arabidopsis thaliana columbia
ccacgcgtccgatgatactagctagtactgaatttccacagctgtttggcaatgcagagaagcgcttcttgtatgagattgttgctaatggtcgaaatgggattgatgtggacaagtttgactaccttgtccgtgattctcgagcttgtggactgggatccaattttcaattccaaagactgacagagacgatgagagtcctggacaatgaaatctgcttccgcgccaaggagtatcttagtgtccacaagttatttgcaactcgagctgatcttttatcgaaccgtctacacgcattcgaaagcaaaggcgatagagctgatgatagtagatgccatggtcaaagccaacaatcatttggaaatttcttctatgattaatgacccatct

SEQ ID NO: 83896 - DNA, 837 bp, Arabidopsis thaliana columbia
  unsure (1)..(837): unsure at all n locations
tctaatacgactcactatagggagagctggtacgcctgcaggtgccggtccgggattcccggggtcgagccacgcgtgcgcggggtctctatctatctctctctcgctctcatatttgcagttgacaattcgttctctttgggaaattagagatgcaggcatcaagagcgcgactgtttaaagaatacaaagaggtacagcgagagagagtagcagatcctgatattcaattgatctgtgacgataccaacatattcaaatggaccgctcttatcaaaggaccttcggagactccttacgaaggcggtgtttttcagcttgctttttctgttcctgaaccttatcctttgcaacctcctcaagttcgattcttgaccaagatattccatcctaatgttcatttcaagacaggagaaatatgtctcgacattttgaagaatgcttggagtcctgcttggacgcttcagtctgtgtgtagagctatcatagcattgatggctcatcctgagccggacagtcctcttaatgcgaactcagggaatcttctaagatctggtgatgtgagagggttcaattcaatggcacaaatgtaaacacgcctcgccgctatgcctaagaaaggaaaaagatgatgatgatcctctggctttttttttgtttttttttttgaaatttgtaatgaaattgatttgcgagagtgaatacattattaacgagaagaagatgattcttctttattaaaaaaaaaaaaaaaaaaaaaaagaaaaaaananaccnnacncnaagggcggccgctctagaggatccaagcttacgtacgcgtgcatgcgacgtcat

SEQ ID NO: 83897 - DNA, 567 bp, Arabidopsis thaliana columbia
  unsure (1)..(567): unsure at all n locations
ccacgcgtccgcgcaatcttttcttgtattttccattgcggcaattcctcctaataaagctttcctctttcacgtttctaatctctttaatccggttaaatccaatcccaaatacagattttgattacagaaatctaacattttgctgatttgtgttttagggctctctcgtgttttttatgattttgattccctgtatagattcaatcacttttctcatatctcttgttactgaatttgatccaatcgatcgataaaccaaacctcagaagctatgagagtgcacccaattcccagaaacatcaacaacacattgatccatcatcatcatcataacccgacccgagaacccggaaagaatctccgaccgattaccacatatcttcaaccgtgttctgggggtaccattgaggcagaagcagatgtgcagtggngggggcacgctgttttggtttntgnggggnggtaggntnttnaacgnngtggggaattagggntntttgggtgngtcatccgggtaaccaggtcgtnttgggaaatgggttnttntttgggttctttnngggt

SEQ ID NO: 83898 - DNA, 439 bp, Arabidopsis thaliana columbia
  unsure (1)..(439): unsure at all n locations
ccacgcgtccgggtgaaggatatatctttatgggaagtgatccggctccatcacacggaatgacatgggttcctatgcttcacgattcccgcttggatgcttatcagatgcaagttacaaagatgagctacgggcagggtatgcttagcttagatggggaaaacggaagagtagggaaagtcttatttgacacaggaagttcctatacatacttccctaaccaggcttactcccaattggtcacatcacttcaagaaggttctggtttaggactaacacgcgatgattcagacggaacactgcctatctgctggcgagcccaaactaactttcccgtttaggttccttgtccggatgttaagaaggtcttcaagcccattaccctttcaaatntgggggccaattgggttatnncattccaggaaacttttttgntnaa

SEQ ID NO: 83899 - DNA, 532 bp, Arabidopsis thaliana columbia
  unsure (1)..(532): unsure at all n locations
acatggagtgcaatctttaccagcttatgaaggatcgccctaagcattttgcagaatctgatatccgaaattggtgcttccaggtcttccaaggcctttcttatatgcatcagcgtggatacttccaccgtgatcttaagccagaaaatctattggtctcgaaagatgtcattaagattgctgatcttggcctggcccgggagatcgactcgagtccaccttatacagaatatgtctctacacgctggtatagggcacctgaagtactgctacaatcatatgtatacacgtcaaaagttgatatgtgggcgatgggtgctcattaatggcggagctgttgtctcttcggccctcttcttttccctggagctcagtgaagcggactgagatattcaaaaatctgcaagtggtcataaggcagcccaaccgaagaggccnnggttggntggggncttnanccttgccagcggttatnaattanccaaattccctnaggtttcccggtgtcattntttaaagggtgatnccaaat

SEQ ID NO: 83900 - DNA, 466 bp, Arabidopsis thaliana columbia
  unsure (1)..(466): unsure at all n locations
gcagctgcggttcttctatagtgcccgggaagattttgagctggtgagaagtaaaggaattgcgtcagggaatgacacctcctccacgatatctttctagagtctgctccattatctgtgctcttatgcccatacttacattgtattttggtcatatagatatctcgataacttcagcggcgtttgttgttgcaatggcattgttgttacagagaggaaacccgcgtttttntcagctgagtagtacgatgtttggcctgtttnactgtggatatcttccttgtttctgggttaagctacgttgtggtcttacngctccagtttctaaacaccggaattgggngaagctggcctactatcctcggcggccaagcacattgggcagttgggcttnttgctatattnattnctttcctnnggataattccccanacacggttgctttttnttggggggaagggaattt

SEQ ID NO: 83901 - DNA, 495 bp, Arabidopsis thaliana columbia
  unsure (1)..(495): unsure at all n locations
tcctcttcaaattgaggctaaagaactcaagaagagaaacactctcctccccttaaatcctttacttatatttccttgagataaagcaaaaatcatggccgaagcgtcttagtttagtggggaagcttgagacagaagttgagatcaaagcttcggctggaaagttccatcacatgttcgtcgagagaccacaccatgtatcaaaagcaacttcaggcaaaattcagggatgtgatctacacgaaggcgactagggcaaactcggctctattgtcatctggaactacattattggcaagtaaaccttatattaactaaggaacggtacataaatttcatagttgctaaaggaatggggggacccggaatttggtcctccggttatgtaccatatctccntantttatttttggaaanaaatcctncnggttggntccgttaacccccatnttggggggggaaanttngnccccncgttttnaggttttnangggg

SEQ ID NO: 83902 - DNA, 381 bp, Arabidopsis thaliana columbia
  unsure (1)..(381): unsure at all n locations
cttgattgttgttgcaggtgcgaattaaattttttggtgtgtcagtacgatttttttttggttttccactcagcgttacaagcatgagtgatagtnagagcaatgcaccactgccatacagcatcaaatttgttggcagtaagacaaaacgattgaaatacttgccggctggtgctagtggtacagcaacagcacaatacccaaatggcgacacatatacaggtgaatacaatgtaacacaacaaaaacatggtaaaggtacatacacatggaggttncaggaccagcagtttttgcagccaggtngtggttggttattaccgntgccggnattntttggcggtnnccaaggnngntccnggtcccctgggggnttttttt

SEQ ID NO: 83903 - DNA, 725 bp, Arabidopsis thaliana columbia
agtttaattggggattaactgttataacgattgcagagaatgttttaaagctacttgagaaaggggaattacttaacgaacataggaaccgagctcgtgagctgtcgcgagggattcatcgtttcggtagctttaaccacatctcttcatctcattctttgtcagagcatgaagtcttacatgaatctacagtctataggaaatgtaattccaattttaccacgaattacgatgaggatgaccaagcagaacactatggtttctcctaatgaccccaacctttttcctcagccgctggtagctgacccgagcgaggaatctaggacgggtatgaaagaaaatatggatcctgaacatgatcagaacacagagggaaacccacttttgggttttagtaaaaaggagggtcaagaactagccggagaagacgagaaccatccatttacggatggcgagagtaagcatacagtagtcttgcttgatgagaacacagattaaattttaattacgtgatatcgcaatctgtataagagaaaaaacccgagaagaagataatgtgtgtatacccatatgtatacatatctaccataataacacttctgttaatgactaaaaaaaaaacggccgcgaattcctgcaggccgggggatccactaggtctagaacggccgcccccccggtggagcttcagcctttggtccccttatgaaggttatttcgagcct

SEQ ID NO: 83904 - DNA, 416 bp, Arabidopsis thaliana columbia
  unsure (1)..(416): unsure at all n locations
ggncactgtctccggtaaccgctgaagaacgatggcgactcaggctgctgctgctgcctcattcaagggcaacttaaagaaagctgtggcaggtataaagcgtatcaatctcgacggtcttcgttggcgtgtttttgatgccagaggccaggttcttgggagactagcttcccagatatcaaccgtgcttcatgccaaagataagcctacttattgtcctaaccgcgacgatggcgatatttgcattgttcccaatgctaacgaaatcgggcttcacaggaagaaagctcactgacaaatttctacccgttggcatacttggggtacaatcggncaaccttnaaggancgggagtctttnaaagatncagattggccaaagatncccncagnggttattcgtnaggnctttnttng

SEQ ID NO: 83905 - DNA, 445 bp, Arabidopsis thaliana columbia
  unsure (1)..(445): unsure at all n locations
agcgaggaagctcaggaggaggccaggaggaaggaaagggctcatcaagaagagaaaatacgtcaagtaaaagctcgcgcagaggctcaaatgctagcaaaaatcagagctgaagaagaaaagaaagaagttgagagaaaggcagccagagaagtagctgaaaaagaagtagcagatcgcaaagctgccgaacaaaaacttgcggaacagaaggctgtgatagagagtgttacgggggagttcagctacatccaaatgctcaagctgggggtaattcaaatccgagctgcagaaagtgcttttgattatttgngnacccncaagntttgaaaaagctccnaaggtccttggaaacaaccgggacccnatncggttttaaggccaccggttcaaaatggaaaacttttttgcangtttttttnngnangccntnttttggaggggt

SEQ ID NO: 83906 - DNA, 538 bp, Arabidopsis thaliana columbia
  unsure (1)..(538): unsure at all n locations
ctcattgcgttttaccattggtgtaaggatactggagtggcgagatcttctgagtaccctgaggttcagaggattacgagcaagctgttggagacactagaagagtttgtgagagacagagccaagagggccaaaagtcctgagaggaaagagattgaagctcctcctgctcctgctcctcctgtggaagagccagtggatatgaatgagatcaaagcgcttcctcctcctgagaatcacactcctccacctccacctgcaccagagcctaaaccgcagcaaccacaagtaacagatgatctagttaacttgagagaagatgatgtctctggcgatgaccaaggaaacaagtttgctcttgcgctttttttcttggccctcccgctaataacggaaattgggagnttttctcttctgntaacaacgngcattggtttggaagatccancagnagncttngggaagnnggttgggnctagnattggtngggncactngtatttnggccatnanaagccgaatgggtggtggtttgccgc

SEQ ID NO: 83907 - DNA, 947 bp, Arabidopsis thaliana columbia
  unsure (1)..(947): unsure at all n locations
gagattgctggaaagatgctaggacaagtacttgtcaccaagcaaacnggtcctcaaggcaaagtagttagcaaggtttacttgtgtgagaaattgtcactcgtcaatgagatgtacttttccattattctggaccgtaaatctgctggaccgttgatcattgcctgtaaaaagggtggtaccagtattgaagatcttgctgagaagttccctgacatgatcatcaaggtaccaattgatgtatttncaggaatcactgatgaagatgctgctaaggttgtggatggtctggctcccaaagctgcntgaccagaaaaaggattcggattgaacaaggtnaaggaagcttatacgggacctntttcccgcaaggactngncttgcacaaatttttngggaattcaatccccctttttggggggccatcaacctaatcaattggtagctgctgatgccaaattgaacttcgatgataatnctgcgttccgacaaaaagaggttttcgccatncgtgatccaacacaggaggatccacganaggtggctgctgctaaagttgacctgaactacatcggtttagatggagagattggttgcatggtgaatggtgctggattggccatggcaaccatggacatcattaaattacacggtggaacaccgccaatttccttgacgttggtggaaatncttctnagcaccaggtggtggangcntttaagatactgacatcggccgataaagtgaaagcaatcttggtgancatatttggtgggtaatgaatttgatgtgattnctagtggatcgtgaccgttcaaaaggggcgcattgaaagtnccagtggtggtccgcttganggncgattttttncagggaagggtnctaaggaagtggttnactctancacttgtgtttggtatcncttgaacnggtaanttccccctttc

SEQ ID NO: 83908 - DNA, 1689 bp, Arabidopsis thaliana columbia
cactcatatagggaaagctggtacgcctgcaggtaccggtccggaattcccgtgtcgacccacgcgtccgcacggctgcgacgacagaagggtacggctgcgcgaagacgacagaagggtacggctgcgagaagacgacgatcattcatagctgcgactattctctgctctttctacattttctcattttctcttgggctacttttcgactactaacaaatccaacgatgaggggattggtgaacaagctcgtgtccagatctctctccatctccgggaaatggcagaaccaacagcttcgtcgtctcaacatccacgagtatcagggagctgaattgatggggaaatatggagttaatgtgccgaaaggagtagctgcttcttcgttggaagaagttaaaaaggctattcaagatgttttccctaatgaaagcgagttggttgttaagagccagattttggctggtggaagaggtcttggaacattcaagagtggtcttaagggtggtgttcacattgttaaacgtgatgaggctgaagagattgctggaaagatgctaggacaagtacttgtcaccaagcaaactggtcctcaaggcaaagtagttagcaaggtttacttgtgtgagaaattgtcactcgtcaatgagatgtacttttccattattctggaccgtaaatctgctggaccgttgatcattgcctgtaaaaagggtggtaccagtattgaagatcttgctgagaagttccctgacatgatcatcaaggtaccaattgatgtatttgcaggaatcactgatgaagatgctgctaaggttgtggatggtctggctcccaaagctgctgacagaaaagattcgattgaacaagtgaagaagctatacgaactcttccgcaagactgactgcacaatgttggaaatcaatccccttgcggagacatcaactaatcaattggtagctgctgatgccaaattgaacttcgatgataatgctgcgttccgacaaaaagaggttttcgccatgcgtgatccaacacaggaggatccacgagaggtggctgctgctaaagttgacctgaactacatcggtttagatggagagattggttgcatggtgaatggtgctggattggccatggcaaccatggacatcattaaattacacggtggaacacccgccaatttccttgacgttggtggaaatgcttctgagcaccaggtggtggaagcgtttaagatactgacatcggacgataaagtgaaagcaatcttggtgaacatatttggtgggataatgaaatgtgatgtgattgctagtggaatcgtgaacgctgcaaaagaggtcgcattgaaagtgccagtggtggttcgtctagaaggaacgaatgttgagcagggaaagagaatcctcaaggaaagtggaatgaaactcataacagctgatgatttggatgatgcagctgagaaagcggttaaagctttagctcactaatctctctatatataccaaaagccggtttgttaattgttttgtggttgacgcccaatttacactttcttgcggatatcatttcctcaaacagatcaataatgaactggtctcctttttttgtgtgatccatccaaagagattcaaatcagaattctcaatatctttttgtatttaaccaactcatatggttgatact

SEQ ID NO: 83909 - DNA, 504 bp, Arabidopsis thaliana columbia
  unsure (1)..(504): unsure at all n locations
gaaagcttatttagctgctcgagaagatagtgaccgaagtgctcagaaagctattgctgataaaacttcctctgcactgctagatagggtggagacaatgctccagaaacttgaaaaggaaattgatgatgtcgataacaagatcggcaaccgctggcgactcctggacagagattatgatggtaaggtaagcccagatgaagttgcattggctgcgatgtacctgcaggacacattgggcaaagagggtatccaagagcttatccaaaatctgtctaaagataaagatggcaaaatactggtggaaggcttagtgaaggttagcgagccgagattgaagatgcttgaagcttgangaaccagacgggcctacaaccaagtttttgnnttntttgtttttggggccatttggcgnaancttttttttccaagggtcangtttttgcctcntggtaagnaaaggggggccctccntttcnggggnttttttcntnanaggccttt

SEQ ID NO: 83910 - DNA, 434 bp, Arabidopsis thaliana columbia
  unsure (1)..(434): unsure at all n locations
gatgaagaggttctcactgatgcttgctgggctctctcctacctttcagatggccccaatgataagattcaggctgtgattgaggcaggtgtctgtccacgacttgtggagcttttgggtcatcaatcacctacggttctcattcctgctcttcgaactgttgggaacatcgtaactggtgatgactctcagacacagtttataattgagagtggcgtactaccacacctttataatttgctgaccgcaaaatcacaagggaaaagtataaaaaaagaagcgggttgttgggcctatctcggaatattacctcctggggataaaccttcaggtatcgggggcttttgggttgccgctgggatnaatcccccccccctttgtgcaaccttggtcccaaaacggggggggttccgtattaaanaaggggannctcc

SEQ ID NO: 83911 - DNA, 502 bp, Arabidopsis thaliana columbia
  unsure (1)..(502): unsure at all n locations
gctgcagactacatgatgtctatatgtggcgatgatggcttgagggaaatttcttcccctgggaaatgtggcagtatcttctacctttctcatgacgacagatttgtgataaagacattaaaaagatctgagttgaaggttcttcttaggatgttgcctaggtactatgaacatgtaggagactatgaaaatacgctcataacgaaattttttggagttcacagaataaaactcaagtggggtaaaaaggtacgctttgtggtcatggggaatatgttttgcacagaattgaagnttcatcgtccgctaatgaccctaaagggctcaacacaagggngntatnccaggnaaagnattaaaanttgggggaaaagnccttccatttgaaagatcctttgatnctngccttaatggaatttncatattgggcaaagctnccttncgaggaggntcctnttncaagcaaaattatttttngncctgtcnggtcccttngggatcc

SEQ ID NO: 83912 - DNA, 680 bp, Arabidopsis thaliana columbia
  unsure (1)..(680): unsure at all n locations
caaagatgatagtgctgctctcaattcttcagtgattgtcacagatgatagacgcctgaaggaaatcgtgataactcattttacatcgaaattgcagacattatctgaggaggagcaattaaatttgagaaaggaaattcagtcagatttttccctagatgatgcacattcgcttggtggacaattattcacggatacaccaggacctagttctcctcttaatcaaacagaacttccagcttttgaagaggttgagctttcagacatagcggcatttgaaggaatatccccaggggccagtgggagtcagtctggccacagaacatcatttgtccacaaacactaacccagtagatgttctgacgtgtcaatgagttgtttgaatcggtatcaggaactgctcggcaagttgcaaggntccctgtttcctccattcctgtaccttttggccaaattgttggcccagttgtgaaggctcttgtgacgggtaagcagcaaaagatgcctgtgcttcggaggttcaaaccccaagcaaccaaagctataacctcagaagacaatgaaaaggacgaacaatatcttctcaaggagacagaagaagctggtgaagatgatgagaaggcaatanttgtggctgatgttcaacctcaagggccagcttgggnttcttcttcacaagg

SEQ ID NO: 83913 - DNA, 1169 bp, Arabidopsis thaliana columbia
  unsure (1)..(1169): unsure at all n locations
cnnnnnnnnnnnnnnnnnnnnnnnnnnnnnnnnnnnnnnnnnnnnnnnnnnnnnnnnnnnnnnnnnnnnnnnnnnnnnccacgcgtccgatttccgtctctctctctttttatctcaccgtctgatcgcttagaagcaaccatgcctcagggagattacatagatttgcacaggaagaggaatggatatcgcctcgaccacttcgagagaaagcgcaagaaggaggcgcgtgaagttcacaagcactccaccatggctcaaaagtctctaggtatcaagggtaagatgattgctaagaaaaactatgctgagaaagctctcatgaagaaaacattgaaaatgcatgaagagtcatcatcaaggcgtaaggctgatgagaatgttcaggaaggagctgttcctgcttatcttcttgatcgtgaagacaccactcgtgccaaggttcttagcaacaccattaaacaaaagaggaaagagaaagctggcaaatgggaggtccctcttccaaaggtccgtccagttgctgaagatgaaatgtttagagtgatccgatctggaaaaaggaaaactaaacaatggaagcggatggttacaaaagctacatttgttggacctgctttcacaaggaagccttcaaagtacgagcgtttcatccgtccacacgcgtccggtttcaccaaggcccacgtcactcaccctgaactaaaatgcactttctgtctcgagatcatcgggattaagaagaatcctaacggtcccatgtatacatcactcggtgtgatgaccaggggaacaatcatcgaggtcaatgtgagtgagcttggtcttgttacaccagctggaaaggttgtctggggaaaatacgctcaagtgacaaacaatccagagaacgacggatgtataaatgctgttttacttgtgtaaccaaatgtccggcactgtcgtagaagtatggatagagacgagaggaaggcgagaatcatgttggctagttttattttgttttctcctgaaacaattttgtgttatttcaagtttttttatgaatgtgtggttggtcttctcttcacattaactagctgctatgttagctttataagtatcccacattatgaaatttgttccctctaatgttcattttgagcctctttaatattaaaaaaaaagga

SEQ ID NO: 83914 - DNA, 466 bp, Arabidopsis thaliana columbia
  unsure (1)..(466): unsure at all n locations
agnaggtctttatattcaaancaaagctatgagcactcgaatgaattttctgtacatccaggaacatattcccctcgtgacctaggcatgcgatatctcccgagcggtggaaatggatatcataggcatcaccaaaacaagtcgcatagaatcaatgggatgaggaatacgagtgaacgatgggatgcaggctattctgaatgccccaggtccaatcttgtctgttactccaacggatctcagcgtnctgatgtggaaggaatacggaatagtacagacattgatgagtacanattgcgagattgcagctggtgctnaaaggcgagcatgcgcttttgcgaantcaaagcgggnaagagcagagagttttaggtcaaagagatcttgcgatcccggaagctccagctgntctcatgtntccagggcagttaaagctttttccgagaccttggnaacaacaatgggg

SEQ ID NO: 83915 - DNA, 560 bp, Arabidopsis thaliana columbia
  unsure (1)..(560): unsure at all n locations
gttgaatgagattctggtggagaaactagcgtcagttgaagccacgacgaatccattgatgaagtcatatgctaaggtgactaagaaagccgtgagtncgcaacaactactgaaagaactgtgttcagcgatagaaacacagcaaaagcaagccacaaagagatcagaaaactttttattggaagaagaagacgacttcttgaaaagtatacttgctgaagatgtgacgattcgatctgggaactgggcagacttcagtggagaaatgtcaggattggtgctggatgttgagaggcttgtcttcaaggatctggttaatgaaatcgtgcatgcagagacaagccgtctgcaagcaaagtcaggaaggcgacgaacgctttttgctgaccagtagctaagtctgttgaagaagacaaaatatatccacaagtggtttctctaactctttaactgtgttatgtttcactctggtcctttttttcgtctttgctgattcttatggtcgttcttgggtcttccgttttcttcagcgggtttataatcatatggtgtgttatgta

SEQ ID NO: 83916 - DNA, 689 bp, Arabidopsis thaliana columbia
acaaaaccaaaagaaacaggccgaaagaaacaggccatattatacaaagaaaaaatacaataaaacaaagtgaaagcccaaaagcccaaacagaaaccctttcactgaaaaaacggtgttgtaaacagcacatagaacacgtggcaagagggaaccagatttgatgacacgtgagaagtcgaagaagagagagtttccgatcaccagaatgatgtgacgccggaaagttttaattccgattgaaaccaccggaaaattgctcaacttttgcagcaacaaaactcaatcttcgcccaaaaaatttaaagcgaaatcccaagttagctttgatgagaatgctttctaattgaagcaattctgtaatacttctgcatcttcaaacaataactttataatcttcagaaaaggaatttatcaccaaccgaggcttgcttttattaacctaattcgaatccaataaactagaggatgtctaataaccaaaggcagaacgtcagtcaatcggactgtcttttcttcagatctgaagccaaaaaaaaactcaaagtgcgtgagagccgaccgatctcgctacagaaaccgataacgtcggagttaaaccagccaaacttgttttaaaagccaaaagttgctggaaaggagccaggcaacgacagtgatgaacccaaagatacccaaagaaaagccag

SEQ ID NO: 83917 - DNA, 528 bp, Arabidopsis thaliana columbia
  unsure (1)..(528): unsure at all n locations
gannaccnacaatttgggnaggaaccggaaacaaggactccccaaccccaattttgcaagtttgaacctctttgaagaagccctaatatacctatcctcccttaaccatttcataaaatagctaccacccttttcctactcccattaaaaaaacatggaaatttcaaaccctaaatcaaaacccaaataatattggggttttaattttgaactacattaaagcaccagaattaatgtagttcatattggtccacatctctctccctgaatcaatctgatctacatgaccaccacctcctcctatgttcatcattccaaagctctctccattcatctgccatggaaatccccataagactctgcttggatcacccaagccgctgctcccgttaccaaacgcataagtagcgttctctttttgttggcttgtcccaaacataccttccatgtcagactcaccagagctaccgagttctgaatgaaacccgtcctgtgaagaacacccaaaatgatgtttgcggacgcgtg

SEQ ID NO: 83918 - DNA, 385 bp, Arabidopsis thaliana columbia
  unsure (1)..(385): unsure at all n locations
atgcaaagtctttatcacaattatgaccattggattgtgttttacataaaagagtttgtagaacttccaaaattataaaaaaaaagaatatggttaaataaatggaaacagattcaatattgtagatgactttgtacatcgttacacaaatctatctaacctatctaatcataatagacggtgaatattgattcctggaagctcagtttacgccacgtgtccttgggcgccgaaatcaacacctagacaaaagcctgttgacttgtagtaatccctttttttactcccgggttaacattaaacccaatcagacaccaaaacggggncaaggccccaaancctttncccccccggnggaaanngacccggggaacctgaaccgggg

SEQ ID NO: 83919 - DNA, 545 bp, Arabidopsis thaliana columbia
  unsure (1)..(545): unsure at all n locations
aagctctcgagcttgagaaacttaccgatgaggagatcaaagacgctgtcatgaccactatctcttgcttgacaggcaaggaagttaagaatgataccgcaaagcccttgaccaatggctcattgaatgatgatgatgaagccatgaagattacaaaggtcttgaagagcaaatggggaagtgatcctctgttcagaggctcctattcgtatgtagcggttggatcaagcggggatgacctagacgcaatggctgagccattccaaagattaataagaaggttggtcaggtcaatggtcatgatcaagccaaggttcatgagcttcaagtcatgtttgcaggggaagcaacacataggacccattactccacaactcatggtgcctactatagtggtttaagggaagccattaggcttctcaagcatttcaaatgtaatttttgagggttaatttttaaaatatgtcccgttttttttttttgggggattttttggggggcgtatttgtggtgtttaaggtttttaaatgcttacnccactttgc

SEQ ID NO: 83920 - DNA, 1440 bp, Arabidopsis thaliana columbia
ctggttcagtacaaaattcggaatcgtaggtttaagaattttagatcattgaaacagccatgtctaggcaggtcacgagacttctcggatctcttcgccattccggcggcggctgcagcggcagctcaaaggtctgctctctcacttcattggtacagtctcgctccttcgggacaactcctccgcctcctgcggcaggtctttgtcgacaaaaatacacgtgtcatctgccaaggtattaccggaaagaacgggaccttccacactgaacaagccattgaatacggcaccaaaatggtagcaggagtgacaccaaagaagggtggaacagaacatttggggctacctgttttcaacactgttgctgaagctaaggctgagactaaagccaatgcctctgtgatctacgtacctgcgcctttcgctgctgctgctatcatggaaggtttagctgctgagttagatcttattgtttgtattactgaaggaattcctcaacatgacatggttcgcgtaaaggctgctcttaacagtcaatcaaaaactaggctgattggccctaattgtcctggtattatcaaacctggtgaatgcaagattgggatcatgccgggatacatacacaagccggggaagatagggattgtttctcgatctggaacattgacatatgaagctgttttccaaactactgcagtaggtttggggcaatctacttgtgtaggaattggtggggatccgtttaatgggacaaattttgttgactgcttggagaagttctttgttgacccccaaacagaaggtatcgttctcattggagaaatcggtgggactgcagaagaagatgccgctgctttgataaaggaaaatggtacagacaagcctgtagttgctttcatagccggacttactgcaccaccagggcgtcgtatgggtcatgcgggacgcattgtttccggtggtaagggcacggctcaagacaagataaagagcctaagagacgcaggagttaaggtggttgagtcaccagctaagcttggtgcggcgatgtttgagcttttccaagaaagaggtcttttgaagtgaaactgaagtaatatcataatacaatgagttgtttcaggaatcaacctctctaataacaacagtttgccaaaatagaagagagaaacggaattcctaaaattccttacatggagataattgcagagaaaaaaaaaatagtcacttttttttttttgtctatgccattctatttttcaatttattgagccgttctatttttttttgtctttgttttggttaaggttacaaaaaatgagaacgaatcaattgcacaaatttcttcttttaagaatcaaaatcaactaatttagctatgttgattccaacttttgtctgctatgctatgagtattgttgtaaaacaaaccttttcttt

SEQ ID NO: 83921 - DNA, 363 bp, Arabidopsis thaliana columbia
gcttaggtacgaggacaaacacaatcagtaactcaaaactgttttatgtgtctatatacataaacatcatattcttcttcaaaacacacacagccaatagtccttgtttatgtggggaccaaagttgtttatgagtctgagggcagaccagaactacagcttcttttgtccgaggaagataatgattcctttgtcatgaatctggaaattatgagtctggcaatgttctcaccagccactgcacttgtctccattgggcttgccgcgttttcaaaagcattcacatagtacaagggatggtcatactactatgcaatggtgcggaaaacttcaggcgcgtggtactttgggtatgcaccccag

SEQ ID NO: 83922 - DNA, 464 bp, Arabidopsis thaliana columbia
gttcttcttctcattggttgatcgatacgcgctaaatttctagaaatctcagatccataaaattttccgaggagagattctctaatcagagaacctcacaatggccgcatatagagccgacgacgagtacgattacctcttcagagttgtgttaattggagactccggcgttggaaaatccaacctcctttctcgattcacgcgcaacgagttcagtctcgaatctaaatccacgatcggtgtagaattcgccactcgtagcatccatgtcgatgataagatcgtcaaagctcagatttgggataccgctggccaagaaagatatcgagcaatcacaagtgcatattacagaggagctgtaggagcgttgcttgtgtacgatgtcacaagacatgtgacgtctgagaacgttgaaagatggttaaacgagcttcgagatcatacagatgccaatatcgtcatca

SEQ ID NO: 83923 - DNA, 514 bp, Arabidopsis thaliana columbia
  unsure (1)..(514): unsure at all n locations
gagatcacagttcaagtgccagcgaccagtcaagtgtggtcaaatctaacagcacaccatcgactcctctagggggaggcagtcatctgcacacagaatcaagactttcagaaggctcgcctttgatggaacaactctcagagcctagggaagacagagaagctttagaagacagttcccatgaaatggagattccggagactagcaataaaatgagcgatgagttggatcttttgagggaacagaaaaagatattatctgaagaggcggcactgcaattaagttctttaaaacggatgtcagatgaagctgcaaagtcccctcaaaatgaggacgattaattgaggaaattaaaagtactcaatgacggcattaaaagcaaaggattgacccgnttttctacgtttgggngccaggtnatggntttttttatngcatctcattggggcattgggtaaatctgntatnttgcagncatttcctnnctttggggtcaccttattgggatnttttg

SEQ ID NO: 83924 - DNA, 423 bp, Arabidopsis thaliana columbia
acgaccacgcgtccgcccacgcgtccgatcatatcttaactttgtctaaaaacaggacaacaaaacagaggatcatggttatgtatgaagaggattttgtgttgaactcacgaggcatgaagttgttcacttgtgtatcgaaaccagtgaagcatgaaccaaaggcattgcgcttcctctgccatggcgacgctatggagtccagcatcaccaggaacggcgcagccgcgacgttagccaatgccggttttgccgtagatggaatggactacgatggacatggaaaatctgagggtctaaatggttacatcagtaactttgatgatctcgttgatgatgtctctaatcattattctacaatttgtgagagggaagagaacaaggggaagatgaggttcctacttggagaatccatgggaggag

SEQ ID NO: 83925 - DNA, 487 bp, Arabidopsis thaliana columbia
agatcatccatggaaacagcgtcgagagtggaactgattgttaaaggcaacttaccggaggttccttctcagggcattcagccgccggaagctcgacctaatctccattactccggcgatgcagcttcgatcccaaccgtcgatctctcgagctccgattccgcgagagaagccatcggcgacgcttgtcgcgactggggagccttccacgtaatcaaccatggtgttccaatccatctccttgatcggatgaggtctttaggtctctctttcttccaagactctcccatggaagagaagctacgttacgcctgcgactctacctccgccgcatctgaaaggttacgggtagccgtatgtttgcttggggcttaagaatgacggcggtttttggattggagagtttactttcgatcatcacacgtttccccccctctcgtcgtaacccttctcattggccgggttaatcctttttgctaaaaaaaaa

SEQ ID NO: 83926 - DNA, 437 bp, Arabidopsis thaliana columbia
  unsure (1)..(437): unsure at all n locations
cttaacgcccacaacgaaaaggaacttctctttttgtttggtgactgaatcggtggaaaacaacacaagtttgttcctttttgtctctccagatcccttggcttccttcttcttcttcatcctcctcgtgagactctgtgttgaaatttctctagggttctaattatcggcgttggtttttcgttcttgagaatttgatttcgtttttagaaataatgggtgattgggctcaacttgctcagtctgtgatcctaggtttgattttctcttaccttctcgctaagctgatctcgatcgtcggcacgtttaaagaagacaatctctctcttcactcgtcacccagaggagtctccaattgggaaattaaacccggaaggagttnacttcgcgacggntnggattccnctttccggtggtttncgtngtnaggcggngtt

SEQ ID NO: 83927 - DNA, 439 bp, Arabidopsis thaliana columbia
  unsure (1)..(439): unsure at all n locations
gagcggccgcccttttttttttttttttttaaaaccatgtcttgtcattacttttattataaaaaccttccacataattcttcttcaaacagaagcatcaatcattgaaaaaacgaccaaaccaaatattaaactaaaaaaaaatatatgtagaaaaatatttttaaaagggtaatcaaagtaatgaaaaattcaacttttacttttcctggatttttttctggttaaggtcctcaccatccaaccctgtttcctcactttggttccttcgaccttagatggtgccacatggcaagaagacgtggacgatcctgaatttgagtttgatgacgtgggaatagatggaccaatacgcttgcgccatctaagcgatgacttggcactattgggcccctcgggaccgggggagtggctcgttaataggaaatnncnggnttct

SEQ ID NO: 83928 - DNA, 382 bp, Arabidopsis thaliana columbia
  unsure (1)..(382): unsure at all n locations
cttagaagcttcatccatttccatattagttataactattaagttagggtcctatgtatttgcaaaaacctcatcaaatctatctgtctctctctctcaagcctcaactcaccacacaccaaaccaaaacaccagaaacaaaaagaaaagcaaactacaaattcctcatttcttcgatcgacaattggtagaatggtcgtaaccactcaaccaattggagacgaaaccgaagacattttttgtgcaaataagaaacacataccactggaagaataaatactcatgggagaattcccaaagctgtttagttcacaggatcatggggccccattgngggggggcctttccncagtttcctnggggnggctggnggannaanngg

SEQ ID NO: 83929 - DNA, 625 bp, Arabidopsis thaliana columbia
gtcagaggcctaccggttatcaaaagagaaacctcaaaatgggatatcaaattcaggaactcacctagctgtgagcctgtttcgcctcttatggctcctggaggcaaagcgcaggctgcagcgaaggaacttcttgactcaattttagatactattgtcaagatatttgaaaatcatgttgttattggagagcttttggagatgaaggcttcacaacatgacattaacacaccaaggtcattgcctactgatgtgaattggaacaccgagtctgaagcatcccaagctactggaggctacactatcagttttcccttgacagtcttacagagtgaatgccaacaactcatatgtgagattctacgagcaactccagaagctgcttcagcagatgctgctgcacaaactgctaagcttgcaaagaaggctccgaagaaagacaaaacggatgcacctgaggatggcctaacagtcacctttcggtttacagatgcaactgtagcaatatctaatcaaggagccgatctcattcgtcaaggctggggaaagagggctccaaatgcatcactggaaggttatggatctgcaactgttttgcctgaacaaggaatatatctagctgcat

SEQ ID NO: 83930 - DNA, 419 bp, Arabidopsis thaliana columbia
  unsure (1)..(419): unsure at all n locations
cgggccaaatgctcttacagtttgcgcttaagcagtttgagatgtgttgtcatcagggagcaacaaatccgtggaaccgggtgctaataagtacgcgaaaacttgggaagagcttaacaagtttaaggcttctggtgatccgtttgatggagatttcttcatgctgcttgagtctgtttacgagcagcaggttatgcttctggagatacttcataagcaaaagaggaagcttgataaaaagcttaagaacataaagtattngaagaaaatctcgnatgtggnttttgtgactgcgtttgtctctgtttttgatcttctctgttgtagcaanccgctntttgctgcacccnccagtttgtgactncccctttnanctgcgttaggggnttcccnttggntcantaggggnantgtgtaac

SEQ ID NO: 83931 - DNA, 591 bp, Arabidopsis thaliana columbia
  unsure (1)..(591): unsure at all n locations
atcatgtatcactcgtggctcggtgtcgaacgttggtttatatatgataacaacagcgatgntggtatacaagaggagattgagttgcttagttcggagaattacaatgtgagtcgacatgtttggccttggatcaagactcaagaagccggtttttcgcattgtgcggttagagcgaaagaagaatgcaattgggttggattcttcgatgtcgacgagttctactacttccctacgcatcgctctcaaggcttaccgagcaaaaacgctttgaagtcgcttgtatcgaactacacttcttgggatttggttggagagatcagaacggactgtcatagctacggtccatccggtctgacctcggttccatcacaaggcgtgaccgtaggttacacttgtagacaagcgaacccccgagagacacaagtcgataatccgccctgagttgctcacaagctcattgctcaatgtaagtacatcattttcagttgaaagaaggagttggggcatatgagtttggtggggagttttccggtagtgaacccttacaagtcccagttttgggccatttcaaagntaaagtttttcata

SEQ ID NO: 83932 - DNA, 618 bp, Arabidopsis thaliana columbia
  unsure (1)..(618): unsure at all n locations
ggaagccatataccaattacttacatatttttctccttctttcatccccaaaaaaaggtttctcattagatcggtatcgatggctgctgccgctaatacctccgccgttttcgcctctccgtcgcagcctttatcctcgaaacgtagttttttgtacagttcaaggattggtccaatactaaggagatttccgaggaagaaacttgatctccaagttaaagctgttgccacgactcttgcacctctcgaagagatcaaagaatacaagcttccttcatgggccatgttcgagatgggtactgctcctgtgtactggaaaaccatgaatggtcttccaccaacctcaggtgaaaagttgaaacttttctataatccagctgcaagcaaactcactcttaacgaagactatggggttgctttcaacggagggatttaaccaaccaattcatgtgtggtggggagccaagagcaatgcttaagaaaggttcggaggcaaagccgattctccgtttttcaaatattgaaggttgggatccctangnatnttggnaattnggnntttcccantncaactaaatggggnnggntngggnaggggcccatanaagtttcaagttc

SEQ ID NO: 83933 - DNA, 439 bp, Arabidopsis thaliana columbia
  unsure (1)..(439): unsure at all n locations
aatatagactatgaattttattgtccaattgagtaatacattatgctgggctaaacagatacagatgtatacaagagctgttacacataacattatataagcgttatgtgacataccacagaacctcttctcaaaaaccaccagtttatgctatgtatctatctctcacaatgggatagcctcaatcaagtttccttgccctgaatctgaacttgaggggaagctaagaatgtgcctcagaacgattgttctcgccaatgtgatatttttgctacacttagtcgcgttatcacccacttcctcgatgctccccggtggaaacatcaaacttctggctgatctcgnggatngaagcctcncaggcactnnttctccttcncctnggggggaaaaaaancctttggancacgggtncanccaaacttcagctantancgga

SEQ ID NO: 83934 - DNA, 485 bp, Arabidopsis thaliana columbia
cggaagtgaagatggatatgtacaaagatgatagctcaccatactgttttttccatccaaaagaagagtatgttggagtttgtcctctctgtttgaacgagaggcttcttgttttagcttcaaaacagagatcatcaagaaccaaacactcttcctcttcaccaatcatcagcctccctaagatattcgccttgagctctctcctcagtcgcctcgatctccgtcaccggaaattccatccctcctccgatcttgacgtctccacaagccaagaaggtacagtatttttatggaatatcactttaattatacacatacccaagatctaattctaatttggtaattttcccctttttttttttgtttccccttggacaaccggggattttcttttttccgggttaagattataaactcctctcccacacaatatgtgtgtgtgggatttaacactattttcaatgatatatatgttcataattttt

SEQ ID NO: 83935 - DNA, 904 bp, Arabidopsis thaliana columbia
  unsure (1)..(904): unsure at all n locations
atacgactcactttagggaaagctcgtacgcctgcaggtaccggtccggaattcccgggtcgacccacgcgtccgcccacgcgtccgcggcagagcatacttctctgcaacctcagcacatacatgcacaggggatggaaatgcaatggttgcacgggccggtcttccactgcaggacttggagtttgttcaattccatccaactggtatatatggggccggatgtctggtgaccgaaggatctcgaggtgaaggtggtatccttagaaacagtgaaggtgaacgttttatggaacgatatgctcctacagccaaggatcttgcatcaagagatgttgtctccagatccatgactatggaaatcagggaaggtcgtggtgtaggaccccataaggatcatatctatctccatctgaatcatcttcctccagaagttctaaaagaaaggcttcctggaatctctgagaccgctgccatctttgctggtgttgatgttaccaaagagccaattcctgtcttacccacggttcattataacatgggtggtatcccaacaaactaccatggcgaggtagttaccatcaaaggcgatgatccagatgcagtgattcctgggctaatggctgctggggaggcagcttgtgcatctgttcatggtgccaacaaggcttggtgcaaattcacttgcttcgacaattgtcgntattttggtcgtggctttntgcaaaatagggggttcaagagggtaaggcaaaacccagggggngaaccaggaancccctttnaggaaggnattccgggttagaagncttntttncnatgggtttggcaaggntttnnaaccntnaancggggggttttnccacntttaantttttantttnaccatccaggggtttttcaa

SEQ ID NO: 83936 - DNA, 2308 bp, Arabidopsis thaliana columbia
acttaaaggaaacctcctctacgcgaaattcgtattctctcatttcttctacggagatttgcatcgaagaaactgactcgcttgtggaatcaacaacaagacgatgtggcgctgcgtctctcgtggctttcgagctcctgcttcaaagacctcttcactctttgatggcgtctctggatctcgcttttccagattcttctccactggttctaccgatacgagatcctcttatacgatagtggatcacacttatgatgcggttgtggtgggagctggtggtgctggtcttagggcggcgattgggttatcggagcatggctttaacaccgcttgcattactaagcttttccccacaaggtcacatactgttgctgctcagggtggtattaatgctgcactgggaaatatgtccgaagatgactggagatggcacatgtatgacactgtcaaaggaagtgactggctaggtgatcaagatgctatccagtacatgtgtagagaggcaccaaaagcagtcattgaacttgagaattatgggctgcctttctctcgtactgaagaagggaaaatttaccagcgtgcatttggtggtcagagtcttgactttggaaaaggtggtcaggcctatcgttgtgcttgtgctgcggataggactggtcatgctctgttgcatactctctatggacaagctatgaagcataacacacagttctttgttgaatacttcgccttggatctgctcatggctagtgatggcagttgccagggtgtaattgcactaaacatggaagatggaacgttgcatcgtttccgttcttctcaaacaattttggcaactggggggtacggcagagcatacttctctgcaacctcagcacatacatgcacaggggatggaaatgcaatggttgcacgggccggtcttccactgcaggacttggagtttgttcaattccatccaactggtatatatggggccggatgtctcatcaccgaaggatctcgaggtgaaggtggtatccttagaaacagtgaaggtgaacgttttatggaacgatatgctcctacagccaaggatcttgcatcaagagatgttgtctccagatccatgactatggaaatcagggaaggtcgtggtgtaggaccgcataaggatcatatctatctccatctgaatcatcttcctccagaagttctaaaagaaaggcttcctggaatctctgagaccgctgccatctttgctggtgttgatgttaccaaagagccaattcctgtcttacccacggttcattataacatgggtggtatcccaacaaactaccatggcgaggtagttaccatcaaaggcgatgatccagatgcagtgattcctgggctaatggctgctggggaggcagcttgtgcatctgttcatggtgccaacaggcttggtgcaaattcactgctcgacattgtcgtatttggtcgtgcttgtgcaaatagggttgcagagataagcaaaccaggggagaaacagaaacctcttgagaaggatgcgggtgagaagactattgcatggctggacaggttgagaaactcaaacgggtctctacctacttcaactatcagattgaacatgcagaggattatgcagaacaacgcagctgtgttccgcacgcaagaaacattggaagaaggttgtcagttgattgacaaggcctgggaaagttttggggacgtccaggtgaaagatcggagtatgatatggaactcggatttgatagagacattggaactggagaaccttttgataaacgcatccataacaatgcattcagcagaagcacgaaaggaaagcagaggagcacatgctcgggaagacttcacgaaaagagaggatggagaatggatgaagcatacattgggatattgggaagatgagaaagtgagattggattataggcctgttcacatggacactctcgacgatgagatcgacactttccctcccaaagctcgtgtctattgatcgagcccatgtttttattttatctgttatcggaataataataataatcaggaaccccccaaaaaaagggaattaggagaagaagacggagttatgagctgatggagcacaaaggactgttctgaaactgggtttacgttttacaccagaaacgatgaaaataaattgatagaagaggaaaaaacactacaattcttattttctttatcagttcctgaaattgttacattctttgttacctgttaattacgccttggtgatattcatttttttttttaaatcaaaatgttcgaattccgt

SEQ ID NO: 83937 - DNA, 708 bp, Arabidopsis thaliana columbia
  unsure (1)..(708): unsure at all n locations
aagatactccnnnnnnnnnnnnnnnnnnnnnnnnnnnnnnnnnnnnnnnnnnnnnnnnnnnnnnnnnnnnnnnnnnnnnnnccacgcgtccgcggacgcgtggggcaaaagcgaaattaaatacataaattcgatcggatgttgaaaatctccgatcggcgatgaaaggcgtctcttcgacgcccggagattacgtctactttaaatctcaggttcctcttcacaagattcccattgggacaaagcaatggcgttactatgactttggtccaaagactgttcctccgctcatatgtattcctggaattgcaggaactgcagatgtttactataaacagattatggcactctctatgaagggttatcgggtaatctcagttgatattccacgggtttggaattatcatgagtggattcaagcatttgagaagttcttggacaccattgatgttcatcacgtgcatctctacggtacttcccttggaggcttcttagcacaactctttgctcatcaccgtccaaggcgggttaaatcattagttctatcaaatacatatttggatactcgtacttttgctactgcaatgccatgggctccttttgtcagttggaccccttcttttttgcttaaacgatacgtcttaacaggaattcgtgacggacctcatgaaccctttatagctgactctgtcgactttgctgtttctc

SEQ ID NO: 83938 - DNA, 678 bp, Arabidopsis thaliana columbia
  unsure (1)..(678): unsure at all n locations
cgcctgcaggtaccggtccggaattcccgggttgacccacgcgtccgtacggctgcgagaagacgacagaagggtacggcggcaagaagacgacagaagggtacggctgcgagaagacgacagaagggtacggctgcgagaagacgacagaagggtacggctgcaagaagacgacagaagggtacggctgcccgccgacgacagaagggggactcgtgtttgtttagtgaagcgatcaagcgagcgagatcagtcaaatagctttttcattgttcctcagatcgaagaagaagaagaagagcttagcaacaatggcggcgaaaccgattgcgagtccgattccggtggcgctgtatccgactttatcggtgttcactcttgcgattggtctcgtcattaccgctatcttcttcatctatgaagctacatcatccaggaaaaaccgaagcgtcggaaaggagctcgctacttcagcagttgcatctgtcttcttgggttttggatcgttgtttttgctacttgctagtggtgtttatgtctgatccttcttcctcaatactattcccaactagttcaaagacaaaaaaaacagatttatctttgttcaagtaaaatcagagttatgaatgttaagacttgagaagtagccttttaaacaaccaagtttcaattnaattt

SEQ ID NO: 83939 - DNA, 358 bp, Arabidopsis thaliana columbia
  unsure (1)..(358): unsure at all n locations
agaagaatgaatcaaagagtagtattngtgtgaaggatgaattactaatagctaaaattgagctgagactggcttcaagagtgatgtacatgtcgaaacttactactgagaagttacattggtgtcaggagaaacttgaaaagatcagcttcaacggtcggaagattcatatggaaccatatttctcgttgttaccttgttgagccatctctgcgtatagattagatcatagatgttggaacaatatggcttcatcagatccaggaagatgtctttttggtggtgttcatatcttcctgagagcaatagtatatctaatgaatgatatgtggtagcttagcgtttttctttctcctct

SEQ ID NO: 83940 - DNA, 681 bp, Arabidopsis thaliana columbia
  unsure (1)..(681): unsure at all n locations
agacaagcgttgagattaatgtgttacagggtgagagagagttcgtaagagataacaagtctattggtagcttccgtcttgatggtactccacgtggtgcaggtggaatatggaactattaagtaataagtgtactgaaaataagaaatcaataaatcttaaaacgagacgtctaccacaacaaccaaacgaaaaaaaatgattcgattaacctgaatttttgttttgactcaagagttctatatcccttgcccaatccactccgattggaattgactaagcgggtattttttccacattcataggagttcgtctatgtttctgctttacgaatatgatatttttctgggcatttttactaatatcaagtgctattcctgttttggcatttctaatttccggagttttatcnccaattaggaaggggccggagaaactttctagttatgaatcagggatagaaccgatcggggatgcttggttacaatttaggaatccggtaattaatatgnntgccccnagtttttggtggttttgatggtngaaactggtttnccggaacccggtgggnaatgnagttccgatggaccccggggggganccgccnttaaaagganncttccattttccgggggtaacccaaanccctgggggnanggtannccatgngggaaangggcc

SEQ ID NO: 83941 - DNA, 710 bp, Arabidopsis thaliana columbia
  unsure (1)..(710): unsure at all n locations
nnnnnnnnnnnnnnnnnnnnnnnnnnnnnnnnnnnnnntattatattattatattagaaactattagtaccacgaacatggaactattaagtaataagtgtactgaaaataagaaatcaataaatcttaaaacgagacgtctaccacaacaaccaaacgaaaaaaaatgattcgattaacctgaatttttgttttgactcaagagttctatatcccttgcccaatccactccgattggaattgactaagcgggtattttttccacattcataggagttcgtctatgtttctgctttacgaatatgatattttctgggcatttttactaatatcaagtgctattcctgttttggcatttctaatttccggagttttatctccaattaggaaggggccggagaaactttctagttatgaatcaggtatagaaccgatcggggatgcttggttacaatttagaatccgttattatatgtttgctctagtttttgttgtttttgatgttgaaactgtttttctgtatccgtgggcaatgagtttcgatgtactgggggtatctgcttttatagaagctttcattttcgtgcttatcctaattcttggtttaagtttatgcatggcgaaaaaggagcattggaatggtcttagtttcgtttacccgaatactttgatacaatttattaaaaaaaaaaaaaaaggaaaaaggggcc

SEQ ID NO: 83942 - DNA, 889 bp, Arabidopsis thaliana columbia
gacttactcgacagggtcaggacacctgtggagaattccctgagggatgcaaaactcagcttcaaagatattgatgaggtgatccttgttggtggatccacacgtattcctgctgttcaggaactcgtgaggaaggtgactgggaaagaacctaatgttacagtaaatcctgacgaggttgtagcgttaggtgctgcagttcaggctggtgttcttgctggagatgtgagtgacattgtgcttcttgatgtgacgccgctttcgattggtttggaaacccttggtggtgttatgactaagattattccaaggaacaccacactgcctacttctaaatcagaagtcttttcaactgctgctgatggacagacaagtgttgagattaatgtgttgcagggtgagagggagtttgttagggataacaagtctcttggtagcttccgtctagatggtatcccccctgcaccacgtggagttccacaaatcgaagtcaaatttgacattgatgccaatggaattctatctgtcagtgctgttgacaagggcacaggaaagaagcaggacatcaccattactggtgctagtaccttaccaaaggatgaggtagacacaatggtgcaagaagcagagaggtttgcaaaagaagacaaagagaagagagacgcgatcgacacgaagaaccaggctgactccgtcgtgtaccagacagagaagcaactgaaagaacttggagagaaaattccaggtgaagtgaaaagagatgtggaggctaagctacaagagctgaaaacaagataggagtggatcaacccagaatcaaaacccatgctgctttacaaaaggatcaattgcagcttatcaccagctgactgagtcagtcagtctcacg

SEQ ID NO: 83943 - DNA, 576 bp, Arabidopsis thaliana columbia
  unsure (1)..(576): unsure at all n locations
agattaaatactggatattgcttttagatacgactgggtaagcttctgaaaacaaaggattattgtttaatttcagacaataatttcagatcaacgttaactactttttgttcttttactcttcatctgatcctgactcttcagaactcgattccttgtttactttcttctttgaccctctcttcttatcttcctcgtcctcactgtattcgctttcgtaatcctcctcttcaatctcatcatcctcttcctctaatccttcttctgcattctcaccctccacatcacgggttcttttcaaaacctcgactttcagtgatgtcttttggtcacaaccgatccaagtaatcgcttagggcagaagcaagtcaaggtaataaggaaccttctccagggggcnaagagtcnccccattaccaatctgggcccacttttaaccttctcaanaggttncttaacgggatcaatgggtccctggagggtggcccaaangggccatggtcagaaaaggggtgagcangggaaagccagtcaccaggattacctcggaanacagaaggtgaccgagagnccaag

SEQ ID NO: 83944 - DNA, 506 bp, Arabidopsis thaliana columbia
ataaaattcacaaactatagtcattaatacaaaaagaaatcattgtatttggtagaggggaaacaaaaaaaaaacacgacgatgtaagttggtggaaccacattatcaaaataaaagaaggtggtggaaccaaattgaataaagtccgtccatatcattatccgtcccttaggagcctctaattagtaatattcttatgggtccactgtggcttagaggacttgattaaaaccattcttatttagtgctaactttgtgagggttggaataacgaaccaagctgattcaaaccattccaaaacaaagttgtcacatattttaaaaccaaagtttaccggacagagaaatatgggtgtgtttttctcaaaccaaggctaaatgggatcccattgttaaacccaaaatgttcacaccctacctattctttttggaggcccttttccatgtgtttgctgtctgctagtcaagtttcattagctgattgccttgcatcatattcttggatc

SEQ ID NO: 83945 - DNA, 400 bp, Arabidopsis thaliana columbia
cgcttccctcctctcgaaggtcctgggtcggtcgacagtttagaaatttaagagtgagttggtcacatcaatggctttgtctaccgactaaaccccatagtattacaactcttgtttagtttctcttttaagtccatcgataaatggagcacggaatttttgggtgcaaggttgagactttaaggtattagtgtagtaacatttggaattttcttaacttgcaatgtggcctcacaaatagagccggtcctgagaaatcaggtggccaaacaaaattattttatttttagaagtgtttaagatatattttttttaaagagagttaatgttaaagtttcagaaatttaggaccttgttcaatatggcctgctcgtaaacggcattctcataaaaaaaaaaa

SEQ ID NO: 83946 - DNA, 810 bp, Arabidopsis thaliana columbia
  unsure (1)..(810): unsure at all n locations
gttgactatagaacagctatgacttcggatgccaccccttcgtaagctgggatcctctagagcggccgccctttnttttttttttttttttttttttttttaaaaaaaaaaaaaaattcccatagacatatatatattcagagaatttagacaacgattgtaattttgctattctcaaagggggaaaaaacagagagattcaaaaggaagagatgaaatgttgtcaataatattttcatgaacttttctcttccaatgagatctttaactccaaatcttcatttcctctcttaatcttaagggtcaccttatcacctacactgtactcatccaatatcttcatcaactcggctttgttcttcacaggtttgtcatcaactgcaacaatgatatctccaagcactatattaccagcaaaaccccgggatgtcggatgtaatcctgctttttccgctagactcttacccggtacctgaaggacaagggctccattacgaacattgagttgattagctactggatcaggggctaattctatgttaataccagctcgaaggactttgctgaattgtattaagtgaggaacaatcttttatacttgntgatgaccgaataaccaaatcccaccaccccccaaaatgttccctgttttttgtgaaaaaatgggcccgggtttgaatccccaaaaaaaagattcccctttttttaaaatccaggcccaaaggggccccctccgcgcttttattttccccggggttttaatggggcgccccatatcagagtttttgaaatttttcctcccccccccct

SEQ ID NO: 83947 - DNA, 304 bp, Arabidopsis thaliana columbia
attcctccgattcttcttcttcacctccccttcttcgaatttctctccttcccttttcatccttttgaaatttctcgtctttcttcttcgaaattggaaactcacagcagcacctgaaaaataacatcataagcttcaagatccaatttgggtcgttctgtgttttcttctgatgggtctcgtcgaaatgtagaacaagtttggagatgttgacaatggacaaggaatttgattcaaagcttactcttcaagggaattcatcttcaaatggggaaactatttccagaagcaaaagcttcgcctt

SEQ ID NO: 83948 - DNA, 418 bp, Arabidopsis thaliana columbia
ctctagtcaactcgagatctagactctgtggaagagtgcagattctgctgctgtagctatcacaacaacagatcttgtaagcaagagtgttgcagttgaatcacaggttggtggaatcaaaattcgagttggtggtatggctaaaggctccgggatgatccatcccaatatggcaactatgttaggtgtcatcacaacagatgcactagttgaaagtgatatctggagaaagatggtaaaggttgcagttaaccgaagtttcaaccagatcactgtagatggagacacgagtactaacgacacagtcattgctttagctagcggggctatcctggatcacccttctatatcatctttcgaactgtaaagaagccgcgcaccttcaggcatgcctcgatgcggtgatgcaaggacttgc

SEQ ID NO: 83949 - DNA, 725 bp, Arabidopsis thaliana columbia
aaaaaatagtgtataccatgtttctcggaggcacaatctccactcctccagcttctctccggttaaggtccacattagaacccacaaaacgcagtcacacaagcatcatcacaagcgacgtttccagctgcaatgcaacgaaagccaccaagttactcaatcagcgacgaagatctcgaatccagaggctttcttctccgtcgaacaacagaaggacttaacttagaccagctgaattcagtctttgcagccgtgggattccctcgtcgtgacacggcgaaaatcgaggtggcgttgcagcacacagacgcgttgctttgggtagagtacgagaaaacgcggaggcctgtagcgtttgcgagagccaaccggtgacggagttttcaatgcgatcatatgggatgttgtggttgatcccatcgtttcaaagctgtggacttgggaaggcggtgatggagcggttgattgaggatttacaggtgaaagggatttgtaacattgctctgtattcagagcctcgagttctcgggttttatcgcccgcttgggttcgtctctgacccggatgggatcaaaggaatggtttttatacgcaaacagagaatcaagaaataaaaagtttgaaactttataaattttaatttcgtaaatgcacagattacaatgtctctttaactacactttcttgtgcgagctaagagagtaatgagaagcacttcttcgtct

SEQ ID NO: 83950 - DNA, 469 bp, Arabidopsis thaliana columbia
cagcgtctctacgactcactattgggaaagctggcacgcctgcaggtaccggtccggaatcgtgggcggacgcgtgggggatacttaatttgacactcttctttgtgttttctcttccaccttctttttcggtatatcattcaacaaaattctctcttcatttctttattttgttgttttttttattattattgaaatcaagagaattaaaacagaggctctgcaaaagaagatgatcaaaacaatcacatctctacgcaaaactctggttctacctcttcatttacatattcgtacgctacaaactttcgccaagtacaacgcacaagctgcatcggctttgcgagaagagcgtaagaaacctctttatcaaaatggagatgatgtatatgcggatttggattgggataatctcgggtttggtctaaatccagctgattacatgtatgtcatgaaatgctcaaaagac

SEQ ID NO: 83951 - DNA, 1024 bp, Arabidopsis thaliana columbia
  unsure (1)..(1024): unsure at all n locations
nnnnnnnnnnnnnnnnnnnnnnnnnnnnnnnnnnnnnnnnnnnnnnnnnnnnnnnnnnnngttttctacccacgcgtccgccgccgcgtaccattcaacaaaattctctcttcatttctttattttgttgttttttttattattattgaaatcaagagaattaaaacagaggctctgcaaaagaagatgatcaaaacaatcacatctctacgcaaaactctggttctacctcttcatttacatattcgtacgctacaaactttcgccaagtacaacgcacaagctgcatcggctttgcgagaagagcgtaagaaacctctttatcaaaatggagatgatgtatatgcggatttggattgggataatctcgggtttggtctaaatccagctgattacatgtatgtcatgaaatgctcaaaagacggcgaattcactcaaggagaacttagtccctatgggaatattcagctaagtccttctgctggagtcttaaactatggacaggcgatatacgaaggtacaaaagcatacaggaaagaaaatgggaagcttcttttgtttcgtccggatcacaacgctatccggatgaagcttggcgctgaacggatgctcatgccttctccttcggttgatcagtttgttaatgcagttaaacaaaccgctcttgcaaacaaacgttgggttcctcctgcagggaaagggactttgtacattaggcctttgttgatgggaagtggtccaatacttggtttaggtcctgcacctgaatatacattcattgtctatgcatctccagttggtaactacttcaaggaagggatggctgctcttaacctctatgttgaggaagaatatgtccgagcggctcctggtggagctggaggcgtcaagagcatcacaaaattatgccgccaagtttttgaaaggccctgtggcagagccaagaagtccggggggttttcaaaacggttcttaaaccctggncttttgncaagganggaggtcctttnggggggggtttntt

SEQ ID NO: 83952 - DNA, 554 bp, Arabidopsis thaliana columbia
  unsure (1)..(554): unsure at all n locations
ccactggtcgttcaaacatatataagaaaatattaaacctctgtttttgctggcgatcatggcttacacagacaaagttacgatatcagccgcgggtgcgacaatgatgctgtttctggcggttacgagcgtggatgcacagtcaatgccaccaatgccaaagtttaatcctgtgtgcgcgttggcggatctcccaaacatcggccaactttgctactttaacttggatttgacgccatctgaagagtgctgcattgatctcaaatcgtcgagcacgatacaagtgaattgtctctgtgacaatttcattgcacatccttccaatggcaatatctcgcaagctcgctacggcctggtcaacagcggcctgtgggtgttgccgncaaattcgcattgtaaaggaggggncgccagcggggggttcaacggncaangtttnctgatnaattggtctactttgggtttgnttnaagctgtcntttaattntttcantttgncttccaantntatgaattntaggatncccgnttttttttaagggtttgnttaaggg

SEQ ID NO: 83953 - DNA, 2341 bp, Arabidopsis thaliana columbia
  unsure (1)..(2341): unsure at all n locations
catttttctaacttctctcaattcccaaacaaaattcaaattcaaaaaacttctctttttgactgagancgagattttagggttccatggattcagctcccaacttcatccctcggttacttctactatcacttctcatcgtatcaattcctctaacatcatcacaatccgacgccaacactactaatccgtcaccgtcaccaccgtcagattcggatctatgcaacggtgtattcgtttcatacactcacactaaaggatctaagatcccacccaacgacaccgcaaatcaaccctaccggttcgaatctgtgataacagtgctcaaccacggccgcgacgagctcaaatcatggcgtgtcttcgtcaaattcgcacaccgagagatcctcgtctctgcttcaaacgctgtactctcagacggctcgagcttaccggtgagcgtcgaaaacggtaccgttttcgctggttatccttcgtcggatttgaaatcagctattcagactgctggtgatgtcactcagatgcaagctcgtgttgagctcgtcgggactcagttcggagttgcgccgccgaatgtgccgcttcctaagaacatcactctcgctactgatggatggaaatgtcccaaagctactcaaaaaggtacaaatgttctgcaagtatgttgcattcctgacccagactatgataacagagagatcattgataatgagtttcttccacgaaaagatggagacctcactatcatgtacgatgtggtcagatcatattcatccaattatatggcacaggtcactatggagaaccataacccgcttggccggctggataactggaaactgagttttgactggatgcgggacgagtttatctacaccatgaaaggggcttacccgagtattgttgattcatcagattgtgttgatggcccacaggcgaagcactatcaagatcttgacttctctaacgtgttaagctgtgcaagacggccaaccgtcatagatctccctcctacgaaatacaatgattcgacattcggtcttatcccattttgctgcagaaatgggacgattctaccacggtcaatggatcctagcaagtcgagctcagttttccagatgcaggtgtacaaaatgcctcctgatctcaatatctctgctctatcaccgcctcagaactggagaataaacggtacactgaacccggattacaagtgtggccctcctgttcgggtgagcccgagccagttcgtcgatcccagtggattaccttcaaaccggactgcttttgcaagctggcaggtggtctgcaacatcacccaaccaaaagatgcgagtcctagatgttgtgtatcgttctctgcctacttcaacgactcaatcgtcccatgcaagacatgtgcttgcgggtgttccagcaacaaagcagcccgcgcttgcagtgccacagctccgtctcttcttctaccgcagcaagctcttctggttccatttgagaaccgaactgaactcaccgtcgcttgggcttatctaaaacaacggcccgtgccaaacccgatgccttgtggggataactgcggagttagcatcaactggcatttggctacagattatcgaggtggatggacagcccgggtcacagtcttcaactggggagaaacagactttgtagattggtttaccgcggttcagatgaaaaatgctgcaccgggtttcgagaaagcctactcattcaatgcatctacaattggtatcaacgggaagaacaatactattttcatggagggccttcctggattgaattatctcgtcgcagaaagagacggggaaaatccattgaagaatcctcggattccaggaaaacaacaatctgttatgtcctttactaagaaactgactcctggaatcaatgtccctggtggagatggcttcccgagcaaagtgttcttcaacggtgaggagtgctctctcccaaccatactcccaatgagaagtagccaacaccggaaacacatctctgttttcctcctggcattacctgttttggctctcttgattctgcgggcgtaactacactgaagcctcccgttgggttggcgatacagtttcttgattcttccccggcttactcgagaacgggtccaatccgcagtttatggatggagaatcactcgattctttttcaacctgatgagtgttggaacaagctttatataggtgctatgaagatatgttaccattcttgtattgtttatgattagagaatgtcagtaatcactaatcagtatgtattactatattttgtttactcattctccgccaaaaaaaaaaaaaaaaaa

SEQ ID NO: 83954 - DNA, 960 bp, Arabidopsis thaliana columbia
  unsure (1)..(960): unsure at all n locations
ctactatagaagagttatgacgtcgactgcacgcgtacgtaagctcggaattcggctcgggggacggattagcttcagtatccattggcggattagcctcagagtgctctgatcaaggttttggaggttgcatttgagtgaggagatgttttcggctcagcataagattcataaggagaagggtgtggaactttctgaattggatgagcaagttgctcaggctttctttgatttggagaacaccaatcaagaattgaaaagtgagctgaaggatttatacgtcaactcggctgttcaagttgatatctctggaggacgcaaggcaattgttgtcaatgttccttacagactgagaaaagcttaccggaaaatccatgttaggcttgttcgtgaacttgagaagaagttcagtggaaaggatgtgatcctcattgctacaaggaggattgtgaggccgccaaagaagggttcagcggcaaagagaccacgcaaccgtactctgacctcagtccatgcagctattcttgatgatgtggtcttaccttcatagattgttgggaagcgctcaaggtacagactcggcggtacctaaatcatgaaggtcttcttggaccctaagtaaaggaccttcacagagtacaaggttcaggctttctatacggtttccaagaagctcactggcaaagatgtcgtctttgagtttcccatcactgaagcctaatagatgccatctcacgtaaagaatctgttatgatctcagacattttaatcttctttttcgtctactttctttaatgtggcaagtcattggtttaacttctgacaatctgacacatggtcgagttttctcgaaaaaaaaaaaaaaaaaaggnnnnnnnnnnnnnnnnnnnnnnnnnnnnnnnnnnnnnnnnnnnnnnnnnnnnnnnnnnnnnnnnnnnnnnnnnnnnnnnnnnnnnnnng

SEQ ID NO: 83955 - DNA, 749 bp, Arabidopsis thaliana columbia
gggaagaaaccagcccaattcaaaagatttttgaaaaaaagtgaagccttgaagggtttttaatacgttcaactcggtctgtttcaagtttgatattttttggacgcacgcaagggcgatttgttgtcattgtttccttacagagtaaaaaaagctctccgcaaaatccatgtaagggttgtttttgaacttgagaagaagttcagtggaaaggatgtgatcctcattgctacaaggaggattgtgaggccgcccaagaagggttcagcggcaaagagaccacgcatccgtactctgacctcagtccatgaagctattcttgatgatgtggtcttacctgcagagattgttgggaagcgcacaaggtacagactcgacggtaccaaaatcatgaaggtcttcttggacccaaaggaaaggaacaacacagagtacaaggttgaagctttctctgcggtttacaagaagctcactggcaaagatgtcgtctttgagtttcccatcactgaagcctaagagatgaaatgagacgtagagaatctgttatgatctcagatattttaatcttctttttcgtctactttctttaatgtggcaagacattggttttacttctgaaaatctgtacaatggtcgagttttctccaaagttttgagaaactttttaaaaaaaaaacaaaagaaaaggtcggccgctctagaggatccaagcttacgtacgcgtgcatgcgacgtcatagctggtctat

SEQ ID NO: 83956 - DNA, 502 bp, Arabidopsis thaliana columbia
cagtaatacgattaatcaggctgtgagaaccagacgtgaaccagcttctgctgcgggtactcaaggttttgagccatggggtttcgagacagaatccttgagagccgctgcaacgtctgcagctgctacttctgcatctggaacacaaagatctatgggctctggaaacagcacttcacagagatatggcaactcagagatgagagaaaaccagaaaacagctcaacctgctggatgggccggcttctaaaactcactcagatgcgcattgctatttcttcctcatgcaacaacaacagcttcatgttgctgccattacagaatcttgaatctttttgtagatgatgatcatcccctgtttttgtgctgctgctaaatataccccacccatatccattatgtttttatgtagagtcttaaactttacacattctctgagctgtggccagatatctcagcttatggattattattggaaaaataaataattcaagattcagac

SEQ ID NO: 83957 - DNA, 743 bp, Arabidopsis thaliana columbia
cgcgtccgaccaagcgtccggttcgatctagctaggcatcatgcaccttcgacaatatttcttgatgagatcgacgcgatcataagccaacgtggtggtgaaggccgcagtgaacatgaagctagcaggcgtctcaaaaccgagctgctcattcagatggatgggttacagaaaacgaatgagctcgtatttgttttagcagcaacaaatctcccctgggaactatatgcagctatgctccggcgtctagagaaacgaattcctgtacctttaccggatccagaagcaagaagaggaatgttcgagatgcttataccgtcacaaccaggtgatgagccattgcctcatgatgtgttggttgagaaatctgagggctactctggttcagacattcgaatactttgtaaggaagctgcgatgcaaccactgagacgcacattggctattttggaagacaaagaaaatgttgtgcctgaaaacgagctgccaaaaattggtcccatcctgccagaagacattgatcgagctttgagcaacactcgaccatcggctcatctgcacgcccatcttttcgacaagttcaatgatgattatggtagccaaattctcaagtaaattcgatgtaatatatacatctatgccatctagaacttgctcattatttgtatggaagcatcccaattacggatgctcaatgaacttttctgtcttaaattatgaataaatgctcctagttccctggg

SEQ ID NO: 83958 - DNA, 499 bp, Arabidopsis thaliana columbia
  unsure (1)..(499): unsure at all n locations
agtaaaaaagtattttctggaccataaaacgaacatgatatactgtatcaagaaccaaaaaacaatgacacaaaaattaacaagtgttggccattgattcgatgagcaacgcatagccctctgggacaggcgactgcagacgcacacactcggctaaagcagggacgtccgatgacacgtccagaaactgagccacaaagagaagcagatgaaaatctgacatcttcttcaccaacggcaagctctttgcccggtccagatgtgtttttagagcccgcatcgttgctcgactgctccggttctctattgggaatattgatgacagaggcccctggtgatccaagatcctgacgagaacgaggaagaaatcgttatctacctccttaagatccttcacaccaacaaccacctncttcttcatcttagagagctttggatcatcgtccggcataatctccgtctcgaaccactcttccttgaacagcctgatgcacatatc

SEQ ID NO: 83959 - DNA, 602 bp, Arabidopsis thaliana columbia
tttttttttttttttttttaacaaaaacagaacgaatattattaaagaaatttcgaacaaggaaacacaaacataacgtcaaaccataaactgatgacgaaaaagacgataagagaaacacagaaacgacatcaaagatccaaacttatcacaacgaaacaaaacgtcacttcctcctaaacatcttggagttacatactacataggaaccaattaatcctcatgatctgtcttatggagaaccaccgcttgaacttggaacaccaccaccactaggtccaccaccgagtccaccagggaaccccattgcaccacccaaaccaccaagcccaccagccccaccaagaagcggcgtcccactcgggagtgggaaagtcatgccagagccaccacttccaccacctggcatccccatgaatccaccaactccggcaacaccgccaattccaccgccgtagatgaagttcttctggtcctcaagaggggcattaaccatatgaggctcatctttggtaggagcagctcctcctcctggagaggcagagtctgagtttgctgtaaagtgcgagcacctgccccgacgcctgggtccatccccggaa

SEQ ID NO: 83960 - DNA, 916 bp, Arabidopsis thaliana columbia
  unsure (1)..(916): unsure at all n locations
gagattccactctatacatacttaggaagctgtaccctcaggtaccgtccgatcccggtcaccacgcgtgcggggggcaacttacactccttactccgacgtgttggtcaaacccttctctctccatcacactatccctcaaccgccgtgctacaccgtgtgacttcaacaccggagtgatggtcatcgagttaaagaaatggcgagaaggagattacacgaggaggatcatagaggggatggagttacaaaaacggataagaatctacgagttaggctctttacccccgtttttacttggcttcgccggaaacatagctccggtagatcaccggtggaaccaacacggtttaggaagagataattttagaggactgtgtcgagatttgcatccaggtccagtgagtttgttgcattggagggggaaagggaacccatgggtaaggttagatgatggtcgaccttgcccgcttgatgcactttgggttccatatgatttgttagagtcacggttcgaccttatcgagagttaaattttagatgttagttttcttttttggggggtaaaagtatatttttgactgaatgtgtaatataggaagatgaataataatacttgaataaaatgataggaaggataggatagtcgaatgtgtaattagtttggtgatggtagttacttactctcgtaacgcattgcctaaatataaaataattaattcgatacctataaggtaataattgtgaatatgtatatctactctaccgaatgtactacggcgagtaattacaaagaaatatactacagcttttttttancaaaaaaaaaaaaaaaaaaaaaaaaaaaaaaaaacaaaaaacnaagggcggccgctctagaggatccaagcttacgtacgcgtgcatgcgacgtcat

SEQ ID NO: 83961 - DNA, 1048 bp, Arabidopsis thaliana columbia
agcggccgcccttttttttttttttttttgtcaaacctttttttcattcattcaaatagaaacaagtacaaagaaaagagtttaaaaaactcaaaaattacaacaagacaagaagaggcattccccaataccaaagaaagatagatagtgtttaacgatttaaaatccatgaaagcattgaggcaagggcaaagtagcgcattgcaacatgagaggtcacggtaaatcgagagatcatcctcgaagggttcgaagaacgacagattagtcacggtcgaaagacatagtgacgttgataaacgaatcaatgatatgattctcgccggagcaagctgcattacccatagtaacacgataccaatgattcgggagactatggtgctatagtcaggtgagggtggttttaaaatccaaagcaaatgcgggtctctccggtcaaatgcggcaaagacggtgaggcaattggtctgagggagaaagctttagagttattaaaccagcaaatgggcttgggcctttttggatgaattgggccaactgaagagtctaggtccactggggaaaaccctaggatctcttcaggatgccaaaacagagagtggttgcggcagccgtccgagaatggcgaagagatttgcagcacatggatcttctccgatgaatgaaggatcgatgaggacaggctctagccgtggttcgggtaaggggtgaggttccaggggttcacagcctttcctacacaaggaaccagatccgaaaaagggtctgtccaaggagatgcgaggaaagagtgggagaagggaagagcacaatgtctcaacttatcttcttctattggttttgaaaaccaatctgaaaccgacgcagggtgaggaacattgattggaagggtttgaaaaagtttcatcaaaaggaaaacaaaggggaaaagctttaaaagaaagaaaataaaaggggagactagataagagaagcgacggtgagaaaaacaggggtttggatccccggacgcgtgggtcgacccgggaattccggaccggtagggcaa

SEQ ID NO: 83962 - DNA, 411 bp, Arabidopsis thaliana columbia
ggccgccctttttttttttttttttttttttgattagactatttattgttttctatcaatttgtttgcatatctgtactatcacacacattttttcaatctataacacacacacacacacaatgatcaaatgtacacatgactcagagcgtatgtaaatgtacacatgcaaagaaaaagaggcaaagcaactcatatctttttgatctgggaatccagcaaagcacgaccagtatggcagatccggtccctttacctaaacttatcccaccatgattaaccattcaatataagatgcaaacctggcacctgatccaggtaaccgagcactgatatgagtgttcagctgctaagccgattaataactctaacggctttgactggattgggcaaaggcaaatctactcgtact

SEQ ID NO: 83963 - DNA, 534 bp, Arabidopsis thaliana columbia
cccggtaacagggagctcgcacgggcggctacgaaatcgctgtattttcaaatcgtctctcagtttccatgacttcagatgctctcactataccatctgagcttgaatctgccttgcggctcaggactgtacaatactttattacaaaaaggccttggcttgatctttatggagtccatgtgaggcctgtgccaccattcggaagtacaagccgtaaacctcattttgatccagctttgattcatcgttgcttgcctgatgagcttcttttcgaggtgtttgctcggatgatgccttatgacttaggtagagcagcttgtgtatgcagaaagtggaggtacactgttcgaaaccctgtgttctggcgtaatgcctgtttgaaagctttggcagactgctgggggtatcggaaaactataagatcttgcagtctaaatatgatgggtcatgggggaaaatgtggctcttaggtccagagttcggactgatgggctttatgtgagtgggtccttcatccgggtggattcaggtggc

SEQ ID NO: 83964 - DNA, 568 bp, Arabidopsis thaliana columbia
  unsure (1)..(568): unsure at all n locations
agcggccgcccttttttttttttttacagcttgaggcacttattcattatgatttacaagaagtgtatactatacacacacatacctctgcgaacctaggaagcaatcaaatgaatttcttctttctatataactaacatctctatacataagtaacgtgtgagcttaggtactctattaactgattaaagagaactgggcgtacaataaatagtggttagtggaagacttgaggagcagtgtagaactcagattcgttgaaacctggtctgagatcttcttgatcacacatgaactgtaatgggaagcacacaaggttccctcttgtctccttcagaatctcccacgagtcgctgccgcatggattctagcctctccggtgcaatgcccaaggtcgatcgtagtgtgacccaacttgtccttacaaagagccatattggggcccaatgcagctcttgagcggatatgtccatccggggtgccgagaaacttggccgaaanacnggggtctcctaagnggtgccancccaaagccttgaangngcncctnntngnccccgnnntttga

SEQ ID NO: 83965 - DNA, 371 bp, Arabidopsis thaliana columbia
ttattccattcttaacctctctctacctctctatctctctctcctcataatcgatccgtaaactcgccggaggagcagggagattcaataagacgatggctcagagaacggagaaggaagagaccgagttcaaagttctcgaaaccttgacgacaacaacaacgacgttatgtaccaataactgcggcgttacagcgaatcctgcgacgaacaacatgtgtcagaaatgtttcaacgcatctctcgtctcggcggccgaaggtgttgttgaatcagggttcgatcttgaagagatcggctagatctgtcaatcttcgttcgtcaccagctaaagtcgtgattcgtccaagagagatcgatgcggtgaagat

SEQ ID NO: 83966 - DNA, 497 bp, Arabidopsis thaliana columbia
cccacgcgttcgcccaggaactgttgaagctgctaaattttttagcatggttgtcaaccgtcgtactgtctacattaagattcctgctactgctccatgcattccttccatcagggatgtcattgcagctggaataagtgtcaatgtcacgctcatattctcaatcgccagatatgaagcactgatcgatgcatatttggatggcctcgaggcgtctggacttgatgacctctcaagagttaccagtgttgcttccttctttgtcagtcgggtggatactctcatggacaagatgcttgagcaaattggtacccctgaagccttagatctccgtgggaaggcggctgtggctcaagctgcattagcatacaagctataccagcagaaattctctggcccaagatgggaagctctggtaaagaaaggtgccaagaaacagagacttctctgggcatcaacaagtgtaaagaacccagcttactctgacaccttatatg

SEQ ID NO: 83967 - DNA, 501 bp, Arabidopsis thaliana columbia
  unsure (1)..(501): unsure at all n locations
gttggacttggcgataaagtttctccctctgatattgaggaaggcatgcgtgttggagttgatcggaataaatatcagattcagattcctctacctcccaaaatcgatcctagcgtgaccatgatgactgtcgaagagaaacctgatgtaacttacaatgatgttggtggatgcaaggagcagattgagaagatgcgagaggttgttgaactgccaatgcttcatccagagaaatttgtgaagcttggaatagatcctcccaagggtgttctctgctacggacctcctggtactggtaaaactcttctggctagagctgtggccaacagaaccgatgcttgctttatcaagggttattggaagtgagcttgttcagaagtatgttggtgaaggggctaggatggttcggggacctttttcaattgcccggnccaanaaagctnaattgtttttttncggagtnnnnccnttggnggcnaantttttaangtttngggggna

SEQ ID NO: 83968 - DNA, 409 bp, Arabidopsis thaliana columbia
gaacattctgggtgcaatcgagcggagatgttggcttgttgcttgcgaaataaacggcgcatgaaaggtaaactctcatggaagtcaaagaagagagatttgtctcattcaggaaactgggcaccagaagatgacaatgatgaagggaaaatcgttttctttggaggaagtaactatacctttgatttggatgatttgttagctgcatctgcagaaattttggggaaaggcgctcatgttacaacctacaaagtagctgtgggagacacagccacggtagtagtgaagaggattggagggcggtgggttgttgggaggagagaagtttgagccaccaatttggggttccttggtagaattcaggcctgtttatgttgccgagcttaaagcctactactattccaagatc

SEQ ID NO: 83969 - DNA, 542 bp, Arabidopsis thaliana columbia
acgattcgtcctcttcgtttccttcttccattaatacaaagcaaatcctactctgaaagcttctttattcaatctctctacttcagtttctctgtccccatttttcatctgagagttaaaactgtaacctcaaaatctgagataaagtcaaaaaaagaaccccagtttatgattctcattttctctttataatcgaaagcttcgatttttaacaaaacccagaatctgtgttcttgttttttttttttttttggtgagagttatctttttttttttttggaatattgggtgagaatctgagtaatgggatttacataaaaagattctatgtaaatactaaaataatctggaaattattaaatttccaaactttgtgttccattttgtggactcaaatttgtttataaagatctcaaatcagagagattgagacgaccaagaacaagcagaagaagaagaattgagagaatggtggtggggtcttcttcaactaaaggtcgttcgaatctggagaggttttttaggaatactctagcctcttc

SEQ ID NO: 83970 - DNA, 872 bp, Arabidopsis thaliana columbia
aggacgcgtgggtcagtagatcggaaaatggagccatggattgacgaattaaccgacgacttacagagtgtaagctttacatcagccggaaccaccgtgaatcgaagcacaagctccggttctcgctcttcctcctccgccgcagctttaacaccagcaccatcagctcacggttcatgctcatcttcgaaactccctccttcactccgatcatctctctcactctccgatctcagattccgtctccgtctcggttccggcgacatcggctctgttttcttagccgaattcaaatccctaaccgccgtaacagaaaccaccgccgttaaattacctctgttagcagcgaaagttatggataaaaaggagctcgcgagcagaagcaaagaaggtagagctaagacggagagagagattctcgaatctcttgatcatccgtttcttccgacgctttacgccgccattgattctccgaaatggctctgtttattaacggagttttgtccccggcggtgaccttcacgttctcccgtcaaaaacagactcataaacgggtttccatgaatccgccgtcagattctattgtatcggaagtgatcgtagcgggttgaatattcttcacatgttgggggttgtgttcccccgggtgaagcctgagaacgtgctggttcgatcagatggtcacatcatgttaactgattttgatctctccttaaaatgtgatgaatcgacttccacaccacagatagtgctgaaccggaacaatcttcctaatggctcgtctgaccagaacgagaaccaaggcatggaccaccgtcaaaccacatcatcctcttgcatgatccctaactgtattgtccctgctgtctctt

SEQ ID NO: 83971 - DNA, 635 bp, Arabidopsis thaliana columbia
gcagtaccgctccggaatttcagggtcgacccacgcgtacgccttgataatccacccaatcgctgtcattctcccatcaatctatctgctttcacaaaccattgtactgagatcgtatctttaaggtaaatttcaaatcggagtcggcgagatcgaaataggaacctggaagtcggagaatttgtgtaaatccggttttttttttttaattctccgatggatagtttaagtgatatcgatggtgatttcgatggaagaaatgaacgaggatcgtcatcggattatcgattgttgggtcggcagattacggttcatcagttcatgggtggtggcaaagctgctgacttgctcttatggaggaggcgacatctttctttgggggttatcattatatcaactgtagcctggcttatattcaagttttccgggttgcctttcttatctggttcttcggatgtcttactcatcgtgatcatgatatcattcgttcatgcccgggtttctgtttttaggaatagacagttgcattcgttgccagagcttgttctatcagaggaaatggtgaatagtgctgcagcttctttccgtataaaactccatcacttgcttgtaatggctcatgatgtcacagttgg

SEQ ID NO: 83972 - DNA, 987 bp, Arabidopsis thaliana columbia
  unsure (1)..(987): unsure at all n locations
ttaggacacactatagaagatctatgacgtcacctgcacgcgtacgtaagcttggatcctctagagcggccgcccttttttttttttttttattcataaccaataatcggattgttaattgaaaactttaatactccatacatattgagttaactctgttaacttgaatgcttaagaataccatccaaatctaatttagtcccaatctcaagttactaacaataataattactgtatatgaatgtcacatattaacctacaagaaaataaaataatattaattccatgtgcaataataagagtcgatcaccaacttcgctgtgtcactctctctatatataaagactttccctcctttagactttgtgcattatccaaaaaatggagaagaagaagaacaacaacaatggaggagatttcggagaagaagaaagttccattgacggagacatactcgagtcaatcctctcctatttaccactcctagacctcgattccgcttgccaagtctccaaatcatggaaccgcgccgtcttttactccctccgccgccttaaaaccatgccgtggttgttcgtctacaaccagagaaattctccgccgtacaccatggcgacgatggcgatggcttatgatcccaagtccgaggcctggatcgagctcaacaccgcatcatctcccgtcgaacacgtctccgttgctcgatcctctcactccacgttgctctacgctttatctccggcgagattctctttctcaaccgacgcgtttcatctgacttggcaacacgtggcaccgccgagagtttggaggatcgatccaatcgtggctgtagtcggacggagcctgattatagccggaggtgttttcgattttgaggagggtagattnccgtgggntnttcganatgaatccgagacgagcntggaaaattgaatcnttccggtttttttnngaatccngtgtcaagngggttccaagggtagt

SEQ ID NO: 83973 - DNA, 2219 bp, Arabidopsis thaliana columbia
  unsure (1)..(2219): unsure at all n locations
aggtgacacttagaagagctatgacgtcgcatcgccgcgtacgtaagctcggaattcggctcgaggaaagattccacctgggttgggtcgtgaagaaagagaagaagaaaccgaagaagctcgaagaagaacgaaggagattcttcctttccccagatttttcgtttgaagaagaatcgaaaaacttagatttttggttttgctttcggagttattcgaatttgaaatatctgaatctgttgattcatttattctccgcatgaagctgtgttggtgaagtttttcggagatttagggtttctgagttgttcctcgtttggttggtgaataaagcgaagatgaacgtgatgcgtcgtctcaagagcattgcttcgggtcggacctccatttcttcggatcctggtggggactatgcgttgaagagagctaagctggatcaagagaacgacaacttgtgtgttgatccaatgcaggttgaccaaaatagttcttgttttgagatgaaagctgacgttttgtcacaagaaagtgttgctggaacgtcaaatgtgcctgctgtatcggaaaaacccgtggatgatcagcttcccgatgttatgatcgaaatgaagattagagacgagcgaaatgccaaccgcgaggataaggatatggaaacaactgttgtaaacggcagtgggaccgaaacgggacaagttattacgacgacagttgggggtagagatggaaagccaaagcagactatctcatacatggcccagcgagtggttggaaccggctcattcggagtagtgttccaggccaagtgcctggaaacgggtgaacaagttgcaattaagaaggttctgcaggataaaagatacaagaacagagaacttcagatcatgcgtttgcaagaccatcccaacgttgtgcggctgaggcattctttcttttcaacaactgacaaggatgagctgtatctcaaccttgtccttgagtatgttcccgaaactgtatacagagcatcgaagcactataccaaaatgaatcagcatatgccaattatctttgttcagctctatacttatcagatttgccgtgcgctgaactacttacatcgcgtggttggggtgtgtcaccgtgacattaagccacaaaatctactggttaatccccaaactcatcaattaaaaatatgcgattttggaagcgcaaagatgttggtacccggtgaacctaacatatcctatatatgctcccggtactacagggccccagaacttatatttggggcgacagagtataccaatgccattgacatgtggtccggcggttgtgtcatggcagagcttttacttggtcaaccactgtttcccggggaaagtggcattgatcagctggtggagataatcaagattcttgggacgcctacaagagaagaaatacggtgtatgaatccgaattacacagagttcaagtttcctcaaatcaaagctcacccgtggcacaagattttccacaagcgaatgccacctgaagcagtagacctcgtctcaagactccttcagtactcaccaaaccttcgttgcactgcattggaagcttgtgcacaccccttctttgatgacttacgggatccaaatgtttcactgccaaatggaagagcactgcctccattgtttaacttcactgcccaagaacttgcgggtgcatcaacagagctgcgacagcgtctaattccagcacattgccagggaacgggaagtagctcttaggatcatttatagcgtgtccaaatccagctttctttctctccctctatttactgcagtgtgtacatcaattttgaaccacttctgcttccaagcttttgtcgccggaggagagattggaaatctgtacgccgggacctgatgaggtgtgaaataactggggtcatgaagcttcttcttcttcttctgactggcttttctctcaatttgctatccttgttattttcaccttcactttcatttttttgtttttttttccacaaatctgaccccccttatatgtttggtgtatcatttttatgtgtttgtaatccatcaagatcattttcccttgccctaatattgcaagctaagattccgtttcatgttcctctctaaaaaaaacaaaaaacantnaatnnnnaaganaagggcggccgctctagaggatccaagcttacgtacgcgtgcatgcgtacgtcatag

SEQ ID NO: 83974 - DNA, 800 bp, Arabidopsis thaliana columbia
aacttgaagccaccaaaaaaagtaggtgaaagtgagttggtggggggattcaaaagttccacatgacaaatagataatcagtataaataagattagttcttcttatattgtcttattcaatgcacacaaacatttacccaaaatggcatcggcggttcagaaatcagcgttgctcttatgtggagactacatggaagcctatgaaacgattgttcctctctatgttctccaatcgtttggggttagcgttcattgcgtttcacccaaccgcaacgccggcgatcgctgcgttatgtctgcccacgatttcttgggcctcgagctatacaccgagcttgtcgttgaccagttgactttaaacgcaaacttcgatgacgtcactccggagaattacgacgtcatcatcatcccaggaggccgattcacggagcttctcagcgccgacgagaaatgcgttgacctcgtggcgcgattcgccgaatccaagaagctgatcttcactagctgtcatagccaggttatgctgatggcggccggaatcctcgccggtggtgtgaaatgcacggcgtttgaaagcataaagcctttgatcgaactctccggcggtgagtggtggcaacagcctgggattcagagcatgttcgagatcaccgattgcgttaaagacgggaatttcatgagtacggttggttggccaacgcttggtcacggcattaagcttttgcttgaatctcttggtggcaaagtctgtagcttggagaagaagcaagcttctgtgcttttcctcattggggactatg

SEQ ID NO: 83975 - DNA, 514 bp, Arabidopsis thaliana columbia
  unsure (1)..(514): unsure at all n locations
ggttttagacttttagtcttaaaactaaagtctcttatcttgtagcccaagtctcagacatgatgaacaacaagccacgaaaaagataaagagggcaggaagataaacagggtagtgttcaagtaacatggacacttagttctcttattgatacagatccttattgatgaagagaaaagctgtgtatttagacattaggaggtggccaaatcttcccgaaaagctcttcaacacgtttcgcttggttcgcataaccttcaacaccggctgataaaagctccactgatgcaggacccatagatgaagccaagcttagctggtcccatttgaccagctctttgttggggaagtgggaatggggttgcagttccgggggtaagtttcccgaacaaaggggtattttccaccccggggatgggggggganctttanngattgnngnccctaatgggggganggaaaatcgcccccggaagntggaaagcctntttntccggaaaagnnccccccttgt

SEQ ID NO: 83976 - DNA, 617 bp, Arabidopsis thaliana columbia
  unsure (1)..(617): unsure at all n locations
agagttcccagtcaagtttcaagtcaaccagatttactggagtttggacaacttcagcagttatttcactttagagacagaggttcctgggagctaccttttctacaagggtggctgatggctcaaagccaagctggtgctaattcagtggctcttcctactggtagtagtggtcacgtcaactcaactccttatatgggttcttcttcagcatctcattcatccacagccagtctagaggctggagtagcgtcattagaaattcctggtggtgttaacttatatggggtttctgcaagaggtgactcccgggaccgaattctacagtcccgcttcgcaggatctggtttagcagaaggtcgttcctctcgtaacactcaacatgaaggagctgatgctcaacctgtggtaaacagaatcccttctgaactggctagttcaattgctgctgcagagttgccttgtactgtcaaactgagagtgtggtcacatgacatcaaagacccatgttcaatactgaagtctgacaaatgtcgattaacaatacatcatgctgttctnatgttcaatactgaagtctgacaaatgtcgattaacaatacatcatgctgttctna

SEQ ID NO: 83977 - DNA, 536 bp, Arabidopsis thaliana columbia
aaaccaaagtatcaaacaataaaagatttttgagaaaaaagagagagagatcatgactactactccagattggatcatgattggaggagacggtcctgagagttataaccaacagtcctcgtatcagagagcattgttggaagcgacaaaggacaagatgaccaaggcgatctcagccaatctcgacctagactttgatttcgaatcgcttcattgtagcggatttcggttgtgcaagtggacctaacacttttgtggcagttcaaaacataatagatgcggtagaagaaaagtaccgtagagaaaccggacaaaacccggcagataacatcgagttccaagtcctcttcaatgatttcagcctcaatgatttcaacactctcttccagacacttccacccggaagaagatacttcagcgctggagttcctggttccttcttcgaacgtgttcttcctaaggagagtttccacatcggagtcatgagttacgcgttccatttcacctccaaaatccccaaagggattatggaccgc

SEQ ID NO: 83978 - DNA, 684 bp, Arabidopsis thaliana columbia
gggtcagaaaccgtttgaagcttttgaaccatcttatggtgcaagtttgtcccatttcgacgatggtcttgctgctaagtatggtggtttcggtggaggctatagaatgccggatcctcctttcctaccggatcagtttccattgagaaatggtcctaacgagatgtttgatttccgaggatattcagaccttgatagagggattggtcaaagagaatatccacagcagtacggtgggcacttggaccccatgttagctcctcctcctcctccaaatctgatggacaatgcattcccattgcaacaacgttatgcgcctcatttcgatcaaatgaattaccagaggatgagctctttcccacctcagcctccattgcaacctagcggacataatctcttaaatcctcatgactttccactgccaccgccaccacctagtgacttcgaaatgagtccaaggggttttgcccctggcccgaacccgaactacccttatatgagtcgatctggcggttggattaatgactagatcagcactcattatccttgtagttgcaacattagtagtttgattgatcttttgtgtctcactctacgaaagtgtaggaagaatagaagaaatctataacttttctctgccactcacatgtgtagctagtgggcctttaagcagtttaataatat

SEQ ID NO: 83979 - DNA, 533 bp, Arabidopsis thaliana columbia
  unsure (1)..(533): unsure at all n locations
ggggggacgcctctcgttctctcttccgtcaatatggaaggcgtcaccgtcgtgtctttcttccttcttttcatcgccaccgccatggccgccaagtccaccgtctccttccgtgacggcatgttaccaaacggagacttcgagctaggaccaaaaccatcagacatgaaaggaacagaaatactaaacaaactagcaataccaaactgggaagtcacaggattcgtcgaatacattaaatcaggacataaacaaggagacatgcttctcgttgttcccgccggtaaattcgctgtaagacttgggaacgaagcatcgatcaaacaaagacttaaagtggttaaaggaatgtattactcactcacttttagtgctgctagaacttgtgcacaagacgagagacttaacatatctgtagcacctgactccggtgtgattccgattcagacggtttatagtagtagtgggtggggtttataattccttgggngnttaaggcttagagngnnttttctnaggtngtnttcanaacc

SEQ ID NO: 83980 - DNA, 567 bp, Arabidopsis thaliana columbia
  unsure (1)..(567): unsure at all n locations
tctatagcgggcgcgctcttttttttttttttttgcgagcaagggctcttactatgaaggacaaacaagactttgatgacgacgatcttctttcttcaagacgacgaaacataaatattaaaaaatgacagagagcaaaacccagttccgacacacttatacatcaatgacccacatgtcggaagcagagcatttttcatgtgaactaaagaaagaaggtagttagtaacaactctgatgacataagagagacacacccgaaatttcaatccactcccttgctcttttcgggaagctgactacgtagcttgtagtagtgcatgcttagctattctttgaaagggtaaaatcttcttctccgggttttaccaatcggattttattcctccggtatgcctgttgctcttcttcgacgacgccctgatctggccaagaagcttcttttgggaacnggaaccctgncaggtccanaatggatcncagaccgggancctgagcgagtgnttgacttggccccacgaggtgaaagcaggnccngncncgngaagggggatttgtggccncgaa

SEQ ID NO: 83981 - DNA, 505 bp, Arabidopsis thaliana columbia
aaatgcaaaattttattgcaaaaccgtattagagtattggagttaagtcgaaaacaaaattccattcgtggtataaaaaaaaagaatttgaagtagcaaaaatagaaaacttacatatttgtgtactcctacccggataacaaaaaaaaagtgaacatagaaacggtatcaggcagagttggaagaagaaggaccagaaggaagcaggtcgtagccatcgtgatggtgacgagactcgacaggtacgcatttgaggataacggctacaatcatgctcaatgatcctatcaagattgatagtaaccaatgttgccagctcagaggaacggtgctagcaaatgctccaagaaactccactatgatcacttgaaacactaccgtcacagtcattacccatgtgaacacccagctattgaacattcctttgaacacatttatcttctctatttcccggctattgatctcattgaacacctggcaaaagacgaaggagttgaagatgact

SEQ ID NO: 83982 - DNA, 458 bp, Arabidopsis thaliana columbia
cgcgacgactgtgagagtttgtttcgcgaacattctctgagtttctctcgacgcgacggcgattgcgaatgtcttctccttctgattctcgtctctctgtgtctccgggataagtaatcgaagatgaatatgattcagcgattcatgcaatctatggcaaagacgcgtggcctctgtcatccagattgcgtaaaagcaagtagtgagcaagaagattacgatgcgtctcagctcagtatttggtggataatgctgggaaggaagacgaccagggagaaatggatgaaccaagctctcagttcactatcgaaaacttgcatcagtatatggtggaaaatgtctggaataagaggtaagatgtgcagggagagggagcaaccactcactgtcaaagactgccttgaatgtgctttcaagaaagggctaccgagaagagaacattgggcacatgtgggatg

SEQ ID NO: 83983 - DNA, 552 bp, Arabidopsis thaliana columbia
  unsure (1)..(552): unsure at all n locations
aatcaaatgcaacaatttcttccatgctgcaagttccgttgtaggaaaacccaccttcccctctggctgtcttgctgctgttttccatcaatctgtgccacaagaatcgcagtcgtcatctcctgccttggactacttactggtttacactccatcaggtcatgtagttcaatacaaactcattccatctcttggaggagaccaggctgagagcaatacgcggaatggagcaaacttctgggctgacccctgaagagggactgagagtgaaaggtgaacccagttcagtgttgggatgtctgtcgaagagcggattggccagagagggaggagaacatatgcgggcttacttatggtggacgaaaaaatgctgagttaactgttgatacttctgatagtgaagatcaaacaaagcctctggagaaacaccatgtttatcttgccaatgcagaggtgctgataaactccggaagaaaaccaatctggcaaaattcagagatatctttctatccgatgtatccaccagactctgnatggcagaacctgaattcg

SEQ ID NO: 83984 - DNA, 2333 bp, Arabidopsis thaliana columbia
  unsure (1)..(2333): unsure at all n locations
cacgcgtcccactcactctctcttctctctctctgaagcgatgtcatcgacgtttcgagctccggcgggagccgctactgtgtttacggcggatcagaagatcagacttgggaggctcgacgctctgagatcctctcattctgttttcttaggaagatatggacgcggcggcgtcccggttcctccttccgcttcttcgtcgagttcttcgcctattcaagccgtctccactcctgcgaagcctgagactgcgaccaagcggagcaaagtcgaaattatcaaggagaagagtaatttcataaggtatcctttgaacgaggagcttttaacagaggctccaaatgtcaacgagtcagccgtgcagcttatcaagttccacggtagctaccaacagtacaacagagaagaacgtggtggaagatcttactccttcatgcttcgaactaagaatccatctgggaaggtccctaaccagctctatttgactatggatgacttagctgatgagtttggaattggtactcttcgtttgaccacaaggcagacgtttcagcttcatggtgttctgaagcagaatcttaagactgtgatgagctcgattattaaaaatatgggtagcacgcttggtgcatgtggtgatctgaacagaaatgttcttgctcctgctgcaccttatgtgaagaaagactatctctttgcacaagaaactgctgacaacattgcggctcttctttctcctcaatcagggttctattatgatatgtgggttgatggagagcagttcatgactgctgaacctccagaggtagtgaaggctcgaaatgataactcccatggaactaactttgtcgactctcctgagcccatctatggcacccagttcttgcctagaaagttcaaggtcgctgtaactgttcctacagataattccgtcgacctcctcaccaatgacattggcgttgttgttgtttcagatgaaaatggggaaccacagggtttcaatatttatgttggtgggggtatgggaagaacacacagaatggagtctacttttgcccgcctggcagaaccaataggttatgttccaaaggaagatattttgtatgctgtgaaggccattgtagtcacacagcgagaacacgggagacgagatgatcgtaaatatagcagaatgaaatatttgatcagctcctggggaattgagaagttcagagatgttgttgagcaatattatggtaaaaagtttgagccttcccgtgaacttccagagtgggagttcaagagttacttgggatggcatgaacagggagatggtgcatggttttgtgggcttcacgtagacagtggtcgtgttggaggtataatgaagaagacgctgagagaagtaatagagaaatacaaaattgatgtccgcatcacaccaaaccaaaacattgtcttgtgtgatataaagactgaatggaagcgtcccatcaccacagtacttgctcaggccggcttactgcaacctgagtttgtcgacccattaaaccaaactgcaatggcttgcccagcttttcctttgtgccctctggcaataactgaggcagagcgcgggatccccagcattctaaagagagttagggcaatgtttgaaaaggttggtctggactacgacgagtctgttgtgataagagtaaccggttgtccaaacggctgtgcaagaccgtacatggctgagctcggtctagtcggggatggtcccaacagctatcaggtttggctaggaggaacaccgaacctgacccagatagcgagaagtttcatggataaggttaaggttcacgacttagagaaagtctgcgagccattgttctatcactggaaactagagaggcaaactaaagaatcatttggagaatacacaacccgcatgggattcgagaaactgaaggagctgatagatacatacaaaggagtttctcaatgagcacaacagagatcatctttcgttttataattcatgtaatgtaatgtctctgtctgaactgttactcttcggtaactctgatggagaacttgttctcgttttggtttgattttgtaccctcttttttttttgtttttttggattgctttgtctttgattggataatgaagcattactgtatcaaggctaattagcccatcaataagcctttttaaagctaaaaaaaaaaaaaaaaaannnnnnnnnnnnnnnnnnnnnnnnnnnnnnnnnnnnnnnnnnnnnnnnnnnnnnnnnnnnnnnnnnnnnnnnnnnnnnnnnnnnnnnnnnnnnnnnnnnnnnnnnnnnnnnnnnnnnnnnnnnnnnn

SEQ ID NO: 83985 - DNA, 463 bp, Arabidopsis thaliana columbia
gtaagcaaacgtggtatggtttaattctctattttggtgaagaccctgccaagtgcccttttgaacaagtagtgtcgactcttctaaactttgtaagactgttcaatcgtgcacatgaagaaaacggaaaacaactcgaggcagaagctaagaagaatgctgctgaaaaggagaaaccaaaaacaggtggattagatacagaaatcaagaagcccttaaatgaagaagttaaggaggagaaaacaaaaacaagtggattaggtaaaggaatgagtgaccggctaaaggtaagaaccgctccttgaatgaccggctgtaccggttttctatatgggaatggtctaagaccgaacgggctttgagaagaaaaagcacccggtgaagccgtgcgtaaaactggctttagaccatggaacaacagggagtgggatgctaaggacaacaatattttatctctttaacg

SEQ ID NO: 83986 - DNA, 527 bp, Arabidopsis thaliana columbia
  unsure (1)..(527): unsure at all n locations
caaacgaatatagagggaaaatcgagtgacaaaattcatgctggtctcattcttgtattggcgcagctctctgtcttcatcgaacaaaaggtcatcccgagagttactgaggaaatagctgcttccttctctggtggaaattcccaagcctttgagaatggacctgcttttattcctggagaactttgccgggtcttccacgcagccagcgagaaacttctccagcattacatagacacaagaacacagaaggtatcagttttactgagaaaaaggttcaagacacctaactgggttaagcacaaggagccacgagaggttcacatgtatgtcgatatgtttcttcacgagttagaaggaagttggtaaaagaagtgaaacaagttttacctcaagggactttccgtaagcacaaaaggccaggcagcaacggaagtaccactcaacctatnacgggnaattcccccntaattgttagntggccggccaattnncaaggggccgtgnacnttttgggcnattttcaa

SEQ ID NO: 83987 - DNA, 641 bp, Arabidopsis thaliana columbia
  unsure (1)..(641): unsure at all n locations
ccaactctatacgactcactatagggaaagctggtacgcctccaggtaccggtccggaattcccgggtctacccacgcgtgcgagagaagacagaaagaaaaaaactttttttcttttcgttaaaggctccacctttctttcttcttaacacacaacacatgaaaatccctgcatcatctcctcaagacacgaccaacaacaacaacaacactaatagtactgatagtaatcacttatcaatggacgaacatgtcatgcgttcaatggattgggattccatcatgaaagaattggagcttgatgacgattctgctcctaactcacttaaaaccggtttcaccacaaccacaacagattctactattttgcctctttacgccgtcgattcaaatctccctggctttcccgatcagattcaaccgtcggatttcgaatcgtcttccgatgtttatcctggtcagaaccaaacaactgggtacggttttaattctcttgatagtgtcggcaatggaggatttgatttcattgaagntctcatccgagtcgtggnttgttttgaatcggcggngttncaactgggtcagggnggttttncacgggttaatnaacggttnaaatctccgngggntagcccntncag

SEQ ID NO: 83988 - DNA, 764 bp, Arabidopsis thaliana columbia
  unsure (1)..(764): unsure at all n locations
acaaaacctaatttcctttctcctaaactctctcatcttcctctttctctctcttttcttcctaaatgataaggtaacttcaaaactacgacaattcaacactcgaaaggacacgccaagatttaggtttttagcttgattcaaaaatggagacgaatccgtgtgacatgaatcagctcgattccgattcgcatctccctcctcgaaaacgattacttgctggattcaagaaatttaactccaacggcattaatggatcttctccttcagatttcgcttcttcttcctctacttcaaactcaaacggatcttcctctgcttccaccaatgttcagacccatctcggcaacttgttatcttctcctttcaacaatgaccagtcacctgaagagctcgtggaggcaacgagatctgcagctgctttagcggttaaagctgcaaaggctgcgagagctattgctaacgagaaggctttgatttccgctaaggcgattgctgcggctaagagggcattggaattggttgattcttttcctaaagaagcaatggctgattgcaaggagaggtctcctaggaagaacaagcagaaggaaacatgtccccggtcgagctcttgtcttcaaagggggcagccttaagagacggtggaagatgatttaagcccgnaggtttcaatcgngctnttngccaatacggcggatccctagagtntttgagaactangcggaggngnattggccaggggnttcaaggnngcangnggt

SEQ ID NO: 83989 - DNA, 526 bp, Arabidopsis thaliana columbia
aaatggcaataatatctcagttttttgctccattaccatctctcaccggaaccctaaccctaaccggtcgttcttttctccctctaaaccttgatacccaattcccaaaacctagactttccagggacagagccgccacactcgtactccaatccaagggtgatgattccgtcgatgcatcggatcggataatctcagccgtctgttacttctacccattcttcgatgggattcaatacggcaaattcatcatcacacagtaccacccttttaagattctcatccaacctttgtttcccgccatcagagctttcaagaggcttccctttcaatgggtttcttatcttcaatcaactctctacttcgtcggttgtgaggacccctaatttcagcaggtacggcaggttcaacacggtgcaggcggttgtgcttgatggggttgttgattttcccggatttgcttgagaggagctttaatcctagagatgggtttggtttagatgtggtgatgagtttggacagcaca

SEQ ID NO: 83990 - DNA, 544 bp, Arabidopsis thaliana columbia
  unsure (1)..(544): unsure at all n locations
acggcggaaacccccgntgtcttttcccatctcggggntcaatcgnaaatcncatacacagtccncctttcagatcccaccaaccttgttccccgccatcagagctttcaagagctcccctttcaatgggtttcttatcttcatcactctctacttcgtcgttgtgaggacccctaatttcagcaggtacgtcaggttcaacacgatgcaggcgattgtgcttgatgtgttgttgattttcccggatttgcttgagaggagctttaatcctagagatgggtttggtttagatgtggtgatgagtttggacagcacagtgttcctcttcttgcttgtctctttgatctatggattctcggcttgcttgtttggtctgaccccgaggttgcctcttgttgccgaggctgctgataggcaagtcctttgattcaataatatctttgtatgtaacacatttgctgtgattaaaccttctgtattggatcgctttctgataatcaaaacatacaatgtaactttttgatccaatgaaaaaggtttctgc

SEQ ID NO: 83991 - DNA, 488 bp, Arabidopsis thaliana columbia
  unsure (1)..(488): unsure at all n locations
ctacgggttcgatccttttggtttaggcaaaccggcggagtatctccaattcgatttggattccttggaccagaacttagccaagaacttatacggagaagtgatcgggactcgtaccgaggcggtggaccccaaatcgacgccgtttcagccatatagtgaagtcttcgggctacaaagattcagagaatgtgagctgattcacggtcggtgggcaatgctcgccactcttggcgctatcaccgtcgaatggctcaccggtgttacttggcaagactgccggcaaggtatcgcctcttttcttttcgtcacttttgcggtttgtgtttagcgctttcgacatctgtcttgattgttttatttttcaatttaccaggtagagctagtggatggatccatcttacttangncagccattgccggtntttatnctggncattgntaatgggnccgaaggnttaagtnnccgggnanatttgggtncancg

SEQ ID NO: 83992 - DNA, 571 bp, Arabidopsis thaliana columbia
  unsure (1)..(571): unsure at all n locations
aacgggncagaactaactaacgacgccggagatggccgccacttcaaccgccgctgctgcttcttcaatcatgggtacccgggtggtttccgacattagctccaattcaagccggttcacagcccggttcggattcggaaccaagaaagcatctcccaaaaaggctaagacggttatctcagaccggcctctatggttcccaggcgcaaaatcacccgaatatctcgacggttcacttgtcggggactacgggttcgatccttttggtttaggcaaaccggcggagtatctccaattcgatttggattccttggaccagaacttagccaagaacttatacgggagaagtgatcggggctcgtaccgaggcggtggaccccaaatcgacggcgtttcagccatatagtgaaggcttcgggttccaaagtctagggatntaagctgttacggtggtgggaatttngcaactttgggggttccgcgtgggtggtgaccggttttttttgaaaacgncggaaagtaggnttntggtgntcantttnttggaacattccgtnttttttgantanta

SEQ ID NO: 83993 - DNA, 535 bp, Arabidopsis thaliana columbia
  unsure (1)..(535): unsure at all n locations
aacggacagaactaactaacgacgccggagatggccgccacttcaaccgccgctgctgcttcttcaatcatgggtacccgggtggtttccgacattagctccaattcaagccggttcacagcccggttcggattcggaaccaagaaagcatctcccaaaaaggctaagacggttatctcagaccggcctctatggttcccaggcgcaaaatcacccgaatatctcgacgggttcacttgtcggggactacgggttcgatccttttgggttaggcaaaccggcggagtatctccaattcgatttggattccctgggcccagaacttagccaagggaccttttacgggggaagtgattcgggaccccgtaccgaaggccgggttggacccccaaattcgacggccgtttnaagcccatataagtgaaggttttcggggttaccagaggttaatgggggtttattacgtatttacggggggttgggaaatncttgccantttttggnggnttncccgnngaattgnnttacccggtgt

SEQ ID NO: 83994 - DNA, 737 bp, Arabidopsis thaliana columbia
  unsure (1)..(737): unsure at all n locations
ttaggacacactatagaagagctatgacgtcgcatgcacgcgtacgtaagctcggaattcggctcgagcaaagattcagagaatgtgagctgattcacggtcggtgggcaatgctcgccactcttggcgctatcaccgtcgaatggctcaccggtgttacttggcaagacgccggcaaggtagagctagtggatggatcatcttacttaggacagccattgccgttctctatctcgacattgatatggatcgaagtgttagtgatcggctacattgagttccaacgaaacgctgaactggactcggagaagcgtttgtatccaggaggcaagttctttgacccgttaggactagcgtctgacccggtgaagaaggctcagcttcagctagctgagatcaaacatgctcgtttagccatggttggattcttgggttttgcggttcaggcggctgcaaccggtaaaggaccgctcaacaactgggcgactcaccttagtgacccacttcacaccaccattatcgataccttctcttcctcctgatgtggtggcttttagcttctactggtgtcatgtaatgatgtggtggcttttagcttctactggtgtcatgtaatgatgtaacgtcgttattttaaagaaaatttggcaccttttgtataaacggaatttcttnnnnnnnnnnnnnnnnnnnnnnnnnnnnnnnnnnnnnnnnnnnnnnnnnnnnnnnnnnnnnnn

SEQ ID NO: 83995 - DNA, 976 bp, Arabidopsis thaliana columbia
  unsure (1)..(976): unsure at all n locations
ctctactccctctcagtatanctatgcgcctgcacgtaccggtccggaaaccgcaaacgcgacagaactaactaacgacgccggagatggccgccacttcaaccgccgctgctgcttcttcaatcatgggtacccgggtggtttccgacattagctccaattcaagccggttcacagcccggttcggattcggaaccaagaaagcatctcccaaaaaggctaagacggttatctcagaccggcctctatggttcccaggcgcaaaatcacccgaatatctcgacggttcacttgtcggggactacgggttcgatccttttggtttaggcaaaccggcggagtatctccaattcgatttggattccttggaccagaacttagccaagaacttatacggagaagtgatcgggactcgtaccgaggcggtggaccccaaatcgacgccgtttcagccatatagtgaagtcttcgggctacaaagattcagagaatgtgagctgattcacggtcggtgggcaatgctcgccacttttggggctattaccgtcgaatggctcaccggtgttacttggcaagacgccggcaaggtagagctagtggatggatcatcttacttaggacagccattgccgttctctatctcgacattgatatgggatcgaagtgttaagtgatcgggtacattgagttcccaaacgaaacgctgaactggactccgggagaagcgtttgtaatccaaggaggcaagttcttttgacccgttaagggctaacggnttgancccggtgaanaagggccagttnaagcaagctgngattaaaatgnccgtttancaagggtgnatnctngggtttcngggcaagngggttnancgggaaaggccgcnaaaaatngggggccncctnggggccctttnacnncatttggaacctcttccccccaaggggggtttncccacgggnnnaaaagggggggt

SEQ ID NO: 83996 - DNA, 613 bp, Arabidopsis thaliana columbia
cacacacgtccgcggacgcgtgggcggacgcgtgggcggacgcgtgggggctaaagtaataaaattaatggcaacttcagggtttaagcatttggtggttgtgaagtttaaggaagatacaaaggttgatgagatcttgaagggcttggagaatcttgtttctcagattgatactgtcaaatcctttgaatggggagaagataaagagagtcacgatatgcttagacaaggtttcactcatgcattttcgatgacctttgagaacaaagatggttacgtcgccttcacaagccatcctcttcatgttgaattctcagccgctttcaccgccgtcatcgacaagatcgttctcctcgatttccccgtcgccgctgtcaaatcttccgttgttgcaacaccatgaatcttgtgatggttacatatcgtcatatgactcatatcgaacttgtttcttaatttaaacgaagtttgagttgtttggttatgtaacttggttgggtaattaaggatgttttggtttgatttgtttattttcggtttgcggtaataagaatctggtttgattggaccttgggggtttatgatttctttcaaaaaagagcattttttaagt

SEQ ID NO: 83997 - DNA, 486 bp, Arabidopsis thaliana columbia
  unsure (1)..(486): unsure at all n locations
tctgagattaacgaattctttagcattttccagtcattctctaacgtcgtccgtactgttccgaggaagcaaatcgatcggtactattactaagatagcatcaacaatcaggacggtaaaaatggcggcttttgctgggtctgactcagaaacaacgtcgtctacctcgagagttatcgattctcatctccacatttgggcttctcctcaagaggccgagacatatccttattttcctggccaagaacctactttgactggtgatgtcaatttcttgcttaagaacatggaagaggcaagagtagatggagctctcattgtgcaacccataaatcacaagtttgaccattctttagtaacaagtgttctgaagagatacccgtcaaagtttgtcggttgttgccttgctaatccctgcagaagttgcaatngnattncggncctttngannttnttttagggaataacggcctttcggtananccc

SEQ ID NO: 83998 - DNA, 484 bp, Arabidopsis thaliana columbia
atgaagatgatgttagccatctagaggtttatttattcgtggaatcgtctggctctccaaacatgtatgttcatcatcacataattataccagacttcccattgtgtactgcatggcttgattgtcctcttaaaggaggggaaaaagggaattttgtagctattggttcaaaggatacaccgacaatcgagatatgggatcttgacgttagggacgaggtgctaccttgtatacaactaggaggaatagaggagatgatagtgagtaagaaaaagaagagcaagaaacagaaaccgaaattcaaagaaggtagccatactgagtcagtacttggtcttgcttggaacaaggagtttcggaacatacttgctagtgctagtgccgacaaaaaagttaaggtctgggatgtggctacttgggccgtgtaagattccttttggggcatcccacaaagggggttcaaacgggttttttgaaccttttc

SEQ ID NO: 83999 - DNA, 558 bp, Arabidopsis thaliana columbia
  unsure (1)..(558): unsure at all n locations
ctggtttaatgttttagatattttccattaccagattctttacattttcggtgatcttgtatacacagacatttttttcgttaccagattctttacttcactctaatgaaggaaaaacattttttcacacactcttccttgattatgatattggatccaaagtctgaaagttctaatcgtggtttgctaaagcataaaccacggcggttctacacggtgcatagaccatgaaggagcagggtcgttcgtcgtataagccatcataagtgaagtactctgccttgcgatcgagcctattgaatccaccaaagagaggatcgtccgagtccaatacgatcttatattttccaggcttggagcaaccaatgcgggaaatccaagtagctgctggtccagtgaaagtaaaggccaaagcggggttaccnccttcgganacggtacccaanngggtcggccttttggggaaagaatgggggcccgaggnctnaaccggaatccctcaaaagtggatgncgganaatcctgagcccggaccggnaaccgncccanaaaatgggg

SEQ ID NO: 84000 - DNA, 411 bp, Arabidopsis thaliana columbia
tgctactgcgaagaacaacaaattccttgtttatcatggcgaattccggcgaagagaagttgaagctctactcttactggagaagctcgtgtgctcatcgtgtccgtatcgccctcgctttgaaagggcttgattatgagtatataccagtgaatttgctcaagggtgatcaattcgattcagtttatcgttttgatcttcaagatttcaagaagatcaatccaatgggaactgtaccagctctggtggatggagatgttgtgattaatgattcttttgcgataataatgtatctggatgagaagtaccctgagccacctttattacctcgtgacctccataaacgggctgtgaattaccaggggaatgagtattgtcttgtctggcattcagcctcatcaaaatctggct

SEQ ID NO: 84001 - DNA, 635 bp, Arabidopsis thaliana columbia
  unsure (1)..(635): unsure at all n locations
agccaacgcgtccgcccacgcgtccgcaatcgctggactctgctactgcgaagaacaacaaattccttgtttatcatggcgaattccggcgaagagaagttgaagctctactcttactggagaagctcgtgtgctcatcgtgtccgtatcgccctcgctttgaaagggcttgattatgagtatataccagtgaatttgctcaagggtgatcaattcgattcagatttcaagaagatcaatccaatgggaactgtaccagctctggtggatggagatgttgtgattaatgattcttttgcgataataatgtatctggatgagaagtaccctgagccacctttgttacctcgtgacctccataaacgagctgtgaattaccaggcaatgagtattgtcttgtctggcatacagcctcatcaaaatcctggctgttattagggtatatcgaggaaaaggtaaatntggaggnganggctncctgggtnataatgctttcncaaaagggtttcagtcttcggnaactttggggatttncctgggaanatcgctggngtgaattacccggtncttttttggcccagncccgggggntnacagtcccgttantggccgcccacnttnaaatttcggtttna

SEQ ID NO: 84002 - DNA, 612 bp, Arabidopsis thaliana columbia
  unsure (1)..(612): unsure at all n locations
cattttcagagctcagagaaaaagaaagaatgaaaataagcttcgtgctccttcaccttccgaaatcggaaaacaatgcacgccaaaaccgattccgaggtaacaagcctcgcagcatcatcaccagccagatctccacgtagaccagtctactacgtccaatcaccatcacgcgactctcacgacggagaaaaaacagcaacatcgtttcactcaactccagtactaagtccgatgggatctccaccgcattctcactcatctatgggtcgtcactcacgtgaatcatcttctagtcgattctctggctctttaaagcctggatctagaaaagtcaaccctaacgatggttctaaacggaaaggtcacggcggtgagaaacagtggaaagaatgtgcggttattgaagaagaaggtttgttagatgatggtgatagagacggtggtgttcctcgtcgttgctatgttttggctttnatcgttggattctttatnctctttggtttctnctctttnattctctatggtgctgctaaacctatgaaacctaagancactgtcaagagtataacatttganacgcttaaganccaagcctggtcaanatgctgg

SEQ ID NO: 84003 - DNA, 570 bp, Arabidopsis thaliana columbia
  unsure (1)..(570): unsure at all n locations
agctctcnnnnnnnnnnnnnnnnnnnnnnnnnnnnnnnnnnnnnnnnnnnnnnnnnnnnnnnnnnnnnnnccacgcgtccgctcccaccattttcagagctcagagaaaaagaaagaaagaaaaaaagcttcgtgctccttcaccttcccaaatcggaaaacaatgcacgccaaaaccgattccgaggtaacaagcctcgcagcatcatcaccagccagatctccacgtagaccagtctactacgtccaatcaccatcacgcgactctcacgacggagaaaaaacagcaacatcgtttcactcaactccagtactaagtccgatgggatctccaccgcattctcactcatctatgggtcgtcactcacgtgaatcatcttctagtcgattctctggctctttaaagcctggatctagaaaagtcaaccctaacgatggttctaaacggaaaggtcacggcggtgagaaacagtggaaagaatgtgcggttattgaagaagaaggttttggtttgtgtttttccgcgttttttatgttgtttgtccccgctgacgcctttcttcccccccc

SEQ ID NO: 84004 - DNA, 442 bp, Arabidopsis thaliana columbia
  unsure (1)..(442): unsure at all n locations
ttttgcatcatttgagtacagagaatagaaggaagattgcttttgaagagcttgttcgtgttgttaagcctggtggatttgttctcattactgtctgggctgctgaacaggaggatacatcgttgcttacgaaatggacacctttgtctgctaagtatgttgaggaatgggttggtccaggtagtccgatgaatagtcctcgtgtgaggaacaatccgttctttagtcttgagagtatcccagagactgaggtgagtacaaaggagcaaaaggttgagaacagtcagttcatcggtcttgagagcattccagagagcgaggagagtacgngtgancagaaaggtgagagtattattccagaanccaangctngtatagtagncaaaagggtgcgaatctnttnngggggcatttggaggncttnagnagggtcaccaaggtc

SEQ ID NO: 84005 - DNA, 566 bp, Arabidopsis thaliana columbia
  unsure (1)..(566): unsure at all n locations
gtctaaatcatatttctgacattttgtttatcatgtagagaagattctttctttgatttgtgttacacataatacaaaaccccttaaagacaacaaattgcagggattttgagctgccacagaatctcaaactacaaccatgaaaaatgcaataataatttccgattacatatgcaatggagttccaatatcacaaagatttgataagtttgaaaccaaagttcaatcttggtttaaagcttctttctgaagaacaatacaccaattcgacttgtcgaaaaatctatcaacctatcattgcattggcctactccagatgccaaccctttcaaggtcggccttcggctaaaggacatgggtagtatcnggtnggacacaaaagctcccttttcnnaacaccttcctttggaagnccncttggaagtgcagacgccnnntggnccactccctttagcncngggggggaaggggaaaggcnagggggccaagggaccctgggggncccttttncnnggcncccaagggnccccaaaggttcccccccttgggccaaaaaaangctgggg

SEQ ID NO: 84006 - DNA, 724 bp, Arabidopsis thaliana columbia
  unsure (1)..(724): unsure at all n locations
nnnnnnnnnnnnnnnnnnnnnnnnnnnnnnnnnnnnnnnnnnnnnnnnnnnnnnnnnnnnnnnnnnnnnnnnnnnnnccacgcgtccgcccataccatcaattatcatttctctcttcgaagaagaagaagaagaagaagatatgggtgttgatttggatttggaatccatctccgaagccacctccggagccattggatctcttctcagcaccaccattttataccctcttgatacctgtaaatccaagttccaagccgagattcgtgttcgcggtcagcagaaatacagatatctgtcagatgtgttttgggaagcaatttcatcaggaaatgttctctccttgtatcaaggccttgggactaagaatttgcagtcttttatttcgtccttcatctatttctatagttatagctatttcaagaggttacattcccaaaggattggttctaagtctattggaacaaaggctaatctcctcattgctgctgctgctggtgcttgtacctctgttttgactcaacctctagatacagcttcatcgaggatgcaaacaagcgagtttggaaaatctaaagggttgtggaagacactaacagatggttcatggggaaatgcatttgatggccttgggatttcccttttattgacctcgaatccagcaattcagtatacagtgtttgatcagctgaaacagnacctccttggaaaaagggaaggcaaa

SEQ ID NO: 84007 - DNA, 402 bp, Arabidopsis thaliana columbia
  unsure (1)..(402): unsure at all n locations
gngaccgggccgggaattccctgggcggcccactgantccggcacacaaggatgatgaatgagagaaagagagaaagagagacagagataatggcgtacagtgcgtgtttcctacaccagagcgcattggcttcatcagccgcacgatcatcatcttcctcctcatcccagcgtcacgtgtcgctctccaaacctgttcagatcatctgtaaagctcaacagtctcatgaagacgattactccgccgtctcccgccgtcttgctctcactctcctcgtcggcgccgctgcttgtggttccaaagtatcttctgctgatgccgtctaccgtgatacttcatacgtgttttgtaatccttggtctataccttaccttttttcctttccattaggtaatagggtt

SEQ ID NO: 84008 - DNA, 550 bp, Arabidopsis thaliana columbia
  unsure (1)..(550): unsure at all n locations
tacggctgcgagaagcagaagggtacggccgcgagaagacgacagaagggcacggctgcgagaagacgacagaagggtacggctgcgagaagacgacagaagggtacggccgcgagaagacgacagaagggggaagagagaaagagagacagagataatggcgtacagtgcgtgtttcctacaccagagcgcattggcttcatcagccgcacgatcatcatcttcctcctcatcccagcgtcacgtgtcgctctccaaacctgttcagatcatctgtaaagctcaacagtctcatgaagacgataactccgccgtctcccgccgtcttgctctcactctcctcgtcggcgccgctgctgttggttccaaagtatctcctgctgatgccggcctacggtgaagctgcaaacgtgtttggggaagcaaagacggtcacaganttttttnccatacaaatgggggatgggttcaaagtngaaggtttccccaaaattggnnccccagnnaaagggttttngttttntnggcaanttcctttngtntggnngaa

SEQ ID NO: 84009 - DNA, 914 bp, Arabidopsis thaliana columbia
  unsure (1)..(914): unsure at all n locations
gatctcgaaagagagaagccaaaggttgaagttgagaatttgattttgcaaacagatggtttgaaatcgttaatcgggtgtttacatggagttgcttcaatggagaaagataacttatatcacacacaaggagagaagagagaaagagagaaagagagacagagataatggcgtacagtgcgtgtttcctacaccagagcgcattggcttcatcagccgcacgatcatcatcttcctcctcatcccagcgtcacgtgtcgctctccaaacctgttcagatcatctgtaaagctcaacagtctcatgaagacgataactccgccgtctcccgccgtcttgctctcactctcctcgtcggcgccgctgctgttggttccaaagtatctcctgctgatgccgcctacggtgaagctgcaaacgtgtttgggaagccaaaagacggacacagacttcttttgccatacaaatggtggtgggttccaaagtgcaaggtttcccaccaaaattgggtaccccacgccaagagaagttgtgatttatccaggacaaggctccttaggttcgaagacaacttcgatgctactagcaatctcaatgtcatggtcactcctaccgacaagaagtccatcactgattacggttctcccgaagagttcctctctcaggttaattacctnctagggnaacaagcttacttcggtgagacttgcctctnagggaggcttttacaacaattcagtngcaacagcaaacaattctggnggcatcatctcagggagtttggtngggaaccctccttattactttgcctgtgttgcaaagancggcttnttggggccgaggttggaggattantgtcanagaaccnttgattggggnggtttnattnaaaggcaagttgngcaagnggtnta

SEQ ID NO: 84010 - DNA, 689 bp, Arabidopsis thaliana columbia
  unsure (1)..(689): unsure at all n locations
gcgccacncttggngangcactcgtgttctgnatccaatgccatggcncccnccgccagancccacnctgatccgntccccgaagggtnccntcccagttaatccccctngggaacangcttactncggtgancctcctctggggaggctttgccaccaatncagtggcaccagcaaacattctggagtcatcatctcaggaagttggtgggaaacccctactattacttgtctgtgtttgacaagaccggctgatggagacgaaggtgggaagcatcagctgatcacagcaaccgtgaatggagggaagctttacatctgcaaagcacaagctggagacaagaggtggttcaagggagccaggaaatttgtcgagagcgcagccacttctttcagtgttgcttgagtgaaagcaacacaacgtaacaatgctctgcttgctttcttcatttgtctcttgtaaaaaatggaaaatgaaactgagcttttgagaactatcaagatgatgttaccttttcggcatcacttgtgtacctatgataacagactcgttttccaagttttcttaaaaaacaactatattcaatagatattttctcaaattaaaaaaaaaaaaaaaaaagggcggccnnnnnnnnnnnnnnnnnnnnnnnnnnnnnnnnnnnnnnnnnnnnnnnnnnnnnnnnnnn

SEQ ID NO: 84011 - DNA, 1182 bp, Arabidopsis thaliana columbia
  unsure (1)..(1182): unsure at all n locations
tcgcgggtcgacgcaagcctctaaacagacgtcctggaaaagacgacagaaggggaatcacacacaaggagagaagagagaaagagagaaagagagacagagataatggcgtacagtgcgtgtttcctacaccagagcgcattggcttcatcagccgcacgatcatcatcttcctcctcatcccagcgtcacgtgtcgctctccaaacctgttcagatcatctgtaaagctcaacagtctcatgaagacgataactccgccgtctcccgccgtcttgctctcactctcctcgtcggcgccgctgctgttggttccaaagtatctcctgctgatgccgcctacggtgaagctgcaaacgtgtttgggaagccaaagacggacacagacttcttgccatacaatggagatgggttcaaaggtgcaggttccagcaaaaatgggaccccaagcgcaaaaggcggattttggtttccacgggcaaagctccttaagggtttcgaaggacaaacttcggattggtttcttcggaattctcaatgtcatgggcaattcttccggcaaagaagtccatnactggttnccggttttcccggaagcggtccccntctcagggttaacttcccccctggggaaacccaangcattcctncggtnagacctccctttggggggcttttccaccaattcagtggcaccagcaaacatttctggagtcatcatctcaggaagttggtggaaacccctaactattacttgtctgtgttgacaagaacggctgatggagacgaaggtgggaagcatcagctgatcacagcaaccgtgaatggagggaagctttacatctgcaaagcacaagctggagacaagaggtggttcaagggagccaggaaatttgtcgagagcgcagccacttctttcagtgttgcttgagtgaaagcaacacaacgtaacaatgctctgcttgctttcttcatttgtctcttgtaaaaaatggaaaatgaaactgagcttttgagaactatcaagatgatgttaccttttcggcatcacttgtgtacctatgataacagactcgttttccaagttttcttaaaaaacaactatattcaaaaaacaataaagcgaccgctctagaggatccaagcttacgtacgcgtgcgttcgacctcataatcttcgaga

SEQ ID NO: 84012 - DNA, 697 bp, Arabidopsis thaliana columbia
gcaccggtttcggaattcccgggtcgacccgcccccccgcgcacaaggagagaagagagaaagagagaaagagagtcagatgataatggcgtacagtgcgtgtttcctacaccagagcgcattggcttcatcagccgcacgatcatcatcttcctcctcatcccagcgtcacgtgtcgctctccaaacctgttcagatcatctgtaaagctcaacagtctcatgaagacgataactccgccgtctcccgccgtcttgctctcactctcctcgtcggcgccgctgctgttggttccaaagtatctcctgctgatgccgcctacggtgaagctgcaaacgtgtttgggaagccaaaggcgaacacagacttcttgccatacaatggagatggggtccaaagtgcaggttccagcaaaattggaacccagagcaaagggttttggtatccagggcaagtccttaggttcgaagcaactttcggtgctacttgcaatctcaatggcatggtcactccttccggcaaggaagtccatccctgtttacggttctcccgaaagcggtccctctctcaggttaattacctcctaggggaaacaagccttactttcgggtgaggacttgcccttctgaaggggaaagctttttggacaaaccaatggccaagtggggccaaacagggctaaaaacattttcctggg

SEQ ID NO: 84013 - DNA, 624 bp, Arabidopsis thaliana columbia
  unsure (1)..(624): unsure at all n locations
nnnnnnnnnnnnnnnnnnnnnnnnnnnnnnnnnnnnnnnnnnnnnnnnnnnnnnnnnnnnnnnnnnnnnnnnnccacgcgtgcgcccacgcgtccgaaaatcattgactcttcgttcgtttcatctcccaattgagtttaacgacaccaaattcgtctcacggccttgtttcctggcgagatccttcccggtggttcgttgttcaagcaccagagacgtacctaagcttgaactcttcagccgcggaaaattcgaccggattcttcaagatccgccacttattgaaaaagccgtatccgaactctcagattactgttcgacgcttgaaggtgatgactcttacagttgctggagagcttactttgaactcaaagatctcgaaagagagaagccagaggttgaagttgagaatttgattttgctaacaggtggtttgaaatcgttaatccgggtgtttacattgggagttgccctcaaattggggaaaggcttaccaaaaacccaaggaaattggctttcaattgtagggggcaaggaatccggttttgggggggaaagggganttnatttttncccanatttnaaatntcccccananggggtttncccaaaaatttttnaacc

SEQ ID NO: 84014 - DNA, 1076 bp, Arabidopsis thaliana columbia
acgaccgctatggggtataagctggtacgcctgcaggtaccggtccggaagtccccgcacgcgccccatcacacacaaggagagaagagagaaagagagaaagagagacagagataatggcgtacagtgcgtgtttcctacaccagagcgcattggcttcatcagccgcacgatcatcatcttcctcctcatcccagcgtcacgtgtcgctctccaaacctgttcagatcatctgtaaagctcaacagtctcatgaagacgataactccgccgtctcccgccgtcttgctctcactctcctcgtcggcgccgctgctgttggttccaaagtatctcctgctgatgccgcctacggtgaagctgcaaacgtgtttgggaagccaaagacgaacacagacttcttgccatacaatggagatgggttcaaagtgcaggttccagcaaaatggaacccaagcaaagagattgagtatccaggacaagtccttaggttcgaagacaacttcgatgctactagcaatctcaatgtcatggtcactcctaccgacaagaagtccatcactgattacggttctcccgaagagttcctctctcaggttaattacctcctagggaaacaagcttacttcggtgagactgcctctgagggaggctttgacaacaatgcagtggcaacagcaaacattctggagtcatcatctcaggaagttggtgggaaaccctactattacttgtctgtgttgacaagaacggctgatggagacgaaggtgggaagcatcagctgatcacagcaaccgtgaatggagggaagctttacatctgcaaagcacaagctggagacaagaggtggttcaagggagccaggaaatttgtcgagagcgcagccacttctttcagtgttgcttgagtgaaagcaacacaacgtaacaatgctctgcttgctttcttcatttgtctcttgtaaaaaatggaaaatgaaactgagcttttgagaaaaaaaaaaaaaaaaaaaaaaaaaagggcggccgctctagaggatccaagcttacgtacgcgtgcatgcgacgtcagagct

SEQ ID NO: 84015 - DNA, 957 bp, Arabidopsis thaliana columbia
  unsure (1)..(957): unsure at all n locations
cannnnnnnnnnnnnnnnnnnnnnnnnnnnnnnnnnnnnnnnnnnnnnnnnnnnnnnnnnnnnnnnnnnccacgcgtccggcttaagagttttgaaaaatatcttcactagagatgataaaatcagtgactcttcgttcgtttcatctcccaattgagtttaacgacaccaaattcgtctcacggccttgtttcctggcgagatccttcccggtggttcgttgttcaagcaccagagacgtacctaagcttgaactcttcagccgcggaaaattcgaccggattcttcaagatccgccacttattgaaaaagccgaatccgaactctcagattactgttcgacgcttgaaggtgatgactcttacagttgctggagagcttactttgaactcaaagatctcgaaagagagaagccaaaggttgaagttgagaatttgattttgcaaacaggtggtttgaaatcgttaatcgggtgtttacatggagttgcttcaatggagaaagataacaaaaccaagaatggtttacatgtaggagaagaatcagatagagagaaaggaatgaatttgcacattcatattcctgatggtttaccaaaatttgaacaagagttggaggaagaagagaaatcgaaaatgccggattcagctttcactagattgcttagaagtaaaggaactatccctgcttggttctctcacgctcctgaccacgaaaccgactgaaagcggattacggattacggtacctttagaaagttgttatcttatcacagttatatgtaaatatagttcttggttttgctttagttcatgtagtctatcttttgttaagatgtgatcatattgccatagaaatgtggttgttattaacttgatgttcgccaatgttgaatttgtttaatgctgtgtgcctattatagtactacgcggttttggtttccgaagagtcaatctt

SEQ ID NO: 84016 - DNA, 423 bp, Arabidopsis thaliana columbia
atccgatctactggatcattgcttcttgcattcttaattggatctgttgcgacgattgttggaacagtggtggcttttatgttggtaccgatgagatcgcttggtccggataactggaaaatagcagctgctcttatggggagttacattggtggatcccttaattttgttgcgatatcggaggctctacagatatctccatctgttatagcagcgggtgtagctgtggataatgtcatatgtgctcttcacttcatggttttgtttgcgttggcctcaaagataccccctgagaccgcctcaagcatcttcccctgatgctgacatggctaaggttgccaagctcgaggccaagaacagagtggtttcaacctcaattgcactatcagtttccttcctgatatgcaaagctgcaattacgtt

SEQ ID NO: 84017 - DNA, 543 bp, Arabidopsis thaliana columbia
  unsure (1)..(543): unsure at all n locations
gagcttgaaacggaagaagctattcaagattctgatcggcaagatattaaaagcgagtttattgcaatggcatcaaccttatctaaagagatggaaatgatggaagcacagttgaaacggtggaaggacactgcacaagatgctctttacctgcgtgaacaagctcaatcgttgagagtttcgttaagtaacaaggcagacgaacagaagggtttggaggataaatgtgctaaacagatggcggaaattaaatctctcaaggctctaattgagaaactactcaaagaaaaactacagctgcaaaatctagcaagcatctgtacgcgtgaatgtaatgatgacaggggactggcagaaatcaaggattcacaacggaaagcccaagctcaggctgaagagctgaaaaacgtttttgatgaacactttcttgaattttagagtnnaagcgggctcatgagnccttagagttcttttccaanaaaggcttttttaccccccaaggcttnaantttcngaattttggggnccccccttanannnttt

SEQ ID NO: 84018 - DNA, 592 bp, Arabidopsis thaliana columbia
  unsure (1)..(592): unsure at all n locations
tacgactcactattgggaaagctggtccgcctgcaggtaccggtccggaattcccgggtcgacccacgcgtccgaaaaaaccttcggcttcgtctcgtcaatggcggccatttctgtaagttcttcaccatctattcgctgcttgagatcggcatgttccgattcttctcctgctcttgtatcctcgacgcgtgtatcgttcccggcgaagatttcatatctctccggtatatcttcgcaccgtggcgatgaaatgggtaagagaatggaaggattcgttagaagcgtcgatgggaagatctctgatgcgtctttctccgaagcttcatctgcgactccaaaatcgaaggtgaggaagcacacaatttcagtatttgttggagacgaaagcggaatgattaataggattgcaggagtgtttgcaaggagaggatacaatattgagagtcttgctgtttggtctgaacagagacaaggctctattcaccatagttgtctgtggacctgaaagggtctttagcaggtaatcggnaactccagaantcgtnaatgtctaaaggttnaagntttnnaagtncccnaagtggngtgc

SEQ ID NO: 84019 - DNA, 501 bp, Arabidopsis thaliana columbia
  unsure (1)..(501): unsure at all n locations
cgaaagatacgaggagtgaaaatggccatgatgatggtgaatcttctgcttctgctggcaaaactgtaaattatgactctcacgacgagacagattcagtttcaagcgtcaaccctgacaacggcaaggacaaggatcatgggaagtatgacagtggttttggatttggatttgggtttgatgacttcagtattaagcctataaaaactggttcgaccatttcaaatgacttcctccctcctaagttatctatatttcctgattccgtcccaagcccaccggcaaatgcatgcgacgtttcccctacaaaacccttcctttgtttgctgattcagttccgggcacttccagcggcggacaattgcctctttacccagggccagaaatcattttttgaatgacttggtcccgggcaacttctggttntccanggaactttgttttctgagnagnaatccttcttttncggntttttcccgngaaccccttgntttccaggna

SEQ ID NO: 84020 - DNA, 465 bp, Arabidopsis thaliana columbia
tgaagttaataacaatgaagatattctctgttctgttactactatgtttcttcgttacttgttctgtctcttctgaacccagaaaccctgaagtggaggcgttgataaacataaagaacgagttacatgatccacatggtgttttcaaaaactgggatgagttttctgttgatccttgtagctggactatgatctcttgttcttcagacaacctcgtaattggcttaggagctccaagtcagtctctttcaggaactttatctgggtctattggaaatctcactaatcttcgacaagtgtcattacagaacaataacatctccggtaaaatcccaccggagatttgttctcttcccaaattacagactctggatttatccaataaccggttctccggtgaaatccccggttctgttaaccagctgagtaatctccaatatctgaggttgaacaacaactcattat

SEQ ID NO: 84021 - DNA, 449 bp, Arabidopsis thaliana columbia
cggtgaaagatgacgtcagagtgatcgagggtcctagcaaaggtaaacttggtcctgtaaagcatatctacaaaggagtcttatttatatatgatcgacatcaccttgagcatgctggatttatctgcgctaaatgcacatcatgcattgttgttggtggatcacgttctggtgctaatagaaatggtggtgattcgctttcaaggtatggcaatttcaaggcacctgccccagtaccctcatctccaggaagatttcaacgtggcagaggcggaggatataataactctggagggaggcatgggggtggaagaggacggggagaccgattctttatttgggtactactgttaaaaatccgtcttaggacctttcaaggggtataggggacctgtagtagaagtgaaaggaaattcagtgcgtgtagaacttgagatgaagattgtgac

SEQ ID NO: 84022 - DNA, 474 bp, Arabidopsis thaliana columbia
  unsure (1)..(474): unsure at all n locations
attttcccgataggttagaagattttttatttattaacaaaattagatttaatacatgtcgatatctcatcaatcatatgagttaacaactttgaaaactctactttatatattatatatgtttgtattaaaattataacaatttcttcttcttctttttttattacaaataagaccaaaccaaaataaaaaggaaaaaaagaggaattgtgagctttaaaacaaggcatacttctgggtccagcttcgagccatggcttccatatttggtcttgtcagttttgtatatgtgagcnatcctgggcaccagaggggtcgtcaggggtttgggatctggttagaagagaagccatatagagagaagcacctataatacccaaatggttagtaattggggttacctatgggagctcctggggtaaatnccaancnggataatgggattataggaaaatatggccaatacctaatccc

SEQ ID NO: 84023 - DNA, 379 bp, Arabidopsis thaliana columbia
aaaataaactacctagctactttgtgaaatcccaaaaaattattacacattttgcccttttgtcatatgcgggtaaatgaacgctatcatacgatcttcaacaatcaatgttcatcatttaaaccttccatcgccgcaacatctcgatcatgatctcgttccacgtgtcgacaggaccaggtagacaccaatgcaaacaatcattaggaattctctccggtacaccgttcttgaacgggtccgcgtacatgtacggaccaggatgtccgcctggtctcagtaccgacatagccgccacgtccaacacctttaacctcaccttagccgcagccgccgtatattcctcaatttctattttgcgcatgtccaaggccagacc

SEQ ID NO: 84024 - DNA, 514 bp, Arabidopsis thaliana columbia
cttcgagtccaatgttggagcaacattctgcaaatgtgtaaacagtgttgtggcaactatattagctggatcactaggcattgctgttcattgggtcgccacacaatcaggaaaagctgaggtttttgtgattggatgctctgtttttctctttgccttcgcagctacttactcgcggtttgtgccgtcattcaaagccagattcgactatggagcaatgatctttatcctcacatttagccttgtctcagtaggcggttaccgagtagataagcttgtttgaaattggctcagcaaagaggtatcaactattgcaattagggaccatcctatttgcaattatcatttcctgtccttccttcttgtccggatttgggcaggatctcagcttcaccgtcttattgaacgtaacctcgaaaaacttgctgattcgttagacggctgtgtagcagagtactttaaggagaacgaagtctcaacgaatcgaaatgaagatgaaaacactaacatgaaa

SEQ ID NO: 84025 - DNA, 385 bp, Arabidopsis thaliana columbia
cgagaaacataatgatgagattgctgctcttgagacttgggatattgggaaaccttatgaacaatctgctcaaattgaagtaccaatgcttgctagggtgttccggtactatgctggttgggcagacaagatacatggaatgacaatgccaggagatggtccacaccatgtgcagaccttacatgagcctataggagtcggtggacaaatcatcccatggaacttccctcttctcatgctttcttggaaacttggaccagttttagcttgcggaaacaccgttgatctcaaaactgctgagcaaactcctctatctgctcttgttgttgggaaactacttcatgaggctggacttcctgatggagttgtgaatatagtttctgga

SEQ ID NO: 84026 - DNA, 558 bp, Arabidopsis thaliana columbia
  unsure (1)..(558): unsure at all n locations
atagaaaagatagaggcattacaagataatcacaaaactggagataagattcagatgttttctctgatgataaacaagattcaaagtttctttataaactattgaggaatataagattacaatatacgagtctcacaagataaaagttaacgttcattagaacagtatcacggttgcacaaacttggctaataaggccaggtccagaatcttgacgtcaagattatcatctatcttaacgataccgtcagacccgtcgattccgatcagcttacctgtagacccacgatactgaccgccaactattttgacacgatcggatttcctcggagggaattatctccagttcgcttggggagggccattatagtggcaccttcaccgctggacccgagagacactttacacggtccatccgaaacatctcgggtgacgnccacatcggggtcctctccagccttgggatgcanccaaaaatcgggatgaccaggttcagatccccctatacagggcatgcatcgggcagtccagngcatggtgccccgggaccagaagatga

SEQ ID NO: 84027 - DNA, 576 bp, Arabidopsis thaliana columbia
  unsure (1)..(576): unsure at all n locations
ctctagatacattgtagatcccaatcatgatgtggtttctatcacttgcttttagccttaaaaggggaaaccatgccgaagaaaatttcggatacagaactaagcaaaatcatacactaaaggcttatatatacacatgaaaacttcttcggtttaaaatcttcatgtatgatgagttttcgatgtgtaattgaaagtgatttaggaacttagtggtggttgtttagtgttgttgtctccggttttctttttcgaatcttgttcgaaatctgcaagatttgccagttcatcgactgcttcaacggctggttgaattctagctgcgttttcgattaacaacgaaaccaaagtggcaactggaaggacctcatgtaggctcatggacgtggtcncnctccgctgnctacttggtcncccctcagatggactcctcaggctaatgggtcaatggacaattttnaagtctgagccctgactgnggtcaacaaaccagaaccacctcgggnttcccgggcncacaaccgaanccnaggttganacggccgtcnaagccccganggctgccggcgggcctnt

SEQ ID NO: 84028 - DNA, 522 bp, Arabidopsis thaliana columbia
  unsure (1)..(522): unsure at all n locations
aaacacacaaaaacaaacttcaatgtatgtgaaaaagggttaataagacacttatgatttgtttggggtttaattaagtggcaactgtttatttaccaatgcaaaacttagcaaaaatggaagataaaacctcttcagagacatcttgaccactgatttgagcaagagataaagcagcttctctaagctcgatcgtccagaaatcaatcggaatctcgtcttcgatagcttctctcagcctcactagcgcttctttcgtccgcaccaattgctcgcattgtctctgattcacagtccattgatgtcctccagtggggacacgatcaagaccaagaatctccaatattgcatcttcaagctcgtcaattccttgaccagttacagcagaagtgaagacagccttatggaacttctccctttncccggactccaagtgatcanagtancagggggggcagcaatttgtcacncnggatcaaggttgcnnntgggttacgnaagcngggnttttagccanctgaa

SEQ ID NO: 84029 - DNA, 459 bp, Arabidopsis thaliana columbia
  unsure (1)..(459): unsure at all n locations
aatctcccccttttgttcattataattttgtgtctccctatcaaattttgtatccctagtatagctaccggcattacttttcccgctaaaatcatcccctggacgctcaaacttggcatccctgtcactcttaggaccctgaatctccctcttagtctcaccatacatctctctcccatcattcctagtatagcttccggtattaccttttccgctaaagtcatctactgatctctcaaatttcacatctctgtctcccttaggaccctgaatctccctctttgtctcaccatatatctctctcccatcactcctattttctgctactctcaaccctaatttccctgccatccttagcaccaatctctcggctccatcggcacaaggggggggggcaaatgggggtcctagaagnaaaggtgnggggagcgagggggccggtnngnaagaggnaggggg

SEQ ID NO: 84030 - DNA, 458 bp, Arabidopsis thaliana columbia
gtgaaaagggttctggtgattccattattgtacctggctgctaacatttttgtttttcttttaaaatcaagaaaaaagttttgattaatcaaaatcgacgccaactaaaaacacgtgtcaaaacgtggttggtgacagtgggatatgagactgtattataaaaagctacatttctcaccaccacccaatctctctctcccttgaagtagactctaagctaaagccaccgtcagattttcagatctcagatctcagctcttcattcgacgccatggccgagaagggcaaagaaaaggtaactatgatgaagttgaaggtggatcttgattgtgccaaatgttacaagaaagtgaagaaggttctttgcaagttccctcagataagagaccaattgttcgatgaaaagtccaacattgttatcatcaaggtggtttgctgtagtcctgagaggatcatgg

SEQ ID NO: 84031 - DNA, 698 bp, Arabidopsis thaliana columbia
  unsure (1)..(698): unsure at all n locations
nnnnnnnnnnnnnntacaactcattttgggaaggctggtccgcctgcaggtcccggtccggaattcccgggtcgacccacgcgtccgcggacgcgtgggcggacgcgtgggttgaagtagactctaagctaaagccaccgtcagattttcagatctcagatctcagctcttcattcgacgccatggccgagaagggcaaagaaaaggtaactatgatgaagttgaaggtggatcttgattgtgccaaatgttacaagaaagtgaagaaggttctttgcaagttccctcaaataagagaccaattgttcgatgaaaagtccaacattgttatcatcaaggtggtttgctgtagtcctgagaggatcatggacaaactctgttccaaaggcggcggctcgataaagaccattgagatcgtcgagccacccaagcctcctcagccacaaccccaacaaccacctcagaaacctaaagatgctcagcctaaagctcctgagaaggcctaaggaacctgaaaagccaaaacagcctgaaaagcctaaagagccagagaagcccaaacagccagaaaagcccaaagaacccgaaaagacgaagcaacccgcacccgctccagctcccgcaccagcacccgcagccaaacccgcacccgctcccgctccagctcccgcacctgccccgaagcagccgggaccgcc

SEQ ID NO: 84032 - DNA, 293 bp, Arabidopsis thaliana columbia
gaagaaaaagctgacatggcaaagtggtgaatctagagtgaccaatgtgaatgtgacaaataagcctttagtgaagagattaggatgctcatgagccacaagttataatgttatatattagcttatatcaacatcacttccagttaccaagaaataaatctttttttttttgtgaattgtggagtaatcttgataagttgagtttttcagttgctcactgaaacaatattgccaaaattgtaatttaattctttggggaaattattacatccatgaaatgaatatttactccc

SEQ ID NO: 84033 - DNA, 465 bp, Arabidopsis thaliana columbia
caccattggatatagagtcagttattaacaaaataaccagcatgtttcatagacgtagaaagtgcattagatacagcaaactatgacaagcttcttcaaagcggattgcagatagctattgttggacgtcccaatgtcgggaaatcaagtcttctaaatgcctggagcaaaagtgagagagccattgttacagaagttgctggaactactcgagacgttgtggaagctaatgttacagtccgcggcgtgcctatcacacttcttgacactgctggtatcagagaaaccaatgacattgtcgaaaaaataggagttgaaagatcagaaacagctgctaaggttgctgatgtcataatcatggctgtgagtgctgtcgaaggctggactgaagaagacactgagcttctacgtaagatccaatcagacatgcctatgattctggtgatgaacaaaattgactgtgct

SEQ ID NO: 84034 - DNA, 571 bp, Arabidopsis thaliana columbia
  unsure (1)..(571): unsure at all n locations
attttttttcacatacttctttgtagtgctactttccattatatcaaacactcagcaacctgatggcaacgagacggatattgaaagaattgaaggagttgcaaagagaccctcctgtatcatgcagtgcaggtccaacaggagaagatatgttccactggcaagctactataatgggtccgaatgaaagtccttactccggaggtgttttccttgtcaatattcatttccctcctgattatccttttaaacctcccaaggttgtattcagaaccaaagtgtttcacccaaacatcaacagtaatgggaacatatgtttggacattctcaaagaccaatggagccctgcccttaccatttctaagggtgcttctctctatatggtccccttctaacagatccaaaccctgacgggcctctgggtgccagagtagccccattttcaaaacgggcaaggccaaatttggggcatgggtgaagtgggcccagagatgcctggtttaaggcaaatcccctttttcctttaattgggnggctntgaaaaaagggggngattgttattatcaccttt

SEQ ID NO: 84035 - DNA, 1871 bp, Arabidopsis thaliana columbia
atttctgggtttaagctgatctctggatcttcctcaattttactttttcagctcagaaaattttgggacttttttttgctgcattttttggttccgaattttctcctcctccttttttaatttttgagaatggatggatcaggcacaggcagtagaagtggggtagaatcgattctaccaaattacaagcttgggagaactcttggtattggttcctttggtagggtgaagatagctgagcatgcattgacaggacataaggttgctatcaagatcctcaatcgtcgcaaaatcaagaacatggagatggaggagaaagtgaggagagagatcaaaatcttgagactatttatgcatcctcacatcatccgtctctatgaggttatagagactcccacagatatttatcttgtcatggagtatgtgaactctggtgagctatttgactatattgttgagaagggtagattgcaggaggatgaggcgaggaacttttttcagcagataatatcaggagtggaatactgccatcgaaacatggtggttcacagagacctcaagcctgaaaacttgcttttggactctaaatgcaatgtaaagattgctgattttggcctgagcaacataatgcgagatggtcattttttgaagacaagttgtggaagtccaaattatgccgctccagaggtaatttcgggcaagttatatgctggccctgaagtagatgtctggagctgtggtgtgatactctacgctcttctctgtgggacgcttccatttgatgatgaaaacattcccaacctttttaagaagataaagggagggatatacacattacctagccatttatctcctggtgctagagatttgatcccccggatgcttgtagttgaccccatgaaacgagtaaccatccctgagatccggcaacacccttggttccaagctcatcttccgaggtatttagctgttcctcctccagatactgtgcaacaggcaaaaaagattgacgaggagattctccaagaagttatcaatatgggatttgacagaaaccacctcatcgaatcgctccgcaaccgaacccagaatgatggcactgtgacgtactatctgatactggacaatcgtttccgtgcctctagtggttatctcggggctgagtttcaagagaccatggaaggtactccccgtatgcatccagcagaaagcgttgcttcacctgttagccatcggcttccaggactgatggaatatcaaggagttggcttgagatctcaataccctgttgagagaaaatgggctcttggacttcagtctcgggctcatccccgtgaaataatgacggaagtcctgaaagccctgcaagatttgaatgtatgttggaagaagatagggcactacaacatgaagtgcagatgggttcctaacagcagcgcagatggtatgctcagtaactcgatgcacgataacaactactttggagacgagtccagcataatagagaacgaagcagctgttaagtcgcccaatgttgtcaagtttgaaattcagttgtataaaactcgggacgacaagtatctactggatttgcagagagtacaaggtcctcagttcttgttcttggatctgtgtgctgcttttcttgctcagctccgagtcctctgaatactaaaccggacctcttcaagaataatccccacttattccttttttttttttttcttattcgtctaagaaattatttagaaaacgtaaccctttttttcttcttctctttctttctatttctatatgcgtgctctactcaaatacctcttttaacttaaatgtaagactgagcaagagtaaaaaaaagacactttgtacat

SEQ ID NO: 84036 - DNA, 561 bp, Arabidopsis thaliana columbia
acaaaagtctgaagcagagagacatacttacatatgtgtgattcttccctaagaggaattctcaaaaatcaaagcatctctcctcttcttcctaaacgtcgacgagtggagtccttggcgcgatcaagattcaaaagaaattcggggactactactactcaagactaaataagataggaaatgggttgatacaaagaagttgtccttttaagaattccatcactaggagttggaaagtctgaaccagagactttggtgtgcttctccaaaaacgacgagagtccagcgtctagcagtatcaagcaactctcttcttactagattctttcacaccatcaagaggagccattatggcaggggaacttgtgtcgtttgcagtaaacaagctttgggacctactgagccatgaatacacgctatttcagggagtcgaagatcaagtagctgaactaaaaagtgatctaaacttgctaaagtcgtttttgaaagatgcagatgccaagaaacacacaagcgcattggtgagatactgtgtggaagagataaacgatattgtttatg

SEQ ID NO: 84037 - DNA, 464 bp, Arabidopsis thaliana columbia
  unsure (1)..(464): unsure at all n locations
ggcgaggattcttatgtcagagaaatgtatttgaagggacgaatgtttttcctctatgttcatagctacctacattacgggttactggctgctcgggctgagattttgaaagtttctgaggactctaacaacccctgtatcgcgactggatatgctggtacctacaaatatggaggataagcgtttaaagctgcagcttctccatccggtgcaagtctagatgagtgccggcgagtagctattaacgcactcaaagtcaataattcattgcgtacacacatgaaatgcacttttggtggagtatggaatggtggaggccggtngttgnccagaaaggaaaattnttttgtttgcaanaattttttctttcggatccgagcccncagaaggcttggtttttttttngcccccaacccaaccctttttggctttagggttctgncccnctttgnnctttttngnaa

SEQ ID NO: 84038 - DNA, 531 bp, Arabidopsis thaliana columbia
caggtctctacgactcatattgggaaagctggtacgcctgcaggtaccggtccggaattcccgggtcgacccacgcgtccgcccacgcgtccgcggacgcgtgggcagccacactggctcctttaaagatctgggcatgagtgttctcgtttctcaggtgaatcgtctccggaaaatgaacaaaccagtcatcggagttggttgcgcttctactggagatacctccgctgctctctctgcttactgtgcttccgctggaatcccctcgattgtcttcttacctgcggataaaatctccatggctcagcttgtgcagccgattgcaaacggagcgtttgtgcttagtattgacactgattttgacggatgtatgcatttgatcagagaagttacggcggagcttcctatttacttggcgaactctctcaacagcctccgtctcgaaggtcaaaagacggcggcgattgagattctgcagcagtttaattggcaagttcctgattgggtcattgttcctggaggcattcttgg

SEQ ID NO: 84039 - DNA, 491 bp, Arabidopsis thaliana columbia
  unsure (1)..(491): unsure at all n locations
ctattaacagaccgccatcaaagtaaaagcacacacaaagaatatgattactgcggggtgtgttagcagaaatcataatctaagatttcaccccactatcactaaaagggcagagaaacaaaaaacaaaaacaaaaatctagtgtctatgggtcggtagaccgtaggttacagcaaatcacaaactcctttggtctctcatatcactgaggtttctatacaaagatgaaagaccaaaccaacctaaatgagaacaataagcctacactctctttcactgtgttagtcaaagtaccaatgcatctgttgtttggatattacaagccaccatagatatcactgttgttgaagaagccatcttctggagaaaatcatgggtccgtaaccgntatatcttctgaaaaagggagggtggttgtttgaagatgctttaaaactattggatgcggctgggaactcggctcctcctgagatattggaagagagcagttg

SEQ ID NO: 84040 - DNA, 497 bp, Arabidopsis thaliana columbia
  unsure (1)..(497): unsure at all n locations
ttcccgaagagaatccaagcatgttttctctataatgaatgtttggagttacaactagaaatagagaagaaaatcggatgaaactagttcaagatattggcaagttcaccattttcatacattgaggtcaaaatatcacatcctcctacaagttctcctttcacaaatatctgtggaaacgttggccaattgctgtagttcttaagcgtctcccttagcccatgattatactcatcgtcaagaacatcaacagtttcataatcaactccttggctttcaagaatcccaacaactctctgtgagaatccacattgaggagcactccttgatccttttatgaaagctaccactttgctctctttcactaaacggtcaatcagttcccccaaaggaaccgtgagctcaacatggcgacctggagtgagacgggtatcgggttctccncggggtggttgcaangggtgtcctgctatnccggggnatttcagtacttanag

SEQ ID NO: 84041 - DNA, 828 bp, Arabidopsis thaliana columbia
agaacattctgcaaagaggcaaagtttgttggaagagatcgaacgtgagtttgaagctgctacaaaagaacttgaacaactaaaggttaatgacttcaccggggacaaagatgacgaagaacactctgcaaagagaaaaagtatgcttgaagctattgaacgcgagtttgaagctgctatggaaggcattgaagcacttaaggtttctgattccacaggaagcggagatgatgaagaacaatctgcaaagagactaagtatgcttgaagagatcgaacgggaatttgaagctgcttcaaaaggtcttgaacaactaagggctagcgattcaaccgcggacaataacgaagaagaacacgctgcaaagggacaaagtttgttagaagagatcgaacgagagttcgaagctgctacagagagccttaagcaacttcaagttgatgattctactgaagacaaagaacactttacagctgcaaagaggcaaagtctgctggaagagattgaacgtgaatttgaagctgcaacaaaagatcttaaacaactaaatgatttcactgaaggcagtgctgatgatgaacaatctgcaaagagaaacaaaatgttggaagatatcgaacgcgaatttgaagctgctacaataggtcttgaacaactaaaggctaatgatttctctgaaggcaataataatgaagaacaatctgcaaagagaaagagtatgcttgaagagatcgaacgcgagttcgaagctgctattggaggtcttaaacagatcaaagttgatgattccagaaatcttgaagaagaatctgctaagagaaagataat

SEQ ID NO: 84042 - DNA, 481 bp, Arabidopsis thaliana columbia
  unsure (1)..(481): unsure at all n locations
nnnnnnnnnnnnnnnnnnnnnnnnnnnnnnnnnnnagacaaaagaataaggcacacacatttatattcaaaaactaagaacataggtcacacaagaaagatgcatacatcacatggcaaaacaaaaaaaaacaaaaaaatataaagcctggagagcagatgccaaatttttaactatataatttggcatttatagcttaagagaaaatacataatgggtgtagataaaacagtgatagtactgtaaaaataaataaaatagtacatttagagagactttacagctagaaaacgaggctctttaggcatgaacttctggtttgcataaacatccatgtaatctccaaacacaaactttggatacttcttctcacttccttcctcttccgccaccgcggctggccctatcgccgccttgtacgacggattgtagaaggaagctatagaccttctgtttccttccgccctcgccaacaacctgt

SEQ ID NO: 84043 - DNA, 424 bp, Arabidopsis thaliana columbia
ccccaacatcgctgttccaacacagcttgacgctctcatagcttactacttcaacacttcttggtcagcggataatcctctatggtctacaacggctacgcagcccaccgatggctctagaccagtaccaccgccgatttcgtcagaacaagtcttcttcacaaacccacttcaacaaaatctgagaacagttccaaacacaaacacaactagtcccatttgttccgtcccaaccgacaagaaaaacggtcttgcgacaacacggaatccaaagaagagatctcgagtctcgagacgagcgcctacgactgttttgaccaccgacacatccaacttcagagccatggttcaagaattcacgggtaatccttcaactcctttcaccggattatcttcatcttttccaagatcacgatttgatctc

SEQ ID NO: 84044 - DNA, 503 bp, Arabidopsis thaliana columbia
  unsure (1)..(503): unsure at all n locations
gcttgatatcgaattcgcggccgcgaaaagcgaaggaagtaatggatctcctagtacaagtccagcagctacacttttcaatgggattaagaagagcacttctaaatggcagctaaaagggaaaaggaattcaaggcagatgagtaaaaaacaagtagaaagaagaaatgcgtacgccgaagaagccaacaacaatgctttacctcattggtctgtctctgatcaaaagccacgcagtcttttcagcgttggcactcaagctatgggaagaaattctgaactgtatgacgtgaagatcgaggtaaaagctaactataaaccccgtaatgttccgctgatttcccttaggagtaaactgaatggtgaagctattgtcgggcatccttcaagtggttgaagtgcttgaaggtggatccatgtggccacattgttgagtaggcataggattgatgatgcgaccaaaaccctcatcaaaaangnatccanggaangganccccattt

SEQ ID NO: 84045 - DNA, 531 bp, Arabidopsis thaliana columbia
  unsure (1)..(531): unsure at all n locations
ggttggcctctgagaaagctgatgttggaccttatggagcttgggaaggtgaaacacctcaagtgtttatgactcccaaactagtgaacaacgagagtgaagctggcacagattcagtgcccttaaaaccagttgaacaggcattgattttggcccagtgccttctaattgaaaggggtagtcggcacgatgcaatgcaaagttgggatatggctccatatattgaggcaattgattctcaaaagtcaacctattttgttctacggtgtttttgtgacttattgcgtgttcgatgggaatcatctcgatatcgtacaagggaacgcgcccgggatatgatggataagcctggttggagctattagcaagagcggtccctgggggtatcaaatcggtcccctttatgctatgcagtgtatcttccctactattccctgctttgagaaaggaatttggggggcttctggtgagttgtgggtatgttggggaagcaatcccaatttttggcacccggaattnggaaanaattga

SEQ ID NO: 84046 - DNA, 558 bp, Arabidopsis thaliana columbia
  unsure (1)..(558): unsure at all n locations
atgcaaaagctaaactgctaaagtttttaataaatctgaagaaaagagtttgataaatctacgaaaatccaaagcctctagagcgttgaccagatagttagagactaaagtcaacgatcaggttcaaaaacacaaaagcaaaaaaaaaaaaaagagagacataaatcgaagggatgagttatgtaagtctagaatttctggatgacgacggcattagctataccagcttgctcgatggtttggtccaattctgtcaattgtttaggagggaaccccatggttagcaactggtactctttggagccaccgggtctaagaagcgtcgataaacccacggtacatctctgacagtgtgggtggttgttgaacctgggagaccaaggcgtgttccgtctgctaatctgagctggatagaggttgtcggtgctgctggttctacaactagcccnccttgatngngctggtgcacgtcnattgggnaantgnaancttnngggntgactttaancanaccgctngnccaagggtctccccaacctganngntttaggttggaat

SEQ ID NO: 84047 - DNA, 748 bp, Arabidopsis thaliana columbia
ggaagagctggcccgcctgcaggtaccggtccggaattcccgggtcgacccacgcgcccgaaatctctcaaagtaagaactaagagctttactacagtcctactctctacacatcttctctctctctcaagagctagtcatggccaaactcataacttcttttctcttactcacaattttattcactttcgtttgtctcactatgtcaaaagaagctgagtaccatccagaaagttatggaccaggaagtctgaaatcataccaatgtggaggacaatgcacaaggagatgtagcaacacaaagtatcataagccatgcatgttcttctgccaaaagtgttgtgctaaatgcctttgtgtccctccaggcacgtacggcaacaaacaagtgtgtccttgttacaacaactggaagactcaacaaggtggaccaaaatgtccataaacaaaaacattgagagagaaaccccaatctgtttcctattttatttaattatttccagtatgcttttgttgtcgtgatggttaaattatagtgtttttgcaggtatcatttatcatcgataaacaatatcatataaaatcttctatgtttctttcacgttttgtttcttttgttgtagtcaatacacgaaatgtgtatggaccttctaattaggaatatataaaattttatttattaaaaaaaaaaaaaaaaagggcgaccgctctagaggatccaagcttacgtacgcgtgcgtgcgacgtc

SEQ ID NO: 84048 - DNA, 514 bp, Arabidopsis thaliana columbia
aaaaaaaacaatctagcaacagaagaagcttcgagaagacgatggcgacggagacgaacgagaatctgataaactccttcatcgagatcacttcttcatcaagagaagaagctaatttcttcctcgaaagtcacacttggaatctagacgctgccgtttcaactttcctcgataacgatgccgccgcagccgccgaaccaaaccctaccggaccaccaccaccttcttctactattgccggtgcacaatctccttctcaatctcactctcccgattacacttccgtctgaaacctcttccctctccttcccggatcacggtcttgcttctccgtcttctcgcgcgttgctcccttacggtctccgatcgagaggcggtgctggagagaataaagaaactgagaatccgtcgggaattcggagttctaggagtcgtcaacacgctgggaatatccgtacattcgccgatctgaaccgttctccggctgatggcgagggcagtgattcggatgaag

SEQ ID NO: 84049 - DNA, 340 bp, Arabidopsis thaliana columbia
ataaaacatttttttcttatcattaatcagcaatctttatttttggggaaagtaaaacaagattatcattgacacttcaacattagagattctacaatccttttcataaaactggtctctatgacaaatcagagcaaatcttggaaatgggctctactcctccttcttcaacacagtctcagcaggagcatcatcactcttatcaacaacggtcttcccaggcgttggggttacatgagcatcttgctcaacattctctgtgggttcagagacagatgcggtttcaggttctgaaccagccactttgacagtaccaaccttagcatacttgctcatgaac

SEQ ID NO: 84050 - DNA, 605 bp, Arabidopsis thaliana columbia
acgcgaatctctcttagggcttcgcttatatcgcagatcgaagttcttgtttccaatcgccgaccgtataatctgataataaagtaagatgtctgctactccggaagaagacaagaagcctgaccaaggagctcacatcaatctcaaagtcaagggacaggatggtaatgaagtcttctttaggatcaagagaagcactcagctcaaaaaactgatgaatgcttactgtgaccgtcagtctgtggatttcaactcaattgctttcttgtttgatggtcgtcgtcttcgtgccgagcagactccagatgagcttgaaatggaagatggagatgagatcgatgcaatgcttcatcagactggtggtggtgctaaaaatggcctgaagctcttctgcttttagtggcggttattttaatggttttccataagattgtgtgatattaatggatttagtgaatcggctttagattaaatttggcaggctttgttttactttgaccagtttctacttactggtgaaagtctatgtgaatcatgaaacttattggatcttaaaatattaatgggcttgtttatggaaaaaatataaataaaaaaaaaaagga

SEQ ID NO: 84051 - DNA, 755 bp, Arabidopsis thaliana columbia
  unsure (1)..(755): unsure at all n locations
ggtccagaattcccgggtcgacccacgcgtccgcctttttatattcatctctcagcatcattctttgattgtgtgaatctctcatcgttctctcaaatttcgtgtttttgtaaccggacggagaacctttcacgatgtctgcaaaccaggaggaagacaagaagccaggagacggaggagctcacatcaatctcaaagtcaagggacaggatggaaacgaggttttctttaggatcaagagaagcactcagctcaagaagctgatgaatgcttactgtgaccggcaatctgtggacatgaactccattgctttcttgtttgatgggcgtcgtcttcgtgctgagcaaactcccgatgagcttgacatggaggatggtgatgagatcgatgcgatgctccatcagactggtggcagcggtggtggtgctacggcctgacacttcgtccaggtttagggcttgtgtgtgatatgaatggttaaggagtaatcggcattaggatttgcagacttgtttttttatcgtgaccattctctttagaaactaagttattatggtcacgaaggttaaagaaccctttggttgattttttgtcttgttcgtttggtatcggatcctatgatactactatttcggcttaaaggtgttattaacccaaaaaaaaaaaaaaaaaaaaaaagggcggccgctctagaggatccaagcttacgtacgcgtgcataacaagtcatgnnnnnnnnnnnnnnnnnnnnnnnn

SEQ ID NO: 84052 - DNA, 511 bp, Arabidopsis thaliana columbia
attttttaattgcatgagaattagtttgttggcaccgatgaagcaacaacttgtgtaggccttgttatccgcaacagaaaatctggaatgacgtctgttgcacacatggattcgccagagattgtggatttggggataagccagatgttgttattggttttacaggatgacgtagatgccgagttagatgtacatatggttggtggttatgaagatgtcgacataaaaaatgctgatggtgttggtgactatgccaaaccagagggttattcatttccgttgtgttgcaaattagtaggaacttttgcagaaggggaggggaaactttcacattcaaaccctctttattcttggggcacaatacccaggttggtttcccaagcaaacacgggccccatttttaatggatgcctggtgaataccagcaccggtgcaatcttgccagccagtttcaacagaacatctagatgtccggatgagatcgttagaagaattcgagtttcatcatcgg

SEQ ID NO: 84053 - DNA, 1274 bp, Arabidopsis thaliana columbia
  unsure (1)..(1274): unsure at all n locations
acgcacaccatagaaatacaccacacaccccccacaacaccagaacccccacacaaccacaaccacaccagccgcagacctcaccccaccacgcaccccccccaacaccccacccctccacacgcacacaaccacatttgtagaagcctcggntcggcaagccacccctccggaattcccgggtcgacccacgcgtccgattagtttgttggcaccgatgaagcaacaacttgtgtaggccttgttatccgcaacagaaaatctggaatgacgtctgttgcacacatggattcgccagagattgtggatttggggataagccagatgttgttattggttttacaggatgacgtagatgccgagttagatgtacatatggttggtggttatgaagatgtcgacataaaagtttgtctctagattttctatttctcagtcgacttagttctaagctgtagagaggtctttagctgaatgtcttgaccgttatgtgcagaatgctgatggtgttggtgactatgccaaaccagagggttattcatttccgttgtgttgcaaattagtagaaactttgcagaagagaagagaaaactttcacattcaaaccctctttattcttgggcacaataccaagttggattcacaagcaaacacgtgccccatttttaatggatgcctggtgaataccagcaccggtgcaatcttgccagccagtttcaacagaacatctagatgtccggatgagatcgttagaagaattcgagtttcatcatcgtttgaagattctagctggaagggaaagttacttgacacatatgacacaaaaactgatagattcatcatcgcaccatgccgctggacaatgcgcttgattgaatatgtttggggacttaatcagcttactgatgaaggaatcctcactaactgttccacctcancttctgctgaaggtccagactttcgtaaacagtttaaggagggttagtcatttttggaagntttccactnggtccattatcttggnccacaaacagggcataggggaaattttgcaattcccctttcctttttgtggggntttagggatttgggggtntttcctgaaatatcccnggatggggcaaaacattncccagggggganccncgggtgtttttaaaaccttnggtgggncctggnaaantctgcttttcaccaacaccntggcatttnccgaantnggtnaaancgggtgggncannattgggttttanngcaagccnctgttttttggc

SEQ ID NO: 84054 - DNA, 694 bp, Arabidopsis thaliana columbia
  unsure (1)..(694): unsure at all n locations
ctctaatacaactaactttagggaaagctggtacccctccaggtaccggtccggaattcccgggtcaacccacgcgtccgggggtgctgccggatgcataatttggatggttattgctgaagtgcttcctgatgcttttaaggaagcgtctccttcgcaagtggcatctgcagccaccatatcagtagcatccatggaagctcttagcactcttttcgagagtttcacacatgattacaactcagaggatgcttctggcttcttcgtttcactcctctttggtctgggtccattgcttgggggagtatttctggttgcatcggcagtcaccttccgtctccagcacgcccttctcatgggagttgcctcaggcattgcttttgtccttggtctctggcgcccacttcaactgctgctatccgcaaaaatgggattaatccctctggttagtctacttgcaattggagctggactgagccatttcactagctcaaccatcctgaatgtaacnggtcggaaaaagtcccgggctggcagtttaataaacccagtaaccaaattttccaaccagtgtggtaacactccaatcattatttagcgtntngagcggttggggtncatgcaattagccgagggggttnctctcgggggtggctgctccaaatgnttatggccttggcgncaaantggtttc

SEQ ID NO: 84055 - DNA, 675 bp, Arabidopsis thaliana columbia
tatcacgtcgcatgcacgcgtacgtaagcttggatcctctagagcggccgccctttttttttttttttaaaaagataatccccattacattatatcacaaattaggtcgaaaaaagaataactagcagagctttacaaattacaaaccataaggcaaagaagagtgcccacaacacaaattaagttgtagaaaagaaatccacatccatcatcatcattatcatcctaatgtaataataactcgatataaaaaataagaaatattaaaagagagaagaaaaagaaaacactaccataaaccaccaaccaaaggaatcatcatcagtagagagcgaaaaggccaccaaccaagaacacatttcagatttcatgaaaaatattaatgaagccgaagtggagcagtgaaattttcgtctaccaaccgtggaagaagaaggaaaagaaagacttccactactactgcatcagacaggaattgcatctacgttcgatgaatcttcgcatctcaatacaattccttcaagacttgcagggaatgtgcacttactccattgccaaccagctgctaatggttctgtcgtcgggactatcattaacacgttatcgtttctctgaaccactccaatcacacttactgtgcttccttctttgatatacccttctttaagccgcatt

SEQ ID NO: 84056 - DNA, 410 bp, Arabidopsis thaliana columbia
  unsure (1)..(410): unsure at all n locations
ggaaatgataaattctaaatttctaaaacagagataaaacattacagagggagttggggaagaacaagaaggttcattcatgtatgtacactttgaacaatgcgacttaaggcttcattgttgtaagaaaaaaaggacaatcatatgctgaaacatttgcgtgtcaagcggcagataacgctcctagtacacccttatctaccgtagttaagcgacctcagattgtaatgatcaaggacacgaccaaaaattacgccctgccatggtccccacaaattggcagctacaacacgaacctttttatttccaaggaaggggcatngggngccggggcagggaaaaatgggcggtatcggggnacnggttttaaaaggtcaccngtttgccnaaggnnngccacccngnntttc

SEQ ID NO: 84057 - DNA, 507 bp, Arabidopsis thaliana columbia
cactaatggagcatcatgtcaaaacttgccatggttcagtttcagttgtagtatatggagatcaagagaaaccagcattgatcacttatccagatgtagcactaaactatatgtcttgtttccaaggattgtttctatgccctgaagcagtgtccttactgctccataatttctgcatctaccatattagtcctccaggacatgaggtttgcagaattgattgtcttgaaacaattcattattctcctttggaatctccccttgcggtttgctcacggttgtgttgggccccatcgtttccacaagagtttttgcagttggggggctgccccagtttgctccaatgatccgtcaccttctgttgaagacctcgcggaccagattcttgaagtattgaacttctttagcctcgaggcagtaatgtgcatgggaatcacagctggtgcctacatcctttccttgtttgctattaaacataaagaacgagttttgggtttgattcttata

SEQ ID NO: 84058 - DNA, 512 bp, Arabidopsis thaliana columbia
aatattttttgtaatatactcaatggcattctccaaagataagacgtcgaggtactcagaacacgtggatgcttacagagccgcctgtggacaccacccagacctcaaatcctttgattctaagattcagcagcgaacctccaatctgatagactcgctcaccgttgaagccaagactgggtcggtgtccccacacgcggtacacaaggaggtcattgagcacctagttgaagtaagcaaatcggtagcagacgtcattactgaatgcggagaagaagtgtgggagaacggaactctacaatctctggtcaaggactattttaacagtaccattggagacttttgaaggttttcggagactgttaacgcaattgcgtccattgaagcaaaaagggggccaacggttacatttaaagcggccgtggcaccagttttaaaaaaggcctcggatgaaaaggccgtttggtgttaaaaggaaggggtatgagaaaaccttggaggagctgatgaag

SEQ ID NO: 84059 - DNA, 615 bp, Arabidopsis thaliana columbia
gtcggcgtaccaaacggctcgtgacgcgaacattagagtccgaggagtgctcataaccaacccatcgaacccatgaggggggacggtccaaaagaaggttctagaagatctccttgacttctgcgtacgcaagaatattcacttggtctcagacgagatctactccggctccgtcttccatgcctccgagttcacaagcgttgccgagatcgtagaaaacatagatgacgtgtcagtaaaggaacgagttcacatcgtctacagtctctccaaggatcttggtcttcctggtttccgcgtgggaactatatactcgtacaacgataatgttgttcggacagcgagaaggatggcgagcttcacgcttgtctcgtctcagacacaacatatgctggcttctatgttgtcggatgaggagtttacggagaagtacattaggataaaccgggaaagacttagaagacggtacgataaccattgtggaacgggcttaagaacggcagggattgaagtggtttgaaagggaccccagggctacttttgtttggatgaattttgggggtcctgccccaaaaggaaaccaaagccggcgagctacatctttgggatgtgatc

SEQ ID NO: 84060 - DNA, 401 bp, Arabidopsis thaliana columbia
tttttaaaaaattcgtttataacaataaatattacaaatcaaccttgatgaacatgaaattaacttgctttgtccaagcaagaaaacaaacaataatatctagaaaagagaaacaaatcaaaacccattttacatcaatgggtttaaattaattatcttctctttcctaaaaaattaattacccctcccccatatatttaaccaccaaaaaaacggatttactttactttttttttttaacatttcaaaacctccttcgtcggcccatgaactcatgtattcttcttcaacgcaatctccaaagtgttctcactcatgttaggcaaaacaaaccctaaaccatccgacctccgagcagtggcacgaagatcccggagatatattcaggttcagctccttta

SEQ ID NO: 84061 - DNA, 516 bp, Arabidopsis thaliana columbia
catgttaactaagttttgctttcttcatctgtatttcttgtctctctgccgtgcctagctccaccggacgtttcccggctgcttctgctccgccaccggaaccttctcctccagcgccggccgatgattctccgacaggtttatcatttccgcaactaccctttttcgatgagaatagttgggatttagcgttcatgtcatcggaatcagcgttgactacttcgtcaagaagctcttgtgctgccttcaagtacttggagctaacaagattagctataccgtttgttacccccgatcctgtagagccagacccgacccggatatcttctccatgtccggacccgaatccgacgtgaataggctggtgtttgttgatgatggttgctgcttgcttgctgctgttgagaacgggaggggtaaagaggggccttgctgcgcgcggggcgtctcacacgcggcttgctggtgagtgggatccacttggtggctaccgtagagactgtactgcacgcgcgg

SEQ ID NO: 84062 - DNA, 1315 bp, Arabidopsis thaliana columbia
  unsure (1)..(1315): unsure at all n locations
tnattattattcacnctctccncttctctccgccgaagtagtcacagttccggccaccaggcaaagaagagagaaaacgaccctgactccaataatggctcctagttctaggtctccttcaccacgtacgaagagactgagaagagctcgaggagagaaggaaattgggagaagtagagagagagaagatgatggtagagaaagggagaagagaaacagtagggaaagggatagagatataggaagagatagggatagggagagaaaaggtgaaggagaaagagatagggaagttggggataagagaagacgatcagggagagaggatactgaaaaaaggagaaggacaagaacagatgatgagagatactctagaggaagacatgagaggtctacttcaccgtcagataggagtcacaggagtagtaggcgttcacctgaaagagctattgcctcaaggcatgatgaggggtctaatgcaagagggggcagcgaggagccaaatgtcgaggaagattcagtcgcgagattgagagcagttgaagaggctctcgcagcgaagaaaaaggaagcccccttcttttgagctttcagggaaactttgctgaagaaactaacagatacagaggtatcacactcctcttcaatgagcccccaggggctagaaaaccccagcgaacgatggagactgtttgtttttaaggatggtgaacccctgaatgagccactctgccttcaccgccaaagctgctacctctttggacgtgaaagaaggattgccgacattcctacgggttcacccatcttgcagcaagcagcatgctgtctttcagtcccgggaaatggaaaaggagaaaccagatggtatgatggggaagcaagtgaagccttacataatggttcttggtagtaccaacaaaacttatatcaatgaaagtcccattgagccacaaagatattatgagctttttgagaaagacaccatatagtttggccacagcagcggagagtacgtattgttgcccgagaattctaccgagtcaatgaaatcagagtcaagcagaaacgagtaaatcacaatattagatagttgcgtttcacaggattaatagaaaagtgtctcctttttcatgtaggcattaaaccgaggtggtgagaatctcatacatcttttaggaatcatttgccagcttgttatataattcatccccatgagggattggaaggacaattggttttttttaaaaaaaaaaaaaaaaaggaaagggcggccgctataaaagatcccagcttgcgtgcgtgtgaagtcaaagtg

SEQ ID NO: 84063 - DNA, 363 bp, Arabidopsis thaliana columbia
agcacaattatacaaattttttataacataaagataaggatacaaagatatgcaggagagaactagtgtctcaattttttaagttttggttaaacgtaaagttggaccctaatactgaaacatacattcatcttattttcataatatatattcctcggtttgtgaatatgtgaataatttatacaaaacaaagaaagtaaacgtcaatctgtattcttgactttgaccaaaatcctaccaaaccctaattaataatacttggaaaaccatgggtgcacccttacggctttacatgggatttattatccttacatggttatggtttggatgcgtggatatggttacatataatggacctatata

SEQ ID NO: 84064 - DNA, 921 bp, Arabidopsis thaliana columbia
  unsure (1)..(921): unsure at all n locations
nnnnnnnnnnnnnnnnnnnnnnnnnnnnnnnnnnnnnnnnnnnnnnnnnnnnnnnnnnnnnncgtatcccaaagatctcatctcccctcgtgcggttcataaccaaaatcaaaacttgagtgaatcataatcgtcgtctcgtcgccggagaaaatgatcggcggtggtagggtttattgggggaagaagttagataaagagatggaagatgcggcggttgttgacggtggtggatctaacggtgttgttgtgatctttgtttggagctcgattaacgagaaccagcttatgaatttcgttgatctttattcttctcttggttggaattctcttgtttgccgcgctgattttctcaccgcggtttatcctgaaatggctctttctttagcattccatcttctttctgaacttgttgaggagttaaagagtagaccatgtcctgttatctttctagctttctctggtgctcctaaagcttgtatgtataaagttctacaggtgatcatggatgattgtgaagctcaaattcatccggatgatagccagttggttagaacctgtctttctggacatgtctatgactctggcccgttggattttacgagtgatttgaatgtgaaattcgcactacatcccaccatacgacgaatgtctggtccttctagactagtatcttgggtggctaaagggatttcttccgggcttgatggtttatatcttacaagatttgaatcccaacgtagtgagtactggcaggccctctactcatcggttgaaattggggctccatatctcattttgtgctccgagaatgatgaacttgctcctctacaagtaatttcaagctttacccatcaattgcaagaactgggaggagaagttaaggttgtcaagtggaaaaattctcctcatgcaagacac

SEQ ID NO: 84065 - DNA, 809 bp, Arabidopsis thaliana columbia
  unsure (1)..(809): unsure at all n locations
atgaactccnnnnnnnnnnnnnnnnnnnnnnnnnnnnnnnnnnnnnnnnnnnnnnnnnnnnnnnnnnnnnnnnnnnnnnccacgggtgcgcgcacgcgtgcgcccacgcgtccgctttcatgtgagagagagagttgaattttgcagatgagtatgagaagaagcaaagcggaagggaagaggagcttacgagaactgagtgaggaagaggaagaagaagaagaaactgaagatgaagatacttttgaagaagaagaggctttggagaagaagcagaaaggtaaagctacaagtagtagtggagtttgtcaggtcgagagttgtaccgcggatatgagcaaagccaaacagtaccacaaacgacacaaagtctgccagtttcatgccaaagctcctcatgttcggatctctggtcttcaccaacgtttctgccaacaatgcagcaggtttcacgcgctcagtgagtttgatgaagccaagcggagttgcaggagacgcttagctggacacaacgagagaaggcggaaaagcacaactgactaaagacggtgaaacgtgtgagatcccggtttgaaggttaatgaaacaggctttgcttactctcttctgtcagtctcttttagctccttgtaatcctctgtgtctctgtctgtttctccatattacctgtaatcaaagctatctgctaaacctacgacatggttaaataaatgcattgagacttagtaaaaaaaaaaaaaaaaacgagggcggccgctcttagaggatccaagcttacgtacgcgtgcatgcgacgtcagagctcgtct

SEQ ID NO: 84066 - DNA, 499 bp, Arabidopsis thaliana columbia
  unsure (1)..(499): unsure at all n locations
ctctcctctttgcctttttccactcactacacgccaaacccgacgacatggcagctacctctctcactgcccctccttctttctccggtctccgccgcatttntcccaagctcgacgctgccgccgtctcctcccaccaatccttcttccaccgcgtcaattcctctacccgtctcgtttcttcctcttcttcttctcatcgctcccccagaggtgttgttgccatggctggatccggaaagtttttcgttggaggaaactggaagtgtaacggggactaaggnctccatcgccaaggcttatctcccgatctctaaacagtgcaacctttggaagcagatgtaggatgttgttgtgtcaccccccatttttgttttaaatgggcccagggccgaaattccccggtttgacaagacccgtaattggcaannattaagggtaagaacttttttgggggttggggaaaggtgggggccttnacctggnngaaaatnangng

SEQ ID NO: 84067 - DNA, 692 bp, Arabidopsis thaliana columbia
  unsure (1)..(692): unsure at all n locations
cccggcccagcgcgtccgtcgagagtaagagagagagcacaaccaccaaccctcttatcgcctctatctcctctgctaccttaagctgagagagtcacagtctcgtctctatctctcctctttgcctttttccactcactacacgccaaacccgacgacatggcagctacctctctcactgcccctccttctttctccggtctccgccgcatttctcccaagctcgacgctgccgccgtctcctcccaccaatccttcttccaccgcgtcaattcctctacccgtctcgtttcttcctcttcttcttctcatcgctcccccagaggtgttgttgccatggctggatccggaaagtttttcgttggaggaaactggaagtgtaacgggactaaggactccatcgccaagcttatctccgatctcaacagtgcaaccttggaagcagatgtagatgttgttgtgtcacctccatttgtctacatcgaccaggtcaaatcctcgttgacagaccggattgacatatcaggtaagaactcttgggttgggaaaggtggggcccttnactggggaaaataaaggggggganaaggttaaaaaggcccttggttcaaagtggggcatttttgggattccgaacgggncatntattggggaaaaagttggttttngggagaagttaattaattngtttc

SEQ ID NO: 84068 - DNA, 940 bp, Arabidopsis thaliana columbia
  unsure (1)..(940): unsure at all n locations
gactttccngtgtaatatatgancctngtntgaatttnaaagttgcccgttttaccatacagcgtggaacagctcaaagaccttggctgcaagtgggtcattcttgggcattccgaacggagacatgtcatcggagaaaaagatgagtttatcgggaagaaagctgcatatgcattgagtgagggtcttggagtgatagcttgtattggggaaaagctagaagagagggaagcaggcaagacgtttgatgtttgcttcgcgcaactgaaggcgtttgctgatgctgtgcctagctgggacaatatagttgttgcatacgagcctgtatgggcaattggaactggtaaagttgcatctcctcagcaagcacaagaagtccatgtagctgtccgcggttggctaaagaagaatgtctctgaggaagttgcttccaaaacgagaatcatatatggaggttctgtcaatggaggcaacagtgcagagcttgccaaagaagaagacattgatggatttcttgttggtggtgcctccttgaagggtcctgagtttgcaaccattgtgaactcagtcacgtcgaagaaagttgctgcttgattgagaactatcagtaacggaaatcgctagtctccatggaacagatgagatgagaaataaaagggaggttagcgcccttgttgttgttgttgtgttcttacatcttcttcttgaactaataatggaaaacagaaagaaaaaaaatgattcgtgagctctggtttgacagagagagataaaagggtctttgattaaagatctttgtaactaagctgtgattctttttttcaatttgagtaagcttggctcccgagtttcttctatggaataatctaaatcaaatcttaagcccnnnnnnnnnnnnnnnnnnnnnnnnnnnnnnnnnnnnnnnnnnnnnnnnnnnnnn

SEQ ID NO: 84069 - DNA, 420 bp, Arabidopsis thaliana columbia
  unsure (1)..(420): unsure at all n locations
acaaattcggataatctctcatcggaggatcgttgttgttgttgctagggttcttatcgatttgtaatgtacaaaactaaattaatcccggtgatgaacgaggatgctgtgattgttcaacaaacggattcgattcaggatcctaaggtaactccagatgatactgtagttgattcgagcggggatgttcacgaagccattgatgatgatgttgaagcttcttcacctatggagctagattcggcggttacaaatgacgctagggttctcgaaagtgagagatcggagaaagatggtgtcgtagggagtgaggaggaagatgagattaaaagcgaggatgttttaattgataaggatgatgagagttcttaaggttaaagaagaaggangnagnagaagatggctctnatgaancaatct

SEQ ID NO: 84070 - DNA, 687 bp, Arabidopsis thaliana columbia
  unsure (1)..(687): unsure at all n locations
nnnnnnnnnnnnnnnnnnnnnnnnnnnnnnnnnnnnnnnnnnnnnnnnnnnnnnnnnnnnnnnnnntacccacgcgtgcgtggtggaaaagaaggttttgtaggcttctctctctcttctctcatttgcatcttttagagagagaaagcatctgatcttctttttccggcaacaatagcttctttagtgtttgttggccagttctctgtccagaatcttatggcttttccagcatggatgtctggcttttgtccggcgatgtttagggcaacgtttgattgtcgtggttcttctgacactgttcggttctttacgacgatggtcggtttgcgtttggcttccattggcttctttagcggcggtaggctagctaaggtctagagtttcaccgcctatcttcggtgtttcgtctaccttttggccggattgattccggtttagatttatgttttcttctctcgatttctttatattcaagtttgattgagccccttttgcggttcaatgtnagancctggaaataaatcccttgaaccncctttggttaaaaggggtnaaatttgttttcaacggtanncgnttcaatttttgnggncaaaataaggtccgggttaagggttttaaacctaaaggggtnaacaattnaaattgggggngttcccaacgaccatgggcggggctttttnt

SEQ ID NO: 84071 - DNA, 400 bp, Arabidopsis thaliana columbia
cccacgcgtccgggaaaagaatgttttgtaggcttctctctctcttctctcatttgcatcttttagagagagaaagcatctgatcttctttttccggcaacaatagcttctttagtgtttgttggccagttctctgtccagaatcttatggcttttccagcatggatgtctggcttttgtccggcgatgtttagggcaacgtttgattgtcgtggttcttctgacactgttcggttctttacgacgatggtcggtttgcgtttggcttccattggcttctttagcggcggtaagctagctaagatttcaggaatcaattgcctttgggagatctttcctttccaaatttgctaatgaagtttggtggattctctaattaaaaatcaatggacttctcttg

SEQ ID NO: 84072 - DNA, 708 bp, Arabidopsis thaliana columbia
  unsure (1)..(708): unsure at all n locations
ggannattgtttnccctngcgaatcatttnngagncnaataanttnggattaggtttttancctaggggttgnaccattccantgngcttgttccccnactggaaccatgaagacgagtcctttttgnccttganaaggtgttgctgaaagcnccatcggcttacnccncntcgatgttctttaagatttcaggaatcaattgccgttggggagatctttcctttccagatttgctaatgaagtttggtggattctctaattaaaaatcaatggacttctcttgaagctccggcggtttccggtggttttagagttccctgagttgctaaccagaacggtggtgaatggcgacaactaaggcttcttcagtcaacgtgtttcaactttgtttgttaacatcacacgtggctttgtggtggaagggaatctttaatttacttcctcataaaggttttgtttcctggtttgggctttctttatgggcctctgcttataagttggacttgttggttttttatgcaatatggatgactatattttagttgatccaatgttgtaaggtttaatatgtgtcaagatttgtaagtggaaggttccacagttgtatctttacaacataaggtaataaataaagtgcaacacggcggccgctctagaggatccaagcttacgtacgcgtgcgatgcgacgtcatagtcttctatagt

SEQ ID NO: 84073 - DNA, 527 bp, Arabidopsis thaliana columbia
acaagcggtggaggttcgattattaacattagcgcgactttgcactacacggcttcttggtaccaaatacatgtctctgcagccaaggctgcagttgatgctaccacaagaaacttggcattggagtggggaactgactatgatattagagtgaacgggattgctccaggtcctattggaggtacacctggaatgagtaaacttgtacctgaggagattgaaaacaaaaccagagagtacatgcctctttataaagttggagagaagtgggatatcgctatggctgcactctacctcagctgtgattctgggaaatatgtgagcggactaacaatggtggtagatggaggactgtggcttagcaaacctcgccacttgcctaaagaagcatgtactctctggttttgttttcaatctcctcaggtacaagtttactcattccaggtgtacctccaataggacctggagcaatcccgttcactctaatatcatagtcagttccccactccaatgccaagtttcttgtg

SEQ ID NO: 84074 - DNA, 469 bp, Arabidopsis thaliana columbia
ctaagttctagatcgccatttccacgtcgtactaagcttctctttcgccatccgttttaggcaacgaagacgaagatcatgaaagggcttacgaggcttctcaattctctttcgcgacatacagcttccgtaacttgttctccatcttcttcttctcttctgatatcacgtcgctctctgtttatctcggcggcgacacactttccggtgaatttctcggagtcgataacaactaatgcttctcgtaactgttcgagatcttcttcatttcccttcaattggatcgagcaaaggaggacaatgtttatccaaacacaatcaacaccaaaccccttcttctctaatgtttagtcctggtaaaccagttatggagattggaagtgctgacttccctaattctcgctctgctatgagttcacctttagctaaagccattttcgccattgatggtgtagttcgagttttctat

SEQ ID NO: 84075 - DNA, 440 bp, Arabidopsis thaliana columbia
  unsure (1)..(440): unsure at all n locations
ccggaanggaaggcccgggccagaccgacccacggacattgcaatttttctaaatccggcgattaaatatgggtttcatagtcggcgttgtaatcggactcctcgtcggaatcgcaatcatcatcggctttgtcaagttggagaattctcgatccaagcttcgctctgaacttgcgaatacggtggctgctgctgcgaggatgacggtggaggattccaggaagcttttgcctcctgagctttatccttcctgggttgtcttctccgagcgtcagaagttgacttggctcaaccatcacttgacaaagatctggccttatgttgatgaggcagcctctgagcttataaaggcatccgtggagcctgttcttgagcaatatagacctgccattgtggcctgcttaacatcttctaagcttactctgggtacagtggcacct

SEQ ID NO: 84076 - DNA, 409 bp, Arabidopsis thaliana columbia
aagccaaattgataacttagtaatttaaccccttataatcttcaaccaaataaacatctttttgttttttcagctaacaaagaacaccgactctcacagatcactacattacaagtttccaaatcatttatgtgatcttacatctactgagaaagctgccaatctcttttctcaagcggctaaaacataattacaaatgctagagccgtcgccgccgtttcccaaccctttgattcggggatgaaccggtataaggagttgaagaagttatgtccggaacaaacacagagtggtggtgaaaatgcttaggccagtttagaccagacgctgtaggtggagactgaatctgtggaaccgcccatgatgtctcacctccaagcaggtattgttatcttctccatcttcttct

SEQ ID NO: 84077 - DNA, 475 bp, Arabidopsis thaliana columbia
  unsure (1)..(475): unsure at all n locations
gggactattgctaagggaggcaatcccatttgtcgagcaaaatgctttcctgtgggcaaagtgatggacatgatgctgcctgagtttctagattgcacggcaagaactggtttagacatgctggctaagcattactaccaatcatctaaagcatgggtggttttctttgttcctggaagtgatgctgatatcgtgttttatgatgagtttatgcattatctggaggagaagcaacgggcagctgtttctaaattggatgacacaacaacgttgtttctggtgcctccatctgatttctccgagaaagtacttaaagttcctgggaaactaagcatctctggagttattctacgtttagaaatgtggtggttctggctccggtgggcctgttcaacagcaaggtgagagaaaggtacagattctaacttatatggtganatcatattcagaagctagtgggggttcngatgtggat

SEQ ID NO: 84078 - DNA, 473 bp, Arabidopsis thaliana columbia
ccaaagagaaaacgtatgagttgcttaaaccataaacctcaagctcaaaattttatcaaccttataaagtttcgttttctcgagattttgaatcttttcagctaaaaaagatcacagctttttgcgttttctggatgagtttcagataagagaagatgaagattcagtgtaacgtttgtgaggcggcggaagcgacggttctatgttgcgccgacgaggctgctctttgttgggcttgcgatgagaaaattcacgccgctaataaactcgccggaaaacatcagagagtccctctctctgcctctgcctctttccatacccaaatgtgacatttgtcaggaagcatctgggattcttcttttggctgcaagattagaggctttgctatgtagggaatgtgttgatttttgcaatccacactgtgaatcctcatgtttcagctcaccagagatttcttctcactggaatcaaag

SEQ ID NO: 84079 - DNA, 2421 bp, Arabidopsis thaliana columbia
  unsure (1)..(2421): unsure at all n locations
gannnnnnnnnnnnnnnnnnnnnnnnnnnnnnnnnnnnnnnnnnnnnnnnnnnnnnnncttaaatctaataactctgttcccttccttcacacgaatcaaaaacaaaaagcttcgtacatttcgcctagctttcttcgttctagggtttcggatcttacttaattacccaaaacccttgaatccattactctgtgtgagcttaaatctcttaccttttatcactttcaatcgattgggtattaagttgtaaaggaaggaacttggaatcatgaagcttgggcttttcactctctcgtttcttctgatcttgaatctagcaatgggtagattcgttgttgagaagaacaatctcaaagttacatcacctgattcgatcaaaggtatttacgaatgtgccattggtaatttcggagttcctcaatacggtggtactttagtcggcaccgtcgtctatcctaaatccaatcagaaagcttgtaaaagctactccgatttcgatatctccttcaaatccaaacctggacgattaccaacttttgtccttatcgatcgtggagattgttacttcactttgaaagcatggatagctcaacaagctggagcagcagcgatacttgtagctgatagtaaagctgagccattgattacaatggatacacctgaagaagataaatctgatgcggattatcttcagaacattaccattccttctgctctcattactaaaacattgggagacagtataaagtctgctctttccggtggtgatatggttaacatgaagctagattggactgagtcggttccacatcctgatgagcgtgtagagtatgaactgtggactaatagcaatgacgagtgtgggaagaagtgtgatactcagattgagtttctcaagaattttaaaggagctgctcagattcttgagaaaggtgggcatactcagttcacgccacattatattacttggtactgtcctgaagcgtttacgttgagtaaacagtgtaagtctcagtgcatcaaccatggaaggtattgtgcgcctgatcctgagcaggattttacgaaagggtatgatggaaaggatgttgttgttcagaatctacgtcaggcttgtgtctacagagtgatgaatgataccggtaagccgtgggtctggtgggactatgtgactgactttgctatccggtgtccaatgaaggagaagaagtacaccaaggaatgcgcagatggaattattaagtcccttggcattgatctcaaaaaggtggacaagtgtatcggagaccctgaagcagatgtggagaacccagttcttaaagcagagcaggagtcacagataggcaaaggttcccgtggagacgtgactatactcccaactcttgtcgtgaacaacagacaatacagaggtaaattggaaaagggggcagtgcttaaggctatgtgttcgggttttcaagagtcaacggaaccagctatctgtcttactgaagatttggaaactaatgaatgtttggaaaacaacggtggatgctggcaagacaaagctgccaacattactgcatgcagggatacttttaggggaagattgtgtgagtgccctactgttcaaggtgttaaattcgttggtgacggttacactcactgcaaagcctctggagctttgcattgtggtatcaacaatggaggatgctggagagaatcccgaggtggcttcacttactctgcttgcgtagatgatcattcaaaggattgcaaatgcccacttgggttcaagggcgatggagtgaagaactgtgaagatgtggacgagtgcaaagaaaaaacggtgtgccagtgcccagagtgtaaatgtaaaaacacttggggaagttatgaatgcagctgcagcaacggtttgctttacatgcgtgagcacgacacttgcataggttcaggcaaagttggaaccacaaaactcagctggagctttttgtggatccttataatcggggtgggtgttgcaggtctttctggatatgcagtctacaaatacagaatcaggagttacatggatgcggaaattagagggatcatggcacagtacatgccattggaaagtcaaccacccaacacaagtggtcaccatatggatatatgagtgaagttatcaacacaagccaagagactctctctctttctatgagtagctttaagtttccatgtaaatgaatcaatggacttgatacaactctagagaaaagaaaaaagccacaaacagaaataagtgtacctgcactatttgtaagaaatgtggatttgcagatggaatctcctttttgtctgcatattactcttacaatgtaaaatagacataactggatgaataatgagtgttacattatttactgttgaaaaaaaannnnnnnnnnnnnnnnnnn

SEQ ID NO: 84080 - DNA, 643 bp, Arabidopsis thaliana columbia
acgccgattctttggcagctgcaagaagagacagtacgggacacgcacacacataaaaaaatgagtcaacacaacatcttagaagctctaaatgtccgggtcgtgggtacgggtgatcggatcctgtttttggcccatggattcggtactgaccaatcagcttggcacttgatccttccttacttcactcaaaactacagagtcgtcctctatgacctagtttgcgccggcagtgtcaaccccgattacttcgatttcaatcgttacacaactctcgatccttacgtcgatgatcttctcaacatcgttgattcactcggaatccaaaactgtgcttacgttggtcactctgtttccgctatgatcggaatcatcgcttcgattcgtcggccggagcttttctccaagcttatcttgatcggattttcgcctaggtttctcaacgacgaggattatcatggaggattcgaagaaggtgagattgagaaagctttcttagctttggaagctaattacgaagcttgggttcatagatttgctccgcttgctagtggagctgatgttcccgcctgtcgttatagattttaaccggaccttgtctaatatgcctccggatattatttttggattgctttcgcaaccc

SEQ ID NO: 84081 - DNA, 1029 bp, Arabidopsis thaliana columbia
  unsure (1)..(1029): unsure at all n locations
gccaactctatacgactcgtatagggaaagctggtacgcctgcaggtaccggtccggagttcccgggtcgacccacgcgtccgcttttttattatgagtcaacacaacatcttagaagctctaaatgtccgggtcgtgggtacgggtgatcggatcctgtttttggcccatggattcggtactgaccaatcagcttggcacttgatccttccttacttcactcaaaactacagagtcgtcctctatgacctagtttgcgccggcagtgtcaaccccgattacttcgatttcaatcgttacacaactctcgatccttacgtcgatgatcttctcaacatcggtgattcactcggaatccaaaacttggcttacgttggtcactcttgttccgctatgatcggaatcatcgcttccatttcgccggcggaactttttctcccaagcttatttttggatccggatttttcggcccaatgttttcctcacacgaacgaaaggaattttttccattggggagggaatttccgataagaaaaagggtgtaagaaaatttggaagngaataaagggttcttttcccctcacaatactttcctttggagaaaaagctcttaaaatttttaccccataaagacgctctttggggggcttctcaaatgggggattttttgtggctctccccgctcttcttggcttagttttgcggaaaccctttaatggtttcccccggcgcgggccgggtttttaaatgaaaattttatagcccgggagccttttggctttaaatatgggccgcccccgggaaaatttacccctcggaccggctcttcgaagggaccgggttttctaaccaccgcaatctctaaaaagggggggccttggggtttaattcaaaagttcccccacgggtgtggaaatcaacaagtgggaaagggttttttttttgtcccgggcttttgtggggggggggatttttagggctctacttcgggggggaataccttctggggggaacctctaaaaccttgag

SEQ ID NO: 84082 - DNA, 461 bp, Arabidopsis thaliana columbia
  unsure (1)..(461): unsure at all n locations
cagagaagatccaaccatacttcagttctactgtcacaatttgagaagaagaagcgtgagatctgatcactagaactaggaagaaagagcttagactacagaaagaggacttacagagatggataaaatgaatcaggctattgagaagatgaagatgttggttggtatggaggttgaagacgagcaacaagctgctgatgaagaaagctcgctctcattcatggaagatcttaatcgcaattgcgctttaactaccaaacagagattttatggctttgcaatttgcttgtcagcaggtttgacctgtacacttttgtcgatgcttgttttctttaaatccggtcaaagttttggcatcacattcactcctgggaaattttgatggcacttcgggggcccagcatttccttttaggcccacagcggcaggttacttttaaggtttttncccccncctggttt

SEQ ID NO: 84083 - DNA, 701 bp, Arabidopsis thaliana columbia
  unsure (1)..(701): unsure at all n locations
nnnnnnnnnnnnnnnnnnnnnnnnnnnnnnnnnnnnnnnnnnnnnnnnnnnnnnnnnnnnnnnnnnnnnnnnccacgcgtccgactttttcctttatataaagttagaaaaacaaaaaaaacaaaatagttagaaaaaatctgagagaaacagaagaaacataaaaaaaatgaggccattgagcattaaaccaacatcgttagatgtagctagacatgccacatcagtagaatcatttgggaatcaccgaccgccgatatcgccgtggcactcaccggtgccgtacctattcggtggtcttgcggcgatgttaggcctcatagccttcgctttacttatcctagcctgctcttactggcgcttgtcaacctccggtgatgactccggcgaaagagtcgacgaggaaaaagagagtcggtctggagtgaaggcggctagcgcggcgtgcgaggagaaggttcttgtcataatggccggagatgacttgccgaggtttctggccacgccggcggcgaacaaatgcatgtgcggtcacgagggtagaatggtaattttcaaggaggatggtattggtgctggagaggagaaaatgggagacagagagaaagccaatgaaaatgaagaaacaacgagtcagggagcttnttggtttccttttctctcttcagccttgccttttttttttggggggggaattttcc

SEQ ID NO: 84084 - DNA, 537 bp, Arabidopsis thaliana columbia
gcctgcaggtaccgggcccggatttcccgggtctaccacgccgtccgcggacatcgtgggggggtggagccggagtcaccgcgtgaatcatcctcaccggagagatctgtgccactccgccgttccaaccgccaagcaaaccgtaagggagactcgtcgagaaaagccaccgagaaaggtaatcgggaatcttctcgtgttgtcatgtgactgtgttatttgattattaaaccatgatctaaataaaaccagttaaaaccaatgaatgtttgtttagttagaggttacgtgaaattgtgtcgtgaggaacaagaagatgacttcattcattggtttagttgttacagtaccggttaattgccaaaccggaagctatctttcacgtgaatgcatggatccaattgtggacgtagtgttacgtgtagtaattgaatcaatatttaattattagatttggttggattaatttattaaattaagtctagttaatttattgaaggatatatagtttgggttgattatgaaattaattataga

SEQ ID NO: 84085 - DNA, 438 bp, Arabidopsis thaliana columbia
ccaattcgcggccgcaacaaaatctattttcttaggcggcgacttttcacaacatatggattcatcaaagagttaaaaagaccaaaagaaaaaaaggactaaaaacagtttgcttcattcactctcaacatctctatcagtctttctacctagtgtaccatttcaccagacaaacaaaaaattgggcattgatcatcttctttcagacaaacaactccattgtcttcaaagttccaaaaatatgtcctgtctactggttggattatcccaaactctttgacaaccatccatccattgggtttctctatcaaccagggtttgagggtttttacggaaaggtggacccacggattaaaaacagggtggtttgaaggtcagattgcgaagttctttcgatcatgactgttaccctctaactgatactcatttaaccgacgt

SEQ ID NO: 84086 - DNA, 528 bp, Arabidopsis thaliana columbia
  unsure (1)..(528): unsure at all n locations
tacgactcactatangggaaagctggcccgcctgcaggtaccggtccggaattcccgggtcgacccacgcgtccgcccacgcgtccgcccacgcgtccgcccacgcgtccggcgaagcaatggaatcaatgacgccaatctcgtgccctacgactcctcgttggaaccaagacagaccatttctcactggtcgcgtccatcaggaaacgagggcaagctccttgtttgctgattctaagaggtttactttagactcgtctagttctggagtagagcaggcaattggctgctatgacacaccggttcaggagcttatcgtcattgatgatctcttatctgcgttggttggaattgaagggagatatatttcaattaaaagattccatgggaaggaggatagtatagctttccaagttgatccatcaatggatttggcactacaggaattggcgaaaagaatatttcctttatgtgaatattatctgctgattgaccaatttgtggagtcaagctcgcagttcaggaacg

SEQ ID NO: 84087 - DNA, 574 bp, Arabidopsis thaliana columbia
  unsure (1)..(574): unsure at all n locations
gtggtgcagattcgatgttagatataaggttaaagaagaacaggcttcaaataccagtgttaagattggatgggttcattatctcaatcttgctcaattgcgtcgcctttgaacaattttacgcaaagagtaccaaccacataacaagctatgtggttttcatgggatgccttctaaacggcaaggaagatgccacattcttaagtcgtcgccggatcatagagaactactttggcagcgagaaggaggtatcaaagttcttcaaaactatatgtaaagatgtagtgtttgacatacatgcaagttatttacggaatgtgtttgtggaattaaccggggaccacctcaaaatggtactcaatatgtcggaggttttttacctgtcacccaggaatttttttggnattgnngttttnggcccaattttatcggttcctaaaaaccnttntntttccttnggaccnggaccagaaaaccngatttttgaaccgccctccgggaagcaaacattcttgggnttttttngggaccattnggtttangnggntttttntttttcanaacacctttnttc

SEQ ID NO: 84088 - DNA, 673 bp, Arabidopsis thaliana columbia
tgactatgactgcgcgcgcacgcgtgcgtgagctcggatcctctagagcggccgccctttttttttttttttttttttttttggcttattttatagaagcccttctctatactaatctttagcaaccaccagagtaggattaaattacaatttcattttcatatagtagaagaagcagaagcatgattataaacaagatttgacacacacacatatatatatatacgaagatacgataattaaggcaaagttggagagagtgaaggattagtgaccttaagctctccacagccactaatgaaaaccggtcttcaagggtctattccacaaagatctcgcggtttgagctctctcggctccaagaaactccgcaaaaccggtaaactggttaatattctccgacggcttatacgtcggaatcgaagaaatactcgtcactacatctaatccttcaagaacagttccgaatacaatgttaccgccatcgagctgcggagacgggccaagacccgtagtgattaagaattcaacatttctattatcaggatcgaggctaatattcatcatcattcatcattctctcggataaaaccaaggagaatcccaaccccgggaaaccctggtttttgggggaaattggaaataaaatttatgtgggaggccaacccccccc

SEQ ID NO: 84089 - DNA, 835 bp, Arabidopsis thaliana columbia
ccaatgtttatggtgtcatggtaagcaatgctcaagaagagttgttggagtggtatgctgaaaatgcgaaagacaatgcaaatataatccatgcgagtgagaggtgtgcgggtgggattacacaagccattggtcactttaagcttggtccaaatctttctccaagagatgtttctgacttcttggagtgcaaggcggataatgtgaacccgggtcatgaggttgtgaagtttttcttgttctacgagagatggagacgaggtgaagttgagaactgtacgacatacacatcaagtctcaaagcttcatggtcatccttcctggtgtctttgttcatccatcctggtgctgaaaagtctctcagagacaccattgatgagcttggcaagtactatggagacaaaaaagggaagaagtttcgtgtttggactgaccaggtcttggcaacagacacaactcccggggcctggggtgtgaagcctgattaatgggagcagactggggatgagaggaaatgttgcacaacaactgtcaaattcacctcaaaggaaggagaagggtttgtgtgggaacatgtgcagcaaatatggtcggaggaaacagagattaaggatgatagcaactggatcatctgaatcttttttttttgttaattcccttcattacaaagaaaaataagccaaactatatactggaagacttttaaataaaagtaatttaaaaaaaaaagaatactgtggactatattccttatataaaaatatagtcctgaaactttcatatatctgtttttagtgtttttcataaatattgcttaaattttatgtaagttttc

SEQ ID NO: 84090 - DNA, 528 bp, Arabidopsis thaliana columbia
tacgactcactatagggaaagctggcacgcctgcaggtaccggtccggaattcccgggtcgacccacgcgtccgcccacgcgtccgggtgaagctagggcaacctggatggagagaacgttattatgaagagaagttctcagtagtaacccctgaagaaatggaaagagtccggaaggatgttgttttgaagtacacagaaggcctttgttgggtcatgcattactacatggaaggtgtttgctcctggcagtggttctatccttaccactatgcaccattcgcttctgatctgaaggatttgggagagatggatattaagttcgaattaggaactccttttaagcctttcaatcaacttcttggggtgttcccagctgcaagttcgcatgcacttccagagcgctacaggaccttgatgacagatcccaactctcctatcattgatttttacccaactgattttgaagtcgacatgaatgggaagcgtttttcctggcagggtattgctaagctgcctttcattgat

SEQ ID NO: 84091 - DNA, 538 bp, Arabidopsis thaliana columbia
  unsure (1)..(538): unsure at all n locations
cagccacttaacatgttcgaacgaatcatcgaagaagcaagaggaaaacaaatcgtcatgtttcttgattatgacggtactctttctccgatcgtggatgatccagacagagctttcatgactagcaagatgagaagaacagtgaaaaaaatggctaagtgttttccaacttccatagttactggtagatgcatcgacaaggtttatagctttgtgaagctagcagaactgtattatgctggaagccatgggatggatattaaaggcccaactaaaggtttctcaagatacaataaggataaaccatccgttctttaccaaccagccggcggctttcttcccatgatccgttgagggtttttaaaccaattagtggggaaaaccaaatcttcaacccgggggccaaagtgggggacaacaagttcttgctttcttggcaacttccgttntttttcgggnagnanttgggcgnctggntnaaaaatncggncggngggaaancctttccgcgntgaactttttagggcgaaggttttnt

SEQ ID NO: 84092 - DNA, 536 bp, Arabidopsis thaliana columbia
  unsure (1)..(536): unsure at all n locations
gcacagaatacccttgcaccggaatgttaaacgagaagagtgatatctatagcttcggaatactaatcatggagataatcactggaagaaacccggttgattatagtcggcctcaaggagagacaaatctagtggattggcttaaatcaatggtgggaaaccgaagatcagaagaagttgttgatccgaaaatacccgaaccaccatcctcaaaggctcttaaacgagtgttgcttgtagctttgcgttgtgtggatcctgatgcgaacaagagacctaaaatgggtcatatcatacatatgcttgaagccgaagatctactctatcgcgatgaacgccgaacaacaagggaccatggaagccgcgagagacaagaggcagctgtggttgctgccggtagtgaaagtggtgagagcggttcacggcatcatcagcaaaagcaaagatgaaaaaagagagtcacttgggttaagtgatttccacacgaccattatatttcattttttttccngcanttattgnnccttncananntc

SEQ ID NO: 84093 - DNA, 487 bp, Arabidopsis thaliana columbia
  unsure (1)..(487): unsure at all n locations
cagaagttcctccctcgtcttactctttcaagatagagtcttataactcgttccttaaaatcccctacttgggattcgaatctcgtccctttgcagctggtggatacaactgggtacttaaggtacaccctaacgggctcacgtgggatggtacttcaggatacgtttcgctttacgtactcttacacgaatcgacccccatcactgcagatcaagtcgtttacgcggatctaaggtttttacatcttcaataacaacgggaagaagtacctttacccgtccaagatacccaacgtatgggaatttcactgcaccccaaaagggcttttggggattccctaaggtcaatgtctgcaggtccaattcggaggcctgcggaacgggtaccatctacgataatcactgtgaggttggggttgatgtgcccgttgcttttactaccaaatatgattcttntttgnnctgggaatcgtacccatttnanttg

SEQ ID NO: 84094 - DNA, 504 bp, Arabidopsis thaliana columbia
aagaatgggagagattgtaagaagagttcagagattaaccttcaagcttgtgtgaatgaagctgctgaaacctttatctgttcaaaggcagaagagaaggggaaagatcggtctaagcagttcatggaggcgttagatattctaagttcgaacaaagaattgttcattacactcttacaagatcctcattcattttcggcgaaaaaaagcttagacttggagggatctaaggtaaaagaaccgcgtgataaatctccatcaatggctgatgatttggttagcattgttctcttgaagcctagattatcaagctcgggtttgattgataaagtgtactctgagattcaaacatctttggccaagaaagttgaaaccttgttgtttgggtcctaccaaggccagcaatcacggcagacaacaaaccccgatggtagcagtagaggtagagaaatcgaggctgctgcttttaaacaagtgatgttttaccagtacagttggtcatag

SEQ ID NO: 84095 - DNA, 855 bp, Arabidopsis thaliana columbia
  unsure (1)..(855): unsure at all n locations
cnnnnnnnnnnnnnnnnnnnnnnnnnnnnnnnnnnnnnnnnnnnnnnnnnnnnnnnnnnnnnnnnctttttttttttttttttttgattatccctaatctctccctataatattaaaaagttagaagtacaaaaaacaaacattatttctcaagttaaaattacaaattcaagattctaaaactttgtaaataaccacgaagcaaggtaatatagctctcgggttataaaccacaagctcctcatgattcgaataaactccagcattgaccgccaccgagtcaaacgtaccaccactcgaagaaactccaaccaccgagttatcctccaccgttgacttcttctccgctgtagccgaagcatccgccgccggtaaatcaactcgcttaactctcccagcgatcacacggcacacaagcatcactctcctcgcatcatcgctacacctcagcaaatcatcagctcttccgctgctcgccgtcgtcctcacaccggcgtttgcgacgttggctcctccgccaccagattttccttggaaaccgtggcgaatcacggtgcagacgccacaaacagggaggttagagcagagagaagaagagccacgagctccgagtgaacaagtgagagtggtgcagtgaaaacgtaagagctcgttgccgtcggcggcacaacgagcatcttttctggttgcttgaagtgcacgcgccttcactgcgtctcggcaatcctcaaaccgttggatcgtacgttgagtgttgtggacttttaatatccgttcgatctganagatgggactgtcttttttaagccagcttgatttgaatatgatctnccactatgtttcgacccgaatcct

SEQ ID NO: 84096 - DNA, 465 bp, Arabidopsis thaliana columbia
ggacccggcccggaattccggggcggccccagccgtccggttaatcctggggatcaaatccggctagctataagaactccggtgaagccgattgttcgatgacgaagtttcgaatttccagagaagcgggtgaggtcttcaattacggcggacgaggcgaaagaggattgattactcaacatcacagaagaaaaaaggcagtcctgcatgcgaagaagaggtgtgatcgcgattttttgttttatcaaattggttacaaaggagagaagatgcgtcaacagagattcggatatcgaaaaacagagattctatcatcagattcgtcaatggagatacctgtttgtcgaggtctggaagctgattttagaggtaaggaagatggcgaatgaaacggggttggacttcactgagcagattattactttggagaacaagtatagacaggcaccggaaaaaatctttaca

SEQ ID NO: 84097 - DNA, 588 bp, Arabidopsis thaliana columbia
  unsure (1)..(588): unsure at all n locations
nnnnnnnnnnnnnnnnnnnnnnnnnnnnnnnnnnnnnnnnnnnnnnnnnnnnnnnncccggggcgttccacgcgtccgcaaaaacttttccttcttcttcctcaacctttgcttcaatcttcaacaactttctttttataaagattttgcaagttaagtgtaaacctacaaaaaccaaacatggtggttttgccacagccagtcactttagataaccacatctccctaatccccacatacaaaccggttccggttctcacttcccattcaatccccgtcgtcaacctagccgatccggaagcgaaaacccgaatcgtaaaagcctgcgaggagttcgggttcttcaaggtcgtaaaccacggagtccgacccgaactcatgactcggttagagcaggaggctattggcttcttcggcttgcctcagtctcttaaaaaccgggccggtccacctgaaccgtacgggtatgggaataaacggattggaccaaacggtgacgttggttggattgagtatctactcctcaatgctaatcctcagctctcctctcctaaaacctcagccgttttacgtcaaaccctcaaattt

SEQ ID NO: 84098 - DNA, 926 bp, Arabidopsis thaliana columbia
  unsure (1)..(926): unsure at all n locations
cggacgcgtgggttgaggttctctttctcgcttgtgtgatctgtctgacaagctagaagaatcgtagaatcgtgagcggattgatttgataattatggtgaaggagacggagttttacgatgtcctcggcgttagccccaccgctacggaggctgagattaagaaagcttattacatcaaggcacgccaagtgcatccagataaaaaccctaatgatcctcaggctgctcataatttccaggtattgggagaggcctaccaagtgctaagtgatccagggcaacgtcaggcctatgacacatctgggaagtcagggatttcaactgagatcattgatcctgcggctatatttgctatgctttttgggagtgaactctttgaagaatacatagggcagcttgctatggcatcaatggcttcacttgatatcttcactgaaggggatcagattgatactaaaaagattatagaaaaaatgagggctgttcagaaagaaagagaagacaaacttgctcagattcttaaggaccgcctcaacctatatatgacgaacaaagatgaatttactagcaatgctgaagctgaagtaacaagactctcaaatgcagcatacggggtggaaatgttgaacacaatcggatatatatatgtcagacaagcggcaaaagagcttgggaagaaagctatttatctcggtgtgccattcgtagctgaatggtttaggacgnaaggtcacttcatcaaatcccaagtaacagctgcaacaggtgcatacggtttattccagctgcaagagggaatgnaaaggcaactaaggtnctgaaggcaattttnccgggaggacttttagggtccatgaggccccttaggaagtaattgttggttccctgtggaggccaatgttctgtttcggagcncttttcnta

SEQ ID NO: 84099 - DNA, 508 bp, Arabidopsis thaliana columbia
  unsure (1)..(508): unsure at all n locations
accacgcgtacgtatcgccggccgattcaataatttcgctttactctgccaaaaaagtttgttcttttgttttctgggattatccaaagagaagaaacagaggaaatcaatctcttttttagtttcagaccctaaatcctaggttttgaagttttgtttctttagtaattttgtcaggttttgtgtctggtgttgggattttccggagcttggtttcttgaaccagctccattttctaaaaattccttctttaaatccccattgttgtaagtcttaaagaaaaaagaagatgacttgttgtttctcttgtttgaatcctcggaccaaggacataagagtcgacattggtaacgctcgattgcaactctcgttaaccaaaccgattcatcaggtcatgggagtggttacaaccaggaaccagggtcggattcggggcatcttaggaaatggtaaagtggatagnccgtacctggnggtggccncgggcttaggttaaagggtanctnng

SEQ ID NO: 84100 - DNA, 1396 bp, Arabidopsis thaliana columbia
aattcggcacgagccaaacttttgtttcgtccaggaaagaagccgacatggaagcaaaaggggcagcacagtggagctctatcctagttccatccgttcaagagatggttaaggagaagacgatcacgaccgttcctcctaggtacgtccggtctgatcaagacaaaactgaagtcgatgatgattttgatgtgaaaattgagatcccaatcatcgatatgaagcgtttgtgttcttcaaccaccatggattctgaggttgagaaactcgacttcgcttgcaaagagtggggatttttccagcttgtaaaccatggaatagactcaagtttcttggacaaagtaaagtcagagattcaagatttcttcaaccttcccatggaagaaaagaagaagttctggcagcgaccagatgagatagaaggtttcggacaagcttttgtggtttcagaagatcagaaactagattgggcagacttgttcttccataccgtgcaaccagttgaattacgcaagcctcacttgttccccaagctacctcttccctttagagatacactggagatgtattcttctgaagtgcagagcgtagctaagatcttaatagcgaaaatggcaagagccctagagatcaaaccagaggaactggaaaagttgtttgatgatgttgattcggttcaaagtatgaggatgaattactacccaccatgcccacaaccagatcaggttattggtctaaccccgcattctgattcggtcggactcactgtactgatgcaagtgaatgacgttgaaggtctccaaatcaagaaagatgggaaatgggttcctgttaaacccctcccaaatgctttcattgtcaatattggagacgtcttagagatcataactaatgggacataccgaagcatagagcatcgcggagttgtgaattcagagaaagagaggctctctattgcaacgtttcacaatgtgggaatgtataaagaagttggtcctgcaaaaagcctagttgaaagacaaaaggttgcaagattcaaaaggctgaccatgaaagagtataacgatggtttgttctctcgtactctcgacggaaaagcttatctagatgctttgagaatctaaagagagcaatgccttgtcgcccactactctgtttctctgttttcttgatttatgcaataaaacaatctctataatcttatcttcattgtctctctatttgcttcacttcgttaaagacaaaaatctcctgtagagaatgcttctacgtattgctacaataagacaataagtttgttcttagcaaaaaaaaggacaataagtttgttaaagtttcttgacacgttcgttgttgctcaaagatatacctaataatatgatcacatgattcacat

SEQ ID NO: 84101 - DNA, 637 bp, Arabidopsis thaliana columbia
aattaaaatggcttcctcttcctcttctccgacgcctagtgctgcggcggcggtctctcctcttacggaggaagaattaactctaacagttaagtggaatggaaaagagtacaccgtccgtatctgtgccgatgactcagtcgccgagctaaaacgtcgcatctgccttctcaccaccgttttacctaaacgccaaaagcttctttatcccaagatcggaaacaaactctctgacgattctcttttactctcttcgatctcctttaagccctccctcaagatgacaatgatcggtactgttgaagatgatataatagtagatcaagctgaatctcctgaaattgttgatgattttgagcttggtaaggaagaagctgttgatgttaaagataaagaagttaataaacagaagttgagaagaagaattgatcaatacaagataaatcttcgaacgccatgtcgtcaaggcaagaaacttcttgttttagatatcgactatacattgttcgatcatcggtccaccgcggagaatccgttgcagcttatgcgtccttatctccatgagtttcttactgctgcttatgcggaatatgacatcatgatttggtctgctaccagtatgaagtgggtggcgttg

SEQ ID NO: 84102 - DNA, 421 bp, Arabidopsis thaliana columbia
atccaaagctttttgagagcattattgccagatccctctacgcttacaaggctgctttgtctgccaagatggcgagggagcttggccaggtcgaaaagcgttttgaagtcatcatcacttcctgggaaactggctgattgctcatcaacagatcctgaagtatctggtatgtattggccatcatgaggatgtcgtttgtttaattgattaaagctaaacatgacagaagtatctgaccttcttattgtatattccaagtgagaagttaaaaggggaaatctaggctttaattatgtggctacaaccggttacaaccggtaaggccattagccatgctaattccgtcatgtagtgacatccctttgcaatctctgcacaaatttttatagttgtacgagattctgctggtggcagtgcgaaa

SEQ ID NO: 84103 - DNA, 559 bp, Arabidopsis thaliana columbia
aatcagattgtaaatttagggaagagactttcgcaagcaatctagaagcaaatcgatcgccaaatctccggattatttgcaagaatcgttcccagataatcttccccagattctccacttctccagcttgaagaagacgacgaagatatggctacttcgaagaaaatgatcacacgtgaagaatgggagaagaaactaaatgctgtgaagcttaggaaagaagatatgaatactttggtgatgaattttcttgtgactgaaggatatgttgaagctgctgagaaattccaaagggagtctggaaccaaaccagagatagatgcttgcgaccattactgatgcgaatggctgttaaaaaggctgttcacaacggaaatgtcgaggatgcgattgaaaaagttaatgatttgaatcctgagatactagacacgaatccggagctcttttttcatcttcagcaccacaggttgatagaattaattcgacaagggaagacagaagaggccttagagtttgctcaggaggaacttgcaccacgtggcgaagaaaaccaagcgtt

SEQ ID NO: 84104 - DNA, 542 bp, Arabidopsis thaliana columbia
  unsure (1)..(542): unsure at all n locations
ttcttttttttttttcatcaacagcttcaatagtcagacgacattgatattagtatcttatattttcttgtacataatgcaaaacattttaatctctatataaagaagaatagagattgaaccagcatcagaacattatcataattaacaagcatcgccatataatatatatattttttttttccaaattttatatgcaaattaaaattatacttttgactgatgattaaaccacttgaaacaaaaatcgagaatacaaaagcagatacttattattgtttcatgcggtgatgctcatggagtgatctgatctccttgctcttcccccaacatctcggactgttggttggaatcgtatggattcctgaagttggacttcttctcattgtacgggggggcttgaagtggnagacggaccgtggggccgaccgggggatccggacggggacngcaggnggnaacagcttncccaaggggggccgataaactnggggaacagggcaaacggtccggggaatggtancggcccaatccnaacggct

SEQ ID NO: 84105 - DNA, 625 bp, Arabidopsis thaliana columbia
attggaaatgctaaatcgtatttatcgtagcttaagttgttacagcaatcatcatacttagaagggtaccctacttagaacaagaataaaaacagacaagttcaatgggggaaacaagagaagaagattgggaagatttgtggttggatcaccacaaaccatagacagcgtttgaacaagtctccttgaaccatttgaagcttttcttcatagatcctttcactctcccttcaacaccatacacattataagaagccactctcttcttcctctgaatctctgcctcacacaaacccttaaatcctttcttcttcaccttattgcttctcttcgatttattgttggagtcgtctctcacaattgttggattctggtatgcattataagttgatgtactgtaagatctcatcatcactggtggctgctggtttgttggttctgattctgatttttctccatgactgaagcaatggtacttgttggtgatgctgctacttctggtctcttctctgcatgacttagatctgaacatcttcacttgcaaacaaacctcaaaaaaagattgctctgctttttataggaagaaaaaggagatagttgcttttgggttttatctccaacctct

SEQ ID NO: 84106 - DNA, 438 bp, Arabidopsis thaliana columbia
  unsure (1)..(438): unsure at all n locations
attaaaaattgatagtctttttatagaaaatatttaatgttgttgaaataggtggtactcgaaacgtaagaaaaaatgatgaggtgaggaaaagcgttggaaagaaactttgggggtgagaatttttggtatagaagagacgtacattatggaagtagagagactaagtgtcagctatttgagaatccacctatagctatctcaaaactaactccacacctaaacttgcatcatctcaacatcttcctcctacctactctttaactcttggtttctcttacttgggtccagtctttccactattggaacttccaagacaccaanagtcgcgttgtaagctgtctatttactccattgacgagagcaagtgcncgggtacngtttttttacggcatacncaccncatggattcaccatgnatcaaagcccacggggaac

SEQ ID NO: 84107 - DNA, 429 bp, Arabidopsis thaliana columbia
atggtgaaaacataacatatttccatcgatctatatacatggatattgattggcacatacacaactatacataacttatgagaaatatcttattctacgaggaagagacgacagaagaagaagagagacgagagatttgatccatgaggaagagcatgcgatcgtgatagtcacgtgcctgttctaaagactcgacctccagctccgccagctgcgagcagagttgctcttccgcctcctccgccacaaccgttcgctgccacaacttaatcatttctgtcttcatctccgccacttctctcgagagctctatgttcctcctccttagctcatccatctcttccgccgccaccgtcacgcatcctcctcggttcgccattaaatttaagattctttgtgtaaaaggatttgattgtggttctaactttg

SEQ ID NO: 84108 - DNA, 427 bp, Arabidopsis thaliana columbia
cacgaagtcttgcaaaagtgattggaacagcattaactgtgggtggtgcaatggctatgacgttggacaaaggtccagccattgagctctttaagactgctcatagctctttacacggcggctcctcgggcacctcctccgagaccactgatcagaattgggttcccgagaactctaggcgggtcatgggtagtatcaccacttgggcaggtttcttcattctacaatccgtgcacgttgaaaaaatatccggctgagctttcgctagtgatgtggatttgtgccatgggaacggtcttaaacaccatcgcttcgctcataatggtgcgcgacgtaagcccatggaaagtcggtatggactcggggcacacttgcggatgattactccggagtggtttgttcgggtatggcgtattacatacaaagc

SEQ ID NO: 84109 - DNA, 432 bp, Arabidopsis thaliana columbia
ggggcagaaaaacgacacagcgtgtttactaatcaatgccaaaatattttacatatgaaacaaagaaaagagagaaaagcttcttaaatcttaatccgagtcactaaggtaaagttctcatgagagtagggtaacgagggaaacgaattcaagggtaactcttccctttgatctcgtgttgatgacgaaatgctccgggtattttctcagcagcatcagcaaaccgtaccatggtttaccttttgcttcagggatagcccagtcttcttgtgataggtatcttcttactcgactgtgatgccatacgtttccatactcctttaatatcaccgaatgaagtttttccataggcatccactctcccggaccacacaaatcggaaagcacagtggcaacagacgatacaacatctttttcctccagctgcaaaaa

SEQ ID NO: 84110 - DNA, 507 bp, Arabidopsis thaliana columbia
cgacataaaatatccaataagtgacctctacaaactcatgtggttttccagttataaaaaaacaacacaaaaccacatgatcacttctttttcttacatctccacataagggaaaaatataaaaagctccaaacaatgaaacaaattcaaagaaacgagaaacccccaaaaaaacaatataaaggtagactgagggactgaagaagaatctctcgtaaataaaaaaaacccgacagagagaaagagatgatggacacgaccgtagcttttccacaagttccgtcgaaacttgaagagttactaaaaagagagatatacaattttacaggagacaaaagggatcggtggtgtccacacaaagaagatgaagattgtcggggatggaatattatttattatttatgattaccgggtaggttaaagctgtaattgaccagggccttttcttgaagttcttgatggaggtctattgttgtctgcaactgatgatgatgtcgaagaaggtgg

SEQ ID NO: 84111 - DNA, 630 bp, Arabidopsis thaliana columbia
aaaaaattacattttgtgtatgaatattggaagagttaacttggtttaaggaaccaagatccaatctctaatttggtctaatcaaatagcaaaaacacatttgctctcaaatacaaaagtctaatctaaacagttggaacaaatgtgccaatataaccaactccagcaacaaaaaatgcacaagactgtaaaaacagataaacataaaagtatgatcctccatatgcgaaatcgtaacatccgcagaagaatatatataatccaacaacgagttctctccagttgagtctttgtccaaatctggtataaagcttagttgtagctttacctattaacttagacttgagagtgtcacctaatttttcagtaacaacccattcgttaacccgtcctgcctctagtaacccgatgaatgtcgcttttgtgcgatgcatcgacattacattctcgaataagatccaaaagacaagaagatggagtgatcgaggtgtagcgattgcgttaaggatagtgattgtagtaggaaaataaacagttgcccatttaggaacttggagctcagggaatagcacagttgttggtaatatcagacagtagaagacaaatgtgaagatgtgtactacaatcttc

SEQ ID NO: 84112 - DNA, 468 bp, Arabidopsis thaliana columbia
aagtattgtaggaagagaaagataagagctaaggcggcgccacgctggaagcttacttcttttaagagggaagatggagtttctgatgacacatcagaagatcattcttataagcagcaatggagggcttccgggaatgaggaagagtcttattttgagacagggaacacagcttctggtgattcatcaaatcaaatgtctgatccgcacaagggaattatcagacataaaggttataaagaatttgagtcagatgatgaggtttcagaccggtcacttggggaagagtatactgtacgggcatgtgcagcttcagagagctcaatggagaatggctctcagcattcaattgtatgacccatccatgacgaatggtgatgatatcgacaggcagcctagggggattccaaggagccaacagacaagagtttttaggaatacagtttcatatgagtcagaagataatgg

SEQ ID NO: 84113 - DNA, 384 bp, Arabidopsis thaliana columbia
agcacacaagatctttaatatggaagacgaaaacaccacaatcatcttggcgtcactctctgctctttctccttcacacctcacgaatctgactcactccattctctctatctcccaccaccatcgccgccgcctcggtgcagtcctctcctctccgaccctgttctccctcactctccggcacctcctctctctatctcttcctgacaaaactcaccctcatcgccaaccatcttctctccctcctccattcctctttctcatccaccgtaaacaccacttcctcctacgccgtcaccatgaagcttccggggacctagcacgcggaggtccttctcctctttctctgcgaaacccaccagcttcatccagatgttctagaag

SEQ ID NO: 84114 - DNA, 609 bp, Arabidopsis thaliana columbia
  unsure (1)..(609): unsure at all n locations
ggggtagaaagaagaattttcacatatttctgaaggaaaaacgaacaattcacacaggatgattcacagattaatgaagctgagtttgtcgaagcttaaagaattcaacaaatacagataacaaagctttggtagaatcaaatgacccagaaccaagcaatgacagatccagaggccaacccaacaaccaagaacatcacagtgacgattcctgcagtctccgagtgtctcagtggaaccgattttggagccagaatcatcaagacgcttgtcaagtacccggttggtaagtcccaataagcatgtcagtatagttacaggaatctcagtcctgagaaacatcgggaccgtgcaagcaaccccagaagagagggtaaaacaagaggcctagcaatgggacccccaacagcggttttctcatcctcccagcatgaatacagccggccggccctttccaacccaggccaacacattgtacgctgcaataagcaggataggggaccatcctgtaagaagctctgatgacatccccgaatgtcccggatttcgaatgnccntnttagggnanccgacctgggttnanttcgccggtccnnggggncccccgga

SEQ ID NO: 84115 - DNA, 460 bp, Arabidopsis thaliana columbia
aggccacacctgttgtgggaaaaagcaaaagaacaacgaatcttgtggtgaagcaggtgaaaacggagtttccaagaaaagtcctgttaactatggaaggatgatatcttttgggaaagaagtagcagaggctgcgccatctgagattaataatattgattttcgaggtgctgccaaaggtcagagtatcccaaatcacacctgtcgtgacgtgtggacagagcaccatgacatgggaattgctgggatcaaagctatcgctgagtataaggtctacactgctggtgaagctatagatctactacattatgttgctcctaagattgatggcgcgtggtgccgctcatttctctttatggaattcctgattgttttggatgacacccaagtttccaagttccccaaatacttggccaaatcccgttagggacaaaattaccgaatgctcctgagatggaaa

SEQ ID NO: 84116 - DNA, 443 bp, Arabidopsis thaliana columbia
gagagttgacctcctactcctctgcgtgaccgtgcactggagctccagaagtacaacatcagctccatcgagtcaacagtcgtgattcgtgagctgacgtcacaaggtctctcctttcagctctggccaagcggcttcctactttcgtcacgttgcttgataactaccgtacgtgaccctagcaagagtccactcaccgccacactcttgtcgctgaaaaaaccatcgccgttgaacatactcgagctcggatctggaaccggcctcgtcgggatcgctgcggcaatcactctctctgctaacgtcacggtgacggatctcccacacgtcttagataatctcaacttcatcgccgaagcaaacgctgaaattgttgagagattcggcgggaaagtcaacgtggcaccactacgatgggcagaagctgatgacgtcgaggttct

SEQ ID NO: 84117 - DNA, 616 bp, Arabidopsis thaliana columbia
  unsure (1)..(616): unsure at all n locations
gagggaattggcctttgctattgctatgaaacacctctggcttggacaggggctatacagactcatggtcacagttgttatcaacgaataataagcctccacgtgtaacttaacctaaaggtccctagttcagtaaacatggaaagtgaacaagcgagcgacaacatcggcgccgcaaaaaaagtggaatgattactcttcctctgcgagacgacgatgaggaaaacgacacatacgaagctaaaatgctcctcataggcgagaatggtctcgacggtgagagtttacctcctactcctctgcgggaccgtgcactggagctccagaagtacaacagccagctccatcgagtcaacgagtcgtgattcgggagctgacctcacaaggtctctcctttcagctctggccagggggcttctactttcgtcacgttgcttgataactaccggacgtgaccctagcaagagtccactcaccgcaaattcttgtnggtgaaaaaccatcgccgttgaaaaaaccggcncggntttggaccggctcgtcggtcgtngggataacctntggaaggacgnggggttccaacggntagaannnantnaagcgggaaacgggaatt

SEQ ID NO: 84118 - DNA, 453 bp, Arabidopsis thaliana columbia
gtgcggcctatgatgaagcctctgttttacagaagcttccagctccacttcagcctgttgaatcgagcggaaaccgtatccccctcgggcagagaaagctttcgtgtgatgatgagtgtgcgaagctggagcgtaagcgggttcttcaagatgcatttgatataactcccccaaatctggaggcattacatttcagcgagaattctgctatgacagagattatttcagacctttataggcgtgatccaaagtgggtactggctgttgaagagcgctgcaagttcttggtacttgggaaagcaagaggaagcacaaagtgcccttaaggtcccatatcttctgcccgatgcagaagggttaaaccgagacacgggttcggacttatagctgatgcaggtttggaaacttgcgtgttacgcaacccacgggttgggagccaaaacggtttacagt

SEQ ID NO: 84119 - DNA, 687 bp, Arabidopsis thaliana columbia
gagctctagacctcggtgtcaatgtcaagatgattactgttgatcaacttgctattgcgaaagagacaggacgtagacttggaatgggatcaaacatgtacccatcctcttctttactcggtaaacacaaagacgaagccatggctcacattcctgttgaggatttgattgagaaagctgatggctttgctggagtcttcccagagcacaaatacgaaattgtgaagaagttgcaagaaaggaagcatatctgtggtatgactggagatggagtgaatgacgctccagcattgaagaaagcggatataggtatcgctgtggcggatgcaactgacgctgcacgaggtgcttctgatattgtcctcaccgagccaggtctcagtgtgatcatcagcgcggttctaaccagtagagccatcttccagagaatgaagaactacacaatatatgcagtctcaattaccattcgtatagtgtttgggtttatgctcattgctctaatatggaagttcgacttttcaccattcatggttttgatcattgctatattaaacgatggaaccatcatgactatctcaaaggacagagtcaagccttctccaacaccagatagctggaaactcaaagaaatcttcgcaaccggcgttgttcttggaggctacatggctataatgactgttgttttct

SEQ ID NO: 84120 - DNA, 549 bp, Arabidopsis thaliana columbia
  unsure (1)..(549): unsure at all n locations
gagcggccgccctttttttttttttttttttttttgtaaaatgtcaagacaatcgttttattcttgtttttcccgtttgcttaatggataatatggaaaaatgataatatatagaagtacaaactttaaagaaggaaaaaaaataagaaattaaaaagcagtgcagaatgaagcttctgattctcctacacaatcatcaaaaacttgtttttgaactttcaatcttcccccatttcaccaaagtcttgagaaacttcttcacctcggaagggtctctaagagagtaaaatgcattgctttcttttggtacagacgataccaatattccaaatcctctggttcccttccctcagtaccttgaatcgcatccttcatcggtcttggcatctccgatgaagattgggaggaactcatccgttcgttgcttaatcccaaagactctaacagaaactctactgctttccctgggccatcggttaaagggcgaaccgctaaanctttctaccgnggnttaacngnaaacgngggnntggttcagggggcnagaac

SEQ ID NO: 84121 - DNA, 432 bp, Arabidopsis thaliana columbia
agacttataagtatatgttctctattatacttgatccaatcatctggaagtccaagaacaattcttgaatcaatggaacaaaacaatacatgtaacatgatgagtatgggggtctattctaagctacaagccacatgaagaatgttggccaaacagtgagtgcaatcgaagccaaagagtaagtccagagcataatcactgagcattcactctccccagttccaaataactgagtaattgtacctagattcatggctggtgggacagcatattgaagaagaagaacgaattggtataagggctctgatgtaactaaatccaacttatatgctcctcttacgagtaaaacaccgctcataggcagtaaaacgtaacgcgcaaccaagactccgataatactggacattttcattcctgaactcctcaaacctt

SEQ ID NO: 84122 - DNA, 466 bp, Arabidopsis thaliana columbia
  unsure (1)..(466): unsure at all n locations
cgtggtgttagaatcaaagaaaccgcttcaaggatggtgagtgaaggagcaacaagaaaagaacttaacctctgtttcgagaatatgaagatggaaggagttttgatctctgagtggaaagatatccctgtggagcttctcatgaagattttaaaccttgttgatgatcggactgtgatcattgcttcttgtatttgtagtggctggagagatgctgtttcccttggcctcactcgcctctccctctcttggtgcaagaagaatatgaacagtttggttctatctcttgctcccaaattcgtaaagcttcagactttagtactgcgacaggacaaaccgcagcttgaggacaacgcggtggaagccatagcaaatcactgtcatgagctacaagatttggacttaagcaaaagctcggaatcactgcccattcctnttattactttcccggggttnacttacntgc

SEQ ID NO: 84123 - DNA, 532 bp, Arabidopsis thaliana columbia
tgagatcccaattacaatttcgcaaggctttttgcaatttccatctgtcgctcaccggaggaattagaacgtgctccgaatctcttctcttccccaaatagattccgatcgattacgcaaccaaattctcggcgtttgaatttttttttccggagaacaggtggtttcttcttctccaggaagatttttgattctcctgtcggatgatttctcagtgaaaatcatggaatcggtatcatcacgcggcggagaccccgtcgtaaaacccgtcgatggaggtcttggcatttcccagattgctgtctatttcgctttcggattcttcttcttgaggcttgtcctcgatagatacgtctttcaaaggatagctctttggcttttgagtactggttctgctccgattaaattgaatgatgctgctactcgggcaaaaatcgtcaaatgcaaagagtccttgtggaaattgttgtattatgctgcttgtgactttttcgttctacaagtcatttatcacgagccgtgggctagagat

SEQ ID NO: 84124 - DNA, 596 bp, Arabidopsis thaliana columbia
  unsure (1)..(596): unsure at all n locations
gaaagaaaaattgatatatctgttaagtctgaaaaatgagaagaattcgatcttagtgtttggagttataaaagagtaatgactcagcaaaatcgaaatcaatgtcttggcttcgtttatttcatctggacgattcctgagctgataagcttttggattttgttcatgatcattgggttctgcatgtgcttttgtgctgctgctggattctcctggagatcagacagtacctgtctcattacaggatctgtgagaatgttctgaatttctgggtcttgcattcccttagcctgtctttctttcaaattcctcaggagtaaggtcgccacgggtttgccttggtttaacctggttggtacacatcttttaaacaccatccaagaagtncctgggtaattaaggancatggtccggagacccctccngggaacgttcccaatngaattggccaaaacccctcaatgnagaaannggnnnggaccctttccaaccggaacccctttaanaanggtggggncnggcccgaaanaatccccnggaactttaaacccccggggattncccccagttnaggggaaangancccggnggnaaag

SEQ ID NO: 84125 - DNA, 762 bp, Arabidopsis thaliana columbia
  unsure (1)..(762): unsure at all n locations
nnnnnnnnnnnnnnnnnnnnnnnnnnnnnnnnnnnnnnnctgctttagggaagatggctaaagtctcgaaagactatgaacctgtgcttcagacttaccagaaagctcttacggagcatcgtaaccctgaaacattgaagagactgaatgaggcagagagagcaaagaaagagttggagcagcaagagtactatgatcctaatatcggtgatgaggagcgtgagaaaggtaatgacttttttaaggagcaaaagtatcctgatgctgtgagacattacactgaagcgatcaagaggaatccaaaagacccgagagcatatagcaaccgggctgcatgttacactaaactgggggcaatgccccgaggattaaaagatgcagagaaatgtatcgagctcgatccaacattcttaaagggatacagtagaaaaggtgcagtccagctcttcatgaaggagtatgacaatgcaatggaaacgtaccagaagggtctcgaacatgatcctaataaccaggaaacttcttgatggtggtaaaaagatgtgtaccacagataaaccatggaaacccggggggacctttactcctgagggaatttgaaagaaacgacagggttaatgggaattgcaagaaccccaaaaaatttaaaaaaattccttccccagattccctggaaatgggagaccaagggtcctgggtcttggaacctctccaggggaggaaatccccacgccagcaagggtcaaaaaaaatgtcccccat

SEQ ID NO: 84126 - DNA, 465 bp, Arabidopsis thaliana columbia
agcggccgccctttttttttttttttttttttttttgagcttccaaaacacaagctttaagtatgactgtatgagtaatcaaaaaagatactaagactttgaaagcttcatacataacaaacagagacaacaatagaagaacccctttttacttgaacaaatgggcaagatcagggtcatctaaatctacatcaagcgatccatttaaccgcataaactcgatgtagctatctggaggagtgatcgcacgagtgttgttcttcggtttgaatccatgaactctctggagatctcttgcgagccaacgcagaaaaactttgtccaatggaggtacaatcttcaaatggatctcttcccgttcttctttcaccgttgtagctttgtttcccatcttgcaaaacccgatctttacctttttcaatcagagagacaaaacattagaaaccgaaagtgagtcgaagaatc

SEQ ID NO: 84127 - DNA, 602 bp, Arabidopsis thaliana columbia
  unsure (1)..(602): unsure at all n locations
atcattactaaaacattttcatttctgtttttttagaaacatagattcggttattatcgtaagaaatctaatacaactgtgaactactacataaactgaattgttcaaaagaaaacatcgaaataatatacagaacaaaaagggaaaacaacaagagctgtgaaccacaaaggaattaaaccgggttttgactctccttattggaaccggaactaaaccgggatttcaatcctccttatcagaaccgtaatacctcttaaacgctctgggtagataaaccggaatcaaaacaccaaagagattaaacgaccaaatccctaaattagccgccgccaaaactttcccggcatacatccgccgcgcagaaaccgtccccgtcacatcctccctcgggaactcactcataatccactccaacaagggtcaaaaccctcctggcgttgtaaacaatcgggacaagaatcctcgccgggagcaggagaagccaaacatgggcgctaatcctttccataaaaattttgcctcggtntaaaggaacagtgggggtgaagttggggtnaaacnggtttttttnatcctcaangttcctnnggagnggggng

SEQ ID NO: 84128 - DNA, 612 bp, Arabidopsis thaliana columbia
  unsure (1)..(612): unsure at all n locations
tanccccnccaancccctaaaaaccccccggnggggaaanattaagtttgtttaaacaanttgaannaatnntttggganaaccnctgcttaantagcctnattgagccaagggaaaaaaaaaaaaaaccannttagagagtgttcccccagctacgggttgctaaaatattccaaaagctttgatccatctctgcttcactatccaggttttcccttcacatgttttcttgaaagtacttccgaagtctccccgctgtttccgtacatcggacggatcaactttgtaaaaaatagtcatcacaacttgccccgaagcttctttgcacttcaagatttccaccaactcatctaagcaccagcacgaagaagcgtacttctctgaaagcaccacaatcgagactctagattctctaatcgcttgtatgagctcaggtccgatcgtatggcctctctcgatctcttgatccttgaacggagtgatccctttgctttcgaagtgattgtgtaaatgactgagaaatccactacggacatctggtccatggaaactcgaaaagacatggtatctcttgaagtcagacggtgatgaaaaagccataagagatagagt

SEQ ID NO: 84129 - DNA, 557 bp, Arabidopsis thaliana columbia
  unsure (1)..(557): unsure at all n locations
aatcaagttggtgggtcttattaaatgatagaaattccacggttgaagaaacagttaagaaagagaaaagcattctaactcattgagccaagagaaaaaaaaaaaaacagcttagagagggttctccagctacggttgctatatattccaaagctttgatccatctctgcttcactatccaggttttcccttcacatgttttcttgaaagtacttccgaagtctccccgctgtttccgtacatcggacggatcaaatttgtaaaaaatagtcatcacaacttgccccgaagcttctttgcacttcaagatttccaccaactcatctaagcaccagcacgaagaagcgtacttctctgaaagcaccacaatcgagactctagattctctaatcgctggtatgagctcaggtccgatcgtatggcctctctccgatccctggatcctgaacggggggtcccttggnttngagggattgggaaagctgggaancnctanggaatctggccatggaaccgaaagaatggaccctgaagcagngggngnaagccaaggnnag

SEQ ID NO: 84130 - DNA, 551 bp, Arabidopsis thaliana columbia
  unsure (1)..(551): unsure at all n locations
tcttcctctccttccataagaagaagcagaagaaagattagatgaagcggcttaacgaactcaggagcttctcgcacgcagtcaatgaccagaagaagaaggcaccaaagcaagaatcaagcaagaaagttttcccatcaagactcacaatgtcttggctaggtcaaggaaagggtaataacaacaacacgcaggaagtccctcaagaacatgatgcacgtagagacagcacaagcgcattcattccttgattttcaaacctgaccctcgaggtcaaaaactattcgatttcaacttgattatgtggatatttcaatctgcagttattgacattgagagcctacacaaagatatctatttaagcgatactctctaacgcaagatcaatcgtttgtttgcattgtgaaagttaaacgagattgattcattatttgcatatgattttggtaatggggttaaataatattgggtcatcttcaaattaccggttnantttnaaaaaaananntanaaaaaaaantggggggcccnttggggcccggttggccgtc

SEQ ID NO: 84131 - DNA, 546 bp, Arabidopsis thaliana columbia
  unsure (1)..(546): unsure at all n locations
agtaacaaacccaccctacactgcttctgtttgctgctcaagaaaattgtcactgccaagattctagatttggatttgttttcaagagctgtgaaagtttataccaaaaatggtaatgctttgacggattccttgctgaaatctgtcttaaagtccttgagaagcgtggatagggttgaacagagcaatgagctgttgaaagaaatgaagagaggaggctatgttcctagtggtgatatgcagagcatgattgcatcaagtcttagccgtaagggaaagaaagaggaagctgatgaatttgtagactttatggaagcatccggaaataatctagatgacaaggcaattggcgtctcttgttgaaggggattgtgattccggggatcttgatgaagcttagtgtgttccggaaaatggttggaaccgagggggnccccnaatgctgatnatccatttnagaagttggtcttncttnttcaccagntcangtaggggcggtncaagttttggtcccaggccggaaaccactgaccncccttgcggngc

SEQ ID NO: 84132 - DNA, 382 bp, Arabidopsis thaliana columbia
  unsure (1)..(382): unsure at all n locations
atcagccattaccttggcctcacacagaacattcagtcgagtatggaactcgtgagatcagcggacgagaagtatcatttctcggatttcactaaatccgcggttcttgtcacgggcacagctgctgtagccgcagccaccattacagggaaagtggctgcagctgcagcgactagtgtggtcaacagtcgttactttgctaatggggctttatggttctcagatgctttgggccgggctgcaaaagcagcggcccatatcggtggaggaggaagcaattgatgtaaaaagtctttgggcttccttggaaaccataaataaatgatatgtgaggttttnnnnnnnnnnnnnnnnnnnnnnnnnnnnnnnnnnnnnnnnnnnn

SEQ ID NO: 84133 - DNA, 427 bp, Arabidopsis thaliana columbia
  unsure (1)..(427): unsure at all n locations
gaagcattcaagaatccattatgagctcatctgattccgttaataacggcgttaactcacggatgtacttccgtaacccgagtttcagcaacgttatcttaaacgataactggagcgacttgccgttaagtgtcgacgattctcaagacatggctatttacaacactctccgtgatgccgttagctccggctggacaccctccgttcctcccgttacctctccggcggaggaaaataagcctccggcgacgaaggcgagtggctcacacgcgccgaggcagaaggggatgcagtacagaggagtgaggaggaggccgtggggggaaattcgcggcggtgatttagggatcccaaagaagaacggngctagggttttgctccgggncttnncgnaaacgccgnangaacgngnnngttgngtangacc

SEQ ID NO: 84134 - DNA, 699 bp, Arabidopsis thaliana columbia
  unsure (1)..(699): unsure at all n locations
ttaggacacctatagaattacttgacgtcccatgcacgcgtacgtaagcttggatcctctagagcggccgctttgttttttttttttttttttttttttttgcaaacagatatattccataacatttgggctttcacctcatgaatcatgatagcagcacccacattgtcaaattttcccgatacaaaacactatcacattttgggaaactagagatcctaactaaaagagatagttttagtgttgtatcaactcgggaatgagcttgagaagaaaggagagctctctgtcagagaagttaggctttggcttagtaccatcagcatctctgttggatggcttcatcatctccctcaccgcctctgttatctcctccacatgatcaactatcactccctctatccccatcaaatgctgcatgtaaaccgcctcggctacattgtttagctttccgtatgtcatcagagagagcttggattcttttatcttgttgacaagagcggggttgcggaatactcccttcacctccgagacaatcccttggaggcctccttctaaacatactttgattgcttcctcaagggaattccttctcgtgtcgtggtacatctaaagttcctccgtttggtnaagggggtttcccgnaaattgaatttggggncaaaaaaaagggttngggggtnaaagggggaangggnt

SEQ ID NO: 84135 - DNA, 1133 bp, Arabidopsis thaliana columbia
ctaaaataaaagtgaagcgccttcctcaggattttcccgagttagtttcgctttcctccgagaaaatttcagacttaaattttccggaatctaataaggagaagccattgttgaagaaactagtctctctgtttcgaatcttcaaattcagattcaatatctatcaggaaaatttcgcatgggggtgaaagtagcttcttcgtctactttccttcaatggactactcagcctattattcatcagtcgtcttcaccatctcaaaccctagcttcgggaaccataacatctccttcaaaacgacgtagcacagtacacgacggccggtttctatcatgtcgtttcgtgacacagagactaaaccgttcggctcttttcggatctcccgccccgaagcttcatcgacccaagtcatgtgagctatggaaatcatcatcatcatcatctagaccgatcaaaactcagtcgtttcgaagagtttatagcgcaaacttagatccattctccgacgaagagttctcgaaaaaaatccaagagctaactctcagattcaatatcccacaccatgacgacgacgagaattcaatcgagccgccatggaacgagattgggtccatttgtccggggtattgaaatgaaagcaaacagtgttgatcttcctctttcacttcgtattataaagaagaaacgtcaatgggaagaaggagttaaacaagctgggtggaatctgcgtgtttgctccgatgaataaaagctttttccttcaatggtggtttatgataccggggggcttcaagagcttttacctttacaatatggagagaggttcctgttcttacggagacctttgcaagagattttgcctaacggaggttgagaagagatgcaaccatcctttcggtttggttgttgcaccaagatttctctgctcctcctacggttgatgggttatggtatggttccctttaccaatttcccttggttttctttccggaacaacagctccgctttagccgctggtgctcctcttgctccgacgaatacggagttaaccactgttagggaaacagaggaaaacaaccgtgaagttttgaatccctcggtgggtggaaaaacgtcttttgggttcatcttc

SEQ ID NO: 84136 - DNA, 412 bp, Arabidopsis thaliana columbia
agcagacaatggaggaggttacagtgctcgtaacctcctccgaagagtgcaagcatcagcggttctaaatgcattggtgtccaatctaaaactgacaaagaggataccatagctgaggaagaagataatgaaacagttgcagagcttactgataaagttgcttctcttcacaattcttaaaaatgatttagttattttttttcttttcttttcttttttcacgaaagttttctggtgaaaagaaattggtttctccattcatccacatctatcttcgtggttgggtttgatttgttgtatttaatagttttgggggtttgatgaaactttaaataaaaacatcgatctccatgtaatttttttgtttctctcttttctttaaacactcatattttgaaattatttatatact

SEQ ID NO: 84137 - DNA, 538 bp, Arabidopsis thaliana columbia
  unsure (1)..(538): unsure at all n locations
gccaatttcaaagcttgaatttgactttgagagaaagaagttagttaaagatgatgtcagagaattaatttaccgagagatattggaatatcatcctcagatgttggaggaataccttcgtggtggtgatcagcttagctttatgtacccaagtggggtagaccgatttaaaaggcaatttgctcatcttgaagaaaatcaaggtaaaccaggagcagcaggaggaggaagaagtactgcacttcacagacatcatgcttccttgccaagagagagagttcctgctccaaatggtgaaacttgcagaagaaagcagtgatgttgagagaagagcagcagctgctgtgggcttcaaccttggaatccgtggaagcagacaatggaggaggttacagtgctcgtaacctccattgaagagtgcaagcatcagcggttcttaatgcattggtgtccatataaactagccaaagnggttccttnntttggnggaggtattnaccanttnnggttcctgtaagtgcttcnttcnanttttttc

SEQ ID NO: 84138 - DNA, 515 bp, Arabidopsis thaliana columbia
tgaagcttgacacatcaatgttgaataatatcaaaaatgattttaatttctgcacgaagctagttagtgaggagagtcttatccttataccaggagtggctctaggggcagagaattgggtgaggatatcgataggaaccgacgaatcagtggtacaagaaatatttgacagactaaaaggtttctatgatcgtcatgccatctccaaggaagctatcaaactcagtggccatgccattaaccagatcgtcgtctctgtcaactgattgtagtagtcctatgccacaagtccacattataatttgtgcgtaattccttaattatcaggaacacaatcaagaaaaatagcattggataatgaaataaagatgtgtgaaaaataaaaggttatttgttttcattattatactcattttcaacatagtttttgatacattgtctatataaaattgggccaagtggaccaaaaggaaggtccaatttagggggggttcttccaaaagtcctcttattcc

SEQ ID NO: 84139 - DNA, 583 bp, Arabidopsis thaliana columbia
  unsure (1)..(583): unsure at all n locations
cgtttttttatatgggtagttaagcaatagaggattttcttgatttaactccacagccttcatttattctccaggaagcacttcctgatatattggagaaaacacctaaagagttcttcgagaagaagatcaaagccatgagacgcaacgtcgagctttcatgtgagaggctcaaggatattccttgtctcttttgtcccaagaaacccgaatcttgttcttatttatggttgaagcttgacacatcaatgttgaataatatcaaaaatgattttgatttccgcacgaagctagttagtgaggagagtcttatccttataaccagggagtcggctcctagggagcaggagaatttggggtgagggatatccgatagggaaccggcgcaatccaggtgggaccaaggaaatatttggacagacctaaaaagggttccaatgaccggcaatggccatcccccaggggagccatcaaaccccagggccatgccattaccagatcgnggccctgcacgggtgaagagccctgccagcccntttattggggagcctatttcggncatcgaaagctggntgnaaaggng

SEQ ID NO: 84140 - DNA, 395 bp, Arabidopsis thaliana columbia
gaaaggattagtagatttgaatcggcagtccgtccagatccaaaagaggctgcattccttaaatcccttggttgggatgagaatgatagcgacgaatacacccacacaatggaggagatgagagattggtgcaagaggttcaagccatcactgctgcagaagctgcctatcatataagaggcacctgagggcatagctcccgactcgtgatcagattttgttcggggttttcagatggaagatagtttttcattctcttttcttttctttattctctttggatttttttttttttcttttggttacttcggcgctggctagaaggtggaaaggctttagttgcagtaagagtattgatctgcttcttcttcagaggtgcaacaaaatgaaaaatg

SEQ ID NO: 84141 - DNA, 552 bp, Arabidopsis thaliana columbia
cacgcaggggggaggggccgttccagggcagacgatcaacgtcgaggacggcgatgccgttgcgcgtcgaatgccggcacggggatggagagcgacttcgcttcgttccactctcggtcggcctcagtgatccagcgaatcaaccccatccaggcgggattgcccaccttgcgcatgcgtagcttgatgaagcgataggcggcgccgtcgatgttgagcggcgccggggactggatgccggagttgttggtggtgttgatcggccgcagcatgccgtcggcgatagtcggggcgccgtacacacccgtccagccttccagtcctgcgttgaaatgccagatgccggcagagtcgaactgcgtgccgctgcctgcggcgacctcggccagagagcgtgccatcgaatccaggccgttctggactttcgtgtggaccgcgctgatgtcagcggtgcgctcgtttttttcgttcagcacgctctgaatacgggcgcgctcttcgttggccaggtttaaaaccagatcctctgcacgcttggccacttcgcccact

SEQ ID NO: 84142 - DNA, 519 bp, Arabidopsis thaliana columbia
  unsure (1)..(519): unsure at all n locations
tcagggnccgggccggaanttcccgggtggcccactgggtccgggttattggaaacggaaatctaccgtcacggtgataaggattgtaccttatagcgcagtccagttgtttgcatatgaaacatacaagaaactcttcagggggaaagacggtcaattgtcagtcctcggaaggctcggtgctggtgcttgtcctggcatgacgtctactctgattacataccctttagatgtgctgagattgaggttagctgttgaaccaggttatcgaaccatgtcccaggttgccttgaacatgctgcgggaggaaggagttgcatcattctacaacgggtctaggtccttcgctttttaaagtatagctcctttacattcgccatcaaactttctgcgtctttgatctgggtaaaagaaatctctgccagagaaggttcaacccaagacacaatcatctttgttaacagcagtagtagctgctgctattgctaccggtacttgctatccattggataccattag

SEQ ID NO: 84143 - DNA, 437 bp, Arabidopsis thaliana columbia
ttctgtttccaaaatggctcgttttatggctgcattagcattggcatacatgtttgatggaaggatggatgaatacgcgatgatagggacttcattggaaagtacatctaaaagtgttaccttaaatggtgctagaacaatgggctcttgatcaaattcaaagccttcattaaaactttcatgggaccaccaaatctcctcacctggggctttatcatcggctccatcctatgttagcacaagtctcgggagagagctcggatccccagaaggctgggccactttgacgatgcagtggttccgaaattggaagatttgttacaatgttgcgaaacccttgtcttgtactcagagcttgtgcagcttttgcacttcttcagtttacaatacctgaaagccgtcacgcaatgcatcacgcaagcttgatgcagaatgct

SEQ ID NO: 84144 - DNA, 1762 bp, Arabidopsis thaliana columbia
atgctttcaattactctcgccgacgattttctcaccggaaaaaaacaatatcattgcggatacacaaactataatggacctcctcttgctggagaagtctttaatcgccgtcttcgtggcggtgattctcgccacggtgatttcaaagctccgcggcaagaaattgaagctacctccaggtcctataccaattccgatcttcggaaactggcttcaagtcggagatgatctcaaccaccgtaatctcgtcgattacgctaagaaattcggcgatctcttcctcctccgtatgggtcagcgaaacctagtcgtcgtctcctcaccggatctaacaaaggaagtgctcctcactcaaggcgttgagtttggatccagaacgagaaacgtcgtgttcgacattttcaccgggaaaggtcaagatatggtgttcactgtttacggcgagcattggaggaagatgagaagaatcatgacggttcctttcttcaccaacaaagttgttcaacagaatcgtgaaggttgggagtttgaagcagctagtgttgttgaagatgttaagaagaatccagattctgctacgaaaggaatcgtgttgaggaaacgtttgcaattgatgatgtataacaatatgttccgtatcatgttcgatagaagatttgagagtgaggatgatcctcttttccttaggcttaaggctttgaatggtgagagaagtcgattagctcagagctttgagtataactatggagatttcattcctatccttagaccattcctcagaggctatttgaagatttgtcaagatgtgaaagatcgaagaatcgctcttttcaagaagtactttgttgatgagaggaagcaaattgcgagttctaagcctacaggtagtgaaggattgaaatgtgccattgatcacatccttgaagctgagcagaagggagaaatcaacgaggacaatgttctttacatcgtcgagaacatcaatgtcgccgcgattgagacaacattgtggtctatcgagtggggaattgcagagctagtgaaccatcctgaaatccagagtaagctaaggaacgaactcgacacagttcttggaccgggtgtgcaagtcaccgagcctgatcttcacaaacttccataccttcaagctgtggttaaggagactcttcgtctgagaatggcgattcctctcctcgtgcctcacatgaacctccatgatgcgaagctcgctggctacgatatcccagcagaaagcaaaatccttgttaatgcttggtggctagcaaacaaccccaacagctggaagaagcctgaagagtttagaccagagaggttctttgaagaagaatcgcacgtggaagctaacggaaatgacttcaggtatgtgccgtttggtgttggacgtagaagctgtcccgggattatattggcattgcctattttggggatcaccattggtaggatggtccagaacttcgagcttcttcctcctccaggacagtctaaagtggatactagtgagaaaggtggacaattcagcttgcacatccttaaccactccataatcgttatgaaaccaaggaactgttaaactttctgcacaaaaaaaaggatgaagatgactttataaatgtttgtgaaatctgttgaaatattcccttgttttgcttttgtgagatgtttttgtgtaaaatgtctttaaatggttcgttctacgattgcaataataattagtggtgctcattcttaaaaaaaaaaaaaa

SEQ ID NO: 84145 - DNA, 1087 bp, Arabidopsis thaliana columbia
ctttttaccgaagagactcctccggccggtgagttttcggacgcagatcatcatcagattcttgtctctctctgttatctgagtgataagaagtattttcagtgcttgaggatctgcaaaagatatccatctgcggtttaacaatggttctattacagttggatccattcctcaatgaactcacgagcatgtttgagaaaagcaaagagaagggttctgtgtgggttactttgaaaagatcatctctcaagtctaaggtgcagaagaggaaactgagctcagttggagaatccattgaatacagatgccttattcgagcaaccgatggaaagaaaactgtttctacttcggttggtgctaaggatcaccagagatttcaagcatcatatgccaccattcttaaggcccacatgactgctttgaaggagaggggaaggaaagaccggaaggaatcggcagaggcagagaaggaaggaaagcacttcaaccccttaaatctaaggaacttttgatttcccccttttgggtttcccattgatttgcaattgctgcttaagggttgaattttgaaagcttttgaaggctctaaaaggttttgacttgtgttataatagagattttggtttgcatttgcttttccctcgagaatgttcatcgtgtataaataaaccaattccatacaaatgtgcgaacataaatccaattcaaagaaactgattctaaatttcaaacactaagaaaaaaaactcaattgttattttggatctcttcctgttcctaacctagtaagattcctcatcagaatttgattccacataagcttcatcagaatttgaatcaacataagccttgataacacgtctgtacttctcagggctatcataccaggttggtgtgttgatgatcgccttttctagccaatactcatcatacactctttgcctcgacatcttctccaagaatcacgttccaactatccatggctcgggtcaatcgaacagtcttaggtcttcccataagaaacctaatgtaatcccttgcaagcttgaccaattcctccccagtgataatgtatgtgtacaaaaag

SEQ ID NO: 84146 - DNA, 529 bp, Arabidopsis thaliana columbia
  unsure (1)..(529): unsure at all n locations
acgagactgcatatgagaactaccataggatctttgtccctgaaggtaagccattgaagtgtgaatcaagagagccattgagagttaacacaatgttccagcacattcagaagatgctctctagtgaaaccgctgtgattgctgaaaccggtgattcttggttcaattgccaaaaactaaagctgccaaaaggatgtgggtacgagtttcagatgcagtatggatcgattgggtggtctgttggtgcaactctaggatacgcacaggcatcaccagagaagcgagtgttggcattcatcggtgatgggagtttccaagtcacggttcaggacatatcaacaatgctgcgtaatggacagaagacgatcatcttcttgattaacaatggtggctacaccattgaaggtggggttcatgccggtcctttaacgnnntaagacctggactncactggctcgttncggcattcataccggtnaggaattctggcttaaaggtnggtcgaggggggtngtgngcggttcggnac

SEQ ID NO: 84147 - DNA, 443 bp, Arabidopsis thaliana columbia
tttttgaaactgcaaaaggagctttactttattccatgataaagcgtacatggaaagagatactaataagtttgaaacatgattaaacccaacggtcgaaaaatcaacacttatcagaaaatgtcactaaattggtaagaagcattgaagattctgtgttgcttcttctactgaggattgggaggacggctgttagcagcagagacgcgtgagccccactcaagcaactctttgctcgtatcatccttgtgaagaatcacttctatgaaacatagacaatctttcttctccgtcgtcgctgtcgtaatcgcctccactaactcctcttcgtatctcacctttgcagtccagcaattgccttcaccgttatgaatgggcgtcaacgagaccagtgtagttccagttcttaatcacgttataaggaccgtcatgaatctctactt

SEQ ID NO: 84148 - DNA, 536 bp, Arabidopsis thaliana columbia
  unsure (1)..(536): unsure at all n locations
tgtcaacgntgnctgattncaaaccttnaaggttcgggcnttcgtaccaggtttggccccgccattagatttccggggaagggtttttaccccggccttaaatggaacgaggatccttctctccaaaagcttgtcatcggaggagaagtttgcatgtggggtgaaacagctgatacatccgttgtccttcagaccatttggcctcgtgctgcagcagctgcagaacggatgtggagcaccagagaggccgtgtcaaaggggaacataacgttaaccgcattgccacgtctacactacttcagatgtctactgaataaccgtggcgttccagcggctccagtggataacttttacgcacgaagaccccccttgggacctggctcttgctatgctcagtgatccaaaacgtttcttctcattgtactatatgtaatgtctcgtctgaaatctggttgtcacgttgctttttctgttctaaattgtgtgcttctcaatttactcaaatcatgacaacatctgaaattacgatctaaaac

SEQ ID NO: 84149 - DNA, 365 bp, Arabidopsis thaliana columbia
  unsure (1)..(365): unsure at all n locations
gaaaaaaagtagaggctcatcattcaatcaatatgaagatgagttgttatgttgtgtatatttagaaatatcacaagatccaattggtagtaataaccaatctgggaaaaaataagtaaaagctaccacgaaaaaaactggaaggttgggaaatcaaaagcttcagatctttatagagtaggatggtagcattacatatgttgttagaaatctaaagagctgcatcacccaagtggagaatatgcatccatgtaattttattatcattgtgttgcttgattttgtattaaatttttaatataatagtttgttgtgtaatatttgtttttaattctaaccttatacttttanngtaaaanacnnng

SEQ ID NO: 84150 - DNA, 408 bp, Arabidopsis thaliana columbia
cgaacttcaagttcaaagagcttaggggggaagactaagggatcgagttctaaagccagcagctccgattcaagccattggccttgtgaatattgcacttacgtaaatccaaggtcgaccaccatttgccaaatgtgtgaacatggccggtgaaatgccagaaactggcattaaagactgtaatagtaatgcttcgtcgcttttggtcataattatgatcaagtgtcgtgtaactttgtatgtttctcgtattagaataaacgggtccaataaattggattagattggccattattattgatttgccaatggccaaaaagtgaaaacatgagaggtgagttatatataagcccttccaaaataatttgtaaaactcctgtaaggttttttctaatcttttgtccggac

SEQ ID NO: 84151 - DNA, 375 bp, Arabidopsis thaliana columbia
agcggggtggcggcgtcatcgccgcaggaggagggggggagagcaggaagatacatgtcggggtctcggacgacccggtgggtggcgcaaagcgtcaagcgaaccggtgttacagggagttactaagttttcgttaattttagtactcgccagttcgctattccacgatttgtcggagaaatgtcggggtcgtggctggaacagttcgtcgcgcccaatcggacaattccgtctcacttggtcggtgattctttcagaatcaataggttgcgtttcgctctatttcgttcatccgcggcccgttgaacggtcacgcacgtccagtttgaccccgacgcacggcctgccgaccataagctgttaattcgcgacatc

SEQ ID NO: 84152 - DNA, 497 bp, Arabidopsis thaliana columbia
  unsure (1)..(497): unsure at all n locations
ccctaagcatttcccagattggnttganatgccaggttctctaatcctncnactggtagtttctccacacttccttgctcaccatatacgtggaaccnggataggcactgtaatcagcctttnnattggatgtaaccttcttcaagaacatattcgagcatcgggtggattcaggaactcattcacacagccccgtggagtatcaaacactttagggatcatccttcttttggtctaccctgtctgggctctaatcgtccgtgtcatgtaatccacattcctctttcatcgacaagttgtttcttgctcggctgctccaataaactgcgtgaaacatcgagcagagcaagtctctatggtgttcctttcttctgattatgttgcatacccaaatactacctcaagctcaatcaatggtctatgtattaaaaaatctcaagttttcaaactattttggttggcttctnttaaggaaaaagntcntttatttggnttgg

SEQ ID NO: 84153 - DNA, 329 bp, Arabidopsis thaliana columbia
gcaagaacaagtgaatacgattgctgctgtgagattatatccatcttccaaaaccttaaaagacccgtcgacaagattttggaagatggatataatctcacagttgcaagaacaagtgaatacgattgctgctatcactttcaatgcttttgggacactgcaaagggatgcaccaccagtccagctttcacctaattatcctgaaccacccgctacaactacggttactgatgatgctacgccttttcctgagcaacctaagcagctcagtgctggcttagttaacgctgctaaacagtttgatgctttggctgctgcacttcctttgt

SEQ ID NO: 84154 - DNA, 876 bp, Arabidopsis thaliana columbia
gggctctctttcatcttcgtggtttgccatagctcttcttgaatcaaggtcgtcttcttgaaatcagatctcttcgtgacttctcctgtaaccaacaaagaaccatggagctcctctctagagctcttttcttctttcttctactctcagttctttcttctttctcttcttcaagtttcatttcagatggggtcttcgaatctcagagtttggttcttggcagaaacttgcttcagaccaagaaaacatgtcctgtgaactttgagtttatgaactacacgatcataaccagcaaatgcaaaggtcccaaatacccaccaaaagaatgttgtggcgccttcaaggactttgcgtgtccttacactgaccagctcaacgacctgagctcggattgtgcaaccactatgttcagttacatcaatctctatggaaaatacccgcctggacttttcgctaaccagtgcaaagaaggtaaagaaggtctcgaatgccctgccggatcccagttgcctccagagacatcagcagaggtaaacgcagcaactacctcgtcgtcccgtctttggctgaccgtttccgcggctcttttggtttttgttaagttgttctgaggctgataaatccgaatttctgcaatgaacttattacaacaacctgaggaagaggatgtatgtatatccacgatttgttttactgttgtactgtctcattcttttgttactagggagttcaaaaaattctaaatgataatttgtaatggcctttgtgtgtctaaaaaaaaaatcttataaaaaaaaaaaaaaaaaaaagggcggccgctctagaggatccaagcttacgtacgcgtgcatgcgacgtacatagctgttcgatagt

SEQ ID NO: 84155 - DNA, 685 bp, Arabidopsis thaliana columbia
cggcccttagctgtcgctgcagttcgcagtaccggtccggaattcccgggtcgacccacgcgtccgggcaacgtggccatcagcgctctgcagatcaccttccctgcggccggtgcgtcaggcagtggtggcgggagcatcggcggtggcggtggaagtggtggatccagaaacccggcattcgaggaagtaccgctatgagctatgtgaagaaggatggtgttcccgtcgaccctggtcagaccgtggtcgagctggataccggtgatctggttgcggtggtctgcactcggacactgcagggcgggcagatcctgttccgcgggttggcccgcgccatcaccgaggccggtgtgccgctgatcagcggtgatggcaatgccatcgaacgcgagttccagcacagcgaccccagaccggccaagggccgacgacgtcgcccgggatgtgctgctggcgcttctcggggagcagccgcagctggttgcgtggtcggaccaggtgctgctggacgtgagcatccgccaggcgcttgccctggccaacattgataccggggccgtcgacgcctcggccgttctgtaggagaaaagatggcgacgattgatggccggcagatcattccggcggcagaccttccgcagcggtcagctggcgtgcttgacgctatggtgggagtggttcg

SEQ ID NO: 84156 - DNA, 792 bp, Arabidopsis thaliana columbia
  unsure (1)..(792): unsure at all n locations
tccgtctgcagtaccggtccggaattcccgggtcgacccacgcgtccggtcacatacatcgcgcgtggaaatgttgcgctatcagtgttgatgacagcagctagcactgtttcagctgtgattatgacaccgcttcttacggcgaagcttgccaagcagtatatcacagttgatgctcttggattactaatgtcaacactacaggtggttcttctcccagtgttggctggtgcatttcttaaccaatactttaaaaagctggtgaaattcgtctctcctgtgatgcctccaattgcggttggaacagttgcaatcctgtgtgggtatgctatcggtcagaacgcatctgcaatactcatgtctgggaaacaagtagtcttggcttcatgccttcttcacatctctggatttctctttgggtatctgttttcaagaatactcggaattgatgtggcatcatcgagaactatctctatcgaagttggcatgcagaactcggtgcttggagttgttcttgcgacacagcattttgggaatccactcactgcagtaccgtgcgctgtttctagcgtctgtcactcaatcctcggtagcggcttggctggaaattttggagacgcagtgcccccaaaacaagctttgaaggcttaaaagaaaggcaaagggaaaggtcatgaaggncncancttgtggtaactcaatttcaaccatcntttcaaggnccctttaggtaaaggttnttgnaccaaatngaccccaaacngggtnatggctttttaaaaggttttngga

SEQ ID NO: 84157 - DNA, 667 bp, Arabidopsis thaliana columbia
ctggccgtctgcagtaccggtccggaattcccgggtcgacccacgcgtccgcaacaacagacgaagcaacatctttgatccattctctcttgacgtatgggatccattcaaggaactaacatcatcatcactttctcgtgagaactcagcgatcgtgaacgcacgtgtggactggagagagacgcctgaggcccacgtgtttaaagctgacttgcctggattgaagaaggaggaagttaaagttgagattgaggaggatagtgttttgaagatcagtggagagagacacgtggagaaagaagataagaatgacacgtggcaccgtgtggagagatcgagtggacagtttacgaggaggtttaggttgccggagaatgtgaagatggatcaggttaaggctgcgatggagaatggtgtgttgactgttacggtgcctaaaggctgagactaagaaggctgatgttaagtctattcagatctctggttgagtaatgggttcgagttttatcatcggagttccttgtgtttttgtcatggttatggttcatgttttacttgagtgtgtgagtactctatctaaattataataatctccgattgagctatgaattatgatgtatcggatacatttgatcctaatgaagtatggaataaataataattatta

SEQ ID NO: 84158 - DNA, 660 bp, Arabidopsis thaliana columbia
cgcagtaccggtccggaattcccgggtcgacccacgcgtccgaaaaaaccacaaattggtaaatatttccggagaattctttcgattcatgcctaaccttgtcgtattggatttatcatggaatagtagtctcactggattaccaaagaaaatatcagagttagtctccttgcgatatcttgacttgtcgtatacaaacatcgaaaggttgcctgttggtttacaagagttgaaacaactaatacatctgaatttggagtccatgaagagtttggagagtattgctggggtatctaagttgttgagtttgaagacactgagactacaaaagtccaaaaaggctctagatgtgaactcagcgaaggagctacaactcttagaacatatagaagttctaaccatagatatcttttcaagtttggttttggaacatttgttatgctctcagagattggcgaaatctattcaatatgtagagcttatagaggttgaggaagaatctttcaaaatattaacttttccaagcatgtgtaatatccgtcgaattggcatatggaagtgtggaatgaaggagataaaagtcgagatgagaacatcatcatgcttctctagcctctccaaagtcgttataggacaatgtgatggtctaaaggagttgac

SEQ ID NO: 84159 - DNA, 750 bp, Arabidopsis thaliana columbia
  unsure (1)..(750): unsure at all n locations
taatcacgacccactatagggaaagctggtacgcctgcaggtaccggtccggaattcccgggtcgacccacgcgtccgggaacaatgtggtggaagcagttcaagccataatactcttccagaaggagttgttagttctttgatgaatggtgaaatggcattgccgcatactgataagtttcctttgccgtcgcctctttcgtgtcctggaggatgtcaggaggctttctactgcagtgaatcatgcgcaccggcagattgggagagttctcattccttactttgtactggtgagaggtctgaatcaatatctagagaggcgcttggagagtttattaaacatgctaatgataccaatgatatttttctcctggctgcgaaggcaatcgcctttaccattctaaggtacaggaaactgaaagcagaacatgtggacaaaaaagcgaaacagagtgagccaaagcaagtccgcttctcttggaagcatggaaaccagtatcgattgggtacaaaagaagggtggtgggactgcattgcattgccagatgcatggtgatcctactgatgaaggggccctcagggtccaaataaagaaccttccgtgtccggctttggggcccctgaagatagccatatttgccaaagaatgtgaagccctggtcccccccgaaatccatggggaacccccggattttnnccggaaacccanccttggggngcncccccgntngggnaattcctngaaanngg

SEQ ID NO: 84160 - DNA, 668 bp, Arabidopsis thaliana columbia
gccgttcgcagtaccggtccggaattcccgggtcgacccacgcgtccgaagaataaaagcactcaaaagtcaaagcgcgcgcgcgctcacacacacaaaaaacaatccagagctaattgattcatcaatggcgatgtcgggaacatacgtgacggatgtgcctcttaagggatcggcggagaaacactataagaggtggaggagcgagaaccacctcgtccctgaagctatcggccacctcatccaaagtgtcaccgtccatgacggcgattgggactctcacggcaccatcaaaatctggaactacactcgtgatgggaaagaggaagtattgaaggagaggatagagatggacgacgagaatatggcggtgacgatcaatggactcgatggtcacgtcatggaggtcctcaaggtttatgtcacgacgttacatttcatccccgagtccaaagatggctgcgtctgcaaaattactatggtctgggagaaacgcaccgaagactccccagagcccatcgaattcatgaagttcgtggaacagatgattgctcacatggacgaccacatcctccaaaaccaggaatgatggatcgatgcttaatcatcatcacatcctccttttatttatcttaattaatgtgtgtccatctcgtacatgatattac

SEQ ID NO: 84161 - DNA, 592 bp, Arabidopsis thaliana columbia
  unsure (1)..(592): unsure at all n locations
gggnaaacccggcttnccggnttcggngaggaccacccccaggcttttagcggntggcccnaggtcaaggggttggatgagngcctcaagcaggnccaagaaaggcccccaagatccnttccaggtggatccccgacagagaagtgcngctctaangggccaaggccaaaaaccaaaaccntatcctcccggtccctcatttcatctgtctgctcttaaaattggtgtagattactatggttttctgataatgttggtgggtctagttacaaagttgagatgcagtgatttagtagctttgtttttcccagtcactatatgtttggtctttggtccgttagcacacttgtagtagttaaaacagtttaagtatggtctgtactcagtcttcctcttctctgtggagttttgtttaagttcaggttagttttgttttgtctctctgttttttcccctgtttctcgacaaacaactcatgtggctttttagcaattttgatggatgatcatgatgaataattgaatatcaaaaaaaaaacaaaagggcgaccgctctagaggatccaagcttacgtacgcgtgcgttcgacgtc

SEQ ID NO: 84162 - DNA, 1757 bp, Arabidopsis thaliana columbia
  unsure (1)..(1757): unsure at all n locations
nnnnnnnnnnnnnnnnnnnnnnnnnnnnnnnnnnnnnnnnnnnnnnnnnnaagcattctctttctgtggacgaaactaaacctgagagaaaaagccagaagaaccaaactcagaccgagagatagagattgagggagagctctagctctgtagaaaagaaggattcattcatcatatccagaaatggctctaaagtttaaccctttggtggcatctcagccttacaaattcccttcctcgactcgtccgccaacttcttctttcagatctcccaagttcctctgcctcgcttcttcttctccggctctcagctccggccccaaggaggttgagagtttgaagaaaccatttacgccacccagggaagtgcatgttcaagtcttgcactccatgccacctcaaaagatcgagatcttcaaatctatggaaaactgggccgaggagaaccttctgattcacctcaaggatgtggagaagtcttggcaaccccaggatttcttgcctgaccctgcatcagatgggtttgaagatcaggtaagagagttaagagagagggctagagacctccctgatgattactttgttgttttggtgggggacatgatcacagaagaagcacttccgacctatcaaactatgttgaacactttggatggagttagggatgaaacaggtgctagtcctacttcatgggctatttggaccagagcttggactgcagaagaaaaccgacatggcgatcttctgaataaatacctttacttgtctggtcgtgttgacatgaggcagatcgaaaagaccattcagtacttgattggatctggaatggatccgcggacagagaataacccctaccttggcttcatctatacgtcattccaagaaagagcgacattcatctctcacggaaacacagcccgccaagccaaagagcacggggacatcaaactagcccaaatatgtggcacaatagctgcagacgagaagcgtcatgaaacagcatacaccaagatagttgaaaagctctttgagattgatcctgatggtactgtcatggcttttgcagacatgatgagaaagaaaatctcaatgcctgctcacttgatgtatgatggggcgaacgacaacctctttgacaacttctcttccgtggctcagaggctcggtgtttacaccgccaaagactatgcagacattcttgagtttctggttggtaggtggaaaatccaggacttaaccgggctttcaggtgaaggaaacaaagcacaagactatttatgcgggttggctccaaggatcaagagattggatgagagagctcaagcaagagccaagctaaaaggacaaagacaaaaacctatcctcccggttcctcatttcatctgtctgctcttaaaattggtgtagattactatggttttctgataatgttggtgggtctagttacaaagttgagatgcagtgatttagtagctttgtttttcccagtcactatatgtttggtctttggtccgttagcacacttgtagtagttaaaccagtttaagtatggtctgtacttcagtcttcctcttctctgtggagttttgtttaagttcaggttagttttgttttgtctcttcctgttctcgacaaacaactcatgtggctttttagcaattttgatggatgatcatgatgaataaacaactcatgtggctttttagcaattttgatggatgatcatgatgnnnnnnnnnnnnnnnnnnnnnnnnnnn

SEQ ID NO: 84163 - DNA, 552 bp, Arabidopsis thaliana columbia
  unsure (1)..(552): unsure at all n locations
atgatacttcnnnnnnnnnnnnnnnnnnnnnnnnnnnnnnnnnnngtcaagtctttcttctgcacatcttctctctctctatttccgcagacatcaattcccctttttgactaaaattccgcgacttgggctttgatccattcccagtgaatctcactgcttttctcacagaaaaaaatcactcctttttcctggattttgttttctcgactgatttggggaaaagctatggtggtctgattaatctctgtctgtctttggtgagatgggtttggatgctgttaaagctaaagggaattggaaatcggagaaacctaaagagactgagaataagaatcacaagaagaagaatggtgatgataataaaagtagaaatgaagaagaagaagaaggagaagcaagtggttgctgggtcaaatttaggtttatgattggttgcataccttcaaaatcagaccttgatgcttcttcttcttctatctatggctctaactgcactgttacaacaatggaaagtaaatcggcaaatgagaaatcaaatgatcaaccagt

SEQ ID NO: 84164 - DNA, 664 bp, Arabidopsis thaliana columbia
  unsure (1)..(664): unsure at all n locations
tccggaccggaattccagggtcgaaccacccgtccgaagatacttacagagaaccacaccaatcaccgtacaacgtggctcagccacttcaggcacctataggaacaaaagcagcacaacaacaacaacctcctcctcctcagccttttacctctggtcctccaccaccgcaatacaccgcagtaccaccgccacgacaagtagtaggattaccagatacatcagcgtatactcaggtgacttacactggaggaatggggaaacaagtttattacacggaggctccaccgccgcagtaccatggagttggcttacctgtaactggtatgagtgaattgagaactggaccggacgggaagcttgttggctatgaacatggcacctaaagttttcatctcagagttcagattcggctgtttgatttgattgaggtatttcatatggttgaatcaggttattgttaatctattacaccaaatttcatcatcttttgatatatatatatatatataggggggttaaggcccctttggtgcctgataaataatgtttttttcttanaaaaaaaaaaaaaaaaaaaaaaaaaaaaaaaaaaaaaaaaaaaaaaaaaaaaagggcggccgctctagaggatccaagcttacgtacgcgtgcatgcgacgtc

SEQ ID NO: 84165 - DNA, 630 bp, Arabidopsis thaliana columbia
acgcctgcaggtaccggtccggaattcccgggtcgacccacgcgtccgggaagatcattacggcagctgaaattctagaagttatgggtgctcctctgtcaggatcagatttacgagcgtatgtgatgtcaggtggtggcataacatttaagaaattcaagccaacaattaggagcaagcgctgctttcttctattccccgttcagggttctgagcaaaagggccttgttagcgttgaagttaagaagaagaaaggccagtatgacatgaagcttttggcggtagatattccaatggcatctggtcccgaccaacggttatttctgattggcgatgaagaagagtacagaattggtggtggtttaatctctgtgttaagagaccctgttgtgaaagcaatggcagcaactaaggagttcgataatcttgatagaatcgaagaggaagaagacgctgaaagagaacttcaagaagctgaaagaaagcatcgtgaagagatcgagaaactcgagaaggaggctcataactcgtatttcttccccagaaatattttcttcttcggtggatataagacaacaccctgaatcttttccaaacccagtttttttttgttttgctaacttcgagaat

SEQ ID NO: 84166 - DNA, 585 bp, Arabidopsis thaliana columbia
  unsure (1)..(585): unsure at all n locations
gtacgcctgcaggtaccggtccggaattcccgggtcgacccacgcgtccggcgggtccttctcggccttcaggctggccacctgctgcacgccgctggcggcggtccagtggaaccagttctggccgacacgccagatcacgccattgtcggcagcgaagttcacgttgcccgcgcgctcgttgctgcgggtcagctgggtcagcgcgccgctgcgcaggtcgcgcacgaacacatcgccattgcggacgaaggcgctgcggctgcggctgcggtcgtaggccggctcggccacgtcgagggtgccgcgctggtcatcggccacctgcgcggccacaccgccggccaccggctggcggaaggtatcgcgcaccgggctgccgctgcgcttgagctggtactccacctgctggctgttccacgaccaccaggccttcttcgaaccggcggaccgatccagtccggggtcggccatgcgcctgttcgatggtgatcgcgtcggccggaattccaaccggtncggcaananggcgaaagaagangaaaggganattggaaattggngaggacantannaaacggaaag

SEQ ID NO: 84167 - DNA, 629 bp, Arabidopsis thaliana columbia
ctggtacgcctgcaggtaccggtccggaattcccgggtcgacccacgcgtccggcgtcaagacaagttggatccagtgaacaggggaaggtccaaggatgtatatccggggtaagggcttttgctcaagttgtggctccatttgtatatagtccattgacagctctatttctctccgaaaatgcaccattctatttccctggattcagcattctatgcatcgccatctctttgatgatcggattccttcagagtcttctgataaaagatcatccttctttgcccttagtgaacataacaatcaacaacccttcaaaagcggaagcttgacaagaaatatatcaagaagcaaatgtaactgtaatattgtacaaatttgcttcaaattaaaagttcatttaaaacgaatacatagctagaagctgtaaaaataacttagttttcttacaaagattgtcattgcaaatgaataaaatcacttgtatcccataaaagacagatgggcgtaatagcgaaaaggcccggaaacgaaaaacctttcccaacgggggcggcccgctttaaaggatccaagcttacgtacgcgggcatgcgaagtaatagcttttgtatagggggacctaaattaaa

SEQ ID NO: 84168 - DNA, 628 bp, Arabidopsis thaliana columbia
tacgcctgcaggtaccggtccggaattcccgggtcgacccacgcgtccgcttttagttgtgtgtttacctaatttaagtgttctcttatctctataacttagattgtgttgtggagactttagcatatttgggcttggagtttgtttctcactggcacaagaatgatttatcatttggtagtcttgtgagatgatcaattactcgcttagcttagttttcacaatcatacgaattagcttaagaagctctgcaaaatgtgcactcatctattctttagagctcaagttgaatgctttatgtggtctcttgtatctctgtacattttgttgtgctgaacaaaggtttgacggcagttagtgcatgtgtaagtaggcatatttttgtcagctgcatacgtaggttctagctacaaattggaattgtatgtgtttgaaaacgtaaaatcaattataaatgtttttgaaaatcatctatacaagcatggttatttggttcttgtttccttattttttcgggtaagggccacggataattggttagacattggttataataatgtgggttttggtatctggaatttctcgtcaaaatgatgtactgtatcattaaatgaatatcacttattga

SEQ ID NO: 84169 - DNA, 816 bp, Arabidopsis thaliana columbia
  unsure (1)..(816): unsure at all n locations
gtctgatgaacagtagctgttagactctctctctttctctcttctctgttcttcttcatcttctctagccgaatccatccttcagatactactctgtaatttcactacaatcatctcagccaaatgggttcggaagaagagaaggtcgttgttcccagaaactttagattattggaagagctagaaagaggtgagaaaggaattggagatgggacagtgagttatggaatggatgatgctgatgatattttgatgcaatcttggactggtaccattcttggtcctcataatactgcgtatgaagggaaaatctttcagctgaagctattctgtggaaaggattatccggaaagtccacctactgtgaggtttcagagtcgtataaacatggcttgtgtcaatcctgagaatggagtggttgatccgagtctcttccctatgctctccaactggcggcgagaatatacaatggaggacatactggttaagctgaaaaaagaaatgatgacttcgcataaccggaagttagctcaacccccggaaggtaacgaggaagctagggcagatccaaaaggaccagctaaatgttgtgtgatgaagagaggttggtgggaatcagctatttgtattaatagaaggaacagtgtatataaaacatcatttgaagctttgaaattccctacaacttcctaatgttatagtcttgtttgagaatatatatatgtccgccaaaaacagttgatgattattttaataaacctcatctctacaatctcttnnnnnnnnnnnnnnnnnnnnnnnnnnnnnnnnnnnnnn

SEQ ID NO: 84170 - DNA, 880 bp, Arabidopsis thaliana columbia
  unsure (1)..(880): unsure at all n locations
ctctctctctcttttatctctgagattgcttcttcgctattgctcaattctctctctcacctaaccctaattattcattattcctgagattcatcggcgatgagttcggaggaagccaaggtcgttgttccgaggaactttagattgttggaagagcttgaaagaggtgagaaaggtattggagatggtactgttagctatggaatggatgatgctgatgatatttatatgcaatcttggactggcaccattcttggtcctcctaatactgcatatgaagggaaaatctttcagctgaagcttttctgtggtaaggagtaccctgaaagtccaccgactgtgaggtttcagacccggataaacatggcttgtgttaatcctgagaatggagtggttgatccgagtcacttccctatgctttccaactggagaagagaattcacaatggaggatctactgattcagcttaaaaaagaaatgatgtcatcgcagaaccgcaagttagctcaacccttggaaggtaatgaggaaggcaggacagacccaaagggactagtggtgaaatgttgcgtgatgtgaaaagaggtaatgaggaatttataagaatttaagagacaaaacaatgtatataaacagcatttgaagggctttgagattggcctaagaaccctttcttctataggccttcttaatcctaccatttgattatgtattatgtaatatttgagaatatattcaccaaaaacaggtgcccttaataaacctccactcttcttcactaaaaaaaaaaaaaaaaaaaaagtnnnnnnnnnnnnnnnnnnnnnnnnnnnnnnnnnnnnnnnnnnnnnnnnnnnnnnnnnnnnnnnnnnnnnnnnnnnca

SEQ ID NO: 84171 - DNA, 598 bp, Arabidopsis thaliana columbia
  unsure (1)..(598): unsure at all n locations
acgcgcgaannnnnnnnnnnnnnnnnnnnnnnnnnnnnnnnnnnnnnnnnnnnnnnnnnnnnnncttttttcttccttccacgtttcacaattcatatcctgtctgatgaacagtagctgttagactctctctctttctctcttctctgttcttcttcatcttctctagccgaatccatccttcagatactactctgtaatttcactacaatcatctcagccaaatgggttcggaagaagagaaggtcgttgttcccagaaactttagattattggaagagctagaaagaggtgagaaaggaattggagatgggacagtgagttatggaatggatgatgctgatgatattttgatgcaatcttggactggtaccattcttggtcctcataatgttagttttcttcttctcaatctatctcttcatcttttgtttaacttaaatgataatatctatggtagatttgaataaagatgcattttttaatgctaaagcaagaacctttccaaatgtttaacttaaaagatgcaattttttgctacttgtttgtcactataattcgagggtttaatttaacttcaaatgatccttagctgagt

SEQ ID NO: 84172 - DNA, 655 bp, Arabidopsis thaliana columbia
  unsure (1)..(655): unsure at all n locations
ctacgactcactatancaaagctggtgcgcgtgccggtaccggtccggaattcccgggtcgacccacgcgtccgggcatgaggccgtcacgggacatcgcgaagaggacgcgggtctggccgagcatcatgaccatgacaactgttgtgaggccggccaggccaccgaagttgatggcggtttgtgcccaaccgattccgttggcctcgaatgcggttgcgagggtggcgctggaatcgccgacgagaggactgccgtccttgagttcggtgtacttgaccatgccggtgaggacgagtgtgacggcaacgtagagaacggtgacgatggcgagcgagccgaagattccgcgcggcaacgacttctgcgggttcttggtttcctcggccgtggtggcgacgacgtcgaagccgatgaaggcaaagaacacgaggctggctgctgcgagcaatccgtaagcgccgtagctacttccgcctgcaccggtcagccaggagaacaagggctgatggatcccgcttgcagagctcccggttccttcggacggcgggatgaacggggagttgtcccccttcttgatgtagaaggcacccacgactatgacgagcagaactactgcgatcttgatcgcggtgatgattgcggagactcgcga

SEQ ID NO: 84173 - DNA, 657 bp, Arabidopsis thaliana columbia
  unsure (1)..(657): unsure at all n locations
aatacgactcactatannnaaagctggtacgcctgcaggtaccggtccggaattcccggggtagttccgtatcggaaccatttcagcatgatctgcatccacatcccttatattggacattggaaagtttccaaacgatgtcaagcttgtggcacggaaactgatgataatctcttaaattgtacggtttgtgatgattacgcattatgcatgaagtgtgccactttaccaagaaaggtaaaacataggtgtgatgatcattttctgtcactatgtcaaggtgtgggaaacgcaagcggcaacttgtggtgtgatatttgtgagaccaagacagatccaaatgtatgttactatacatgtgaagaatgtgggcttagtctccatcttaattgtgttcttggtgatttttattatgttaaggtaattcctgatcagccgaaagtatttgccaacaatggggttactcgacttttctgcggcgtttgtgaagttcgttgcaagtttcccttcatcatgtggggagctgtaggagactttactggctacgtttgttcgattaactgtgtattcccaaaagcggataaataatagggtagccatgaaagtattatacaaatttgtgaaggcattcgatatgtttccaagatgctgcaagaa

SEQ ID NO: 84174 - DNA, 565 bp, Arabidopsis thaliana columbia
  unsure (1)..(565): unsure at all n locations
gctggtacgcctgcaggtaccggtccggaattcccgggtcgacccacgcgtccgaacagtttcaacagcagcagcaaaggtcaaaattaatgcagttgcctcaacatcagcagcagcaactacttgcacaacaacaacaacagctcaggcaatcttctatgcagggattgggtcaaagtcagataccagcacttcatgatatgcatgggcaagctcagcaaaagtttcagacgtcacatgggcaacatcaaatgccatattcccagccaatgggcgcgcaccaacaattccaagctagacagctctcaggtggacatattcagcatagcatgtctcaaggacagctcaatccagcgatgaaccgtcacttaaaccagttttcaggtggagccaatagtgcattgtttacttctgcacaaggctccccaaaggtggccaaatggatacccaaacatgtcatctatggcaattttagacactttgttnctaggaatgccagcaaattttgggaagttttcgggggtacccaattccccccaaaaaagaaaggcccaattttcggttc

SEQ ID NO: 84175 - DNA, 628 bp, Arabidopsis thaliana columbia
acgcctgcaggtaccggtccggaattcccgggtcgacccacgcgtccgattgcgttcagatattaatgagtggcgttgtggattctgcaaaaaggctttttatgaagagaagtatctcgataagcatttcgattcgcgccattacaatttacttaatgcgagtcatggtaaatgtctgtcggatctttgtggagcgttgcattgtgatcttgttgtagacacagctcggcttaagtccaagtgtaatcctgcagctgctgcaaaaaaccggcacttatgtgagagtttggctaatagttgttttccggtaaataaaggttcatcagccaaccgtcttcacgatttcttcttgcgtcagttctgcgatgcacatacatgttcaggaggatcaaagcccttatctcaaaaaccaaagaagaggagtatagtgtacattattttctccatcatcgttttggtagtgcttcttctctattacagctttgtctatttgttccgaagaggattaaagagaagatctcaagatttgaagcgtattagacacaatggtctgaagaagaaacccttctaaccatatcaagctttagctttaatggcggctgagagagagtacatttttttttttttg

SEQ ID NO: 84176 - DNA, 293 bp, Arabidopsis thaliana columbia
  unsure (1)..(293): unsure at all n locations
acgcgttcgggagcccgaaacattagtggggaaggatctttggtgcttaagttgttggaccactaaaatttcgctcctatgggataaaaatcagttagcatgttgtggaaaaaagagtacgaacaagctttagtgctctattattttgtatatgcatacatgcatacatatgtatccttaaaacctgacgaggacccagctctattttgtagttttaagttaatgtcgatgctatgacaccaccccggtttattttgtggttgnanaaanggaaaaatgttcaacgtgnaana

SEQ ID NO: 84177 - DNA, 799 bp, Arabidopsis thaliana columbia
  unsure (1)..(799): unsure at all n locations
gtcgaatgtggagaagcatgaaaatgtagcagaggatttgaatgcagaaaaggaaagcttagtcgtgaaggaaaatgttgtagatgaagaagaggcgggtaaaggaccgctgaaactagtaacaagtcaacaggaggttcttcatggcttcagaaggcttcgtggactcagctggttagcgacaaaaatacttcttcattcagtataactcaactcttcccagatttaacttcagacaagggcgaagcagctggagtgatcaacaatgtaggaaaccagttctccaactctaaccagactgcaagtgcaatgaaacaaacagattacgcatctagcagcggtggttttgtggctgcgggagtccctgtggatagtacccctgtgagaagtttagatgagaatcggcagcgtctgaatggtaagaatgtgagtgaaggagctaaattgggtgcgaagaagaagataattaagagaaaggttgggtcgggggatacttgcacatttatgagaagctcgacttctttgaaagagtgggcaaaggctaagaaggcattgagtgagcccaggcgaaagaaaaatagcgaagaatgggttaatactatcagaggctcttcaaattatgtatccctccacagtttttgtgcttcacacaatacaatgttttttttaattcaaggttttaaggtacacttctataaaaagcatttctcattaaaaaaaaaaaaaaagggcggccgctctagaggatccaagcttacgtacgcgtgcatgcgacgtcatagctggtgtaaannnnaac

SEQ ID NO: 84178 - DNA, 730 bp, Arabidopsis thaliana columbia
ccgggctgcttactcatcctcagattcactcgaccataattcaatgcagagccagcagttctatgactctggtctactcaactcaactcctaaagtttcaagcatcagtgtagccaagacagaaacttcttccatagatgcttccataagaagcagctcgtcgagagatgcagaccggtcagaggaaatgtcggtaagcaatgcgagtgatgttgacaacgaatgggtggagcaagatgagcctggcgtttatatcaccattaaagttttaccaggtgggaaaagagagcttcgaagagtcagattcagccgagagagattcggggagatgcacgcgagattatggtgggaagagaacagggcaaggatacatgaacaatacttgtgatcataaatctaagaggttttgttttttcctcattctctcggtatacagtctttttttccagctcaagtaaattcttccacaggtactcattgtgcctcccagaaatctcaaaatatcaattgtgggatatgttttaaggaggtttcttattttcttccttcaaaaaaatttgagaaagcttggaaaagataagatgttgtctcctttgctcaatatgtgtatccttaattagttctttaaaaaaatacgttcttcaaaaaaaaaaaaaaaaaaaaaaaagggcggccgctctagaggatccaagcttacgtacgcgtgcatgcgacgtcatagctcgtctaa

SEQ ID NO: 84179 - DNA, 392 bp, Arabidopsis thaliana columbia
  unsure (1)..(392): unsure at all n locations
gataaccaatggatcgacgcggagtataccacttccgggatcatcgtcatcatcggcgatcaattcttgagaatgagcaatgggaagtataagagtgtggagcatagggcgaagatggataaggagaagacgagaatctcgtggccggtttttgtggaatctagccttgatcaagtcttcggacctttgccggagctaattaccggtgatgagaacgttcccaagtttaagccttatgtctacacagactacaaatttcgtatgcttaagaagcttcttctcgactgagaaaatctcataataacccataaacagaaaaggagatcatcgaataaaaaaaaatatttgtttgggtttgcctccggcttnantnaataagttttanccnattt

SEQ ID NO: 84180 - DNA, 901 bp, Arabidopsis thaliana columbia
  unsure (1)..(901): unsure at all n locations
taatttctctcatctctctattagaaaaattattagcaattatgttgtccactgcaccggccttttcattctccgaaccgggtttggttaatcaattctcgggtttccaaaccgggttcactccttgggaatgggattgctctgatctctttttcgtggaccaaatgtctcttgaaccggccatccctagtccttgttatggtgaatccgacactggttccgtcaaaattaattccggttctcatgacatgaaaaccggttctgacgaatcttgtgccggtttcgtcaaaattaatcctcgttgtgacgacgccgacatatcaaacgatctaccgtgctctcaagcagatgaaccggactcggacgacacaaaacaattgacagccatcacaagtttcggttcgggagagaataaccataaccggaaaaaaatgatccaaccggagatgaccgacgagcggaagaggaaaaggatggagtcaaaccgggaatcagcgaaacggtcaagaatgggtaaacaaagtcacattgataacttacgagagcaagtaaaccggttggatttagaaaaccgtgagctcgggaaccgactccggttagttttacaccagcttcaacgagtgaattccgacaataaccggctcgtgacagaacaagagatactccggctaaaattgtcggaaatgcgtcggattttgatcattagacaacttcaacaacagcaacaatgggaactacataaccggagaatgatcatgactgaacaaaaccaccctcatcttcaatgatagatcaaaatatttnnnnnnnnnnnnnnnnnnnnnnnnnnnnnnnnnnnnnnnnnnnnnnnnnnnnnnnnnnnnnnnnnnnnnnnnnnnnnnnnnnnnnnnnnnnnnnnnnn

SEQ ID NO: 84181 - DNA, 522 bp, Arabidopsis thaliana columbia
  unsure (1)..(522): unsure at all n locations
tatctttcaagatcttgttgattggagattctggtgttggtaaaagcagcttgcttctcagcttcatttccagctctgtcgaagatcttgctcccaccattggtgttgactttaagatcaaacagatgaaagtaagagggaaaaggctgaaacttacaatctgggacacagctggacaagaaaagttcagaacattgacaagttcttatttcagaggctcccaaggaatcattctcgtttatgatgtcacgaaaagagagacatttttgaacttggcagatatttgggctaaagagattgagctatattcgactaaccatgactgcattaagatgctcgttggcaacaaagttgataggagaaccagaaagggaggttacccgggaagaaggaatggccctagcgaaagacctcaattgtttggtccatgaatgtggcgcaagaacccgagaaaacgtgaccggttgcctcgaagagctagctttgaagatatggggcctacctttggaaaggaccccctnt

SEQ ID NO: 84182 - DNA, 417 bp, Arabidopsis thaliana columbia
cggacgcgtgggttcgtctctatcaagctcatttctcagatccgtaggatcttcatttccatggaggcttaaaaaccctagaagatattcttttacacatcactcatccgctagtgaagataaaaatcatttctagagcttcctctttctctctctgtatgatctgaagcgaatcgtctttagattcttcaccaatcactatcaaaaggacctctttttaaagcttttcgagacgagctgggtttcggatcctgtgagcttcagagacgcttactggtttatcaacaaggctttccctttgaatcaagctttgattgagaaaggagtgaaaagattttgattttgatcagatacacaaagtgttcttgcgttagttaagcgactaggtgtgtgttgttgtagtgaaagcttcttact

SEQ ID NO: 84183 - DNA, 850 bp, Arabidopsis thaliana columbia
  unsure (1)..(850): unsure at all n locations
gcaagatgttgttgatcagttctttcaacctgttaaaccttctttggggcaaatagttagacagaagcttagtgaaggaaggaaggtaacatgccgtcttcttggagtaattcttgaggaaacaagtccagaagaactccaaaaacaagccacagtgaggtcatctgttttggaagttctactagagattacaaagtatagtgatttgtatcttatggaaagagttcttgacgatgaaagcgaggccaaagttttacaggctttagagaatgcaggagtttttacatctggtggtttagtcaaagataaggtgctcttttgtagtacagagataggaagaacttcctttgtcagacagctagaacctgactggcatattgatacaaacccggaaatcagcacacaactagctaggttcatcaaatatcagcttcatgtcgctacggtgaaacccgagcgaacagctccaaatgtgttcacctcgcagtcaatagaacagttctttggaagtgtttaatatcaacaaaaaaagagaggtgaaagatattacgttgtcctgacttaagcatcgttgatccagtgtctcttaggctgaaacttgaaacttgtttttcatttttctttgattgtgtctaaattaaagtttgatatacatttggagttagatattactgcgagtgcctctgtgaaagtatccaagtttgtaatttttgtattagcaacttagcaaaattctttaagaaataaacaaatgtccgttgtttagtccaaaaaaaaaaaaaaaaaaaaaaannaagggcggccgctctagaggatccaagcttacgtacgcgtgcatgcgacgtcagag

SEQ ID NO: 84184 - DNA, 579 bp, Arabidopsis thaliana columbia
  unsure (1)..(579): unsure at all n locations
gtgtggagtttgactacgactccgatgacgagtacttgtacggagactgatcgccgcctcgcggaaccgaggcttgggttggatggatcggggccggatagaggagtgcagtgggtgcttatgggagcccctggagcatggaggcacgtcttcgccgagaggctctccaaactgcttgaagttcctcacatttccatggggtcccttgtccgtcaagaactcaaccctagatcttctctctacaaggagattgcaagtgctgtaaatgaacgaaagctggttccaaagagtgttgtgtttgcgttgctatcaaagaggctcgaagaaggctatgcaaagaggggaaactggtttcattcttcatggcattcctcgcactcgttttcaagccgaaactcttggatcaaatcgctcaaattgaccttgtcggcaatctcaaaggctctgaagaccactgggaaaccggaatgnccncaaatgnaacagtctngctcagnaggngtccnccgggncnatgnaaacnacctgttgnataangncgggggaaantccgggcaacnnaagggggananannaaag

SEQ ID NO: 84185 - DNA, 468 bp, Arabidopsis thaliana columbia
  unsure (1)..(468): unsure at all n locations
annggggccccccttttttnatntatnatntnnttttctaggttaatttaggaattttctgaaaaaaagaagtggctctcatgacaagtagtctaaattcagtagaacataagagttatttcatcacagtactaagaggaagaagagaagttgctctgcaattccttgatgcctttggaatcaagaaaagaagttttgcccttgagaaaatcagagtaccaatgagcagagagtctaggagatctcttgcgatgtggatcactgaaatttacagagtacaatccataaccataatcgtaccgccctataagctcgaataaatccataaatgaccatacaaaatagcctctagtgtctgatccattccttatggatttgagcacaccaccaatgtaagcattcatgtattccaccctatggggatccctggggggcggcccaccgggggatctggttggaanancggac

SEQ ID NO: 84186 - DNA, 937 bp, Arabidopsis thaliana columbia
  unsure (1)..(937): unsure at all n locations
cacggagcacacaaaaaaaaaaaaaaattagaattcccatggttctacacaccatttagggaaggctagcccgcctgcaggacccggtccggaattcccgggtcgacccacgcgtccgcggccgcgtggggaaaaagaaaacattaatttcaaccaaagcaaaacagagagaaaaaaatagagagagtgaatcaatttcggtggagaaagagaagaatggagcagccgtacgtgtacgcatacccgcaaggtagtggcccctcgggagctccgactccacaagccggaggagtggtagtggatccaaagtactgcgctccttaccctatagatatggcgatcgtacggaagatgatgtcgttaacggacggcaatttcgtgataacggacgtcaacggaaacctgctgttcaaggtgaaggaaccggtgtttggtctccacgacaagagggtcttgctggatggttctggtactccggtcgtcactttgagagaaaagatggtgagcatgcatgacaggtggcaagtgtttaaaggagggagttcggagtcaccgtgctctactatacccggtgaaaagatcgtcgatgattcagctagcccctaaacttgaggtgtttttgactaccaacgtagaggagaagatatgtgatttcaaagtcaaaggggcctggctcgacgactcttgtgttgtctaccccggcgattctgacaccattattgcccacgtaaacaaactctctttccttatttttgttttagaagacagtattttacatgtaaatgtttatatcatatattttctaaatatcgaataaagttttttttttnaatgccnnnnnnnnnnnnnnnnnnnnnnnnnnnnnnnnnnnnnnnnnnnnnnnnnnnnnnnnnnnnnnnnnnnnnnnnnnnnnnnnnnnnnnnnnnnnnnnnnnnnn

SEQ ID NO: 84187 - DNA, 785 bp, Arabidopsis thaliana columbia
  unsure (1)..(785): unsure at all n locations
cnnnnnnnnnnnnnnnnnnnnnnnnnnnnnnnnnnnnnnnnnnnnnnnnnnnnnnnnnnnnnnnnnnnnnnnccacgcgtccgtgcggctgcgagaagacgacagaaggggaaagcaaaacaaaagagagagagtgtatccatttttggaggggaaaacaaagtatgcagcagccctgtgtgatagtgggttcgaagtactgctcaccaaaccctgtaggtttggcgatcgtccgtaaggtgatgaagataacggacggtaacttcgtgataacgagtgcggacggtaagttattgttcaaggtgaaggatcctttgtttagtcttcacggcaagaggatcttgctggattgttctggagctaaggtcttaactttgagagggaagatgatgaccatgcatgacaggtggcaagtgtttagaggagggagtacggaggagggtgctctactatacacggtgaaaagatcgtcgatgattcagctagcccctaaacttgaggtgtttttggctaacaacgtagaggagaaggatattgtggatttcaaaagtcaaaaggggcctggctcgacgactctttgtgttgtctacgccggncgattcttacacccattatttcccacattttccggaaanaaaccnntccgaggntttttntttcggaaaaggcccattttnccgncactntttataagaaccgttgntatnccctcattcaatcntnaatgcancctttngaatngaaaacctggtttttcggaattcacccaatntaanggttttttg

SEQ ID NO: 84188 - DNA, 901 bp, Arabidopsis thaliana columbia
tggccgtccgcagtaccggtccggaattcccgggtcgacccacgcgtccgagagtgaatcaatttcggtggagaaagagaagaatggagcagccgtacgtgtacgcatacccgcaaggtagtggcccctcgggagctccgactccacaagccggaggagtggtagtggatccaaagtactgcgctccttaccctatagatatggcgatcgtacggaagatgatgtcgttaacggacggcaatttcgtgataacggacgtcaacggaaacctgctgttcaaggtgaaggaaccggtgtttggtctccacgacaagagggtcttgctggatggttctggtactccggtcgtcactttgagagaaaagatggtgagcatgcatgacaggtggcaagtgtttagaggagggagtacggatcagcgtgatctgctgtacacggtgaaaagatcgtcgatgcttcagctaaagaccaaactcgatgtgtttttgggacacaacaaagatgagaagagatgtgatttcagagtcaaagggagttggctcgaacgttcttgtgttgtttacgccggcgaatctgacgccattgttgcccaaatgcacaggaagcacacggtgcagagcgtattcttgggaaaagacaacttctcggtgactgtttatccaaacgtcgattatgccttcatcgcctctctcgtcgtcattctcgatgacgtcaaccgcgaagaccgcgccgcctgagagaagaagatatcaccttctcttcttcttaattatccatccatcaataatgtgctattcatcaaccgttaaaactttgtgtgatcatctcagttgtaaaataatcaaatcattgtgcctggccttgttgtttaatgactacatttataactgttttttcttat

SEQ ID NO: 84189 - DNA, 1524 bp, Arabidopsis thaliana columbia
  unsure (1)..(1524): unsure at all n locations
gttgatcaacaattaaacacaaaaacccttaagttgacatggctgtatctcttccaactcttaaaaatcaattactattatacccctcagaaaaatggcagagcgtgtgtctctcacactcaacgtaaccctcctttctcctcctcccacaacaacaacaacaacaatgtcttcttctctccgatctaccaccgccgcttctcttctcctccgctcctcctcctcctcctccagatccactctcactctctccgcttcctcctctctctccttcgtcagatctctcgtctcttctccacgtctctcttcttcttcatccctctctcagaagaaatatcgaattgcgtcggtgaatcggagtttcaactccaccaccgccgctactaaatcttcatcttcagatcctgatcagttgaagaacgctagagaagatatcaaagagcttctcagcaccaaattctgccatccgattttggttagattaggttggcatgatgctggtacgtataacaagaacattaaggaatggccacaaagaggtggagctaatggaagtttgagattcgatattgagcttaaacatgctgctaatgctggtcttgtgaatgctttaaacttgattaaggatatcaaagagaaatactctgggatcagttatgctgatttgttccagttagctagtgctactgctatagaggaagctggaggaccgaaaataccgatgaaatatggtagagttgatgcctctggtcctgaggattgtccagaagaaggaaggcttccagatgctggtcctccttcacctgctactcatctcagagaagttttttacagaatgggattagatgacaaggacatagttgcattatctggtgctcacacgttaggaagatctaggccagaacgtagtggttgggggaagcctgagacgaagtacacgaaagaaggacctggagcaccaggaggacagtcatggacaccagagtggctgaagtttgataattcgtacttcaaggagatcaaggaaaagagagatgaagatctccttgtcctacccactgatgctgccatcttcgaagattcttctttcaaggtctatgctgaaaagtatgctgcagatcaggatgcatttttcaaggattacgctgtagcgcatgcgaaactcagcaatcttggcgcagaatttaaccctccggagggtatcattatctaatggggcacctaatttactcaaccagacttatgattttagagaaacgtagttcaataatgaaagagaagaaaaagttgacggagaacttttcatgcgagtacttttcgagataccttttggacaaatgtttctggctgttcaaaggattttgtttagccggaagtatttgatcgttttcatggttttgtgctttcatgtttttttcttgtaataaattgcggaagtgattatccaaaatctatacaaattttgtctggaattgaattattttatcgatgttataactnnnnnnnnnnnnnnnnnnnnnnnnn

SEQ ID NO: 84190 - DNA, 556 bp, Arabidopsis thaliana columbia
aattccaattactggcaccggaataaacccggctaggagttttggagctgccgtcatctacaacaatcaaaaggcttgggatgatcagtggatcttctgggtcggtccatttgtgggtgcagccattgcagcattttaccatcagtttgtgttgagagctggtgcaatgaaggcctatgggtcagtcaggagccagcttcatgagctccatgcttaaatttgttatttcgaactagcgaagaggtgaagaattctttgggccaggaagggaggaaggaaaaaaaaaagggacccaaatcatataaaagaaaaaacgaatattatttaagatggtcggtgagtgacatttactgtgtcttatttgtggctttgtgggggaggtttgtgtgtaacaatttgtaacgtacaagcaatgtatgtgttatttgatgcatatgatatttatatatctacttattgaaaaaaaaaacccaaagggcgaccgctctagaggatccaagcttacgtacgcgtgcaggcgacgtcatagtcttctatagtgcacctaatagaatcg

SEQ ID NO: 84191 - DNA, 831 bp, Arabidopsis thaliana columbia
  unsure (1)..(831): unsure at all n locations
gcatgatattcatcctcgtctactgcactgccggcatctctggtggacacancaatcccgcggtgacgtttgggctattcctagctagcaaggtatcattggttagagctgtgtcgtacatggtggctcagtgtctcggagccacttgtggagttggtttggtgaaagtcttccagtcgacttattacaaccgctacggtggtggagccaacatgctctccgacggatacaatgttggcgttggggttggtgctgagattatcggcacttttgtcctcgtctacaccgtcttctccgctaccgaccctaagcgaaatgcccgtgactctcacattcctgtattagcaccattgccaattggattttccgtgttcatggttcatttagccacaattccaattactggcaccggaataaacccggctaggagttttggagctgccgtcatctacaacaatcaaaaggcttgggatgatcagtggatcttctgggtcggtccatttgtgggtgcagccattgcagcattttaccatcagtttgtgttgagagctggtgcaatgaaggcctatgggtcagtcaggagccagcttcatgagctccatgcttaaatttgttatttcgaactagcgaagaggtgaagaattctttgggccaggaagggaggaaggaaaaaaaaaagggacccaaatcatataaaagaaaaaacgaatattatttaagatggtcggtgagtgacatttactgtgtcttatttatggctttgtgggggaggtttggcggccgcgaattcgatatcgagcttatcgatacaatcgacatcgagggggggtc

SEQ ID NO: 84192 - DNA, 872 bp, Arabidopsis thaliana columbia
  unsure (1)..(872): unsure at all n locations
nnnnnnnnnnnnnnnnnnnnnnnnnnnnnaccgtcatnnnnnnnnnnnnnnnnnnnnnnnnnnnnnnnnnnnnnccacgcgtccgcggacgcgtgggcagtctctcactttctctcttctctctctctctttcttttttgagtccgtgaaggctaagtctgaaagaatgacgaaggatgagttgacggaggaagagtcgctctccggcaaggactacttagacccaccgcctgtgaagacgttcgaggtgagagagctcaagaagtggtccttctacagagctgtcatcgctgagttcatagctactttgctctttctatacgtgactgttttgacagtcatcggctttaagagccagactgatatcaacgccggcggcggagcttgtgccagtgtcggcctcctaggcatctcttgggcctttggtggcatgatattcatcctcgtctactgcactgccggcatctctggtggacacatcaatcccgcggtgacgtttgggctattcctagctagcaaggtatcattgggtagagctgtgtcgtacatgggggctcagtgtctcggagccacttgtggagttgggttggtgaaagtcttccagtcgacttattacaacccgcttcggtggtggagcccaacatgccttttcgaccgattccaatgttggccgttgggggttggtgcctgaaaataatcgggcactttttggtcccttagtttttccaccggtctttttttccggttacccggaacccttatagccgaaaatggccccgttgaacttcttaacaatttccttggtttttagcccaccctttggcccaacttgggaatttcttcccggggtgtccactggggtccaatttaaa

SEQ ID NO: 84193 - DNA, 564 bp, Arabidopsis thaliana columbia
  unsure (1)..(564): unsure at all n locations
gttattcaccagaatccgagttttattttttcttggatgtacaaagaggagagaaaaacaatgggctgcaaatcaaatgatgacggaaccaatttctcatgagagcaaacgcttcctcagcgtctcgatcatcttcgggtgtctcgggccggtgaacattgccgtgtcctcttccttcatacacaacaacctttgaaccttcaccaatcttctcctcaatttcatacaaacccttcacttcacaaagcgggtctctatctccagcaataaacaagactggcactttcacatctcccgccaccgccgagtctattctcgtaccgtagaacgagacaccggtgctaaagtaaccgctctcatccgtgggctaacacgtcaaccacacgtccaccgccaaaacagaaccccatcaatcctagcttcttggggattccagcggtgnaaatcctcaaccatccattttggaaggaagaagggcctggctgaaaggtaggggcatgccnctttccatccncgaatcgganttggcggtttcggcatggttnccgaaaagcnggaaaagng

SEQ ID NO: 84194 - DNA, 837 bp, Arabidopsis thaliana columbia
  unsure (1)..(837): unsure at all n locations
nnnnnnnnnnnnnnnnnnnnnnnnnnnnnnnnnnnnnnnnnnnnnnnnnnnnnnnnnnnnnnnnnnnnnnnnnnnnnnnnnnnccacgcgtccgcagacaaaaaaaagctgcggagctagcgacttcgcttctctctttctctcaaatctcttatccgtttgattttttctgtgtcgcaatctcttcttcttattaattcattcaaaacagaaaagtacgggaaaaaggaattgagacggtgggtttcgatggggtcaggtgcatcgaagaatactgaggaagatgacgatggttccaatggcggaggtggtcagctctacgtttcactcaaaatggaaaactctaaggttgaaggagagctcactcctcatgtctatggctctcttcctctcatcggttcctgggatccttccaaagctcttccgatgcaacgtgaatctgcgttaatgtcggagctaagcttcgttgttcctcctgatcacgagactttggacttcaagtttttgttgaagccaaagaacagaaatacgccctgcatagtggaggagggtgaaaataggcttcttactggtggttcgttgcaaggagatgctagattagctctgtttaggctggaaggtgatgtgattgttgaattccgagtcttcatcaacgctgacagagtttctccaattgatcttgctactagttggagagcttatagggagaacctccagccttctactgtacgtggaattcctgatgtcagcattaatcctgatccaaaatctgctgagtgtcctttagaaagtttggagctcgatcttgcacattatgaagttcctgctcctgcgcct

SEQ ID NO: 84195 - DNA, 358 bp, Arabidopsis thaliana columbia
  unsure (1)..(358): unsure at all n locations
gtgtcccggaatccggacgatccaccgagctcgaagctcaaaaatcttggcgtctctgtcgcgtctcccgagttgcgggcggtcacctgccgcttcactctacaccaagccccgactactttctgcttcttcttcttccccgtcgccgcttcctctagcctatcctctacaaaaccctaagaagctatgtagaaagattgagagagtaatgcgcagagcggggttttcacaggacgcaccactcgtaacagcaattggtgcgtgtatcctaagttcatttgtttttccggtggcggaaacgagtcaacgatnaggangaagaagangnaaaactcagcgntttntttcanaagntntg

SEQ ID NO: 84196 - DNA, 591 bp, Arabidopsis thaliana columbia
  unsure (1)..(591): unsure at all n locations
gcggccgccccctttttttttttttttaaaattcggattttgtggcaattacattttctatgctaatagctaaagtctgttacaaatattcatttattctctttgtgtcttttgcgaattattcttaattttcatcgtcactgttttttcccttgaaatgtttcttaaaatggattcttttcttagatgaaaaatcgtcatcagatgtgtttctgaagaatgcaagtgtctcaacatccccatttgcgatgcttgcttcaagctgaacatgaataatgcccaagacaatgcttgtaattggtaaccagctctcttctggagaaatagacagatttgaactcaaataaggaacaagataaacaagagcataaacagcataacgagattttccagtgtcaagccaagcaaacacccaactcagccaattgaagtaaggtatgaagctgatgattcccatggcggccaatctcatatctggtgacccaatcgctgaggttcctcctcctccttccccaccgtggcncggttcgcaccgggaaaacaatgaccngggtcncgnccatggggacggngggngccgggaaaccgcna

SEQ ID NO: 84197 - DNA, 743 bp, Arabidopsis thaliana columbia
cctctctgggctctctccttctgtatctctctaaggggaacaacgttttcatcaccttctgttttatcgtcaccggcgatcattcaagactcgatctccggtaatcagaacattttcattcgccgacatggcgatgaccatcgaagtactggctggacttgctttcatgttttcatctagtatcctcctacagatcctggcatgcgcgatatatggtcactggtggccaatgctatcagcactcatgtatgtagtggtgcctatgccttgtatgttctttggaggaggctcaacccaattccttattagtcgggacggtggagggtggatagacgcagcgaaggttcttgaccggagcatcgacccgtgggaagccttgctatccccaatcatcttaaggcacgcacagatgatcgagacaggtgcaatgctcatagagttcacatcattcttcatattcatttgcactgtcatgtgttttcaccgggctagtctcgatgatgactggtaacgtagatgttgctgctcgtgaattactaattggattcgtatgagaaagagagtgtgaagaaaagatgaggttactatgagtggttaagaaagttgtgttcttctccctctttttgtaaagctttgtatcactcaatgtttgtaaaaagttttattcatcactgtgaatcttttcctgaaactaagtgccaaaatattttgtttcgcatgtttaggaaaaagtttaattcatc

SEQ ID NO: 84198 - DNA, 518 bp, Arabidopsis thaliana columbia
aaaataaaaatgaatttaaataatggagatccatctttccattcatcttcctcttccgattcatttggtttgatgaatggttggtagatgacaatgcagcaatggggagggaaaatcaaattgcggtcaatttattagtttacaacaatcggcttattcaccaactcactcgaaatagcaatcacgtaagtcatcgaggctctattcttggtcacgcagtaatacaccctgataaagaaactgctcatcataatttgttcaatgattattttttctgataatcttttgtatggtgaaagagagttccatcgtcggttctgaatgtcacaaaggttatttcttcatattgttgatgttgttaaacaaccttgacaactactttaatcaactttggcagtttctcggtcgtagtggatctcccacaattattcttgaagctattgcttattacgatctatggatatgacatgcctattttggtatgccaatcaacagtaaaaacatcaatgttttgaagg

SEQ ID NO: 84199 - DNA, 749 bp, Arabidopsis thaliana columbia
cttactttcaggacacaaccgcttccaaatatgattgtgggatggatgctaagtttgagttcactgaaactgagagagctgagttttcaggttatgttttcacccgaggaggatatgttgagttgtcgaagaaactttcacttccattgggtaccactcttgacaggtacgaaggcttagttctttctgttggtgggaatggaagatcctatgttgtaatccttgaagctggtccatcatcagatatgtctcagagcaaacagtatttcgctaggatcagtaccaaagcagggtttcctcgcgtgcgggtgccattttcagcttttcgaccggtcaacccagaagatccaccgctagatccatttcttgttcacacattgacaatacgctttgagcctaaaagacagaggcctgttgatggacttgctggtgcgcaacaagatttgagaagttttagccttggatgggagtacataaaagctttgcctgcgggtcaagaaacagactttattctggtatcgtgtactggttcgggagtagaagccaacagaagggagcaagtgttgaaagctaagagggctggtgaagattctttaaggagatcaggccttggatacacaatcattcgtcctggtcccttgaaggaggaaccaggcgggcaacgagctctgatatttgatcaaggaaacagaatttctcagggcattagttgcgcggatgtggctgatatatgtgtcaaggcactgcac

SEQ ID NO: 84200 - DNA, 596 bp, Arabidopsis thaliana columbia
  unsure (1)..(596): unsure at all n locations
acccancntatcgcccttgggaactgtccctgcaggtccgccggatcccggncgaccacggtccgcctcaaggctttcccttcgtctcccacttctcacttcacactgtgagtctgcgactatctccaagaccaagcttcatactttatttttgcaaattccgtttctaaacgtgtgatcagtatggatgaggaggcatctcggacagcaagagagtcactagagcttgtgtttcgcatgtcaaacatcttgggcacgggtttggaccggcatactttgtcagttctcatagctctttgtgatcttggtgttaaccctgaagctctagctactgttgtgaaagagcttcgtcgcgagtctatccccgattctgtcacaaccacaccatctatacactgatcaggtatgcaatggattatacaagtattgtggttggtatgtgaatcttgttactactttttttgtatcatttaaacaaaatttgtatggatgaattataacttcttttatttgtatgaaccgttatttgaaagccaaagtagcagaatgcaaaaaaaagtatataaaaaaaaaaaaaaaaaaaaagggcggccgct

SEQ ID NO: 84201 - DNA, 407 bp, Arabidopsis thaliana columbia
aggtgaaactgaaaaaaagcttgaacactccattgttctctactctaccactatctcacagagattcatggatacgatgcgaatctccggtgtatcaaccggagctgaggttttaatacaatgcaattccttatcaagcctcgtttctcgtcgttgcgacgacggaaaatggcgaacgagaatgtttccggcgagaaacagagacttgcgtccatcgccgacgagaagatcctttttgtcggtgaaatctatctctagcgaaccgaaagccaaagtaaccgacgcagttctcgattccgaacaagaagtgtttattagctcgatgaatccgtttgcgccagatgctgcttcggtagcttcgagtatcaagtaccacgcggagtttacgccattgttttcaccggaga

SEQ ID NO: 84202 - DNA, 511 bp, Arabidopsis thaliana columbia
  unsure (1)..(511): unsure at all n locations
gctaacaattggtcgtagaccaaatctttttttctctagaagtatcctccgaatccttattatgttccacagtaagcttttattagaaggatacgagtggaggagaaaaacttacaatttctaaagcttttcaaacaaaccaaatcagtgtctattcatatctcccaagcatacgtatttgatctcaaggtattcgtccataccatacttggatccttcccttccaagaccagactgcttcactcccccgaatggagccacctctgttgatatgagtccttcgttcacccctacaagtccatattcaagtgcttcaaatacacgccaagatctttggacactgtttgtgaatatataagcagcaagtcctgcaattgnggncattagcaattctgatagngncccctcggtttgaaccgaataangggngcacagggccaaaatcnccccctaagaatgncatgtatccgnaaatcggggnanagagggcaagaagcacccagnnggcttg

SEQ ID NO: 84203 - DNA, 852 bp, Arabidopsis thaliana columbia
gttaaaagctccaaagagaacgaaagaaaattaacctggttcaaacccaaaagaagatcacaattaaagtaattggggaaacccccccccaagatttgtaatttaatttctaaaagaaatatccaattggcttaaaccacatttggtttcgggtaaaggaaccccacaattcctttttaatttttttctttaaaaagaaaaggtatatcccttccccgaaaatacctctaatctaattgtttcccaccaagtaaaggcttttttatttagaaaaggattccgaagtggaagggagaaaaaaactttacaatttttaaaagctttttccaccaaaccaaatcaggtgtctattcaaatctcccaagcatacgtatttgatctcaaggtattcgtccataccatacttggatccttcccttccaagaccagactgcttcactcccccgaatggagccacctctgttgatataagtccttcgttcaccccaacaagtccatattcaagtgcttcaaatacacgccaagatctttgaacactgtttgtgaatatataagcagcaagtcctgcaattgtgtcattagcaattctgatagcgtcctcctcggttttgaaccgaataaggggagctacaggtccaaaaatctcctcgttaaacatgatcatgttatccgaaacatcgcggataacagtaggctcatagaaagtcatccctagactgtgccttttgccaccaataatgatttttgctcccttagaaacagcatcttgtacaaatgtctctacaaaaaacaatgctgcatcatttataagtggaccctgggttgtcccatccctcggacgggtgggtcgaa

SEQ ID NO: 84204 - DNA, 615 bp, Arabidopsis thaliana columbia
agtattaggcaactcacttattcttaaattcacttagttaatatacatagtcaaaagtaccattaacaaaaacaaacctacattttcacccatttctttgataattattactcattgcacatactcatgatacatctcatccatttattatgtattgacccctctctaatccgacttgatttctggagttctgatagattccgggtacagagtactacgtacaccaggaatgtccatgatcctcttggggagtgcagtatcctcggacataccagttccagtcatgtacagtaaccgacaaccccactcaatcaactccggacatagcactttccaaaggtacgtcaccttaaaccatgatggctctgtcacgtatctttgtttccggcacacaccgttcactatcgacttggcacatcctgatgctgacgctaccggaaatggtcctacttgaacatctctcatgtcttggaagactattaaggcgccttcaccagagaagtacttgccttgtgtgagctccgactcgatataaccaggtgtgacgattgtaatgtgtacatcgccaccaagctcaattctcatcgtctcaaagaagctcaacaaagctgcttg

SEQ ID NO: 84205 - DNA, 420 bp, Arabidopsis thaliana columbia
  unsure (1)..(420): unsure at all n locations
ggangtacatagaagcatcctnaaccgcgaacaagagtacaaacatcgaaggaaaagttataagatgtttctcctncttgcagattatcaataaagactcggggttgagctgcccacaactgacagagagcgctcaaagcctcagcgaattaacttacgtaagacaagaaatcaagagtcctctcaacgggatccgatttgcacatacgcttcttgaatcctcagagatttcagctagccaaaggcagtttctggagacttagtgatgcttgtgaggaagcaaatcacggcaataatcgaaagcaccgggcttgtaaaagccatttgagggaaggcaagttgctattggcaacagaagagtttccgacttgaaaacatcttggacacaatcattagccaagtgatgattatattgagaga

SEQ ID NO: 84206 - DNA, 412 bp, Arabidopsis thaliana columbia
cttagcctttaaagatagaaacctctctctctcaaagaccaaaaacaaaaaaaaaaactttttttttttcccccttctcttctttcttcttcaaggtagcctccaagccaaacacggaggaacctaatctgttgtctgctcgtaacttcacaagaagctataatttgtcgttaatgttggcttcttcttgtccatttcttcttttcttcttcctctgaaacacaagaaaaacatctttaacccctgagcagagtaaaaagacgaagaaactggtaactccaaaaaacagagtatatatatgaagagaaacttgagtttgtgaaagtttttttagttatcttgtttttgagataagagttaagtagaggaagaagatatgtctgcaaaacttctatataacttgtcagatgag

SEQ ID NO: 84207 - DNA, 703 bp, Arabidopsis thaliana columbia
agaacagctatgacgtcgcatgcacgcgtacgtaagcttggatcctctagagcggccgccctttttttttttttttgataaccagtttttcacacaaaaccggttttttctgtattaaaaacatccaaaagtccataagtctattaatgaagataaatagttagaaccttctaagttttgtcgagaattttaatcttgagctagttaattattattggggtttagaccaatgcaatgctgctttctccgcctggtggtttacgaacaccgccggagtagtcacgagactgagccttcgcatcagcaaataggtcattgccacttatctccttcaacttcgccgtgcttagaagcctttcacccgtggcggaagagggagacgaaacattgcttttgaacacgttgttacccgacaaatctgtaaacttattatccgcaatcttcttggacgtctttagttccccatcgggtttggtatctgatactcccaagaagaagttgtctttattagccaaagcactaacagtgggaccaattttgatctcaggtggaggagcaaagatgttatgagcacttacttccttacacttagcatctgataattgtttgtcaagcttagcaggagaatggaactccaatgaaccactaagctcacgttgcttagcaactaatggcaccggtgatggctttttgggagaaacaa

SEQ ID NO: 84208 - DNA, 631 bp, Arabidopsis thaliana columbia
  unsure (1)..(631): unsure at all n locations
cantgtgcggtgccccccctgcatctcatactcctggagccacagtccccacatggttttaccggacccacttccacccacacccccagtgttccccgggccagtccccatcatcccatggtgagttattgcctggtgccaggacccaggagtttccggagaggaaggattgcattacatggcacgtggcccatatggtacagacggaatgatgccgagacagtggcaaatgacgaacatggacttgtcgttgccagcaatgaggagcaatggaatggaagatggaacatcatcagcagctaattaccatcacagttactttggtttggacgcttcgaatccaagttttacgtctggtattaatggctacaccgagttcaggccatcgaatggtcattgatcagcaaatggagagaggggatttgtaatgtttttattttttttaaaaaggaaaaaaaatcatgaatatacaatttgtgtaaagagagttgtcttcttgtcatcctctacgtttcaaatggtttttttttttttaaatatagtataagatagttttcgcatagaaaaactcttccctgaaagtccctgaatagtttttataagtgaattatactcctctttatctttaatc

SEQ ID NO: 84209 - DNA, 464 bp, Arabidopsis thaliana columbia
tgaatatcacacatggagtcccccgaatcaatgaaatcattttttcttccaaaaatataagcacgcctgtcatctctgcagaacttgagaaccccctggaattgactagtgcacgatgggtgaaaggacgcattgagaaaactactttaggacaggttgctgagagtatcgaggtgctaatgacttcaacatcagcgtcagtgaggatgattcttgacaataaaataatcgaggaggcatgtttatctataaccccctggtcggtaaaaaattccatcctaaagacccccagaatcaaactcaacggtaatggtattagggttttagataccgggtttggatattactcccgtggtggataaaagtagggctcatttcaatctccacaatctgaagaatgtgctgccaaatattatagtgaatgggatcaaaacagttgagcgagttgttgtcgcagaggatat

SEQ ID NO: 84210 - DNA, 500 bp, Arabidopsis thaliana columbia
  unsure (1)..(500): unsure at all n locations
gacaaatctttgttttcttactttcggttttctgttactacttgtgaatttcaatgagagaccagggttcaaaagataaatattgtctaaaacagtgatcagaacagaaagaagaaaataaactcagggcaaacaatctttcccctgtgtagacaaaaaagaaaattcgagtttgaatctaaactatgcttgctgcagtatcctatacggggctatcgaaattggcagattgtcaccaggcctttgcttagcctccagtatgcaaattgggtggttgaattatagaacccccagaatttgggtgcatctgcactgatcttgcgttgcttgtcatctatatatatccggcatgtgaacccttgtttctggtcttttcaagagatgatgggatcagggccccaattcacctggggggaaacancgggcccttnangggctttnagaaccccggntccgaggtcctnggggggccccaacannaatctggnancccccccggg

SEQ ID NO: 84211 - DNA, 769 bp, Arabidopsis thaliana columbia
agagacatgaagagcactctcaatagagaagagaaggaagcatgaagctagctctgcagcttcaaggtctcattaatggaggtctctaactcttgttcttcattttcttcatcctctgtcgacagtactaaaccttctccttctgaatctcctgttaatctctcccttagtctcacatttccttctacttctccacaaagagaagcaagacaagattggccaccgataaagtctagattaagagatacactaaagggtcgtcgtcttcttcgtcgtggtgatgacacttctctctttgttaaggtttatatggaaggtgttcccattggaaggaaaactcgacctttgcgtattctcaggctacgggagccttttaggaaatctctcttccacatgttcgatacttcaatcatctgcggtaatcgagatcgaaaccatcatgttttgacatatgaagacaaggatggagattggatgatggtccgagatattccatgggatatgtttcttgaaaccgtgagaagactaaagatcacgagaccggagaggtattaaaacttggatcggtcaaggctgtgattgcgcagttacaagacgtgtaagatttaggcattgatgaagagacttgaggcgggacggagctattgctgcatattgcaacaaaggccttgaagaagttggagaattgattgatgcatatatttatttatatgacacctttcagtgtgttttttcttataaataaatcgagaagaccaagtcttctctt

SEQ ID NO: 84212 - DNA, 684 bp, Arabidopsis thaliana columbia
  unsure (1)..(684): unsure at all n locations
acgactcactctanggagagctgacacgcctgcaggtaccggtccggaattcccgggtctgacccacgcgtccgctcaaatacaagtgcaaatcgtgagttaagcagaagtattctggtagaggttctactgggagaggggattatcttggtagttctgacgacaaggttagtgatagtatgtggacttcagctagagaaagagaagtgcaaccatctttaggctctgagaagccaagatctgtttcaattcctgaaactcctgccagaagttctcgtgctattgcaccaccagaattatctcctaggattgcctctgaaatttcaatggcacctcctgctgttgtttcgcagcctgttcccaagtcaaatgattcagagaaaatatggcattacaaggacccatctggtaaagttcaaggacctttttcgatggcgcagctccgtaaatggaacaacactgggtacttccctgctaagttggaaatctggaaagcaaatgagtcaccgttggactctgttctactgactgatgcattggctggactatttcagaagcaaacccaggcggtggntaaataagctatatgaaagctcaggtaagcagctttttnntgggnnaatcaagccnattttgaacccaattnaagggtttnccngccnagggttgttccnaacaaccatt

SEQ ID NO: 84213 - DNA, 424 bp, Arabidopsis thaliana columbia
acaaaggatccaactaacaaacaacaaatcagtgtttttgttttttacaacagtctctcttaaaatctctcaaagtttccatctttcataagtaagaaatcaaatttacggacaaagatatgagttatttgggagtcggagttagtcccggaaacgtcaccgaaactagtaccaaaatgaagctgattgatcggaaagtgagagtcacggagttgactctgagggtgtttgggtttgtgtcctttctctcgtctctgcgattctcattgctacagatgttcaagtgagagagattttcatgattcagaagaaagccaaattcaccgacatgaaggcgcttgtgcttttggtggtcgccaatggcatagccgcgggttattctttggttcaggcggctcgttgcgtggtgggtttgatgaaagga

SEQ ID NO: 84214 - DNA, 405 bp, Arabidopsis thaliana columbia
gcgtccgatcttaaaagggactctttttggtggttggaagcctaaatctgatcttccttcactcattgacaagtacatgaacaaggagattatgatcgatgaatttattagccgcataacctgtcatttgatgaaatcaacaaagcttttgttcttatgagagaaggaaaatgtttgcgttgtgttcttcacatgccaaagtaatgtctcggaaaacacatgtcacagattcaagaaagattaacgagagctctgtatattctacagctgagttgttgtataaaacaaaagtgatggttttctatagagttatgagacttttttttttcttttggtttgttgtgaagtgatcgttcatacattataaagatggattctcacatgatgaatccagcgagttcctag

SEQ ID NO: 84215 - DNA, 464 bp, Arabidopsis thaliana columbia
  unsure (1)..(464): unsure at all n locations
cagagaaataacatattaagattacgttctcttcttggagccagcagatttacatggtacactaccacgaaagaggttcactgttttagggaacaaacatagagagaataacaaaactaaaaagaagttaataaagagttctttgcttcttcaacaagcaactaaaaccaaaacacactaacttcaagactcctattattactactacttcttctgctgctgctgctgcttcatcattaagattccttgtgccacactctttcaattcccatcatcttgatggattttcaagtaaagggtttcctccaccatcccctgaacttccctcctctggccttaacggccaacaccaanttccaatttcgggttcccangggcaaaatcttggaaccacagcctntccctgaagggtanggngnncagggtttctcntntccgggggtngngntttttccaaggggntt

SEQ ID NO: 84216 - DNA, 568 bp, Arabidopsis thaliana columbia
  unsure (1)..(568): unsure at all n locations
actacactttccattaattaccaatatatttttactacttaaaaaagatattggtcttgaaatggagagttacttaacgaaatggtgtgtagtgcttgttttgttgtgtttcgggtttagtgtagtaaaagcacaagcacaagctcaagttccatgtttctttgtttttggtgactctttggttgacaatggaaacaacaacggtcttatttctattgcaagatccaattacttcccttacggtatcgatttcggcggccctaccggccgtttctccaacggcaagactactgttgatgtgatccgctgagctacttggatttaatggctacattcctgcgtacaattcctgtgagtgggtcggcaaaatactctccggaggtaactacgggttccgcagctgcttggattcccgggagggaacccgtcggcaatttggggcaaagggctaagcttttggtggccaagtttgggcctnccagcccccaggttccaaagctgttcacgtttttcgggggccgggcttttcaactgtttcccaaggngtgtttaccncnttggttngggg

SEQ ID NO: 84217 - DNA, 523 bp, Arabidopsis thaliana columbia
tacaactcattttagggaaggctggtccgcctgcaggtaccggtccggatttcccgggtcgacccacgcgtccgcccacgcgtccgcacaaatcctgccagatttgggtttagagtgacgaacgcgggatgttgcggtattgggaggaatgctggacagatcacatgtttaccgggacagagaccgtgtagagaccgcaatgcgtacgtgttctgggtcgcatttcaccctactgaagccgcaaatgtgatcatcgcaaggagatcgtacaatgcacaatcggcttcagacgcttaccctatggatatttcaaggctggcacagctttgaagaaacatagtaaaataagaactaaagaagttccacaaaccaatgtgtgatcttgttgtgtaccgtaccgctatttaagattttcttgacgtaattgaaatcgagtaaaacattattctataaaaaaaaaaaaaaaagggcggccgctctagaggatccaagcttacgtacgcgtgcatgcgacgtcatagct

SEQ ID NO: 84218 - DNA, 1440 bp, Arabidopsis thaliana columbia
  unsure (1)..(1440): unsure at all n locations
nnnnnnnnnnnnnnnnnnnnnnnnnnnnnnnnnnnnnnnnnnnnnnnnnnnnnnnnnnnnnnnnnccacgcgtccgctacactttccattaattaccaatatatttttactacttaaaaaagatattggtcttgaaatggagagttacttaacgaaatggtgtgtagtgcttgtgttgttgtgtttcgggtttagtgtagtaaaagcacaagcacaagctcaagttccatgtttctttgtttttggtgactctttggttgacaatggaaacaacaacggtcttatttctattgcaagatccaattacttcccttacggtatcgatttcggcggccctaccggccgtttctccaacggcaagactactgttgatgtgatcgctgagctacttggatttaatggctacattcctgcgtacaatactgtgagtggtcggcaaatactctccggagttaactacgcttccgcagctgctggaatccgagaagaaaccggtcgacaattgggacaaaggataagctttagtggacaagttaggaactaccagaccacagtatcgcaagttgtgcagcttctaggagacgagactcgtgcagctgattacctcaagagatgtatttactctgttggtttaggaagcaacgactatctcaacaactacttcatgcctacgttttactcttctagcagacaattcacacccgaacaatacgctaacgatctcatcagtcgctacagcacccagctcaatgcattatacaactatggggctcgaaagtttgcattgagtggaattggagcagttggttgtagtcctaacgcgctcgcaggcagtcccgacggtaggacttgcgtagaccgcatcaactcagcaaaccagatcttcaacaacaagctaagatctcttgttgatcagctcaacaacaatcaccctgatgcaaagttcatctacatcaatgcttatggcattttccaggacatgatcacaaatcctgccagatttgggtttagagtgacgaacgcgggatgttgcggtattgggaggaatgctggacagatcacatgtttaccgggacagagaccgtgtagagaccgcaatgcgtacgtgttctgggacgcatttcaccctactgaagccgcaaatgtgatcatcgcaaggagatcgtacaatgcacaatcggcttcagacgcttaccctatggatatttcaaggctggcacagctttgaagaaacatagtaaaataagaactaaagaagttccacaaaccaatgtgtgatcttgttgtgtaccgtaccgctatttaagattttcttgacgtaattgaaatcgagtaaaacattattctatatacattaaaaaagcntttnnnnnnnnnnnnnnnnnnnnnnnnnnnnnnnnnnnnnnnnnnnnnnnnnnnnnnnnnnnnnnnnnnnnnnnn

SEQ ID NO: 84219 - DNA, 406 bp, Arabidopsis thaliana columbia
  unsure (1)..(406): unsure at all n locations
ggctcccttaacacatgaagagaggaccatatcaatggcctattgttcgacacatcttagttaaagaatcaagctttcggacacatctgggttatccttagggtcatcgtcgcttaggttccatccaatatattgacgagagaatgtattaatgcttaaaaagattaatatcttcagcagaaccgtttttaaccattgtgtgagtttctcttccctgggaacactttgaacttagcttcatcggattttgttgagctcccttgcacaatgttctttggatcatcaactttcgcngnttcctttgcagctgaattgccggttgaaccaaagacgngctttcccgaaattggccntgggggnagggccggaaaantcncaangggctttccccatcccaggngggttt

SEQ ID NO: 84220 - DNA, 494 bp, Arabidopsis thaliana columbia
  unsure (1)..(494): unsure at all n locations
atagagattgtgtgaaacattacaagaagagaaaaaaaacattacaagaagaaaaaagtggagtcagtgactcctacaaacgaggaaataatggaaagtggagaagatagcttcctcgacgagaggaagaccgtcgtctcttatttttgaaaactcaaacacttaaaagaaaaactgaaataattaaacggacaccaagaaaaccatgagacaaaattgtctccggttttggaccctgcgtctgtttgatgttctgcgccttggtgcttcgattccatcaaacatcgataaagtttatttttcccagaaccaggggatctttttgccaaaccgngataacncggcccctnccgatcaattttgccaaaatttggcccaatcatcaccaacngntttggaaacccccggtaaatnccccangnccccnganggggnntccaaaatggttcggggccccccattggncccnccccgnggggccctccaggggttca

SEQ ID NO: 84221 - DNA, 380 bp, Arabidopsis thaliana columbia
  unsure (1)..(380): unsure at all n locations
cgagtggaaacttttaaacaagagagggagagagtgaaatggcgacgtcgggaacatacgtgacggaggtaccgttaaaaggaacagcagagaaacacttccagaggtggaggaacgagaaccatctcttccctgacgctgttggccaccacatccaaggtgtttcttttcacgacggcgaatgggacactcacggaagcatcaagatttggaactacacattgggagatggaaagcaagaggaattcaaggagaggagagagatggacgatgaggattaacacaaatgaaggtttctaggcctttaaggtcacgtgatggngcagctcaaggtgtatnnnatccgttttccattttttttcccaagttttnntnaggtt

SEQ ID NO: 84222 - DNA, 418 bp, Arabidopsis thaliana columbia
aaggctgaaaaggccaatttttaatttaaaaaaccttacaaattttataaatacaccctttttctggaaggaaaaattatacacataaataccaaaattcaatgcatcaaatcaatgtaagagacacacaaacaacattcttatgttctgtcttctgtgcgtttctcaactttggttaagatcacgcgatgtttgacctagccatcttgagaataagaatcttgcaagtggactaaagtttgcattagaactaaattctttgctagcttgctttcttttgttctctgcatcattgttcattgtcttagcgaacacacggatcgccatgtcttgcacttctttctctgacgcttcctttgtacttcccaactgttcgatcagtttggcaataaaagcttcagaagaaccaggcttttcg

SEQ ID NO: 84223 - DNA, 534 bp, Arabidopsis thaliana columbia
  unsure (1)..(534): unsure at all n locations
ggcaaagaagtaaaagaggcttaaaactctctctctctcttggtcttcctcactcttaacgaaaatggactctctaacactcttcttcaccggcgcactcgtcgccgtcggtatctactggttcctctgcgttctcggtccagcagagcgtaaaggcaaacgagccgtagatctctctggcggctcaatctccgccgagaaagtccaagacaactacaaacagtactggtctttcttccgccgtccaaaagaaatcgaaaccgccgagaaagttccagacttcgtcgacacattctacaatctcgtcaccgacatatacgagtggggatggggacaatcccttccacttctccaaccatcaatcccccggaaaaattttacaaaaggncgccaaggggcctcccacgggaggagattggcccgtagattccttattccaaagtaaaaccctgggtaaaaagntcctagncgntnggattcggngttggcggtncgattnngggantttgaatttaanttggggggntacgangt

SEQ ID NO: 84224 - DNA, 1451 bp, Arabidopsis thaliana columbia
atcaggcaaagaagtaaaagaggcttaaaactctctctctctctctcttggtcttcctcactcttaacgaaaatggactctttaacactcttcttcaccggtgcactcgtcgccgtcggtatctactggttcctctgcgttctcggtccagcagagcgtaaaggcaaacgagccgtagatctctctggtggctcaatctccgccgagaaagtccaagacaactacaaacagtactggtctttcttccgccgtccaaaagaaatcgaaaccgccgagaaagttccagacttcgtcgacacattctacaatctcgtcaccgacatatacgagtggggatggggacaatccttccacttctcaccatcaatccccggaaaatctcacaaagacgccacgcgcctccacgaagagatggccgtagatctgatccaagtcaaacctggtcaaaagatcctagacgtcggatgcggtgtcggcggtccgatgcgagcgattgcatctcactcgcgagctaacgtagtcgggattacaataaacgagtatcaggtgaacagagctcgtctccacaataagaaagctggtctcgacgcgctttgcgaggtcgtgtgtggtaacttcctccagatgccgttcgatgacaacagtttcgacggagcttattccatcgaagccacgtgtcacgcgccgaagctggaagaagtgtacgcagagatctacagggtgttgaaacccggatctatgtatgtgtcgtacgagtgggttacgacggagaaatttaaggcggaggatgacgaacacgtggaggtaatccaagggattgagagaggcgatgcgttaccagggcttagggcttacgtggatatagctgagacggctaaaaaggttgggtttgagatagtgaaggagaaggatctggcgagtccaccggctgagccgtggtggactaggcttaagatgggtaggcttgcttattggaggaatcacattgtggttcagattttgtcagcggttggagttgctcctaaaggaactgttgatgttcatgagatgttgtttaagactgctgattgtttgaccagaggaggtgaaaccggaatattctctccgatgcatatgattctctgcagaaaaccggagtcaccggaggagagttcttgagaaaggtagaaaggaaacatcaccggaaaaagtatggagaattttctcaatttgtttttatttttaagttaaatcaacttggttattgtactatttttgtgttttaatttggtttgtgtttcaagaattattagtttttttttgttttgttgcatatgagaatcttactcttgatttctccgccgtagagccggcgagacataggggattattagtatttttaagtgtgtttaagattgattaacaagttagtaaaataaaatgtacttaggtgtcgaaaaaaaaaggaattc

SEQ ID NO: 84225 - DNA, 509 bp, Arabidopsis thaliana columbia
aaacaacttttccaatttttcagttccgatctgctgccattgacttggtagatcttcaagcttcaaaactctataatcggatcttttattccttgtggagatatggatggagatggttctagctttgagcagtgttaccgttgttatcctgtcacattcattgacaaggcacatcttgagaagggtgacaaaagtaaattactactctcttcccttagtctctatagatagtttctttatgatatatatctctgagaagacttgtgatctctgcagttatcatgcctccttccgctctcgatcgtcttgcttctttgcatattgaatacccaatggctggtttcaactgagtaatgtttctgttgagaagacctcacattgtggtgtactagaattcactgcagacgaaggcctagtttacttgccatattggatgatgcaaaacatgtctcttgacgagggagacgttatgcaagttaagaatatcagcttggtaaaagggacttaca

SEQ ID NO: 84226 - DNA, 522 bp, Arabidopsis thaliana columbia
gctcgtatacgactcactatagggaaagctggtacgcctgcaggtgccggtccgggattcccgggcttcttcttctgtacctcggtctcttccgtgtccactccgagctcttactagtaccactcgatctctaccatttcaatgtgctcctctctttttctctattccttcttcaatcggttgcttctcccactcaaaatccccgacccgcgaagagggtgccggtggcgtccgggaagagcggagatggattcgcgaggagcaacgatggattcgtgaagaacagagatggatacgcgaacgtgaatcgcttctacaagagatttcggatctacagctcagaattcaatccctagagtcacgaaattcgcaatgggggaattctattcccgatacgatttcgaatatcgctgctttgcttcagggtttgaaggagaagaatcggatttctgagagtggattgagcgcaacgccgatggtattggagagtacgagagaacaaattgttgaggaggtggaaga

SEQ ID NO: 84227 - DNA, 616 bp, Arabidopsis thaliana columbia
  unsure (1)..(616): unsure at all n locations
agaggctataataaatctgactgataaagggaactgtccatatgagagtgacttctcagttctcaatagtcttttaagatttatgtcatagttaagagaaaaaaagaggatccatgattgtaagaagggagaaactaattaagtcaccggtttcttcagaaattaagaaaaattaaggacaaaaaaaagggagcaatggagatcaactagaagaaactctgtctctcttggaccttgatctggtacatttgctactctctgcaacgattatagtctcaggtgttttttcttcttcttccggttcgagaccaagggacaccctagaagaataaactcctttcaacagcactggtctcccacaaagggtagccacatctgtcctaaacttcagagagctcatgcccgcgctaattctcttccacatctggagcccacttcaccagatatcncgggggtaacnccggttcctgnaagcattaacngccttnaaacgtcgggggnccagctgaagaatggccaancgcaaggcttccaaanaatgggggggcccccaggggnaaccanagctttaagccgngaagggttncgggaanttangggccccccngggaaccng

SEQ ID NO: 84228 - DNA, 565 bp, Arabidopsis thaliana columbia
  unsure (1)..(565): unsure at all n locations
gaatcctatagccaagcaaaatcttgttgaaatcaagacaaattgcttataattgtattctccttaatgcagaacagtaatccatttcagtttacatagcaagaggagtgtcacataaaatttggacaatactaactttcgaaatagatccactaatgttggagcagagcttcgttacaatattttttaaagttgacagcctcgtcggtcaggaagtcacacagtcgctcagccatgcgtcccacttcccatcttggactccatgggtactcagtgaggagattcgatttcactggcacactcgattggtttaaatgctggacaactttgcagcatcagagttggttgctgcntcgggaattgagttgaaaagaagaaatggaccatgaaagtaaattgtccagaggcattaagggatgtagccttacggcaaaaggaagntcggctccaagaggcctnccngattaagccttaatgcnccataaacnccccctaaaccattggggacagntcatgggcnggccccagggtctccantggggggatcnncagncaccgcntcnng

SEQ ID NO: 84229 - DNA, 1168 bp, Arabidopsis thaliana columbia
aaacaaagcaacaagcaagattcatcaaatccttatcttctctctttcactcacaaccaattgctcatcccacctacttgttccccacaaaacactctctccctctttgttctttcatcttctctaagctctttctctgaacctacgcttctgctaagctattctaagagaagccagactagcaataaacccttcattttaagcattctgtttccttcttgagaaacctagatattttggtttcttgtatccggtgatgaagatacagtgtgatgtgtgtgagaaagctccggcgacggtgatttgttgcgccgacgaagctgctctctgtcctcaatgcgacatcgagattcacgccgctaacaaactcgctagcaagcaccaacgtcttcatcttaattccctctccaccaaattccctcgttgcgatatctgccaagagaaggcagctttcattttctgtgtagaggatagagctctgctttgcagggactgcgatgaatccatccacgtggctaattctcgatctgctaatcaccagaggttcttagccactgggatcaaagtagctctgacctcaactatatgtagtaaagaaattgagaagaatcaacctgagccttccaacaaccaacagaaggctaatcagattcctgctaaatccacaagccagcagcaacaacaaccttcttctgctactccacttccctgggctgttgacgatttctttcacttctctgatattgaatccaccgacaagaaaggacagcttgatcttggggcaggggagttggattggttttcagacatgggattcttcggtgatcagattaatgacaaggctcttcctgcagctgaagttcctgagctttctgtttcgcatttaggtcatgttcattcatacaaacctatgaagtcaaatgtttcacacaagaagccgaggtttgagaccagatatgatgatgatgatgaggaacacttcattgtccctgatcttggctaaaaagctatatgtaatctatgtgtagacattcttcaatgtaaaagaacaaacaagaaacctatctgcatgtgtggagttaatgtcatatacattttagttttgtcttaagttgtgtaagatatgttgagagcttataacaaatgtctgtgtttgagttaaaaaaaa

SEQ ID NO: 84230 - DNA, 1097 bp, Arabidopsis thaliana columbia
ttaggtacacactatagaagagtctatgacgtcgcctgcacgcgtacgtaagcttggatcctctagagcggccgctcgcgatctagaacttcttctgggtgttcaaagaattagtcgttctcgcgtattcactttccatggcgggctttctctccgttgtccggcgcgtgtacctcactctctacaattggatcgtctttgctggatgggctcaggttttgtacttagcgataacgacgttgaaggaaacgggttatgagaatgtctatgacgccattgagaagcctctccagcttgctcagactgccgccgttctcgagattcttcatggattagtaggtttggtcagatctcctgtttctgcaactctgccacagataggttcaaggctatttctcacttggggcatcctatacagttttccagaggtccgatctcattttcttgttacgtcgctggtcataagctggtctatcacagagattattcgctactcattcttcggctttaaggaagctctaggctttgcaccttcatggcacttgtggctcagatacagcagctttttattgctataccctaccggtatcaccagcgaagttggtcttatctaccttgccttaccacacatcaagacatcggagatgtacagcgttaggatgcctaacatattgaacttctcatttgacttcttctatgcaacgatactcgtccttgcaatctatgtcccaggtagcccacacatgtacaggtacatgcttggtcagcgaaagagagctctctccaaatccaagagggaataaaagaaaagatttagaaagagacgaaaaagctcatcaactgttttctcctcttgtcttgttcgttcatgtactactagtctactactacaacttgtcttttgtttagcttgtttgagcttttacttcctcggcgattacttgaacttacatgcagcaggatactattaagtgtaatgtggtttctaaattaataagaaaatcattggttccttctcaaaaaaaaaaaaaaagggcgaccgctctagaggatccaagcttacgtacgcgtgcgtgcgacgtcatactcttctatag

SEQ ID NO: 84231 - DNA, 680 bp, Arabidopsis thaliana columbia
  unsure (1)..(680): unsure at all n locations
agtcccaccgctcttatgctttagattttgaatcagcttgatgggtttgacgcacgtggtaacatcaaggttcttatggcaacaacagggcctgacacactagccccagctcttttacgttctggacgtcttgaccgtaaggttcagtttggtctacctgacctggagagcagaacacagatcttcaagattcacacaagaaccatgaactgcgaaagagacatccgtttcgaactccttgctcgcctctgcccaaactcaacgggagctgatattcgaagtgtatgcactgaagcaggaatgtacgcaatcagagctaggagaaagactgtgactgagaaagactttctagacgcagtgaacaaagtcattaaaggttaccaaaagttcagtgccactcccaagtatatggtctacaattagagagattgagacagatagaagaactccgaaataaaactccgaaacactctttgttctttgtttgtgtctcttcccttcaagctcttttgtagtacttgtttcacaacttattccagtaactcgggtttatcttcttcaatgtctactacttttggattcataaattctttgttaagtttcnnnntntnggngaattcacgtcttttggnnnnnnnnnnnnnnnnnnnnnnnnnnnnnnnnnnnnnnnnnnnnnnnnn

SEQ ID NO: 84232 - DNA, 633 bp, Arabidopsis thaliana columbia
cccacgcgtccggtcctttgagtaatttagaaaatcaaaatgggtcgcaacgtcaaaaccaaggcaaagaggaagaacaagaagaaagcagaggcgtcttcttccgagataccatcgataccaactagggtttggcaaccaggtgttgatacccttgaagatggagaagaacttcagtgtgacccttctgcttataattctctccatggcttccatgttggttggccctgtctgagctttgacattttaggtgataagttgggtttgaaccgaactgagtttcctcacacactttatatggtggctgggactcaggctgagaaagcagctcataactccatagggttatttaaaatcaccaacgtatctggtaagagacgtgatgttgtgcctaagacatttggcaatggtgaggatgaggatgaggatgacgaagatgacagtgacagcgatgatgatgacggaggatgaagcttctaaaactccaaatattcaggttcgaagggttgctcaccatggatgtgtttaaccgtataccgtgcaaatgccacaaaactctcatattctgggctcttttgggcagattctggtcatgtacaggtctgggacatgagctctaattttaatgcttta

SEQ ID NO: 84233 - DNA, 436 bp, Arabidopsis thaliana columbia
  unsure (1)..(436): unsure at all n locations
ctcaatttcggttccactttcctttcgtttgcaaaaacccatcccatcaaaaataaacaagagggcctaaagaagaatcctaaagactttacgggtcttgtttaggataaaagaaatgcctgccggtggattcgtcgtcggggatggccaaaaggcttatcccggcaaactcactccctttgttctcttcacttgcgttgttgctgccatgggcggtctcatcttcggatacgntattcggaaatctccggtggtgtgacggctatgccgtctttccccaagggatttctttcccgtcgggtgtatcgggaacaaccaagagggccgggtaaacggaccccgtacctttcaagtacgggtagccccaacggttaacggtttttcaaaaaagggttcttataatcttagngggggggtaaaatttcgtncgcntggt

SEQ ID NO: 84234 - DNA, 2035 bp, Arabidopsis thaliana columbia
  unsure (1)..(2035): unsure at all n locations
nnnnnnnnnnnnnnnnnnnnnnnnnnnnnnnnnnnnnnnnnnnnnnnnnnnnnnnnnnnnnnnncccacgcgtccgcccacgcccacgcgtccgcggacgcgtccgctcaatttcggttccactttcctttcgtttgcaaaaacccatcccatcaaaaataaacaagagggcctaaagaagaatcctaaagactttacgggtcttgtttaggataaaagaaatgcctgccggtggattcgtcgtcggggatggccaaaaggcttatcccggcaaactcactccctttgttctcttcacttgcgttgttgctgccatgggcggtctcatcttcggatacgatatcggaatctccggtggtgtgacgtctatgccgtctttcctcaagcgattcttcccgtcggtgtatcggaaacaacaagaggacgcgtcaacgaaccagtactgtcagtacgatagcccgacgctaacgatgttcacatcgtctctatatctagcggcgctaatttcgtcgctggtggcttccaccgtgacaagaaagttcggacggcggctctcgatgctcttcggcggcatactcttctgcgccggagctctcatcaatggtttcgccaaacatgtttggatgctcatcgtcggtcgtatcttgcttggtttcggtatcggtttcgctaatcaggctgtgccactgtacctctctgagatggctccatacaaatacagaggagctttaaacattggtttccagctctcaattacaatcggaatcctcgtcgccgaagtgctaaactacttcttcgccaagatcaaaggcggttggggatggcggctcagtctcggaggcgcggtggttcctgccttgatcataaccatcggctccctcgtcctccctgacactcccaattcaatgatcgagcgtggccaacacgaagaagccaaaaccaagctcagacgaatccgtggtgtcgatgacgtcagccaagagtttgacgatttggtcgccgctagtaaagagtcgcagtcgatagagcacccgtggagaaacctcctccgccgcaagtaccgaccacatctcacaatggccgttatgattccgttctttcaacagctaaccggaatcaatgtgattatgttttacgctccggttttgttcaacaccattggtttcacgaccgatgcttctctcatgtccgctgtggtcactggctcggttaacgtggccgctacgcttgtttctatctacggtgttgacagatggggacgtcggtttctctttcttgaaggtggtacacaaatgcttatatgccaggctgtggttgcagcttgcataggggccaagtttggggtagacgggacccctggtgagctaccaaagtggtatgctatagtggttgtaacgttcatttgcatctatgtggcgggttttgcgtggtcgtggggcccactagggtggttagtaccgagtgaaatcttcccgttggagataaggtcggcggcgcagagtatcaccgtgtccgtgaacatgatcttcacgttcattatcgcgcaaatcttcttgacgatgctttgtcatttgaagtttgggttattccttgttttcgcctttttcgtggtggtgatgtcgatctttgtatacattttcttgccggagacgaaagggattccgatagaggagatgggtcaagtgtggaggtcacactggtattggtcaaggtttgtggaggatggtgagtatgggaatgcgcttgagatgggcaagaacagtaaccaagctggaacgaagcatgtttgatttatcattgtttttaatgagagttttaagaaagaaagaaaaaagatttgtaatttctaatgtcgtaaaggaaaaagtgtattagcctagatatttattggtgtttatataattcaataccacatgaagaaattatgcatatgattcttcgttaattgtccgtaattgttatactctttacttaaaccaagtgttttctctttgnnnnnnnnnnnnnnnncggctcaattnnnnnnnnnnnnnnc

SEQ ID NO: 84235 - DNA, 572 bp, Arabidopsis thaliana columbia
  unsure (1)..(572): unsure at all n locations
aaagannggatcttttcatgttacttttagggttgttttctatgaatgtttctcccaaatctcaagttactaaagttgattatggaaagtggaataaaccggagaacctaagatcctttcacaaagagatagtcataaaagaacctacggttacctggttttaaattatatctcataaccaggaaacttagaatctaccggcgacacatgatcgaacccgaggcatgctgggccagctaggccccggaatagcgaataatcatgttctgtttcttggcttgtcatattcacgagctctatcgcatcacggcacaagtaactcgcaaacgcttttgctctctcttcatatacaacatctcccgggtaagcgataaaggggataagaaagcgtaggcattaccagcaactccatcagntaacctacctttcttcaccaagcaatnttccaaacaattncccggttaaaggggggttcnggggaaacccttcctnggggaaccnnggnggntttgccaagaatgggcaccggggggnccagggccttggggagttncccggntccccgggngggt

SEQ ID NO: 84236 - DNA, 523 bp, Arabidopsis thaliana columbia
gactcactttagggaatgctggtacgcctgcaggtaccggtccggaattcccgggtcgacccacgcgtccgcccacgcgtccggcagcttattctgttgcttttgctcagattgggatgaaatgggcgaagtacttggttggtatatgcgctttaaagggaatgaccacaagcctgcttgttggctctctaggccaagctcggtacaccactcagattgctcggtctcatatgattcctccatggtttgctttggttcatccaaaaacaggaacccctatttatgctactctccttgtaaccatactcagttcaataatatccttcttcaccagcttagaggttttatcaagcgttttctcctttgctaccctcttcattttcatgctcgtggcagtagcattgcttgtgagacgttactacgtgaaggatgttactcctgaggcccgtttgttgaagtttcttgggtttttgttttgataattgcttcctccattggagatcaccgctttgaactcaagcgt

SEQ ID NO: 84237 - DNA, 643 bp, Arabidopsis thaliana columbia
cgcctgcaggtaccggtccggaattcccggtgttgacccacgcgtccgaggacgcgtgggcggacgcgtgggctgcgagaagacgacagaaggggagaccgaacacgaagaaacaaaaattcaacaaaaacaaagacaaagtttcgttttagcttaaaggttccagatttcgaaaaagctctcttttttttttctccttcgtgttacacaaccatttctagatatcattttggtgattaagttatttaagaaatggctgatcatttgagtttatgtaccgatcgtctcataacatctgagagcttggactcagagaaagattcagattcttcaggagaaagttcttaccggcctcaaggcacagacttggcttcttcatctgtgaatgaaactgaggttcctagagagtactacgcggttgcggatgaggaagaacctcttctccaatctgttgagtgtcgtatttgccaagaggaagatagtactaagaaccttgaagctccttgtgcttgtaatggtagtttaaagtatgctcaccgcaagtgtgttcagcgttggtgtaatgggaagggcgccataacctgtgaaatatgtcacccgccttatcaacatggatacactgcacctccgcctcctcctcctg

SEQ ID NO: 84238 - DNA, 2083 bp, Arabidopsis thaliana columbia
  unsure (1)..(2083): unsure at all n locations
tgatatctccnnnnnnnnnnnnnnnnnnnnnnnnnnnnnnnnnnnnnnnnnnnnnnnnnnnnnnnnnnnnnnnnnnnnnnnccacgcgtccgcttcttcttcttcttcttctttttcttcttcttacatttgatttctctgtctggaattcgagaaccagatctactaattacctgagagaaaaaagatctgctctgtttgtctgaaacagacagaagtcaacaaatctttcatttgttttttagcaaatcaaagaaatggccggagggttcgtcagtcaaacgccgggtgttcggaactacaattacaaactgacaccgaaagtgtttgtgacatgtttcatcggtgcttttggtggtctcatcttcggatacgatctcgggatctcaggaggggtaacctcaatggagccattcttggaagagttcttcccttacgtctacaagaagatgaagagcgcacatgagaacgagtactgtcgatttgatagtcagcttctcactctcttcacttcgtctctctatgtggcggctttggtgtcttctctctttgcctccaccattactagagttttcggaaggaaatggtcgatgtttctcggtggtttcaccttcttcatcggttctgctttcaacggctttgcccaaaacatcgctatgcttctcattggtcgtatcctacttggtttcggagtcggattcgccaatcaatctgtaccggtttatttatcagaaatggctcctccgaatctaagaggagctttcaacaacgggtttcaagtagcgattatctttggtattgtggttgcaacaatcatcaattacttcaccgcacagatgaaaggaaacatcggatggagaatctctctcggattagcttgtgtccctgcagtgatgatcatgatcggagctctgatccttcccgacactcccaactctctcatcgaacgtggctacaccgaagaggccaaggaaatgcttcagtccatccgaggaaccaatgaagtcgatgaagagtttcaagatctcattgatgcaagtgaggagtccaagcaagtgaaacacccatggaagaacatcatgcttcctcgttacagaccacaattgatcatgacttgcttcattcctttctttcaacaacttaccggaatcaatgtcattaccttctacgccccggttttgttccaaaccctcgggttcggtagcaaagcttccctcctatcagctatggtaacgggtatcatcgagctcttgtgtaccttcgtctctgtttttacagtggataggtttggaagaagaatcttgttcctccaaggaggtatccagatgcttgtctctcagatcgctattggagccatgattggagtcaaatttggagtggctggaacaggaaacatagggaaaagtgatgccaatctaatcgtggcactgatctgcatctatgtagcgggtttcgcctggtcatggggaccgttgggatggttggttcctagtgagatatctccactagagatccgatcagcagctcaagccataaacgtttcggtcaacatgttcttcacattccttgtggctcagctcttcctcactatgctttgtcacatgaaattcggactattcttcttcttcgccttctttgttgtcataatgacaatattcatctacttgatgttgcctgagacaaagaatgtgccaatcgaagagatgaacagagtgtggaaggcacattggttctggggaaagtttattcctgatgaagctgtcaatatgggtgctgctgagatgcaacagaagtccgtatgatgatgatcaagaatgaagttttctttgggcaataaagatttatgagaaaagagaaagtgaataattcttgggatgaaataagaataattgtcaaaaatgccttacttcctaaaagaaagctgctctgtctttagcttcagagacttagctttcattgtttcttctttcttcttttttaatgtttctttgttgaaattgttatttggggcctaaagatgtaaaaacaaaaaaaagaacaaaattatttaaaaatggtttcttattttacatttcaaaaaaaa

SEQ ID NO: 84239 - DNA, 568 bp, Arabidopsis thaliana columbia
  unsure (1)..(568): unsure at all n locations
aaacctagagaagcacaatatccatataagaaaaatggcacaagctacgcgtcagtcttctctacaaggggaacttgaggtagatattgagatcaacgcatcggcaaagaagttccatcacatgctctctggaagaccacaagatgttgcgaaancactcctgacatccagggatgtgctttgcatgagggagagtttggcaaagttggcagtntcatattctggaactatgctattgatgggcagcccaaggtggcgagggagaggatcgaggcagtaggatcaggagaaggaatctgttagtgctcagggtaataagatggagatcctgacggaagagttcaaagagctttctttgggcacctttcccgggcaanccccaaaagcttagggggccccgggaagttttggggtaggggtccccctttaattttgggggggttttccggggaaggtggctccccccgggaaacttccccgggtttttttnccaagtntcccgntnattngccggaattttttttcccgngtttangggtccnttgganccccctttttttntnncncc

SEQ ID NO: 84240 - DNA, 689 bp, Arabidopsis thaliana columbia
aaacctagagaagcaaaacatccgtataagaaaaatggcacaagctacgcgtcagtcttctctacaaggggaacttgaggtagatattgagatcaaagcatcggcaaagaagttccatcacatgctctctggaagaccacaagatgttgcgaaagccactcctgacatccagggatgtgctttgcatgagggagagtttggcaaagttggcagtgtcatattctggaactatgctattgatgggcagcccaaggtggcgagggagaggatcgaggcagtggatcaggagaagaatctgttagtgctcagggtaatagatggagatctgacggaaagagttcaagagcttcttggtcactatccaggcaaccccaaagctaagaggaccgggaagtgtggttaagtgtcacttaaaatatgagaggattgacgagaaggtggctcctccggagaagctgctcgagttgtttgccaagctaaccgaatcaatggacgaaatgcttttgtccgaagtctagaggattccttggatatccatctatctatctatctatctatgtttgtgggtgttttgtaagatatctcaaattttcaataatgtgctctctctatgaagagatctgaactgcaagtattgcagagtttgtgttacgtatgtttgaagtttttaattagttgcaaattataac

SEQ ID NO: 84241 - DNA, 336 bp, Arabidopsis thaliana columbia
gtccacgggccttgtaccgtggttggcttccatcagtgattggagttgttccatatgtgggcttgaacttttcggcgtatgagtctctaaaggactggctagctaaagagaacccatacggtctagtagaaaacaatgagctgacggttgcaacgaggctcacttgtggtgcaatagctggaacagccggtcaaacaattgcttatccactggatgtgactcgtaggagaatgcaaacggtcgggtggaaagatgcttccgctattgtaacatgccaagggagaagcacagcttcacttgaatacactggtatggtcgatgcatttagaaaaacag

SEQ ID NO: 84242 - DNA, 1096 bp, Arabidopsis thaliana columbia
  unsure (1)..(1096): unsure at all n locations
acgcgcacannnnnnnnnnnnnnnnnnnnnnnnnnnnnnnnnnnnnnnnnnnnnnnnnnnnnnnnnnnnnnnnnnnnccacgcgtccgctcagatcctccatttgagggtgagtcttgcggattctcgtgtcatcttgaatgtgctttcaacactgaaaaatccggtcttggaaaagacaagcaaagtgagggatgctgcttctattgtgtctcttgcggtaaagcaaacagtttgcttgaatgctggaagaagcaattgacgattgctaaagaaaccagaagggtagaagtgctttgttaccgtcttttcttagtccagaaactattgaagagctcaactaaataccgaaatctgtgtgaggttgtggatgaagctgtcaagactcttgaagctgatgtgggtcctctcactggtcttcctatgaaaatgggtagaggaattgtaaacagacttcattcgggacccgatgtgcagaaactttgctcttctgctcttgaatctcttgaaactatagcaactacacctcctgatgttgctgcattaccttcacctcgcagctccaagatgcagcaaggtcagaacttttgtacccttcaatgattgagtaatatattaagtttgttgaataatgtggattctctgattttgtttcgtagattgttcttatgtattgagcaatgagatatctgcagatacagcaaccacaggatcaaccaagatcaggttcgaggatgtaaacgcgacttcacttacagtggttctcgcctctaatgaaattccctcacctccaaacatcgttcactacagtatttggcatcgtaaggtaccagaaaaagattacccggagaaatcgacttgcacattgtttattccaaacacaagatttgttgtctctggattagctccagcttttgagtactgcttcaaagttgtgtcctatagtggaaccagagaaatgggcgttgatgaaatcaatgttttgacacgtagcgctgaagaaggagcgaattgctcttcggcagtcgcacaaaagcgtaagccccccccccaattgcagcacattgtcttctaatccttcttctgttgaagctgag

SEQ ID NO: 84243 - DNA, 481 bp, Arabidopsis thaliana columbia
gagatcgcaattttgcaaaacagcgaaaatagttctttgtgattttcgagtgagagagacgacagcttccattatcccctgtctctctccctctcgaactacaaatcaaattcgagtgttttcatattgttaatctttttcttcaaggaaagaagagattttgttttccgtttctgggggtttttcttgattctgatctctgatctgatctcatcatcattgtccgtggattctccgatgggtttctgattgtgggttctttcaaatttcttcacttttggagcttttcttctctctgtcttttgttttccctcagctatggcttggaatgagaccaaactcaagaggctctatcaagtttggagaggaagcaataaatttctatgtggcgggaggctaatatttggtcctgatgcatcatctctatatctatcaaccatcttgatccttggtcctgctgtaatgttctttgtcaaaatgt

SEQ ID NO: 84244 - DNA, 521 bp, Arabidopsis thaliana columbia
gcctgcaggtaccggtccggaattcccgggcttcaccccaactgtattagcactgttcgtctttcagaaaaaacaataatagatagaggaaaaaagaaagaaacagagaagtgagaaaaagcccttaaaactcaaacactaaaaaattttcagtgtcgattcaaaaagttttgttatttgatctgtttctgtgtaaaaaaaatggtgaaagatctggttgggtatagattttatccaacgggagaggaattgataaaccattatctaaagaacaaaattttgggtaagacttggctcgtcgacgaagccattagcgagatcaacatctgtagttacgacccaatttacttgccttctttatcgaagataaaatcggatgatcctgtgtggtacttcttctgtccaaaggagtatacttctgcgaagaagaaggtaacgaagaggactacaagttcagggtattggaaaagctactggggttgataggaaaatcaaagataagagaggtaatcgcggcgaga

SEQ ID NO: 84245 - DNA, 425 bp, Arabidopsis thaliana columbia
caggaattgttgcacttctcaaagctctgcatcctgattggtctcctgctgccattagatcagctattgtcactacagcttggagaacagatccatttggagagcagatatttgcagaagggtcacctaggaagccagctgatccattcgactatgggggaggccttgtgaatccagagaaagctacaaaaccaggtcttggatatgacttgggactcgaagactatgttctctacatggggtctgtggggtacaacgagacttcaatctctcagcttggcggtaaaggaactgtctgttcgtatcccaaaccatctggtcttgatttcaacttgccttctatcacaattccaaatctcaaagaagaagtcactcttcccagaaccctcactaacggtggaccacttgagtcggtctatagagga

SEQ ID NO: 84246 - DNA, 1707 bp, Arabidopsis thaliana columbia
  unsure (1)..(1707): unsure at all n locations
nnnnnnnnnnnnnnnnnnnnnnnnnnnnnnnnnnnnnnnnnnnnnnnnnnnnnnnnnnnnnnnnnnnnnccacgcgtccgcttcgttttcttcgaatccaaatttctgtgtctgcttttgattcacagagaaggagcaggaaagatgttggatatcaatctatttcgtgaagagaaaggtaacaatccggagattatccgagaatcgcaacgccggagatttgccagcgttgaaatcgtcgatgagatcattaagctggacaaggaatggcgtcagcgtcaatttgaagttgatagcttcagaaaggagttcaacaagctcaataagcaagtggcgcagctcaaaattaaaaaagaagatgcgagtgagattattcaacaaactgagaaaaacaaacaagattctactgcaaaggaggctgaagttcgtgaagcttatgctgctttgaaagccaagttggagcaagttggtaatttggtccatgattctgttccagttgataaggacgaggctaataatcttgtgattaaactgtggggtgaaaagcggttttctacgcctggtctgaagctgaaaaaccatgtggatcttgttgagcttctcggtattgcagataccaaaagaggtgctgaaatcgctggagcaagaggctttttcttgaaaggagatggtttgatgcttaaccaagctcttatcaactttgggttaactttcttgaaaaagagaggattcacaggattgcaacctccttttttcatgaggaaggatgttatggccaagtgcgcacaattggcacagttcgatgaagagctttacaaggtgactggtgaaggagatgacaaatacctcattgcaactgctgagcagcctctttgtgcgtaccatattgatgaatggattcatccgactgagcttcccctaagatatgctggttactcatcctgctttagaaaagaagccggttcacatggaagagacacccttggtattttccgtgttcaccagtttgagaaaattgaacagttttgcatcaccggccctaacgagaatgcctcgtgggaaatgctcgatgagatgatgaagaactctgaagatttttaccaagcgctaaaacttccataccaaatcgtctcgatcgtctctggagcattgaatgatgcagctgcgaaaaagtacgatttggaagcttggtttccttcgtccgagacattcagggagcttgtgtcttgttccaactgtacagactaccaggctcgcaggcttgagatcagatacggtcagaaaaagagcaatgagcagacaaagcagtatgtgcatatgctgaattcgacacttactgcaacagagaggaccatttgctgcattctcgagaactaccagcgagaggatggtgtcgacattcctgaggttctgcagccgtttatgggcggagagacgtttttgcctttcaaggccaagcccgtagttgctgataccaaagggaagaaatcgaaagcttgattgatgtattgattcagattaacgactcttctgttttcttgaaattgatgaaacacttcgataaatttctttactttgtggaatttttttggacttctgttattttaccaggaccgttatttatcatctgatttctgctagtatttgttccttttgtttggcgaatcattgttaactttacttcaatgataacaaaatttttgtatt

SEQ ID NO: 84247 - DNA, 543 bp, Arabidopsis thaliana columbia
  unsure (1)..(543): unsure at all n locations
cagagctcctcttctccgatcaaaaaccctcgagcttctaacaatggagaccagcatcgcgtgctactcacgtgggatccttcccccaagtgcgtctcttctcaacgatcctctacattggtctctcctccttccttctccacatcctccagcttcaagcgtctaaaatcgagctcaatcttcggagattcactacgactagcaccaaaatcgcaacttaaagccgcaaaaggctaagagcaatggtgcttcaactgtgaccaaatgtgaaattggccaaagcttggaagagtttttggcacaagcaactccctgtcaaggggatttgaggacctttgcctgatgtgtatggggagaaggcatttgaggaccaataaggcttttttaaagttagggcccancttttttcgggtgggaccaccttttgttgttatacctcctttgggggatggncaactcggtnttnnaaatgcttccnggaaaaggtttctntttngggntttaaanncnnggatttttcaaaanttnttncctttaaagggg

SEQ ID NO: 84248 - DNA, 514 bp, Arabidopsis thaliana columbia
gaaagagaaatacacactgcgatacaccggaggaatggttcctgatgttaaccagattattgtgaaggagaaaggaatcttcacaaatgtgacttctcctacggctaaggcaaagttgaggctgttgtttgaagtggctcctcttggcctgctcatagagaatgctggtggattcagcagtgatggacacaagtccgtgcttgacaagaccatcatcaacctcgacgatagaactcaagttgcttatggctcaaagaacgagatcatccgcttcgaagaaaccctttatggaacatcaagactcaagaatgttcccattggagttaccgcttagaaactcattcaaaataagtgaatgcatgtttatttttccataaaccggataatctacttttcccttggtttataagagaagcaacaaaacttgtgatacaagtttttaaaaaaaattattagtttggtttggtgttaatcaaaattttaacagcatgaaacgaataatgaaatctgtctg

SEQ ID NO: 84249 - DNA, 613 bp, Arabidopsis thaliana columbia
  unsure (1)..(613): unsure at all n locations
tcgcacatccctttgcctcggtctctctctcgcccaattgcccatcaccagagcttaatcatatcttcttcagttactgccacgtgtcactctgaccgtgaacagcctttatctcttccaagtccacttgtgttcttgattattttgtcttcaccattctctctactcagagctcctcttctccgatcaaaaaccctcgagcttttaacaatggagaccagcatcgcgtgctactcacgtgggatccttcccccaaacgtctcttctcaacgatcctctacattggtctctcctccttccttctccacatcctccagcttcaagcgtctaaaatcgagctcaatcttcggagattcacttcggcttagcaccaaaatcgcaacttaaaaggccgcaaaaggctaagnggtaaatggtgcttcaaacttgtgnccaaatgtggaaattngccaaaggttttgaaggggtttttgggaaaagaaactcctgncaaagggttttagnncttttctgaatgtgtattgggggagnattttggcaatagntttaaaggtngnnaanttttnnggnggcacnttttgttatncttgggggncacncgtgtgaagntnta

SEQ ID NO: 84250 - DNA, 1447 bp, Arabidopsis thaliana columbia
tgactgtccgtctgcggtaccggtccggaattcccgggtcgacccacctctctactcaaagctcttcttcttcgatcaaaaaacctcgagcttctaacaatggagaccagcatcgcgtgctactcacgtgggatccttcccccaagtgtctcttctcaacgatcctctacattggtctctcctccttcctactccacatcctccagcttcaagcgtctaaaatcgagctcaatcttcggagattcactacgattagcaccaaaatcgcaacttaaagccacaaaagctaagagcaatggtgcttcaactgtgaccaaatgtgaaattggccaaagcttggaagagtttttggcacaagcaactcctgacaagggattgagaactttgctgatgtgtatgggagaagcattgagaacaatagcttttaaagttagaacagcttcttgcggtggaacagcttgtgttaattcctttggtgatgaacaactcgctgttgatatgcttgctgataagcttctctttgaggctttgcaatactcgcatgtgtgcaagtatgcttgctctgaagaagtacctgagcttcaagacatgggaggtccagtggaaggtgggtttagtgttgcgtttgatccattggatggatcaagcattgtggatacaaatttcactgtgggaaccatattcggtgtttggcctggagacaagttaaccggaatcactggaggagatcaagtggctgcagccatgggaatctacggtccacgaaccacttatgttttggctgttaagggctttccaggaactcatgagttcttgcttcttgatgaagggaaatggcagcatgtaaaggagacaacagagatcgcagaagggaaaatgttctcaccaggaaacttaagagccacattcgacaactccgaatacagcaagctgattgattactacgtgaaagagaaatacacactgcgatacaccggaggaatggttcctgatgttaaccagattattgtgaaggagaaaggaatcttcacaaatgtgacttctcctacggctaaggcaaagttgaggctgttgtttgaagtggctcctcttggcctgctcatagagaatgctggtggattcagcagtgatggacacaagtccgtgcttgacaagaccatcatcaacctcgacgatagaactcaagttgcttatggctcaaagaacgagatcatccgcttcgaagaaaccctctatggaacatcaagactcaagaatgttcccattggagttaccgcttagaaactcattcaaaataagtgaatgcatgtttatttttccataaaccggataatttacttttcccttgggttataacggcccccgaattccttcaggccgggggatccactagtcttaaacggccgcccccccggtgaagctcccagcgtttgttccccttaatgag

SEQ ID NO: 84251 - DNA, 803 bp, Arabidopsis thaliana columbia
  unsure (1)..(803): unsure at all n locations
tacggctgcgagacgggaactagccactgcgatcggagaagaaaaagctcgagagacgccatggaaatttcccaagctcgttcaagcttcgtttgtcttcttcttctgttactctccatgtgtttcgttccctgcgtcttttccaaatctcctcgtcctatctccgatgtggagatcaggcagaagaagagcgaatgctacggtgatatagagagtgggttatggggttggcaatgcaaatcttctgcaatagcgaaagagaattgtgcgctgcgatgcctttctccggtttgctatcaactcatttatgagagtgatccgcttgaagaaggtgaaaaagatttgattaggagccaagagtacaagtattgtatgtacaagtcatcactcggggaaagcttagagggtgttcgaggcatcttttgatggtatcaaataagactttctcagtgaagacatttgccaaaatctgagctaagctcttgaatttctgatcagtagtattctgctctgtcgcgtttgaagccatgtaaggcttcttttattataaacctcaatttttgggttaatggttgtttatatgaaacgtttacgtttatgattggcaaatccactgaatcttggaaccattgtacaaatcagtcttaatacgcacagattggtcccagttctcttgtcatgaataggagtccatattattgttggagtctnnnnnnnnnnnnnnnnnnnnnnnnnnnnnnnnnnnnnnnnnnnnnnnnnnnnnnnnnnnnnnnnnnnnnnnnnnnnnnnnnnnnnnnnnnnnn

SEQ ID NO: 84252 - DNA, 586 bp, Arabidopsis thaliana columbia
  unsure (1)..(586): unsure at all n locations
gaaaaacccgcccncctaacttgtcagcccgattattaacggatacgggcgttctaccaccactaaaaggntggaagaccccttgctatgcactgctgtgctggcttagtgtgttcattgataggagaattaggttgcagacgtagcagagtaaaccttttgaggctctacacggctgcatcaaccattgttatggttctttctgtgttttgtgctgttaggagcagattaaccatggaggaacgcaatagctctggaacaaccgcgaagcttgagctcgcaggtttcatttgtgctcaattaggagcggtggtgcagatattagcgatcatcgttacagggtcccttgtcaataatatgtctccacctacgaaagcagcatagaggaacataaaatttgggcactgtcgtgtgtgcttctcttaaatgaagaacttaggaatttgtaatttttgaaccatttttgttctctccaccaagtgattagtgttatacaacgttgtttacttcagctttttaaaaaaaaaaaaaaaaaagggcggccgctctagaggatccaagcttacgtacgcgtgcatgcgacgtc

SEQ ID NO: 84253 - DNA, 892 bp, Arabidopsis thaliana columbia
  unsure (1)..(892): unsure at all n locations
gagagaaaaaatttgacttgcacttcctttgactcactatcgggaaagctggtacgcctgcaggtaccggtccggaattcccgggtcgacccacgcgtccgtccaatttctccggctaagatgcagcagaggaagccgacggcgggtagacccagtggtaccgatggatccgatttctcataccgcatggtcgttgactctcgttacacgaaggtcactaaagaaaaagctcgtctccgtcctttgatctttgttcaggctgcgatttatgtaatcggattatcgtgtgcgtttctaacaacaactaaaaaggatgagaagaacacccttgctattgcagctgctgttgctggcttagtgtgttcattgataggagaattaggttgcagacgtagcagagtaaaccttttgaggctctacacggctgcatcaaccattgttatggttctttctgtgttttgtgctgttaggagcagattaaccatggaggaacgcaatagctctggaacaaccgcgaagcttgagctcgcaggtttcatttgtgctcaattaggagcggtggtgcagatattagcgatcatcgttacagggtcccttgtcaataatatgtctccacctacgaaagcagcatagaggaacataaaatttgggcactgtcgtgtgtgcttctcttaaatgaagaacttaggaaatttgtaatttttgaaccatttttgttctctccaccaagtgattagtgttatacacacgttgtttacttcaagcttttaatcagtccttccaacacaaaaaaaaaataaaaaaaaaggggcggcggtcttaaagatccaagctacgtaccctgnnnnnnnnnnnnnnnnnnnnnnnnnnnnnnnnnnnnnnnngtaaatcg

SEQ ID NO: 84254 - DNA, 385 bp, Arabidopsis thaliana columbia
actttctctctctctctctctctgattgattcttgaaaagagtatcatagtctcaatagcttgggtttgattctagttccattccacaattgcatctaattctcctaccgtagccttgtcttctttatttgtcatcaacaactcctaaaattcatatgaaattagagaaatcgaaacgaagagataatatttttcaagaaagagctacatatacaccttttgaccttgtaaagttggaaccctagaggcctttcaagcaaatcatcagggtaacaatttcttgatctttctttttagcgaatttccagtttttggtcaatcatggcaaacccttggtggacgaaccagagtggtttagcgggcatggtggaccattcggtctcct

SEQ ID NO: 84255 - DNA, 711 bp, Arabidopsis thaliana columbia
atgatttgccggcactatacgactcacttagggaaagctggtacgcctgcaggtaccggtccggaattcccgggtcgacccacgcgtccgggtataatatgagagatagacaaatgtaaagaaaaacacagagagaaaattagtttaattaatctctcaaatatatacaaatattaaaacttcttcttcttcaattacaattctcattctttttttcttgttcttatattgtagttgcaagaaagttaaaagattttgacttttcttgtttcagatttcagcaaatgggatcgattttaagcttcgtctgggttaaaagcttggagcctatctgaagacagaacaaaggttcttgcttttgattcattgcccattttgagaagatgttcgaaggtcgtcctcgtgattcttgtctagtttcaacacttttcaccatgccaagccataaagaaacgaaatggagctttttggtttctgggaaacgatcttttctcaacaacgatgagtctgatcttcacttcaagaagatgtacaagcttactactgattcaagtgaaggagaagacaatggatcttcttcagattcaggaacacttatcccagggatgaacagagatgattcgttaagctgtttgattcgttgctctagagctgattactgctccattgcttctgtgaatcgtagcttacgttctttgattcgaagtggag

SEQ ID NO: 84256 - DNA, 707 bp, Arabidopsis thaliana columbia
  unsure (1)..(707): unsure at all n locations
tgatcttnnnnnnnnnnnnnnnnnnnnnnnnnnnnnnnnnnnnnnnnnnnnnnnnnnnnnnnnnnnngtcagcataaaaattccacgtcgcatttttctcttcttcctcttctgaaaaattagggtttgagttcttcttctaatcgatcagaaagatgggtggaggaaacgcacagaaatcagccatggctcgtgccaaaaacttggagaaggctaaggctgcaggaaaaggtagccaattggaagctaacaagaaagctatgtcgattcagtgcaaggtttgtatgcaaacattcatctgcacgacatcggaagtgaaatgcagggagcacgcggaggcgaagcatccgaaagccgatgttgtcgcttgtttccctcacctcaagaagtgatgaaagctattatctcaactataaaggattccaatgtataacgtatggatcctcatctttcctatgtttgtatcaaagtctcgacaaattttatggtttctatttctctctacttgtttcaacaataagtctcttgctatgattatataatgaagctctgtgtggaacctttttttttaatataaattggcttcttttcgctaaaannnnnnnnnnnnnnnnnnnnnnnnnnnnnnnnnnnnnnnnnnnnnnnnnnnnnnnnnnnnnnnnnnnnnnnnnnnnnnnnnnnnnnnnnnnnnnnnnnnnnnnnnnnnn

SEQ ID NO: 84257 - DNA, 468 bp, Arabidopsis thaliana columbia
gagacttacttgaagatagacgggagtaaagccgagaagtttgtgtcaaaagggatgtacaaggatccgagtggtctctctgttcttactggaaacaacaagaagaaactgatggaccatgcaagctttaaaggcttgaaggatccaaaacgtaactctcaagagaaaaccctgagaaccagcctgagccggttgatgccaacagtcagttttaatgacaagactctaaactcacccacatctcagaaacgaaaatccgctgtttatcggctttctttcaaaaggaggtcgtgtgatggtgagcgaagttactgagcaacgtaagttgttgtaccgtccaaaagcgggattcacaattccttcctcgggcagagaaaagcagtctagcggaagttggtctgagataccgccttcaacttttaaactccgtggagaaacctatttcaaagacataaagaaatccccagc

SEQ ID NO: 84258 - DNA, 996 bp, Arabidopsis thaliana columbia
  unsure (1)..(996): unsure at all n locations
nnnnncacgcgtacgcaaaggctggcgcgtgccttatctgcttctctctctccagtggtctcaaatctctctgtgtgatcccacttgtcatcctcctccacaacataaagcttgagaccataaccctttagcgttttcggctaaagctttcgctgactactacaacaatggcgtcctcatccctttcccctgctactcagcttggttctagcagaagtgctttgatggcgatgtcaagtgggttgtttgtgaagccaacgaagatgaatcatcaaatggttagaaaagagaagattggattgagaatttcttgtcaagcgtcgagtattccagcagacagagttccagatatggaaaagaggaagactttgaatcttcttcttcttggggctctttctctacctactggctacatgcttgtcccttacgctaccttctttgttcctcctggaaccggaggtggaggtggtggtactccagccaaggatgcccttggaaacgatgtagttgcagcggaatggcttaagactcatggtcccggtgaccgaaccttgacccaaggattaaagggagatccgacttacctagttgtagagaacgacaagactctagcgacatacggtatcaacgcagtgtgcactcatcttggatgtgttgtgccatggaacaaagctgagaacaagtttctatgtccttgccatggatcccaattcaaccgcccaaggaagagtcgttagaggtccagccccattgtcgctagcgttggctcacgcggatatagatgaagctgggaaggttctttttgttccatgggtggaaactgacttcaggactggtgatgctccatggtggtcttaagactcttcaacaagaaaaagagaaagatttggtctttttgtgtaagacttgtttgaatgttcttataatgtataagctacatttcatcgcaattactctgtgaattcttgcctcttatatgaaatattatgttcattc

SEQ ID NO: 84259 - DNA, 494 bp, Arabidopsis thaliana columbia
ctgcaggtcccggcccggatttccggggttgaccaagccgtccgaaagactgagaaaaagctccaaaaaatgagagagctcctgtgaagggccgaagagccgaagaagaaggagaacattaatggcggctactccgtggtccttggtcgcagtacttctcaccattcttaccagctctcaggggattctatcaactctttctcaaagtgatggaggttataagtatgattatgctactgttccctttcttgctgaagtttttaagctgatcatttctggtttatttctctggagagagatgcggacatcttcctcaacaacttcaaggattactacggattggaagagtgtgcgattatttgttattccgtctcttatttatctgatacataacaatgtgcagtttgctacattgacttatgtggatacgtccacttatcagataatgggtaatttgaagattgtgaccactggcatactgtttaggttatttt

SEQ ID NO: 84260 - DNA, 2005 bp, Arabidopsis thaliana columbia
  unsure (1)..(2005): unsure at all n locations
cggacgcgtgggttcggataatcctatccttctcttcctataaatacctctccactcttcctcttcctccaccactacaaccaccgcaacaaccaccaaaaaccctctcaaagaaatttcttttttttcttactttcttggtttgtcaaatatggtcagccatccaatggagaaagctgcaaatggtgcgtctgcgttggaaacgcagacgggtgagttagatcagccggaacggcttcgtaagatcatatcggtgtcttccattgccgccggtgtacagttcggttgggctttacagttatctctgttgactccttacgtgcagctactcggaatcccacataaatgggcttctctgatttggctctgtggtccaatctccggtatgcttgttcagcctatcgtcggttaccacagtgaccgttgcacctcaagattcggccgtcgtcgtcccttcatcgtcgctggagctggtttagtcaccgttgctgttttccttatcggttacgctgccgatataggtcacagcatgggcgatcagcttgacaaaccgccgaaaacgcgagccatagcgatattcgctctcgggttttggattcttgacgtggctaacaacaccttacaaggaccctgcagagctttcttggctgatttatcagcagggaacgctaagaaaacgcgaaccgcaaacgcgtttttctcgtttttcatggcggttggaaacgttttgggttacgctgcgggatcttacagaaatctctacaaagttgtgcctttcacgatgactgagtcatgcgatctctactgcgcaaacctcaaaacgtgttttttcctatccataacgcttctcctcatagtcactttcgtatctctctgttacgtgaaggagaagccatggacgccagagccaacagccgatggaaaagcctccaacgttccgtttttcggagaaatcttcggagctttcaaggaactaaaaagacccatgtggatgcttcttatagtcactgcactaaactggatcgcttggttccctttccttctcttcgacactgattggatgggccgtgaggtgtacggaggaaactcagacgcaaccgcaaccgcagcctctaagaagctttacaacgacggagtcagagctggtgctttggggcttatgcttaacgctattgttcttggtttcatgtctcttggtgttgaatggattggtcggaaattgggaggagctaaaaggctttggggtattgttaacttcatcctcgccatttgcttggccatgacggttgtggttacgaaacaagctgagaatcaccgacgagatcacggcggcgctaaaacaggtccacctggtaacgtcacagctggtgctttaactctcttcgccatcctcggtatcccccaagccattacgtttagcattccttttgcactagcttccatattttcaaccaattccggtgccggccaaggactttccctaggtgttctgaatctagccattgtcgtccctcagatggtaatatctgtgggaggtggaccattcgacgaactattcggtggtggaaacattccagcatttgtgttaggagcgattgcggcagcggtaagtggtgtattggcgttgacggtgttgccttcaccgcctccggatgctcctgccttcaaagctactatgggatttcattgaattttagcagtggttgtttggctctctttctctcataaaacagtagtgttgtgcaaatcctacataaagaaaaaagaaaaggaaattaaactcattgggttggtttgtattttacctaaacccacgaagttcctttttctttttgtaactcaatttaaatttggagtatattttactttttgttaaaaaaaaaacggacgcgtgggtcgacccgggaattccggaccggtacctgcaggcgtaccagctttccctatagnnnnnnnnnnnnnnnnnnnnnnnnnnnnnnnnnnnnnnnnnnnnnnnnnnnnnnnn

SEQ ID NO: 84261 - DNA, 791 bp, Arabidopsis thaliana columbia
  unsure (1)..(791): unsure at all n locations
aaccgggagattcccttttttggtgatgaataaaataggaatcgaacacgtggacggcgcagatgctaaagtgaccaaatccactggtgatccgggtaaagtttcgggtccggctcagttcacaacaagtggtgacgtggcggaggtgatagaggagcttcgaacggagaacaagcagttaaagagagccgttgaagatctccgggaagtaatatcaaacgtccgtccatactcgccggcgacaattgattacggatcacactcgaagtatcgcgaatccgagaggaacaacaacaacaacaacaacaacaacaacaacaacaacgggagatcgagagctgatcggtggagcagcgagagaacgacaacgtctgattacggtgggaagaaaagcaaggaagagggcaatgtagctgaggagctgaagaaagctttgaaaggagctgcttgaagcttctatggcggctattggtaatcgcaggctttactcgaattacaattacatttgtcgaccttaatcagctattgcttttgtatatatatgcgttgaattatctggattagatttgcacaacttgttttgaatcttttgatggaatcttcagagttttgtatgagattatgcttttcaattctctttattgaacttatatgcaggttgattgttgaattgatttgaatcagtattctattatagtacgaataaaaagaacaaagggaggccgctctagaggatccaagcttacgtacgcgtgcatgcgacgtcaaagtcttctaannnnnnnnnaatc

SEQ ID NO: 84262 - DNA, 673 bp, Arabidopsis thaliana columbia
  unsure (1)..(673): unsure at all n locations
gcgagagagaaggaagaagatccagacgaagtggtttgccttcagggaacgagagagagaaagagattttaacaaacgatgtcgctgaggccgagcacacgcgcggagctaaggaagaagatatacaagacaggcgtcgatgccgatgaggccaggcggaggagagaggacaatctcgtcgagattaggaaaaacaagcgtgaggatagtcttctcaagaagcgtcgtgaaggaatgatgcttcagcagcagctgcctctcggagctggccttgatggtccccagaccgctgccgccgttgagaaacgattagaaggtatcccaatgatggtacaaggtgtttattctgatgatcctcaagctcagctagaagcgactacccaatttagaaagttgttatctatagagcgtagtcctccaattgatgaagtgatcaaagctggggttatccctcgntttgtggagtttcttngaaggcatgaccatcctcaattgcagtttaaggctgcatnggctttgaccaatnntgcgtcagggacatcagatcatactcagggttgtaatcggaacaagggnacggttcctattcttcgttaaggtttnttacatnttcaaagtggntnncggtcnagagcaggnggaantngggctttgggaatgnnnattggggcct

SEQ ID NO: 84263 - DNA, 417 bp, Arabidopsis thaliana columbia
  unsure (1)..(417): unsure at all n locations
ttttttnanancccggggcccnttgacccnnattttttncggcccgttcaaaggaatttcccngnccggaaanctttccnccagngngtacnctgtccagaaagttactgcacatcatcaaccaatactaaggaaacaagaccagcggcaagttctttgcttgggatggccaggagataccttggtgatttcttatatggttttctcgatccgaatggtcagttctttcaaagtctattgaattcttgtcggggttttttcacgttcttggtttgagagcaattcctcgagtaatatcgaatagcttggagtgagtatccagaagctgagagctttctgagtatataataaccaatgtgatggtataatcttctatctacattttgtattactgcataattttacacgctattttcg

SEQ ID NO: 84264 - DNA, 845 bp, Arabidopsis thaliana columbia
atcaaaagccttaactttttctttagctctttccattacaagagacctctagcttcatactttttataaaaattctctctttttctcagtttaatctcaagaaatggtttcaagatcgtattcaaatctgttggagttagcttcaggagactcaccaacgtttggacgcatgaaccgacaaatcccacgaatcatggccgttgctggaatcatgtcaaacatcgataatgactctaaagacactgatctgtctcctaaagatcgtatcatcattgtagccaatgaattacctatacgagctcagagaagggttgatggtaatggtagtggtagtagtagtagtagtacttgttgtagcaaaggttggaacttttcttgggatgagaattcacttcttctccaattgaaagatgggttaggagatgaagctattgaagttatctatgttggttgtttgaaagaagagattcctcttaatgagcaagaagaagtgtatcagattcttcttgagagtttcaagtgtgtgcctacgtttttgcctttggatttgtacactagatactaccatggattctgtaagcaacagctttggcctttgtttcattacatgttgccactttctcctgatcttggaggtaggtttgataggactttgtggcaagcttatgtctctgtgaacaagatttttgctgatagaattatggaggtgattaatcctgaggatgattttgtgtggatacatgattatcatttgatgggtttgcctactttcttgaggaagaggtttaacagagtcaagcttggtttcttccttcatagtccatttccatcgtctgagatttaca

SEQ ID NO: 84265 - DNA, 889 bp, Arabidopsis thaliana columbia
  unsure (1)..(889): unsure at all n locations
cttcaaacaccatttttggaaacaccatttcatattccttaaacttttccattttagtatcatttcatattcattgatatggatgtctccaacacgatgctccttgtagctgttgttgcagcttactggctatggttccagcggatctcaaggtggctaaagggtccacgtgtttggccagttttgggcagtcttccgggtctgatcgagcagcgtgaccgtatgcacgactggatcactgagaacctccgtgcgtgtggcggcacttatcagacatgtatctgcgccgtacctttcttggcaaaaaagcaaggtctcgtgaccgtcacgtgcgatcccaagaacatcgaacacatgctcaagaccaggttcgacaactaccctaaaggtcctacgtggcaagccgtgttccatgacttcctcggccaaggtatcttcaactccgacggtgacacttggctcttccagcgtaaaaccgccgctcttgaattcaccaccaggacgttgaggcaagcgatgggtcggtgggtgaaccggggaatcaagctccggttttgtccaattctcgaaacggctcagaacaattacgagccggttgatctccaagacttaatactacggctcacattcgacaacatttgcggtttagcattcggtaaagacactcgaacctgcgcaccgggacttcccgagaacggtttcgnctcggctttcgaccgagncaccgaagcttttctccagcggtttattctaccagaggtttctatggaggctttaaggaaatggcttttgnctncggcttagaaggnaanttttagnccggagcctaggggaaattccattgggatttagatcntgcattnatncacgtngaaaganttntngnnna

SEQ ID NO: 84266 - DNA, 791 bp, Arabidopsis thaliana columbia
cccaagcgtccgcccacgcgtccgcggacgcgtgggcgagaagcaaaggatagtataaaaccaataagagagccaagcagggtggtacaagcaaaaccagccagaggtcaaaccgggaagaaaacagctccatcagttaaggtggttgagccaacaatgctggtcatgaaattcccacctggcacatctctcccttcagccgcattgctaaaggcgaggtttggtcgcttcgggctgttagatcaatccgccattagggttttctggaaatcatcgacctgccgtgttgtctttctgtacaaagccgatgcccagactgcttttcgatatgcaacaggaaacaacactctatttggaaacgtgaatgtaaagtactttctccgtgatgtggatgctcctaaagccgagcctcgtgagccagaaaacaccaaggaagatgatgaaccacagagccagtggttggaccaagcaccaccgcttcaccaaccaacattaccgccaccaaacgtcaacctcaaatcctgtttgaagaaaccagttgatgacccgagcagtagtagcaacaatggaaacggtaaccgcgcagccgtaagagtcaaattcatgttaggtggtgaagaaaactcgagtaaagcaaacaccgagccaccacaggtcacaatgaccttgaatagaaacagtggaccttcttcatcatcatcatctgttccaatggaatttgttagtaagaagtttcaaaacgttgttcatcatcaacaagtttcttcttctacattgccttcaattttttc

SEQ ID NO: 84267 - DNA, 406 bp, Arabidopsis thaliana columbia
acgtagtcattagctatattctagtttaatggttatcatcagaaaatctgaaatcaaatttttggattgtaatccatggctgctcttggtaaaggacataaaacagctttcatctcttgaatggcttcgtctcttttgcaatttttgagttagccaagtgctcaagggagatacataatacctgaagatgtccaaggcaagtgatgccgtcagagaaccattggtggacaagaatatggctggatcaaaaccagaccagccgtggatggtttatctcagcacattcgttgcggtctgtgggtcttttgcgttcggttcttgtgcgggatactcttcacctgctcaggctgcaattaggaatgacctttcattgacttagctgagttttcactctttgggtctttac

SEQ ID NO: 84268 - DNA, 891 bp, Arabidopsis thaliana columbia
  unsure (1)..(891): unsure at all n locations
nnnnnnnnnnnnnnnnnnnnnnnnnnnnnnnnnnnnnnnnnnnnnnnnnnnnnnnnnnnnnnnnnnnccacgcgtccgcggacgcgtgggctcttacccataaaaagttttcccctttaattcttgtcctccgcttttccattttactcttcttgtatgtttctgtcttcttactcaacttttgcttcaggcttcgtctcttttgcaatttttgagttagccaagtgctcaagggagatacataatacctgaagatgtccaaggcaagtgatgccgtcagagaaccattggtggacaagaatatggctggatcaaaaccagaccagccgtggatggtttatctcagcacattcgttgcggtctgtggttcttttgcgttcggttcttgtgcgggatactcttcacctgctcaggctgcaattaggaatgacctttcattgactatagctgagttttcactctttggttctttactaacttttggcgcaatgatcggtgctataacaagcgggcctatagctgatttagttggaagaaagggggcgatgagagtttcctctgcattttgtgtagtcgggtggctagcaatcatctttgccaagggagtagtggctctggaccttggaagactggcaacgggatatggaatgggagcattttcctatgtggtgccaatctttatagcagaaattgcacctaaaactttcagaggggctctaaccacactgaaccagattctgatctgcactggagtgtcggtttccttcatcataggcacactagtgacgtggagagtcttggcattaataggaatcatcccatgcgctgcctccttccttggcctcttttttatccctgagtctccaagatggctggcaaaagtggggcgtg

SEQ ID NO: 84269 - DNA, 407 bp, Arabidopsis thaliana columbia
cggacgcgtgggctttcacaacaaaaaaactcttttctttttgtctgctcgtttttcttttcataatgggagccttggaagcagaaagagccgccaacaatgctacggcgttagagacacagtcgtcaccggaagatctcggtcaaccatctcctctgcgtaagatcatctccgtcgcttcaatcgccgccggtgtacagttcgggtgggccttacagctttctcttctgactccttacatacaactcctcgggatccctcacaaatggtcgtcttacatgtggctttgtggtcctatctccggcatgattgttcaaccgatcgtcggttaccacagtgaccgatgcgagtccagattcggtcgccgtcgtcctttcattgccgccggagtcgcactcgtagccgtc

SEQ ID NO: 84270 - DNA, 2046 bp, Arabidopsis thaliana columbia
  unsure (1)..(2046): unsure at all n locations
nnnnnnnnnnnnnnnnnnnnnnnnnnnnnnnnnnnnnnnnnnnnnnnnnnnnnnnnnnnnnnnnnnnnnnnnnnccacgcgtccgcccacgcaaaaaaaaaaaacagaagacagaaaaaaacaaaaaaaaaaagaaaaagaaaaataaacaaattttcttttcttttttttcctctaaagtttctattttgtctattcgtgtttttttttttacttcctgataatgggagcctatgaaacagaaaaaccaactaaagatgcggcggctctagagacacagtcgccggaagatttcgatcaaccatctccgcttcgtaaaatcatctccgtcgcttccatcgccgccggtgtacagttcgggtgggccttacagctctctcttcttactccgtacgttcaactcctcggaatccctcacaaatggtcatctctcatttggctctgtggtccagtctccggcatgattgttcaaccaatcgtcggtttccacagtgaccgatgtaggtccaaatttggtcgccgtcgtcctttcatcgccaccggagccgcactcgtcgccgtcgctgttttcctcatcggttacgccgcggatttcggttataaaatgggagataaactcgaggagaaggttaaagttcgagctatagggatctttgctctcgggttctggatcctcgacgtagccaacaacaccttacaaggaccttgccgtgctttcttagccgacttagccgccggtgacgctaagagaacgcgagtcgcaaacgcgtttttctctttttttatggcggttggaaacgttttgggttatgcggctggttcgtacactaacctccacaagatgtttccgttcacaatgacaaaagcttgcgatatctattgcgccaatctcaagacttgtttcttcttatccatcactctcctcctcatcgtcaccgtcacgtctctttggtacgttaatgacaaacaatggtctccgccgccgcgaaatgccgacgacgacgagaagacctcaagcgttcctttgttcggtgaaatctttggagcattcaaagtcatgaaacgtcccatgtggatgcttctaatcgtcacggccttaaactggatcgcttggttcccatttcttttgttcgatactgattggatgggtcgtgaagtgttcggtggagattcagatggaaatgaacgatcgaagaaactatacagtcttggagtccaatctggtgcaatgggattgatgtttaactctatagttcttggtttcatgtcacttggtgttgaatggattggtcggaaattaggaggagctaaacggctttggggtattgtcaatttcatcctagccgctggtttggccatgacggttctcgttacgaaattcgccgaggatcaccggaaaaccgccggtgatttagccggaccgagcgctagtgttaaagctggagctttaagtctctttgctgttcttggtatcccattagctattactttcagtactccttttgctctagcatccatattctcaagctgctccggtgcaggccaaggactttcattaggagttttaaatttggcgattgtgataccacaaatgatagtctcactaggaggtggacctttcgacgccttgttcggcggtggaaacttaccggcgtttatcgttgcagcaattgcagcggcgattagtggagtattagcgttaaccgttttaccttcaccaccaccggacgcacccaaggcaacgaccatgggaggattccactagtttactatttttttttttttaatgaaactcatcaaatacagtattactgtggcgaaactggaaaaacccaaataaaagaaaagaatggataaaatgataaaatctaataaaccttgggtcgtctgtatttcacccttttttagttttttttcttctttttttataacttttgtcacttattttaatttgaaatagaatgttttttttttttgcccttaaataagatttgtgtgttgagtacnnnnnnnnnnnnnnnnnnnnnnnnnnnnnnnnnnnnnnnn

SEQ ID NO: 84271 - DNA, 392 bp, Arabidopsis thaliana columbia
acaaagtctcatttctcgttaatttccattttcgttatctctctctctcgccgatcaaaccctaggtgtatcaattcgttcagattcccggcggttggtctcactgtcatgtaggtttgattcatcttctcttctggatcttgagtgacgaagagagaagagatctgagtttttctgagagagagatttttctccctcgttgacccgatcagttttttttcgtcgctggggattttcaaattttttttgagggatcggttttgatttgttacgtagatggcggattcttcacccgattcgtgtttcaaaggaggcaaatttagtgctccagggtttcgatttcatccaactgatgaagagcttgtgatgtattatttgaagaggaagatttg

SEQ ID NO: 84272 - DNA, 451 bp, Arabidopsis thaliana columbia
ttctaacaaggatacactaggggggctttttagagcgagtcgcggtttaatttgctatactcaatcatacacatgacaagaagtcatattcgactccaaaacactaaccaaccttcttcttgcttctcagagctttcatggggtagccgcagtccatatgagtctctggctttgtgtcttctaacaaggatacactacttaggctttcaagatcgggttgcgctttaagttgttatactcaatcatacacatgacatcatgtcatattcgactccaaaacactaaccaaccttcttcttgcttctcaaagctttcatggtgtagccaaagtccatatgagtctttggctttgtgtcttctaacaaggataaactacttaggcttacaagatcgggttgcggtttaagttcttacactcaatcatacacatgacatcaagtcatattcgact

SEQ ID NO: 84273 - DNA, 2515 bp, Arabidopsis thaliana columbia
ataaaatcaacccctatttcaacgcctctttttctccctgatttatatatcggagagatttcaaggcaaagctttctcatttcctcgtaattgccggccaattctactaaagagtttgttgagcaatgaagggagcgactctcgttgctctcgccgccacaatcggcaatttcttacaaggatgggacaatgccaccattgctggagctatggtttatatcaacaaagacttgaatctaccaacctctgttcaaggtcttgtcgttgctatgtcattgatcggtgcaacggtcatcacgacttgctcaggaccgatatctgattggctcggcagacgccccatgctcattttatcatcagttatgtatttcgtctgcggtttgataatgttgtggtctcccaatgtctatgttctgtgctttgctaggcttcttaatgggtttggtgccgggctcgcggttacacttgtccctgtttacatttctgaaaccgctcctccggagatcagaggacagttaaatactctccctcagtttcttggctctggtggaatgtttttgtcatactgtatggttttcactatgtccctgagtgactcccctagctggagagccatgctcggtgtcctctcgatcccttctcttctttatttgtttctcacggtgttttatttgcccgagtctcctcgttggctggttagtaaaggaagaatggacgaggctaagcgagttcttcaacagttatgtggcagagaagatgttaccgatgagatggctttactagttgaaggactagatataggaggagaaaaaacaatggaagatctcttagtaactttggaggatcatgaaggtgatgatacacttgaaaccgttgatgaggatggacaaatacggctttatggaacccacgagaatcaatcgtaccttgctagacctgtcccagaacaaaatagctcacttgggctacgctctcgccacggaagcttagcaaaccaaagcatgatccttaaagatccgctcgtcaatctttttggcagtctccacgagaagatgccagaagcaggcggaaacactcggagtgggattttccctcatttcggaagcatgttcagtactactgccgatgcgcctcacggtaaaccggctcattgggaaaaggacatagagagccattacaacaaagacaatgatgactatgcgactgatgatggtgcgggtgatgatgatgactcggacaacgatttgcgtagccccttaatgtcgcgccagaccacaagcatggacaaggatatgatcccacatcctacaagtggaagcactttaagcatgagacgacacagtacgcttatgcaaggcaacggcgaaagtagcatgggaattggtggtggttggcatatgggatatagatacgaaaacgatgaatacaagaggtattatcttaaagaagatggagctgaatctcgccgtggctcgatcatctctattcccggaggtccggatggtggaggcagctacattcacgcttctgcccttgtaagcagatctgttcttggtcctaaatcagttcatggatccgccatggttcccccggagaaaattgctgcctctggaccactctggtctgctcttcttgaacctggtgttaagcgtgccttggttgttggtgtcggcattcaaatactgcagcagttttcaggtatcaatggagttctctactacactcctcagattctcgaacgggctggcgtagatattcttctttcgagcctcggactaagttccatctctgcgtcattcctcatcagcggtttaacaacattactcatgctcccagccattgtcgttgccatgagactcatggatgtatccggaagaaggtcattacttctctggacaatcccagttctcattgtctcacttgtcgtccttgtcatcagcgagctcatccacatcagcaaagtcgtgaacgcagcactctccacaggttgtgtcgtgctctacttctgcttcttcgtgatgggttacggtccattccaaacatcctctgttctgaaatcttcccaacaagcagaccgtggtctctgcatcgccatatgtgctatggtcttttggattggagacattattgtcacgtactcacttcccgttctcctcagctcgatcgaactagttggtgttttcagcatttacgctgcggtttgcgttatctcatggatcttcgtttacatgaaagtcccggagactaaaggcatgcctttggaagttatcacagactactttgcctttggagctcaagctcaagcttctgctccttctaaggatatataacttgtaactttcttcttcgtcaattgctctgtgtacctaaagattctcttcatcccctttttgttttgtttttcagatacccttcatatcgtttttgtttcttttgttttttttctttttcctttgtttcgttgtcaaaatcaatctaataagtactcaattttctctcaaaaaaaaaaaaaaag

SEQ ID NO: 84274 - DNA, 614 bp, Arabidopsis thaliana columbia
  unsure (1)..(614): unsure at all n locations
nnnnnnnnnnnnnnnnnnnnnnnnnnnnnnnnnnnnnnnnnnnnnnnnnnnnnnnnnnnnnnnnnnnnnnnnnnnnccacgcgtccgccttttctacgtttcccgaattctgattagttgattcttcttcctcaatccgttcttcccaaacttgttgccgatttttggatccggtcatcaactttgttgtttatttgtcatcaatgcaaaaattgagagcgtctgtgttttcacttgcatgttatcaattcctaatgttgtttgccgtttcattaaccggattcgagactcttcccgctggatttctttttttcacgtcttcttttctattttttatggatttggtattttgacatgttaagcaaccttcgttaatcagtttaaaatcggtgctttccgaaatttttagaagaaacatggaagcttaaaattttgaaattgctatttggaaaagctatcatttcataggcttagtctttgtaattcttctttacttgttgttcattggcatgaatatatgaaggattttatatttgattgggtgtttgtttatgttgttagaaattgatcaaaatgggagaagctggtcaatccagagacggagaatctgtcac

SEQ ID NO: 84275 - DNA, 490 bp, Arabidopsis thaliana columbia
  unsure (1)..(490): unsure at all n locations
gctctctcttccttcaaccctaaatctcttcctttcggcgtctccagacctgcctccgtttccctcttatctccttccctctcctttaaactcaattccgactccgtttccttctccatcgccgccaaatggaactctcccgcttctcgcttcgcccgtaacgttgcgattacctcagagttcgaggtggaagaagatggtttcgctgacgtcgctccgccaaaagagcaatctttctctgctgaccttaaactcttcgttggtaaccttcctttcaacgttgacagtgctcagctcgctcagctctttgagagtgccggaaatgttgagatggttgaggtaatctaatgacaaaattaacagggagaagcagaggttttggattccgtgcactatggcttcaagtttccgaagttgaggcagattgctcagcagtttaatggcgaaaagatggggggggaaaccctttgagaaaaanggggggccccca

SEQ ID NO: 84276 - DNA, 587 bp, Arabidopsis thaliana columbia
  unsure (1)..(587): unsure at all n locations
nnnnnnnnnnnnnnnnnnnnnnnnnnnnnnnnnnnnnnnnnnnnnnnnnnnnnnnnnnnnnnnnnnnnccccgcttcttcacccaaaaacccctaaaagccttatcccttcttcttcccatggctgcttcagcttcgtctctcgctctctcttccttcaaccctaaatctcttcctttcggcgtctccagacctgcctccgtttccctcttatctccttccctctcctttaaactcaattccgactccgtttccttctccatcgccgccaaatggaactctcccgcttctcgcttcgcccgtaacgttgcgattacctcagagttcgaggtggaagaagatggtttcgctgacgtcgctccgccaaaagagcaatctttctctgctgaccttaaactcttcgttggtaaccttcctttcaacgttgacagtgctcagctcgctcagctctttgagagtgccggaaatgttgagatggttgaggtaatctatgacaaaattacaggaagaagcagaggttttggattcggggcaatgctcaagttcnaagtnngggagtgncagngtcaatgggaanngtggngggnc

SEQ ID NO: 84277 - DNA, 801 bp, Arabidopsis thaliana columbia
  unsure (1)..(801): unsure at all n locations
agatttcttggtgatgctttgcgcgttctttggtgtcattttcctatccgttcaaaacggtctagccattgcggtggggctatcgttgttcaagatattgatgcaagtaacaaggccgaaaatggttataatgggtaatattcctggaacggatatataccgagatcttcatcattacaaagaagcacaaaggatcccgggatttcttgttttaagcatcgaatctcctgtcaatttcgccaattctaactccctcactgaaagaacatctcgttggattgaagaatgcgaagaagaggaagctcaagagaagcattctagcctacagttcttgattcttgaaatgtcagcccgtgagcggtgtagacacaaaccggagtgtccttttttaaggaacttaagaaaacaaccgccaagaaggacatcgagcttgtgtttgtgaaccctcataagcgaagtggtggagaagcttcaaagagctgacgaacaaaaagagttcatgaggcccgagtttctcttcttaaccgtcgctgaggccgttgcgtcgctctctcttaaagggccatctctcagtaacgtttaactataattttttgtatcggtccaatattgatatttaaccgatggttaaatttttctttttgtctctttttcatcttttaatttcagtacagatgtaatattacgttcttctctctctttcttcagtgatgattttggtcaagatatgtttgtatgaaaaaaaaccccaaaacacccagggcgaccgctctagaggatccnagcttacgtacgcgtgca

SEQ ID NO: 84278 - DNA, 689 bp, Arabidopsis thaliana columbia
gttcttgcaaagaaggctggtactttcgctgccttggcctcgacccgtgaacgattcgcccctaaaattcacaacccggaaccctaatttcctaaaaagtggttcttttttttaattgattctgttacttgtgagatttgctctgttttttgttctctcgatttcgaagatgttgctctacaacaagcagaagaagaaccaaaacgctaaagggaataggattctcattagcgttacggttttgggtagtgccggtccgatccggtttgttgcttatgacgatgatcttgttgcctctgttatcgatactgctcttaaaggttacgctcgtgaaggtcgtcttcctcttcttggatctgatttcaatgaattttcttctctattgtcctatgggttggacctgaagctttaagcacatgggatgcaattggatctcttggagcgaggacctttatgctctgtaaggaaaccagaggggaagaaggttgagggaagtaatggaaggcctgactctaccattaatggtgcaagaaaaggtggaagcttgaaggcttggatcaacaaatccttcaatctcaaagtctcaagccattaagattaattttcttctcttttttatgaaataataagaccaatctttgttttatcatcattatgttctttgtttttggttttgattccaaagtttg

SEQ ID NO: 84279 - DNA, 638 bp, Arabidopsis thaliana columbia
  unsure (1)..(638): unsure at all n locations
atacgactcccttagggaaagctgctacgcctgcaggtaccggtccggaattcccgggtcgacccacgcgtgcgccttctcccataagaaaaaaaaaataatcaaatcctcctcctctgcttcaccaccaaaaagcatattcttctctcgtcttctccggttaatcaaaatctctccgtgtgaatcgtttgtgaatggtggaaactaatccgatcggtggtaagtttacgctctccctttccatcaaaagggcgagcttttctcttcctctctcgacatcctctgttttcgctttcggatcttgcaaagaaggctggtactttcgctgccttggcctcgacccgtgaacgattcgcccctaaaattcacaacccggaaccctaatttcctaaaaagtggttctttttttattgattctgttacttgtgagatttgctctgttttttgttctctcgatttcgaagatgttgctctacaacaagcagaagaagaaccaaaacgctaaagggaataggattctcattagggttacggttttgggaagtccggccctcccggtttttgcttataagggtccccttgtgccctgtaaggactgccttaaagggacggngaaaggggctccctntgnctntnnc

SEQ ID NO: 84280 - DNA, 760 bp, Arabidopsis thaliana columbia
  unsure (1)..(760): unsure at all n locations
nnnnnnnnnnnnnnnnnnnnnnnnnnnnnnnnnnnnnnnnnnnnnnnnnnnnnnnnnnnnnnnnnnnnnncttttttttttttttttttacacaaaacgattttcacataatcaatcgagttgctttgttacaaatattagcacagagccaaacattgttaggaccattggtcctatacactttaatgatcaacacaaattgttttacttttacatcatacactaagctacaaaagaagaggctgtaaagcaaacgacgtctgtttccgttgttgttggtctgttgatttcattgttgtagtagcagctgtggcggttgttatgtggtcatggaggattaagagtttcagtgtggctgattcacgcagccaagttgctaccaccggaaccgcttgatgtgaaccgtcccatgttgcattttgacaggtggaatggtgcatccattcccctcaaaagagctccaaccgctcggcttagtgctccgtctccaaccactttgctgggtttccccccagccaagttcaatatagttaagactataagggggctcctgacccttcaatagaccaggggaccctttattttctaagaaagcccccaccggggaagcaattgggaacggggcctttttttcagggaaggacaattgacgggggggcgcggttcccccccttcgctggaaattcaagcccccccccccgggagtctttcccccaaaacctctgtcccataaagaggacttttccccttcctaaggggg

SEQ ID NO: 84281 - DNA, 447 bp, Arabidopsis thaliana columbia
atcacatcgagactctttgatcggagtttcccaaaatccccgatggcgaaggaaactccggcgtcgtcgtcgatgccttctggtctcaaagcctacacggttcctatcttcctcttcgtcctcgctatgttcttccagcttttccttcttcctcgttcctttcctccttctcattacgacgttttgggtgtaaagatgtacagctcagtggatgacgtgaaagatgcgtatcagactgttgcttctaagtgggattcgggttcaggagtttctcttccagctgattttgttaagatacaatacgcctatgagctgttaacaaatctagtatggaaaagggactatgacttatacgccattgatgaatcagtacatattatagaggaacttgaaaaacaatatgctgtggaagattttgcaaaaataaaacttcccctactggaagtt

SEQ ID NO: 84282 - DNA, 459 bp, Arabidopsis thaliana columbia
  unsure (1)..(459): unsure at all n locations
ttagcatgaatgtccaaggtgctaaaaagcatggcgcttccagcaggggctgcagatgcagaagccgccgcctctccctcttgctgaatgggtcgccgtagctcaggaggaagatctgcccctcgccctcgtcctgctgctgcacgcagcccagctcctcaacctgtacaccgtgcacctcctccagctccagctcaggccagcggtggtggtggtggcatgttctcaggcattggttcaaccattgctcagcgtatggcttttggtactggaagtgcagttgcacacagggctgttgattctgtgatgggtccacgaaccattcancatgaagcttgttgaagctgctttcttgcatctgcaacccctggctggaaaacgcccatgctttttaaccacctgtnaanatccatgcctaangntttcccaaaaattggcatcccggcagcttattgggaa

SEQ ID NO: 84283 - DNA, 558 bp, Arabidopsis thaliana columbia
atgatactccagcgtctctacgactcactattgggaaagctggcacgcctgcaggtaccggtccggaattcccgggtcgacccatgcgctccatttgcttaatctcattttcgtttcaccgccgtctctctctatatcaaaatgggtcgccgtagctcaggaggaagatctgcccctcgccctcgtcctgctgctgcacgcagcccagctcctcaacctgtacaccgtgcacctcctccagctccagctcaggccagcggtggtggtggtggcatgttctcaggcattggttcaaccattgctcagggtatggcttttggtactggaagtgcagttgcacacagggctgttgattctgtgatgggtccacgaaccattcagcatgaggctgttgaggctgcttctgcatctgcagcccctgctggaagcgccatgctttctagcacctgtgacattcatgctaaggctttccaagattgcatcggcagctatggaagcgagattagcaaatgtcagttctacatgggcatgtggagcggggtgcggggagaactgtgg

SEQ ID NO: 84284 - DNA, 681 bp, Arabidopsis thaliana columbia
  unsure (1)..(681): unsure at all n locations
aaaanaanggccccancccnggggaaatcccccccccccngnccnnnnttnaccaaccccagcccnaaccntncccccgggccccctccagnnccagtaagcccacccgtggtgttgtncaatttccccagccatggttcaacccattgccccgggaatggcttttggtactggaagtccagttccacacagggctgttgattctgtgatgggtccacgaaccattcagcatgaggctgttgaggctgcttctgcatctgcagcccctgctggaagcgccatgctttctagcacctgtgacattcatgctaaggctttccaagattgcatcggcagctatggaagcgagattagcaaatgtcagttctacatggacatgttgtccgagtgcaggaagaactctggttccgtgattggtgcctagagtttccatttctcctatttgttttatcttaaagaattatccagctgtgatgatgctgagaatttggatatgatgatatgatcaaataacagtattatgtttccagaacctgaaactgcatggttgaagtcttattatgggtaatcgtttttaagacttgggttctatcccttttttaaacaaataatgcaagtttttttgtaaaaaacaaaaacaaaagggcgaccgctctagaggatccaagcttacgtacgcgt

SEQ ID NO: 84285 - DNA, 340 bp, Arabidopsis thaliana columbia
gtttcaacggagactcactagtcgatctcctatcctttcttctacccgcccgaaatccgtggaaacttctttgctttaccattgatttgcctcgtctcagctcaattctcttccgttgctgcttcgtttagtactctggtggtcggagagatgaatcacggccaacaatctggtgaggcaaagcatgaagatgatgctgctcttacagagttccttgcttctctgatggattatactcctactattcctgatgatttagctggagcactacttggctaagagtggatttcagtgccccgacgtacgattggtaggtatttccgacaagttatatctgata

SEQ ID NO: 84286 - DNA, 930 bp, Arabidopsis thaliana columbia
  unsure (1)..(930): unsure at all n locations
atgatactgccnnnnnnnnnnnnnnnnnnnnnnnnnnnnnnnnnnnnnnnnnnnnnnnnnnnnnnnnnnnnnnnnnnnnnnnccacgcgtccggtcccacgcgtccggtttcaacggagactcactagtcgatctccgatcctttcttctacccgcccgaaatccgtcgaaacttctcttctttaccattgatttgcctcgtctcagctcaattctcttccgttgctgcttcgtttagttgttgcttcgcttcagtactctggtggtgggagagatgaatcacggccaacaatctggtgaggcaaagcatgaagatgatgctgctcttacagagttccttgcttctctgatggattatactcctactattcctgatgatttagtggagcactacttggctaagagtggatttcagtgccccgacgtacgattgtaggataaggctagttgctgtggctacacaaaagtttgttgcagatgttgccagtgacgcccttcagcattgcaaggctagaccagcaccagttgtgaaagacaaaaaacagcaaaaggataagcgtttggtattgacaatggaagatctttcaaaagctttgcgtgagtatggtgtgaacgtgaagcatccagaatattttgctgatagcccttcgactggaatggaccctgcaacaagggacgaatagaaaccaggaattcctcaaaatctttgcctagtaaggacggtcatgtgactcagatccctgattctctgttgtgtttcagttaaaaacaaaactcacttgtcttgctagtcctcaattactacattacatgtatattcgtttgttgtttgttctctggtgatttttggggttctacatcacttatccaccattcttgcaagtctccaagtcgtgaaaataaaaaaaaaannnnnnnnnnnnnnnnnnn

SEQ ID NO: 84287 - DNA, 757 bp, Arabidopsis thaliana columbia
  unsure (1)..(757): unsure at all n locations
cataccactcactttanggaaagctgctacccctgcaggtaccggtccggaattcccgggtcaacccacgcgtccgcggacgcgtgggcttcaatgtgaaagagtattgcaactgatttcccgtttcatgcaggcaagaaaacagaaaggcagtgatcatggcatcaaagcgcatggagatggttggttgctaactgttgctctaattgagggggtcgatctagcagctgtggatccaagcgggcattgtgatccctatattgtatttacttccaatgggaagacaagaaccagctccatcaagttccagaaatctaatcctcagtggaacgaaatatttgaattcgatgcaatggctgatcctccttctgtactgaatgttgaagtttttgatttcgatggaccttttgacgaggctgtttcattggggcatgctgaagtcaactttgtgagatctaatatatctgatttagcggatgtttgggttccacttcaagggaaactagctcaggcttgtcaatccaaacttcacttgaggattttcttggatcatacaggaggtggagatgttgtcagagactatttaaataagatggagaaagaggtgggcaagaagattaatgtgcggtctcctcaaacaaattcagcttttcagaagctctttgngtctcccacaacgaagaatttctaatcaatgacttttacatgtcacttaaagcggnnaatgccttttcagggtcgtcttttcctgtctgca

SEQ ID NO: 84288 - DNA, 706 bp, Arabidopsis thaliana columbia
  unsure (1)..(706): unsure at all n locations
gatttccgggtcgacccacgcgtccgtgagtttttcggcgatgggagacgagcagctggcgattgtgatggccgatcgtgaaagagatcgagaactttgattcgcttcgctgattccggcaacaaagacgatgtttgttcattaagggtttggcatcgaagaagttcatgaaaggctgattactggcagctctagcgcgatttttaaatcagatcatcccgccatgacctcacaagcttgtctcttcagaatcagctcaaagcagacaggaaagaggccgttaaagatttggtgcaagctgcgactctgtgatcacaactccacaccaagtatcctcttacatcgcactcgtcgctcctgcactcgtagtttctttgaatagccaatgaagagtaaagttcaattatgtgtgtcgtgtttagtaatttgacttgaaaaaagagtttgctagggtctcttgtgaacaagttgttatgtctgcaattcgtgagttttggttaattttggatttgtacttcttgcaatggctgccctcaaaccattgattaatgtattatataggtgggtgtggttaatgatcctctttagtttattcgattaaaanaaaaacaaacccaataattgaattcaatcctacacatcaggcgattttccgctcagctataattactcaaaaaacccaaatgggggggggggggcgttttta

SEQ ID NO: 84289 - DNA, 473 bp, Arabidopsis thaliana columbia
aaacagattcattaaccctttcttttgcttaggcatctcattaggtagagtcttagagtcaaaggatctctctttgagtttctggtcttttatcaggttttctaataagcaaactttgtttttcgttgcagtgatcttgataaccaaggtctgaaaggtttcctaccaaacgatatatcaaagctaaaacatcttcagagcataaacttgagtgaaaacaacattcgtggaggaatacctgcatcgcttggaagcgttacgagcttggaagtattggacctctcctacaattccttcaatggatctatccctgaaaccttaggagagttaacatccctgcggattctgaatctcaacggaaactctttgtctggaaaagtaccagcggctgtaggtggaaggctgttgcacagagcaagcttcaacttcacagataatgcaggtctttgcggaatcccggggctaccagcttg

SEQ ID NO: 84290 - DNA, 531 bp, Arabidopsis thaliana columbia
gcctgcaggtaccggtccggaattcccgggtttacccacgcgtccgaccacgcgtccgatcagttattgggacatgaagttgaggcccagatggttcgtaacacactacctcgacgttttggggtacctggtcttccagaactgaatgcatctcaggttaatgcggtgaaaagtgtccttcagaagcccatcagcttgatccaaggtccacctggcacaggcaaaactgtgacttctgcagcaattgtgtatcacatggcaaaacagggccagggacaggttctcgtttgtgccccaagtaatgttgctgtggaccaactagctgaaaaaattagtgctactgggttaaaggttgttcgcctttgcgcaaaatcaagggaagctgtaagttctcctgtagagtatttgacccttcactaccaggtaagacatcttgacacatctgaaaagagcgaactgcataagttgcagcagttgaaagatgaacaaggtgagctgtcaagcagtgatgaaaagaaatacaaaaatttg

SEQ ID NO: 84291 - DNA, 490 bp, Arabidopsis thaliana columbia
  unsure (1)..(490): unsure at all n locations
agttaacttgcagatttcttagtatttctaatctttttcttatattaaccttttgtctccttctctctctctctctctctgaactatacaaaaacctacttttaggttctcgtccaagaagtcaagaacccagaagaagacatgacaagtgaagttcttcaaacaatctcaagtggatcaggttttgctcagccacagagctcatcaaccctggttcatgatgaatctctcatcaatcctcctcttgttaagaaaaagagaaatctccctggaaatcctgatccggaagctgaagtgatagctttatcccccacgaccttgatggctacgaaccggttcctatgtnaggtatgtggcaaaggtttccaaagagnccnaaacttacagcttcatcnggcgggggacataaatcttcccatgggaaggtttgaagncaggaggnccaaagcaaaaggaaggtgagnnaaanggtgtnttacgttttgncccc

SEQ ID NO: 84292 - DNA, 571 bp, Arabidopsis thaliana columbia
  unsure (1)..(571): unsure at all n locations
tctattctttctttttttctttcgtactgagacaaggaaaagctcataaattcgatacatccaacattcaaagcacatgacacgaactttgaggcgtaagctggcacaagttaacatcaaacctagacatatagattttatttcaacaaactgattatttatacaatacttttatttcattctataaggagggataccacatatttcaggttcaaggctcatgatcgacttgctacctctaatccgtttccatcaggatcaaagaagaaaacttgcttgacttttccatcaggaagagacttctgaaaagtttctatccctttctccttgagagaatggacggaagagtccgaatttggggcagaggaacagatatggtgacccattggggagatggctaaggtccttaaccgctgggggagcancggtaagggccttctgggaanattgttgangggtcccccggnaaaatgnattgnaaagccccgggaagttnnccncccccgtngggccccaanangggtttgggncccggnnccaaancccttntaaaagggggggggggganccc

SEQ ID NO: 84293 - DNA, 621 bp, Arabidopsis thaliana columbia
  unsure (1)..(621): unsure at all n locations
cttcttccggcgttttctctccgccgtttcgccaccgtacgtgacaatgtctgtttctctctccgccgcctctcacttactctgttcctccaccagagtctctctttcccccgccgtcacctcttcgtcctcgtcccctgtcgttgctctttcttcctctacatcgccacattctcttggaagcgtcgcatcttcttctctgtttcctcactcctccttcgtgcttcagaaaaaacatccgatcaatgggacgagcacgaggatgatttcaccaaaatgtgccgcttctgatgcagctcaattgataagcgctaaagaagatatcaaagttcttctccggactaagttttgccatcccatcttgggttagattgggggtggcacgattgctggnacttactaacaagaatattgaaggagtggccactgagaaggtgggagccaatgggaagccttagggttgaagggtgaggttaagaattgcggaaaaggcggggctggtaaaggtttaaaagctctttaagcccctcaaagcaaaggttcccaaaaatccttttgcggggttatccaagcagtaaggcanagaaaanaggggtgggggccgnaanccgggaanngggg

SEQ ID NO: 84294 - DNA, 1493 bp, Arabidopsis thaliana columbia
ggcaacgcattattgacacgtgtcttttcatttctcttcttccggcgtttttctctccgccgtttcgccaccgtacgtgacaatgtctgtttctctctccgccgcctctcacttactctgttcctccaccagagtctctctttcccccgccgtcacctcttcgtcctcgtcccctgtcgttgctctttcttcctctacatcgccacattctcttggaagcgtcgcatcttcttctctgtttcctcactcctccttcgtgcttcagaaaaaacatccgatcaatgggacgagcacgaggatgatttcaccaaaatgtgccgcttctgatgcagctcaattgataagcgctaaagaagatatcaaagttcttctccggactaagttttgccatcccatcttggttagattggggtggcacgatgctggtacttataacaagaatattgaggagtggccactgagaggtggagctaatggaagtcttaggtttgaggctgagcttaagcatgctgcaaatgctggtctgcttaatgctttaaagctcattcagcctctcaaagacaagtatcctaacatctcttatgcggacttattccagttagctagtgccacagcaatagaggaggctggtggtcctgatatcccgatgaaatatgggagagttgatgttgtagcacctgaacagtgtccagaagaaggaagactccctgatgctggacctccttcaccagctgatcatttgagagatgttttctacagaatgggacttgatgacaaggaaatagttgccttgtctggtgcacataccttagggagagccagaccagaccgtagtggttggggaaaacctgagacaaagtacacgaaaactggacctggagaagcaggaggacagtcatggacagtgaaatggctcaagttcgacaactcttatttcaaggatatcaaagaaaagagggacgacgatcttctggtgttacccactgatgcggcgctatttgaagatccttcattcaagaactatgcagagaagtatgctgaagatgtggctgcatttttcaaggactacgctgaagcccatgccaagcttagcaatctcggtgcaaaatttgatcctcccgagggcatagtcattgaaaacgttccagagaagttcgtagctgcaaagtattctacgggaaagaaggagctttcggattcgatgaaaaagaagataagagcagagtatgaagcaattggaggaagcccagataagccattacccacaaattacttcctcaacatcataattgccattggcgttttggtcctcttgtccactctctttggtggtaataacaactccgatttctctggtttctaattgacaaattatatattttgatttctcttacctacatacataattacgtggtgatcatatattccttgcaaacaaaaacatcattgtaaagtttgcttgaataaaatcaccttataaaaaaaaaaaaaaa

SEQ ID NO: 84295 - DNA, 681 bp, Arabidopsis thaliana columbia
tcgctcgttttcgattctaggatggtcatttaagtctattcaatcatggaaaccggtttaaacatcttaaagctatcgctatgcgtcagcctagtcgtggttggatcatatgctcaggctcccgcaccatggaatccatctaatgggtttcgtccggggacatgtgaccactacgagtgtcccacctataaattggtagaggccggatacggctttgagatccgcatgtacgacgctgccctatggatatctactagtcctatcccctccctatccatgactcaagccaccaaaaccggtttccgacgattaaataggtacatagaaggagataacaagagcaacgtgaagatgaacatgacagctccggtgatcgcacaagcaacgcctggaagatcagtctacacggtctcactctacctcccgaagaagaaccaacagaacccacctcaggccgatgatctccacgttcggtctacgaaaccaacttacgtagccgtgagacagatcggtggctacgtgtcgaacaatgtagccaaggacgaagctgcggctctgatggaaagcctccgggattctaactggattttgcccatcgagaagagcaaaggaaagttgccggcgtattttctcgctgtttataacccgccatctcataccacggctagggtgattaatgag

SEQ ID NO: 84296 - DNA, 490 bp, Arabidopsis thaliana columbia
  unsure (1)..(490): unsure at all n locations
aaatggaacaaaggtaatatatttgggtggtgaggaaaaggcaccggggttgctaacctggtttggcccaacgtgaaggggtaaggtaaattcccaacgaattttctcgctgtttataacccgccatctcatacctcgggctagggtgattaatgagatcatggttccgtttaacatgtagatcatgttaatggcgccctcacgttttgattgttccgtagcaattggattagaagaggtggtttagacccgatcgatgctgtatcagcagcttgcagcttctggtttaaccggtataaattgtatctctggttaagtggtgattaatattgttattttgtaaaggtggggaaaactgtaaccaaaaagtttgataaaagatttattttttcctttgaaaaaaaaaaaaaaaaaaaaaaaaaaaaaaaaaaaaaaaaaaaagggcgancgctctagaggatccaagctacgtacgcgtngcgtgcgacgt

SEQ ID NO: 84297 - DNA, 533 bp, Arabidopsis thaliana columbia
agcgctacacgactcactattgggaaagctggtcacgcctgcaggtaccggtccggaattcccgggtcgacccacgcgtgcgctctcttcttttttttttttttttggtttttcatttaagtctattcaatcatggaaaccggtttaaacatcttaaagctatcgctatgcgtcagcctagtcgtggttggatcatatgctcaggctcccgcaccatggaatccatctaatgggtttcgtccggggacatgtgaccactacgagtgtcccacctataaattggtagaggccggatacggctttgagatccgcatgtacgacgctgccctatggatatctactagtcctatcccctccctatccatgactcaagccaccaaaaccgggttccgacggttaatgaggtactggaatatataagacttggcgttctgcggccgctcctcgtcccgaccaggggtggtgtagcgtgcaggccggcgcgggccgagcgctccccttttgctgtgatcctcgtgttttcatccccgtgc

SEQ ID NO: 84298 - DNA, 498 bp, Arabidopsis thaliana columbia
tccacttatacatattaggagctgtccctcagtaccgtccgatcccggtcaccacgcgtgcgggacgcgtgggctttttaccgcgcttgctacacatgggggcagacatcaactcctacctaaatctggtagcagcccattttcagatcgaattgaccccaaggagatcacatcagtttttgggggttttgaggaatgaatttcttgcttcgatctgcttcttccgctactcatcggcctccggtgatcgaaccaccagctacgccgcctcaacctccccctgaaacagcgaggcccggagttactttggaagggctgattgctgaagagcatttcccacaatatccatcagtagatgaagatctcgatcgtgtgggtgatggatctggagaccttgatggtaatggagagtcaaatgctaagtctggtggctctggtatggagagattctctgatgtgtctgaggaacaaggatggatcgccattccatacaaggag

SEQ ID NO: 84299 - DNA, 375 bp, Arabidopsis thaliana columbia
atagggagaaactggatggtggaattatttaagtaagaaacacatgttgaaacaattgtcttggaatcatacgaggatccttgtctacaactgttacaataaaattgaaacagaaaagagcggaaactacattatcggttctacaaccacaaatcatcatcatcttcttcattcttattcgctagtggctgatatgaaggcacttccaggttgacggttagccaatggaccatggtttgttagaaacttagcattgacaccatcaggcacaatcctcttcatcgctctcagcttcgtgtactcagcacggttgaatttagtgaatccccatttcctgctaacaatgatcttttgacgaccagggaacttaaactt

SEQ ID NO: 84300 - DNA, 801 bp, Arabidopsis thaliana columbia
  unsure (1)..(801): unsure at all n locations
gcgccccggttgggttgcaattcgttnnnnnnnnnnnnnnnnnnnnnnnnnnnnnnnnnnnnnnnnnnnnnnnnnnnnnnnnnnnnnnnnnnncttttttttttttttttatttcaggggaaaatattgatttcttgataagtttaaaataatgttttatgagagaaacgaattctattaacagtacaagttatatagtgatttctactatgatctgacaacacctgtattcgcagcgacatacaaatactagaacttcttaccgttcttgaggtttctgacagccatcacaagttgttgtctttctccttctacctctgcaaatctcaggcttatctctgaatatctctcttccatttctttcaactctctctccattgaactgtttttgttcttacaatacgccaattcgtctgatagctttgatagattctcctctttgtgtccgttttcttgtgaccttgcttccatccttgcatctaggattttagtcatttcttcttcttttctccgaatatcgactttcaggtttgatacttgttttctcagatcatcattctccattttttcttgaacgaagctgttatgtaattaactgtactgtaggcttagaccttctacttctgtcttcaaattcctgagccttgcctctttatcatcatttgacgaacttaggagagttaactttttctgcgctgtttggctacttctttagccaaagaaaggtttctctcaaattcaactctttctttcctccactcttgtattatcttctgagtttcagtagctggtgcactcgat

SEQ ID NO: 84301 - DNA, 696 bp, Arabidopsis thaliana columbia
tttgtttttttttttttatatcagacctttttctttaccattttagcaaaatgttgaatctatgtacaaaagataaactataaggagtctctaaaggaggaaaagagtcatgaggcgaagtcaagaaaatagaagacacagagaggtatccaaaggtaatgcagaagagataaaatgtgagcctactagatgaactgttcctgtgccttcgtcttttacttttatgcttgatgagcagttgtattcagtccacccaatgagctgattttcgagatcgtagagaacaagcttgtttgaaagcaccaaatctcccaaaagtgtcatgtttctcctatctctggattgcattgcgctattttgccaaccaatgcaccacattccttcatgagggaacagatagtcatgaggataaaccctgaggaaaaccgagttctcgaaatggaaagtgacattcggaaacccctcatcaactctgccagagtactgaaagcatttataatctttatccactatgtgaacttttagagcaggctcctgcgaggttatcttcttcaccaatggttcatagattatctctggaagataggccaaggttgtaccactgtcaattatcgctccttttctatctccaggttgaaataaatcggctgggatagttagaaactcctgaccaacttgaactgctgtcatatagac

SEQ ID NO: 84302 - DNA, 456 bp, Arabidopsis thaliana columbia
catcaattcatctttactcatagcctgaatcctcttagttcccttggattgtctagtaacgactccaccgggagaaaatcctctctcttcttctggtgacagtttctttcctgtaagacaactcgcctcaccatcaaatttgccacggtctccagagcacagatcatcaatcgcttcagcagccacttgtgtatcattccctaaaactgccgcttcacgaacttcatctaactctttgccaagattctttttagcaccctggatattctttcggctcctagtcacactatgcttcaacagtttggaatcagaacgagcccatcttttatccactgcaactggcatcagttctcttttctgttctctaggcaagctagaaaattcccgtcttttacttgcaacgccaaagaattcatcttttcttctacgatagatatcaccccctccttcatcctc

SEQ ID NO: 84303 - DNA, 488 bp, Arabidopsis thaliana columbia
  unsure (1)..(488): unsure at all n locations
atagcaacttttatgtatttgaaattcgngtaccaccttatgnactcacacaccactctacataaccaccaccaccaccaccacatgtttcagatgaagaagagtcattgacatagaagaacatagagcatagttctcaggtgccaaaagacaaatccctatacccatatctaaagagttttaaagacaggtgaaaaacgtagaacatgcgaggaaaacaatgatgaagagtgaaaacaaaccgacacaggccgagaaaagccacacatcctttcttcatgacctgcaaaacatgctagacgaacgagcaagccccatagtcagaccaccaccttgaacactagcttcaaacttgattgtgttcctttcataaggctttctgcaaccaggacaacggccatctccatcgcatatcgncttgtggcagaaaaggnaagccggaatccncaaggncatggncagaattgagcnggaaaggcaagactccg

SEQ ID NO: 84304 - DNA, 2012 bp, Arabidopsis thaliana columbia
  unsure (1)..(2012): unsure at all n locations
ctggatcttccgcggccgccgcaaatccctctccggttcattggataagcagcctggggaagatgagcattgtacctaaggaaacggttgaggtaatagctcaaagtattgggattaccaacttgttacctgaagctgctcttatgcttgctcctgatgttgagtatcgtgtccgagagatcatgcaggaagctatcaaatgcatgcttcactcaaagagaacaactttaacagcttcggatgtagatggtgcctctcaacttaaaggaaacgttgagccgatatatggatttggcctcaggagggccattttcggttttagaaaagctattggacatcgcgatttgttctacactgatgacagagaagtggatttcaaagatgtgatcgaagccccgctgccaaaagctccccttgatactgaaattgtttgtcactggctggctattgaaggagtgcaaccagctataccagaaaatgctcctttagaagtcattagagcacctggcagaaaccaaaatccagtaacaaaaagacgacctcttattgacgttaggctaccagtgaagcatgtactatctagggaacttcagttatacttccaaaagattgctgaacttgcaatgagcaagtcaaatcctcctctgtataaagaagcattagtgagcttggcctcagactcaggacttcatcctctagttccatattttacaaatttcattgctgatgaggtttcaaatggcttaaatgacttccgactcctgtttaatctaatgcacattgttagaagtcttctacagaatcctcacatacacagagaaccttatctgcaccagttgatgccatctgttgtaacatgccttgtatcaagaaagcttggaaatagatttgctgacaaccactgggaactcagagatttggcggcaaatctggtttcactgatatgtaaaaggtatggaaccgtttatataactcttcagtctcgtcttaccagaactttagtcaatgcactgctggacccaaagaaggctttgactcagcactatggtgcgattcaaggattagcagctttggggcacactgttgtacgccttcttattctatcaaatctcgaaccatatctaagtcttctcgaacctgaatttaatgctgagaagcaaaaaaatcagatgaagatctacgaagcttggcgtgtatatggagccttgctgcgtgctgcaggcttgtgtatacatggccggcttaaaatcttcccacctttaccatctccgtcaccaagttttctccataagggaaagggaaagggaaagataatcagtactgatccccacaagcggaagctgagtgtagattcttcagaaaaccaatcaccgcagaaaagattgataaccatggatgggccagatggtgtacattcacaagatcaatctggctcagctccaatgcaagtagataatccagtggaaaatgacaatccgccacaaaactctgttcagccatcctcatcagaacaagcctctgatgctaacgaatctgaaagcagaaatggaaaggtgaaagaaagcggcaggagtcgggctattaccatgaaagcaatccttgatcagatatggaaagatgatcttgattccggcggctattggtgaaactgcacgaactctatggtgataggattcttccctttatcccttctacagagatgtcagtattcctctaaccaataagagagaaggaggcttggagagattaaagcgccgtctggttggcatacataaactcatttagatccgtgccattgttctcaggtcaactctttagttcttctttttaagcttgagggatttcaaagtccttaggagcctgcagagtgggttgagttgaattgaaccggttgcaatgtatatattaagagaattttaatgattccgtagtggacttatttgtttactctcaaatgtaatccatgaaataatttctcttcaaaaaaaaatgatctagattgcaatttttna

SEQ ID NO: 84305 - DNA, 301 bp, Arabidopsis thaliana columbia
ctcatggtttcaaatcttcatgaacattggaaaccatgaggaactttcttgccacattagttcaacatggtttccaatgttcttgaagatttgagactttaaaagagaaaaatctctttggtttgctatgtttttatatgtttgtttctactgttatctattgtttttgtgagaaaaagctttgttctgtcactgttgagtttgatgtaatgcttgagcttgttcatgatagaacctttgttctctcaatattgagtttgatgtaatgcttgagcttgttaatggattttatgttcttagt

SEQ ID NO: 84306 - DNA, 816 bp, Arabidopsis thaliana columbia
  unsure (1)..(816): unsure at all n locations
nnnnnnnnnnnnnnnnnnnnnnnnnnnnnnnnnnnnnnnnnnnnnnnnnnnnnnnnnnnnnnnnnnnnnnnnnntttgtattaattcgcggccgcctaagaacataaaatccattttcttgtctcaagcattacatcaaactcaatattgagagaacaaagggtctatcgtgaacaagctcaagctttacatcaaactcaacagtgacagaacaaagctttttctcacaataacaatagataacagtagaaacaaacatataaaaacgaaacactttcaggttcaaagatcactgtagtacaagaacaaaaggtaaacaggataaacgtcaaaaacgtgtgtagtagaaacagtcaaaaggtcattcattgcagagcgcttcaacggaagtaaccgtagagccccaagtagcaaattgcaaatagttccaccggagttgatgtacctgcagttggaccggtcagaaacatccagccttgaaaaacctaaaaggggagttaatgcatttgctgcggtgattgcccatgatgcaaactgaccggccttgcacattgtttggtcatcctcatggactctcaaggctgcccatgttttcccctccatcgatccctgaaacttccagaaatcttgggaaatgctcttgataccgccttggtctgaaggtggtaatagttgcaccataagctgatgttcttcgcctaagtccaccacccaccaggatgatatatggccgtcttccatcctaggccctgcaaaggaagtacccgcataggcttttgaagccaaagcctttggatcagtgaatctggatgtggg

SEQ ID NO: 84307 - DNA, 559 bp, Arabidopsis thaliana columbia
  unsure (1)..(559): unsure at all n locations
atgcaagagattcttaaaccgagtcataaaaaacaaagtataactcattactccacagccgtaggccaaatcttttgtataaaaaccaaaacaatctaactggaatcaagtttaacatatattgagaaacactttcaggttcaaagatcactgtagtacaagaacaaaaggtaaacaggataaacgtcaaaaacgtgtgtagtcgaaacagccaaaagggcattcattgcagagcgcttcaacggaagtaaccgtagagctccaagtagcaaatgcaaaagttccacggagttgatgtatctgcagttggaccggtcagaaccagcctgaaaaacctaaaggggagtaatgcatttgctgcggtgattggccatgatgcaaactgaccggccttgcacattgtttgggcancccatggactctcaagtctgnccatgtttnccatccatcggtccctgaacttccagatctggggaagccctgggccgcctnnctganggggaaaatgcaanaanngntgtctcgcnagccccccnccggngtntggcgcccccnggcg

SEQ ID NO: 84308 - DNA, 502 bp, Arabidopsis thaliana columbia
aggtgacactatagaagagctatgacgtcgcatgcacgcgtacgtaagctcggaattcggctcgaggcttgttaatggattttatgttcttagtaagctcaagcattacatcaaactcaatattgagagaacaaaggttctatcatgaacaagctcaagcattacatcaaactcaacagtgacagaacctttgttctctcaatattgagtttgatgtaatgcttgagcttgttaatggatgtgatgaacttagttacaatcacaaaaacacacggcgtccgacccctaagcatctagtgtaccccctgatgagcctaatgacggaacctgctcgcattccttgttttcctataactggccgctttacagctgggaaacctgacgggccaacttggttactggatgagacaacgctccggtacaggcggcacccatataggaccccgaggcgtattttcttttcccagggagcctagaacagtgattgccctttacattctgc

SEQ ID NO: 84309 - DNA, 710 bp, Arabidopsis thaliana columbia
tccttcacattcatcccaaaacattacaaaacgttacaatggcttctaaggctcttgcagttacagctcttcttattacacttaatcttctttgtcttcacctttgtaacctccacaaaatgtccaccaactactcctaaacccccaaaaaccccgaaatcgcctaagaaggctcctgccgtgaaacccacttgtcctaccgacacacttaagcttggtgtttgcgcagacttattgggcctagttaacgttgttgttggttctccaccaaagactccttgttgtacacttcttcaaggtcttgctaatcttgaagctgcggtttgtctctgcaccgctcttaaagccaatgtcttggggattaatctcaatgttcctattgatctaaccttgctgttgaactattgtggcaagaaagttcctcatggtttccaatgttcttgaagatttgagactttaaaagagaaaaatctctttggtttgctatgtttttatatgtttgtttctactgttatctattgtttttgtgagaaaaagctttgttctgtcactgttgagtttgatgtaatgcttgagcttgttcatgatagaacctttgttctctcaatattgagtttgatgtaatgcttgagcttgttaatggattttatgttcttagtatttctcctctcgtccataaatgacattcaatcataacgctcttctaaaaa

SEQ ID NO: 84310 - DNA, 729 bp, Arabidopsis thaliana columbia
agaatgaagccggagtattatggattcttctaatggttctctctttcttgcttcaaggagcaggtacagtattgaaggaagtcatctttatagatagccaaagacgattaaagggtgcttcactcgatctatttatagtaaattcatatggttcagctttccaagccatctgcattgcgttgcttcttccatttctttcaaaactttggggcataccgtttaaccaactcggtacctacctaaaagatggtgcggtttgttttctcaacaatgggacaataacaaaaggatgtgatggggctccgtttttgcctctgttgtttgtgataatgaacattggctataacattgctcttttaagactcctcaagatttcatccgcggtggtttcatgtcttgcatcaacagtctcagtgccaattgcagtgtttctgttcacaatgccattaccgtaccttggagttgcatcatcactaccaaaagggttcatgggaggaacaatcatacttgtattgggaatgattctttatagttggacaccacacggagctaactcttctcatactgattcagtcattccttcacctcctccaacatagagagggcttaactaaggggttttgcttttatataaagatttgagagatttatgcaaattcggtttgtgtttaaataaacttatatttgatcatatgatgttaatggaaaagttgacattttgtgaaaaaa

SEQ ID NO: 84311 - DNA, 567 bp, Arabidopsis thaliana columbia
  unsure (1)..(567): unsure at all n locations
gtttcttgacaatagtatatagctaaccttataaggagaacacaaaagtatacaaattgctaagtgtatgtgaatattttctctgttgagttgcagaaactaattgacattcatacataatggaattgctcattgatttctccatcaagctatgatcaattcgcaacgtcacatgcctcttaaccttaagaaccgccaaataccgatgctaggaaatcagtggagagcccaggcttgctttgagatgtctcattttcaattgatttcttctgtctaaactgggaaaatccgccctaggtggaaagactggtgctgcttcagcattgctacccgattcttcttggaatctttcggttccttttccattcgggcatctaactcggtcatgggcacgagacttcncnaatttangatagataaaggccttccccccccttgcagcagaaaggaccatattaattccggtcccggatngacttttgangngnttcctccagaaganaccccctnaaatnggcaagaattgggnccaanccaagaancgggntncttnccccggtgncccat

SEQ ID NO: 84312 - DNA, 761 bp, Arabidopsis thaliana columbia
  unsure (1)..(761): unsure at all n locations
tccacgcgtccgaaatgtgcagctccggaaataaataatcactaaaataaccagatccgatctactgccccggtttctcgccggaatctccattctgtaaccggcgatcctctttctgctcagttatggaagacgtgaaagggaaggagattattgatgatgctcctattgacaacaaggtttcagatgaaatggagagtgaggaaaatgcgatcaagaaaaagtatggaggattgttgcctaagaagattcctttgatatctaaggaccatgaacgtgcgttttttgactcagctgattgggctttaggcaagcaaaaaggacagaagccgaaagggcctttggaagctctccgcccaaaactgcagccaaccccgcaacagcaaccaagagcaagacgaatggcttattcttcaggcgaaactgaagacactgagattgataacaacgaagctccggatgaccaagcctgcgcatcagctgtggatagtaccaatttaaaggacgatggaggcgcaaaagacaacatcaaatcatgaacaacatatagagatcttttgaggagcgcaaacaaacaacatccccaagtcaatttttcaggaggattagccgccccagggttttctttttgcaaccgggttgtaaatatcaagggcccttanccttatcatactttggggccttcaaatntggtatcactttcaaacctcggtggctttaaacggctnttttggcggttgaaaatnattttgctttaatgg

SEQ ID NO: 84313 - DNA, 400 bp, Arabidopsis thaliana columbia
gacatactcaacatgaactttattactcagttgtacaaaaaccaacggctttaatacggaataatgaactgatgatccaaataagagttattgctttctcaaatggtttaatatctatttttggttaaaacctgtaatgagtactaaaaactgacgatggtttatctttgcatgcgtcatcttcacttgtattttgtttcttactttgtctgtctccttcatcggatggttgtggtcttttctggtttctcccaacctccgtttcaagcaagagacgacctttgttagacagtacttgatcagattcgaatttttcttccggaatttttccaacaatcatcgcgggctgccacgatctcaagaaccctataaaccctttaagcgaaagtttatgcggaat

SEQ ID NO: 84314 - DNA, 388 bp, Arabidopsis thaliana columbia
  unsure (1)..(388): unsure at all n locations
cccacgcgtccgccgaaagttctcatggcgtcgaagcaaaaattctgactcgttgatccataaagcgaactctttctcgctcttagtttctgcatttcgtctatcaaaagtaggattatacactttttgtttttgtttttgtgaaaccctatacagttcgatctaaaaccctaaaaagatggtgaaaccttccgatttcaaagcagttcacaaacttattcaattgcattacagtcgagtcaacctgttcacaacgacgggatggtcaaaactctcagctttgtcttctccggctcttccttcaaatggggtttctcagcttcagcctaagtctggtttccacaccttctcgtcgagacncacttcgaaaaactttggcttatcccag

SEQ ID NO: 84315 - DNA, 807 bp, Arabidopsis thaliana columbia
  unsure (1)..(807): unsure at all n locations
acgtaaaaacataagaaaaacagagtaaataaagtaatgcgccgatcgtcgacggagagtatgagatgagaagagaaattgatattgatattgtttgatatctactgtagatgattcgtcttgacaaagagtatagtgtacttcgatgttgctttcggagatcagaaacttagttttgactttttttttgtgttctccttgtatagggaaggaggctgcttgacatcgaccaccctgaaagtccttttggtacaaaggaatctcctgctgtcgtacagtcctactttgacaagagaaatatcggatgccgtggtggtgaaggcgaggatggacacgacgtcgtttggttctggctagataaaggaaagtcatttgaatgtccagtgtgctcccaatactttgagcacggaccaccagacggtcatggtgacgatgaagaccaccaccattgattccggtcttttcttaacggcgaaatgttttcttctattgtagtgagtggaataaatatttctcgttggtgaaaacacttaaatatgttttttttgatcccccgagaagacaccacccctttatttgcctcaggctctaaccctttttgctttcttgagacttttgtttttatgaatgattctcgagtcagaatcattcctcctttttttgacccatataaaaaaaaggttttgggggtcnccggggggganggttgggggaaaaaggaaaacccnanaannatgcntnggggcgggaancntgnaccccgggggggcccaagnctanangggggccncccngggggggnccanc

SEQ ID NO: 84316 - DNA, 707 bp, Arabidopsis thaliana columbia
  unsure (1)..(707): unsure at all n locations
tactctcnnnnnnnnnnnnnnnnnnnnnnnnnnnnnnnnnnnnngcctgcaggtaccggnccggaatncccgggttgacccccgcgtgcgggcacgcgtacgcccacgcgtccgcaacgacctgggcttgtatcctcaagctctacttcaaaaccatgtcttccaaggatgtccattgttactttcatatcctgcaaaaggactgtacacttggagtacttatcaaattgcttgagcaatccgaggagccaattgtttgttagatatggttttctggaaaggagcaacaagaagaaatcacagaggctggtcttggcatctgctgaagatggagtagctattaatggaagtcctcagccaagatctagtagtaatttggaggacatgaggactagtttcaccggatcattacaagacgaaaacaattctaatggacttaaccagtctttgcatgatgctgctagatctattgaattggctgttaaagagaagattactccgtccagattttcgtggtttccttcgacttggcttggtgctgataaatatgcatgggtgaagactcttttcgtatcaggcttctctgtactccctactgcaagcagtaaatgagatttcatctagaggcaattacagagacgaggntattaatgcctttgtcaaagaggctntcacgccagctgnnccccttgagaanatnatngaga

SEQ ID NO: 84317 - DNA, 514 bp, Arabidopsis thaliana columbia
  unsure (1)..(514): unsure at all n locations
nnnnnnnnnnnnnnnnnnnnnnnnnnnnnnnnnnnnnnnnnnnnnnnnnnnnnnnnnnnnnnnnnnnnnnnnnnnccacgcgtgcgcggacgcgtgggcggacgcgtggggcatttacacacaatcacacacacacacacacacacacaccaaaatgatagcttacatagaaccatacttcttggaaaacgacgccgaggctgcctctgccgccaccgccgccggaaaatctacggatggtgtttctgagtcacttaacatccaaggagaaatcttatgtggtggagctgcggcggatatcgccgggagagattttggcggcatgaactgtgtgaagcctcttgctgtggtgagaccagtgggaccggaagatatcgccggagcggtgaaagcggctctgaggtcagataaactaacggtggcggcgcgtggaaacggccattctatcaacggtcaagccatggcggaaggaggactcgttgtcgatatgagtaccacggcggagaatcatttc

SEQ ID NO: 84318 - DNA, 640 bp, Arabidopsis thaliana columbia
  unsure (1)..(640): unsure at all n locations
gcgtccgaaaggagctctttagattgagactagtggaagagagacgagcaaggaattagcaatggcggcggatttgccggaggcgacagtacagaacattctggaccaagagtctcttaaatgggttttcgtcggaggtaaaggaggtgttgggaagacgacatgcagttcaattctcgcaatttgtctcgccagtgttcgatcctccgttctcatcatctccaccgatcctgctcacaatcttagtgatgcctttcagcaacgcttcactaaatctcccactttggttcaaggtttctctaatctctttgccatggaggtagatcctaccgttgaaactgatgacatggctggtacagacgggatggatggtttattctctgatttggcaaatgcgattcctggaatcgatgaggctatgagttttgctgagatgttgaagttggtgcaaacaatggnttatgctactattgtgtttgacactgctcctactngncatactntccggcctgtnacagttccggccacactaggaaggggcctttcgagttnatgccattnagggnngggtttggggcttatgcccantggncgntgtttgatggggntngtcgagggtcttctggaggttgggttaagc

SEQ ID NO: 84319 - DNA, 563 bp, Arabidopsis thaliana columbia
  unsure (1)..(563): unsure at all n locations
gctctaatacgactcactatagggagagctggtacccctccaggtgccgggccggagttcccgggtcgacccacgcgtccgcccgcgcgtccgggtgtggaaaagattatcttcagcgagtgggagaatgcgtacaacgcattgactgagacatatgagaatctgtgccaagctggagtgattgatccggctaaagtgacaagatgtgcgctacagaacgctgcttccgtagcaggagtggtactgaccactcaggccattggtgtggacaaaccgagacccaaggctcctggtgctgctgctcctgagggtctcatggtggaatcaaaacacagcatcttatcatcacgatggcatctttggctttttgcacatttgtcatccccatttatctgcgatggttttcttttttgggggaatatgagtaggttggtaacagtatccagagataattatcatcttttttgtccaaaaaaaaaaaaaaaaaaagnnnnnnnnnnnnnnnnnnnnnnnnnnnnnnnnnnnnnnnnnnnnnnnnnnnnnnnnnnnnnnnnnnnnnnnnn

SEQ ID NO: 84320 - DNA, 1172 bp, Arabidopsis thaliana columbia
actcagctgaagaaagaactattcgagactgattctgtgtatgactcagagaagctcgctgagagaattgcgaacctagctggaggtgttgctgtcatgagaaggcagagcatcaactgaaactgagcttgaggaccgtaagcttcgtagcgaggatgcaaagaacgcaacatttgctgctatcgaggaaggcatagttccaggtggtggtgctgctttggtgcatctctccactgttattcccgccattaaggagacttttgaggatgctgatgaacgtttgggagctgacatagtacaaaaggcattgctgtcaccagctgctcttattgctcagaacgctggagttgaaggagaagttgttgtggaaaagattatgttcagcgattgggagaatgggtacaacgcaatgactgatacatatgagaatctgttcgaagctggagtgattgatccggctaaagtgacaagatgtgcgctacagaacgctgcttccgtagcaggaatggtactgaccactcaggccattgttgttgacaaaccgaaacccaaggctcctgctgctgctgctcctgagggtctcatggtgtaatcaaaacacaacatcttatcatcacaatggcatctttgtctttttgcacatttgtcatccccatttatctgcaatgtttttcttttttgggggaatatgagtagtttgttaacagtatcgagaaataattatcatcttttttgtccaatggaaattgcagaaaatggttatgtatgcgaccaaacattttatatgtagcgagagtagtttagcagaacaataagcaaatatgcgtacaaactgaataatgttccaacttactatactattccactaggagggaacaatgttttttcatgcctttactagttttctcataaaacttgatctggatattgcacttcgatgatctacgaaccattagcagatctccggtgattcgatacttctccttgtcgtttattgcacaggcacgaactttgacaagcacaagacatgacagtttctctatgaaatgtctcatttcctctagctcttcaattgttccttcatattcagttatcttcaatactttcacaggacatgacaatccatatattcttgtaaagttaagtatatatacagggagatcagactcgtt

SEQ ID NO: 84321 - DNA, 887 bp, Arabidopsis thaliana columbia
ccagctctatacgactcactattagggaaagctggtacgcctccaggtaccggtcccgaattccccggtctacccacgcgtgcgggacgcgtggggttctttgagtttcttcttctcttggaggaaaatcgagaaagacgaaacatggcttcttcttctacttctctgaaaagaagagagcaaccaatttcgcgagatggagatcaacttatcgttactccgttaggagccggaagtgaagtgggtcgttcctgtgtttacatgtccttccgaggcaaaaatattctgtttgattgtgggattcatcctgcgtactcgggcatggctgcgttgccttacttcgatgagattgatccttcttccattgatgtcctcttgattactcactttcatatagatcatgcagcatctctaccttattttctggagaagacgacattcaatgggcgggttttcatgacacatgcaacaaaggccatctacaagctgttgcttacagattatgtaaaagtgagcaaagtgtctgtggaagatatgttgttcgatgaacaagacatcaacaagtctatggacaaaattgaggtaattgacttccatcaaacagttgaagtgaatggcataaagttctggtgttacacggcaggccatgttttgggtgcagccatgtttatggtggatatagctggtgtccgaatcctctatacaggcgactattcccgtgaggaagaccgacatctgagagcagctgagcttcctcaattctcccctgacatatgcatcattgaatccacttctggtgtccagcttcatcaatctcgacatattcgtgagaaacgcttcactgatgtaatccattcaacggttgctcagggtggacgtgtgctgat

SEQ ID NO: 84322 - DNA, 816 bp, Arabidopsis thaliana columbia
attttagatgggaggaggagaagttagtaaagagatgggagcttgttcattagcgtatcgtcgtggagatcagaaattacgcaagttcgtgacggcgaggagtactaagtttcttctattttgctgcatcgctttcgtcttggtcacaatcgtttgccgatcttctcgtccttgggttaacagttcaatcgccgtcgcagatcggatctccggatcaaggaaaggttatacacttctgatgaacacatggaagagatatgatctcttaaagaagtctgtttcccactatgcatcatgttctaggcttgactctatccacattgtatggagtgaacctaaccctccatcagagtctctgaaagagtatcttcataatgttctgaagaaaaagactcgagatgggcatgaggttgagctgagatttgatataaacaaagaagacagtttgaacaacagatttaaagagattaaagacttgaaaacagatgctgtcttctcaatagatgatgatatcatatttccttgtcacacggtagattttgcattcaacgtttgggaaagtgctccggatacaatggtggggtttgtgccccgtgtgcattggcctgaaaaatcgaatgataaagccaattactacacctacagtggatggtggtctgtttggtggagtggtacatatagcatggtactctcaaagggaagcttcttccacaaaaaatacctcagccttttcacaaatagcatgccagcatcaatcagggaattcacaacagagaacatgaactgtgaagatattgcaatgtcattcctcatcgc

SEQ ID NO: 84323 - DNA, 526 bp, Arabidopsis thaliana columbia
aggaagcttgtaagagcggagatgcggtggaacgatggcgacttcagcggcgtagtcttgagagtctgcctcctcaccttgctgatgctctcctccgtcgcctcctcaaaaagcggcttcttttcccttcgttactcgaaggattcaaatattctgtagagaatatagatctccgaggcaaaagctcagttaacgcagaatggatggcttacattggaggcttcgttaatctaattactctaaatctttcagattgccagagaatcaacagttccaccctctggcctatcacaggattaacaagtttgacagagttggacctttcaagatgtttcaaggttacggatgctggtatgaagcacctccaatctgttgtaaatctgaaaaagttgtggatttcacagacaggtgtcactgaagttggaatttctcttcttgcttcacttaaaaaattgtctcttttggatttgggcggcttacctgtaactgatcagaacttgatttctctccaggcactgacaaagct

SEQ ID NO: 84324 - DNA, 460 bp, Arabidopsis thaliana columbia
acaaaaacaaatagaaaaaaatacaaataaaaaatgtcaacccaacagatgaaacacactccacaaaacttgcaacagcaaggacaaggacttggtgagcaaggaagagacactcaaggacttggaagcacacaagagtttggacaacgtgatagacaacaggatcttggtagccaatttgataaaactcaacaacaaggacaacaaggacaacaaggacaacagggacaacaaggtcaacaaggacttcaaggtcagcaacagtggggaggtgctcagcaatttgatcaacaaggaggaaagcaacaagatttgggacaacaacaatttggatcaactcagcaaaagaaccaagactttggacagagatcataaagagatgaagcaacgaggcgatgatgatctcccaaaaagaagaaagtctgtttaattgatgtgtagcagagtgctctcatagcaa

SEQ ID NO: 84325 - DNA, 589 bp, Arabidopsis thaliana columbia
  unsure (1)..(589): unsure at all n locations
ccnnnnnnnnnnnnnnnnnnnnnnnnnnnnnnnnnnnnnnnnnnnnnnnnnnnnnnnnnnnnnnnnnnnnnnccacgcggtncgggcttctctgtttctctctcttcttcttgcagttttggtttggaagaaagagaacgaagaagacgacatctccagagtttttggcaataatcttttaagaaatgggaaagcttttgtgtgattcaacggcgacatttcaatctccttcaccaacggttccttggagagaaccttctacagtcgccgtgtctctcgaagatgtagatcttgttgaccaatccgcggctgctgcggcggtggacgcggttgagaagacaatggccgccgcaactaccaccgcttgggatgaggtttttggattggaggaggcgcaaagacggcatctgagccggctacacgcgagaggtgtgttgtggaaacatcctggtaaagatgaatcctctgcttccgtcgttttccgtctctctcacggcggagaggtttcttccgacgggaactgtttgttcaccgcttctcagaaggctatggaggcgcgtgggatcgacgcgcgagatttacggcggcg

SEQ ID NO: 84326 - DNA, 531 bp, Arabidopsis thaliana columbia
  unsure (1)..(531): unsure at all n locations
tttcgggggncttnggaggccatgacnggggtaaagttttttgcccgtccttccagggtgggattccagttcccccatgccgncccggggttcctagtatggcaaatgctgcccttattccaattggaagtcagttctttatctgcactattaagacgtcatggttggaccggaagacatgtggtgttcgggcaagtaataggaaggaatggaagtggtgaagctgatagaggaacaagagacagacagaggagaccgtcccagaaagaaagtggtgatagcagactgtggtcaacttccaatgtctgaagcttaaaagtaagatcatttaaccaaaatcttgtagacatgagatggagcttgtttttgcattttacaaccctttcttttgtgtaatggatttgtatccccttcttccaaaaatttaagaaagaaatagtattccgctgccgggtgttgaactcatatttcatttcattggtttgtttcgaaattaaccattgtgttatagcggttcagttgcattagaaa

SEQ ID NO: 84327 - DNA, 1064 bp, Arabidopsis thaliana columbia
  unsure (1)..(1064): unsure at all n locations
cccacgcgtccgcacctaccatttttgccaacaaacgcgagcaagagttttgagctccaatggcgaccttgtcgatgactctgtcaaatccgaagtcgctctcagctcctccacgaagactttctccgatcaatacctccgctttcacatctacctctttccgattgcgcaccaaatcttccttcgattcaatctcgttctcgtcttcaactcccttctccgcctcatcgctcctccttcacacgtcttataccaaaagaaaccaccgctgtttctctgttcaatccaatgctgaggtggttactgaaccgcaatcgaaaataacacacaaggtgtatttcgatataagtgttggcaatccagtggggaagttagctgggaggattgttattggattgtatggtagatgatgttccccaaactgtggagaactttcgtgctctatgcacaggtgaaaagggatttggctacaagggttctacattccatcgtgtcatcagagatttcatgattcagggaggagactttgagaagggcaatggaactggaggtaaaagtgtatatggccgtacattcaaggatgagaatttcaagttatcccatgtcggaccaggagttctaagtatggcaaatgctggccctaatacaaatggaagtcagttctttatctgcactattaagacgtcatggttggacggaagacatgtggtgttcgggcaagtaatagaaggaatggaagtggtgaagctgatagaggaacaagagacagacagaggagaccgtcccagaaagaaagtggtgatagcagactgtggtcaacttccaatgtctgaagcttaaaagtaagatcatttaaccaaaatcttgtagacatgagatggagcttgtttttgcattttacaaccctttcttttgtgtaatggatttgtatccccttcttccaaaaatttaagaaagaaatagtattccgctgcaaaaaaaaaaaaaaaaaagggcggccgctctagaggatccaagcttacgtacgcgtgcatgcgacgtcannnnnnnnnnnnnnnnnaacg

SEQ ID NO: 84328 - DNA, 1124 bp, Arabidopsis thaliana columbia
  unsure (1)..(1124): unsure at all n locations
tnaccncctctctctcacagatctaaaaaccagaagcgagagaaacaaattcactctccccttatataagcaccgatttataaatctttttccctcttcgattctcaattctttgtataaaaggcttctccttttctcaattcttcggcttcctttcgcccaaactcttccctcgaatctttccttctcgtcttaaagctacgaaaccctagatttcggatttcttcgctatccaaagaagaatgactgatcaaggattggaagggagtaatccagttgatcttagcaagcatccttcagggattgttcctactcttcaaaacattgtctccacggtgaacttagactgcaagctagatcttaaagccatagctttgcaggctcggaatgctgaatataatcccaagcgttttgctgcggtgataatgaggatcagagaaccgaagactacagcattaatattcgcctcagggaaaatggtctgtactggagctaagagcgaggacttttcgaagatggctgctagaaagtatgctaggattgtgcagaaattgggattccctgcaaaattcaaggatttcaagattcagaatattgtaggttcttgtgatgtcaaattccctataagacttgaaggtcttgcttactctcacgctgctttctcaagttatgagcccgagctcttcccagggctgatttataggatgaaagtcccaaaaatcgtccttctaatctttgtctctgggaagatcgtaataacaggagccaagatgagagatgagacctacaaagcctttgagaatatataccccgtgctctcggaattcagaaagatacagcaataggtcacggatttgttccctgcaaaactagttgtgcggtcttagccccttggagttgctaaagcttgctgagaattttgcccttgaacaaaggctttcacagtagctagactctcaccttgtgttttggttcataatataacattgtatatacacaatggagattctaaagacaattcttcggttctattttttttctttttctttccaagatatgtcttacatgtatgttgctgtagtgtcctcacatttccacttatgttacaagtagaaccttaactc

SEQ ID NO: 84329 - DNA, 1195 bp, Arabidopsis thaliana columbia
cgcagatcacaaatctcatccccagagagagaacccagagagcgatattgaaaatcaaaactctctcctttatatataatcccaatttacaaatctctttccctctctaaaaatttcttatctttgtataaaaagccttctcctttttcaaatcattcaccttcctttcgccttttcgggggaatttcttccaatctgttgggtttacgaaaccctagatttcgaaattccggattgctaactagcgaaagagaatggctgattcaaggaacggaagggagccagccagttgaccttactaaacatccttcagggattgttcctactcttcaaaatattgtctcaacagtgaacttagactgcaagcttgatcttaaagccatagctttgcaagctaggaatgctgaatataaccccaagcgtttcgctgctgtaatcatgaggatcagagagccaaagaccacagcgttaatttttgcttctgggaaaatggtgtgtaccggagctaaaagtgaacatctttcaaagcttgctgcaagaaagtatgctcggattgttcaaaagcttggctttcctgcaaagttcaaggattttaagatacagaacattgtaggctcatgtgatgtcaaattccccattaggcttgaaggtcttgcatactctcatagtgctttctcaagttacgagcctgagctatttccaggattgatatataggatgaaacttccaaagattgtactgcttatttttgtgtcaggaaagattgttataactggagccaagatgagagaagagacttataccgcatttgagaatatctacccagttcttagagaattcaggaaggtccagcaataatagtatagcctaccatattgaaggcaaaaaccatgttcacgtttggattgccatgaactagagatctcgggtgttggcaggcgcttggtggggttatattccttggacaagaacttgaaatgattcagattcaaaaccagaaattgtaaatagagaatggagatgccaataaatctcttttcttttttgttctaaaaatgtcttccaagtaatcttgtttcatgttctgtttgtttcagtgaacaatacccaatcattaaagagttacttagttctttgctaactgttctgtaataagacaccaagtctgtttgccctttaatatactctttcaagc

SEQ ID NO: 84330 - DNA, 675 bp, Arabidopsis thaliana columbia
  unsure (1)..(675): unsure at all n locations
tncccccnattttttgaatttgncnnacaattccccggaacngctttnccatattcccaagcncaaattaccccncactaaggggaccaaaacttgnncctccaccncggttgccccccgccgacggcgtggtgttcctccttcctgctctgaaaaatggcgaagagaacgaagaaggttggaatcgtcggcaaatacggaacacgttatggtgcgagtatcaggaagcagattaagaagatggaggtcagccagcacagcaagtacttctgtgagttctgtggcaagtacggagtgaagcgaaaggctgttggtatctggggttgcaaggattgtggcaaggtcaaggcaggtggtgcttacacaatgaacaccgccagtgcggtcactgttagaagcacgatcagaaggttgagggagcagatcgagggttaaaagtctgctggctttttatatttggtttccttgttttgacaatttaagttttgcaaactctatgcttgtgattttgaatcaagacttatacattgagcagtttaagcaggtttttatttttttgtttgaggtaatttttcaaaagtttcatttnccaataggtcctagnctatataanccntaaagttagggctttgaggggttttgnaatgnttgnncccattaacnncntatttataa

SEQ ID NO: 84331 - DNA, 610 bp, Arabidopsis thaliana columbia
  unsure (1)..(610): unsure at all n locations
aagaaacatcgaaacagaaaaattaaagaatatttcaagaaagtaagaaacaatgaataattttagtattttatataataatgctttatgtcgtacaaatcaactacaaaaatcaaaataaaactatataaaaactttgtgggataaaacaatttctctctctttgcttttgatatgttttttactcgctgtccctaaggctttcactggtgagccaaagtttcttctggacaatgaaaacgacattgttctcaccatcttcactgtcttggtcgagttctgaacttgtatttaccttctctgatgccacagtctcccaatgcaaagcctgcaaatacttcttgattgactcaacaacactctgcttatctctgatgataacgaatcccgtaggtctaagaatccgatccatctcgattagtagatcctctgcactgcatcctttgcttttaatgtctgnaaatatagnccacgngtgcaacagatcgtatgttcgaggntatgtagggnaagcctcacancagttatggtttngttccgntttaaaccacggtcgngntccagttttagggttttgggncccntnngggggngncaaagntnttaaccc

SEQ ID NO: 84332 - DNA, 496 bp, Arabidopsis thaliana columbia
  unsure (1)..(496): unsure at all n locations
cggcacgagacaaaacacaagttgcagactttatccaaatttagggttttctctttttttcttacttagttatcatcagatcttcaaaaccccaaaatttgcaaatcagatctcagcttcccggttagtactaccctcaaatcaactaagtttcatgtctgaacttgactcccaggttcccactgcctttgatccgtttgctgatgcgaatgttgaggactcaggtgccggaacaaaagaatacgttcatatccgtgtccagcagcgaaatggtaggaaaagcttgacaaccgtccagggcctgaagaaagagtacagctataccaagatacttaaggacctcaagaaagagttttgctgcaacggcactgtggttcaggattcagaactcggacaggttatacagcttcaaggtgcccaacgtacgttcgcctcctgacaggtggttngtnanaggttcanaagccntggtttnacgncttgngcaatttnaaac

SEQ ID NO: 84333 - DNA, 897 bp, Arabidopsis thaliana columbia
  unsure (1)..(897): unsure at all n locations
nnnnnnnnnnnnnnnnnnnnnnnnnnnnnnnnnnnnnnnnnnnnnnnnnnnnnnnnnnnnnnnnnnnnnnnccacgcgtggcgccacgcgttttcctcttcctctcattatttttgttctcgccaccgaaacaacagaagttgcagactttatccgaatttagggtttcagctcgttctctcttctccaattatcagatccacgaaactctacttttcggatcaggtctcagcttctctatcgtttgcccctcagatcaacaaagtttcatgtctgaacttgattcccaggtccctactgccttcgacccgtttgctgatgcgaatgctgaggactcaggtgcaggaacaaaggagtacgttcatattcgtgtccagcagcggaatggtaggaaaagcttgacaacggtccaggggctgaagaaagagtacagctacaccaagatacttaaggacctcaagaaagaattttgctgcaacggaactgtggttcaagactcagaactcggacaggttattcagcttcaaggcgatcagaggaagaacgtctccacgttcctagtccaggctgggcttgtgaagaaagataacatcaagatccatggtttctgagcagcttctgttgcatttcccgtaggccgtttaagtggatcattactctatcgtgcagttacaaaacatatcttcacctttcccttcgattacttgttacttgtttctgttttagcgttggaatgatactaagagaccatcatcgttttctttcacatgttacttctgtaatacgagattgttaagcattctccattaaaaaaaaaaaaaaagnnnnnnnnnnnnnnnnnnnnnnnnnnnnnnnnnnnnnnnnnnnnnnnnnnnnnnnnnnnnnnnnnnnnnnnnn

SEQ ID NO: 84334 - DNA, 946 bp, Arabidopsis thaliana columbia
  unsure (1)..(946): unsure at all n locations
nnnnnnncagacccggactcgactggatcttctcttctctccctatctctctctatcgacgatcgaactgacttgagtacttcttcttcttttgaccagagctctcacacatacgagtcactataatggaaggcgatcaagagacgaatgtttatactttggtggcaaggaagccttccttcgatctcccaacagcttgccctaattgtcttcctgcttatatatacctgaaattagcccagctaccttttgaacttgcgttcaattcaaccttccctgattcagatgaactgccgtactttgaaagtgatacatatgttgcatataacaatgaagatggaggagtaattgaaaaactgaagaaagatgggattgttaatctggactctcagctacagtctctttcggattatttatctttgaaggctcttattgtgtcttggctagaagaagcgcttacctatgagatatgggttggtaccgaggggatatctacatcgaacaatctactattcatatcttccttgggtgatcagcaaggtcctgttttataagcagacatacttggcaaagaaccgtttaggaatcaccaaagagaacgcagagcaaagagaaaaacagatatacaagagagcaagtnaggcatatgaggctttgtcgactaggttaggtgagcagaagtttctntttgaagacaggccatcgagtttggatgctttcttactctcgcacatacttttnataatccaagcgttaccagttacatcagtgcttcggtgcaaacttctggaccatagtaatnctngtccgntatgctgagnacttaaggcagagttccttgaagcctctccttcactcctcacctcactttantcatccctccccattccagaaaggtngagccaagggaaccaaggngnaagcccnggggggaaanttaggangg

SEQ ID NO: 84335 - DNA, 432 bp, Arabidopsis thaliana columbia
  unsure (1)..(432): unsure at all n locations
atcagagatcagccatggcttcttcgactctnttcaaactcaattcacagacattcaaagctctaaacccatctcctccggcgttatctcctcccaattccagaattttccatcttcatttctccaaatcactctcacaacagcattcaaagctcaaccacaaatcaaccactactcgcttattcgctcctctctgttcctctcttccttcaccttcttcttcttctcctcccctttccaaagaagaagccattaatcaagccaaaaacttgtctcctttcatgtctcaccaaacccttaaaacaacccaaaacttcgttctccccaaaaactcaggacagctcaaacaaaccaaggttccgtccttggaaatcccaatccttgacgggtggnttctccttnggnaaatttgttcagnttgggttttntcgg

SEQ ID NO: 84336 - DNA, 565 bp, Arabidopsis thaliana columbia
  unsure (1)..(565): unsure at all n locations
ttcttctcattttccctctatatattcatatactctttcgtatagttgcaccatccactctactcaacatggactcctccaaactctcatctctctctctttgcctcttcctcatttgcattatctatctcccccaacattctctcgcatgcggctcttgcaacccacggaagggcggaaagcactcccctaaagcccctaagctaccagttcctccggtgaccgtccctaagctaccagttcctccggtgaccgtccctaagctaccagtccctccggtgaccgtccctaagctacccgttcctcctgtgaccatccctaagctacccgttcctccagtgactgtccctaagctacccgttccccccggtgacccgtacccaaaggtacccggttccctccagtgcacccggtccctaaggtaacccggttcctcccagtgcaggggcttacccataaactccagtgggtagggtcccaattttgncaattngcaacttttnncaaattntagggncctaattttttcaaccggggnanaaacccatcnagncaanaggagggg

SEQ ID NO: 84337 - DNA, 528 bp, Arabidopsis thaliana columbia
  unsure (1)..(528): unsure at all n locations
atcagagatcagccatggcttcttcgactctcttcaaactcaattcacagacattcaaagctctaccccttcctccgatttcagggctacccatacctccagtggtaggtcccaatctgccattgccgcctttgccaattgtaggtcctattcttccaccgggaacaaccccaccagccacaggagggaaggactgtcctccaccgccagggagcgtaaagccaccatcagggggcgggaaggcgacatgtccaatagacacgctgaagttaggtgcttgcgtcgacttgttgggaggtttagtaaagatagggcttggggatccagcagttaacaaatgttgtcccgttactttaaaggcctcgtttgaaggtcgaagcccggggtttgttttttaaatacccctaaggtaaaggtttttgaccccaaactttttttccccggtggctttcaagttttccttaacccgngggaaaatccngcccccnggttnaaattggccctttttttnaatncaccccncttttt

SEQ ID NO: 84338 - DNA, 1344 bp, Arabidopsis thaliana columbia
  unsure (1)..(1344): unsure at all n locations
nnnnnnttgtccgcctgcaggtcccggtccggaattcccgggtcgacccacgacgtccgctacaacatggactcctccaaactctcatctctctctctttgcctcttcctcatttgcattatctatctcccccaacattctctcgcatgcggctcttgcaacccacggaagggcggaaagcactcccctaaagcccctaagctaccagttcctccggtgaccgtccctaagctaccagttcctccggtgaccgtccctaagctaccagtccctccggtgaccgtccctaagctacccgttcctcctgtgaccatccctaagctacccgttccaccagtgactgtacctaagctacccgttcctcctgtgaccgtccccaagctacccgttcctccagtgaccgtccccaagctacccgttcctccagtgacagtccctaagctacccgttcccccggtaactgtacctaagctacccgttcctccagtgaccgtccctaagctaccccttcctccgatttcagggctacccatacctccagtggtaggtcccaatctgccattgccgcctttgccaattgtaggtcctattcttccaccgggaacaaccccaccagccacaggagggaaggactgtcctccaccgccagggagcgtaaagccaccatcagggggcgggaaggcgacatgtccaatagacacgctgaagttaggtgcttgcgtcgacttgttgggaggtttagtaaagatagggcttggggatccagcagttaacaaatgttgtccgttacttaaaggcctcgttgaagtcgaagccgcggcttgtctctgcactaccctcaagctcaaagctcttgacctcaatctttatgtccctgttgctcttcagcttctccttacctgtggcaaaaatccacctccgggctacacttgttccatatgataaactcactccacttataaaggatgctttggagaaaaaagtgagaagagaatggcagagctccaatctttcctgtcttggtttaccaaatatatcatatcaaatcctatccctttgattctttcctctatcgttcccttatgcttgtatcattaattaatgtgtgctttttagattaatgattcttctcttgtattaaagtatgatttgaaatcctttttttttctctatctctttttattgaatggaattgactgcgttcatgatactgtcaaaaagagagaaaaagagtacaattttatatatttttcgtattagttgaacgacaaaataaattacattttaaaatgtaaaatataaaatacaatgccattgaaaatatttacaggggtgtnttggaag

SEQ ID NO: 84339 - DNA, 645 bp, Arabidopsis thaliana columbia
acccacgcgtccgcattctctaaattaactcaaaggagtaaataaaaatacaaatacaaaatttatacagaacaacccacaattctgtctagtttagttaaacgtgttaaaatagtcacgcaatgctttttctatttttaaaaattaataagctctgacctgtacgcaaccaaataaaacactaaaacttatctgtgatcaacttagctctgtataaaaatcttcctcctctttctttctgtccaattctctacagagaagtcttagcttttgcaaaatcattaactaatctctgttttgatgactagataacttggatgtaggattattatacctaaattctttctttccatgcatttatgtcggttttgacatctttgttctcttagtttaaaagatatcaatattagttatcttctattctttgaacatttgtgtccatctcatgaagttcaggaagcgtaggcaatactttcctgcttgttcgtctcatcgccaagtaatgatctcttcgtcatcttcttcttctccaaactcatatcaaatttgaatcttatcatcaaattgagagtaatcaacgacaccactgcaatcttgcatatacattgttcttgtgtattccacccgtttctttaatcttcaatg

SEQ ID NO: 84340 - DNA, 539 bp, Arabidopsis thaliana columbia
  unsure (1)..(539): unsure at all n locations
acaatttgttctttgttttcagttgaggaaaacatgaattcgacatcgacacattttgtgccaccgagaagagttggtatatacgaacctgtccatcaattcggtatgtggggggagagtttcaaaagcaatattagcaatgggactatgaacacaccaaaccacataataataccgaataatcagaaactagacaacaacgtgtcagaggatacttcccatggaacagcaggaactcctcacatgttcgatcaagaagcttcaacgtctagacatcccgcataagatacaaagacgggcttgctcaatacccgcgagggcttgctagggacaatgtcgctttggcgcgatgggcgtatgttcagcaacttgggaacaagcaggttgaagctaattccaatttgggncaaganctggttcggnnnngcaacaggggttttttttgggaaccgggttngtcctaatntttncggtttttnggaacccnntnccggggttntttcnttttaaatgggttttgcctttggtttnngcncgcc

SEQ ID NO: 84341 - DNA, 1978 bp, Arabidopsis thaliana columbia
  unsure (1)..(1978): unsure at all n locations
ccttccaaacactattggggaaatggcttcttctcttttttccggtgtaggtttaaggttttagatttgaaggcggatggtgaggagtttgtgttgatgaaatgggtgatttgaagttaaatacctttaagttcttttagccttaagttcttttagcctgtcattacaatatatgtttcagttgtgatcttttggtgctctccaaggtcttagggaatctccgtgtcccctctggtttctttctttgtataaagtctctggaatttaaagatgattttgtcctgttttcttcgaagaatttggcgaagaaacatcaaaagttcactatttgctttacgtgttatgcttgtttgactttgtgtgatctaacttttggttgaaaactaatgctcatcttttgttctttggaatgtcttgatctgcttgattttgaatgctttgtcacattgtttaaacaatttgttctttgttttcagttgaggaaaacatgaattcgacatcgacacattttgtgccaccgagaagagttggtatatacgaacctgtccatcaattcggtatgtggggggagagtttcaaaagcaatattagcaatgggactatgaacacaccaaaccacataataataccgaataatcagaaactagacaacaacgtgtcagaggatacttcccatggaacagcaggaactcctcacatgttcgatcaagaagcttcaacgtctagacatcccgataagatacaaagacggcttgctcaaaaccgcgaggctgctaggaaaagtcgcttgcgcaagaaggcttatgttcagcaactggaaacaagcaggttgaagctaattcaattagagcaagaactcgatcgtgctagacaacagggattctatgtaggaaacggaatagatactaattctctcggtttttcggaaaccatgaatccagggattgctgcatttgaaatggaatatggacattgggttgaagaacagaacagacagatatgtgaactaagaacagttttacacggacacattaacgatatcgagcttcgttcgctagtcgaaaacgccatgaaacattactttgagcttttccggatgaaatcgtctgctgccaaagccgatgtcttcttcgtcatgtcagggatgtggagaacttcagcagaacgattcttcttatggattggcggatttcgaccctccgatcttctcaaggttcttttgccacattttgatgtcttgacggatcaacaacttctagatgtatgcaatctaaaacaatcgtgtcagcaagcagaagacgcgttgactcaaggtatggagaagctgcaacacacccttgcggactgcgttgcagcgggacaactcggtgaaggaagttacattcctcaggtgaattctgctatggatagattagaagctttggtcagtttcgtaaatcaggctgatcacttgagacatgaaacattgcaacaaatgtatcggatattgacaacgcgacaagcggctcgaggattattagctcttggtgagtattttcaacggcttagagccttgagctcaagttgggcaactcgacatcgtgaaccaacgtaggtttgagttattttgtaacaaccaaatgaagaaaatggaaagacctcaaaaaatgaagaatgagtgcatctgaaaacagaggactactctgaataaatagaggggttgctgctgatatttatttttactctgcggcggaattagaaaatttgaaaaacatcatgtattgataagttgtaaatatcagaaaaaggtgggggtgcaaaaatttgtactttttagcttttgaaagaggcaagtttttcgaatgtttgtttgatttgtaaacaatttcagaattatataaacttggttccaaaaaaaaaaaaaaaagggcggccgctctacaggatccaagcttacgtacgcgtgcatgcgacgtcatagtngtctatagtgtaagga

SEQ ID NO: 84342 - DNA, 450 bp, Arabidopsis thaliana columbia
caaaaatcttagtttcagacggaaagagagagtatagccatggaagtctcaaatcagaccagaaaacggaaagcaatcgacgccggacatggctcgcagccgacggcgtatcgaggctcagatggtgtagatctttctctccttgaagcacttgagaagtcttcgcataatggagtagaagcgcttgatcttaaaaccctaaaaaagcttgtcctctccttcgagcggcgtcttagagacaacatagctgctcgtctcaagtatgtggagaatccagaaaagttcgctgactcagaggttgacctacacgacgatcttcagaagctcaaggtgctcgctggagctccggaactttacccggaccttgttgcttccaatacggttccttcgattgtcaatctcctctctcatgaaaactccgatatcgccaacgatgttggtcagcttctt

SEQ ID NO: 84343 - DNA, 529 bp, Arabidopsis thaliana columbia
ggtgcactatagaagagctttgacgtcgcatcgcacgcgtacgtaagcttggatcctctagagcggccgccctttgggtttttttttttttgtaaataactgaattgattctaccagtatttgaagataaaaatacatttatcgctgattgggataggtgttcaaatatttatatgtttatatgttaacaaatgttattgctgacttgcaggtcttagcagctgccataaaggctggtgcttccagagagcatgaaatccttgctgagatcagagattctgtcttttcatttatccggaaaatggaaccaaggagagtaatggatacaatgcttgtttctcgagtcaggatattgtacataaggtccttacttgcacgatcacctgagcttcagtcgatcaaggtgagcataaccagatttagttagctaattttccttttagcttttcctgctggtatgtgtcacaagtttcttctcccggaaagatcaatctcacgtcacccacttcttttaggtttctcctgttga

SEQ ID NO: 84344 - DNA, 623 bp, Arabidopsis thaliana columbia
  unsure (1)..(623): unsure at all n locations
aatacgactcaccttagggaaagctcctacgcctgcaggtaccggtccggatttcccggggcgacccacgcgtgccggcagtcttcaaaactcaatggccaccactcctctcctcctccttctcctcaccgccgtcttcctctccacggagataaccgctcaacgcgctgctccggctcctggcccggctggtcccatcaacatcacggcaatcctcgaaaaaggcggacaatttgttactcttatccgtcttttaaacacaactcaaataggaaaccagataaacatccaaatcaacagttcatcagaaggcatgaccgtgttagcaccaacagacaacgctttccaaaaccttaaacccggaaccctaaacaaactaagcccggacgaccaagtcaaactcattctttaccatgtcagtcccaaattctacacattgggaagatcttctctctgtaagtaacccggtcagaactcaggcctcaggtcgagacggttggtggggtttacgggctttacttancggtaaagggatcaaggcaatgtatctctngtgtggtggncaggtttagtcttnattgggcagangncttttcggttnggtggtgcatggattttccggc

SEQ ID NO: 84345 - DNA, 1080 bp, Arabidopsis thaliana columbia
  unsure (1)..(1080): unsure at all n locations
cagctctccatacgactcactatagggaaagctggtacgcctgcaggtaccggtccggaattcccggaccaaatgcaaacacaccacatgcagcaacaacaactccatcacttcgtctttgtccacggctcatgtcatggagcatggtgctggttcaaactagctgcaaagctcaagctcgatggtcaccgtgtgacagctatcgaccttggtggctccggtgtcgacacgaggcagctccatgaggttcgtttggtgtcggcgtatctagagcctttgatgagtttcatggagtctctccctgaaaacgagaaagtggttcttgttggtcatagctatggtggcattggaacttctcttgctatggaaaggtttccgaccaaagtctctgtcggaatcttcctctctgcttacatgccgcaccatgactctcctccggcggttttgattcaagagtattttacgagactaccagagggtttcgctatggactgtgagtttacattcgaggaaggattagacccccccccaagttcagttttgttcgggactagtttcttgaaggagaaggcatatagtaattgcccgttagaggttctacaattacccctggcgttgatgaaaccaagctggttatcccctaaggaaatggggggtgaagtttttataccaaaggaaaggtatggttttgggaaaaaagtgttttttgtttgtgaaggcgccaatgtggttccaaaggagattcaaaagtggatgtttagtaactccgaccccccccaagttaagcggattgaaaaagctggtcccatgggtatgccccctaagccccatgaactttttcaactggtccaagaaatagcagcgaaatataactaaatgtaaaatgatgccccccgggtattatttggggccagttccctctttgatatgaataaaagggtttccttnnnnnnnnnnnnnnnnnnnnnnnnnnnnnnnnnnnnnnnnnnnnnnnnnnnnnnnnnnnnnnnnnnnnnnnnnnnnnnnnnnnnnnnnnnnnnnnnnnnnnnnnnnnnnnnnnnnnnnnnnnnnnnnnnnnnn

SEQ ID NO: 84346 - DNA, 369 bp, Arabidopsis thaliana columbia
ttttagttcaaaaaggactcaattacatcacaaattgtcccttaaataaacaatgtttcgataggtcgcaatgttgaaagagatcttttcgagggtttactctattgtgtgagaacttgatccttgccactgaccggagtaaccacaccgagtatcacgaaaccgccaagaataagggttagaacgcccattgtgttgactaacattgcctctggggaataccgagttatcacttgattcacttgcaggaacgtcaccttctcaagtatccctgtggttgcagtcaccaacgccaatgcatatatgggaaatccctaaggaacacatgccatggcttcaaactggctctgctggttcttgaaccacccg

SEQ ID NO: 84347 - DNA, 410 bp, Arabidopsis thaliana columbia
acggacgcgtgggactagaaagagaaagaaagagagagagagagagagagagaaccagagattatcgaacacgaagcagaagacgattcgtggaagagacttggagagaatatttctcaatgtctcctctcccaatcttccatcgtcttcctcacgccacgttctcttcctttctcctctcactgtctcaagctggaagttctaaaacatcagtggcattcctcaatgccttcaaatcagaagatatcattgctcgaattgggctatggtggcagcttataagggctgttgtagttgtacctgtcttcaagttcctggtgcttctatgtttggtcatgtctgtcatgttcttcgttgaggttatgtacatgggaatcgttgttttgtatgtcaagctgttcaagagaaag

SEQ ID NO: 84348 - DNA, 1278 bp, Arabidopsis thaliana columbia
  unsure (1)..(1278): unsure at all n locations
cgccgcagaccggccgaanccgggttgacccagcggcgcctccacattaaagtaaagtatctctctcttttttctcctacgtactccatagtgatggcttcatcgcttctgacatcttccgttatgatccctaccaccggttccaccgtggttggccggtcagtgttaccctttcaatcttccctgcactctctccgcctgacccattcgtacaagaaccccgcattgttcatctcatgttgctcttctgtgtccaaaaatgcggcaactagttctactgatctcaaacccgttgtggaacggtggccggagtacataccgaacaagcttcccgacggaaactatgtgcgtgtattcgacacgacgctccgtgacggtgaacaatctcctggtggatccctcactccgccgcagaagctagagattgcccgacagctcgctaaactccgagtagacatcatggaagtcggttttccgggatcatctgaagaagagttagaaaccattaagaccatcgccaagactgtggggaatgaggtggatgaggaaacaggttacgtccctgtgatatgcgccatagctcgatgcaaacatagagacattgaggcgacttgggaggcgctgaagtacgcgaagaggccaaggatactcgtattcacatctactagtgacattcacatgaaatataagttgaaaaagactcaagaagaagtgattgagatggccgtgagtagtattaggtttgctaaaagcttgggcttcaatgacatccagtttgggtgcgaagatggcggcaggtcggacaaggatttcctatgcaagattctaggagaagccataaaagccggtgttacggtggtgaccatcggtgatacggtagggatcaacatgccacatgaatacggggaactcgtgacttatctcaaagcaaacacccctggaattgacgatgttgtcgtcgctgttcattgtcacaacgaccttggtcttgcaaccgccaactcaatcgccggtatacgtgcgggacgagacaggtcgaagtaactatcaacggaattggtgaaagaagtggcaatgcgtcgcttgaggaggtcgtgatggctttgaaatgtcgaggggcatatgtgatcaatggggtttacacaaaaatagacacacgccaaatcatggctaccagcaagatggttcaagagtacacggcttgtatgttcaagtcacataagcccatagttggagcgaactgttttgttcatgagagcgcattcatcaggatggaat

SEQ ID NO: 84349 - DNA, 527 bp, Arabidopsis thaliana columbia
  unsure (1)..(527): unsure at all n locations
aggagactctgtgttatttggagacagcaatccatcaaacccaaaaccaagatttggagcatattgggttcaaggtggtaaagtggttggagcattcatggagggaggtagtggtgatgagaacaaagccttggctaaagtcgccaaagctcgaccttctgcagagagtctcgacgagctcgtgaaacaaggaatttccttcgcagctaagatctgagtgaaacacaaccaccaaaacaaactcacgttttctcttctatgttaaaataaaaacttgtttagctataataagttgtgtgtttgtattgtctctctaaactccatgagaagagtctacggcagaggaaaccctgaaccacattcacattttagatcatgtgtttggttttctgtgtttcagtatctgtcttggtttcttaatgtgaacaactccaaaaccacatttactgtaatctcaaatgaagggagttattttcaatnnnnnnnnnnnnnnnnnnnnnnnnnnnnnnnnnnnnnnnnnnnnnnnn

SEQ ID NO: 84350 - DNA, 951 bp, Arabidopsis thaliana columbia
  unsure (1)..(951): unsure at all n locations
nnnnnnnnnnnnnnnnnnnnnnnnnnnnnnnnnnnnnnnnnnnnnnnnnnnnnnnnnnnnnnnnnnnnnnnnnnnccgcgcgtccggtgaaggaagtacaactcaaggatgggaggacattggaagccgacattgtgatagttggggttggtgcaaaaccattgacatccttattcaagggacaggtcgaggaagataaaggtggaattaagaccgatgcattcttcaaaacaagtgttccagatgtttacgctgttggtgacgttgctactttccctttgaaaatgtacggagacgtgagaagggtcgagcatgttgaccattcccgcaaatcagcagagcaagctgttaaggcgatcaaagcggctgagggaggcgcagcggtggaggaatacgactatcttccattcttctactctcgctcctttgatctctcatggcagttctacggagacaacgtaggagactctgtgttatttggagacagcaatccatcaaacccaaaaccaagatttggagcatattgggttcaaggtggtaaagtggttggagcattcatggagggaggtagtggtgatgagaacaaagccttggctaaagtcgccaaagctcgaccttttccagagagtctcgacgggcttcgtgaaacaaggaatttccttcgcagctaagacttgggtgaaccacaacccccaaaacaaactcacgttttctcttctatgttaaaataaaaacttgtttagctataataaggtgtgtgtttgtattgtctctctaaactccatgagaagagtctgcggcagaggaaaccctgacccacattcccattttagatcatgtgtttggttttctgtgtttcagtatctgtcttggtaaaaaaaaaaaaaaaaaaaaaaagggcggccgctctagaggatccaagcttacgtacgcgtgcatgcggcgtcatag

SEQ ID NO: 84351 - DNA, 792 bp, Arabidopsis thaliana columbia
  unsure (1)..(792): unsure at all n locations
tacagacatggctttgtacggtgaaaaggagtggtatttttcctcaccaagagatcgaaagtatccaaacggttcaagacccaaccgtgcagctggtactggatattggaaagctaccggagctgataaaccaataggtcgtcctaaaccggttggtattaagaaggctctagtgttttactcgggaaaacctccaaatggagagaaaaccaattggattatgcacgaataccggctcgctgacgttgaccggtcggttcgtaagaaaaacagtctaagattggacgattgggtattgtgtcgtatatataacaagaaaggtgtcatcgagaagcgacgaagcgatatcgaggacgggttaaagcctgtgactgacacgtgtccaccggaatctgtggcgagattgatctccggctcggagcaagcggtgtcaccggaattcacgtgtagcaacggtcggttgagtaatgcccttgattttccgtttaattacgtagatgccatcgccgataacgagattgtntcacggctattgggcgggaatcagatgtggtcgacgacgcttgatccacttgtggttaggcagggaactttctgagttgtcacggtgcgattagagttaagtggaaagtgggaacttatcactggnctgttttcgcaacgtntcgggtaagccgtntttnnaaaccccntaagcttggnccanaaagtnaccccaatttggntttttaaacaacaatttgggccttagnctttttttnccccttagtaagnaaannnnctnanttgggt

SEQ ID NO: 84352 - DNA, 1137 bp, Arabidopsis thaliana columbia
  unsure (1)..(1137): unsure at all n locations
gctctcttcaagaagaaattcggcaaggtttacggttccattgaggagcattattacagattctctgttttcaaagcaaatctcctgcgagcgatgcgtcaccagaagatggatccttctgctcgtcacggcgtaacgcagttttcggatctgactcgttctgagtttcggagaaagcatttaggggttaaaggtgggtttaagcttcctaaagacgctaatcaagccccgattctccctactcagaatcttccggaggagtttgattggagagatcgcggcgcggttactcccgtgaaaaaccagggatcttgtggttcttgctggagttttagcactacaggtgcccttgaaggtgctcacttcctcgctactggcaaactcgttagtctcagtgaacaacagctcgtcgattgtgatcacgagtgtgatccagaagaggaaggttcatgtgattctggttgtaacggtgggcttatgaacagtgcctttgaatacacgcttaaaaccggagggcttatgcgagagaaagattatccttacaccggtactgatggagggagctgcaagttagacaggtctaagatcgttgcctctgtctccaactttagtgttgtgtccatcaacgaagatcaaatagctgcaaaccttatcaaaaacggtcctctagctgtggcgatcaatgcagcttatatgcaaacctacattggaggagtctcgtgtccttacatatgctcgaggcggctcaaccacggtgtgttgttggtaggttatggctcggctgggttttctcaagcaaggttaaaggaaaaaccgtattggatcatcaagaactcgtggggtgagtcttggggtgagaatggtttctataagatatgtaaaggtcgtaacatttgcggtgttgacagtttggtctccaccgtcgctgctaccacttcttgagcttttcattattctgctgcaatgctatttaaagtctgtaaataaatgattaacaaaaacatatttcttggtgaattcgaaacaacaatgccataggcttacaaaaaaaaaaaaaaaaaagnnnnnnnnnnnnnnnnnnnnnnnnnnnnnnnnnnnnnnnnnnnnnnnnnnnnnnnnnnnnnnnnnnnnnnnnnn

SEQ ID NO: 84353 - DNA, 590 bp, Arabidopsis thaliana columbia
acttgcaaggatggtaagttgggatgtttggataatgggaagtatgtgaggtatacacctgaacaagttgaagcacttgagaggctttatcatgactgtcctaaaccgagttctattcgccgtcagcagttgatcagagagtgtcctattctctctaacattgagcctaaacagatcaaagtgtggtttcagaaccgaagatgtagagagaaacaaaggaaagaggcttcacggcttcaagctgtgaatcggaagttgacggcaatgaacaagctcttgatggaggagaatgacaggttgcagaagcaagtgtcacagctggtccatgaaaacagctacttccgtcaacatactccaaatccttcactcccagctaaagacacaagctgtgaatcggtggtgacgagtggtcagcaccaattggcatctcaaaatcctcagagagatgctagtcctgcaggacttttgtccattgcagaagaaactttagcagagtttctttcaaaggcaactggaaccgctgttgagtgggttcagatgcctggaatgaagcctggtccggattccattggaatcatcgctatttctca

SEQ ID NO: 84354 - DNA, 741 bp, Arabidopsis thaliana columbia
caactcgaattaccctcactaaagggaacaaaagcttgcatgcctgcagctcaacggcctctccgtcgccaaggacgtcggcaaggcgttcggcctcctcgcggggctggcgtccgaccgcgtccccacctggctcctcctcgccgtcggctccctcgagggcctcctcggctacggcgcgcagtggatggtcgtgtccggggccgtcgcgccgctcccgtactggcagatgtgcgtctccctctgtctcggcgggaacagcaccacatggatgaacaccgccgtgctcgtcacctgcatccgcaacttccgccggagtaggggccccgtctccggcctgctcaagggctacgtcggcctcaccaccgccatcttcaccgacacctgctccgcgctcttcgccgacgacccggcctcgttcctcgtcatgctcgccgtcgtgccggccgccgtctgcgcgctcgccatggtgttcctccgcgagggcgccgccgctgcggacgacgacgacgacgggcgctgcttcgccgcgatcaactcgctcgccgtggcaatcgcgctgtacctcctcgccgcggacctcacggggctcggcaggcgggggcggggtcgtcttcgtcgccgtgctcctggtgctcctcgcgtcccccgctggcgtgccggcgatcctggcgtggaaatcgtgggcggagaccccgcaggccgcgaacgcccacctgcaagaggcgaactcctttgctg

SEQ ID NO: 84355 - DNA, 487 bp, Arabidopsis thaliana columbia
  unsure (1)..(487): unsure at all n locations
ccacgcgtccagtctctaactactactatcnccaacacacactgttactcttcttcttcttctctgtcactgtctattctctcttttggacctttcatggctatgtttctctgcaatggaagtccaagctcgtgatcaccaacaccgacacgctaatggctattggagatagagctatgtttactgttttgcttctattcattgcttcgatctctggattctctgttgttcgttgtgttactgatccatctgatgttcaagcccttcaagttttgtttacttcactaaatagtccttcacagctaaccaattggaaaaatggtggtggtgatccatgtggagagtcatggtaagggatttcttttgagggctttatagtttgttatttatttttttatctttatctaaatatatactaatttctctgtgtatttttttttttttttcattataatttattaatatttactcgttttttctatatttt

SEQ ID NO: 84356 - DNA, 757 bp, Arabidopsis thaliana columbia
gcaactcgaaattaccctcactaaagggaacaaaagcttgcatgcctgcagcggcgacgcgggcctcggcgcagcgggatctcccaccctccgccctccgtcgccgcctcgccggccgacccaggcggcgcagcgcacacgatcggtcacaaacaagaacgaccaaggcgcgcccctcaagcggcgtcgtcagtcctcgtcctcgtcccccccgagaccccgagcgcggaggaaaaagtcaacccggctccatccacgagaagagatggggtcgttcaaggggcacgtgctcccgggcacgctgttcctggcggtggggctgtggcgggtgtggtcgtcggcggcgcggcacgccgcggacccgtcgtcgttccgggtgcgcgcgtggtgccccgcgccggcgcccgggccggcgcggctgctggagctctacgtcgtggcgggcggcgcgctggcggacatgtgcgtggaggtgctctactccacgcacctccggatattcgccggcggcgagcgtcaacccggcgcacctcaacgacctcgagcacggcggcatgctgctcatgttcttcctcttcggcgcgctcgctctcgcgtcccagctctggcccacgtctgtctggctggctgtcctgttctgtcttctgtgtgcacgcgcgcgctcgttgcctagctcctctgacggtctctgtctgacctagccctctccgtcgatccagccaaaccttggatcggtcgtcgtttctcaagcttttta

SEQ ID NO: 84357 - DNA, 750 bp, Arabidopsis thaliana columbia
tcaccaagccgaaattaaccctcactaaagggaacaaaagcttgcatgcctgcagctaagctagattttctctcttccctcttcaacaagctccgaccttgtgaagctccagcgcatgcacggctcgccggtggcctagcatgtgtccaccctcccagccgctggcctgctggcagccgtgggagtccaagaagttcttgctgaggtccctcgtcacggacccacctgcgcgctcccgcggcggctgcggtggcgtcggtatcctctggagcgacgaccacgccgtcgcgaggccgtggtccgatggcgacccgcacgccagctgctgctccctgtcgtcctcggcgatggtgtccaggctcctcggccccttccttcgtcgcatgaccgacaccacctgcggcggcgccacctccgtcgtgaacctcgccgccacctgcgcctgcgccttcgccatgcatcgaggagttgataaacacacacacacacacacacagtaagagacggtatctctactcgctctagttatgtgcatgtacggggccgtggtcccgaccgtgacccccacggcgccagcatctccctggcggcctcggcgatggtgctcacgctcctcggcgccttcctccgccgcatgaccgacaccacctgcggcggcggcgcctccatcatgaacctcgcccccacctgcgcctgcgccttcgccatgatcgaggaaatgacgaacacacacacacacagctcgctcta

SEQ ID NO: 84358 - DNA, 749 bp, Arabidopsis thaliana columbia
aagccgaaattaccctcactaaagggaacaaaagcttgcatgcctgcagtgagtagtgaaatgacacctgttctcatttgtaaagctgggccaaatgctcccactaaatccttgacactcgtcaattgccaagaaccagccgagagttttatgggacacaaggcacctcgagttccaccaaaagggagcgataatcatatcaaattgccgaatggcaggcatcgtagcctaaattaaggccccaacacacaagcatccaaaaggcaaagaaaggtcgagagttcatgagcttaccatccagatagcactgcaccgcgatgggcaggtgtcggtcagttcttgcccttctccttcatgtctgcgtgctggaaaccgttccagagctggaacgcggcgaactggccctcggccgtggtgggcgtggtggccgccgcagcggcagaccgcgagccgagctgaacatgaatggtatgttgggagcgtccagtggagtagacagcctctggagctgttggtggtggtggtggtggtggccggagatgtgcggctgcgaattggactgaagggtccccctactgttaacacccaaaagaccccgaggacatgggagaagttgaggttggtattctccggcgggagccgacagccggcatcgcgtggacgggcatgaagtggtcctgcaagaacgagaagtgcgtcatatcggcgtgcggctcgccgccgccagaggcgacagtgacgggaccgtt

SEQ ID NO: 84359 - DNA, 1407 bp, Arabidopsis thaliana columbia
aactcgaaattaaccctcactaaagggaacaaaagcttgcatgcctgcagcttagctagttcatcgtcatgctcatgcgtataaaaaaaatatcaccttggctactaatggtattctagctatcagaaggaagaagaagaaggcgggggctgatagatagatggatgccaagacccggtacgtactagggcccggaggtcccctaccaatcgttggctccaattcattttcatgtggcctgtgggtgtggtgtgtgggcaacagtggttgatgaatgcgtatgcacgcacaccaccgcccgggtgatggagttggctggctggcgcgcgtgaccgtttgcgacggacggacggacgggttgggatgtgatgtgagagcttgctgcatgtgaaggggccggggatcggaggaggaggaagaggagccgcgtgcagtgcaattgaagccctctctccgctttcctttgcggccagctgcgcgaattggctcccagcgccgcaaacttggttggagtttggagctgttgccttgccttctcttcttctgctagctctgctctctcctgtgggtggatcttttccagccagccacagccagccgccacttgtgtgctgtgcctgtgcgcacgtacaggtacaggtacaggctgaggatcggatcggctgccgtcaaatcgctctggatccattggtggtggtggtggtggtggtggcctggtgggcagggccagcgtgtctgccattggcgcgaggagatcggtcgatgcacacgccgtcgtgtctgtttctggttcgcgtccaatcggccggggcgccgctggtgctggtggccgctgctactgctgctgctacaggtcagtgacactgatttttcccccatctcatccctcgttccagcgaaaaggtcacactgattttttcccctccttcttcttcttattaaatatataatatttttcgggaactttttagaccagagaccagagaagcggcagccggcccggcccaaacaaacaccgaaacaaggcaaaaaaacaaaagagaggctattatttattcctaacctatcctacgacgcttccaactacggtggtaggttacgtacgggccggcggcccgcccgcgtagccgccgggaaaaccgcgtattgggccgccatcttctcacgactcacgggcacttgggccctcctttcttggtcttccagttgttgtagcaggggcaggtctccttgttgccgtaggtgccaggcggcacgcacaggcacttggcgcagcacttgttgcagaagaagaggcacggcttcttgtggtgcgtcttggagcaccgccgccggcactccccgccgcactctgcaggtcgactctagaggatccccgggtaccgagcgtcgaattcgccctatagg

SEQ ID NO: 84360 - DNA, 959 bp, Arabidopsis thaliana columbia
accaagcgtccgcccacgcgtccgcggacgcgtggggcaaattcttgatatgggtggaggtagttgggaccgtgacactgttgttcgtgctctgagagctgcgttcaacaatcctgaaagagctgttgaatacctgtactcgggtatccctgctcaagctgaaatcccaccagttgctcaagccccagctactggggaacaggcagccaatcctctagcacagccccaacaagcagcagctccagcagctgcaactggtggtccaaacgcaaatccattaaacctgttcccccagggcatgcccgctgcagatgctggtgctggagctggtaatcttgatttcctgcgtaacagtcaacagttccaagccttgcgagctatggtacaagcaaacccacaaattctacagcctatgcttcaggagctcggtaaacaaaacccccagcttgtgcgactaattcaagagcaccaggctgacttcctacgcttgataaacgaacctgtcgagggagaagagaatgttatggaacagttggaagcagcaatgccacaagctgttaccgttacacctgaagagcgtgaagccattgaacggcttgaagggatggggtttgatcgtgcgatggtcttggaagtgttctttgcgtgtaacaagaatgaagaacttgcagctaattaccttctagatcacatgcatgagtttgaagatcaataaacagagcaaatccattcctccctctaaactcagaccatctttctgtttctttttcttcttcttttttaatatgataatctcttctccaatgccatttgacagtttcatgtttatgttcatgggagttgatgtgtttatgttactattaaaactatcatagtttatctggtttgaagaaaaaaaaaatttatcgctggccgctctagaggatccaagcttactgtacgcgtgcatgcgacgtcaa

SEQ ID NO: 84361 - DNA, 791 bp, Arabidopsis thaliana columbia
tacactatagcccagcttgacgtcgcatgcacgcgtacgtaagcttggatcctctagagcggccgcccttttttttttttttttttttacagaaaaaaactaacatttctaatataatgtcactataaatttgagaaatatattgtgtaattacaattattttcagatttattatactttgcaaattattatcgcaatcggaatttatttaaaaataaaataaaagcgtcccaaccttacttaaatatgatgaccagtcttcaacataatcaaatcaaattctcttgcaatccctctacaaagtgatcaacgtaaccagtcaataatccaggactaactaaaatctccttcaatttggtgtgggttactcctcactaacttcccaatgtcactggcctttatccatcacaggatttggatagcattgctccaagggccccccttgggaaaccatcctggtttttccctcggcacttctacagggaccctcgaattccccgggcatcaatcttgtggaggggacctggtccccttaaaatggggtcaaaaccatttggcaatcactccccaaagacccccatattggtccgggcccacaatggttcacaaagcaacctaattgaggatgacccaatatcaaaggttgttgaacccattctccccaaacaacaccacgatcttttacccgctcctcgaaccccttttggtaaccccttctttggacccgttgaatgaatccttttggggggcttttaccgctaaaagaaaaagggtaaaaccctggttagctt

SEQ ID NO: 84362 - DNA, 685 bp, Arabidopsis thaliana columbia
  unsure (1)..(685): unsure at all n locations
taatttcgtccactttaatcattttcgttgatacagcttctcccggtaataatgtcggcggatttctccgtcgcactctaaattctttaggattttgtttctcttgctcatctgtaactcaggcaagctctcgttggattgttttaggcatgaatgagtcagtccctgattctgtggaagacaacggtaattcagtccctgcaaatggattattagtattgcctgataatgatcatgaggaaggaggtgttggatcacctcaacgatcgaacagcgttgaatctcctggtggatcagtacattctacgaggaaaggttttggtttgaagaaatggagacggatcaaaagagatggtcctgtgagagatgaggctgctcctgttgatgatggtagtaagttactgaaacgtggattggctggtttggtgaatcctccttctaaacatgtagaattttcttcagttgaagcaaggcagagtagtgaagggctctgttgggtcagcgaatatggtgcatcatccaggggtagccaacgggtttagtcccgatataggttgtatgtttgctgttgggcaagcgtttgagaaaagtgaagagcatagcggtaataccataggtggaaggtttgtgggggaaggttttcaggtgcagggaacntgggtgnccccagnggctccngnggggc

SEQ ID NO: 84363 - DNA, 1203 bp, Arabidopsis thaliana columbia
ctctcttttaccttcagacaaagggctgttcccagtcaatttcctctgttctctcctccgttgcgcgatcttcttagacacttccttgacctgcaagaacgagctcgagaagcgaatctcagtcgttctagaacacgtctccgtcgacgatcttttgatcccgtctttcacctacgacggcgaacggttactagatctcgatagtgtcagaagaatcatctctgctttcgtggaaaaagagaaaaacgttggtgttttcaacggtgggagacttcaacagaggagtctgctctgtttcactacaaagagtagctaaaacagttgattcttacttagcggagatcgctacttacggagacctaacaatctccaaattcaacgcgattgcaaatcttgtcccgaaatccgctagaaaatcagacgacgatctctacagagctatagacatcttcttgaaagctcatccgaatctagacgagatcgaaagggaaaaagtgtgtagctcaatggatcccttaaagctttcttacgacgcacgtcttcacgcttcacagaacaagagattaccagtaaacattgttcttcacgctcttttactacggtcagttaaagctaagaagtggagtcgcagaaccaagaagaaagagcagtagttgttctccctgaagctttaaagacacgtagccaactgcaagctgatactacgttagctaaagaaaacgaagcgttgagaagtgagctgatgaagatgaaaatgtatgtttcggatatgcagaagaataagaacggtgcaggagcttcttcttcgaattcgtcgtcgttggtgagtagtaagaagagcaaacatactttcttctcttctgtttccaagaaacttgggaagttaaatcccgtttaaaaatgggtctaagggtactttcgcaccataggttgaaggtccttcgggggtgttgacattactaagcccaaggggacgaagattctcaaatctcttaaaaggaaccgtttgatctaaggccctttttgtgggttgtggataacccttttaggctagtgtgcttaatgttcccttcttgaagcgtgattttttttttttttgggtgtgtgtggttaatggttgcggccgcgaaatcctgcaggccgggggatcccctaggtttaaaacggccgcccccccggttgaggttcagcctttggtcccct

SEQ ID NO: 84364 - DNA, 686 bp, Arabidopsis thaliana columbia
  unsure (1)..(686): unsure at all n locations
anntctcccncctttccncgnncgttaanctagaagngnccccagaccaggaggaaggccatttttgtccccccggaccttaaagaccccgtcccaactgcaagctgatactacgttagctaaagaaaacgaagcgttgagaagtgagctgatgaagatgaaaatgtatgtttcggatatgcagaagaataagaacggtgcaggagcttcttcttcgaattcgtcgtcgttggtgagtagtaagaagagcaaacatactttcttctcttctgtttccaagaaacttgggaagttaaatccgtttaaaaatgggtctaaggatacttcgcacatagatgaagatcttggaggtgttgacattactaagccaaggagacgaagattctcaatctcttaaaagaaaacgtttgatctaagtgcttttgtgtgttgtgtataactcttttagactagtgtgcttattgttcccttcttgatgcgtgatttttttttttgggtgtgtgtgtttattgtttaatgagcttggttaataaaatgaaaatcgaaaccaaaaaaaaaaaaaaagggcgaccgctctagaggatccaagcttacgtacgcgtgcatgcgacgtcatagtcttctatagnnnnnnnnnnnnnnnnnnnnnnnnnnnnnnnnnnnnnnnnnnnnnnnnnnnnnnnnnn

SEQ ID NO: 84365 - DNA, 708 bp, Arabidopsis thaliana columbia
  unsure (1)..(708): unsure at all n locations
nnnnnnnnnnnnnnnnnnnnnnnnnnnnnnnnnnnnnnnnnnnnnnnnnnnnnnnnnnnnnnnnnnnnnnnnnnnnnnnnnnnnnnnnnnnggagaaacccaaaaaagggttaatagataaatgcgtagagcacaaggaacacatagataataagtgcagaaggaacaagtacaacaagaggaacaatagctgcaagtgcatgaaagcttctcttacattccaaaggtccaagtttaatctgaacaagatccactaacgccattgtcaagaacccacatcccaaaaccgacgcaacacacgaagcaacaatcccaaccctttaaagctgccaagtttcacacgcccctctcccgcgtttcaacacacgcgcctcctcctctaaacagttcccgcttgttggtgctgctgttgtcctataggcttgcttgagagacattacctttagcttggggaaggggaattaactgggggagtaaaatgggcttgaaaataacctttccgctaatgcgggaccttttgcaaaaatacatacgcggagatggtggttcttggaggctgatgaggaaaccgggaaagtgatggttccacttttggttaggccgaagaaaagaacaaggcgaaaaaagtgaatttaacgttttaccgatgccccgtttattaaccccgagaaccctgggaattaaattgttaaatatggggaaagggga

SEQ ID NO: 84366 - DNA, 439 bp, Arabidopsis thaliana columbia
acccacgcgtccgccaaaagctctctcatctctctcgtccgtctcctctttctccatagtttaaagcttcgtcgttccgtcaccagaatttcaactactttgagttgattctcgttggatttctcacgatgggagacagcgggaagcttgaggcaacgatagatcggcttctgaatgaagagaagcagatgagactcgccgaaaacgtagccggtacaaggaaagccgccactgagattcttcagctttgtttcgatgctaaggattggaaacttctgaatgagcagattctcaatctctctaagaaacgtggtcagctcaaacaggctgtgcaatccatggtgcagcaagcaatgcagtatatcgatcagacaccagacattggaactcggatagagcttatcaagacgctgaacaatgtacctgctggaaagatata

SEQ ID NO: 84367 - DNA, 641 bp, Arabidopsis thaliana columbia
ggcacgaggagattttggcttattctcagatttgggagaaatggcggcagaagagggtcaagtgattggttgtcacacgaacgatgtatggactgtgcaacttgataaagccaaagaatccaacaagctgattgtgattgatttcactgcttcatggtgtccaccatgccgcatgattgctccaattttcaacgatttggccaagaagttcatgtcaagtgccatcttcttcaaggtggatgttgatgaacttcagagtgttgctaaagagtttggtgtggaggcaatgccaacctttgtgttcattaaagccggcgaagttgtggataagctcgttggtgcgaataaagaagatcttcaggcgaaaatagtgaagcatactggtgttacaactgcgtaaatcagtttgaggcataaataataaggtctaatttgtttatcttaaactagctagacataacgggaatagtgcagattggagatgaagtagaagttattgatctctgactgtcataaaaccatgctttttttatatggtctttggcttttgcctaattcatatgtttaggtgttctttctatacctccatagaccaccactcagtcgaattttcagatcagtgaaatagactcttgtgaatg

SEQ ID NO: 84368 - DNA, 846 bp, Arabidopsis thaliana columbia
ggccgtctgccgtaccggtccggaattcccgggtcgacccacgcgtccgcaaagcacaaagggttcttggtgttcaaatttgaggagttcaattgcacagtggagtactacagatctccatttttggttcctcaaagcagaccaccgattggatcacctggaaaggtcaagacaagtttgaaactggacactatggattggacttcaagcaaatggagagatgctgacgttttagtgctcaatactggacactggtggaacgaggggaaaactactagaacgggatgttactttcaagaaggagaagaagtaaaattgaagatgaatgtagatgatgcttataagcgagctctgaataccgttgtgaaatggatacataccgagctcgattcaaacaaaactcaagtcttctttcgcactttcgcccccgtgcatttcaggggaggagattggaaaacaggaggaacatgtcatatggagacattaccacagattggaacctcattggcttcatcagagacctgggaacagttaaagatcctcagagatgtgttgtcacataactcaaacagatcagaaactgttaaagtgaaactgttgaacataacggcaatggctgcttaaagaaaagatggtcacccatcactctactattttggtccggatggtccctgcaccgcttcattcgcaagactgtagccactggtgccttcccggtggtcctgacaacgtggaacaagctctttttatgcattattttatgaaaacaagaaagcttctttcttttttctaaaaaaagtttaaagaagccgaaccagtacacagaaaatgtttacaatggtcgtg

SEQ ID NO: 84369 - DNA, 840 bp, Arabidopsis thaliana columbia
tgcggtaccggtccggaattcccgggtcgacccacgcgtccgaccccatcggccagagaaaatgagcaatttgggatctcgatcttctaccgacaaagagcttatcagcttctcaagatctttgttgcagctattggctcggactagttgactaagattttgaagtcgatttttgtgtatattgtgtaagataagcaaatgtcttcttctacgaaaggatctgttaagaagagttcgattaaacatagttgcaacttagctgaggttaagaggaagctttcaaagatcagtgatcatcattcacatgtagagtatgcttatgccttccagagggacaatagagaaagagtagatactaggttgagtcaaatcctcagtagggatgcgttgatatcagccgttgatttgttgtgggatcgctcgggttttgtttcactgaaagaagggaattttgattatgtatatagggatgaagttagttcacagtctcaattgtcatcgactccacagtctagggttagattattgggagtggctgaaaagatgtacagtttcgatccggataaccgaaaaagtttgttgaatcagactgatggagctaagtctgtattgtggttcttgcaaagggattgggttttcccgtcgaagctagatgggaagaccgttgtttatcttggatgggagggaggtagtaatttccaaggttcttacctgaatattcattgaaacaaaggggcctggagaatggtggaaggaaaccaacccatttttttgaaacgacctggggtttccttttaattccacggggaggccacgttcccgggctgtaaactttgtttt

SEQ ID NO: 84370 - DNA, 767 bp, Arabidopsis thaliana columbia
cccctttgaaatgcgctggccgtttgcagtaccggtccggaattcccgggtcgacccacgcgtccgagaactaggctgggatgcgattccagagctgcttactaaatgtccacatttggaaaccctcgtcttggaggggcttttccacttagccacagatgtgtgtggtgatgtgtgtccctgcaggaggaacatggagcaggcaatctcttacctagtaaaatctcctgttactcacctagagatatacgaaggagttgttgggaaaaagagaggagaagttactgaggatgcagcccgatttggtgagcaagtacggtggtttttgatgagaatgctacatctccaacaagtgaaaactatatgggcaaccagaaggtagcgttaccgctcttttcggccatttgccactgaactttcggagacttgaagggaaagctttcccaaatgttcagatatctgtactccaagcttaaacaaaggcgtgttgtacagtaattgtgaccaaagttgaaagtcttttgcgtgcctataatgaattaaccttattgctctgaaaatgcatcttgttcttaagggaatgtaattaaagggaatttttcccaaaaaaaaaaaaaaaggggcgggccgttttaggaggatcccaagcttttccgtaccgccggggccttggccaacctgtcaataagctttttttcttgtttaagggtgcaaccctttacaatatccaaattttctacctttgtgctctcgctcggtgtttttta

SEQ ID NO: 84371 - DNA, 947 bp, Arabidopsis thaliana columbia
  unsure (1)..(947): unsure at all n locations
acacaacacacccccctatcacatctccccctcacaccgtacccggcatccccaccaacccacgacaccacaccaacgagtacacaactcacccccccccccaggcggagcaanaatgatggccgtcccatgtaccgtccggaatcccgggtcgacccacgcgtccgtttggattagcttgatatcgaattctcggccgcgaatggtgtaacgactgccccgctgtctccgattttttctttttgaaattgaattctccgtgaagatgcggagtaccaacggctagacggtaagaccccgtgcaccttcactatagcttcgcagtgacaaccttgatcgaatgtgtaggatacgtgggaggtcgtgacatagaaggaccaatcctgaaagaccactctttcgtctaagggtgcctaaccgccgcaccgagaattcggggggaggcgggacactgcgaggcgggtagtttatctggggcggatgcctcctaaagagtaaccgaggtgtgcgacaggtaggctcaagctaagattttgctcgtgagcgcaatggtataagcctggctgactgtgacaccgactggtctaacagagannnnnnnnnnnnnnnnnnnnnnnnnnnnnnnnnnnnnnnnnnnnnnnnnnnnnnnnnnnnnnnnnnnnnnnnnnnnnnnnnnnnnnnnnnnnnnnnnnnnnnnnnnnnnnnnnnnnnnnnnnnnnnnnnnnnnnnnnnnnnnnnnattctgcggttggaagaatggtccacaggggtttgggttgttccgctcgatttcaagatggttaccttgaagtttggggcttttttcaaccgctacggggaggaccagggtnttgggtttccctatatctttacccggtcgtggttggtttcagaagggggaataaaactttgccatagtggagctccaaaaccccttttattctcta

SEQ ID NO: 84372 - DNA, 1193 bp, Arabidopsis thaliana columbia
  unsure (1)..(1193): unsure at all n locations
acgcgcacnnnnnnnnnnnnnnattaaaacatctcactctttatctccctcacacctcagccttctgtgttcgtcttccacgcgtccgcaaatctcaattttggactcgtctgcttttgtttatataaacacttctcttcttcttcaatctccacacacaccacacaaaaccacctaccttcttcgatttctccagaaatcctccttcaagttcatactcatggaagaagctaaagtggaagcaaaagatggtaccatctccgtagcttctgcattttccggtcaccaacaagctgttcacgatagcgaccataaattcctaacgcaagctgttgaagaagcttacaagggagtggactgtggtgatggtggcccatttggtgcggtgattgtgcataataacgaggttgtcgctagctgccacaatatggttttgaaatatactgacccaactgcacatgctgaagtcaccgccattagagaggcatgtaagaaacttaacaaaatcgagttatcagaatgcgagatttacgcatcttgtgagccatgtccgatgtgcttcggagccatccatctctcgagactcaagaggttggtttatggagccaaagccgaagcagctatagccatcgggtttgatgacttcatagctgatgctttgagaggcacgggggtttaccagaaatctagtctggagatcaagaaagcagacgggaatggcgctgcgattgcggagcaagttttccagaacacaaaggagaagttccgtttatactaaagcacttctccattaccacattcttcttcttcttctccttcatgatggtaattagaagtagtagaagaagaactgcacttgctttaacttaaataaatctctgtttcaaattgttcattttaaaaacagaaggaaacgaaaaaaaaaaatcaatttcggttcttgttgacacgatttgtaatttcttttcttcatttgaattgaactggtaaatactttcttctctgtcaaaatctttattttctattttctgtacaaggccaagttcttcactaataaatcgaattgtttttctaaaaaaaaaaaaaaagnnnnnnnnnnnnnnnnnnnnnnnnnnnnnnnnnnnnnnnnnnnnnnnnnnnnnnnnnnnnnnnnnnnaaaggagtgtacagcctttcaaaccgtgggggcgcgg

SEQ ID NO: 84373 - DNA, 832 bp, Arabidopsis thaliana columbia
tggctttccgttgcagtaccggaccggaattcccgggtcgacccacgcgtccggcggatgaagatcttgttcatcgtaagatcttcgttcacgggcttggatgggatactaaagctgattcacttatcgacgcttttaaacagtacggagagattgaagattgcaaatgtgtggttgataaggtatctgggcaatctaaaggttatggctttatcctctttaagtcaaggtctggtgctcgtaacgctcttaagcagcctcagaagaagattggaactcgtatgactgcgtgccagctggcgtctataggacctgttcaggggaaccctgttgtggctcctgctcagcatttcaatcctgagaatgttcagaggaagatttatgtcagtaacgttagtgcagacattgatccgcagaagttgctggagtttttctcaaggtttggggagatagaagaaggtcctttggggcttgatcaagctactgggagacctaaaggtttcgctttgtttgtctatagatccctagaaagtgccaagaaggcattggaggagccacacaagacttttgaaggccatgtcttgcattgccacaaagcaaatgatgggccaaaaccggttaagcaacatcaacataaccataactctcacaatcaaaattcccgttcccaaaggaacgaccacaatggttatggtgcccctgcaggccatggacatttcatagctggtaataacccagctgtgcaggcgtttaatccggtcattgggcaggccctcacaggtttggttggcatcttaaggtgcttgggttgggtttaaacccaacctttggg

SEQ ID NO: 84374 - DNA, 531 bp, Arabidopsis thaliana columbia
  unsure (1)..(531): unsure at all n locations
tctacgactcacttactggagagctgacacgcctgcaggtaccggtccggaattcccggngctacccaggcgtcctgaaacggtgacggtacacatgatccagtcctcagaatctctaggaatggtcatgaagcgagagtatataaaagacgacgagcaccacatatctctcggcaccgccctgggtgagatattgaaacacaatgagccctccccatctctatgcacagtgctgggcgagatgtctaaaaacaacgaggagaaggaacatattttttcggatctagaacgaggaacaatgctaacaagaccaatgggcgaaggatatattcaatatctacggctttctaaagagacgactcaaccggcggattctaagattcccggtctttggtcttcttccgttagaccagagttttgttgcatctatagagtaccagaccggttacgcaaagtgaaccccgaggcttacactcctcaaatgctgctaatcggacctcttcaccattccaagaaagctgaagccctcaa

SEQ ID NO: 84375 - DNA, 804 bp, Arabidopsis thaliana columbia
tttgcggtaccggtccggaattcccgggtcgacccacgcgtccgggaagacattatgcctgagattctcgatggtcacaatgtggctgacttcattgatccagacattttgcagaggcttgcagagttggaacgtgaagaagggataagggaggctggggttgaagaagctgatatggagatggatattgaaaagctttcggatgagcagctgaagcagctttctgagattagaaagaagaaagctatactcattaaaaaccacaggctcaagaagaccgttgcacagaaccgatcaactgttccaagaaagtttgataaggacaagaagtacacaacaaagagaatgggtagggagttatcagctatgggacttgatccgtcttctgcaatggaccgtgcaagaagcaagtctagagggaggaagagggatcgatcagaagatgcgggtaatgatgctatggacgttgatgatgagcaacagtcgaacaagaagcagcgtgtgagatcaaagtctagagctatgtcgatatcaagatctcagtcgaggcctcctgcacatgaagttgtgcctggggaaggattcaaagactctacttagaagttatcggccctttagattaggcaataaatcttcacaaaaaggagagaccatgaaatggcaccgttgttgggtgaaagccttgaccagagtttaattcccaaaccgcctttagaacccggaaaaccatttttggttttttccagggccaagagaagaaaggcgataaaggggaaaaaataccccggaaccaggggtccgttt

SEQ ID NO: 84376 - DNA, 873 bp, Arabidopsis thaliana columbia
atggccctttgcggtaccggtccggaatttccgggtcgacccacgcgtccgccaagttacagtccaacatcaccaagctacggtcctacgtctccaagctacaaccctcagtctgctaaatatagcccatctatagcttactctcctagcaatgcaagactatcaccagctagcccctacagtcctacatctcccaactacagcccgacatctccatcatactcacccacatctccatcttattcaccttcaagtccaacatacagtcccagcagcccatacagctcaggagcaagcccagactacagcccaagcgcaggctactcgccaacacttcccggttattcaccgtcatcaacgggtcagtataccccacatgagggcgataaaaaggacaagactggaaaaaaagatgccagtaaggatgataaaggcaacccttgaaagagagtgagaattggcaatccatgttttaggtcatgatttaagagacagtgaaagctgagaaaaggaagggaccgtttcaaagtgatcttctgtggataactttgggaacaaggttttcttaatagatccttttttcgtgagttgtatattattccaaactgatccataaatgcattcaatcctcatccgccaaaaagaaaatagtataaacatagaaaaaccgaaacctattaaaactttgggcctttttcgtatgggttaagctcttgggctttttggctggggtggctcctattttcaagaaaaggaaaacatggggaaaaccgggcgtcattttggttaattcccatggaaaggggaattctctttattggttatcttggcctggttggcctttcaatttggaaggtaggaattacgcaaatc

SEQ ID NO: 84377 - DNA, 811 bp, Arabidopsis thaliana columbia
agtaccggaccggcattcccggttcgacccacgcgtccgaaaagagaaaagagatagcctttggtcaatgatcaaagacaatatagggattgatctcacaaaagtctgtcttcctgtttacttcaacgagccactttcttctttacagaaatggtttgaggatttggaatattcgcaccttcttgaccgagcatttgaatatggcaaaaggggaaatagcctcatgaggatacttaatgtagctgcttttgctgtatctgggtatgcatcaactgaaggaagaatttgcaaaccttttaatccattgttaggtgaaacatacgaggcagactatccagacaaaggccttcgatttttttcagaagaggtcagtcatcatcctatggttgtcgcatgccattgtgatggcaccggatggaaattctggggagacagcaatcttatgagcaaattctggggacgatctattcagcttgatcctgatggtgtattgactctgcaatttgacgatggagaaatccttcagtggagcaaggtgactaccatcaatatacaatctcatacttgggaaactatactgtgatcactatcggactatgcgttttgagggtagagcacaatactcatgtaaacttaaattcaagggagcggtgcctcataaaccgaaatcctcatcagggtcatgggtttagttcaaaacaagaaggggaaagaacagtggccaccttttgtttgggcaaatggggatggagaacccttccaccttttgtggaccggggcgacctggtcccttggaaaaaaagggaaaatt

SEQ ID NO: 84378 - DNA, 843 bp, Arabidopsis thaliana columbia
ccgtctgcagtaccggtccggaattcccgggtcgacccacgcgtccgcctggataggtgcatctattgatgttaatttgggtatgcaaacttcatttagttaatgggtatgagtaagagaaaaaagttaatttgggtatgcaaaacccattcatttaaactcatttagggaaaaaagttaaatggggctaaatgggttacccaaactaaactcatttattaaaaagttattttcaccgttactacttatttcaatttttctttcatcaactggcaaagtggactgggccaatcacattttagccatttgagctgaacttgaccaaaatacccttcaacacaactgcaactgtgactattcatgttcagttgatttgttttactggttacgcttttattttaaaaatttataataaaatcaaaactttttgctgcagaacaaatgtttcaaactaaaacccagatttgtgttcatgtataattgaaatcgaaaaaaatgaaagtaaattccggtgagaaagcaaatgttctttcgaaagaattgacttaaccaatggattattaaacaaaacttaaactctttagctttttgaatttataatatgttaaatgtacaatatttagatgtattaagcattcaaaacgtaaatctaaaaaaaataagatttttgagataatgttacaagctggtgaaaaaattagggtacagaggttggagaccaatggtaaaattacaattattcccctttattaaattttcttatgggggacggaatttattaatttaacagggggaccgtcccttgtagaacatgttaaatattggttagaattaatggtttat

SEQ ID NO: 84379 - DNA, 801 bp, Arabidopsis thaliana columbia
  unsure (1)..(801): unsure at all n locations
ccggttctggaatcccgggtcgacccacgcgtancgaaacgatacaacattatccggggaatcactcgaggaatgttgtatcttcatcaagactcacggctcacgatcatacatcgtgacctcaaagccagcaacattctcctagatgcagatgtgaacccaaaaattgctgattttggaatggcgagaatttttgggatcgatcaaagtggagctaatacaaaaaaaatagctgggacacgcggttacatgcctccagaatatgtgaggcaaggtcagttctcaacaagatcagatgtttatagtttcggagtcttagttcttgagattatatgtggtcgaaataacagattcatccaccagtcagacactacagttgagaatttggtcacatacgcttggaggttgtggagaaacgattcaccattagaactcgtggatccaaccatttcggagaattgtgaaaccgaagaagtgacaagatgcctccacattgcgttgctgtgtggtcaacacaatcccacagatcgccccagcttggcgacaatcaacatgatgctcataaacaattcgtatgttttacctgatcctcaacaacccggaattttttttcccataattagcaacccagaaccagatggcctcgactctttgaacaggtgccatccacaaactatcaatgatggcacccttaccgaatttggaacctcgggtgaaaggtggttttttccggggaagacatttgttcccatctggaaaggaacaatggttttcttaaggaattctttttattcaattccc

SEQ ID NO: 84380 - DNA, 810 bp, Arabidopsis thaliana columbia
  unsure (1)..(810): unsure at all n locations
caaggaaaaaccaagccttatgggccccatttatttaccgccccaaaggctttttaaattacggacctccacttatatagggaaaaagctgtggttccggcccttgcaggggtccccggtcccggatattccccgggttcgaccccacggcgtccgggcaacaaaaaaaaaccgtcccttaatgacaactcatgctttgcactcaagctttaagctagctaaacctatctcgcgcactactagaattcaaaataaaactctataaatagaaaccctcatgagatctcttctttcctcatatacactcatacacaccacgtgaacaatctatctctctttctattgcttttctatatatacagaaactaattaattgtatctgtaatggctaagttaagcttcactttctgcttcttgttgtttcttctgttatcctcaatcgccgctggaagccgccctcttgagggggctcgggtcggggtgaaggtgaaaggcctaagcccttctatcgaggctacgagtccgactgtagaggatgatcaagctgcgggtagccatgggaaatctccagagcggttaagcccaggaggacccgacccacaacatcactagttattttgtgtttttcaatttcttcgagatgtttattacttatcaataatttggttgcaacgaagctgtttttcttttttgtaataaatttgcgaatttacgtttgtcataataaaaaaaaaaaaaaaaaaagnnnnnnnnnnnnnnnnnnnnnnnnnnnnnnnnnnnnnnnnnnnnnnnnnnnnnnnnnnnnnnnng

SEQ ID NO: 84381 - DNA, 881 bp, Arabidopsis thaliana columbia
aaacgcaagcttgcatgcctgcagctgcgtgaggcccatgagcgtcttgagcgcgtgcgagtagttggagaaggtgtagttgttgccggagatgcactgcacccacaccgccgtcaccagccccagccaccgcccccagcgcgtccccgccattagggcctttccttgcttgcttcgagttcaatcaaggtggcgcgcgtttggtcgcttggtgcttggccgtgtgtcccgaggaggaggaggaggaggtacggaagggccggtggaggcgcgtcgctttccggtgcgtcgggcgggactcgagcattcgttcggtctggtcggccgtaggagcagggccggtggttttatcagcggctgagagagggagggtacggcttttcttggagtaatttattggtttttagaaagagtatacaagcgattattatatgattttgatggtttttgaattgttatggaaggaagtgtcatggttttgagttttgatgtttttttgtttgagcccttgaccctaggctgctggtaccatcaccggaagcgaagcgtgcaggctagttcccgtccgtgtccgtcaagcatcggcaagcccgctcccaaacatctgcatgagtagcctacctacgcaaaagcaacacgcacgtctccatctgccctactgcggcctgcctgtcaacagcagcctaaattaataaacaataataataatatactgaaaccaaaacacacacggttcattgtgcggcacgaaaatggtttgctttagttcgtcagaaacccgtaagcatctcccaaaggtaatcgggttcaggacgtgccgccaagcatgtccaatcaaaccttttccctgcaggtcgactctagagatccccgggtaccga

SEQ ID NO: 84382 - DNA, 771 bp, Arabidopsis thaliana columbia
gcaagcttgcatgcctgcagcagtgagcagccgcagctggtgccgcacttgcaggtgttgcagtcgcagccgccgccctcggtggccgcctcgaagccgccggcgctggccttggtggtcggcgcggcgaggaccgtggtcttgacgctgctggtggcggcggtctccacgtcagggtacataccgcagctgcatgcatatgaccggatggatcactcatataatcacatgtacacgttcagacgccgcacacacaccaacaccatcatgcgtcgtctacatactcgagcgtctctactcaattaacacgatgtgagattatctattattacccgttgcatccgctgccgcaggagcagctggagccgcacccgcacttgccgccgcagcaagacgacatgatcacaggcgaagggaggaggtgtggttcttgcttgtgctgctgccttgttgcttttgcttgtgatgagaggatggcagggtggggagaggggtataaataggcgggggtgacgaatcggagtggagtgaacggcgcacggcagccggtggccggaaagaatggatgcgggcgggcgagccagggaccaccccccacggcccgacctgctctgctttgggagcaggaatacggatagagtagagagacacgagcctctctttccctgatctttttggtttttttttggaggcagagccagaggtaggaccgtaggagcaagggggaaaagagaatcttgctgcaggtcgactctagaggatccccgggac

SEQ ID NO: 84383 - DNA, 1188 bp, Arabidopsis thaliana columbia
cagcttgcatgcctgcagagctgtgcagacaagtgttgacagttccacgggttgcctctgaagctctcctctctctccgtccgctgaccgagaccacctgacatccgaggcttccatcccagcagtagtgacgcgtgacgagcagtgaacccgcaccaacatcacgtcacgttgaaagcagcagtcagtttgggggactagtcggacgccagtgcagcaagcaaaccacagggaagtgttcctacttccaacgtctatatgctgctgctcgcttcatcagacctgcgaactggttggcagttggcacaacggtcgtcggattacggattgcgcgtgtcccatggccatggccatgccaaatgctgcgtcgcttcccctggccctgtccatgccactcgtcgtactcgtagccctcgcagcggcaaaaggaccacacggtttccgcagctctatcagcatcccaacgaagggaactcccaggaactttcgccaacccgtgcggcggcaaaatcagctgccagcctgccacctctacgcgcgggcgcggcgcccgctcccgctcccgctgggacgccacgccaaggcacaccaccaccaccctacaaatacgccccgctccgaacactggaacgaccacatagaccaccacgacacccttccccacaccagcagtcgagctgagcacgacacaaagccggctggggccgcctcgccatggcgatccggatgaccaacaacgtgatcggcgcgctgaacctggtgacactcctgctctcggtccccatcctcgtctcgggaatctggctgcggtcgcgcgccgacggcaccgagtgcgaccacctcctgtccaccccaggcctactgcgctgggcgcggtgctcatggcctatgctgtcgcgggcctcgccggcgcctgcttccgcgccacctggctgctatggctctacctcctcgccatgctcgtgttcatgcggtgcgctgctctgcttcaccgtcttcgccttcgccgtcaccaacaggggcgccggtgaggccgtgtcgagggcaggctacagggagtaccgcctcggggactactccacctggctgcggcgccacgtcgaaagccgcaaggactgggcccggatccggagctgccgtcgcctacgcgcacgtctgcaggtcgactctagaggatccccgggtaca

SEQ ID NO: 84384 - DNA, 944 bp, Arabidopsis thaliana columbia
gcaacttgcatgcctgcagaactgaaacgtgtggaattcgttcatttttatggttgcatttggggttttgattgtttaataaatctggtgcccatggccctcacatcatgatttactgaaatatttccttgtggtgcagctcggttctcaccagatgacaagtactctcgccagcgatacctgttgaagaagagatttggacttctgccaacgcagaatccaggaccgaagtactgaagcttcaagtcaactgtccaacctgcgatgttctttttgtgtcaatgcttgttggttggaatgtaccatcttcgttctcgaatatttgtggtccgttagttcaattttgaactaaaccgcgacaaataaaaaagagcggagggagtagaatataggtatttctgagaactgaaatcaaacactggtaggcactactatgtcatcctgcatcacattctgtcactacatgtaatgctatttttttttggactgttgacatgctttattagttactgcttattcaccatgttcttgtttcctgtgataaaatatggcaacggaaattggtaaggtttccgtctatgcaacgagatcctcttacccgttgcccacgggtgtgttcacgggtgcatctattggttgatgaaaatcaatttggaaatgggaaggaccttcacctttatgggcgttgcatttattggaacgtgtaaacagacaaaatggtggagctaagacccatttatgtaaaaatcacaagcacagtgcacattggttcattgccctcgggatctgtatgctcaggatgtgccagtttttacctataaatgttaaacggtaaatgaccactcatttgtccatttggcgtttacttggtgtaaataagttcggctgcacggtcaagctgcgcccggctgcaactgcaggtcgactctacaggatcccgggac

SEQ ID NO: 84385 - DNA, 869 bp, Arabidopsis thaliana columbia
ccaagcttgcatgcctgcagtactgctgttctgacggttcagcttactgcacattagcatatcacgactgttaagactaattgctatcccaatgggctatattcatgataagacttagtgagctgcactttgtgcccattctattgatcatatgatttgttgttggcatctttcatgaagcaatacattggttcatatgactgagcaaaatggcaagatgttacattgtatattaggatggactataaaatatatgtcactcctgctgctcttttggttcagctgcctgcacatgtgcacattacgttgaaaccacatttttggtaaagcaatacatcataccaactgtatgaccgagcaacatgcctgaatgttacataccatgcataatggccgtcttttgggatatgtccttcagtcattgcattttggaacctctagtagttacttcaattgtgaccttaatccttggtttgcttaacaactaactgtcctagccatatatcttgtcacaagcactgtgtgccattcaatttttttattgccattcaatttttttgatttgccaaataattcttacgtacctaaatgctctattggtattaggtgtcaactcaccacatggacattgatagagctgttatgcagacaacagcttaccatattgggaaacaaatagagagcctaagcctataccctgcaagatgatcatattaatagcagataaccatgtgtcatgtgtgcttgtattagcatctttgccatcgtgttatatcagtttgggtgtccgtggcctaggtcatattaatctgtgaaaataattacaatctgttaagctgcaggtcgactctagagatccccggtaccga

SEQ ID NO: 84386 - DNA, 753 bp, Arabidopsis thaliana columbia
agcttgcatgcctgcagtgataaaattcaaagtacagaagtacactgattctctacactatcttatggtttgttggtttcaagctgctaacacacactatctaatgcaaatggtagttacagcatgacacgacaatctaatttaaatgcacagagtgatgatatttcaggcatattgttgggttttgctttgatgggttattttgattaggatggaaaattagggcagtgtttggaagggcttctgctcccagattatcaatccagagcagctggagctggagctcattccaagcactgatctttttcccactttcttttgattatcattacaggaatagctctaagtatgatgatcagtagcacagtaatagtttgataggaatatatgctgtgctcactgagctttcgtgctcacatgagcactttaaatccggtatatcatgatcaatccaacgaggccgacaatgtttcacttatcccctcccacctcagctctgatggcataggaggtaagtgaaattggattgctcacggatacagaacatttaaagtggtaatatgaagcccgggagctccatgagctcataatatgtttcctagtttgatcgtagatgcctccttgttgtactaaaaggttttatgaaacttgattacctacagggttgcagttatatgatttcaaaatctttatctttgcaattgtagtctaggtgatgtggagaaactatgattaaagtctgtacgaaatcgt

SEQ ID NO: 84387 - DNA, 880 bp, Arabidopsis thaliana columbia
tgcatgtctgcagtactacggtcggcagtggcaggttagcgaatcgatccctaccacagcgtgcacacctccccggcgccgtcgaggttccacaggctgccccacgtggcgccgtcctcctcgctggacccgtactcgtcgctggccgtggagccgcagcagctgccggtgccggcctgtccgccggcgccgtggagcacgaggaggtcgtcgcagcaggacatggggcacaagaagcaatccatggcgtcgtgcatgaccaggtcggccccggcttcggtggctaccgacgtcgtcgtcggcggcgccgcgcacgcgtcaccggtcgcgctgccgcagtcgttgtcgccggacgccgccgtggcgccggtgatgcagccacgcgccgcggcgctggtccccgccctcgtcgaggtgcaggtgctgccgcccaagagactgctgctgcatcatcatttcccggcgctgcttgaggaaccgggctctcgcgcgctcaacgttcttggacggcttgcccttcttgaagtgcgtccgccagtagttcttgatctcgttgtccgtcctgccggggaggctgcgagcgatcgtcgaccacctgcttatgcacgtcgtacgacgtacagtacagtactataatgagtaataaaactacacatcagatgccaaattaagaactttatttagtgcatcaggttcgttcgatcaaatttgtttgctttcatgataaataaaagctgggtaatttactatatatacctgttcccccacaaagcatggagctggactatgacgctctcctcttggggtgtgatcttacaccgtttcagatctggtctcaggtagtgtcctaccgcagcttgcatgtcgaggtttagagggg

SEQ ID NO: 84388 - DNA, 1055 bp, Arabidopsis thaliana columbia
gcaagcttgcatgcctgcagtaaactagatatctgctcatagagctgatccataaaccttaaaaaagcttcaccgctgagatctcgggcttcctcctcaacatgtttacggagcgcggcaccaataacatcctagggccaatcaaaaaacacaattacatataggtacagaatacataaacaaaaaagagaatagagtgtacagatcagcatgaagtatttgttgacgccttgatggaacaaaagaatcatgccaaataacaaatagttcagaggtttagcaatccagaaaacttaaacctggaaataaacccttaacgtaacaaggttattgaaggagcgttacaatcaacatataacgcatatataccaccaaagcggaaggacgttaccagtgcagataaaccccatgccttgcccccacagttactagttactactgtgacatagagatagaatcagcaggagcaacaacagcaagtaatccagccagtactgattatgaagatcagaacagaaaccgcgcacatccatccaccaccggcggcactagcttcatggcctactgagcaacaaagaactattgctaatgcgcacactaatttatccaagcaaattagcatagcattccccaacaaacccaaaatagagcaaaaccctagccccaaatctagctgttgagtcaagctctaatcgagacgcaaaagtaaaggactcaggaatctgggagaggaggaaagagatgcacgtaccgctccagacgagatgtaagccgcgatgttaaatgtgtggtccttagcaatcaaatctgcgtacaagatggaatctctattattttcagcgaaaccaagggattccgtgagcgcatccgagggaggaaggtgggcgtacctttaggcttctttccgatctccgggaagtgcggcgagggtttcatggcgatgttggcggctgcaaggccggcgcgccggatagaggcgggggcaggggaactgacaagggtttaactacgcgaacgcgcactgcaggtcgactctagaggatccccgggtaccg

SEQ ID NO: 84389 - DNA, 897 bp, Arabidopsis thaliana columbia
ggacattcacttgctgtttgcggggatgattctggtgaccttatcggcgttcctgccgacggacacggtgctcggcggctcctcggtgttcggcgcgcacacggtagcgttcgtggggctttacctcgtcgcgatcgggagcggcggggtgcggtcgtcgctgctcccgttcggcgcggagcagttcgatgacgacaatgcggcggatcgcgagaacaagctgtccttcttcagctggttctacctctgcgtcgactttggcccgatcgtctccggcctgttcatcgtgtggatccaggagaacatcagctggggcctcggctttggcatctctaccgcctgcatcgcgctggccttgggcgcattcgtgctcgccacgcccatgtacaagcgctcgacgcccaccgccggcaaggtatgagtcggctctagctagcgtgcgcagtccaataccgcgcgcactgacgagtgacgtgacgactgacgagttctcgttgcttggcaaggcgtccgtcatctccgactccgagacgggcttggaagcgatatcggaggaggcgggctcgtcgcagaagctccgcgccgcgacgaaggcagaggagttcaagacactgctggggcttctgcccatctgggcgaccagcatcatcgtctcctcggcgtacacgcagatgaacaccaccttcatccagcaaggcagcgccatgaacgtgtccgtcctgtcggtgcaggtgccaccggcatcgatgggctcgttccaggtggtctgcgtcctcatatgggtgctgctgtacggccacgtgatcgtgccggcgctgaggggatgcgggttctcgttcggcggcgacggcgaaccgtctcagctgcaggtcgactctacaggatcccgggacgaga

SEQ ID NO: 84390 - DNA, 988 bp, Arabidopsis thaliana columbia
gcaagcttgcatgcctgcaggcaggtggagaccagcgacgggcggacggtgagtcctctcccccgtcttgttcgattcctccggggttctcagacctgcattcccctccgggagaagaggactggttcggacgcgttcgttacggtcccgggggttttattaatctgcttctggttcttcggttttgtctaccggccgctcgtgagtttctcgatcgattcttcgggtgcgacgtagttgtttcttcgatttttattttttgtttctggatttttcttttctgtgagggttttaatctctgttgttgctcttttttttcccccaactagggacatatactgatcatgttagtttttgttttctggtttttctccccagtgcttcatgaggagtgtgccgtgagacaactctgcgagtcaagaacaactggtgaggcaaaggtgagaatgggatgatgattgattaatcactaaggcctgacttgcccttttgttttgcttggattctctgagtgatgactgcccatatgaattgcttcctactcctctcatgctttgttcactgaattaatatatgttgcttacaagcgaagaaatctattattaaaacaaaaatagagaagatgctgcgagttcattaaaccctatcagtccgtctgttgattgcgtagtatcgattgctgctgcttgtgaaatgatttcctatccataagggaaaaaatgattcatttaattctgttttgatacggtcaagatcttgttctgaaactgatagcatgagttaacttgtctccagaattgtggatgttcaaactagtagtggtaaataagtcaaactttaccaagttagtagaaatttaaaggcgatgccacatgtctaagttattgactccaaattaatgcagcgaagaaagccgagaggggagaccagatggcaactgattcctcagctctgcaggtcgactctagaggatccccgggtaccgaca

SEQ ID NO: 84391 - DNA, 796 bp, Arabidopsis thaliana columbia
caagcttgcatgcctgcagatccagagcacaggtgctgttgatctgatcttgaggtgtcaaacgcaaatcctctcgtgtacctccttggcttgccttgtgtcattgtgtgtgtgtgtaatgagtgcaacttttggccaaagctggggcggagtggcccaaagtgtcttccctgcccccaagttttttcgtcgagagattctctcttccatgatggtgttgtgacgacgcagtagctaacccggggtgccggggctaatggtaatggctggctgcttgcttggtgactactggtttgtggggggtgaaaatggcgttggcgtggaatgaagggcatcgatctctcgtggaaatttggcctcccaagttgccagaaaactgtggcgtgaccgtcgacagatcattttcaggccgccctgtgatagaatagatcgcagagagtcaaacgagacttgactgtgttgggacagtgcagcacagcactccagcgagagttctgaatgcagacggcaactcgcgtgtttgcagagaggggatggagagccgtggcatcattctggcgaaggaaccgcacgagcaaaaaggatgtgatgctcgaaagcgaatttgacctctccctgccccgtgccttgctcttgcaccatccaatgcatgccaagaaaaccctaaagcttcatcatgcaatgcaatgcaagcacccggcccaagaaatcaataatgcatgcatggccatttctgcttttggcgtgtatatttatttaccctgcaggtcgactctagagatccccgggtaccgac

SEQ ID NO: 84392 - DNA, 830 bp, Arabidopsis thaliana columbia
  unsure (1)..(830): unsure at all n locations
nnnnnnnnnnnnnnnnnnnnnnnnnnnnnnnnnnnnnnnnnnnnnnnnnnnnnnnnnnnnnnnnnnnnnnnnnnnnnnnnnnngcaagcttgcatgcctgcagtggcgagaatgttgtcaatgcaagcccaattcatgtgtcttctctgactcacgcttaggttgtttcaaaaaatttagggttaatttattagtagtctgttgtgaatttagaattttttaggaaacgttttttacatcagcccctaatattaagttttggggaacaattttatagcagtcttttggagtcgctctaaacatgttaattacaattgagccctcctcagacacaacaagatcatctacaattaattcacctgcaattcacttgcatttggatcactgacttataggcccgatctagaataagggccctttggtagggctccggttcctctaaaaatagggttcctctaaaaacagtttcagcactgactcccctggctctttggtttctctaaaaaatcagaaccactttaaaattcatttggtaaaacagttttcttgtgtttattttaaaagatgtgtgagtaaaatgtaggaggatccgttagaagccatattttttgtgctctttcttttttggagggctttcgataaaaagctattttttatgatcgtttgatagagcttgaagatgagccagcgttagagccgttcaaagaggcattgccaaaagggctctcactctaaataccagtggcctgcaggtcgactctagagatccccgggtaccgacnnnnnnnnnnnnnnnnnnnnnnnnnnnnnnnnnnnnnnnnnnnnnnnnn

SEQ ID NO: 84393 - DNA, 823 bp, Arabidopsis thaliana columbia
  unsure (1)..(823): unsure at all n locations
tcgggctcgtatgcggtgtgcaattgtaaccgaataccaatttcccacagaaaccagttatgaccatgattacgccaagctggcatgcctgcagggttatgctagttagattttgcagagaaaagttcaattcactcggtttccctgagttattgttacacttgtagttacttaattatttgactttaggttatataatgttgtggcctcacaggccctcactacatcatgagtcctgtatcttatttcattttggtaataaacttgtaataatatcccatgatttggcattttgacttcatttagctgaaccaactgtaacctaacttatgaccccctgtgttaatgtcttaatgaagcttctgtagccaagggtgggttgagggaggcttttgcagatccagggttaggttatgttgatattccaaatgcacagataagaaaggtaaattttgatggccagaatgttaggcatcattttcatattagatgataacagcctgagaatgtattgaccttctgttgtcttcaggttactgcaaatcgcttgctagcatcgaaacagaccattcctcattactacttcacagtagatgcacgtgttgacaaacttgtccagtatgtttctaacctaatttgtgatctacagagccctttttgttggcgaacagtactgattactttattacttctagctatgatttccttgtgtcactctaatcaacaggttgcgaggtgaactgaacccactgcaggtcgactctagaggatcccggagtacgagctcgaattcactgggcgtcgtannnnnnnnnnnnnnnnn

SEQ ID NO: 84394 - DNA, 797 bp, Arabidopsis thaliana columbia
caagcttgcatgcctgcagctcaggaagcagcaaaatgaagtggcagtcatgcattggacccagggcgggagaggagaggacaaacccagatccgccgcaccgcacatcaactgaccaccgtgtctaatgtgtccatacggtggtggtccgttcgtggaacgaacctgtgtgagagagagagagagagacgtctgagccgacaacaggagctgggccagtcaagagccggagtgcctgagactagccagctcctaacgcgacaggcgcagatgcagatcatgcacacctgctcccctccccttggactgtttgtccccctataccagctccatgtagttggtggttgaagcagggcacatgctgacatgccccgtgaccgtgccgttgtatcacaataatgccaaggagatggtaccttagcgtaaaccttctccagtcagcaattagtgttcgttcgttcacagactcgccatcgttattgattgcatgcatatttggtttgctcaactctgctctgacggctttctttttcccttcagctgatgcgctggtcaacactggtctggcgaagctgggctacgagtatgttaacataggtgcggactgtgtgtgaactcaccaaccttatttcgtgtgtgtgacgccgcagtagttcatagcctagtgcttatcttgaaggcttattatccatatatatcttctttcagatgattgctgggcggagtctgacagggactaccaggtaaagcggatcaagtttgcctgcaggtcgactctagagatccccgggtaccga

SEQ ID NO: 84395 - DNA, 1091 bp, Arabidopsis thaliana columbia
atggcctttgcctgcctgcaggctttcgacctctgcgaggctctaggtgaacgacgacaactgcaagatcgccaagaacgcggtcgacttggcccggacgctcgagaaagcgtagaattggattgggctgtcccccccaaaacatgagatgagattcgccatgggttttgattcagcacctgctcgattggtcgggtgttggcctcattgtacagaggtagcaacagcaaaggtgaaccttttatcttcttctcttactccgtttcatttccatgttgtagctgcaccgaaaggaggacaaaaaaaacagtagaatttagcttatgttcatatggttagaaccagagagagagagaaaggagtatggttcctgaacttgtcagttagaactgctttccatgtttcagagagtgaccagaccatcatccagtctgagatgttgttcacaatggttcatctgatgatgtagtgaaagtgagaccaaatgatctggagtggctcacgatcaaaagtaggatcgccagtcgtttttttctctcccccttgcttcactgtgctctacagttttacattgagaattggattgtgtgtgtagcgcctatcacctccttatggctcgtgataagaaatcaaaactcctgcctgctcagaaagtcttttgcgcttgatagttgatgcctagtacctcatcatcagatatttgctctgctaggtttgacatttggtgcaatcaaagctcagtgattgtgcccaagttttccacggttggaactaaaaacaaaacctttaggatgggcgcgtattatatagccagcagagatccgcgtaggaccctcaggatctccctgcatcatcctagagtcttaattactcggtagatcgcggcaactgtcactgcttgttcaaatttggaatggacaaaactttcagcgtgagagtgctcttctgatggaaacatatcatgccgataaggctatctccagcagcttaccgtgcagtctacggtgcacgaccatacgcttgacctgtttgacatagcctgataaagagaggaggttctgcaggtcgactctagagatccccgggtaccg

SEQ ID NO: 84396 - DNA, 763 bp, Arabidopsis thaliana columbia
gcaagcttgcatgcctgcagcaaccggcgacagtgagctcatcactttgtcctgcgccaaggtggcggcgacaactccaaatgtgccgccatggcttcagggctaccaagttcaagatacgaccagactggcgagccgcagcaccagttttcaggtacactacattcctgggctcaaaccgctcaatccagcaaaaacaagtttaaacaacttagcaagaggggctatattaagataattaaagacacctcatacatgcttaaccaacttagcaaattaacaataattcagccatttcttcctaagtaagatgcatgtctgaaagatcctttattgttgataccccacctcctgtcttcagattttgcacagttcaaacttcaaaatactccatatagcaatacttttgtttctaaaactaccaattttcttccgcgcagatgcaagattgggaccccaactctaatggagcagcttaccacacgtcggagatcacactgagcttctccccacaggctactaactctccagacgcttcttcaatctccggctcctttgcccccagcttgatgatgagctccgaaccatggcaattcaagctgatgcaaccgtgcccaaactatggacgtggcgatccatttgccaggtcctctgatcgtcaacaactgcttccaaggccgactagtccagaaaaatcttactccgtgtccaactcatccgaagtgcccctgcaggtcgactctagagatccccgggtaccgac

SEQ ID NO: 84397 - DNA, 1092 bp, Arabidopsis thaliana columbia
cgaacttgcatgctgcagtccctttcagtaataaaaagtctctttctcctgctggacaggaccagcaagtgcttaagatgaccacaacagctctagataactgccttcttgtgcctaatctcgatgatttgatgcctaaggtactaatgtgcttatcatattattctttcctattgttccctttagcaagtcttcaattaggtgtgcactttcttttgtgcaaacagtttgatattttctctggtttgtttgtgtattaaggttccaaggtactttcattattttttatctaccattttaatttgcactcaccgtgtgttgtgctggaatcatgaaacgtgcacaccaccatttttgacaaacacttatctcttgatttaaacatgtgcacacttaccatatatcttttgctgtcatttgggggtttgcctgatctttcgttgtcatgcttaataactaccaactgttttcaatccagcatgagcaaattgaataccatcaagctgatgattacccagccacttatgatcctcatatagcatcagattctcctgaggagattaatcaccacctaggggatgtcagtgaaaccctttgtattctacctgatgtattagaatcgccagcgaactccaacaaagatgaccagcaaagtccaatgtctgttcttgaatcttccatggacggagaagatgtttactctggggattttgagaagatcagtgcagatctccaaggcaagtgatcgaattcttctgtacgaacctgtcttccttctcattcttacgcaagtttgatttattgtatacattgcagagctcagattgcaacttgggcttctgaagagggagactacagacactagagatggcagcgagctttctatattgagtgatgacgagacagcacgtcgatcacttcctgagacgggggaatcccatgcttttaggaatacggaagaaagggacttctcctacgtgttcgatatgcttgttgctctgggcattcacgcggccaacgaggatgacctccttgacaactgctacttactggagtgctctgcaggtcgactctagagatccccggtaccga

SEQ ID NO: 84398 - DNA, 811 bp, Arabidopsis thaliana columbia
gcaagcttgcatgcctgcaggtggggcccacgtctacactaattgtggaaagtacacttgggcacttggcatcgcggccgaggtccccgaaaaagagccatgctgggccctaatccggacgtgatattttctcgcgattttgtcacgttagcggccagctacatcctgacgatcctgtcacccgctcgatcggcgggcgctggagcccgcgcatctagctaactttgtgcaagtttcacgggatctctagctttgtcggcggcacatgagcagctccaagcacgccgcgggcgccgtagcgggcaaggccgcgcgcgcctgcgacagctgcctgcggcggcgcgcgcggtggtactgcgctgccgacgacgccttcctgtgccagggctgcgacgcctcggtgcactccgcgaacccgctcgccaggcggcacgagcgccttcgcttgcgcctgcgcccgacggacccgcactcgacgacgctcgaggccggcgtggcgacaacgacgtggaagaagcgccagcagcaggtcgcgccggcgtggtccaagcgcaaggcgcgcactcggaggccgcacgtcaagagcgtcggggagctcctgtcgaggaagctcgtcgtcgtgcctgaggtgtcccccatcgaatcgtcggaggagcggaaggccgaggaagaggaggaagaggaggaggggcagctgctgtactgcgtgccgacctttgaccgcgccctggcgagctctgctcgccaccgctccggtcgatgacccgacggcctcatcctgctgcaggtcgactctagaggatccccggtc

SEQ ID NO: 84399 - DNA, 944 bp, Arabidopsis thaliana columbia
atccgtttgcatgcctgcaggccttcttcctcgccgccaagggcgtgtggggcgtccgcctcctggcgcgctccgtccacccgccgctccccgttgtgcgcgccgagcgaggcgcgcgctgcgacccgcggttcatggaggaccccccggcccaccgggccgggacccctgccccggcccagcgtgaagttgatgatggcgccagggttccacgtctacctgcccggtccgggcgtggtgaaatgcagggtcgtctgcttctacaccagcagtaacgcccgcacagacggccacagagatgccgggagcagcgccaacggcagcgtggggttggggagtagctgtagtgacattaatggcagtgctacagatgtggttgatagctgtagggcagtgaagtagggtaaaatgttgcccttgcacaggtagaaagaacacggggattttacttgttcgctaaaaaaacatgatgatctgcgtttaggcatttactgcttctgcttgtgtgaatatgggtgaattattaatcacgaacattttctgttaattttttattatgtaaagtttgagtaccacatatcagtttctttgtttggccgaagctgcggcatgagaatcatgacatgaccaaccttggaagctcgaaactttcccatcgcagatcccaatggaatagattgattggaccctccaactatcttaaccgtcagacacgtgtcttcggccttttggctgtccaattttctttagccacgctagtctatttcttctcttcttaataaccggttttaccgaaaaacttggcatataagaaattgttgtgtgcataacttatacagaggtagcagtagaatttatttttttataaaaatacaataaatcctatgagttctgcaggtcgactctacaggattcccgggctacggagctcggccacccccacc

SEQ ID NO: 84400 - DNA, 902 bp, Arabidopsis thaliana columbia
gcaagtttgcatgcctgcagtgtccgcacctgcgccgccaccgtcgccttccacgtcatcaacttccgcaccgatgtcgagttcgtgctcttctccggcggcttccggacgccgtgcgtccgcaagcggtccggcgcgctccggttcgccaaccccgccagcccgctctacggccacctctccagcaccgactccacggccacatcggtgagcaggcccaccgtttcttcgtccatttctccggtgattttctgccaaactgtatctgagcgctggaagcaatggttgtcgccagatgaggcttacctgggtgagcggcgaccggaggcagcagcaggttcagtacggagcaggcaagtccgctacttctcaagtggcaacgttcacgcagaatgatatgtgcagtaagttgtggtctcgtccgtttatcacagagagcagacgttactgagggaaacgtgatagtgtttgattctggaattgcttcgaccaacttatctccatgcaggtagccccttgttgccaagccctgccaaggatttcgggtggcatgaccctggctacatccacacggccgtcatgaccgggctccagccttctcagtcctacacctaccgttacggaaggtaaagtccttttgtgactaagatcctcacaaactaaacaactgatcagcaatgcttcagaattagaaaatgccatggatgttcgtaaagtttctaactttaaaatgtcagccagttctgtagtaacattctggcaaccaaaggagagatgcatgtttcatctgttcacgcagcttttgggtttgtgcttgtgcagtgattccgtgggctggagtgacacaaacacattcaaaatgccaccagctgcaggtcgactctacaggatctcgggctacg

SEQ ID NO: 84401 - DNA, 936 bp, Arabidopsis thaliana columbia
tcccgtttgcatgcctgcagtacaagtcagctacagaaatttgcacactactatggcggtatggtcatcctgcattgctttctgaagcactgggaaaaacagatttgataagggaacaaatgaagggatatacatgaaaaaaatgagttgcagatatttctgttccacttccgtatttatatgattcggttgtttacattcagaagaagaaatgctttgagcaagattttttttcactcgcccttgtacgattctgtggtttctttgtttcagaaaacatgttaaataagataacacttttactgatgagcaggttgctgaacgacaaggcaagtacctggcaagcctgctcaaccatgtcatgaaagctggaggagggcatgcaaactctgagactgaagcagatctgggtcgtccaccctttgtgtacaagcatctaggcagcatggcaactgttggaagatacaaagctctagtcgatctgaggcaaagcaaggtcagttattggttgatgttctctgtttgcaagctttgacagagtttagtagatagtcatgggtttactaaaaaattatttctcaatcggcaggagtcaagagggatatctcttgcaggatttgtgagctggttcatctggcgctcggcatatttaactcgtgttgttagctggaggaataggttctatgtggctatcaattggctgaccactctcttatttggccgggacataagcagaatctagagtgtcttggtacacgtacgaacaagcgtataagtcgatgtagagttacacgccacggtcacttgcttgccacacccccctccgggggtccactcctaccactgtccctattagctgtgaatgtaattcacaggtgaattatgaataaatctgaggatactgcaggtcgactctagagatccccgggtaccgac

SEQ ID NO: 84402 - DNA, 783 bp, Arabidopsis thaliana columbia
ggaaacagctatgcccatgattacgccaagcttgcatgcctgcagtttcgtccgtggatgttgctgtagataggccgctgttgtgtgggatggtcgtggtctgctctatatatcagcggttagacgtaactggactgggagttggctgttggcatatgacctgcttctgttgtccctttccatgccctcgttttccagctctagcacttgatgcgagaaacattctcatgcataattgagatcagttagcagatgacttggaatgccaattaaggtcaaaccatcgcaccgtcagtgcctgttgtattgtatttgtatccgtccctggagctcaaggtcaactcccagcgtgctaataatcggccaaagcctaagcatggtttcaattcccagcgtgtgttatctcctcgaaactaacaccgtcaaactctagaacgtactagatagtgtgtggccctcaaggtcaaccaagccacaccttactagaatcttgtgacgacagcgagaacgaaccaattgtgcaagtgcctttttttcttcttcttcttctgtttcgtttctttgaatagattcttcaggcaacaccaccagccatgaccaaccgcttcgatgccactgatgaatgataataatcacagattcacagatacatagtacttcacttgcacaacatgatgtgttctagaggttaaggatggtgctaagaaagtcaaagcttttctatgaggaagaaaaaaaagaagtcaaactgcaggtcgactctagaggatccccgggtaccga

SEQ ID NO: 84403 - DNA, 796 bp, Arabidopsis thaliana columbia
gcaagctatgcatgcctgcagaatcttttctatttatctgtaaacatagtgaataacacaggcaacttgtatggtacagatgtctgaataaaggaaggatgaaggaaaattgattgactatgttccttgttgattccttctgactaatgaatacaatgtttccatttttttagtcctgagctagacaaaatcagctaggtatggccttgctgttctctttgggagataaattcgtcgcctctagcatttggcacaagaaaagtttgttttacactttgcttcattaaccaagccactgcttcagccttttgggatctaagaggtctgttaaatattcttcttctcttgctcgtccatttcttttacctacaggctgcatctccgcatatatacatgccatcatgagatgctcccaaacctatactgacgcacaacgatcgacagaaagccattcaggctgctctatctgagccagttactgagagacgaggacatcattttgatgcttctgcttgatggatgcttcgttgacaacatcttatcgtggcatgatcggaaggaatggcacatactgcccaaagttggatgctagatgtctggacgaggaacatggaactccagcgggaaatgcctttggagtgaagcttggtggtcaattggccatgatcatgaagtatctcccagctggaacgcacacctttttcttaatttaataaaaagaaagaagggataagtaaaaatactggaatgcacaagactccgctgcaggtcgactctagaggatccccgggtaccg

SEQ ID NO: 84404 - DNA, 784 bp, Arabidopsis thaliana columbia
accaagcttgcatgcctgcagcaggaccctgcccgccgggatcagcggcgcgccgcacgacaacaacatcatgctctggaacgccgtcatattcgtggtagcccgccccctcccctcccccctcccccgatttcgttaccccacaaacgcccccccctggagtccgttaatcccgttcctgttctagggtttgattgagggactccggatctcggggagggagacgggatctcagctattccttttgttcttactcttgtgttcgttgtgctgatgagaggttcgtgtggtttcgcaggccggatgatacgccgtgggacggtggtgagattcccagctctcagctctgagcctctgaccccttctcttatctgttgctcatttggtgcttgctgtgtggtcgttacttgcttgaaggtagtttgattcggaattgtgcaggtggaaccgtagaaattcatggggcgttaagatatttgggtgccacaggaaccgagactcgtctggtacctcgtggctgttttagcttgttcctgtcggttaatctttcatgtccaatcttgggggagcattctgttatgcaattctttagctatccgttggaagttgtcttttggagcatgtcttcagagctgtaggttcgagctgaaattctgtaatggctttagtctcagttaaatcagaaatcgacaaatttagcatggcggtaagaataacgcccactaggctgcaggtcgactctagaggatccccgggtaccgaactcgaaattcactggccgtcg

SEQ ID NO: 84405 - DNA, 821 bp, Arabidopsis thaliana columbia
  unsure (1)..(821): unsure at all n locations
cnnnnnnnnnnnnnnnnnnnnnnnnnnnnnnnnnnnnnnnnnnnnnnnnnnnnnnnnnnnnnnnnnnnnnnnnnnnnnnnnnnnnnnnnnnnnnnnnnnnnncaagcttggagggcacaactcctagccccaggccggttttacaagacggcaacgggcaaggagatgcaagctttccacggctgctgcaaagcccagtcgggacagatattccatacccccagtgagaggacggataggaaagaccgatcgatcgatcttgtggctgaagcaactcgtcgtggccgctgatctcgcgaacgtgtgcagattctggaagtaagtgcgtgcgtgcggtcagagttccgggcaagatcgagcaggcaactgatcgatgcttcccaaaggttttctttcatcgggaaccatgaacaacagctaccctgggctatgatggctattggctactccgatccaatacgaccactcatcgttcatcactgcatgctcacgctcgcccgacgcgcgagagattaaaggaaggaagaaaggtggccggcctgggccttgctttattatcaccaaaaggccacaggacgtattgcggaaaggcatgcagctagctagtgcctgcgggcagctgctgactgagataagagagacccggccgatctggggctgtcagctttatttgcccggccctttatctgcagtcgaattcagggattcccggggtaccgagggtccgaatttcacgaggccggtccgtttttaggaaaggtccgtggaccttggtggagaaaacgcgctttgggccggttttatgtcccaaaacctgttgt

SEQ ID NO: 84406 - DNA, 750 bp, Arabidopsis thaliana columbia
ttggggatccgtcgacctgcagccaagcttttgctggcttataaaacagagcccaaagtataagtccaaacgtcaggacattttttttaaatggagcattcaattccgtgtcaaagattgcaattgtgcataatcctgtactaacaagggcaggtgaaagaatatgtagatgggtggtcagaacagcgtgatggaaagttattttcttgttctttgcaaaggtgaacaactcacgtaaagatagatactagccaaagatcctcacaagaatagcaaaatcaaccatatgccaggcagaaccctcatccttgggcttgcagttgcagaacatatgccaagcagcatcttgtgttttttgtcatttaatgtcagaccctctccaaatgcagtgctttctgtatttgtgtatctcctccagcatggttgaatggactttcaaagtgcaaagttagaaagttggcaggggtgagagaaacgaattagctctctggagccatcctggctgggatataaaggaaacactataaaaggcctctgttcactaatggcagtaatttttcaatctttctgtattgaataaggatatgtcactgaacattgggtttgttaaacaagctatggttttcttattttgaaattattctaaggctgcttttaatactagttatttgcttgggcttggtcctccttggttattgaactcagtccatgtttaattatctgcaaacatgggttggggaatatccaggt

SEQ ID NO: 84407 - DNA, 1351 bp, Arabidopsis thaliana columbia
caagcttgcatgcctgcagcttccagttgtagatgtgggagtccaccagccttcacatgttacagagaagctgctgatgatgcaaatagcagagctagttcccaaacatcacggaaggacaaataagcacgaggcagcgtccaattcgttacccggtgggaggtcaaagaacacgaaaggcgggaaaaagaaaaagtgatggtagtgccattttgtgtgttctttttttttttctttctattcttttcgccctcgtgctaagcttctgtggaagttgtctttctgaggcctgaaaatcattgcgacttttggcgagattctggttcatttgaaaatttatgtacccatctttcctgttatcttaaaattcggaaggatgcagctgcttaggtacatcatttgaccaatataatagagctggttttgtatcttcgtggtggttggattaaatctggtacttgatctgtttttgtttactcgtatgcaatgatgattcactgtatcttaattaccttgcacaacaacttttaaaattcccttggtccccgcccagtattaatctcccaacatttaggtgttgcgtatagatatatagtactcagcagtgcacacaccacattgttactttacgcatcgaatcatgatggtgtgttttattcatatatataacaatcagggagtcgatacatacaagccagtcgaactgacaatcaggcagtcgataggtagatgtatgtagcctgcggcagcaggcgtgccggtgccggccgcgatcggtcagcactcaggcggcggtgacggcgatcttcatgccggactggcagtggccggggatgctgcagctcctgaaaccacagccacgagtgagtagtgcccatagagcggatcacagaaaaggtgagcacaaccgaaggggcaccactcgctcgctcacctttggtcccaggaagagcccatacgggacgccctcaaacttgtccatgtggtgtatctgctcgcgacgtcaccgagcaggtagatggccggcacggcgttgacgatggcgaacacgtcgttgagctcgaatgggccctcgcgcggccggtggtgccactcgtgcatgtgccacagggaggcgtgcaatagcgcctggtgcgcctacgcgcccagaactccatcccgacctgcacggacgcgcccagggaagtcagcccagtttcacgtcaggaaaggaaaaaaagttggagatagagctgagctgccaaggaccgccgcgtaccgccgcgccgacgaagagcgcaaacgtgccgaacatctcgctcaccgggaccgcgccgccctgcaggtcgactctagaggatccccgggcacg

SEQ ID NO: 84408 - DNA, 1210 bp, Arabidopsis thaliana columbia
caagcttgcatgcctgcagctgtcgacttgtccgcaaagactgggggtgggaatcttggcaggactcgcttgttcgggctcgccggccgccgtatgcgtatcagccattcagcctagcctaaaaaggctgttccggcttgctgatcctgctcgtggtcgcttgattgatccacggttccaactctctctgcgcgccaccgccttccatccacctgggcgagaagtactgatggcgcctctgcggagccactaactgcgctgtctgtgtcgcgttgtagcgcccatgattcttctcggatcctatagcaggacatgtcggcggcaccggcaccactaggagaggagacgagctcggagtggaacgccgaaagagtaaaaaaaacatggcaagtaggacacggtagcagtacctgcactgccgcatgtgcgtcgccctaccccggccccgtccatgattgatcttgatcgggagccgcggtgtagtacaagtcatcaacgaaacgagcgtctgcgcacacgacaagtaccgctggtattgctagtacgttgatccttccttcgatcgatgtgcctctgcctccgccctccatcataccgtcaggtgggccagtacagtgctgtgctctgtccatggatttgtgtacactccgcgccgatgcgctaacccgtcgtcatctcatcatcagagcagaggggaagggaaggaagagacgagtggaccgacggtgttggttgccgagtacgtgacccgtcgccgtcgaccgagggacggaggagcatgtaccgtaccacttactacagcagctcatactcatgtgcgtgcgctcacggcagaaagcagaggtggaacgccgagacaagatccgggaaatgagtgcgcagtacgcactacaaagccggccgggtgttccgttccgtctccggcaggcgcagtgcatgcaccagagccagacggcagagatacttggcctggccatcgccgtaccctcctcctccccctttggccccgcccccgcgtccccttctggctggctctggctcctgcccaaagctcgcaggccagcgccaccaccaccaccttttcgtttcgtcgccccgcccccacgctcgggaagtcggaagaacagtgtcccccctcacctgtcgactgtcgtggctggcgtcgcctggccgttgctgcaggtcgactctagaggatccccgggtaccg

SEQ ID NO: 84409 - DNA, 850 bp, Arabidopsis thaliana columbia
  unsure (1)..(850): unsure at all n locations
gttccccggcctcggttaatgttggtgtggcaatttgttaaaggggaaaaccacattttcaccacagggaaccaacctattgccattgatttcgccccaaggcttgcatgcctgcaacaaatgtgttgtgcccaatggtcccccctccaagctgttctacaaggcctccaccaaggggaacgataagttactagtgcaaaagttgctcaagagaatgaataaccaggggattgtcccgaacaaaaagttcttcctggacgctttggaagcatttggcacctctcacaggaaacccaggacatcgccaggcataaactctgcaagcaagccaagtacagattctgctggtgattcagaaacagctacttctgacaaaccagaggtaagcgtttggcatgtacctgctacataaggctgttggtttgagcaagctcgtcgaattacctgacatcaggaagaacacatttgatctgcaccagaaaccgttaatacagtgtacttggagctacaggagttcctctactcccaacaggacgctcctttcttaacggaagaatgctaaaacctttcgtgtttcggcaaaatctgcttgtacatgtactctgttatcaaacgtaggtattttgtttctagtcattattgggcatcacaaaaattctggctctctgtactcgtcgattgttattacatgcctgttccttcaatccttctgtggtatctatttattgagcatctcccgatacataaaactgggaactggaatgacatgcatgctgcaggtcgactctacaggatccccgggcacggagctcgaattcactggccgtcgttttannnnnnnnnnnnnnnn

SEQ ID NO: 84410 - DNA, 752 bp, Arabidopsis thaliana columbia
caagcttgcatgcctgcagtcaggagtctaaggggcagatccttcggcttaatttgatgtgtgcctcttcactaagcttgtcgttaagggtttgagttcttccccaagtgacatcatcacaataaggaaatgcagcatcagagacacgctagtagtttatgcaaaccaacagaagatgtctatgtcttcttcttttttacaaaatttgcagtgaataatgtaacctctgctctagccttgatcctcctaacgacgtttagctttactcttggggccaattccctatatgtcactggaattttgtttggtatcttatttgtatcgcgaacgtcatgatccccactcggatgctttttcatgttatcgttagtggcatagaaggattagggtatataattctcttactctttatgtcactgtaatttagtctcatatcttatttatcatagcaaatgttttattcccttttatgccacttggatctaatttcttagaacagattagaacatacaattttttaatccttctatgtcactggcgacaacataaaaagataataaattgcatccggatggcacagaagggcttagtatatttacaatgacaaaataaggtattagacaaaattacaatgacatacatacatacaattttctcttagtcttattatttgatggcctgagaagattatctgaatcaaaacagattttcccatttctcctcttcctctcttctgtcttcatcagtgcagg

SEQ ID NO: 84411 - DNA, 708 bp, Arabidopsis thaliana columbia
gcaagcttgcatgcctgcagctagctccaaagcagcaggcgcaccgcgacacccccggtggccgcccgagcgcattgcatggagcgtccgcgcaatgtctctctgccgccccgcgttccgagcagagtttccccgctaatatccagcgagaccgcctgttcctgagcagctgattcgtcgtttgggttgcccactgccggggccatggatcagcagcggaggagcagcatcaggttgtacgggtccaacgcctcgtcccggtcggggtccttcgacttcgaacacgaccaggacaaggaacgcgctgaccagcccagcgacggcgaccgccgggaggtcgtcgtgaagatcgacgccgagccgcactcgccggtctccctccacgccgccggaggcatgtccgggcacagctccgcggtcagcacgccccgggcccgcggcgcgggtgagcatgctcgcggcgtctgcgtccggctcgagcgcgtcgacctccagcgctgggggcgatgcgccccgctcccgcgagtcgttcagtttcaagaaccccaccccccagtcttcggcccgccgcggggagtccagcgaagatcccccgagccgcctcattggcagcttctccggaacaggcggccgtggcgggagtgtccacgacccgattcgagtgacgaataaagcgcagccgcaatttcagctcagactgcttttcaa

SEQ ID NO: 84412 - DNA, 802 bp, Arabidopsis thaliana columbia
ttatgtgtgctgaaattgtgaggggttagaaattttcgaatggaaacagctatgaccatgattacgccaaccttgcatgcctgtagcgcgaagcggcgcaggggaccacgtgggtttcatagagccaacgcgactccaggttatgggatccggcgtgggctgtggtagtaggaggagcctgctcagatcgtgctttcgccgccaggcacagtgatccggccggaatagtcagactcaagaggctactcgggcgacgcacgacggccagtaccagcgccaatggcacgggcgcacggcacgtcggtcgcggcacggcacgcaccacaccctatagataggtagctgtagctcttgttgacctcttcctctcgaatgatgattctctcgttctattctagactgctgcgtgcgtggcctctgtgcggtgcgctggtgtcctggcgcagatgacacacgagacgagggacgggcgcagcgctgtgtgcgtgcgtgcgtgcatgccgtgagcctgctgactgacgccgttgatgccatgctggaactgaagcctccctttattgtgcgcccaaagcccacaaggcccacatctgcgcgacgacgctgatcgacgcccggaatccaatgccacaagccctacccccacccacagtgcgtgcgtgacccgctgcccactggccagtggcagtgggatatggatggacagcctgcaggtcgactctgagaggatcccgggtaccgagctcgaatcacttggccgtcgtttacaacgtcgtgactggaaaaaccctgccgtaaccaacta

SEQ ID NO: 84413 - DNA, 1032 bp, Arabidopsis thaliana columbia
caagcttgcatgcctgcagcagctgcttcacctggagcttcagcagaagaaggacgtggagcagctggacttggatttacttcttcatctgctcctccaatcacaatcagcatcgtcggctcaagaccaacggaaggacgacgaaggcatggataaattaccagaatgggacgacaaggtcatcgcaaaaatagccaggaagctcaagaagcacatggaagccaccggtgaagaagaagccaaggagcttaataaagagcagcaaacgggaacagaagaagaacaggaaggaaacagacaagtcgcgaggcagcagcagcacatagccccaatttgtctccctgaagatcaatataaacagatcctgctagaagtgttcccaaaggccggcagcagcgagcagcagagggacaggccggcggtgaagcaggaggctacagaggcgacggcgctgactacagtagggaatcatgcagtaacaacaagtgaacttggtccgaacggaaaagctgttttcgagactacagttgatcagaagatggccaagatcaagcagaagctgaaagagcggctgaagagctacgcgctagcgaccaagatcaaggaacacttgaactatgtctgccccctgatcatcctcatagtcaatgagaagatggacggatccacatggaccgagaccagaaacgccttgagtctgctagcctgtggcaccgatgcaatcatcgtcactaccacgaggagcgcccagtgggctaaggaatactgttacccacagtgggagcctatcgagtattccctcgccggccgctactatagtaccgtgctccagcttgcaaggtaccagaaggacgaagacggcgataagctcaggacgattcataagatcttggaggagtgtgagccggatgaactgtgcatgaaaatcttcactcgtgctctgtacgctaaccccagcaggagcaacgaagagctaacgaagctgcatacctaccctgcaggtcgactctagaggatccccgggtaccgact

SEQ ID NO: 84414 - DNA, 748 bp, Arabidopsis thaliana columbia
aacgcaagcttgcatgcctgcagggaaacaagctgtctaggggtcatacctccgagcctcggccattgtgccgctctgttgcacatcgacctctccagcaacagcttgactggggtgatatcagaggagatcgccggcatcgtgacactgaacctgtcgcgcaatcagcttgggggcatgctgccggctggcctcagcagcatgcagcatgtgcaagagatcgacctgtcctggaataacttcaacggtgagatcttggccaacatcggaaactgcattgagttgacagtgctcgacctctcacacaactcgcttgccggcaacctcccttcgacactcagccagctgaagaacctggaaagcctcaatgtcgcgaacaacaacctcagtggtgagatccccattagcctggccaattgcgacaggctgaaatatctcaatctgtcatacaacgacttcagcggcggcgtccccaccaccggccctttcgtgaatttcagctgtctctcctacctcggcaaccgtcgcctctctggtcctgtgctcaggcgttgcggaggtcgccaccgctcgtggtaccagtcccggaagttcgtagtcatcttgtgtgtctgctcggcggctctggcgttcgcgctgacgatcctctgcactgtcagcgtccgcaagatccgcgagcgggtcgcggcaatgcgggaggacatgttcagtggccgccgcggcggcggctcgtcgccagtgatgaagt

SEQ ID NO: 84415 - DNA, 823 bp, Arabidopsis thaliana columbia
gaaatttggaagggggaataccattttttccccaggggaacagcttatggcccatttttttacgccaaggcttggcatgccctgcagctaccgctggtaaattttactaagaacgagacagggagagatttcccgtgtcgctgcggtagagttagaatatatgtgattcgtgtgtctgagggtagattcgtcttttggcattcccaaattttcacatgcgtacgggatgtttctggatgggtgcccggcgagggaattttcgattggtatcgttaagctccaaagccgtgatggattggtccatacggaatgaatcgctcgcaatgtgcgggattcttggccgtatctccggaggtgtcatgtacttatgcgtttcaagcgtctttttactactgtacagtagtacttcctgggttcctgtcgctacgagaaataagctggtcaaactatttaaaattcaattaaatttataaaaagtatattaatacatttattgtaaatacaaatttatgaataaatctaataatagtaattatatctttaaatatgaatacacgacgctgctagctgcacacgacggcgacgcgcatctatttccgttcctacggatatgatcctatcccatgcgtccatgccagcgacttcaactagccgaaccgatggacgacacgacaggcaagcgggcaaaaacgtggcatggacggatggctccccctctgatcatccgctctggtcatctgcatgacggcatggcagcagcaggctgcagctgcaggtcgactctacaggatctccgggcacgaggctcgaatcactggccgtg

SEQ ID NO: 84416 - DNA, 789 bp, Arabidopsis thaliana columbia
atcagcaagcttgcatgcctgcaggtgcttgcccagcatctggtccatcgtttatagtagctagtagctactaccaccaccaaccagtacgttcttgagaattaatgtacgcgtgtgcgaagatcgatcgagctgagcggatgtggatgcgatgtgggattggatatatatataaatatgatcatcacggtggtggtggtggtggcccttatatatagcgcgcgggaggcaacgcgcgtgatggcccgcggccgggtcgcaaacaaagtcacttcaagagaggccagctacaatgttaagctcatgatttgatatccatgattgggcttgggccggcgcatgcaataatggcggccggctcgtcctggcagagcgctgtgagcgtgcagttgcccgcggacgcctcgtggctgttgcttcgaagcgtttacatctaaccgctgtttattataaggactgtaactgccagggtgactgatagtgaagcgtttacagcagtggaaaactggaaatcactgggcatgcaatgcatgcatcaccgaactggagcttctagctagctagggaacgaatgagagcttttggtcgcagtcgcgcagctggtccgatcgatccggtccattctggtctggtacggggtccaagcgtcgcacagcctggacttggactattcctccagactcctgagacgagtgggaggaagctggccggccggccagcaacagtggcgagatggatctcagctcgatctctgacgacgactgcaggtcgactctacaggatcacggg

SEQ ID NO: 84417 - DNA, 784 bp, Arabidopsis thaliana columbia
cacctatgcccatgattcgccaagcttgcatgcctgcaggtttatgttaagagtacgctttttcctcattccccatctgcgtgcctcaagtaagcccttgattgatcagttgtttgtgttgtgtattggattttctctctcgaaaacgctgtttattggactttccttatagtcatggtacttaaggttctaatgctgtatagtcatggtgtctgagaaagtaagaaatctttggaatttccttatctaactattttcatgtgacttacttgaactaggcttcataagtggaaccaagtgatattgaattatacaaatttggttccatgaatgatgggttacccagcagatcctaatcaaacttgatgacatgtttgctcagcaatacaacttttagacttctaaaaagtagtaatatactccctcggattccggattgtaagtcattctggcttttctagatgcatatatatatatatcttttgctatgtacctagacataagttatgtttagattcattgtaaaatctgtgtctaagagagccaaaacgacttccaatttggaacgaagggagtactgttatactatttaattttcacaacagatattgacaacatggcccctaacttatgttcctatttcatgtttgcaaaataggtggaaatctcgatcgggagctattcttacagaactaaagagctttgatgctgacttcatgtgcatacaggttgtcttatataaagttctgcaggtcgactctacaggatccccgggcacgggtag

SEQ ID NO: 84418 - DNA, 787 bp, Arabidopsis thaliana columbia
  unsure (1)..(787): unsure at all n locations
nnnnnnnnnnnnnnnnnnnnnnnnnnnnnnnnnnnnnnnnnnnnnnnnnnnnnnnnnnnnnnnntcaacttgcatgcctgcaggttattattgcctcctgttggcttcagcattcggagcctcgacagtagaatcctccatggatggcatcatgctaccctcaggaactcttctggctgcttcagctatacgtagaatagtttgaataactggtcatggagcttactgtttcggctatgtttaaagacagagagggaacgagaggtatacatgggattctgtggtcaagggagatcaaactcagccagtcagtgccacaacaggtctgaggacagtagtagtcactactccctcggtgtttgtgtcagagagaaaaagagagagagagagaggtgagtgtgagagagatggggggtggggccgtcgggtggggggatggtgattagtgtatagatgaggccacgatagattgtatcctgtgccatatggccacaatgtttaatggctggaagtatgctgtgctagtgagatcaaaatcattcccgttcagctgtcatcggaaagctcaccaaccatgtgccatgctgaacttttcagaggatcaacaggcgtggggctgtgcgtggagatgttggattctgattccagcttctgaccatgcctcacagtagcagtacttgaaaacaaaaggcattgattggtcccttcagaagatgccccccccccccaaggtactgcaggtcgacctagagatcccggtacgactcgaatcacagcgtcgtttaca

SEQ ID NO: 84419 - DNA, 865 bp, Arabidopsis thaliana columbia
caacttgcatgcctgcagcagcagatttccgcgacactcacacacatcagttcctgatatgcctgccccctttacttttttcacaattactgcatgcatcaggagccaggattaaaagttgcctcaaagaagaagatccctctgcgccgctgcatgttgagcgagcctaccgtagcgacgagcgcggatatgaattggtgttgtgttcctagggccaaccagagagaagagaacccttactccaacagcatcggcggtaaggaaaaaaaaaatgtattatattatttgcctacaagttttgtacttgcaattgcatgctacaatatgcatattgcatttcttcaggcatctactccgagaagaacataaggctcttctcctatgccgagttaagatctgctaccgacaacttcaaccgcaccaacaaagtgggacgaggcggattcgggacagtttataaggtgccagccaaactcgatcatatctattatattgacggcccgcgcgtcacatggatcatctcttgtttgttggcgtcacagggaaccatccgaagcgggcgagaggtcgcggtgaaggtcctctccgccgagtccaggcagggcatcagggagttcctgacggagatcgacgtcatcagcaacgtcaagcaccccaacctcgtcgaactcatcggctgctgcgtcgagggaagcaaccggattctggtgtatgagtacctcaagaacagcagccttgaccgtgcgctgctgggtacgagccaccactagctgtttacccaaacccatacccatacccatacatacctacatacctgatccatcagttgcggcgttctgcaggtcgactctagaggatccccggg

SEQ ID NO: 84420 - DNA, 281 bp, Arabidopsis thaliana columbia
tgcgacgatcacatctggaactgagtctctctgctttccttctaatgtgtaagtaacagacttgtttattagatgagaggaagaatcaacgggaatgcataatctgacgatttcataagaatgaatgaaacaaaacaagagagagctaagaagaagaaaaaggattgtatatgtatgtacaaaaggtctatatatgtacaccattattcttttctatctgtaaccttgcgacttaaatgacattacagtttttttgaaaaaaaataaaaaaaaaaagaaaa

SEQ ID NO: 84421 - DNA, 947 bp, Arabidopsis thaliana columbia
caacttgcatgcctgcagtccgctcgctcggctcagacatttcatcagtgcagtgcaagagtgcattgcattctgtggtggactggtggtgcggcaaggcaaggcaaggcagagtgaagaggccttctccttctcccttgcattgcatcctgcatccctccctcccacggcgtgaatacgggcggcaggcacgctttcggtctcttcgctttcggcaaagcggcgaggacagccccagctcctgatgtagtgtaaaagacttaaagagcgcccggccaaggaagcggaacagtcggagcgtacgaagaaaaagatgaggaaaaacacaagccaaagccatggaatggatgctcgtcgtcgcctcatcatacagccgaggaaaaagtaatgatcacgccgtgtcggtccaaacgttttttttctactagcagtctagcacccaggaatcagaactcgctgtcctatcatcattcatcagtaaaaaaaaacaagcactaaatcattgcagtgctgtttcctgggcatgcattgggggcggggcaatgcaaagggcgacgtcgtccgcgtcaaagcaacaaaaaaagggttcgctacaatactaatactacttgaaacctcgctaaagcagcagaggtgttaagaaaagaagagaatctaatcccaagaaagcagagaagcatcacacaatctcctgcttttgtatttgttttcgctgccaacgtaaagagtaaagactaaagagagcgatagtgtgtgtgtgcgcctgtgagaggaaatctctgccggagtggactgccatgctctctctcccccgccgtgtccagctcagcctttggagacaccacctgtccgttgctccaggcgcctcttcctgtgccaccccccgtgcagctctgctcttcggctgcggctgcagctgcaggtcgactctagaggatccccgggta

SEQ ID NO: 84422 - DNA, 969 bp, Arabidopsis thaliana columbia
caacttgcatgcctgcagagaagcggaggcctgtcgatttgattgaactttccaagtgagtactctgcactctttccagtgtcgtctcaggttgttcttgagttctgaaccgggtttctgacgggttttgttttcgagctcgagttccgcgacactgctctaacatgtgttggaggattttggccttggtcccgtgcgcgtgcgtttcgctgcacgtagtcaacggaccaaagtggtcaggttttatcatcaagctttgcgtagggttttctcttttctacgctctctgtttcaccatccaatatttatgttcatattttttttaaaaaaaaacagcacagaacgatctagttcttcttctggtcatctgtttattacggtatcctgctcaaataaatttgtttccggtatatgaatttagaccaaaagctccacctgattgatacacagggctaagcgtggtcatttcttatatcaaccattcgctttaagcgctttactttaaccattttttttactttaacaaaaaaaagatcattaaatagcgtgtatgcaaacgtgatcaatcatttcgcaacacaggtaggattccgttggatcatattgtaccacctcgggccagagcgaacccaccggtctgtacgtcctcgttcctggctcgcgtgctacgatactcaaagtagatcagagatgcgcagttgttgtacgcttggatgccccaaatgccatgcttttttttccaagtcgtacatgaccgtctgctgtgccggacggcggaacagcaggcaccccagagatgcgcagttgttgtacgcttcgtcgcacgccgtttggcagtagcctgctagtttgggatgcgtcaccacggcccaagacatcattgtgtcttacctgctgttactaaacgccaacgtttttttttatgtatatattcctggtcctgcaggtcgactctagaggatccccggt

SEQ ID NO: 84423 - DNA, 921 bp, Arabidopsis thaliana columbia
agcttgcatgcctgcagcataaatgtatggtgcatggtaatgccggcctacgtgtaccacaccacactctctgcgttaatatcgttctaataactctgagtctgactctgatgaagtcaacttcttccggtacgcgcgcgcgggggcggaatatatacgatggtgcatcatcaatcataattcataacgcagatgcatcgagttatatagctaggttaggcggcatgcatgtgtatagaaaatatacaatggtgcaatgcatcacaatgccatacgtgtcaagactcatgaacaatctaataataattattttattccccgcctaacgtgaggcttcagggataagcaggtaaaaagccccaattctagtaaatgatgccccccggccgtctaccaaacacgacatctttcaagctaaggggcgtggtggatgcatgaactcgttcgcttgtcctttcccttctaataacttattagacctggcatcagttacatcttcctagctttgagtcgggactaaaacaactcgaggacggaaactgtgctacgccagagctggtccaacctaccagtcccaatcccaactagtaaatgttgttgcggttgattgagatagaatttagtttacgttccactgtaataacatatatgtggaatgatgcggatttgactatatccaaataatactttagtgctaacatgtcttattattcgcaaaaaaaggcacaccaaattaacccatataaatgtttcttgcgcgttggaaacacacgtcccaatttacgctcggacatgcatgggacgaataatgggtgatgcctgcacaatgcatggtagtagtatctccggcgcgccgtccagccctcgagattccgtgatcgccaccctgcaggtcgactctacaggatcacgggcacagac

SEQ ID NO: 84424 - DNA, 1397 bp, Arabidopsis thaliana columbia
cgtcgacctgcagtcaagctttcagcagtaacacagagggaaacagagagagcagagcatagctattctatttgctttgcaatatgaaatgtcaaacaaatcatatttatcaatgaaaactgtagttacgaaggttatgatgtgaaggaggttagcttatcagttaaaacatcttttcctattgtagagccatcatctccgatatcaatgcctgaactatcttctatttcaaggcacactcgacataattttcatgaagtcttccatctgagacaaggaatttactctgacatgcctatttctaaagttttggagataatgaaatccaccaacttggatgtaagtggaatataatgattctttctgaaatgtgcgtgagataatgtcagcccaaattctgatctttttattctttgcatcatgtggaaccaattttacagaatgcccctactcagtcacttttgagttttgtgaatgccatccttgatcggatcattgaaaataagaatggagaaattccttatgtaggctactgaaaagcaatacagttagttatttcttttcatacatgagaactttggtacattttgttttatacttctttcatccccttggataaaaagatagcattctttgcacagaatatcgcttgcttgttgagaaaggtaataatggagattgaacgccgcatttctactcaagcagaacacataagaaatgtaaggaatgctattttttatacttatttttcaaattattcttgttgtaactcttacttgtatggcagcaaaatagccttatcagagcacgtgaagagaaatataaatcaaggataagagtactagaggcacttgcaagtgggacaggtggacaaatgcaaataaactcaagtgcggcaaatggaaaaataaatgtaagttctagttttcatttgaaacctattaagatgagttttgttagactcttttatgcataaatctcctgcactttcgagaaaaacaaaaccttctaacattaataacggatatccttttcttatattattttcagattgctgaagatcatgtgctccagatgatggtttgtttcttttccaaaaaaaatacctctttgtattactatgttctgcatatatttaaatcaagttcttgctactgtttgctctagaattgttgattgacttagttctgtagaagatcttgtaagcaaataagcattgataattcagtttaaaaggaccacaagaattgttcattaatttatgcgtcctttgtgtgaatgattgggttttcttacttcacttccattcttcagatagacaatttttttactacactttcattcttcagataaacaaaagcaaaattggagaaagaagattagttgatagagatatg

SEQ ID NO: 84425 - DNA, 1237 bp, Arabidopsis thaliana columbia
tggggatccgtcgacctgcagccaagctttgctttgttgttggtaagagtggtcattttaacttttgtatgtttttgtatgtgttggatgtgtggggttgagactttcgaattacatacaggaagctaggtcttcatgcactattactgaaagataaagggatcttaaaaccctggatgcagcttcttagtttacatgaatagatgaatcattgagcctgcttaaagtaccgtctgatactgcagctgttggtttttccccatcagattgtcatacttgtgtctcagcagattcaggttcagagtatgtagaggtagataccgtgtttggagtactctccttccgataactgagaccaaatttgtatttcgttcattctgatgtttaggctggctaacagtggcaaatgtgttgcgtactcaggtaagggaaacaagacctgcggttgctgtctcgctgaacattaccaaatggcatacgagcatgacaggaagacatagtagacaagcacaaggcaagctgcaaccatgatttgcagattcagcgggacggtcttcatggcttccatgttcggaggagcctcctttgccgcagctgctgaagagcaggaaaggaagaactctgccgcgatagcttcgctgctgtctccttggaggtcactgttgtaagctggtttgccggacacacttttgtagagcccgcactgcgtccatggaaacggaacaggtcagtggcgaggcctgaatcatgatgaacaatgatgcaagtgatggcaatgtgcccatggcttccaaattcagtagtcggtttattgtttgcaggcctggagtacggacacatttttgctggccttcgttttagccgtgcaggatgttttcagttttcctaattgattttcgagtttgatggctagatgcatttattacctgtagctggtcacccacggtgacgacgagggcgccgtcaaggggcgagaacctggaccagcctcgccgcgagaagacgtggaacgccgacgcgccggggcagagatggagggcgagagcgcgggagcaccgcgagctccgtaccagcatccgcaggacgtcgtcttggctgatcggaccggacgcgcacgcgctgccgccgccgcgtcggtgcttgcggatacagagaagcgagccgttcgcttcagctttagccagcggttcagctgctgcacatactggcgtgctgcaaggcgtgcaggagcttggtt

SEQ ID NO: 84426 - DNA, 1328 bp, Arabidopsis thaliana columbia
cgtcacctgcgccagcttttatttaaaaaatataaggtcccaaaatttagggtgaagcacgaaggacaaacatctaccagtaaattgtgctcctagtcatctattcttgtacttgactatgtttggcttataaaaaacacttgtggtaactaaaggcatgggtagttaaccactaagactcacctttgccacataaaactcctagtcactctagcatcattcactaagaaccattcccactaagtaaagggtctcatcattcctcacacaccaagtcatcgttgttacagattatcagtgtttgatgatcgataaccttactataggattccaagggtaaagttagctggtatcaacgaaaaatcaaattcaatggcaatggcaagacatcgatttagatatgttcaagttgctggatagtgtaataccctacgtcctatatgttggattgccatatgtcgaattattgaatatgatctattacaaggggagtaccactacctctatatagtcctgagtataggtgcatgattctagtcctatctgtgtatgatagagtagttctaattctattataatgattgtccttcctatagctgactaacttagtttgcttgtcatggaattcacaccacttttttgtcttcctagcatttttgtgtgtcgatcacacaactttttgtcatggaattcacaccacaatgaggaacccttaggatcttggtccatcaagccctcgaagctcttcttggttgaactttgaagtcttcttaaacctccatgttatctctatgtagaatcaagaagtatttgagtacctgctagagtgaagccatgaagtgctctttaaatcttcttcaaaaggtgtgcactttgatgcaaagcgtaccaactaggtgtagcctccaagcctcagtgtttatcaccaagagcttgagggtcaattctataatcttctaactttaatgtgtctattattcaaaagtttttaaatgtatccactaaggacatatgtctcatgccatcgagcctaaaaaccgagtacccgaatatacaaaatcgattattggggtcttatacatccttagacattttgtagagtaccaccccatggcaatgatcaaataacatttgtcattgagtggtttgccacatgtgaatcacttataaatggtggtgaaaaaactttaatcctatccactatgacagagtaccacctgttgagcttatacacacatagtggtaactacaccccaaaacttagtcatatggccttaaaattaataatatacgcaatcctcgagcccctcgacatagtcaggaataag

SEQ ID NO: 84427 - DNA, 1281 bp, Arabidopsis thaliana columbia
gggatcgtcgacctgcagccaagcttatgatagaggcatagagctctcatccaccacaaaagtaagcaacatccatttgaagactcatacaaacattatccatatccaagtcatattccaaatatggtcaagccaattcatgattccttatatcattcattttagcctggcaccctcaatattcatttcaatgtttgttcataataacattgtccttctttattcttccaacttgatcaatatcaatgcatagtgattttctaagtctttgtccataaagcaaaccaatatcaagactatcttatattcattatatattgtatactttatcatttaacctttgcctataatttatttgcctacccattcctaactcattcttcaatacttgatcaataacaatccactataaatctcttcttgttcatgcaaagcaaactactatttgaggccacaccatgctcatttctctttatctatttttggcttattaaaaccattgaaggtatgacatgagttttatatcatcattagcaccgaaacctacttagggattcatcaaactcattattttgttatttagccatcaaaacacgctagaagatcatgatgaactgatgaacttttagtgctaaactatgtatattttatcttgcattaatcattaatgtcttatctctagcttccttctcccaccaaaaccacacctcgttccttttacattaggcgagactcctataaccattagactgtctccaacaactttctcattctatcttctatcatatcttgtattctaaacttcactatatgaacaatgcagtatacaatacaaaacatgttttatataactatatgcacgatctgctgaagacatccttaggatatcagacctttcacgagaattccagcatgtgatgagtgctaaggtggtgcaattagggatggcaacagggaattccctgtcgggttgtacctccccatctccatcaccgagagaaaaaatttctccatggaaatcccccgaatggttgcgggggacatttctttcccatcaccattactgcgggataaatccccatcggggatccccatccccgcgtaaattatactcaagacatactttctttgttattaatggaaaacattgtcatttatacacattgtgagatgtaaaaaatattatgtgtacatcaaaatgaacatatttgtcaacaagtgatctcttgacaatgtcattgtttatttttatcattaactattataaaacaccatctagat

SEQ ID NO: 84428 - DNA, 1036 bp, Arabidopsis thaliana columbia
ccggggatcgtcgacctgcagccaagcttaaaatgacctattttgaagagtgtcatcttagagtgacccattttatcaaatttctctaccttttgacatcaaacctttctaaatttactctcaattagggctagtttggaaacctagttatttcaaataatttttatttccaaaaaatagttattttatcttggaaaaataaaaatcacttgataaaaagaggttatcaaactagcccctcaaatggggcaaaaaggcaatgttctttgaccaccgagcaaaccccagcctccgttactctccttcctcttggctcgcctcggctcccgtcgtccccttccttgagatctctaggatacgagcgcattcgcatcgcttcgcctccgccgcggcctggggagatggcgggtttgggaaaggcgatgtacgcggtgggattctggatccgggagaccggtcaggccctcgatcgcctcggctgccgcctgcagggcaagtacttcttccacgagcagagtaagtgacgccatccctctggcacaccccgagatcaccctcccttgtccatcgattagcggagcactacgggcgtagaggggatttcgtctgccctgagcggccgaaaggagtgagcgaatggggattgcttgatacggttagtagcggttagggaaaggaaggataggctggttcgctcgagactgtacgcagagttttgtgtagttatcttattgccctatgatttgagctgaattggacctgctctttcatgcatgttttctctgatgttgcacagtggctgtctggctgatcgcattaaatgcacagaattgataagattgatagattgagtaggtcaacaatatctgtatgcattgtggttattttgtttttgggtagcattgggttttaccaggtggtgcaaattttgtatgactagagttcccgatatgtccaattgctgtgttgatcatttcaatgatggtattaagttgagtatctatagtactatcccgtgtttctctgaacagcagtg

SEQ ID NO: 84429 - DNA, 744 bp, Arabidopsis thaliana columbia
attggcatccgcgacctgcattcaagctttgattcctccaggtactcactttttgcctgggcaaaagaaaaactgttcagtgtttttttttatatgccataaaacacaatatctcacccatgggtgaaatttcactgtcaccagatatgttcaagggagcatatataagaatactaatccaataagatgtatcagtgtaaaataatctttaagtaaggcatcatggtagcaactgatagcaaatccctgtcatgtactgtaggcatactattcaacctttttcttttcacgcacgaaggaaatactgcagtgtcttcgatgcttattcagattaggtagttttagtgcgtagcaaccatgaacaaacagtacaaactttctactagatttagatctttaaaagaatcataagcatatatcattcgccaacaaggggtgatgcactgaagcaggataggtttaaggtcttgaggatacctctggaaactgttcataggccaatgattgtggatgtccgaggcgaaaccaaagctcctcagccaagtgtggcgcgaagggtgaaagcagcagaacaaaggattcaataacagattttggctgggtttcccactgtaaaagaaaataagagtcacatcctgttcttgcgtaaaccatggaatatacgaccttagctagttagcttcctctatgtataaatgcatgtcattttggacatggcaagatccaatagagccaatgttgact

SEQ ID NO: 84430 - DNA, 1431 bp, Arabidopsis thaliana columbia
cggggatcgtcgacctgcagccaagcttacaaatacaaagcagaatcacttgttaaggagtaccttcttgcagattcgtatgtttcatacactgctgtacttggtgggatcctgatgtgcaagatggtaccatctgcctcctcttatatgttaacaccttgacattttatgatcaagactgccttcaaatcaaattaatatatgctctgtctcatgtttgtgtttaaatgagagctaagcatcactataagtttaatagttctttttttagaagaaaattgctataggtaaatataggactatggaggagattagaaataaacaaaacttatagatggaaggaaattagatcatcggtgtatctgagattggttcaaagttgaaattatttgtgattttgactatgattgtagatgccaattactgttgtaaaatagtttcaacagtttgcttggacttgtaacattagcttttattatgaattgtttagatttagctgaattcatggtaagttaatattaatgaacacctttgaagataagtttgttttgtgtttacataaattaacatgaatgaatcttattagagcatctccaagagattagtcaaatggcttgtcaagctaaattttagttaatcaaaagcaaaataactttccaacagattaaccatctgactcgcctagctatccggctctccaaattgactccctcaccagccaaacttggctagccactctgactggccaatttgttgatagataggttgttggattgagactctacatttagagtatagtctttatgaaaaagtaattagagggtcaaatagagagcctaaaattacagagtcccttgcagatgctcttaggtaccccattttaactaaactgtttgacataatggtagctaaaactttcttcttgagtacacagcctatcattgcattaagaagaaaggtgaggacaaaaaatatatttgtgactcattttttagtctctgttagttcatttattagacccagtatcacttagtattttttggatgaatcagctgacttcaggttgccttagaaaattagctggattgaatcactaagcgtttctgaagaagtgcttgaagtatcggtaacttggacaacgtttggtgtagttgtccataacaaaatagcaagtgtgctgtgatataatttggtaacaacacacagacaataattttgtttgtgttactgtgctagccttaaaactgttgcatggatttgttgtgattaattcatacgtaccaggagtccagaactttagttagctctgttttgaaataagttctcccaaggctaactttatgttttgttttctcaggcttatgacataacaagcataatcagctcattgtactacaagggcttatggttgcacttacaaaaaccggaaag

SEQ ID NO: 84431 - DNA, 742 bp, Arabidopsis thaliana columbia
tggggatccgtcgacctgcagccaagcttataaagatcgtagttcaatgtgaaaaattacattacaaaaaagaccttgtgacctactctaaagatgaaatgtatacagcgctgcttgttacttgttgctttgtttgcgccaactataaaatgctaaattatgtcacaattcattttctttgcgtgatttggttggaataagcaactagctcctggctatgtgttggatgtgcacattcctagttgtcacagagacctagaaagtacacttctagttgtcacaaagacctagaaactacactcgcatttactccctccatcgtaaattaaaatttgttttactttttattagattcatacaatgattaatgtatgtgttctatatatgtatctaggttcataatcattcatatgaatctagacataaaaatttagagctaaaacgactactattttagaacggatagagtatatttaaaaggtagaccttatttatacttgtcttttcgacttgggataaccctttttcccatttcacaacggaattgaggacttagtttggtttgaggtccgatgacaagacgatgagtcgatgacagcctttgagttgcatggaaacacgaacaaatatgcatggtactcacgtaccacgtaaacatgcttactggcttttgcagatggatccagatgaagtgtattcaagtattcagtgcagatgcaaaaggtaggcaagaaaccataac

SEQ ID NO: 84432 - DNA, 739 bp, Arabidopsis thaliana columbia
gtacataagacccttttctcccaaccaaccatgcaccaaagggtacctcactggatactgcaaagaaacgaattagcatgacaagttagacttgaaaataaccacataagaatattattaaggaacaatccaatacattaagtcgattcaaaaccatggagatgcatctacttgttatatcatccttaatgaaattcaataaataacaacaacggcacttaatcccgagcaagttggggtagcaaaccaccaacaaaaagatagaaaagaaaaggaggtgtattagcagtagatagatgtatacaggaaattggcacaaaggatgctccaacagataaattctctgaaccatatcttacacccatgaccccatagtcttctgaatgcaccctgcaaaaaaaacacaaacataacttaacggaataaaatatagttaacattggtccagaaaaaaagattcaacaatcaacattaaagtttctggaaagctatataacagcactttgcattttttggaaacagaaacaagatatatggcctcacacctacctagtacctacctgttccccattagcaaaggtaatgttccaaaggcaccaatacgatacttaggatgatatgcacataatctcagctgcaacaagcttcaaaaaaggaggtgcgcaaattgttattgacgtgtttttcatacacaaaaatgctgagaaaaactattatagcccatcgaaccaaaaagtgc

SEQ ID NO: 84433 - DNA, 754 bp, Arabidopsis thaliana columbia
aagcttgaggctgcagaattaccatgccgcaaactgatttttatgtagacagtaatgtgtttatggatatggttgacacttaaataaaaagctgggctgcgtgcacatgccatttacaatagagatttgccttgcgcgggaaattgtattccatttacagtagagtcttgccttgaacaacaatgttcgatgtggtgggataactgacttgatcctacaactaccatagtagctaatctccccgttgctcgtatgactagtaacacacttgaggagcacagataaacatattgctgctactctggatatacgggtatgcgtacttcttgttgtgcttttcttctactatgctgtgtgcctagtgataataatttatgatcctctactcacacgttatcttgcttggtatggtaaatatgctagtgcatagtgtaattaaaaatggttgttttacgagaataatatattgatttccgttttaatgcatgcactttcatttaaaattgagttgagtagaacttgaagtaatctataaaaaatgctgtacctctagaacaattggcacaaggtcctggactgttttttgtatggttcttatattgaatagcacaaaaaaatttaaatccaagatattaaaatctggtgaatttgatagtttataaatgaagccatcttgcacaccagcttcaaaatttggagcatcaggttttatatgcgaaggtgcgtgttatctcgctggacgtagataggcttc

SEQ ID NO: 84434 - DNA, 758 bp, Arabidopsis thaliana columbia
aagcttgaggctgcagcgacgatggatcaaccgatgcgctgctcgatctgtctgtcttgtagcgtcttgtgtttcagggactgcacgggagcactagctatatatacatatactctctctctctctctctctctctctcatatttcatgaccggtgtggttttttgatcttctgtgacaggctctcagctacccctacatgggccacggcaatgggacctccattcaaaatgtatgtctgcatgcatttctctctctctctctctctctctctctctctctctgaaaaacacgcacaggcacatacacacgatcgctcgctgtggaaagaatcttaggtccgaggttaacagtatgcctatccacgtgcaaccgtattgtgaaattgctagccggggtagactttgacgcactttgtatgtagggagcacacaattaattaatagcgccttagcaaagcctttagctagcaaaggtggcccggaaatatactttgtcaaagggtactctaaagaagccttttaccaattagcagcaggcatcagtacgtacgtagaacactgatcctttggctaacctttgatctgtccaaaaggactagttggatcttttaggctattcaaacaaacgatggtttcttctagttttcacttcaaataaacagtaaacataaataggttctgccaggttctgttaattaccccgagaaattaataccggtctgttcaagtattgactccacgcatgcatgtagtaaga

SEQ ID NO: 84435 - DNA, 756 bp, Arabidopsis thaliana columbia
gacttcgctggcctgagggcgtacgcgctctacctcaagaggatccttgaggccggcgagccatcatcgccggcggtgtcgtcgccgctgccgcagcctcttcctcctccggagctcgtgttcggcgtcggggacgacgatgacagtcgcggcgacgaggacaccgcgccggagaacgacgagtccgctgccagctcgcggagcgagctaacgtgacaatgtaagagaacaccccgttcttctcgctcactccggtcccattgtcaagtacatgacgagattctttttggtcacctgttgtagccgatgtgggcagagacggaggagcagccgggcgatctttacccgcggcggcagggcagcatgaaaggcaggagggacctcttgaggccgccgagcctgtacccgcagcgcgtgccgccgcacctcatagttcagcagcagcagcagcaatcgctgccggtgggcagagggagcccagcgtcaaggctccgagcggagcactcacggtcgcggtcgccggccgcgccatcagacgacagcatggaggattcttcctccgagctctgtgcggccaaagaggtacgtgctctctgactggcgtccatcatttggttcatcacaacaccttcattagtcatactctctccaatcaaaaaaaaaattcgtttttagtatttcagtggattcataagttgatgtatttgatcagggcttcttttacttattagaagctcagggctctaaatacatata

SEQ ID NO: 84436 - DNA, 753 bp, Arabidopsis thaliana columbia
tcacaagctgggtgcagaggtattggtcttttctgattcttgcttctctttctccctcgaattctttctcttctataatacatactgcgcaggtgtctttcttctccgtctttttttcttaccaaatctgagatgatactttcaccgtcatccgtccattctcaccgtgcaatctcaactttacacttcttgacagaaaggtcctctgctaaaaattcaacgaagcatctgctctcctctcctctccgctgttcttgctatatatcgatcgcgattccattactacgatacataataataacaaaaagaaagaacctttccgcgtgtttggttgctgctcctgagcaggcaggtgcttctcccctcgcgagtatgtgggtgtccacaccacacgcctatcctcctttttttccgcttcttctctgttttcttccctcttaatatatccatcaaatcactgtgttagcgtgttatgttcttgcaccccccactgttcacatgccctgctttccccccgatccgtgtaccctgttgcggggcctgcggatttatcgtattcccgcgtcctatctctttttcttgttggaaacagagctgccagtctttgcagattgtcgatagagaacaagcctagattaagtgacacacccgcttgctccatctggggtcaaacagaggcttttgtgtggtgcaagcaagatcctggacaggagacgtcattgtttactgttttttttctcctccattgacagt

SEQ ID NO: 84437 - DNA, 757 bp, Arabidopsis thaliana columbia
aacttgaggctgcagaagttagaacttacatgtacatcttctagaggtgaaatcgacagctgcttatagtctatggtatgattgtgggcccccggtgccaaaaaaaatataaggatccaggagatttgcaatatcccaagtacataatcatattaagctactaccaacctacctgctcactgaagccacgttatctagaagcattgactaccaaccagtcgtaaaacagaacctaaagacaagttggtggatgtctctagctaataagtggaatggaaacatggaggctaaacacgtacctaaaaaaagaatacattgtttttaactaaactaagttaagcgcaaaaaatatatatatatcaaactacaaatttcaattaacgtcagatcaaacaaggttggggacctagagggcacctaaacacttaatcctggatgcatatatgatatatcaagactcaaccattatacaatttacagtattatgaaatttaggtgctaaagtacgactatgtaacactagctaaactgtgaatactactaaaacaaccgctcgtgagagaattcaataggcatacatcacagcaaaaacgcaccttactggcaaagatgcctttctttactttcttcttcttcttctttttactttgagatcataaaagagaaatacagaacccggccaggctgtataatgcagtcaattcggtaaatgggacatcaagcttcactggccctagtttgctgctgacaagccagc

SEQ ID NO: 84438 - DNA, 749 bp, Arabidopsis thaliana columbia
gtgggtgcagtgatggtggtggagacggggtcggcgagggagaggcgtgggggtcggaggagttggggttggagcatcgtgcgaactcgggcgatggatgggtgaagggaaggctgtgagcctgtgacttgcaatcgtctaggcgttttcccggtgaccaatgcggtgcggacgctcgggcagagggagacaggtggatgatgctttcaaactaatttggatccgcaggaccacgagaattttatagcgtcaaactaattttctgcaaattcgtgaaatcttttgccaaacggggctgcatctggcattggtctggccgtctgggccatcgaacccatcaaacagacgattttgcctcgttgatgatccaggaaagcaggggtgaacagaagggggaaaaataaataaaagagcagcaactgtacatatctgcaggctatctccaacagagcgtgtataaaacttttttgcattataaatcacattgtttatatagtagagtttgaaatagggtaactaggaagcctatgaagcgcaaaacattaaaaattgatgtgaaaaattcaatgatgagcaatacagttacaaaatgtatgtagtcgttttggggcacatgaaatatgaaaacagctttctgtgtttcaatttgctaacagaaatgtgaaaacaacaattggaagtaagaaaaaaacccgtcctgtctattatgccgatggtgtaagggggaatgctgccctttgccctttgtg

SEQ ID NO: 84439 - DNA, 758 bp, Arabidopsis thaliana columbia
gaaattcaattgccttagcactgaacaaaacaaacagtaacaatcgggctgtcaggcgatgcggacggatgggatggcactggacggccaggatggacccattattggcgcagagcgcaggcctgctggaaattaccagccagggccctgccgcacggtgcatacggcaacaataatatgctcgggacccacctggcagcggcaggggtcccagtgaaaactgaaaaggcctcatagtatgtatgtatacatagagtcatagagagagggggtaaaattaagggagggaacgaggacagagagaggaattaaaagcaccgcctgtcgttgctagccatgacacaggccacatgaagcacccaaggagccagccagttaaagcttccttccaaactcctatttggccgcaccagttctttttttttttacaccaccgaccgcgcgcctagcctccctttcaccatcgccacgtacttgatttgtttccgtcagttttaatttctcgtagccgacgaatggcaagcagtgttaaagcttagcggtccgttcctgtagttacagtgatcaattgcaaatgcggcacggaaactaactagccacccggaggaaatgacgtagtatgtggttattactactactctactagcatattgatatactgtatacattaatgggtatgtacagtgacgcacaaattaaaaggagcagcagttagtagttggaggccaggacacataaacgcgcaccaccaccaccac

SEQ ID NO: 84440 - DNA, 757 bp, Arabidopsis thaliana columbia
ccgcttggcctgttgacgttcaagaagaagaaccagaagccgctcttcgaggcgctgctcaaggtcaaagaaggtgcctccatttccctccgctccttatgttttttttccacctgaagataataaaattagacaatgatatagataaaaaaagatggcggatatttttttataaaataaaatagaatagttttacgaggataaagctcgtatgcactgagccttgttgactactatacgaacaccggagactgattgtcctctctctgtagaagagaaccagaacgaaaccgggtgattggctatttaaaaatgcatcttataaggaaaaaaaacatgtgtgatttgacagcagaaatacgtaactttttttgttttctatagtcatcctctactccgggttttttcagataatttagagtggattttagaagggttcttggagatgctctcagtcttatttttccttttctctacgattccggaaaagatacagatgtctacggcacaaacaaccttacctctttgtctctgtgtgcgatgcagagctgatgcttctggggttcatctccctgctgctgacggtgttccaggggatgatccagaagacatgcatccccgaagactggacgttcgacatgctgccgtgcaagaagccggacgaggccgccaccaccgccaaggcgagtttcgtcgatgtcgggactacccttggcaggattggtaggcggttgctggccgaaagagttgatggggt

SEQ ID NO: 84441 - DNA, 754 bp, Arabidopsis thaliana columbia
gacaacttggactgcagtgttgcttcctccatccatctcctctcctgctgctaaggccctgtttggtttggctaactaaaatctagttaattttagtccctaaagaagcaaacatgatgactaaagtggaacgactaaactttacttcttggtgactacaagggactagagtaggatttttgtcttatttgtcctctccactttctttttggaacaaacatttactaattaataggggtaatacaaccattattcgcatcaattaattctctttagtccgatttagtcaccggaaccaaacgagatactttagtctagtgactaaatgaaccaaacagagcataagcatgttcgtttggatttaattcgtatcggtttctacagagtttttgtcgattgcagccgcaatattccaaacagctagttttaatttgaaacgaacaaccctcaggctctctccaaccattccccatatatatcttcttttatctatactttttaatatattttactgttttttcttaaaaggttccatcccatacgctctctccatataatacaactcatttatttaatatgtatttatcattttttttgaaatgttttaaaaaaaactagacaatatttatatgccctagtaaacattattatcaagttacgtgacttaaacagaattaatattagtgtgattgaaaacaaggagagcataatgctctccttagggcttgttcggtttgatttcaatccatatggg

SEQ ID NO: 84442 - DNA, 756 bp, Arabidopsis thaliana columbia
aagctgggtgcagagatgttgtaatctatccttattaagcatgtgcagtgactacttatactgatagacaaatttaaagatatgcagttgtttacatcacaaaacataataaacatccaccatgaaagcgtagctaacatccaccatgttaataatacctctaatagtagagtacaccctccatcctaaaaggacctatgtaatgatactaaatatactataaagttcaatgtgttagacggagagagcagacccgttaacaagaacatctgaagggtaaggacccaagagcaccagtggtaagagtagaatgcgcattcttcgttagtatcattccggaacagaatcagtttgtcaatgacgagcgtgatacaaaataaaacccgagtaatagaacgactaagcacaaacagaagacaagagagattaaacacacataaaaagcctttttttaataaagaatacttcaaatttttcgaaaaaagaacatctcaaaggaaaagaccatcgcgaactatttggtgtagtgtttttggggaacccgcgcggccatcatcgcgcgcgctccgaccgcgggcagtcgtcatcgctcgtcgccggcagcgaccgcgggcgcaagcgccgcctctttccgacgaaccgcgccaccaacccaccaacccttgcaggccggcgggggcaacgcgggcacggggaggcgaactccggccgccgcggtgctgccggacggcgcgctcggataagatcaagtagtgt

SEQ ID NO: 84443 - DNA, 1067 bp, Arabidopsis thaliana columbia
agtctagtgcgctcgcacagctatgtatagctgctgatgtacagttaggacaagtcgcacgagtgtgtcatccagtgtgtcgcgtatcagtcattcatctactcgtgcagacagtgctagcgcatcgtgcctatgtgatacgtgtcagacagaccattgcagcgtgctgtaccactcctccatagcgatgagtatttcagtactgtagctctgccagcgtgactcaagcgcgcggtgtgattatccgtcgagagcagacgtagactacgcatgtaccatcgagcctagtgccacacctacacccgtcaacaaccttacagtgacactcatagaatactcaagcttgcatgcctgcaggtatggcaatggtgcttccatatttacaacatctggcgtctctgccaggaaatttcaaacagacattgaagctggccaggtatagtatcagtcgttttcaaaggctgctgatatcagattgcatatgctactcgaaaagaaaagaaaagaaaagataagataagaaagaaatggttccattctgaatttggtaaaactaggaaccagaagaaatgaggtgactcatgcagcatgcattattattattcataacgtttttacggttccatttgcaggtgggcatcaacgtgccgattccagtccccctgccgttcttctccttcacgggcagcaaagcttcattcgcaggagatttgaatttctacggtacacccttctcatcctaacaccgcctgatccttcccaaacagttcgtgagtgactaacacgatggcatgggatgggatgtcaggcaaggctggcgtgcagttcttcacccagatcaagacgatcacgcagcagtggaaggagtcgccggtgcagcgggtctcgctctacatgcccacctcgcagaagtgaaacgtcaaggcgctcacgccactctccaaaacttcactcctttccactcctctgggcatagacccacgcctgggccacaagagaagggtaattggtaggcatggcgacactccatgcatggccatgatactagtgtgtgctcgctttgctct

SEQ ID NO: 84444 - DNA, 761 bp, Arabidopsis thaliana columbia
atatgcccatgattaggctaagctttttaggtgacactatagaatactcaagcttgcatgcctgcagccagcgaagccgtgcacggacgagtagaaggccggccgggtctcaccttgcttgcagttgcagtcggctcgtgccgtagtgccgtcagccgagccacgggcaccgcagctgcgagtagaatatgcagagggcggcgaggcaagtgtatagtaactgtgcgtgtgtgtgtgtggcgcgtcgaagtcaaagcacggtgcgggcgggcgggcgggtactctttgtccctcgcggccgggaagctctcccgtgggcgtaggtgaccgcggccggcaagcaactgccaacggatatcccacggccgctcccgctcgcaggggtgttggccggccgcgccgccgtcgcctataaatggcgagcgagagaccacgcaaaggtcatgccattccgtggtcccgaacgacgccctcgctcgtgcactctctggtctctttctcttcgcctgaccctgagcacagcgccacagacacaacaacctcggactcgggagtacgtgtagctaggcccggtactgtgctgcacgccatggtccattgctagctactagagctctgttgctctgtactgtagctagtacccctgtcgtcgtcattgcctagagacacgtacgcagtcgcgttgctgatggtttgctttgcctgcaggtcgactctagaggatccccgggtaccgagctcgaattcggcctatactgagt

SEQ ID NO: 84445 - DNA, 588 bp, Arabidopsis thaliana columbia
tttagcctctccacactcacaaagggctcacaagtctcaaatacaaaacaatgaagaacatactagcttgcatagttaccatcataaccctctcaaacctcataaccatttctcaaggaagaagggtatcacagtcatttgaaacatttgagtacacagcaattatttgcagatcccacagtgcctccataacagagtacggtggtgtaggagacggcaagacgctaaacacaaaggccttccagagcgccgttgatcatctcagccaatactcatctgaaggcggagcacagctctttgtacccgccgggaaatggctcaccggaagtttcaacctcacaagccatttcactctgtttcttcacaaagacgcaattcttctcgctgctcaagacttagacgaatacccaattctaaaggctttgccttcgtacggacgaggacgtgacgccgccggtggaagattcgctagtctcatcttcggcactaatctctccgacgtaattataaccgggaacaatggtacaatcgatggtcgaggatcgttttggtggcagaagtttcacggtggtaaactcaaatacactc

SEQ ID NO: 84446 - DNA, 784 bp, Arabidopsis thaliana columbia
tatctagccctcggacgcgtggcgattggcactctctcctcttggtggggttgacgaatgtctccttccctggcgtctctctgcatccaatccctcaaaattcagcttctagaaagcgatcatccaattccagatttatacgagcttccatcggagttacttgatggcattgtcgctcacttgcctgctcttgctttgcagaagtttcagaccaacatgccgtttcattgcttggatagttatgaatctggagatgattgctgcttgattactgggagaaaacgtgcaagagatgatgtacttggtagctcttggaagttgctgtttaagctgcggtggcctgaattttgttgacccgtgtgggaatcaccagctgatttggcaacagccttttactgggaaaagcatctccaaaattgtgttgattgaagcagctgaggtagctcctgcgtccggcaatttagtggtcgggtttgccccatgaatggatctggtcacatattgggatgcatttgccatgaagagcacatcatgacttgttaaaattgtgtctgcagggaactatcttttcatttcccaactttcggaccatatcttaagggtctgaggcttctgaatgtcctttgcgttacaaaaacttttgaggtattggtggacaagttaattggcgaagtttggggttcttacctttggatccaggatcccgaggaaggccttggttggagcccccttggtggcaaagcctttttgggatttcataaagccccgagaaaaaccatttaaa

SEQ ID NO: 84447 - DNA, 1041 bp, Arabidopsis thaliana columbia
  unsure (1)..(1041): unsure at all n locations
cccccgggccgccggtttcgataagctggatatcgaattcgcggccgcctcgcaatctcaacgagaaagccaagaacacatcgcaaaagaccaaaccagacttacaacgaagcagctactcttctctctactgcttatcccaacatcttctcctcaaacttgtcctctaagcaaaaaactcactcttcatcaaactctcacttctacgggccattgcttagtgacaacgacgacgcttctgatttgcttcttccttatgaatcaatcgaagaacctgattttctgtttcatccaacgattcaaacgaaaacagagtttttctcagaccagaaggaagttaactccgggtggagattgctacggtggtgaaatcgaaaagttttgatttctccgacgaattcggatgctgaatcgattctcgatgaggatattgaaggagggatcgatagtataatgggggctgtggtggaatcgatttcaaatccggggatttattgaatctggggtcccgggaatgatcaatcgcggtggaagaagttcttctaatcggattggtaaactagaacagatgatgatgatcaattcatggaatcgaagctctaacggattcaatttcccgttagggcttggattacgaagtgctctcagagaaaacgacgacacanaattgtggaagaatcataccgttgatttcgaacagatctcgccgcgaattcaaactgtcaaaaccgaaactgcaatctccaccgttgatgaggagaaatccgacggtaagaaggtggtaatctctggagagaagagtaataagaagaagaagaagaagaaaatnacggcgacgacgacattnattacggaatcgaaaagcttggaagatacggaggagacgagtttgaagagaacaggtccgttgttgaagcttgattacgacggcgttttggaagcttggtctgataaaacgtcgccgtttcccgacgagattcagggatcggaagctgtcgatgtcaatnctagnttagctcanattgatttttttcggagaca

SEQ ID NO: 84448 - DNA, 461 bp, Arabidopsis thaliana columbia
cccgctttggctgatgaaagaggcaatgagataaagacatcgaaggttgatctagaaactgaggttgcagtagttagtgaaggaacatccccaaatccatttctggctctcctgaatggtcttggaatttttagtgctggcgttcttggtgcactttatgcactggctcggcaagatacaaaagctgctgaggaaaccatcgaatctctaaagaaccagttgaaagacagagaaagagcattggttttgaaggagaaagatttcgaggcaaaactgcagcatgagcaggaagagcggaaaaaggaagtagaaaaggcaaaagaggaacagttgtcattgatcaaccagttgaattctgcaaaggacttggtgacagaattaggccgggagctaagtagcgagaagaaattatgtgagaagcttaaagatcaaatcgaaagtctggaaaatagtctgtcaaa

SEQ ID NO: 84449 - DNA, 806 bp, Arabidopsis thaliana columbia
  unsure (1)..(806): unsure at all n locations
ccccccccccaggtcgccggtatcgataagctggatatcgaattcgcggccgcgcttgagtatatgtttctctatcaaaacaagctctccggtcagatcccaccgtccatcttctccctccaaaacctaatttctctcgactttagcgataactcgctctcgggagagatccctggctcgtggctcagatgcaaagcttggagattctccatctcttctctaataacttaacaggaaaaattccagaaggagtaacttctttgccacgtctaaaagttcttcagctttggtcaaacagattttccggtggaattccggcaaatcttgggaaacataacaatctcactgttcttgatctttctaccaacaatctcaccggaaaactccctgacactctttgtgattctggccatctcactaagctcatcctcttctctaactctctagacagccaaatcccaccgagtttgggcatgtgtcagagcttagaacgcgtgaggcttcaaaacaatggcttttcaggcaagttacctcgaggtttcaccaagttgcaactcgttaactttttggacttatccaacaacaacctccaaggtaacatcaacacatgggacatgccacaacttgagatgttagacctcagtgtgaacaaattcttcggtgaattaccggatttttctagaagcaaaagactcaagaagctcgatttatcacggaacanaatctctggagtggttccacaaaggctcatgacgtttccggaaataatggatttggatttaagtgagaacgaaatcactggagtg

SEQ ID NO: 84450 - DNA, 423 bp, Arabidopsis thaliana columbia
ccgactgttcggttccattcgcgtatcaaccatgacttgtgtcagccatgttaccggcgtggtggattcaaagaagtttggggttcttgcaaaactggcaaagacagtaccacaatggaggaccatactgactcaattgaagaaggagatggctgcatcgcataaccggaagcttgttcaacctcccgaaggaactttcttctaatactctcaaagcctacctttgaggggcttctccattgttggtcttcaagcttttctttcgtaccttaaagtaaaaacaatggtgtctgtcgatgaatgatgatgttcgattgatcatctggagtttaaatccttgtgtgcaaatatatctagacaacgctgtctcacgacttcatcttctcagtttagatataatatgggaaacaaccttctagaatc

SEQ ID NO: 84451 - DNA, 787 bp, Arabidopsis thaliana columbia
  unsure (1)..(787): unsure at all n locations
caagttttaatacgcctccctatagggaaactgggtcgccctcaaggtaccggtccgaaattcccgggtcgacccacgcgtccgtgcgtctttggcctggccccatcatcggtcctcacaacactgttcatgaaggtagaatctatcagttgaagctcttttgtgacaaagattacccggagaaacctccaactgtccgattccattcacgtgtcaacatggcttgtgtcaaccaccaaacaggagtggtggatcctaagaaatttgggctacttgcaaactggcaaagagagtacacaatggaggatatactggtacagttgaagaaggaaatgtctacgtcgcataaccgtaagcttgttcaacctccggaaggtacttgcttctagttacttctggaatcttcttctggtttgctagaaaatcattgccccttctaataccaaagtatgtatctgggggtccttcattgtcgttctcaacgcttttttttttttaattcatcaaaaaatggtctgtgtggatggtatggtgatgatgatgatgttgtccgattgatcatctgaagttttatcattgtgtgcaaatatcaaaaacagcttctcttcctcactccatgtgttcaatcttttgaatttaacatgttgtgtcagccctttttttatatataaatgaaatctgctatatttgattggttaaaaaaaaaaaaaagaaaaaacaaaaagggcgaccgctctagaggatccaagcttacgtacgcgtgcgtnnnnnnnnnnnnnnnnnnnnn

SEQ ID NO: 84452 - DNA, 621 bp, Arabidopsis thaliana columbia
  unsure (1)..(621): unsure at all n locations
ctctattcgattctccctttacttcttctcgtctctcttctctgctcgtcagatctcaaaatcaatcggatatcgaaaccacaacttcatcaattatgactcttggctcaggaggatctagcgttgttgttccgaggaattttcggttgttggaggagcttgaacgtggggagaaaggtattggggatggaactgtgagctatggaatggatgatggagatgacatctatatgcgttcttggactggcaccatcatcggtcctcacaacgtaactgttcatgaaggtagaatctatcagttgaagctcttttgtgacaaagattacccggagaaacctccaactgtccgattccattcacgtgtcaacatggcttgtgtcaaccacgaaacaggagtggtggatcctaagaaatttggggctacttgcaaactggcaaagagagtacacaatggggggtatactggtcagtttgaagaacggaatgtcttcggcgcataaccgtaagcttgtcaacccccgaaggacttcctccaagtacttctggatctcttccggttgcaaaaaaatgcccccnaaaccaagangactggggcccatgnggncaancttttttttntng

SEQ ID NO: 84453 - DNA, 611 bp, Arabidopsis thaliana columbia
  unsure (1)..(611): unsure at all n locations
cccaaattgctctcgactttttattctcggattagcgtttgtgctttcgcatcagagaatctctcagttcttctcaatttaggtcatcagatctcacaatcaatcgactcgaactcaaatctcacttcatcaatcaaatcatgactcttggctcaggatcgagtgttgtcgttccgaggaatttccggttgctggaggagcttgaacgtggagagaaaggtattggagatggaactgtgagctatggaatggatgatggagatgacatttatatgcgctcttggactggcactatcatcggtcctcacaacactgtacatgagggtcggatttatcagttgaagctcttctgtgacaaagattaccctgagaaacctccgactgttcggttccattcgcgtatcaacatgacttgtgtcaaccatgataccggcgtggtgggttcaaagaagttttggggtctttcaaactggaaaggcagtccacaatgggggcatactcgcccaattttagnagggggtggttcatcgataccggaggtttttaacccccggggcctttttttaaccntaaggctcctttgggggtccctttggttaagttttttncnt

SEQ ID NO: 84454 - DNA, 472 bp, Arabidopsis thaliana columbia
taccactcactttaggggaagctggtacgcctgcaggtaccggtccggaattcccgggtcgacccacgcgtccggaaggagaagaaaagtgtcggagagaaagaagaagccaatcatcatcgccagttgttcttctcttcgagatattcaaatcctccgtctctagagaatttcatatcaagagaatcagtggtttctgtagtttgtggtggtggtggttggaaggtaagataggatatggcgcaggagcaggaaggagcggtcgttgagaaaggtgagccgaatgattcctccgccgctgccgtggccgcaaccgcaaccgcaaccgccgatagcgtgaagaagaagcaaaatggattcttttcgcgtttgtggaatgggatatttagggttagaggtgacgatttcgagagagacttcatacatctcagggaagaagtactgtttatcaagatgaagcgagatcgattca

SEQ ID NO: 84455 - DNA, 689 bp, Arabidopsis thaliana columbia
  unsure (1)..(689): unsure at all n locations
aggagtttccggatcttgccaatgtttatctttcctgctgtttctgctcttgcttattcctcaatcgtcagcttctcaaagatgtttgaccgcagagatcaaaagaccttggaaaagcttcgagctgaaaggttggcgaaaatcaatgaacttaaagaaaggaccaattattataccacacaacaacttattcagagatatgacccggacccagctgcaaaggcagctgccgcaactgtcctggcatccaaattgggtgccgattcaggcttgaaagtatatttaggagatgaatcccaactcgatccatcctcgggcaagagcaatgacatggaggttaaccaatcacgtgggttgaggaatcgaaggcaaccaaatacaagaccccacggttctgggagcacttcaacacatcattctgatgatgagtctcaccattctggaacaagcgagagatttccaggcaccacagagcaaaaccagcagatgttggttgagcattacagccctcagggatatgctgctcatgatngcagttggatcttacggattgnggctctacttntgggggaagatcccacacaatcatttggggtcatttntggaaactntcggtntncanaatnggctttntntggnaaagggggttttccttnaattanaactttttccccnncttgnattnttta

SEQ ID NO: 84456 - DNA, 602 bp, Arabidopsis thaliana columbia
ggtacgcctgcaggtaccggtccggaattcccgggtcgacccacgcgtccgatggcgcaggagcaggaaggagcggtcgttgagaaaggtgagccgaatgattcctccgccgctgccgtggccgcaaccgcaaccgcaaccgccgatagcgtgaagaagaagcaaaatggattcttttcgcgtttgtggaatgggatatttagggttagaggtgacgatttcgagaagagacttcaatacatctcaagggaagaagctactgttttatcaaggatgaagcgtagatcgatttcatggaggaaactcaccagaaatctcatccgttcctctgtattattcgagataattgctgtgggttatgcgatcctgacaaccagaacggaagatttggattggagaatgtggagttccccgatcttgccaatggttcatctcacctgctgcttctgctcttgcttattcctcaatcgtcagcttctcaaagcatgttctgacccgcagcacatccaaatagaaccctttggcaacaaagcttcttcgaggcctctgaaacagggtttggtgcgtaacaaacattcaaaatgggaaaacccttttataaa

SEQ ID NO: 84457 - DNA, 778 bp, Arabidopsis thaliana columbia
gcctccaggtcgacggtatcgataagctagatatcgaattcgcggccgcgggaacttttgcatctgctctatcgctgtggggatgataattgagattgtcgttatgtatcccattcaacaccgtgcatatcgtcctggaattgataaccttcttgtgcttctcattggcggtatcccaattgccatgcctacagttctctctgcgaccatggccattggctcgcataggttatctcagcagggagcaataaccaagaggatgacagcgattgagggaaatggctggcatggatgtgctttgcagcgacaagaccggaactttaacattgaataaacttactgttgacaaaaatcttatcgaggtttttcacgcaaaggagtggatgcggatacaagtagttctaatggcaagctcaagcctctaggactgggaaaccaaggttgccattgatgctgctatagttgggttgcttgctgcccctaaagaggcacgggctggtgttcgagagggtcactttcttccattcaatccccctgccaagggcgcggctcttacatatattgacagtgatggtaaaatgcatagggtcagcaaaggtgcacctgagcaaatgctaaatcttgcacacaatagagcacagattgagcggagagtacatgctgtaatagacaagttcgctgaacggggttttgcgaacctctcgcccggggcttaccaagaaagtttcccggaagggaacaaaagaaaagtggctgggaggccccttggggcaaattt

SEQ ID NO: 84458 - DNA, 774 bp, Arabidopsis thaliana columbia
  unsure (1)..(774): unsure at all n locations
acttggccctccctcgaggtcgacggtatcgataagcttgatttcgaattcgcggccgcggtaataaagcaggaaaagagaggaaggtggaggataaggtcgttgttatggacaaagaggtcattgcttccgagattgttgatggaggaggaagcaaaaaaagaaggggcaacggttactaggactatcaagctggtacatggagatgatataaggtgggcacaattgccgttggattctactgttagacttgtgagagatgtaatcagggatcgctttcctgctcttaggggtttcctcattaaatatagggatacagaaggtgacttggtaaccattaccacaactgatgagctgagggctagctgcttctactcatgataaaccttggctcccttaggattatattatagcagaacgttaaccctgaccaagaacccaacctatgatggcatgagcaatactgaatcacctgacaaggtttccaagagattaagtagccttgcggacattggtagtgttggggaacccgggggatctgacaaagcatctgggtgctttgagaactggattttccagtttgcgcaattgtttaagaaccatgttgggtttgattctgattcgtacgtggaccttcatgaccttgggatgaagctgtatacggaagcaatggaggatgctgtcactggtgaagatgcgcangaactctttcaaatcgcttgctgattaagttcccaaagaaaatggggggccaactagccttttgtttgaaac

SEQ ID NO: 84459 - DNA, 802 bp, Arabidopsis thaliana columbia
cttggccccccctcgggtcgacggtatcgataagcttgatatcgaattcgcggccgcatttaagaaaaaaagattacaaatggacaagaaacaagaaattaatgatttcggtgattattaaactatagtattacaaacaaatttatcaacattaacttatagcgaccgacaaaagaaacttaacttttagcgatgctccagagtttttgaccgggtttgttgacaagtgtgtgagtgcttaaggttgggagctaagtagtctttcggcctcgtcgtttgcttcagcctgtattttccatttctcttcaaggttttcaagttccatgatctgctctatctgttgagcaatgttttcagtattgttcactgcctcggctgcaagaacatcactgtccatttccacctcaatctcaatcattgaagatattctagcataactatcgatcagatcaatctttccctttatggagttctctagactttctcgtaccttctttactcttgttcttcgagtacggtaagctggctctcccactgctaaaattttgttctcgagctggcacattcgagccaacatccacacctctttctcaactgcttctttttgatctctaatgcgacgctggagcacatcatattgagataaaagttgctgcttgataccaaccacatctactgttcgttcaaggagcttatttaacttaggaaagacaaaagaaattacggttgcttcctttcccttgtgatgtaaccagtaccaacctggaaggaacttgaggcaaaactggggatcaataacccc

SEQ ID NO: 84460 - DNA, 710 bp, Arabidopsis thaliana columbia
ctatatgggaaagctggtcgcctgcagtaccggtccggaattccgggtcgacccacgcgtcgtcggctggagaagacacaaaggtcggctgcgagaagacacagaagggtacggctgtgagaagacgacagaagggtacggctgcgagaagacgacagaaggggattcaccaaaaaaaactcatcaatcaaacaaaactcttaaaagcttaagaacaaataataaaaatggccggtgaaggagaagtgattgcttgccataccctcgaagtttggaacgagaaggtcaaagacgccaatgaatccaagaaactgattgtgatagacttcacagcatcatggtgtccaccttgccgtttcattgcaccagtgtttgcagagatggctaagaagttcactaatgttgtcttcttcaagatcgatgttgatgaattgcaagctgttgctcaggaattcaaagttgaggcaatgcctacttttgttttcatgaaagaaggcaacatcattgatcgtgttgtcggtgctgcgaaagatgagatcaatgagaagctgatgaagcatggtggtcttgtagcttctgcttgattgatttcagtttctaactctttgcatcataataaagtttttatctttcgtatgaaataaaagtgatgcattgctactgcccatttgtattataacctatgttgatttttcgattactggtttgtt

SEQ ID NO: 84461 - DNA, 734 bp, Arabidopsis thaliana columbia
  unsure (1)..(734): unsure at all n locations
cggtcctttatttccgggtccgccccacccgtccgaaaatggttaaccctcaagaagaacctgctgaagatgaaacctcatccttcgaccgttaagaggaggaggattaagagaattcgtttcgtggttttgggaaaattcaatggcggtttctactgtatcgtcgtttctattgccatctttcggcattccaagctcttcgccttcttctaccagactcaaagtctctctgctgccttcatcttctacccatggcgggcctagttcctgcgtccttacgaaaccatccgtctcgcttacgaaggtcttcgctgttcccgataccctagatccaactccagaaattctcgatgaacccgcctctgaggttccgagctcttcatccatcagtgtagacgcggttaagatggcgccaaagcaaaagattatggatcaaagcttagatcatactgggtgcctcttattgaggactcatgcaagcagatactttgatgctggcgagaaacacnaatggcaaagacgatggggtcctggttccattggccaacccaagaagcngtatctaactggnggttcctcnaagtcttccctcaaggtttcanaanggattctaagggttccaatttttgaaatccngggnaaaccaagggcattganttgaaatttcntttacccgggttggnnaaaaaantaggnttnttttgnngcactttgatttcccccgggggggnncc

SEQ ID NO: 84462 - DNA, 661 bp, Arabidopsis thaliana columbia
  unsure (1)..(661): unsure at all n locations
anccggcntnacccnccgttgcccgntaaatgncccaaccaaaaattgggnnaacctngacatncggggcccctattggggcccntccaaccagttctgatctccgggaaccccaatncaagncgatggncctgtnccatgccaacccaagaagncgtatctactgtgttctcaagtctcctcacgttcacaaggatgctaggtcccattttgaaatccggacacaccagcgcatgattgatattctctacccgactgctcaaactatcgattctttgatgcaacttgatcttcctgctggtgtcgatgtggaagtgaagctctgaagaagaagcgtaactacaatgatgtgatgggcacttttgcattgaatgaacagactgtttcagatcaacttacattgcttagaactggtaagccttcgtatcatcttttttgagaacctttgtaacgaaaatgtaagttgtattatctggtccttagcaaagttggaatctatctttagcgatgcttggttcttagttgatgaacatatccttaattaagcaagttcaaaggaatttgtttttgttttactaattgttatgcagtttgcctgtgtccattatgataagtttttttatttttgttgtattcaaagtggaatcttttttttgaatat

SEQ ID NO: 84463 - DNA, 1074 bp, Arabidopsis thaliana columbia
  unsure (1)..(1074): unsure at all n locations
nnnnnnnnnnnnnnnnnnnnnnnnnnnnnnnnnnnnnnnnnnnnnnnnnnntgccgtaccggtccggaattcccgggtcgacccacgcgtccgcccacaagaagaagctgctgaagaagaaacctcatccttcgaacgttaagaggaagaagaataagagaaatcgattcgtggttttgggaaaattcaatggcggtttctactgtatcgtcgtttctattgccatctttcggcattccaagctcttcgccttcttctaccagactcaaagtctctctgctgccttcatcttctacccatggcggccttagttcctgcgtccttacgaaaccatccgtctcgcttacgaaggtcttcgctgttcccgataccctagatccaactccagaaattctcgatgaacccgcctctgaggttccgagctcttcatccatcagtgtagacgcggataagatggcgccaaagcaaaagattaggatcaagcttagatcatactgggtgcctcttattgaggactcatgcaagcagatacttgatgctgcgagaaacaccaatgcaaagacgatggggtcctgttccattgccaaccaagaagcgtatctactgtgttctcaagtctcctcacgttcacaaggatgctaggttccattttgaaatccggacacaccagcgcatgattgatattctctacccgactgctcaaactatcgattctttgatgcaacttgatcttcctgctggtgtcgatgtggaagtgaagctctgaagaagaagcgtaactacaatgatgtgatgggcacttttgcattgaatgaacagactgtttcagatcaactacattgcttagaactggtaagccttgtatcatcttttttgagaacctttgtaacgaaaatgtaagttgtattatctggtccttggaatctatctttagcgatgcttggttcttagttgatgaacatatccttaattaagcaagttcaaaggaatttgtttttgttttactaataaaaaaaaaaaagggcggccgctttagaggatcccagcttacgtgacgcgtgcatgcgacgtcaa

SEQ ID NO: 84464 - DNA, 761 bp, Arabidopsis thaliana columbia
  unsure (1)..(761): unsure at all n locations
actnnnnnnnnnnnnnnnnnnnnnnnnnnnnnnnnnnnnnnnnnnnnnnnnnnnnnnnnnnnnnnncttttttttttttttttgaattaagatagtttaagtatgcatattcaatcgacaagcttgtatatgggaattttggcgacaaaacataagatcccaaacgtatctacttgaatttgcacacaactggtttcacaaatccaaaaacttaacagaatattgggggaaaaacactgttagcaacctgggggggagcggccaccgctacacttttgccctgtacagagaatatcccctcagggttccataggccgagttgtaccctctgctacccatcttagtaatactctgagagcttccttaactttgcaagttgcaactcaaccttgcagagattgcctctggcaacattgtgattcctttcctgaaagaaccaactgtttgggccctttggctttgacagaagcggcctcagtttcccattccacaacacaaacctgggaatgggaaacaatatctactccgctgaggatcagtcaatccgccgtcacggtaatacctcctccgccttcgagtttagaagatcgacgattgatcaaccggaaacaacagagattagtagaatcataagcaagtaaccgaggacggagaagaattatgagagaaatggctgcgacaccgccggacggagaagagacatttgatatttccggacgcgtgggtcgaccccggaattccggaccggtacctgcaggcgt

SEQ ID NO: 84465 - DNA, 913 bp, Arabidopsis thaliana columbia
  unsure (1)..(913): unsure at all n locations
tatgactttcgcatgcacgcgtacgtaagcttggatcctctagagcggccgcccttttttttttttttaaattttttaactggattataaaatatttttggatagaaaataaatatattttttttttatagaaaatattcatctcgtagcaatgctaaatctccaaatataaaaaaagagtagtagaacggaatgctttctctctcttctctctcctcatctttcagagagagcaaagcagcttcaatttttttgaccgacaatgactggctttatcagcggtgtttggtcggcttctcctccggcatcgctggcttccttagaagcgttgactggctcagcttccggcatcgaccgactacttttagcggtggtggctggcttatctcccgagagcaagatattctctttcttgtttcgtcgggcttttttctggcgtcttttgccggctttctctccggtttcttgaccggatttagatttgttctgttttttttcttctgcgtgtatacattgcaaaaacgtcccgtattatatgatacaaagccctttctagtgcatcaatggtaaccttatagccaaccgatggcatcaccggttttgggatcaaaccaattagtccgggcaatagcatagccacgagccatccgggacattccccggccgccaacaattggcattttctcggattgggttcatcgcggaagttcttccccatcaagcttatggtgctgtccttgtaaggaccgtcctcgaaaaagaagctcatggccattatnaaacctacttcttctttacatnaagaaccgtaaaggccttgcgcccgtccaacgagtttggattttggatcagcggtctcggtgagagcgtcgtcgaccatgaanacagcgccgaacagcgtcggggatttttc

SEQ ID NO: 84466 - DNA, 617 bp, Arabidopsis thaliana columbia
  unsure (1)..(617): unsure at all n locations
ccccccnnttttggngaatnggcgganncattcccccgnaccgctngccatgattcnccaagcnttantcggctcccctttnggaaacctggtccccctgcnagtcccgcccggccgcccacgcgtccgctcacgcttatcgccgcatctccgtcaaccttcatctacagaatggattctcagatcaagcacgctgtggtggttaaggtcatgggtaggactggttcaaggggtcaggttactcaggttcgagtgaagtttaccgactctgatcgttacatcatgaggaatgttaaaggaccagtgagggaaggtgatatcctcaccttgctcgagtctgagagagaagctaggagacttcgttgatcttcttcttcatactccaaaatgcggaaacaagaaaacatttggttatttctcttttgctttctttgattggattagtggattatgcatttggagtcttaattttgttgttgctttaagacaattgctgctggatttataagttgtttggtattcaaaaaaaaaaaaaaaaaagnnnnnnnnnnnnnnnnnnnnnnnnnnnnnnnnnnnnnnnnnnnnnnnnnnnnnnnnnnnnnnnnntcagctcaatc

SEQ ID NO: 84467 - DNA, 651 bp, Arabidopsis thaliana columbia
acccacgcgtccggcgatcggagagctctgacggcatcagccacctctgcggcttcgcaaatccaaataagctgtggatgaaacgaagaatcctagatttctgaatggcgacaccatttatagcgggggttgcagtagctgcaacagcacttgctggtagatatggaatccaagcatggcaagcattcaaggcaaggccaccaaggcccaaaattaagaaattttatgagggcggtttccagcctacgatgacgaaaagggaagctgctctcattcttggcgtcagggagagtgtagcggcggaaaaggtgaaggaagcacacaggaaggtaatagtagcaaaccatccagatgcaggtggtagccatttcctagcctctaagatcaatgaagctaaagacgtgatgctaggcaaaactaaaaacagcggatccgctttttgatgcaaatttcaatcaaaagacttccttatgaatcatcttatgttataggactgtaatgtcaaaatgcagattttatgctaatttataagcttgtggtctgtttgtgacacataaagactcgaatcttttctttcacttgttgtcgctgaaaagaacacaaaaataaaaacgcaaagcagaaggaaagaaactagtcttttcggttttt

SEQ ID NO: 84468 - DNA, 582 bp, Arabidopsis thaliana columbia
  unsure (1)..(582): unsure at all n locations
ggtaggtttcttacttggatctgctctctcaaatccgccgtctctagccaccgcgttttcttcttcttcctcgtcctcctccgccgccgccgccgtcgacatggaaactcacaaaaccaaggtttgcatcgtcggaagtggaccagcagcacacacggcggcgatctatgcatcgagagcggagttaagcctcttctcttcgaaggatggatggctaacgacatcgctcccggcggtcaattaactacaacaaccgacgtcgaaaacttccctggggttccctgaaggtattctcggtattgatatcgttgagaaattcaggaaacaatccggaggcagattttgggaactacggntcttctaacgggaaaacttgtttaacaaaggttggatttctcaatcggaaacccggtttaaaggctttttcacttgtttcggggaccttgttcttggtggattctggaatnaatttctacttggggctgtttctnaacggnttaggtnaacttggancttggtnaaggnaatngnggnttttggatntggggntcnccgtttttcnttttttgngggggttnnccg

SEQ ID NO: 84469 - DNA, 1261 bp, Arabidopsis thaliana columbia
aagcaaagcacgaagctttgcacggcttggtggtgaatccactctctctcaaccgccgtctctcgcctccgccgcgttttcttcatccgccgtcgatgaatggtctcgaaactcacaacacaaggctctgtatcgtaggaagtggcccagcggcacacacggcggcgatttacgcagctagggctgaacttaaacctcttctcttcgaaggatggatggctaacgacatcgctcccggtggtcaactcaaccaaccaccgcgtgagaatttccccggatttccagaaggtattctcggagtagagctcactgacaaattccgtaaacaatcggagcgattcggtactacgatatttacagagacggtgacgaaagtcgatttctcttcgaaaccgtttaagctattcacagattcaaaagccattctcgctgacgctgtgattctcgctatcggagctgtggctaagtggcttagcttcgttggatctggtgaagttctcggaggtttgtggaaccgtggaatctccgcttgtgctgtttgcgacggagctgctccgatattccgcaacaaacctcttgcggtgatcggtggaggcgattctgcaatggaagaagcaaactttcttacaaaatatggatctaaagtgtatataatcgataggagagatgcttttagagcgtctaagattatgcagcagcgagctttgtctaatcctaagattgatgtgatttggaactcgtctgttgtggaagcttatggagatggagaaagagatgtgcttggaggattgaaagtgaagaatgtggttaccggagatgtttctgatttaaaagtttctggattgttctttgctattggtcatgagccagctaccaagtttttggatggtggtgttgagttagattcggatggttatgttgtcacgaagcctggtactacacagactagcgttcccggagttttcgctgcgggtgatgttcaggataagaagtataggcaagccatcactgctgcaggaactgggtgcatggcagctttggatgcagagcattacttacaagagattggatctcagcaaggtaagagtgattgaggaaattgttggaaggctcaggtcattgattattgttgaatgatccctgattcagttagacattgatggaccagaatgagacttgatctttatcatagaacaagttaagatacattgatttgtttattccttaatattgcagttggaattgagtacgggtattgttc

SEQ ID NO: 84470 - DNA, 1476 bp, Arabidopsis thaliana columbia
tctcaatgagccagtcaagattcattataaagtctttatttagcacagcaggaggtttcttacttggatctgctctctcaaattcgccgtctctagccaccgcgttttcttcttcttcctcgtcctcctccgccgccgccgccgtcgtcatggaaactcacaaaaccaaggtttgcatcgtcggaagtggaccagcagcacacacggcggcgatctatgcatcgagagcggagcttaagcctcttctcttcgaaggatggatggctaacgacatcgctcccggcggtcaattaactacaacaaccgacgtcgaaaacttccctgggttccctgaaggtattctcggtattgatatcgttgagaaattcagaaaacaatcggagagatttggaactacgatcttcacggaaactgttaacaaagttgatttctcatcgaaaccgtttaagctattcactgattcgagaactgttctcgctgattctgtaatcatttctactggagctgttgctaaacgtcttagcttcactggatctggtgaaggtaatggtggtttttggaatcgtggtatctccgcttgtgctgtttgcgacggagctgctccgatttttaggaataagcctcttgtggttattggtggtggtgattcagctatggaggaagcgaattttctgactaagtatggatctaaggtttatattattcataggagggatacgtttagggcgtctaagattatgcagcagagagctttgtctaaccctaagattgaagtgatttggaactctgccgtggttgaggcgtatggtgatgaaaatggacgtgttcttggaggattgaaggtgaagaatgttgttactggggatgtttcagatctgaaggtgtctggattgttctttgctattggtcatcagccagctacgaagtttttggatgggcagcttgagcttgatgaagatggttatgttgtgaccaagccaggtactactaagacgagcgtggttggtgtatttgctgctggagatgttcaagacaagaagtatagacaggccatcactgctgcaggaactgggtgcatggcggcattggatgcagagcattacttacaagagattggatctcaggagggtaagagtgattgaagaagcggtaggagttggatccatgataaaatcactctctctccaccttatttgctttgccatttttataaccaataaaggatcagattgatctcatacagacaaatctgaatagaattttgttatttgcatttgtttgcagttggttttgtgccaagttgtaaactctttagttgtcacagcttccaccaaattcatcttttaagatttgttcctcaggtgagaggactttttcatactttaattctctttttatttgattatgtaatcacaattaaaagtggcatatatggaaaggagtttctagagctcaaaaaaaaaaaaaaaaaaagaa

SEQ ID NO: 84471 - DNA, 853 bp, Arabidopsis thaliana columbia
ggtacccgaccggaatttccgggtcgacccacgcgtccggaagagaacaagtgcttccgcgttgtgatcgttattccgctactccctggatttcagggaggtattgatgactttggagcagccacggttcgagcactgatgcattggcaataccgtacgatctctagaggaggaacttcgattcttgacaaccttaacgctttgctcggtcccaagacgcaagattacatctctttctatggtttgagatcgtacggacggctgtttgaggacggtccaattgccactagccagatttacgtgcatagcaagttaatgattgttgatgaccggatcgcagtgatcggatcttctaatataaacgataggagcttactaggttcacgagactctgagatcggtgttgtgattgaagacaaagaattcgtggaatcttcgatgaacggaatgaagtggatggctgggaagttctcttacagtcttagatgttccttgtgggcagagcatctcggtcttcacgccggagagatgccaaagatcgaagaatccattcaaagatgcaacctacaaagacttggtggatggcaactagctaagaaagaacacccgatattttccgaacccaagtcttttttcgttgcatttcctgaaatgaaaacatattaccccctcaaagaaacttggaatttgaaaaacaccaaataattgggcttctttttgtaaaaaaacaaagtttgggggttcaacaactttactgaatccgaaccctttgggtcatttggccaccccgggaaaaagggcttaaaaattcaatttgccgggcaaacccgatcttcgtggggggagaaatttc

SEQ ID NO: 84472 - DNA, 1314 bp, Arabidopsis thaliana columbia
  unsure (1)..(1314): unsure at all n locations
nnnnnnnnnnnnnnnnnnnnnnnnnnnnnnnnccggcacgcctgcaggtaccggtccggacttcccggggcgacccacccgtccgcccacgcgtccgcggacgcgtgggcttttctctctgttacttacttccattattttcgagcttattcttatcttcatcgcttaaggttcgaattttcgaattcgatctctttttgtagctataccaatcacaagtagctgaaatcaatagtattaagccaggctagctagaccagcaagtaaatttgctggctagcaggatcctcatgagccctcagagcgtatcgaagactagcaaatcccttgagggtgtccatggggttcatgttgtatctcattctcatttcggatttgaaagtattggccaagtctctggctttgagtctgcggatgcaggaacaaagcagagacttttcattgaacgtgtttggcaacaaagacctccatgcctaagacccatccattgcagcatccatggtgatcagagtatcttagaaacagctgctaatgtgatcacatcgatccctttcattttcctcggtatgcaggcaccgaggaaaaacctgaacatgaaggtatatgcaaactccttaatcggagttggaattgcatcgagtttgtatcattcttcaagagggaagtttaggaagtaccttagatgggctgattacacaatgatagctacagcgacaatatgtctaacgagggcgcttagagaagagaacccaaagttcttgatggctgcatcagctttggctctaccgtttcagcctctcgtggtatcagctgttcacactggaatgatggaggtagcatttgcgaaacgagccttagaggatccggatttgaaaatggctcatgatgtacacaagatgtcttcgttattaggcggagcattgttcatagctgatgatcttttccctgaaacaccattcattcacgccggttggcatctcgccgcagccattggcgttggaacttgcaataagcttcttcagtaatccacagtaccaactatattgagtgattgtggaactgccacattcttggcttaatgaaaccactagtacgtgtggtttcactaagctcataaatcagccgacataactagtagtagtcatctctatctttaaatcaatgtaaggaaccgaaacaagtcacctgttgtaatataaggacaaaggccactcgtctctatatattgaaaaaaaaaaagtataatttnnnnnnnnnnnnnnnnnnnnnnnnnnnnnnnnnnnnnnnnnnnnnnnnnnnnnnnnnnnnnnnnnn

SEQ ID NO: 84473 - DNA, 785 bp, Arabidopsis thaliana columbia
accggaattcccgggtcgacccacgcgtccgggcgagcctcttcttaagaaggattgtcttgaagaaggaggtgttgatatcgattttgaccgcagacaactaagttcatccgatgagtctaactctgattggtataggtctgatgatgcaatcatgaaaccattatcccagtttggagatgatgatttcgttgttggtagctgggagaccaaagagatcataagccgtgatgggctgatgaaactcacggctcgagtatttctcgcatcaattgatcagagaagcgagagacctcctggggaaagcgcctgcacagctctagttccagtgttggcccattggttaggttccaccagggacataatcccaacaaggtcagagtttgacagtcttatcagagaaggatcatccgagtggagaaatatgtgtgaaaacgaggaataccgggaacggtttccagacaaacatttcgatctcgagacggttcttcaggcaaaagtcagacccatctgtgtagtccctgaaagatcattcatcgggtttttccattcagagaaatcagaggaagaagaaggaaaagagaatgcttgtctagattttctcaaaggtggaaaggtcctttgacaggatttgggaagaacttattgaaacaagaaacccgaaagaggccgggaacgccgaaccttgtggatccttacatttggtaaagctgggaaaaggaaccaattttctttttgtgccttccctttggggaaacccacggatggcgtttatattaccattc

SEQ ID NO: 84474 - DNA, 819 bp, Arabidopsis thaliana columbia
taccggccccgaaattccgggtccgcccacccgtccgaaagaataatgaataattttgattcagtaaggacaagagttctcactatttgtcaatccaaaagtgcagataacctagacgagatggaagaaactgatgacgaaaaggatgataggtcctatggttccttaatgatagagagattaactggaactcgagacggtcggatagatcacatgctccaggagaaacctttgccatccgtatctacaagcaataggagctcatacgaactattggagagatcaagatactgctcttttcataattaaacacttgtatcgcgagttaccagacggaccaaactcgcccacggaatccaccgaaggagatgatagtccaaaagactcaagtagacctcatagctggatagacagaagagaggctgattatgatgatgaagagctttctttaacattctccgacaaacaaatcgctagaagcttctctgcagaagccaagaaatatttgaagaagccttaagactttgaccataggtttatatcgtatatccggtgaaagctccctgattttggttttggttcctgtgcagaagtaacatctagtgtagaaaatgtgaaaaagtaaaactccgacatgggtttgccacattggcaccataatttttacattttattaagccaaaaccatgaaaagcttaaaaaaaaaaaaaaaaaaaggcccggccggcttttagaaggaaccccaagctttacctaaccccgcttgccttgccgaacacccaattaaccttcttttctatttggggggccacccctaaa

SEQ ID NO: 84475 - DNA, 769 bp, Arabidopsis thaliana columbia
  unsure (1)..(769): unsure at all n locations
gtaccggnccggaattcccggtcgacccacgcgtccggtcatgtacttaaaaaaagaagtcaaaggggcattccgagaatcgatctcgggacctcttgcacccaaagcgagaatcataccactagaccaaatgctgtatttgaatgcccccactgaagcattgtgttgttgtgtaatcctgtggaaaagagaattcatgcttcactccgttattacaggaaattaagtcatgggggcttgtttaccttttgagggttctattcgtgatgaagctggcaacatgcattgaagctaagctgcagaagggaggtgtacggtcatcgcctcatcgggcatgtaagcaaaggttaaatttgttgtgtgcgaatcaacagagagagagaaaagggcacatcaaatagatgggcagagtatcctgtggacgagctagaggcggtcctagacaaggcagcattgggacaacaacaaaacggggattatagcaatggtgaacaaagcttacctggaggaggttgaaagaaggaggacaatgcttgatctggttttggagagtttttgggaagggagagggtactccgccgcttcttgaccatttgatgctagtggcaggggatcagactttctacgaacggtggctttttaggaggcttcccttgtacaagaagggatcccatggggtttgactttggaaggaaaaaaaggttttttattgtcaaaaagaattttcatttggacaataaagttgggccggagagacctttaacttggg

SEQ ID NO: 84476 - DNA, 779 bp, Arabidopsis thaliana columbia
tgcagtaccgctccggaattcccgggtcgacccacgcgtccgcaccaaatttggagactgtgattgagcatgagcgtcagaagttgttgaacaaagtcgacgaaatcgaggatttcagattcgaggatctcgaaatggagacggagaaagataaggaaaggatgatgacgccgacgacgagaatgtcttattcatcttcgtcgtctccgtctccatcttcggcttcatcatctcgctgcgctcctctctcgctgccaaggcaattcgagcatcttctgcgcatagagactcttctctttcttctgcttactcgtctccttcttctgctcctgttcccactcctcccaaggaggtgaataaggcttatgagtatacttctatgaagagtttgaatgaaccaaaacggggcttttgggggaagtttagctagtaaagctaaaggcttttttgtgatgaggatgatcccaaatcaagttgccctcaaagtcccaagaggatggagcaaggcatacccttttgcgacaacttcaaggaactaagggaagctgggcaagactggtacggaaaagccaggatcctttattacagagaagattagatgcgatcacttcatcggtgaaataacattggtggcaccaattggtactgttgttgaggagggttttaccggttgtggagaatcgtactgcaggcattatttaagaaacccctaaaaagaataaaaaaaaagccagtcttacaaggacccacagaatcctggaaatcaagctgatttggag

SEQ ID NO: 84477 - DNA, 770 bp, Arabidopsis thaliana columbia
gtaccggccccgaatttccgggtgcgcccaacccgtccgttaaactcttttttttttcgtttttgggatttgccaacttcgatttctttggttgggatttgtttatacgtttccttcgatttcgctcgagcttcgatctgaaaagcttcgagcttttagacaaatccatggattctccgccagtttctgctcgattcgatatattcgagatttatcgtagattctgtgctattcgatcaggacaacaattgtgtaataagaaaccctgtgatggcgaagaatctcaaagatttaacttgtctaaagaagcaataactcagctcttatatctagtagagaataagtttcaagctaggaactcgatttttgatgaattgtttaagttgatgtcacggctagacttaatggtggactttacggagtttacttgcttttacgattttgttttctttatgtgccgcgagaatgggcaaaagaatataactataagtagagctattaccgcatggaaacttgttttggctgggagatttaggttacttaaccgctggtgtgactttatcgagaaaaatcaacggccacaatatttcagaagatacttggcaaacaggtcttggcggtttagccggtgtgttccatgagaaatctaggaagggatatgactcctgaagggtgccatggccctgtcccaattagatggactttgcccgagccatttggacaagtttttttacggaccgaaataagggacactttgcttttgttttgga

SEQ ID NO: 84478 - DNA, 533 bp, Arabidopsis thaliana columbia
  unsure (1)..(533): unsure at all n locations
ggatcccttccatgcacgtgaagttctgtgcttctgagggaacaaaaccaaaactccagggtcctggtgctcagtctgctcttagagccccttgctcgttcgggcataaagattggtcgtattgaggatgtgactccgattcccacagacagtacacgccgaaagggtggacgaagaggaagaagactctgattgcacgatgaggctcatcatcgttgcaatgtgctcttgagactgtgggtattttcttgggtacacttcgaagttagttttgtctctctccaatttatctttccagttgctttgagaacattataagctgtgtttttttgtatttggagtttttggtattgagaaaaaaaatgttaagttactgatcgcgtcgtgttactgttagttggcttattgatattttacattttctctctttttaaaaaaaaaaaaaaaaaaaagnnnnnnnnnnnnnnnnnnnnnnnnnnnnnnnnnnnnnnnnnnnnnnnnnnnnnnnnnnnnnnnnnnnnnnnnnnnnnnnn

SEQ ID NO: 84479 - DNA, 556 bp, Arabidopsis thaliana columbia
  unsure (1)..(556): unsure at all n locations
tgcttgcagctcaaaatgctgctcaaagaatgcaagggagttggcatccctcccatgcccgtgaagctccgtgctcctggaggaaccaaaaccaagactccaggtcctggtgctcagtctgctcttagagcccttgctcgttttggcatgaagattggtcgtattgaggatgtgactccgattcccccagacagtacaccccgaaagggtggacgaagaggaagaagactctgattgcccgatgaggctcatcatcgttgcaatgtgctcttgagactgtgggtattttcttgggtacccttcccagttagttttgtctctctccaatttatctttccagttgctttgagaacattataagctgtgtttttttgtatttggagtttttggtattgagaaaaaaaaatgttaagtttctgatcaaaaaaaaaaaaaaaaaaaaaaaggnnnnnnnnnnnnnnnnnnnnnnnnnnnnnnnnnnnnnnnnnnnnnnnnnnnnnnnnnnnnnnnnnnnnnnnnnnnnnnnnnnnnnnnnnnnnntagctnnnnnnntcat

SEQ ID NO: 84480 - DNA, 695 bp, Arabidopsis thaliana columbia
  unsure (1)..(695): unsure at all n locations
nnnnnnnnnnnnnnnnttaggtccactatagaagagctatgacgtcgcatgcacgcgtacgtaagctcggaattcggctcgaggagcagaatctaaaaacacttatcgtttcgtctcttctctgatccattgttgaagatgtcgaagagaaaaactaaggagccaaaggttgagactgtgactcttggaccttctgttcgtgaaggagagcaagtttttggtgttgttcacatctttgcatctttcaatgacactttcattcatgtgactgatctctccggtagagaaactctcgtccgcatcaccggtggcatgaaggtgaaggctgaccgtgatgagtcctctccttatgctgctatgcttgcagctcaagatgttgctcaaagatgcaaggagcttggcatcactgccatgcacgtgaagctccgtgctactggaggaaacaaaaccaagactccaggtcctggtgctcagtctgctcttagagcccttgctcgttctggcatgaagattggtcgtattgaggatgtgactccgattcccacagacagtacacgccgaaagggttgnccgaganggagaaggctttnntttcacggtgngnccatatnggtgaatgtncntttagcttgggattttttggcatncagaagtttcttnccaatttttccantntttggaatnnagggttttgc

SEQ ID NO: 84481 - DNA, 592 bp, Arabidopsis thaliana columbia
cacccgtccgcagcctgatgctatggcggatgccttagctgaaatcataagccgtttagaagattctggtgataaaataactgaagcactcagatctctgtgttggagacataacagtgttcaagcagaggaagtgaagctgattgggatagattccctaggttttgacctcaggcttcgcgcaccagcaaagattgagtcatggcgatttgcattctcgacaagggcaacatcagaagaaaacgcagagggacaaataaggaaactattattccccgcaaaacggtcccagtcggcacaaccaataaccaaaatgaacaagtcccagggaatgttgacgctgtagtaattttctgtgaagctgtagaaaaaagttccatgaaccaaaatccaaacagagcacatggatattgtttctgggaacataatattgaaccaattttcttgcggggttctttagacaaatcgaatttatgtatttatgttggaccttctttcagccctaatattgttgtacatattagggatttattttcctaaaaccgcgcctgtgtccacatatatttgtgcgggggtcttacatacaataata

SEQ ID NO: 84482 - DNA, 1616 bp, Arabidopsis thaliana columbia
  unsure (1)..(1616): unsure at all n locations
cgcggaannnnnnnnnnnnnnnnnnnnnnnnnnnnnnnnnnnnnnnnnnnnnnnnnnnnnnnnnnnnnnnnnaaaaccacgcgtccgcagaagaataacagataaaactctctgtgtgagtgagtgagactcaaccatggcgtctttggctcagcaattctcgggattgagatgttccccactctcttcttcttctaggttatcgaggagagcttcgaagaactttccccagaacaaatctgcctctgtttctccgactattgtcgccgcggttgcaatgtctagcggtcaaacaaaggagcgtcttgagctgaagaagatgttcgaagatgcttatgaacgatgtagaacttctcctatggaaggtgttgctttcaccgtcgacgatttcgctgctgctattgaacaatacgacttcaattccgaaatcggcactagggtaaaaggaacagtgttcaagactgatgcaaatggtgcattagttgacatttctgcaaagtcatcggcttacttgtcggtagaacaagcgtgtattcatagaattaagcatgtggaagaagctggtattgtaccctggatggtggaagagtttgtcatcattggtgaaaatgaaagtgatgacagtttgctattgagcttaaggaatattcaatacgaacttgcttgggaacgttgcaggcagcttcaggctgaggatgttattgtcaaggctaaggttattggtgctaacaaaggtggattggttgcccttgtggaaggtcttcgtggatttgtgcccttttcgcagatatcatcgaaagcagcagctgaagagcttcttgaaaaagaaatacctcttaagtttgtggaggttgatgaggaacaaacaaagcttgtcctcagcaaccgtaaagctgtagcagatagccaagctcagcttggaattggttctgtggtcctcggagttgttcagagcttgaaaccttatggtgccttcattgacattggtggaatcaatgggcttctccatgtcagtcagataagtcatgaccgtgtctcagatatcgcaactgttcttcagcctggtgacactttgaaggttatgatattgagtcacgaccgtgacagaggaagagtaagtctctccacaaagaagctggagccaacacctggtgatatgattcgtaacccaaaacttgtgttcgagaaggctgaggagatggctcagacattcagacagagaattgcgcaagcagaagccatggctcgtgcagacatgcttcgcttccaacctgagagtggactgacgctgagttctgacgggatactaggaccactcggatctgagttaccagatgatggcgtagatctaacggtcgacgacattccttctgcagttgatatttagattctaaagctttagtgtattttttcatacacaaaaacacctccttgagcttaattgaatatgtagtttacttcctacaagacattttatcatgtgtactttgtcttttgtaatcgatatgttctgttacaatgtcaagaaaccaaagaaaggctttgcccaagaccaaacagagcacacggtcttaaaaaaaaagatattgttaaaattttaaaaagaatttattcat

SEQ ID NO: 84483 - DNA, 510 bp, Arabidopsis thaliana columbia
acccacgcgtccgtgatttcaaagggatcgtctttaatggaggtgatacacgcatggtctgctccaagatcactcagcaccactctcatgtactcctttgcccagagagatgacattgaagtgcttgatgagccattatacgctgcgttcctcaagtctacgggtgttgataggccttacaaagatgagcttctctctaagatggagtgtgatggagaaaaggtggtgaaggatatcatttatggtccaggaaagaagaaatataggttttgtaagcatatatcgaaacagcgacttcttggtttgccaagtgaactaatgagtgaagggaagcactttatattgatacgcaatcccctcaacatattgccttcttttgagaagatacacccttcatcgtttcacgaattgggactgggagagttagtatcgatatacagtgatctctgtcagatgggaacaccaccagcaatcatcgatgcagatgagcttcagcgagatcccgaggct

SEQ ID NO: 84484 - DNA, 596 bp, Arabidopsis thaliana columbia
gctgtaccggaccggaatttccggtgcgacccacgcgtacgcacatagacaatggagtgtctgctaacaaaacccaaacccgttttcctctgttcaccatcgttatctccaagaactttgagcacagcaacaccgtcattcgaattatcaccagaatttcattcacccatcaccaaaagcttgctcctttcaagcctcctagcctcgctgttgcattctctgaaaagggtttgaagagagatgtcaccacagctgctgcagcgacggagggagattacagaaggataatgttatctgatgtgttggggaacaagacggaaaaagttgttcggtgggagagagaatgggaaagctatggcctttggggctgttgctggcgacctgtctatgcatttgcttagtctttatggctccgattcaattgaatgggagagctgcttccgctgctgctgggctttatatcgatacaggtgttctggagattactctggctttccatacgagtctttctcatacagcacttgagctacctaaatggcttgagtactagttagctcatcgtggagctcacgctcttcacggaaacccaattgatt

SEQ ID NO: 84485 - DNA, 597 bp, Arabidopsis thaliana columbia
gcagtaccggtccggaattcccgggtcgacccacgcgtccgagtaggcgaaagtgggtttttccaacgcttgtcggattcagtttagatgagggcgcaaaaccattagatggtgccagtcgaatgaagctgacaggcctgtcaccttattggtttgatgtatcttctggaaccgctgttcacaataccgttgacatgcactcactgcttcttctaactggacctaacggtggcggtaaatcgagtttgctcagatcaatatgcgcagctgctctacttggaatttccggtttaatggttccagctgaatcagctcgtattcctcactttgattccatcatgcttcacataaaatcatatgacagccctgtagaccgggaaaagttcttttccaggtagaaatgttcggaaatacggtcttttgcaagccaggcttcttcgagaagccttgggcctttagatgagatatgccgagggacagagacagcaaaaggcacctgtatcgctggctgtgtggtagagagtcttgacacaagtggttggatgggtattgtatctactcatctgcatggaatcttcagtttaccttttacagcga

SEQ ID NO: 84486 - DNA, 656 bp, Arabidopsis thaliana columbia
  unsure (1)..(656): unsure at all n locations
cccacttcttccgctttcgtcttcttcccggctttactctctttctctctccaccgtcggctcagatctagacggaaatgtgccggtgaaatcgaatcatgaaaagatctcacatttcgtctcctcgttcttattcacgaccagcgatttcaatcttcggtgtcttcctcttgtttcttctggttttaacactaagctctcgaaaaccatcagattcatcctccggtttagctccaaatcgaaacttagccacaaaatcgacgattccgaggtttgcgtatttggtaacgggaacgaaaggagatgggaaacgagtgaagcggctgcttaaagcaatacatcatccgagaaattactatctgcttcatttggttctcgaagcttcagatgaagagagaatggagctggcgaagtatgtgagatcggagaagaagaagtttgagaatgttatggtaatgggtttagctgatttggttacggagaaaggtccaacgatgttagctagtacgcttcatggtgttgccatttttttgaagtaagctaaggattggaattggtttatnaancttaggtgcttctaattancctttaangcctcangatgntatttgccatatatccccatacttnccacggttcctganctttatcggggc

SEQ ID NO: 84487 - DNA, 494 bp, Arabidopsis thaliana columbia
  unsure (1)..(494): unsure at all n locations
cctgcttgcttctctctttgcttgcgttttctcaaaggttcgaagaaaacgaagaaccacgcttttgcttttttcccaagacttaatctaaaaagcgagatttccttctttcgattcttttttctcaatctggttttcagtcttcggattcaatggcgtctggatcttcgggtcgggtcaactcaggatccaaaggtttcgattttggctccgatgatatcctttgctcttatgatgactacaccaaccaagactcctctaatggtcctcactccgatcctgcgatcgctgcttccaactccaaacaaggaattccataaaacaaggatggcaaggtcttcgggttttccctacaagctcttacagtccaccagaggnttcttttgagncaagncaattactgacactgtcggaaagggccntnaagntgtatgctggtaacatganggggtttnttnaaaggcctaagtcannggttgtctaantttaacttt

SEQ ID NO: 84488 - DNA, 704 bp, Arabidopsis thaliana columbia
tcccgggaacgacccacgcgtccgatcttaagagagagagagagagatggagataccgaaattcttggcggtgctagcgttagtgatgttgcagtttacgtccgccggagttgcactcttcacgaaagctgctttcatggaaggtctcaatcccaccgtcttcgttgtttaccgtcaagccatcgccactctcttcatctgccccatctctttcatttccgcttggaggaaagaaaacaaaccttctctgggagtaagaggcttttggtgggtggctttgacggctgttattggtgtgactgttaatcagaacgcttatttcaaagggattgaccttgtcttcttcaatccatggcttgtgccatgacctaatccttatttcctgcccgtcaaccttccattatcctccatcaattgttggggttcgagaggtatcaaagaggtgaacgtatcgaaaaggtgtttgcaaaagtaattggggcccgtgtctgtgtgggaggagccatgggaatgacttttctcagaggtacaaaattgctgaatgcctttcttaaccaagacaacacagcttgggtactcgggctgcttatttccttctttttaagcacatttggctggggcctctttggggggaacctttgaagtttccctattgggcctttttaacttggccccggacccactttggtaacacctttgctggg

SEQ ID NO: 84489 - DNA, 728 bp, Arabidopsis thaliana columbia
acaccgacccagaattcacggaacgacccacgcgtccgatggcttctactatgcgactttgtagtatcagtgggatatcaaggttgttgagtttaagacggttgagtctgcgagggtctaaagttcatggagatgctagcgtattgaagaagctgcagcaattggagaatctacaagatctacgcataactgtatccgcggagttagttagtttggatcaaaggttggcgaagttaatctcttttctgggtattgaggggtttcttcaaaagccattcgatttatcattcctggcgagtatggagaatcttaatgggctatcgctggataatagttatttctcggagattaatataaagtgcagagaaagcgagacggactcgtcttatttacacattaatccgaaaattccatgctttaccaacctctcaggtctggttataagtaagtgccatagcatgaaggatccgacttggatattgctagctacaaaacttgtctacctatacattggcgactcaagagaagtgggagaaaaaataaacaaagagaaaggcaccaaacctacaagtattacaccaatttctgaaactagaaaggttgtattttgaaagaaattgcccaaaacctgggagaagttactacaaggagggccctctaccccttatccgctttttagatggaccaatgggaagggtgcaaaacctgccccaaaaaactgaaaaaaa

SEQ ID NO: 84490 - DNA, 623 bp, Arabidopsis thaliana columbia
ccaacgcgtccgcccacgcgtccgcccacgcgtccgcccacgcgtccgcccacgcgtccgatttcaacaccgataagttcgcgtcgtaactctaacccattcgaattgatttaggcgttagggtttcttcatatttctctctcggaagaagaagatggtttgcgataagtgtgagaagaagttatcgaaagtgatagttcctgataagtggaaggatggtgctcgtaatgtaactgaaggtggtggtcgtaaaatcaatgagaataagcttctctccaagaagaatagatggtcaccttacagtacctgtaccacaaaatgtatgatctgcaagcagcaagtgcatcaagatggtaaatactgtcacacatgtgcctatagcaaaggagtgtgcgcaatgtgcgggaagcaagtgttggacaccaagatgtacaagcaaagcaatgtataaacaaatccgcaagcgtttcacattttagtttttgtccctttgatgtcaacgttgtatcctctcactcatgtatttttttgtatcggtttcctccggttttaatataaccaaacagaatcttgttgcttcactgtgtttcttgactgatcataaagttaatgtttcgttttag

SEQ ID NO: 84491 - DNA, 510 bp, Arabidopsis thaliana columbia
  unsure (1)..(510): unsure at all n locations
tgcacacactcaacaacatatcccataacaaaaaaaagctattaaaaaaaaagagaagcagccatggaagaaggtaagcaagaagcttcaatgccactagttccaattgacagcttctcttacagttggttagttaactttccttctttagaagctaccattgatgatcatcatcaaacattcgaagattcatcttcttcttcttccttcattgagatggatccaagattgcctccttctagaagattcttcatcaaaacatctcatgaaagtagctttcaagttcggtaacttcggcctctttctccgacggaggatcactcctttaggtcacggccgccgggctctttccgggacgggctacggttatgccttatcggttaaagaccacgtncgngggtaccgtggnaggatcttnngccgttgggtacaaacaacctcggggnagggttttttncaaggngggcttttaanngaaagcctttttcntnntttttttanggnagnttt

SEQ ID NO: 84492 - DNA, 833 bp, Arabidopsis thaliana columbia
  unsure (1)..(833): unsure at all n locations
nnnnnnnnnnnnnnnnnnnnnnnnnnnnnnnnnnnnnnnnnnnnnnnnnnnnnnnnnnnnnnnnnnnnnnnnnnnnnnnnnnnnnnnnnnnnnnnnnnnnnggaataatggatcttcttcttctctctccagtcaaaaagaactttgcacaaatgaatttaatcaaatcaatagttacaacaacgaagaaaatgtacaattttccattctttgcattacatatgttgcagtcttggttgtttcattgggggtgaactatctttgtcctttaacggtttagggctatctccatcttttgttttgttccaaagagagctgatgaattgggctgccccgcttctagagagagtacactcttgtaaaattcatacgaagtaaagaatatggctccttgcgacatgtacatcactagtctggggatcaagcctctgtatagtcctctcagaccttcttgcctgcgtattgattgaagagtttgatagacactaggatgttggttcctagatccgggaatctgagtttgtaatcttgtttttactacatcaaatggggttgtgaagaaagcaccancagatcccgctagtcctccacaggtgagcttgttggagcaaatatcaaaatattcatcccagttatctccctatttcaaaaaaaaaaaaaaaaaatacggattggcttaagaaaaaattttgaaggtgcacaatttattttatggggaatggaagccctaaaaaagaaaaacccccccttgttttgttaaaagttttggggggggtttgagcccactatttcaccccccccgagggggcctctgggggggaaggggaaaaaaa

SEQ ID NO: 84493 - DNA, 705 bp, Arabidopsis thaliana columbia
  unsure (1)..(705): unsure at all n locations
nnnnnnnnnnnnnnnnnnnnnnnnnnnnnnnnnnnnnnnnnnnnnnnnnnnnnnnnnnnnnnnnnnnnnnnnnnnnnnnnnnnnnnnnnnnactagtaatcatatttattattgactcatgtatgcgatacataaagaggaattggtttgcgtgagaaacaactacacaagtacatttctaaatctctctaacttcaaaaatcaaaacatattgaaacaaaaggaataaacatgttataaccaatacatagaccgaacaaaaaaggaaacgatacagagaacccaaagaaagtctcattttcagctttattaagagcttttactgataagcaacaatggcttctaaaggaatggaggaagtatcacccatcttcttgggatactttggctttccatcttttccatcaaatatctttctcagacggctgtgctttccaagagcccaattagtcatgattagagcagcaacagcgagggaaacatatcctgcaatggtctgagtagcggtggttgaatcctacccattggggaacctcggtagtgtaaatggcccatgtaacaatgttgaaggggaaaccgcgtggacttggggcacctccaaccccacttgggggcccttaaatttctttaacaattatgtgacagtaaaaaggttttgcgaatttgggcaaaacccaaaaccccaaacccccgaaaacccaaatt

SEQ ID NO: 84494 - DNA, 802 bp, Arabidopsis thaliana columbia
  unsure (1)..(802): unsure at all n locations
nnnnnnnnnnnnnnnnnnnnnnnnnnnnnnnnnnnnnnnnnnnnnnnnnnnnnnnnnnnnnnnnnnnctttttttttttttttctagaagtttccctaatttattaaaatcccaaagcaaattataatgcaagaacaacacaaacaaagtagcacacatataaatacattacaggaaagtagataaaagtaggtgaacatatatcaagacactaacgagttttgtttccgcgattttaaggttctccattagcacgcatcgttacgttcaatttattgaacttgagaacgtgagaagaaatctgcgtcgcttacacatcacattgtagtgttatatcctttaaccgacaagattgatcgtatgatcccccggattcaacgagatcacaacacgatcacaccacgtcggggatgccacgatttgaggaattggttggaaactaagagctagatattcataggatgcattgagaaccatatgcgcggaagatgattgccactaaccaccaagtatcccggaaaattgaacgatatggcctttaaccacaaactatcccggaaaattgaacgaaatgcaacctacaccgggaactgcattaagtggaaagacaatggtctcgagtgcaaagagaggtcccctctgcatcctgagccctgatgtttcgttgatagaaaaaagaatactttgcaaccccatcctttttttgttgtaaaaaaacaatgggtcttaaaaatctttgaaccggattggggtaaaatcgatgaatttaacaactttctaccccaaagtcattattttaccc

SEQ ID NO: 84495 - DNA, 490 bp, Arabidopsis thaliana columbia
aaacgattgggtcccacactcacctctccgtctcttccacctccatagatagattttttttccttaagcaaaaaagattttatctcactctcaatagtgttagtattgtcacagagaaagcttcagatctagaagaagaagcagagttcataaagagaaacccattttaaaccctagaaatcaagtgtcaatctcggaaaccttctgattccgcaacaatggcagttacagatactgaaagtcctcatcttggggaaattacttgtggtaccttacttgagaagttgcaggaaatctgggatgaagttggtgagagtgatgatgaacgagacaaactgcttcttcagatagagcaagagtgtcttgacgtttacaagagaaaagtcgagcaggctgcgaaatcccgagctgagcttcttcaaaccttgtcagatgctaatgctgaactttccagcctcacaatgtctcttggagacaaaagcttagttgg

SEQ ID NO: 84496 - DNA, 661 bp, Arabidopsis thaliana columbia
gtataattcattcttagtttagttttagtctctcattggtttttgttttcgagtgtctctcccggaaaccttctgattccgcaacattggcagttacagatactgaaagtcctcatcttggggaaattacttgtggtaccttacttgagaagttgcaggaaatctgggatgaagttggtgagagtgatgatgaacgagacaaactgcttcttcagatagagcaagagtgtcttgacgtttacaagagaaaagtcgagcaggctgcgaaatcccgagctgagcttcttcaaaccttgtcagatgctaatgctgaactctccagcctcacaatgtctcttggagacaaaagcttagttggcattccggataagtcttcaggaacgattaaagaacaacttgctgcaatagcaccggctcttgaaccaactgtggcaacagaaagaggagagagtccgagagttctctgatgtacaatcacagattcagaagatatgtggagagattgctggaggtttgagcaatgaggttcctatagtcgatgagtctgatttgtcactgaagaaattagacgatttccagagccaactccaagagctccagaaagaaaagagtgacaggctgcgcaaggtgttagagtttgtgagtactgttcatgatctat

SEQ ID NO: 84497 - DNA, 837 bp, Arabidopsis thaliana columbia
gtccggaatttcccgggtcgacccacgcctccgatttttttttcttaagcaaaaaagattttatctcactctcaatagtggtagtattggcacagagaaagcttcacatctagaaaaagaagcagagtttataaagagaaacccattttaaaccctataaatctaagtggaagggggggaacccttctgattccgcaacaatggaatttacagatactgaaagtcctcatcttggggaaatttacttggggccccttacttggaaaagtgccaagaaatctgggataaagtgggggagagggttataaaccaaaccaccttgttcttaaaataaagcaggagtgtttgactttacaaaaaaaaaggggggcggggtggaaaatcccgagctggctttttaaaccttggaaatggtaagggtgacctttcacccaaaagtgtttttgaaaaaaagtttttgggcttccgaaaatcttaaaaaaaaataaaaacattttgttaataccccgttttttaccttggggaaaaaaaaagaaaaacccgaaatttttttttcccccccaattaaaaatttggaattttcggggggtaacaatgagcccttagcagggttggtttgcctaaaaaaaaaaattcccaaccccctcaagccccaaaaaaaaaaccccggcccccgggtaaagtagagcccctcaaacttggggtttggggggtttttaccccccccattttctccgttaaaaaacccggccccaaaaattaaagaaacccgagggggggacccctctcttataataaaaaatatctaactcaggcgctcccctttcccgggggggg

SEQ ID NO: 84498 - DNA, 661 bp, Arabidopsis thaliana columbia
gaaacccgagctccaccgcggtggcggccgctctagaactagtggatcccccgggctgtattaattcgcggccgcactactccatcgacttgtaatttcactttcttagggttcttcttcatcggatcatcggccgtatctgaaaccggagatggccggcgttgattccggcaagcttatcggctctgagattcatggattccatactttacaagatctagatatacaaacaatgttagatgaagcatacagtaggtggctccgtcctaatgagatccatgctcttctctgtaaccataaattcttcaccatcaacgtcaagcctgtgaacttacccaaaagtggtacgattgtgttgtttgatcgtaagatgttgaggaactttagaaaggatggtcataactggaaaaagaaaaaggatggaaagacaattaaggaagcctccatgaacatctaaaagttggtaatgagggcaaggattcatgtttattatgcccacggtgaggatacccctacatttgtgcgaaggtgttactggttattggataagtctcaggagcacatagttcttgtccactattgcgagacacatgaggttcatgcagctcccagcacacctgggaacttgtactcaagttcgatcactgaccacttatcttct

SEQ ID NO: 84499 - DNA, 427 bp, Arabidopsis thaliana columbia
  unsure (1)..(427): unsure at all n locations
acagagcacacaaaagaaggagagaaagatgacgtcaccgagccatgcctctgatcgcggcggcggcgacggtgactcagtcgagaatcagtcccctgagctcaggaaagatccggtaactaaccgctgggtcatattctctcccgccagagccaagagaccgactgatttcaaatccaaatctccccagaaccctaatcccaaaccttcctcatgcccattttgcatcggtcgtgagcaagagtgtgccccggagttatttcgtgtgccagatcatgacccgaattggaaactccgggtcatcgagaatctntacccggctcttagtaggaatntngngncccaattgncccaacctgagncggggancaagtcgggcaatagtngggtttgggnttccacggcggtgtgattcggatcccctgtt

SEQ ID NO: 84500 - DNA, 804 bp, Arabidopsis thaliana columbia
cgttacccatatacgagctatgacgtcgcatgcacgcgtacgtaagcttggatcctctagagcggccgccctttttttttttttttttttttttcaataattttcatatatagtagagattatatgaacaggccctatcactattaccaaagtaaccaaaaccaaataaaacaaaagacaaaaataattcacatttaggtgatctcatcgcgggccggacacttcctgagacgctatgtaagacgcagactgcctagagccgccactattagagctctctcgccggtggaagaccatagtttcactctccccattttgtccttcaaccatggaagactccgcaaacctcagcccataaaacctcaagaagttcaacgactccatcctcgggttccccaacggtatacttccttcgaacatacccactaccgctgccattgttggcctcaatgctggctcctcgtggacgcaacacaaagctatccgaaccaacttctcagcctcttggctcgttacccgaccctctagcctcggatcagcgagctccatatacctcccttgttcatgcatatccaaagcgtacaatgggaaatacaccaaaccagtactagtggtcgtagtcgacgagtggttctgattattatcctccgtcacactgttgctccgagatcgaaaagaacagtttttcctaccactcactagttctaacaaaaccattccatagctgtacacatcagctttctcggagatcgctgcgtttgttatccacggacgcgtgggtcgaaccggaaattccggaccggt

SEQ ID NO: 84501 - DNA, 553 bp, Arabidopsis thaliana columbia
ctgtagaggctactttcattaacttggaacagttcttggaacctcttgagctctgttaccgatctctgtgttcatgtggtgatcgtccaatagcagatggaagccttcttgatttcttgaggcaagtctcaacctttgggctctctcttgtgagacttgacataaggcaagaatctgaccgccacactgatgtattggatgctatcaccacgcatttagatatcggatcctacagagagtggtctgaagaacgccgccaagaatggcttttatctgagctaagtggcaaacgtccgcttttcggttctgatcttcctaaaaccgaagaaatagctgatgttctggacacgtttcatgtcatagccgagctaccagcagatagctttggtgcttacattatctctatggcaactgcaccttctgatgtattagctgttgagcttttacagcgtgaatgccgagtgaaacagcctttgagagttgttccgctctttgagaagctagcagatctggaagcagctcctgctgcagttgctaggctcttttctgttga

SEQ ID NO: 84502 - DNA, 516 bp, Arabidopsis thaliana columbia
  unsure (1)..(516): unsure at all n locations
nnnnnnnnnnnnnnnnnnnnnnnnnnnnnnnnnnnnnnnnnnnnnnnnnnnnnnnnnnnnnnnnnnnnnnnnnnnnnnnnnnnccacgcgtccggaaatgtggagtgtattcctccaaataaaataaagtttgattttcttggtaaggattcaatccagtatgtaaacaagaggctcaacctcgactgtgttcacatactggatggaccctcttgtttacaaggccattggacagttccaggcgggaaaatccaaaacagatgatctttttgatgagttagacacaagtaaactgaatgctcatttgaaggaacttgtgcctggtctcacagctaaagtattccgtacatataatgcttccatcactttggatgaaatgctgagtcaagaaaccaaagatggcgatgttactcaaaaaatagtagtttatcagaaagcaaataaggaggttgccataatctgcaatcatcagcgtactgtatcaaagacacatggggcgcaaattgaaaaatgact

SEQ ID NO: 84503 - DNA, 3201 bp, Arabidopsis thaliana columbia
  unsure (1)..(3201): unsure at all n locations
gagagaacagagagacggcggagagagataggcttcgctagacaatttcttcaatctctggaagaagaagttggtctgagccttcatcaacgttgttctttcgggaatgggcactgaaacagtttcaaaacctgtgatggataatgggtctggagacagtgatgatgacaagcctttagcgttcaagaggaataatacagtggcttctaattcgaatcaatctaaatccaattcccagagaagcaaggcagttcctaccaccaaggtatcacctatgagatcacctgtgactagcccaaatggaaccactccttcgaataaaacttctatagtgaaatcctctatgccatcatcttcttctaaggcttcaccagcaaagtcaccattgcggaatgatatgccctctactgttaaggataggagccagttacagaaagatcagtctgaatgtaaaattgagcatgaggattctgaggatgatagacctttaagttccatactatctggaaataaagggccaacctcttcgcggcaggtttcttcaccgcagccagagaaaaagaataatggtgatcgacctcttgatagagcaagcagaattataaaagacgagtcagatgatgaaactccaatctcgtcaatgtttcggaagaagattgatagtgggatgtcagggggcaaccagctctccaatgatgaaaagaaacctttggttcaaaagttgcatcagaatggttccacagttaagaatgaagtgccgaatggtaaggtattaggtaagagacctctggagaagaatagttctgcagatcaatcttccttgaagaaggccaaaatatcagcttcacctacttcagtgaaaatgaaacaagattctgtcaagaaagagatagatgataagggaagggttttggtttcaccaaaaatgaaagctaaacagttatctaccagagaagatggaactgatgatgatgatgatgatgatgttccgatatccaagagattcaaatcagattcctccaacagtaacacatcatctgcaaagccaaaagcagtaaaactaaattctacttcatcagctgcaaagccaaaagcgagaaatgtcgtttctcctaggtccagagcaatgaccaaaaacactaagaaagtaacgaaggactcaaaatattccacgtcttcaaaatcatcaccttcctctggagatgggcaaaagaaatggactactttggtgcacaacggtgtaatatttccaccgccatacaagcctcatggcattaagattttgtacaaggggaaacctgttgacctaactattgaacaagaagaggttgcgactatgtttgcagtgatgagagagacagattattatactaaacctcaatttcgggagaatttctggaatgactggcgaagactgcttggcaagaaacatgtgatacagaagttggatgattgtgactttactcccatatatgagtggcatttggaagagaaagagaagaagaaacaaatgagcacagaggagaaaaaagctttgaaagaggagaaaatgaagcaagaggagaaatatatgtgggctgttgttgatggtgtcaaagagaagattggtaatttcagagtggaaccgcctggccttttcagaggccgtggagaacatcccaagatgggaaaactaaagaagcgtatccatccatgcgagatcaccttaaatatcgggaaaggtgctcctattccagaatgtccaattgctggtgaaagatggaaagaagtaaagcatgataacacagtcacctggctagctttctgggctgatcctattaacccaaaagaattcaagtatgtatttttgggagctggcagttctctgaaagggctgagcgacaaagagaagtacgagaaagctaggaatcttacggatcatatagataatataagaacaacatacaccaagaattttactgccaaggatgttaaaatgaggcaaattgctgtggcgacatatctcattgataaattggcgcttagggctggaaatgagaaggatgatgatgaggccgacactgttggttgttgtactttaaaagttggaaatgtggagtgtattcctccaaataaaataaagtttgattttcttggtaaggattcaatccagtatgtgaacacagtcgaggttgagcctcttgtttacaaggccattggacagttccaggcgggaaaatccaaaacagatgatctttttgatgagttagacacaagtaaactgaatgctcatttgaaggaacttgtgcctggtctcacagctaaagtattccgtacatataatgcttccatcactttggatgaaatgctgagtcaagaaaccaaagatggcgatgttactcaaaaaatagtagtttatcagaaagcaaataaggaggttgccataatctgcaatcatcagcgtactgtatcaaagacacatggtgcgcaaattgaaaaattgactgcgagaatagaagaactcaaggaggttcttaaagagctcaaaactaatcttgaccgggctaaaaagggaaaaccaccattggaaggttctgatggaaagaagattagaagcttagaaccaaacgcgtgggagaagaagattgctcaacagagtgctaagatcgagaaaatggaacgagacatgcatacaaaagaggacttgaaaacagtggcactgggcacgtctaagatcaactacctggatcctagaatcacagttgcatggtgcaaacgtcatgaagtaccaatcgaaaagatattcaccaagtctcttttggagaagtttgcgtgggcaatggatgtagaacccgagtacagattctcgcgccgttaggtatagagaagctcttctcggatggagcaagtattggagggcaaaagagctgaatgagataagagcaaagagaaaaccggcctttcttctattcatcttcctcccttgtttagaattttattaccttagtgagtaaaaaacatgaacatgtcaagctgtttcattagtgtcttttttaacattactatgactcaaatgttatgttatttgtaacattactatgattaaagaaatagaaaatccgaagaagaacaaaaacaaaaaaaaaagnnnnnnnnnnnnnnnnnnnnnnnnnnnnnnnnnnnnnnnnnnnnnnnnnnnnnnnnnnnnnnnnnntgtcctaa

SEQ ID NO: 84504 - DNA, 394 bp, Arabidopsis thaliana columbia
agcctgcctttctgggaacgcgaaaagaaagacaaaattttcttgcaattgaaggtgaggtttggtgaaagggaaattgagaaaaccctagaacaagtacggtctctattttgctttaatgggtcgcgaatctgtggctgttgtgactgcgccgccctcggcgactgctccgggtactgcttcggtggcgacctcgcttgctcctggcttccgatttcatccgactgatgaggaactcgtgagctattacttgaagaggaaggttctgggccaacctgtacgcttcgatgcgattggagaggtcgatatatacaagcatgagccctgggatttagcagtgttttcgagattgaagacaagggaccaagaatggtacttctacagtgcattagat

SEQ ID NO: 84505 - DNA, 454 bp, Arabidopsis thaliana columbia
  unsure (1)..(454): unsure at all n locations
ccacaagaataacattgggccaccaagtgggaacagatatgctccgttcatggaagaggaatgggctgatgatgaaggagctctgattccaggaatagacgttaagctcaggctagagccgccgccagtagccaatggaaacgaccagatggaccaggaaatccagtcagccagcaagagtctcatcaacatcaatgagccaccgagagagacagctccactggatatcgaaacggaccaacagaatcatcatgagaatgacctcaagccggaggggcataacaacaataataattatnattgaaaacgggggaacactnaaaacgggngcagattgggagaagaggagcgtcctccttggcctgtatgnnttntttaacaaagaggtccatttcctttttntgaatttcaaacgtggnnnccaaaggggtnccacaacaaatttannnggggc

SEQ ID NO: 84506 - DNA, 945 bp, Arabidopsis thaliana columbia
  unsure (1)..(945): unsure at all n locations
ctatacgacttctatagggaaagctggtacgcctgcaggtaccggtccggaattcccgggtcgacccacgcgtccgaaaaattgagaagaaaacctagaaacaaatacggtcttttttttttctttttatgggtcgcgaatctctggctgttgtgtcctcgccgccatcggcgactgcgcccagtactgctgtgtcggctacctcgcttgctcctggctttcgatttcatccgactgatgaggaactcgtgagctattacttgaagaggaaggttctgggtaaacctgtacgcttcgatgcgattggagaggtagatatctacaagcatgagccctgggatttagcagtgttttcgaagttgaaaactcgggaccaagaatggtacttcttcagtgcgttagataagaagtacggtaatggtgctaggatgaatcgagcaactaacaaagggtactggaaagcaactggaaaagacagagaaatccgccgggatattcagttgctcggtatgaaaaagacgcttgttttccacagcgggcgtgctccagacggccttcggactaattgggtcatgcacgagtatcgccttgtggaatatgaaactgaaactaacggaagcctgctgcaggatgcatatgtgttgtgcagagtgtttcacaaggaataacattgggccacccaagtcgggaacagatatgcggccattcatggaaggaaggaatgggctgattggtggaggagctcctgattccagggattagaccgttagggtcaagggttagaggctcttaccacaaagcccattggaaacaacccgatttgcccccggaaattccattntagcaaagcaaagnttctcattnaacaatnaacggggtttcccgggaggttctttcttccaattggccattgaccctacccaccagatnatntttngggtcngc

SEQ ID NO: 84507 - DNA, 453 bp, Arabidopsis thaliana columbia
tgattaagatgatgaagcaagcccgctctttgctctccaggagcctttgtgaccaaagtaagtcacttttcgaagcttcgacgttgcgtggttttgcaagctggtcaaattcttcaacccctggacgtggattccctggtaaagatgccgcaaagcctagtggtcgattgttcgcaccttattctatcttcaaaggaaaagctgctctctctgttgaacctgttcttcccagtttcactgaaatcgattcgggaaatcttcggatagatcgtcgtggatccttaatgatgacttttatgcctgctattggtgagcgtaagtacgactgggaaaagaaacagaaatttgctttgtcacctactgaagttggatccttaattagcatgggttccaaagacagctccgagtttttccatgacccttccatgaaatcaagtaatgctggtcaagtca

SEQ ID NO: 84508 - DNA, 580 bp, Arabidopsis thaliana columbia
  unsure (1)..(580): unsure at all n locations
tgacgtcgcatgcacgcgtacgtaagcttggatcctctagagcggccgcccttttttttttttttttcttgaatatcattcacttatcatcttatttattggcaattaatgttaagtggaactaatatacaaagacgcaacataggcttttatactgtaaattaaacaactacactatattctgaaaaacaaatcattcactttgataaaaatattcagcactgagagagattatatcaaaccccaaactgatgtaattcacaacaaggcctctcctcctgtctccctcataagccattttcgtgcatttgttgcctctcttctgctttcncctctcacnccagttctttgagaaagtcaatgttgtccacaaataccgatttccaaccatcaggatccagacacgcggtgatcttcgtgctaatanctggtaagggaccaggctcctcgtgatttttccccaaagagtttatagctcngcagtttggacacatcatcgggcctatgggatctgggataagattccttacanatcagggcccaagtantgcagcnagggaggaatatctccggcaaaccc

SEQ ID NO: 84509 - DNA, 625 bp, Arabidopsis thaliana columbia
  unsure (1)..(625): unsure at all n locations
ccccttaaacattttgtatccctttttacttttattccatgtttaattgtcacatggggnaaatatgtgtaccaatgaaacaaacttgtcattttgtagaatgcagnagaaacaaaaaaggataaactaaaaatctgtctttactaaagagtccctaattctccacaggaaagattcagatcagcggaatttagtcctgtggtgtgctcaaaaacggttgtccatgttctcgactatgctttgcagtcctgacttatacgaaggatatagcaatttcactcctagtttatccttcatgcgttcgttgcagactcgtttctcgcctctcaatgaactttcctcccgagattcatacagaaatggaaatggttttgtggtgatattccccggccaacgtttctcgatcaactccaaggcatattcaaacacctcttctcttgctgccggatcatcatcaacaatattgtagatctcccctgatgctggcttttcagtggaagctttaagaacttggcatatacctcaacatgaatcncgacgggaattacggggggnctccctttgacctcagnaacgccngnntaaaaggacaatgactcgcaggcaaaaacccagcgggattggt

SEQ ID NO: 84510 - DNA, 545 bp, Arabidopsis thaliana columbia
  unsure (1)..(545): unsure at all n locations
tgacgtcgcatgcacgcgtacgtaagcttggatcctctagagcggccgccctttntttttttttttttttttttaatttaaatcacttcgtttagctctgcattccacgccaattacaactcgttttgttacaaaccttaccatttgacctgcgttatctacaccctacttctaatgtaaacgacaaaatgagcccggtgtgtgcgaatacaaaacaaagaggggatttggaaaagactgtaaaatcatgaacatgttactcataataagatcttgaaacgggaatcatgctaagtagctttaatcgtcttcgtccatggggtccactggtttcttctgatccccatcaacttcatggcttctttctggatcaggatccgacgagacgtgatccccttggtaatcattcatatcagaaccccctggatccagaatcggaaaagggatggggtttncctnccaggtcancaccggggcaganaaanncnggcntgngccgaagggancaggtttacctccctgaaaggnncccangggcggaaaaa

SEQ ID NO: 84511 - DNA, 523 bp, Arabidopsis thaliana columbia
  unsure (1)..(523): unsure at all n locations
tgacgtcgcatgcacgcgtacgtaagctaggatcctctagagcggccgccctttttttttttttttgaaataagatttgcgtccatatcgaaactcgaattaacagtagctacacacacaaaataatggacgaagtttttttcagataaaccggttaagaaactcatcaacactagtgtacttgacttcagggtaaagctcggaagcctcaactccaaaagaaggatctatagtgaaggaggtaaagtcactcttcacaaaggnttgtatggatcagacccaccaaaaaatccattggaggcttactctcttggatggttttgaggagttcttcctctgaaacataagtcttttcgagagtctnaccgatcttttcctcccacaaaccaaccatatcgttctgcganacaatgtaatgggcgggtgaatgtagagaacttgtaagtgtcncggnnatcaacagcttcaaggaaatgcaacgngctctcagggtgaaaggnttgatggccagtncaagatgaat

SEQ ID NO: 84512 - DNA, 531 bp, Arabidopsis thaliana columbia
caaatctctgaatctcttgggtttgatgtgtaatcttaattccagttttcttgttgctttcgtttgttaaattacagagatgccattcgttctgtatccccaagcttggaagtagtagtaccaatgagaatggcagaggaagaagtgtaacagtgagagcttcaggagatgaagattctaatgagaactttgctcctcttgctcctgttgagcttgaatctcctgtaggacagctttttggagcagattcttagaactcatcctcatcttttacccgttacttgtcgatgagcagctcggagaaattcgcccgcggcaaagcgaagtctcggttaaagctggaattcgtctttccacacaaggcaatttctccaaaagtaagtctttttgcttcaagtttttgagtgagactgtgggagaatcttgcaatgcttaagtacatagccttagccttagatactgtattggtcgaggtctacttgaagatgttgttgtgtggttgatttgcaggaggatatctgaagttagaga

SEQ ID NO: 84513 - DNA, 1015 bp, Arabidopsis thaliana columbia
  unsure (1)..(1015): unsure at all n locations
aacaaaaatgcaagccatcggtagcagccatggcaggaggctctgcttcaaccactatctctccgattccttctccaaattcctctctccttcttcttctccttcccttctccctcagagatgccattcgttctgtatccccaagcttggaagtagtagtaccaatgagaatggcagaggaagaagtgtaacagtgagagcttcaggagatgaagattctaatgagaactttgctcctcttgctcctgttgagcttgaatctcctgtaggacagcttttggagcagattcttagaactcatcctcatcttttacccgttactgtcgatgagcagctcgagaaattcgccgcggaaagcgagtctcgtaaagctgattcggcttccacacaagacattctccaaaagagggtatcttgaagttagagataagggaaggccgtaaaactttagcagagatcatttactgttttaggtggtacacagaattttttggaaaaaggaatctctatgattcctcggattaaaccaacttcagacccagcaggacggatagacttatggccgaatcaagaagagaagctcgaagtcattcactctgcggatgcgttcgagatgatacagagtcacttgtcttcagttcttggagacggaccagcagttggtccgttaagctctatagttcagataggcaaaatcaagctaggaaaactctatgctgcttctgctatgtatggatattttctcagaagagtagaccaaagataccaacttgagagaaccatgaacacacttccgaaacgccctgagaaaaccagagaacggttcgaagaaccttcgcctccttacccgttatgggacccggattccttgatcaggattcaccccagaggtatatgatcccgatgaatacgcggtccaagaatgaagatgnggcatcgccttatggattnggntcatatgntncggatttggntcgnancgcttcagaganttgncncgatnggtntaagnngc

SEQ ID NO: 84514 - DNA, 471 bp, Arabidopsis thaliana columbia
  unsure (1)..(471): unsure at all n locations
gcagttgtaagctcgcgtgcacgcgtccgtaagcttggatcctctagagcggccgccctttttttttttttttataattttttagctttgattcgctaaaaaatagagaatatctcagccaattcttgaattaatctctgtaaataattttgtacatatactctattcttttgtcacaaatggaaagtgaacattaaagggggaaatagagaactatatattaaaaaaaagttaccggctcgacttgaagatcatcagagccgagccgaatagagctgatgggggcaaaacttctgagnatagctaaaacggagcttagagcataagctcagtcttacacgtgctctccttctgacacgtgccaaacacgcngatccttctcttcttaacaggtaccacntgatacgcacgtgacaccggttcgagccttaaagttaggcaagcttatctcgnnggagcccttcanagccg

SEQ ID NO: 84515 - DNA, 919 bp, Arabidopsis thaliana columbia
  unsure (1)..(919): unsure at all n locations
tacggctgcgaaagacgacagaagggtacggctgcaagagagagagagaaaacaaaacaaaaaatggctacccgaaaagctctgatcaacgttcaccggatcattcgctccaccgccgtggttggccggagctctatcattcctgccgccgctaaccggtcatatcctattatattccggaatggagttgatttgggggcgagattcttctgtgagaacactgcgtctgcccagaatttcgatattgatctctctaacgaagagaataagagaagaacgatcaacagattgttgtataggagcaagcaaagagggtttttggaacttgatcttgttttggggaattgggttgaggagaatgttaattccatggacgaaaatggtgttaaatccctaattcatgtcctcaatttggaaaaccctgatctctggaaatggctaactgaacaggaacagcctccggaagcagtgagttcaaatccggtgttctcggcgttacacgagaaagtcatgaagaatctgaacaagcatgcagcgccagagactcgtgcagcggctggacagccctgggtcagaggatgggacgatttcaagagaggccgtgatgctcccatttcagggaatcagttaacattaactcctctttttcaaaaagtatcaaagtgaaaataagttctgatatgaaaatagatccccagtagtagccacccattactttactattgtatttattaagaaccaggccgtgaagaaggtccatggcgttgagataattacagtgttgtgtcttgtttgttgaagtttccaaagctaatatttggggtttctagaaccaaaaaacaaaagggcgcgnnnnnnnnnnnnnnnnnnnnnnnnnnnnnnnnnnnnnnnnnnnnnnnnnnnnnnnnnnnnnnnnnnn

SEQ ID NO: 84516 - DNA, 389 bp, Arabidopsis thaliana columbia
  unsure (1)..(389): unsure at all n locations
tgacgtcgcatgcacgcgtacgtaagcttggatcctctagagcggccgcccttttttttttttttttttcattagattaagcattctttaactatgttcattaataacctctgtcacacattatatataaacctatgaaagatgtttgtttgtgtgccactaaataacttagttccagatgtgagcatcgcaaaggatcacaaccttcttgagcaatgtcagtgattttgaacaccgggcgtcggaaaatttccccagcttcccaattgggatggnaagaacactctgtgaccaaatcaatttaccggcggattccaccnggttactaacggaaccnggaacnngganagcnccggnnggggaactttggcangntancccaaaaaggt

SEQ ID NO: 84517 - DNA, 515 bp, Arabidopsis thaliana columbia
  unsure (1)..(515): unsure at all n locations
agcatgacgtcgcatgcacgcgtacgtaagcttggatcctctagagcggccgccctttttttttttttttttttttttacaagctaacccttgattaaactaaactaatcgagacagaagtctagttgatacttgataaggcaacaaaaacatcggttgaggttacgtaccaaaagcagtaaattaccggttaatgtatcttaaaaaaacggttaaggagctaagcaatgattgatagtttcagagagacatgagagcaaaccacgtcttcaacgttaacctctcttttcatcttcctttggccttcttttaaaagctccgtttgcaagatcctcctncttcctgcngaagctcaaggaccctctcctcnganancggtttcncggcaatcancccttaancaattttnaacccctnggtttctggccggatcccaaagaaacccgggccaagggcccggttcttnaaatggnggggtccccccaggggnnaannaggnaacccttgggggggca

SEQ ID NO: 84518 - DNA, 3099 bp, Arabidopsis thaliana columbia
gcggccgccagtgtgagtaatttagttttggttctgttttggtgtgagcgtatgcctggaaataagtacaactgcagttcttctcatatcccactctctcgaacagaacgcctcttgagagatagagagcttagagagaagaggaagagcaaccgagctcgtaatcctaatgacgttgctggcagttccgagaactctgagaatgacttgcgtttagaaggtgacagttcaaggcagtatgttgaacagtacttggaaggggctgctgctgcaatggcgcacgatgatgcgtgtgagaggcaagaagttaggccttataataggcaacgactacttgtagtggctaacaggctcccagtttctcccgtgagaagaggtgaagattcatggtctcttgagatcagtgctggtggtctagtcagtgctctcttaggtgtaaaggaatttgaggccagatggataggatgggctggagttaatgtgcctgatgaggttggacagaaggcacttagcaaagctttggctgagaagaggtgtattcccgtgttccttgatgaagagattgttcatcagtactataatggttactgcaacaatattctgtggcctctgtttcactaccttggacttccgcaagaagatcggcttgccacaaccagaagctttcagtcccaatttgctgcatacaagaaggcaaaccaaatgttcgctgatgttgtaaatgagcactatgaagagggagatgtcgtctggtgccatgactatcatcttatgttccttcctaaatgccttaaggagtacaacagtaagatgaaagttggatggtttctccatacaccattcccttcgtctgagatacacaggacacttccatcacgatcagagctccttcggtcagttcttgctgctgatttagttggcttccatacatatgactatgcaaggcactttgtgagtgcgtgcactcgtattcttggacttgaaggaacacctgagggagttgaggatcaaggcaggctcactcgtgtagctgcttttccaattggcatagattctgatcggtttatacgagcacttgaggtccccgaagtcaaacaacacatgaaggaattgaaagaaagatttactgacagaaaggtgatgttaggtgttgatcgtcttgacatgatcaaagggattccacaaaagattctggcattcgaaaaatttctcgaggaaaatgcaaactggcgtgataaagtggtcttattgaaaattgcggtgccaacaagacctgacgttcctgagtatcaaacactcacaagccaagttcatgaaattgttggccgcattattggtcgtctcgggacactgactgcagttccaatacatcatctggatcggtctctggactttcatgctttatgtgcactttatgccgtcacagatgttgcgcttgtaacatctttgagagatgggatgaatcttgtcagttatgagtttgttgcttgccaagaggccaaaaagggcgtcctcattctcagtgaatttgcaggtgctgcacagtctctgggtgctggagctattcttgtgaatccttggaacatcacagaagttgctgcctccattggacaagccctaaacatgacagctgaagaaagagagaaaagacatcgccataattttcatcatgtcaaaactcacactgctcaagaatgggctgaaacttttgtcagtgaactaaatgacactgtaattgaggcgcaactacgaattagtaaagtcccaccagagcttccacagcatgatgcaattcaacggtattcaaagtccaacaacaggcttctaatcctgggtttcaatgcaacattgactgaaccagtggataatcaagggagaagaggtgatcaaataaaggagatggatcttaatctacaccctgagcttaaagggcccttaaaggcattatgcagtgatccaagtacaaccatagttgttctgagcggaagcagcagaagtgttttggacaaaaactttggagagtatgacatgtggctggcagcagaaaatgggatgttcctaaggcttacgaatggagagtggatgactacaatgccagaacacttgaacatggaatgggttgatagcgtaaagcatgttttcaagtacttcactgagagaactcccaggtcacactttgaaactcgcgatacttcgcttatttggaactacaaatatgcagatatcgaattcgggagacttcaagcaagagatttgttacaacacttatggacaggtccaatctctaatgcatcagttgatgttgtccaaggaagccgctctgtggaagtccgtgcagttggtgtcacaaagggagctgcaattgatcgtattctaggagagatagtgcatagcaagtcgatgactacaccaatcgattacgtcttgtgcattggtcatttcttggggaaggacgaagatgtttacactttcttcgaaccagaacttccatccgacatgccagccattgcacgatccagaccatcatctgacagtggagccaagtcatcatcaggagaccgaagaccaccttcaaagtcgacacataacaacaacaaaagtggatcaaaatcctcatcatcctctaactctaacaacaacaacaagtcctcacagagatctcttcagtcagagagaaaaagtggatccaaccatagcttaggaaactcaagacgtccttcaccagagaagatctcatggaatgtgcttgacctcaaaggagagaactacttctcttgcgctgtgggtcgtactcgcaccaatgctagatatctccttggctcacctgacgacgtcgtttgcttccttgagaagctcgctgacaccacttcctcaccttaatatcccgagacagtgtcaagtgagttcatgtaacccaataaaaactattgttttgtaacaaaaagcagccattaccagactctttagtggtttgattctaatataataagagtagagcaacttatgacacaaaaaaaaaaaaaaagggcggccgctctagaggatccaagcttacgtacgcgtgcatgcgacgtcaagaatcttctataggtcgcctaa

SEQ ID NO: 84519 - DNA, 833 bp, Arabidopsis thaliana columbia
  unsure (1)..(833): unsure at all n locations
ttgcccnnnnnnnnnnnnnnnnnnnnnnnnnnnnnnnnnnnnnnnnnnnnnnnnnnnnnnnnnnnnnnnnacttcgnngacacatctataacaaaaaaaaaatcggccgcaaagtttacgataccgaaagagataaaacaaatagcataaaagcgacccccatcctcatgccactttggaaggtcacaacgacctaagtaccaccaatccttgcttcgccctcagctgtcgtcatcgatgcctcgtcctcaaactctggaaaggccacgaggtcatcatcaagaagatcggtaatctcaagagcatcgaccacttcgcgccaattgtttttgtcaaccttaagctcgcacatagtctcccttaggattgcggtaccgtttttgatcaatttcttcaagagtttccgagaacctacggcttgggattgcatgaaaagagattcgtctgcaacacgtttgtcaagcatatgcttttttagccgatcgatccttggtttataaaatagaacatcatttttaaagcggctccatttggaacgagcagtacgaagagcattggtaagggaaccttcttaaacttggattggcttagccttgactaaaaattattccgaatttttttgagaaattttccaaagaagctttttttggaagtttcaaaagttacccccaaaaacccaaatttggcttggcaaaaaaaaaatattcccgcgggggcctttttccggattttttctttggaaaaacgcgggccaaaccgtgtatttttcttttcccttttaaaaatttttttttttgtacccttgtgtttacctttccgaagaaaaaaaaatt

SEQ ID NO: 84520 - DNA, 792 bp, Arabidopsis thaliana columbia
  unsure (1)..(792): unsure at all n locations
nnnnnnnnnnnnnnnnnnnnnnnnnnnnnnnnnnnnnnnnnnnnnnnnnnnnnnnnnnnnnnnnnnnnnnnnnnnnnnnnnnnnnnnncggccgcgaacatcaagaggagaaacccttttactccatcatcttcaccaagccatgacgcttgcaacgagcttcgcagagagaagcaagtgctaatgatggagatagtgagtctaagacagcagcaacaaacaacgaaaagctacatcaaagctatggaacagaggatagaaggaacagagaggaaacagagacaaatgatgtcgtttctggctagagcaatgcagagtccttcgtttttccatcagttgttgaaacaaagagataaaaaaattaaggagcttgaggataatgagtcagcaaagaggaaaagaggttcttcttcgatgtcggaattggaagttttggctttggagatgcaagggcatggaaaacagaggaatatgttggaagaagaggatcatcaactgggggtagagagagagttggatgatggtttctgcgaagagttgcttagtgatgagagtttggcttccacctcctaactagatggaattcttttttggttttgtttttaggttcttctaactttcaagctcatttttcttctgtcaccaaaaaaaaaaactttttcttgtttggtttaaattaaatttggcaggaaatttttgtttttcaaagtaactcagtagctaggtaagttggtaaaaacaaaaaaaggcgggcccggcgaaaatttcggatatttcaaaggcctttaatct

SEQ ID NO: 84521 - DNA, 564 bp, Arabidopsis thaliana columbia
  unsure (1)..(564): unsure at all n locations
gaagaaaaccctcaaatggagaaagcaaaacaagattgattcgatccttggagaggagtttggggaggatcttgccactgcagcttacatgaacggtgtggaccgcgagtcccacccagtttgttacaatgtccacagcgaggagctttaccagacgattgggtcggagaagaacagagagaagttcttgagatggaggtttcagctgatggagaagggaatccagaagcttaatcttaaaccaggaggtgttacttctcttctccagatccacgatctcaaaaacgctcctggagtgtcaagaacagagatttgggtcggaatcaagaaagtaatcgagactttgcaggacaactatccggaattcgtgtccagaaacatattcatcaacgttccattctggttctacggcatgagagcttgtcctctcgncattcttaactcaacggaccaagnacaagtttttttgtggntncntccccttaaggttaaggggnnctttttttaaggcaaattccccanctttattggnncccccaattnnnaaaanggggggtttnaaaa

SEQ ID NO: 84522 - DNA, 676 bp, Arabidopsis thaliana columbia
  unsure (1)..(676): unsure at all n locations
acgcgcgnnnnnnnnntacgactcaaatagggagagctggtacgcctgcaggtaccggtccggaattcccgggtctacccacgcgtccgcgatctcaaaaacgctcctggagtgtcaagaacagagatttgggtcggaatcaagaaagtaatcgagactttgcaggacaactatccggaattcgtgtccagaaacatattcatcaacgttccattctggttctacgccatgagagctgtcctctcgccattcttaactcaacgaaccaagagcaagtttgttgtggctcgtcccgctaaggtcagagagactcttctcaagtacattccagctgatgagctcccagttcagtacggtgggttcaaaacagtagacgataccgaattctccaacgaaactgtctctgaagttgttgttaagcctggatcatctgaaaccatcgaaatcccagctcctgagactgaaggtacattggtatgggacatagcggttttgggatgggaagtgaattacaaggaagagtttgtgccaacagaagaaggagcttacacggtaatagtccaaaaggtgaagaagatgggagcaaatgaaggaccaatcaggaacagtttcaagaacagtcaggctggtaagattgttcttaccgttgacaatgtctctggcaagaagaagaaag

SEQ ID NO: 84523 - DNA, 877 bp, Arabidopsis thaliana columbia
  unsure (1)..(877): unsure at all n locations
ccacgcctccgcaatctcaaaaacgctcctggagtgtcaagaacagagatttgggtcggaatcaagaaagtaatcgagactttgcaggacaactatccggaattcgtgtccagaaacatattcatcaacgttggagtctggttctacgccatgagagctgtcctctcgccattcttaactcaacgaaccaagagcaagtttgttgtggctcgtctcgctaaggtcagagagactcttctcaagtacattccagctgatgagctcccagttcagtacggggggttcaaaacaggtaggcggtttcccctaattctccaaacggaaacttgccnccttaaggttggttgtnaaccctgggatcatcttaaaccatcgaaatcccagctcctgagactgaaggtacattggtatgggacatagcggttttgggatgggaagtgaattacaaggaagagtttgtgccaacagaagaaggagcttacacggtaatagtccaaaaggtgaagaagatgggagcaaatgaaggaccaatcaggaacagtttcaagaacagtcaggctggtaagattgttcttaccgttgacaatgtctctggcaagaagaagaaagttctgtacaggtacagaaccaagactgaatcctcttcctgaagtggaggatttcatgtagtctctggatatataatattcttttctaaatttaaacgtttggtgttattatttatttttgagtgatatgtaagagaaagagatactcccattatttcattgatattcaatcaaaaaaaaaaaaaaaagnnnnnnnnnnnnnnnnnnnnnnnnnnnnnnnnnnnnnnnnnnnnnnnnnnnnnnnnnnnnnnnnnnnnnnnnnnncattc

SEQ ID NO: 84524 - DNA, 605 bp, Arabidopsis thaliana columbia
ggcgtgaatgcagtaagagacggcatgaacttagttccatataaatatatcatttgcaggcaagggaccccaggaatggataaggccatggggattagccatgactcagcccggacgagcatgcttgttgtctctgagtttatcggctgctcgccttctttgagtggtgcgatcagggtgaacccatgggatgtagatgctgttgcagaagcggtaaacttagccctcactatgggtgagactgaaaagcgattaaggcacgagaaacactatcactatgtgagtactcatgatgtgggttactgggcaaagagctttatgcaggatcttgagagggcatgccgggagcattataataaacgttgttggggtattggttttggcttgagtttcagagttctgtcactgtctccgagtggtaagaagctatctatcgatcacattgtctccacgtatagaaatacacagagaatggcaatatttttggactatgatggcactctcgttcctgaaagctccatcatcaaaacccctaatgccgaagtcctgtctgttctgaaatctctgtgtggagatcctaaaaacactgtgtttgttgtcagtgg

SEQ ID NO: 84525 - DNA, 797 bp, Arabidopsis thaliana columbia
  unsure (1)..(797): unsure at all n locations
tcctnnnnnnnnnnnnnnnnnnnnnnnnnnnnnnnnnnnnnnnnnnnnnnnnnnnnnnnnnnnnnnnnnnnnnnnnnnnnnnnnnncggccgcgcattttacaggtacacttagaagacttatgaagaagacggcacattgaactcaacaacaatggtatcatcaacataatcacgaatcttctcactccgccacttcatctgctcatccacaccctcaatttcacccaaacccctaaattacgaaatcgatccaattgagaaatcttttagatcccccccggagaaaagttttctccaacagtaatctgatcaatcccttcaaatttctccttcatcacttccataatctccaatttcgcttcttccatgacattctctttcaatttaagaagcgtgattttaccaattgaaccaagaggcggtgctagggcttccggagcttgttcggcgatccaatcaacggccatgatatcttcgcgaatcgattctgattccttgacaacacgaacgtgatcgggatgtatagcgtaagcgttgagatcttctttggatctgtaacggctatgaaggacgtgagtgaagtcggaggcggtggtcgtgataaggcggtggattgaaccgcagtagaggtgaagcacttggtcgagattgactagttcgttgattccggtgaccatggagttgatcttgccggagtcaacggcggcgtcggtgagcggccgggaattcgatatcaagcttatcgataccggcgaacttggaggggggggcccggtaccccaattcgccctatag

SEQ ID NO: 84526 - DNA, 1014 bp, Arabidopsis thaliana columbia
  unsure (1)..(1014): unsure at all n locations
gaggcccccttctcgagtcgactgtatcgataagcttgatatcgaattcgcggccgccaagaaccggagacgttcctccgctttatatgctttacgccgtcatagttcacttggatactctcaacgcatctttctcgggtcactacatttcgtatgtcaaagatttgagagggaattggtacagaatcgatgattcagagattcatccagtgccaatgactcaagttatgtcagaaggagcttacatgttgttctacatgagatcgtatccacgtcctcaaagaggagagcacaatggaaaagctccggttcaccattcgcaaccaagaaacgagatgaaggnacagaggaaacctgttaaccgcttcaaaccgagagcgggtcacaagaacacagagtcatcatcaagcgagatgggctctcttaacaagctcagacgaggcttcttttcaccacaggatcaaccagggggaccctttcagcaccatgggctccacagatgtttcccacgccggagcctcttcttcccctttcggccatcttcaacaacggtttccacaaccgtagggccatcgcccacacaacactgtcgcttgcagaatgttctcaggtcccaaacccgaaacccggtatttccgtggagcaagaaacaaatcacaacaacacggtcggtgctggacgcaacaccatcactatatcctattccagcaccgtatccgccccatgattattacgatcagagtatgtatgtaaattacgagactaacccagaatttaacaatggtcaggatcaggatagaacttacagttactggtagtaagtagaagagactagagaggattctgtttttgaacctccctgatttttattaaatatgtttagagatctctttagggatacttaactcgagtgccctgagattttttgcggccgaattttgtctttagtcatctgtttctttggtatcaaaaaaaaaaaaaaaaaagnnnnnnnnnnnnnnnnnnnnnnggtag

SEQ ID NO: 84527 - DNA, 656 bp, Arabidopsis thaliana columbia
  unsure (1)..(656): unsure at all n locations
ttgggtaccgggccccccctcgaggtcgacggtatcaaaagcctggatatcgaattcgcggccgcctccatcttagtgttagcctctcttcttctaatcagttcatctcttgcttcggctactatatcagatgcttttggtagtggcgcggtagctccggcaccgcagagcaaagatggaccggcgttagagaaatggtgtggacagaaatgtgaagggagatgcaaagaagcggggatgaaagatcggtgtttgaagtattgtgggatatgttgcaaagactgtcagtgtgttccttcaggcacttatgggaataagcatgaatgtgcttgctatcgtgacaagctcagtagcaaaggcactcctaaatgtccttgattctatttctttccaaccaaaaatttaaataaatggataaggggggtccagtaaactaattttaaaactataaatgggtcttttgtttatgatttttttttttttttcattcccatttttacgaatttggcttgggctttttgaagtaagtttttaaatattgaaaagggctaaaattttggggaaatcgatccggccggnattcnntgnccccgggggggcccccaggcntaaagggccnncccgggggngccccannttgnnnnnnnnaaccgtag

SEQ ID NO: 84528 - DNA, 726 bp, Arabidopsis thaliana columbia
  unsure (1)..(726): unsure at all n locations
gcccccctggagggagatgcttgcaatcgactgcactggcgccctgggccgaatgagagtgacgcattggcaatgcagaaaacagacttatctctattcttctttgaaaagctcgcgaccgatgacaatccttctgatctcgcttgtccctgcaccgatttcatatagctttgcatctcttagaaggcgtcctgttgcatattcgtttatgtatccatttccgcctaaacattgtatcgcctgcaacatcaaaccaaatcttttagtcttaaaggaaaggtaactaggtgatcaatatgtgtagttatgatcccttcggaggtttgctttgctggtaaccattagaaagacaagagacaacgctttaaaactgggtttcggggtttgatctagccttttatgagctaagtgtcaccagtaaccttttaagtatgaagggcaaaataaggggacttgacctggaaagcgcacctgcggttgctctctcggccgcacaaagaataggtccggcgcagtccctttgggccacctttcccattggcacaggccctcgcaacaggggaaacgtatcgcccttgaagattgtaatgcggggcacatatcagcacctttaccccgaaattcaaccgaattgttttagcggccgaatnnnnnnnnnnnnnnnnnnnnnnnnnnnnnnnnnnnnnnnnnnnnnnnnnnnnnnnnnnnnnnnnnnnnnnnnggtag

SEQ ID NO: 84529 - DNA, 677 bp, Arabidopsis thaliana columbia
  unsure (1)..(677): unsure at all n locations
ccccccatttgaannccatttaataggccactcggcacccccctcgaggtcgactgtatcgataagcttgatatcgaattcgcggccgccaaatattcgcaattgagtctgcaaaaggatgcaaagtcacgaggattcactttctggggtaaaggaccagagaatgctggtcaatacagttctcatccacatgaaactgtgttcttccaagaaagaggtgaatatgacagctattatggccgcttcttcttaaattggtactcacaattgctaattggtcatgctgagaatgttctgtctcttgcaaatctcgcatttgaggagacgaagattattgtcaagataccggcaatatactggtcatacaagacagctagtcatgctgctgaattaactgcaggatactacaacccttcaaaccgtgatgggtactccccttggtttccgaaactctgaagaaatattccggtgactgtgaagtttgtgtgccctggggcacaaatggctcccaaatggcgcatgaaggaagcattagctgntncagaangggttaaggtggcagggnggncancnagccttggggtaaagggnttccaaaccggnggnggaaaatcnggtaccttgttcnccaaanatggtggntngggtaancggaaaggaaccagaacccccgnngt

SEQ ID NO: 84530 - DNA, 659 bp, Arabidopsis thaliana columbia
  unsure (1)..(659): unsure at all n locations
accgggccccccctcgaggtcgcgggtatcgataagcttgatatcgaattcgcggccgcctcgggctcagtaaatggaaagttgaactacttgccgcactacaagtgggtgctacagaggtccaatctatgattctgaagggtggtggcatgatcacattcgccaaagtttatcagttgttggctaagaaactatctggaaaagtattccttgaagctgccaactaccagattaggaaagagatgctaaaaaagggtgggcagtttgctgccattaacttggaatctcgagcagctctgttagcagcgaagcatggatttgcaggggctgcatccagatacattggcttaaaaacagcgatgcaattacttggccccatgatgtgggggacattactggctgacttagtgattcagatgctcgagactgactacgctagaatcctaaggagcaatttacgcattttgcacagattcgggtcaccaggacatacaggctaccttgtaaatggagtaacagttggttttccccatcccagggtccctacgaactatgtcggtaagcggccggaatgcnnnnnnnnnnnnnnnnnnnnnnnnnnnnnnnnnnnnnnnnnnnnnnnnnnnnnnnnnnnnnnnnnnnnnnnnnnnnnnnnnnnt

SEQ ID NO: 84531 - DNA, 552 bp, Arabidopsis thaliana columbia
  unsure (1)..(552): unsure at all n locations
cccccctcgaggtcgactgtatcgataagcttgatatcgaattcgcggccgcaaaaatttcatttggaaaaaaaaaattgattaaaaagaagaagaacaatcaaaaagagaagaaacaagacggatagaaattgcagaaacttgggatagcttcctatttgctcaaataataagaggttctctcttagtaactcaatcaattcttagaaaatatattatattacctttattgataataattaaaaacagtgtccgtatgttattatttcaatttcccgagtggtcccaggatttaaaggattggaaacgtgaaatgcatgttaaatgtacttataatggggntcaactatccgnaacagaatttccaagaaactggttaacggntggtattcagntnaaaatcccatttcccttttancttaaaccctgggcataaanctaaatttccaagnatccccaggagggncggccnaaaaaaaccaaaggccangggggaaaaatgggttttgggtccctaacnggttgggggntngnanccgngcnccggttngg

SEQ ID NO: 84532 - DNA, 415 bp, Arabidopsis thaliana columbia
  unsure (1)..(415): unsure at all n locations
gctctataagcttgatatcgaattcgcggccgcgtgcgttttaaaacacatgtgtttaagtttcgaggcaattaggagataaagacgaacgagatttgcaagcaagaaaccaagacatgagataaaatgatattaacgactgttctattgttgttctgagaccgaggccagattaccgtgaggcgctgctttggttccggctttccaacaacctttgccaaaccatttttccacaatgcacaagagtcaagagatgccacaaggtaaagaagagggaccccggtcacacaancttcccgatgcaaattcanccaattgtcannattccaacangtaaaggtgtatgactggaaccgcgggccgggaattccctgnanccccnggggggtncacttaaattnttggancgggnccc

SEQ ID NO: 84533 - DNA, 410 bp, Arabidopsis thaliana columbia
caagctccaatctctctctctctccctctcccaaaatctcacgatgcaacctcagccgcatatttctccgaacaccgcaactgccgcgatctcagccgcgcttgaatctcagcgcagtagaaaaaaccgaggaagttacaattgcggtagatgtggtcaacctaagaaaggccatgtctgtcttttaactgctccacctgatattcccactactccgatcgcttctgagccagtgagctgcatctccgccgccgcatcttcttcccgttctactgtcttatctttaacagcggcgccgtcatcgcgacagaccttcactcacttacgccgagctttatcgttcgatgacgtcgatgcgcgtaattcactcgatgaatccgatctggatgctgcatcgatggatctggatc

SEQ ID NO: 84534 - DNA, 605 bp, Arabidopsis thaliana columbia
  unsure (1)..(605): unsure at all n locations
ctctaatacaactcactatagggaaagctggtcacgcctgcaggcaccggtccggaattcccgggtcgacccacgcgtccgcccacgcgtccgcttcatccataataacttcactctctcccccccccccccccccaacatgttcctgtgacgacgatacactctttcactgacttacccctacctcaaaatcaccttcttcttcatcgtctcagctcaggaattgctaactacctgtttttgaatttgagatctgtttttgtttctagaagaaaacagcttgttttcaccgtctctgatcctctgatttgatcggaatctaatgggtaaaaccaccgggaacagagattggactcagatctacgctatttacggaatcgaacaatggcagacactcgtcttccttctcttccatgctttcttcttctctcttctctctcttctcttcctcatctacttcgatcagatttgctttttcctcgattccttcttcctctccggcgccgccagattagcccgcggggtttacccggngcttnaaacccggtntttcccgggggttttnaannttttgggccggngnaaaatttggntttacnaaagat

SEQ ID NO: 84535 - DNA, 728 bp, Arabidopsis thaliana columbia
gccgtctgcggtaccggtccggaattcccgggtcgacccacgcgtccgacactctttcactgacttacccctacctcaaaatcaccttcttcttcatcgtctcagctcaggaattgctaactacctgtttttgaatttgagatctgtttttgtttctagaagaaaacagcttgttttcaccgtctctgatcctctgatttgatcggaatctaatgggtaaaaccaccgggaacagagattggactcagatctacgctatttacggaatcgaacaatggcagacactcgtcttccttctcttccatgctttcttcttctctcttctctctcttctcttcctcatctacttcgatcagatttgcttcttcctcgattccttcttcctctccggcgccgccagattagccgcgggtttcaccggtgctgtaaccgctctctccgcggtttgtctactcttcgccgcagctaatttcgtttactcagatgttccgcttcagtacgagatggctcaacgcatggttagctccgtcggtgactggtcttgtgtcaaaactgctctcgatctcggttgtggccgtggtatcctcctcaatgccggcgctacacagcttaagaaaaccggtagcttcggtcgggtcggcgggttagaccgctctaaacgcaccacttttttccactcttcccaaccggtttaacttcgaaggtgtgccaagaattttttgaccatg

SEQ ID NO: 84536 - DNA, 535 bp, Arabidopsis thaliana columbia
  unsure (1)..(535): unsure at all n locations
tgatcaactagctgaagctggactcatgccatctcacatcgcagcaaccgcacttaacttaatcggtgcaccaagggaagctctgttttgagagtaagaatctgttggctaaaacatatgtatacaaacactctaaatgcaacccaaggtttcttctaagtactgatcagaattcccgccgagaagtcctttggcaacagctatatatatttactaagattgtgaagagaaaggcaaaggcaaaggttgtgcaaagattagtattatgataaaactggtatttgttttgtaattttgtttaggattgtgatggagatcgtgttgtacaataatctaacatcttgtaaaaatcaattacatctctctgtgtatctttcatagctttgtgtgacatattttggtacgagcagtgtttttagcggccgcgaatctnnnnnnnnnnnnnnnnnnnnnnnnnnnnnnnnnnnnnnnnnnnnnnnnnnnnnnnnnnnnnnnnnnnnnnnnnnnnnnnnnnnnnnnnnnnnnnnnnnntcat

SEQ ID NO: 84537 - DNA, 443 bp, Arabidopsis thaliana columbia
caactctccaccaccaccattgtcaccaccacatttaaacacacactttcacttgtagtgggattcgaaagtgcgttttattcatttgttttactgtttttgataacctcaaaatttgcctaaattttattctctataaatccttatatgttttacttacattcctaaagttttcaactttcttgagcttcaaaaagtacctccaatggcttcttctgcatttgcttttccttcttacataataaccaaaggaggactttcaactgattcttgtaaatcaacttctttgtcttcttctagatctttggttacagatcttccatcaccatgtctgaaacccaacaacaattcccattcaaacagaagagcaaaagtgtgtgcttcacttgcagagaagggtgaatattattcaaacagaccaccaactccattacttgacacta

SEQ ID NO: 84538 - DNA, 1201 bp, Arabidopsis thaliana columbia
  unsure (1)..(1201): unsure at all n locations
gcccccgccccccccattgaaatgcattggcattgggaccccccccgaggtcgacggtatcgataagcttgatatcgaattcgcggccgcgttgcgttgttgggttatggctcatcagtttatagctgtttaggagcggctgtaatgctcgaagaacgcggattaaacgtaactgtagcggatgcacggttttgcaagccattggaccgtgctctcattcgcagcttagctaagtcgcacgaggttctgatcacggttgaagaaggttccattggaggttttggctcgcacgttgttcagtttcttgctctcgatggtcttcttgatggcaaactcaagtggagaccaatggtactgcctgatcgatacattgatcacggtgcaccagctgatcaactagctgaagctggactcatgccatctcacatcgcagcaaccgcacttaacttaatcggtgcaccaagggaagctctgttttgagagtaagaatctgttggctaaaacatatgtatacaaacactctaaatgcaacccaaggtttcttctaagtactgatcagaattcccgccgagaagtcctttggcaacagctatatatatttactaagattgtgaagagaaaggcaaaggcaaaggttgtgcaaagattagtattatgataaaactggtatttgttttgtaattttgtttaggattgtgatggagatcgtgtttttcacctgcagagctctcgattttttctctcgagcatcatcattttcgtcggatcaatcaccaagagatggcgtcgagaaactccgtcaccggattcgcgttgttcagttttgtattcgccgtcatcttatctctcgccggcgctcaatccctggctccagctcctgctcccaccagcgatggaacatcgatagatcaagggatagcgtatttgctaatggtggtggcgttagtgctgacttacctaattcatcctcttgatgcttcttcttcctactccttcttctaatctctctctctctttcttctgtttttttttatttctttgcaacttcttattagtttcttcaatttgccttttttcttcttcttgtggataaaattttcgcggccgnnnnnnnnnnnnnnnnnnnnnnnnnnnnnnnnnnnnnnnnnnnnnnnnnnnnnnnnnnnnnnnnnnnnnnnnnnnnnnnnnnnnnnnnnnngtc

SEQ ID NO: 84539 - DNA, 2636 bp, Arabidopsis thaliana columbia
cccccctcgttgtcgacggtatcgataagcttgatatcgaattcgcggccgcattcatttgttttactgtttttgataacctcaaaatttgcctaaattttattctctataaatccttatatgttttacttacattcctaaagttttcaactttcttgagcttcaaaaagtacctccaatggcttcttctgcatttgcttttccttcttacataataaccaaaggaggactttcaactgattcttgtaaatcaacttctttgtcttcttctagatctttggttacagatcttccatcaccatgtctgaaacccaacaacaattcccattcaaacagaagagcaaaagtgtgtgcttcacttgcagagaagggtgaatattattcaaacagaccaccaactccattacttgacactattaactacccaatccacatgaaaaatctttctgtcaaggaactgaaacaactttctgatgagctgagatcagacgtgatctttaatgtgtcgaaaaccggtggacatttggggtcaagtcttggtgttgtggagcttactgtggctcttcattacattttcaatactccacaagacaagattctttgggatgttggtcatcagtcttatcctcataagattcttactgggagaagaggaaagatgcctacaatgaggcaaaccaatggtctctctggtttcaccaaacgaggagagagtgaacatgattgctttggtactggacacagctcaaccacaatatctgctggtttaggaatggcggtaggaagggatttgaaggggaagaacaacaatgtggttgctgtgattggtgatggtgcgatgacggcaggacaggcttatgaagccatgaacaacgccggatatctagactctgatatgattgtgattcttaatgacaacaagcaagtctcattacctacagctactttggatggaccaagtccacctgttggtgcattgagcagtgctcttagtcggttacagtctaacccggctctcagagagttgagagaagtcgcaaagggtatgacaaagcaaataggcggaccaatgcatcagttggcggctaaggtagatgtgtatgctcgaggaatgataagcggtactggatcgtcactgtttgaagaactcggtctttactatattggtccagttgatgggcacaacatagatgatttggtagccattcttaaagaagttaagagtaccagaaccacaggacctgtacttattcatgtggtgacggagaaaggtcgtggttatccttacgcggagagagctgatgacaaataccatggtgttgtgaaatttgatccagcaacgggtagacagttcaaaactactaatgagactcaatcttacacaacttactttgcggaggcattagtcgcagaagcagaggtagacaaagatgtggttgcgattcatgcagccatgggaggtggaaccgggttaaatctctttcaacgtcgcttcccaacaagatgtttcgatgtaggaatagcggaacaacacgcagttacttttgctgcgggtttagcctgtgaaggccttaaacccttctgtgcaatctattcgtctttcatgcagcgtgcttatgaccaggttgtccatgatgttgatttgcaaaaattaccggtgagatttgcaatggatagagctggactcgttggagctgatggtccgacacattgtggagctttcgatgtgacatttatggcttgtcttcctaacatgatagtgatggctccatcagatgaagcagatctctttaacatggttgcaactgctgttgcgattgatgatcgtccttcttgtttccgttaccctagaggtaacggtattggagttgcattacctcccggaaacaaaggtgttccaattgagattgggaaaggtagaattttaaaggaaggagagagagttgcgttgttgggttatggctcagcagttcagagctgtttaggagcggctgtaatgctcgaagaacgcggattaaacgtaactgtagcggatgcacggttttgcaagccattggaccgtgctctcattcgcagcttagctaagtcgcacgaggttctgatcacggttgaagaaggttccattggaggttttggctcgcacgttgttcagtttcttgctctcgatggtcttcttgatggcaaactcaagtggagaccaatggtactgcctgatcgatacattgatcacggtgcaccagctgatcaactagctgaagctggactcatgccatctcacatcgcagcaaccgcacttaacttaatcggtgcaccaagggaagctctgttttgagagtaagaatctgttggctaaaacatatgtatacaaacactctaaatgcaacccaaggtttcttctaagtactgatcagaattcccgcccgagaagtcctttggcaacagctatatatatttactaagattgtgaagagaaaggcaaaggcaaaggttgtgcaaagattagtattatagataaaactggtatttgttttgtaattttaggattgtgatgagatcgtgttgtaccaataactaacatcttgtaaaatcaattactctcttgtgatcttcaataagcttgagtgacaaaaaaaaaa

SEQ ID NO: 84540 - DNA, 615 bp, Arabidopsis thaliana columbia
ccggggcgggccgacgcgtccgctcataccgttttctctctctcctccgtcgtctctgcagaatcactctctcgccggagtttttcacctgcagagctctcgattttttctctcgagcatcatcattttcgtcggatcaatcaccaagagatggcgtcgagaaactccgtcaccggattcgcgttgttcagttttgtattcgccgtcatcttatctctcgccggcgctcaatccctggctccagctcctgctcccaccagcgatggaacatgatagatcaagggatagcgtatttgctaatggtggtggcgttagtgctgacttacctaattcatcctcttgatgcttcttcttcctactccttcttctaatctctctctctctttcttctggttttttttatttctttgcaacttcttattagtttcttcaatttgccttttttcttcttcttgtggataaaattttcaagggttaatttaatcatcatgttctcgattatgatttctggagattgattgattgatgataaaaaaaaaaaaaacccaaagggcgaccgctctagaggatccaagcttacgtacgcggcagtgcgacgtcataatcttctatagt

SEQ ID NO: 84541 - DNA, 664 bp, Arabidopsis thaliana columbia
  unsure (1)..(664): unsure at all n locations
ttctatacgactcactatnnnaaagctggtacgcctgcaggtaccggtccggaattcccgggtcgacccacgcgtccggggcatcgaatcgctgaccgacgcacaggcgcagatcctggtcggccatgaccgcgaaagccacggccgcgacctgttcgccgcgatcgagaagggcgacttcccgaagtggaagctgttcatccaggtcatgccggagctggacgcggaaacctaccgcgtgcatccgttcgacctgaccaaggtgtggccgaagagcgactacccgctgatcgaagtggggccagttcgaactgaaccgcaacccggtcaactgggtaccaggacgtggagcagtcggcgttcgcaccgagcaaccctggtcccgggcatcggcccgtccgccagacaagatgcttgcaggcacgcctgttcccctattccgatgcgcagcgctaccgcctgggcgtgaaccaccaccagattccggtgaatgcagcgcgctgcccggtgcacagcaaccaccgcgatggtgcgatgcgcgtggacggcaactacggcggcctgccgcactacgagccgaacagctacggccagtggcaggagcagccgcagtaccgcgagccgccgatgaagatccggggcgacgccgacttctggaatttcc

SEQ ID NO: 84542 - DNA, 2431 bp, Arabidopsis thaliana columbia
aaaaaaaaaccctagtcacactcagataacataaacctttgacaacaaattttgatgctccttcgtcttacggctcgctctattcgtcgtttcacaacttcttcttcgtctctaccattgctctcatcgtcttcgttttgtactgttccaacaatggcagctaatcatcctaaggatgaagcgtatctctccgccgtcatccccaaacgtatcaagcttttcgagcagatccaagcgaatcaactcgagaatcttaagtctcttccacacgatccgatcaaggttacgttaccagatggaaatgtgaaagaaggaaagaagtgggagacaactccgatggatatcgctgctcagatttctaagggtttggctaattctgcgttgatttcggctgttgatgatgttctttgggatatgaataggccattggaaggtgattgtaagcttgagcttttcaaatttgatagcgataaaggtcgtgatactctttggcattctagtgcgcacattcttggtcaggctctcgagcaggagtatgggtgtcagctgtgcattggaccatgcacaacgagaggagagggtttctactatgatggattttatggtgaattgggcctgagtgacaaccactttcctagcatcgaagcaggtgctgcaaaagctgctaaggaagcacaaccatttgaaaggattgaagtgacgaaggatcaggcactcgagatgttttctgagaataattttaaggttgaactcatcaatggtttgcctgcagacatgaccattactgtctacagatgtggccctttggtggatttgtgtcgtggaccgcacataccaaatacttcctttgtgaaagcgttcaagtgtttgagggcctcatcagcttactggaagggtgacaaagaccgtgagagcttgcagagagtttatgggatatcttatcctgatcagaagcagctgaagaaatatctccaatttctagaagaagccaaaaagtatgaccacagactattgggccaaaagcaggaactcttctttagtcatcaactcagccctgggagttatttcttccttccactcggcactcgtgtatataacaggttgatggacttcattaagaaccaatactggcacaggggttacacagaggttattacaccaaatatgtacaacatggagttgtggcaaacatccggacatgctgacaattacaaggataatatgtttacgtttaatattgagaagcaagagttcgggctcaaacctatgaattgtcctggtcactgcttgatattccagcatagggttcgctcatatagagagttacctttgagactggccgactttggagtgttacaccgcaatgaggcaagtggagcacttagtggattgactcgtgtccgacggttccagcaggatgatgcacacatattctgtacaacggaacaggttaagggagaagtgcagggtgtgttggagttcattgactacgtgtacaaagttttcgggtttacctatgagctaaaactttcaacgaggccagagaagtaccttggagatttggaaacatgggataaagctgaagcggatctcaaagaagctatagaagcttttggaaagccattagtgttgaacgaaggagatggtgcattttatggtccaaagatagacatcacagtttctgatgcaatgaataggaaattccagtgtgctactttacagcttgattttcaacttccgattcgcttcaacttggaatacgcagctgaggatgaagcgaaaaagagtagacctgtaatgatacatagagccgtgttgggatctgtggaacgtatgtttgccatattgttggagcattacaaaggaaaatggcccttctggattagtccgcgacaggccatagtttgtcctatatcagagaaatctcagcaatatgcagaaaaggttcaaaagcaaattaaagatgctgggttctatgttgatgctgacttaacagacagaaagatagataaaaaggtgcgagaagctcagcttgctcagtacaactacattctggtcgtgggtgaaacagaagctgctacaggacaggtgagtgttcgtgtgagagacaatgcagcccactccgtgaagagcattgaggatttgctggaagaattcaaggccaagactgccgaatttgtatgagatccgactcatgaaattcaagttctgatatgatgttttttttttttttttcaaattagggtcgacccagatttaagtgttcatctgtttcattaaaccatattaggcctcaactatattaaagtttcgattacattctgcgaaaactctatgtttggtccccttttagtatccctttatggaagaaaaaaatctggaaaatggaagtttccgaaataaaaaaaaaaaaaaaaaaataaaaagggcg

SEQ ID NO: 84543 - DNA, 556 bp, Arabidopsis thaliana columbia
ccacgcctccgcacctttttgcagagcttcttcttcttcttctccaaaaatcccaactttcttctctttcccggtttcttcgtctccagcattttcgcgtgttgtaacctaatccaaatcttacccattgatggaataacatcatcacgacgcgtcaaaattctgtatcggaggaccgagagatctccatctcctgtccagattcgattcccaccaatcccaatttcgtgaaattcgttagggttttagtttgaatctcatctcatcagatcgagtcgacccaggattaggaagaagaaaagcgatgaagatggcgacgaatggccggtttttcacaatcgggctagtcgcgtcttggtactcatcgaacattggtgtattgttgctgaacaagtacttgcttagcaattacggattcaagtacccgatctttctcaccatgtgtcacatgacggcttgttcgttactcagctacgtcgccattgcttggttgaagatggttccgatgcagacgattcgatccagatttcagttctttaagatcgcagttctaagt

SEQ ID NO: 84544 - DNA, 672 bp, Arabidopsis thaliana columbia
  unsure (1)..(672): unsure at all n locations
attgcccgtccggaccggaattcccgggtcgacccacgcgtccgagctcttgagattcatgcagtaccaaccaaaacagcgactgccttttacgagaaagaactgggtgtgcttctaacacctccatcagggaaaaatcagatgcaggagtggaaagggttacaatctcaccggttacttcaaatcgaaatcaacgatgcaaaaagaccggctagtgatgtggcaatatcagggttaggatggatttcaattgaaccaatccgcaaaacacgaggaactgaaccgagagatctcaatgaagcagagcatgagatacatatttgtgtcagtgtgccaaaaccagttgaagtttttcttcgaccaacattgccaattggtacttcaggtactgaatggtatcagtatcgtgagttaaccgataaggaagaagaagtaagacccaaatggtacttttgaatttttttttgtttagatgcaaaaatatcggcttagtatcacaaaccagagttatatgtaacaaaatagtaaattgtttgtaatgaaatctacttaagtnnnnnnnnnnnnnnnnnnnnnnnnnnnnnnnnnnnnnnnnnnnnnnnnnnnnnnnnnnnnnnnnnnnnnnnnnnnnnnnnnnnnnnnnnnnnnnnnnnnnnnnnnnnnnnnnnnnnn

SEQ ID NO: 84545 - DNA, 651 bp, Arabidopsis thaliana columbia
tcccggtccaacccacccgtccgggtttcgttgatgatagcctcaaaactggtttgaaagatcagcctgttgctgttaaggctttgaaacgagaaggtggacaaggccatagagagtggctggctgaagttataatccttggtcagttgaagcatccacatctggtaaatttggtcggatactgctgtgaggatgatgagaggcttctagtatacgagtacatggaacgaggcaatctggaagaccatttatttcaaaagtatggtggagccttgccttggttaacaagagtgaagattcttctaggtgctgcgaaaggccttgagttccttcacaaccaagagaaacctgtcatatacagggattttaaggccttccaacatcctcttgagcttcggacttcagctctaagcttttcagatttcggcttagccacaagatggttcagaggaagaaggctcaaacctttaccaaaagtgtaatgggcacagaaggatatgcagctccagaatacatctcagcaggtaatctgacgacaatgagtgacgtgttcagttttggggtggtgcttttggagatgctaacagctagaaaggcagtggagaagtaccgggcacagagagggaggaacctagtggaatgggcaagact

SEQ ID NO: 84546 - DNA, 676 bp, Arabidopsis thaliana columbia
  unsure (1)..(676): unsure at all n locations
ctggccgtccgcagtaccggtccggaattcccgggtcgacccacgcgtccgggagaatctcctcctcgacgagaagctcgatttgaagatctctgatttcggactcagcgctcttaccgatcagatccgacccgacggcctcctccacacactctgtggtacgccggcgtacgtggcgcctgaggttttggcgaagaaagggtacgacggtgctaaaatcgacatatggtcatgtggaatcatactgttcgtcctcaacgccggttatctccctttcaacgaccataatctcatggttatgtaccggaaaatctacaagggagaatttcgcattcccaagtggacctcaccggatctccggcgactgctgactcggcttttaagacacgaatccgcagacggggatcactatcgaagggattcatccacggtccatgggtttcaaacagggctacgacgatcggatgtctaaattttcccatctaggggactccgttatgaaactcccggcggacgagaccgacagcgagatgggagcaaggaggatgaacgcattcgacatcatctcaagatctccagggttcaatctctccggtcttttcggagacgccagaaagtacgaccgagtggaacggttcgtgtcggcgtggacggcgganaaggtggtggagaggct

SEQ ID NO: 84547 - DNA, 637 bp, Arabidopsis thaliana columbia
cggaattccagggtcgacccacgcgtccggatatttcgaagggaagagagcaaccgaagctgagattttggataaatttggaaacagaggttcggttttaaagccaggattcatacatgggactcgtcaggtcggtagcataaagctgccacttagtctcattggagctcctctcgaaatggttttgaagctgttgccaaaagaggtgacgaaaattcctgtgatcgggccacttttaatacctccggtcaatgtcaaatccgttgcagcaacagcggtaaaagctgcagttgatcccgagtttgcttctggagtcatcgatgtgtaccggattcttcaacatggtcactgaaaacaacacctgtcttaacaaagttctcctcaatacggttttaaatgtcaaattcaaatgtaaccaataaccatcgtctctggtcttctgctaccaaataaactatgactttcgcatattacaaaaaaaaaaaaaaaaaaaaaaaaaaaaaaaaaaaaaaaaaaaaaaaaaaaaaaaaaaaaaaaaaaaaaaaaaaaaaaaaagggggcggccgctctaaaggatccaagcttacgtacgcgtgcatgcaacgtcatagctctttttatagggcacctaaattca

SEQ ID NO: 84548 - DNA, 630 bp, Arabidopsis thaliana columbia
  unsure (1)..(630): unsure at all n locations
gtcatcctgaatttatccagctttttgtcaaggctcttggcggtaaaataactaaagcaaataaaaggatcttgtttctttgtggggattatatggaagactatgaagtcaaagtgcctttccagtcccttcaagctttgggatgtcaagttgatgcggtttgtccagagaagaaggctggtgatcgctgcccaactgcaatccatgactttnagggtgaccaaacttacagtgagaaaccaggccacacttttgctttaactactaactttgatgacctagtttcctcgagttatgatgctctggtcattcccggggggcagagcaccagaatatctggccttgaacgaacatgtcccttaacataggttaaaggggttcatggattcctgaggaaccagttgcggctattttgccacgggcaaacagatcttagctccttctggtgtcctcaagggaagggaaatgcactgcttatncagccgtgaaactgaacgtggtactttggagggngggancttgggtagaaccanatnccattggcaaggggtttaattncgggnattttgnaactngngcaanttgcctgggaanccnggggttttttttaaannaaaggtttttttggga

SEQ ID NO: 84549 - DNA, 723 bp, Arabidopsis thaliana columbia
ctaatacgacttacttagggaaagctggtacgcctgcaggtaccggtccggaattcccgggtcgacccacgcgtccggataaaccacaacatcacctgatcaagatttggcattgctttaattaggaagtgtttgacgtgctcgatctgctcctttatgtcttcattgtcatcacaaatttcttcaaacttaaatatcttaaggaccttcaccggacttgataatagagattaacgaactttgtgatgacaacgaagacacagctgatcaaatcaagtaggtcaaccactttctgaagacaatgccgaatcttgaccatttgatgttgtgctacgatacaccaaatcatttgatgataccattagaaattacatttattcacccacgattctgtatttggaaaagatgagacaattaaatatgcaaaattaggttttgaatcttaaagtcattcttaaactcatgaaaggcctcctttagtctagatgacaaaattgtttttggaagaaacaaacggttttgcaaaacttgaaccatgggaaatttaacacctcatttagtaaagtttattattttaggggtcagaagaaaatctaaaattttaaaattatatgtttagtgtctttatatgtttagtgacactaaacatataattttaaaaaattggatttccttctgaaaactaaaattaaaacctttactaaaatatgttctattttacat

SEQ ID NO: 84550 - DNA, 952 bp, Arabidopsis thaliana columbia
cacactctctacgcttgacatggccttcgatctccaccatggctcagcttcagatacgcattcatcagaacttccgtcgttttctctcccaccttatcctcagatgataatggaagcgattgagtccttgaacgataagaacggctgcaacaaaacgacgattgctaagcacatcgagtcgactcaacaaactctaccgccgtcacacatgacgctgctcagctaccatctcaaccagatgaagaaaaccggtcagctaatcatggtgaagaacaattatatgaaaccagatccagatgctcctcctaagcgtggtcgtggccgtcctccgaagcagaagactcaggccgaatctgacgccgctgctgctgctgttgttgctgccaccgtcgtctctacagatccgcctagatctcgtggccgtccaccgaagccgaaagatccatcggagcctccccaggagaaggtcattaccggatctggaaggccacgaggacgaccaccgaagagaccgagaacagattcggagacggttgctgcgccggaaccggcagctcaggcgacaggtgagcgtaggggacgtgggagacctccgaaggtgaagccgacggtggttgctccggttgggtgctgaattaatcggtacttatgcaatttcggaatctttagttactgaaaaatggaatctcttagagagtaagagagtgctttaatttagcttaattagatttatttggatttctttcagtatttggattgtaaactttagaatttgtgtgtgtgttgttgcttagtcctgagataagatataacattagcgactgtgtattattattattactgcattgtgttatgtgaaactttgttctcttgttgaacaaaaaaaaaaaaaaaaaaaaaaagggcgaccgctctagaggatccaagcttacgtacgcgtgcgtgcgacgtc

SEQ ID NO: 84551 - DNA, 551 bp, Arabidopsis thaliana columbia
  unsure (1)..(551): unsure at all n locations
nnnnnnnnnnnnnnnnnnnnnnnnnnnnnnnnnnnnnnnnnnnnnnnnnnnnngacgactcacgcgtatcgaaacaaaacgttgttgttagagagaaaattccagttcttggattccggcgacctcattggtgaaagatcttcagagattattatatttctcttgaccggtttcgatggcggatggaaacgccagttcgcgttacgtgaaattgaggaaagagcaggctcctgtcgaagaagatatcacacccggtgaactcaatcagcccattgatgttcctcagttgaatgtccgcaagtgccatgaatgtatgcaagttctacctgaaacctatgaacctccttctgatgaaaactggaccaccggcatttttggttgtgctgaagatccagagagctgcaggactggtctcttttgtccgtgtgttctgtttgggcgtaacattgaagctgtgagggaagagattccttggacccaaccatgtgtatgccatgctgtatgtgtcgaaggaggtatggcacttgcagcagtaaccgcactcttcagtg

SEQ ID NO: 84552 - DNA, 701 bp, Arabidopsis thaliana columbia
  unsure (1)..(701): unsure at all n locations
nnnnnnnnnnnnnnnnnnnnnnnnnnnnnnnnnnnnnnnnnnnnnnnnnnnnnnnnnnnnnnnnnnnnnnnnnnnnnnnnnnnnnnnnnnnnnagaaggaagaaatataacgctttaatcgttttcgtttgtgacaaataaagcgttttatttgctctgccctttcacatgataaggaagatgtatataactctttattcctttttgtttgtgatttctaaatacaatttagctctaaaaagtaagaaaatagtcgtgaatgtgtttacttatctcgtcaggcctttcctcgtggataaaatgaccgacgcctttaattaccacaacttcgtccaacaacgggacatggctcttaaaccggccatcgtggatgtacttcttgctaccgggaatgtgatatgtcagatcttgggcgccggattatggacttaaccgggactttcactttagcgtttgatagtgaccccatcagctcccatgttcgggccatattccgggagtagtttactgggccagtgaagccattcttctcatactttgacacataatatttgacatctgaatcagttagccaagagggaagtgaaacagagtcatcatagcgttttcctttaggtagaagaataggaccagggttacgatatgttaagaactctaagagacatcgttccgtgccaaccttagcaaattccgactctatt

SEQ ID NO: 84553 - DNA, 770 bp, Arabidopsis thaliana columbia
  unsure (1)..(770): unsure at all n locations
ntnnnnnnnnnnnnnnnnnnnnnnnnnnnnnnnnnnnnnnnnnnnnnnnnnnnnnnnnnnnnnnnnnnncttttttttttttttttttttaacttatcaaattctctcaagaatcaataataaaatgttaatccaacaaatctacaaaaatttgcaagtgtttaaaaatataaaacatctaaccagacttcaatcctcgacctatctactatgtcaaatagacatgatacaaaaatagaaagtccccgttgatgactgcttctgacaccaccaatgcttccattgccgctcacgctatcggcattaccaccgctactgctaccaacgtgtcataccagctgctactatcaccgtttccacttgcatgaattttcttgtgatggccgtaatagtggtggcagcaacggttaaaaggatggcttaacatgttcgtagcagaagcggcggtgattttggctgtcgctgaaaaaaatgatagcacaactggtaacatatgttgtatttattgaggtagaagtacgaacctttatcctcacaatcagaaagttaagactaagcgttgttttacatttagccttaaacaattgaacgaaatagacatttttggctacatggaacgatacagtttctggtaaattacatttatgcttataatctacgtttacttatgcgtattatctacttttaattcatggagaaagcacttgntactgaaatcactttctactttctaaaatattctaatagaaccgttcactattaataatata

SEQ ID NO: 84554 - DNA, 534 bp, Arabidopsis thaliana columbia
  unsure (1)..(534): unsure at all n locations
nnnnnnnnnnnnnnnnnnnnnnnnnnnnnnnnnnnnnnnnnnnnnnnnnnnnnnnnnnnnnnnnnnnnnccacgcgtccggcactggcaaagatgttgtcggagaaagcagcttgggcattagccatggaccgtaggctcaacatggtctctatcaaccctggtcttgtcgtcggaccatctgtcgcacaacacaacgctaggcccaccatgtcataccttaaaggtacacacacatagagaaatttcataaacctcacaaaagagtttatgagcatttaatcaaagttccggaattagttgcgaaggttttgtgaatgttttaagaaggcttttttaatagcataactggaatttgtttttaaacaatcatagtgttgaagaacgagacatactaattcatattcatcaattgtgatttgaatttgatgaaatagtgtttttggtaacaggagctgcacaaatgtatgagaatggtgtgttagcttatgtagacgttaagtttctagcggacgttcatattagagcattcgag

SEQ ID NO: 84555 - DNA, 1117 bp, Arabidopsis thaliana columbia
  unsure (1)..(1117): unsure at all n locations
accacgcgtccgcggacgcgtgggcggacgcgtgggctctcttcctacttctaaccttctttttctccttcatcacacacatatacacacgctttcgtttaaactctctctgtttcaatcattaatcagaaagaagcaacacaaatatggatcacgacaagtctacttcttgttgctgcgttcttgatgcttccacttatgttggtttctggattctcaagaaattgcttagcagaggatactctgttcacgcagcgattcgtagaaacggggagagtgaaattgaggagatgatcagagagatggaaacaacagaagagagattagtggtgtacgatgtagatgtgttggattatcaaagcatacttgtctctctcaagacatgtaacgttgtcttctgttgcttagacagccctgaagggtacgatgagaaggaggtggatttggaagtgagaggagcgatcaatgtggtggaagcgtgtggaagaacagagagtatagagaagattgtgttttcttcttcattaacagcttcaatttggagagacaacattggaactcaaaaggatgttgatgagaagtgttggagtgaccaagacttctgtcgcagcaagaagttgtggcatgcactggcaaagatgttgtcggagaaagcagcttgggcattagccatggaccgtaggctcaacatggtctctatcaaccctggtcttgtcgtcggaccatctgtcgcacaacacaacgctaggcccaccatgtcataccttaaaggagctgcacaaatgtatgagaatggtgtgttagcttatgtagacgttaagtttctagcggacgttcatattagagcattcgaggatgtttcagcttgcggtcgatacttctgcttcaaccaaatccgtcaacacagaagaagaagctctcaagctagtggagagtttgtcccctttgattcctatgccaccgagggatgagaatgagatgcacgggaagtgaagttacgaggaagattaagggcaccaattngcaantggnanantggcctnttgtaaagaaagttcccatttaattgaaggcgggtttcaaaagtggattgaatgccncccnggnnggtntggnt

SEQ ID NO: 84556 - DNA, 832 bp, Arabidopsis thaliana columbia
  unsure (1)..(832): unsure at all n locations
gaagntntataaatgtgannccaacctctgcnagaaaagttggcatcnctgcaaaatgttgcgganaaancacttgggcattancaatggcccgtggctaacatggncccntcaaccctggncttgccgcggaccatttgncgcacaacacaaccgctaggcccaccatgtcataccttaaaggagctgcacaaatgtatgagaatggtgtgttagcttatgtagacgttaagtttctagcgcacgttcatattagagcattcgaggatgtttcagcttgcggtcgatccttctgcttcacccacaatcgtctacccagaacaagatagctctcaagctagtggagagtttgtctcctttgattcctatgccccctgaggtatgagaatgagatgcccggaagtgaagtttccgaagaaaggttaagcaactacttattaagcaagctggtagaagctggctctgcttgttaaagaaagatttcacaatttatattgaaagaggcgagattatacaaaaaaaagttgtaatttgtatattgatcttctcatagatgcatgttttgattgtcaactattaaacaacaagaaaataaacacgtttcatctcattttataactaatagaatatgagtagttttttttttaaggatgggggcacaatagcaatgtgttctaatttttgttaagcatattaaatcttggtgggagagttgtagtatccgaaccttttaaacacatgtttcctatcgcgtgggcggacgcgtgggtcgacccgggataccggaccggtacctgcaggcgtaccagcgtcccctatagaagtcgtatag

SEQ ID NO: 84557 - DNA, 952 bp, Arabidopsis thaliana columbia
actatagggtaagctggtacgcctgcaggtaccggtccggaattcccgggtgcgacccacgcgtccgctactttgctttactcaaaaggatgccgatgagaagtgttggatgtgaccaagacttctgtcgcagcaagaagtggtggctttgcactggcaaagatgttgtcggagaaagcagcttgggcattatccatggaccgcaggctcaacatggtctctatcaaccctggtcttgtcgtcggaccatctgtcgcacaacacaacgctaggcccaccatgtcataccttaaaggagctgcacaaatgtatgagaatggtgtgttagcttatgtagacgttaagtttctagcggacgttcatattagagcattcgaggatgtttcagcttgcggtcgatacttctgcttcaaccaaatcgtcaacacagaagaagaagctctcaagctagtggagagtttgtctcctttgattcctatgccaccgaggtatgagaatgagatgcacggaagtgaagtttacgaagaaagattaaggaacaacaaattaagcaagctggtagaagctggctctgcttgttaaagaaagatttcacaatttaaattgaaagagacgagattatacaaaaaaaagttgtaatttgtatattgatcttctcatagatgcatgtgttgcttgtgaactattaaaaagaaagaaaaaaaacacatttcatctcattttataactaatagtatatgagtagttttttttttttggctgggggcacaatatgaatgttttctaatttttgttaaacatattaaatcttggtgggagagttgtcgtatacgaaccttttaaagcgatgtttcctataattgtgcaataataatatggcggccgctatagaggatccaagcttacgtacgcgtgcatgcgacgtcatagctaatctatagtgcagctcaat

SEQ ID NO: 84558 - DNA, 723 bp, Arabidopsis thaliana columbia
  unsure (1)..(723): unsure at all n locations
gaagggaaaaagttggattgacattacnnnnnnnnnnnnnnnnnnnnnnnnnnnnnnnnnnnnnnnnnnnnnnnnnnnnnnnnnnnnnnnncttttttttttttttttcgaagttgcaacgaaaataattcacagtttttgttcttgttcatacaacaaattacaaaattgcaatagaaaagagctcaaaaaccaaacaagaaattatttcaagaaacaaaagatccttctcatgagggatgatgattataatttagtaagctctggagttagatttgctgcaaaccttcctgatctctccgacgcgatcttcaccagtgagaacaccaacgttgaccagcttagccatcgacacagcaaactgctgtctgaatatctgaggtgattgctctgcgaaagtctttacaagcggagcagtccttggggtccttaacaagctcctgatcagtcgacaaaactcccatatgcttctgaagattaatgtagtactgattatcgaacactgcgggggttacagcgtcgagatcgacggtctcagaggcccagcgacacctgcgttgcaagtaatcagcgtattttgtgtcaatcgaaggatctgaaccactggttgcgttgtagttgtaaagcctcgactggatggtgccacaggaggcttttccgatggtgtgggccccggataggacaactaggtcgaggacgttgagaccgtatgactgaaacgtt

SEQ ID NO: 84559 - DNA, 397 bp, Arabidopsis thaliana columbia
cggacgcgtgggttttgagtactcccgtgatcatgatcctgtagcatccaggtttaaacaactttactgcgagtcagataagaaacatattgatgccccaaacaagaataaacaacaagcaagtaaaaatgatggtccagattacattgcagataatgattcaagcggaagttttcatgtgaagattcaaactgatggtggtttttcgtttggttcgtcccaaaaagatgggcagtcaatgcatgccgaatctagtacatcattatggtcaggcaatcacgaaacggtaaccagagatacgaacaccgaacgtttgagtgcttcaacagccatggatgagatggttgcaacttggagacgaataagtagtgagtcatcaagttctcatacttctgtg

SEQ ID NO: 84560 - DNA, 416 bp, Arabidopsis thaliana columbia
  unsure (1)..(416): unsure at all n locations
cccaagcgtccgactgaatctgttttgctttagttggaagcattaagagaacagccatggcttcttcttcaatctcattctcctgtgcaccttctttggccacctcactcttctccaccacttcttcttccccaaggctgctctcctctagatttctcggaacccgaaacttaaagcttcggatccgacctgccagactaggaccctccaatggttcaagaaccacttgctggttcaagttcggcaagaatggtgtcgatgctgaaaatgccggaatctatggcagccagtctcgagatgatttcgacagagacgacgtcgaacagtatttcaactacatgggtatgcttgcagtagaaggaacctattcanagatggaagctcttcttaacctaaacattcacccagttgatatc

SEQ ID NO: 84561 - DNA, 835 bp, Arabidopsis thaliana columbia
  unsure (1)..(835): unsure at all n locations
nnnnnnnnnnnnnnnnnnnnnnnnnnnnnnnnnnnnnnnnnnnnnnnnnnnnnnnnnnnnnnnnnnnnnnnccacgcgtccgcccacgcgtccgcccacgcgtccgaagagaacagccatggcttcttcttcaatctcattctcctgtgcaccttctttggccacctcactcttctccaccacttcttcttccccaaggctgctctcctctagatttctcggaacccgaaacttaaagcttcggatccgacctgccagactaggaccctccaatggttcaagaaccacttgctggttcaagttcggcaagaatggtgtcgatgctgaaaatgccggaatctatggcagccagtctcgagatgatttcgacagagacgacgtcgaacagtatttcaactacatgggtatgcttgcagtagaaggaacctattcaaagatggaagctcttcttaacctaaacattcacccagttgatatcttgttgatgttagccgctacagaaggtgacagacctaagatcgaggagcttctcaaagccggtgctgattattcggtcaaggacgctgatggaagaaccgctatcgacagagccaacagtgaagagatccgtgatttgatccttggctactcgactcaaaaggcttgactccgcttggttttaatacacaggaacaacacaagttatgttcttgagttttgaaatgtttgtgtttgctaggacaaactgtctttcctgtgttccgcggattgagtagattcataaaaatccatcttcttccctttttggccttttcttggccagttttcttggtttcctcaantggggggttgttct

SEQ ID NO: 84562 - DNA, 1096 bp, Arabidopsis thaliana columbia
ggcacacggaggttgtgtttgaccattccgccggagatacagtttgttcagagtgtggtctcgtgcttgaatctcactcaatcgatgaaacttctgagtggcgtactttcgctaatgagtccggtgataatgatcctgttcgtgtcggtggtccgacgaatcctcttttagcagatggtggtctcactactgtcatttctaaacctaatggatcctctggcgatttcctctcttcttctcttggtcgatggcagaatcgtggatctaatcctgatcgtggccttattgttgctttcaagactatcgctaccatggctgataggttgggacttgttgcgaccatcaaggaccgagcgaatgagatttataaaagggtagaggatcagaagtcaagtagaggaagaaatcaggatgctcttttggctgcttgtttatacattgcttgccggcaagaagacaaaccacggacggtcaaggaaatatgctctgttgccaatggagctactaagaaggagattggtcgtgcaaaagagtacatagtcaaacagttggggctggaaaccggacaattggttgaaatgggtactatacatgctggagattttatgagacgtttttgctccaatcttggtatgaccaaccaaaccgtgaaagcggctcaagagtctgtgcaaaagtcagaagaatttgatataaggaggagtcccatatcgattgcagcagcggttatatacatcataacacagctctctgatgagaagaagcctcttcgagatatatcagtggcaactggagtcgcggaaggaactataagaaactcttacaaagatctttaccctcacctttccaagatcataccagcttggtacgctaaagaagaagatctcaagaaccttcaaagcccttgagtgtcttcctcttctaatctcttactcgcaaccataccttcaagtttcgattgggattatgggttataaagttgttttgtccagaagtgcgactggaggcacgcttgaacaagagttttacagtagatttgtatcactttttcttcataaggtactatacattgttgaattaatgagatggtatttct

SEQ ID NO: 84563 - DNA, 447 bp, Arabidopsis thaliana columbia
  unsure (1)..(447): unsure at all n locations
gggacacttaaagagagaaacaaatccttcttctaaaatattcttcaatcttcttctcgaagcttctccaaaaatggcgattacttcttctagaaccgccagatcaaacggatctgcttcgctccgatccaaatcaccgtccggtcgattctgtggcgtttactcaaaccgtgtgccgtcatcatctccgtcgtcgtcaggtttcgcttcttccacaagctcaagtttctcgtcaccgtcgacagcgtttttcagcagccacaatcagaacaaccaccaccaacacagatctgcttctccgacgcgtgtgaatctattcacatcagcaccgatgacgcaatcgtttcgttaactcaatcggtaacagatctatatcaccggaatcgtttctatcgctgtttcctccaacaaacctagcaatcatcacaagattccgggnttnggngg

SEQ ID NO: 84564 - DNA, 831 bp, Arabidopsis thaliana columbia
  unsure (1)..(831): unsure at all n locations
gaatttcgttacnnnnnnnnnnnnnnnnnnnnnnnnnnnnnnnnnnnnnnnnnnnnnnnnnnnnnnnnnnnnnnnnctttttttttttttttttaacttaaaccggtattttattgcatataaccattttgtgtgcacagtacacaatacacagtattggtattggcaattagtcaattacattacacacaaggaaaaacagaagcacactcatgataggattgactccattattcttcttaggtgtcaaagcggaagctgactccattattcttcgtgaaatcatgtgacgtgtgatccaccacatttgtgttgctgagttctaagttgtagaaatccatgatggagctgccactaaacaagggtccagcatgccatgtaccacggtgcagtttcacaaactttggtcccgagaacctgaagacgcgaatctcttccacctcaggtggaatgtacaagtgaccagactttgcttttactgtatctactctccttccatcatcatcatcttcaataagagatggcttagccactcccatataccaaatatcacctcctattgatcctagacactgtgtcacctttgcgtgatgcgtgatcttgaaaaaccctaagggtgtttctttcagcctaagtatatagagccgtgggattcctttagagagatccaattgagcgtcgttgggaccgtaaccggccccatcacgagaggcttcgatgacttgaccatactctgcgaaggtctcaggtgtagcttcgattggtatcagattcacttccaccggagatttcgccatcgttgcggacgggtgggtcgacccgaaaattccg

SEQ ID NO: 84565 - DNA, 504 bp, Arabidopsis thaliana columbia
cgccgatgttaaattcaacagatcgagagagaaaaaactctctctccctcctccgttcaccgtcgcgactcggctctacagtacattttgttgagcaatctcgtatttagaggattccaatgtctggcgcagaggataataaatcttcccatgctcagctttcgtcccaaatttttcttgatcttgtggattcggtgatagctgatgtagcatctgagtgtcatcgggtagcacgactaggacttgatcgtgatttggatatagtagaagaagagttgagattgtcagtggaagcgcgtgcgaagatcgctgatcctagcaacaacctcgaaaccaacaccaaatatgttgttgatatatttgggcagactcaccctcctgtagctagtgaagtgttcaattgcatgaactgtgggcgacaaattgttgcacgaacgtttgctcctcatctcgaaaaatgcatgggaaagggaagaaaggctcgtgccaagactaccagaagca

SEQ ID NO: 84566 - DNA, 1127 bp, Arabidopsis thaliana columbia
  unsure (1)..(1127): unsure at all n locations
ggaaaagggttgaatttcgttacctcnnnnnnnnnnnnnnnnnnnnnnnnnnnnnnnnnnnnnnnnnnnnnnnnnnnnnnnnnnnnnctttttttttttttttgcttctaaaagaatctttttctatataatggaaactctcaatagagataaaattttgttcatttgacaggttttgtaattgtttcttctttctaaatcctactttgtagtgaccttgacattagtccggtctaggataacgttgaggatcttcccaggcacatagattcgcttcttgattgattgtccatctagatatttcctgagtttgtcgtcctgtgaagctagaacaaaagcatcatcttcagagcatccttcttcaacctctatggtgcctcttgtcttgccgtttatctgaactggaagaacaatagttgtgtcctttaagtaatccgggtttgccttagggaagctttcataggccagagaatttggatggcctaaccgcgaccaaagctcttcagccatgtgaggcgcgtaaggtgagagccaaagaacaaaaggctcaatgattcctctaggttgattattccacttatatgccgcattaacaaactccatcatccctgaaattccccggttgaaatcgtgtactctcgatttcctcttgtcacctttgcaatgcatttatgaagagttccgagttgttcaagggttggttcgtcatcagttactaaggttccatctttgaaagaaccatcagactgaggcaaaccaatgactagtctccaaagttcttgccaagaaacgatgcacaccttcaatcccactcgtgttccaagtttttgagcccctaaatggtcccatgaacatctcatacaaacgtagagaatctgcaccatactctaatacaacatcatcaggatttacgacatttcctctacttttgctcattttataaacgcgtggaatcagacgaatgctaggatcctccttcagaacaaaatgatctccggacttgataactttttcttccgggactgtcacttgttgatgttcatttaaccgttcttcagtatctgcagatacataatttccttcttgatctttccaagccggacgcgtgggtcgaaccggaaattccg

SEQ ID NO: 84567 - DNA, 735 bp, Arabidopsis thaliana columbia
  unsure (1)..(735): unsure at all n locations
nnnnnnnnnnnnnnnnnnnnnnnnnnnnnnnnnnnnnnnnnnnnnnnnnnnnnnnnnnnnnnnnnnnnnnnnnnnnnnnnnnnnnnnnnnnnnnnnnnnnnnnnncgaataacaacagatcaattaaaacactacaaccactatggttttaaggtttaaaatgtaatgactacatctcgttgaagagagtaaaagaatcaagaaaaagttttatttaaaagctcaagtagaagaaccgcagctgaatccttagctttcttaacactcggcattggctcgccaatacactcatcggtccatcctctatcgctcgtattaactcttaccccaaacgtaaatctctttgcatgagccggtcctccttctttcacacatctgtaagaaggcattggccatttctccctcaaacaaataccattcaacgtttgtcgcgtaggcggctgatgcccattcttcttgttcccattcttattctcgccttgatcctctcccgcattaccgttgttgatatgcttctcctttgattctgctatttctttctctttcaaagctgcaagtgcgttcctcgcagctagcttttgaaccattttcttttgcgggttttgcgctactccaacttgaacaccgtcgatgaaaacttccccagtcgctgtgttaccactcctactcgctttgtattctaacccttttgcttgttgctggcaccgctctttgtacttttgccccggatgcatt

SEQ ID NO: 84568 - DNA, 697 bp, Arabidopsis thaliana columbia
ttaggtgacactatagaaagatcttgacgtcgcatgcacgcgtacgtaagctcggaattcggctcgagcgagaaccagtttttttgttgatcctatcaacaatgacgaaaatagagcttcgagctttggggaacacagggcttaaggttagcgccgttggttttggtgcctctccgctcggaagtgtcttcggtccagtcgccgaagatgatgccgtcgccaccgtgcgcgaggctttccgtctcggtatcaacttcttcgacacctccccgtattatggaggaacactgtctgagaaaatgcttggtaagggactaaaggctttgcaagtccctagaagtgactacattgtggctactaagtgtggtagatataaagaaggttttgatttcagtgctgagagagtaagaaagagtattgacgagagcttggagaggcttcagcttgattatgttgacatacttcattgccatgacattgagttcgggtctcttgatcagattgtgagtgaaacaattcctgctcttcagaaactgaaacaagaggggaagacccggttcattggtatcactggtcttccgttagatattttcacttatgttcttgatcgagtgcctccagggactgtcgatgtgatattgtcatactgtcattacggcgttaatgattcgacgttgctggatttactaccttactt

SEQ ID NO: 84569 - DNA, 734 bp, Arabidopsis thaliana columbia
tcttttagaacaacctgacgtcgtattgcccgcgtccgtaagcttggatcctctagagcggccgccctttttttttttttttattgaaaagaatatagaactcgatcaagtcatgaactgatacatagttaatcctaatattccttacgtgtctattgggcaactctgaaattcttgaccgtacaacatctattaaaggcaaaaaaagccctcgagactctattcatgtttcaatctttacagccatggaacaatgtcgcttgggaacagggctctattgatcttgctttcacacagtaaggctcatgggcagtcccattctcagctttgttcaacacccatggcttcaaccctccaaggccatgaggcaacctccacgagtgaggaccataaacctgtgaccaccagcgcatcagaacaactcagaaggtatatctcagcccatgctctcttactttccatgttcctcgggggtttttggtagtccttgtagctcggcttgtgaacgcggattatctctcccatcactgttgggttttcccaatatacgtccctgatactcttaaaataccctggagaagaagatgggataaacactgcctttgattttcggttcagaacttggcttgaagggagatttctttgtttgtcaacttcaggaagcagcttatgtctagttccacaagctaaaatctgatctatcaaatgctggaactgttcatttccagactcag

SEQ ID NO: 84570 - DNA, 592 bp, Arabidopsis thaliana columbia
ccggaatctccgggtcgacccacgcgtccggtcaatgttcttgtgagatcgaactttctctgggttcgtgcagaagctttgcttttttgagtatcgcgtttaaggcacatcgaagaagagagaccctaatttgatattttgagttctatcgatggcttcgctactagctcgcaggtcgttcagtgctctccgagctcgacatctcgctttttcagggcaaggtttacagggatctcatctctgtgggctacagtcccgtgctatatcttatggaagcaacaaagatgatgaagaagctgagcagcttgctaaagagatctccaaggactggagtactgtctttgaacggagcatgaacaccctatttctcactgaaatggtcaggggtttgtcactgaccctcaagtacttctgtgatccaaaagttacaatcaattatccttttgagaagggtccattgagccctcgcttccggggtgaacacgctcttcgaaggtatccaactggggaagaacgctgcattggctgcaaactctgcgaagctggatgatccagctcaagcaatcaccattgaggcagaggagcgggaaga

SEQ ID NO: 84571 - DNA, 734 bp, Arabidopsis thaliana columbia
cgggaaggcattaaaaccaccccttgtttccttcacaagaaaatgggtcccgcgggttttgttcgcttgacccctcaaagtactttttttgatcccaaaagttactatcaaattatccttttaagaagggtcctctgagccctcgcttccgtggtgaacatgctcttcgaagatatcctaccggggaagaacgctgcatgccctgcaaactctgtgaagctgtatgtccagctcaagcaatcccaatagaggcagaagagagggaagatggaagccgcagaaccactaggtccgatatcgacatgacaaaatgcatctactgtggtttctgccaagaagcttgccccgttgatgcaatcgttgaaggacctaactttgaattcgcaaccgagacacacgaggaacttctctatgacaaagagaagcttcttgagaatggagatcgatgggagacagagattgctgagaatctgaggtcggagagtctctaccgctgaaccatttctacaacagtctctgcttcattcaacttgtttttcccggggaaacattttcgttgcttctgtttgaaaataaagacgagatcatatgcgtgtgaaaactcttttgtaatccagattttgtgctgtgtaattgaattgtttgtaaccaaaaaaaaaaaaaaagggcggccgctctagaggatccaagcttacgtacgcgtgcatgcggcgtcatagctctatctatagtgc

SEQ ID NO: 84572 - DNA, 1055 bp, Arabidopsis thaliana columbia
  unsure (1)..(1055): unsure at all n locations
nnnnnnnnnnnnnnnnnnnnnnnnnnnnnnnnnnnnnnnnnnnnnnnnnnnnnnnnnnnnnnnnnnnnnnnnnnnccacgcgtgcgcccacgcgtccgatcgcagtgaagaaggaaggaacctaaatcggaatttgggtgctccatcaatggcttcgattttggctcgcaggtcactgaatactctccgtgctcgacatctcgttttgtcagggcaagctttacagggatctcatctgtctagactgcagtcccgtggtatatcttatggcagcaacaaagatgatgaagaagcagagcaactttctaaggaaatctccaaggactggaatactgtctttgaacggagcataaacaccctgttcctcacagaaatggtccgcggtttgtcgctgaccctcaagtacttctttgatccaaaagttactatcaattatccatttgagaagggtcctctgagccctcgcttccgtggtgaacatgctcttcgaagatatcctaccggggaagaacgctgcattgcctgcaaactctgtgaagctgtatgtccagctcaagcaatcacaatagaggcagaagagagggaagatggaagccgcagaaccactaggtacgatatcgacatgacaaaatgcatctactgtggtttctgccaagaagcttgccccgttgatgcaatcgttgaaggacctaactttgaattcgcaaccgagacacacgaggaacttctctatgacaaagagaagcttcttgagaatggagatcgatgggagacagagattgctgagaatctgaggtcggagagtctctaccgctgaaccattctacaacagtctctgcttcattcaacttgtttttcccggggaaacattttcgttgcttctgtttgaaaataaagacgagatcatatgcgtgtgaaaactcttttgtaatccagattttgtgctgtgtaattgaattgtttgtaaccaacctgactttgattttcggttcatgagttccggttattaggtgttttcggttcggagaaagagcnnnnnnnnnnnnnnnnnnnnn

SEQ ID NO: 84573 - DNA, 640 bp, Arabidopsis thaliana columbia
  unsure (1)..(640): unsure at all n locations
aggtgccgggccggaattcccttgtttacccacgcgtgcccgaaagcaaagactgagagaaccaaggctccgatctaacaatgaggaagaggacgctcgtgtccgttttgttccttttctcgcttctgtttcttcttccagatcaaggaagaaagttacacgcgaatgcagaagagagttccgatgatgttacagatccaccaaaagttgaggagaaaattggtggtcacggtggtttatcgacggattccgatgtagttcatagagagtctgagtcgatgtcaaagaagacgcttcgcagtaacgcggagaagtttgagttccaagctgaggtttctcggcttatggacattattatcaactctctatacagtaacaaggacattttcttaagagagttgatctccaatgcttctgatgccttggacaaaattaggttccttgcactcactgacaaagacgttttgggtgaaggtgacactgctaagcttgagatccaggttaagcttggcaaagccaggagntccttcctttccggacccgggaatttggttactaaggaggcttatnaagaccttgnnccttggaaatttgacgcaacttttttggaatcacagngggttaccnttgcatttggttt

SEQ ID NO: 84574 - DNA, 770 bp, Arabidopsis thaliana columbia
  unsure (1)..(770): unsure at all n locations
tgacttcgtttggccgccttccgtacgctgggttcctttaaagcggccgcccttcctttttttttttttttttttttttttttncaaaaaaaaaaaggctctgattcaaaggtccatatgagccttctggggggtcccctcgccaaaatatgactaatgaaaaaacttccgactctcgtcagtttacaaatcagatgataaacactcgagtaacatgaaggttatgttacaaatatccaatgaactggagagttgaatcaacttgaagcaagagcgtttagcttcttttcatatagttttgcccgtcgaagagcatctaatgcctcagcttgtttccctgcacgtttgaaggtcacagcttttaccttccctgctttgatccgtccccccaattgactccccccttgattaattagtattcctattactccccttcactgggtttggttttgccgcagcttgtgttgtgcctgttttacttaccggtggaggattcacgggattgtctaatccaatagctttgagggcagacaggagttgaggatcgagaaaatcttccaccgctacatcgtccaccggttctggtttagaggatgttgaatcttccaattgagcttcaagagttttggcgatttcaaactcagcttcagcttcctgcattttaccttccctccgaagcttcatggcttgacgtttgtgacttagtgactcttgctgcagcttaaaacggtcacgacctgacattgcctttggagctgaacttgaaggac

SEQ ID NO: 84575 - DNA, 685 bp, Arabidopsis thaliana columbia
tacactatcgaacagctatgacgtggcatgcacgcgtacgtaagcttggatcctctagagcggccgcccttttttttttttttttttttttttttttttttgggcccaaagatatacaagagatttcataattggtgtttggtgtatttggacaaagaaatacaagagacaagtgtaaaagatataacagagcaaaaaccaaaacaatctgcagatacatattaagaatccataaggaaagagatacacagagcataaagcttggatcaatggaagagctcttgagcaaaggcaaaattgttatctcgagagatgttatatctcgtagttgcaagtaaagccagaaggtgagaaataagcagagtgcacaactctagaatgatttacagtagtcaatgttttcgtttttttttttgctcccatgctctcaagtctcaaaggcaagcagttccatctgtggaacttgtagccagccatgacatggggattttgccagttgaagtctatagagttaatcatgggtccatgtaactcccaatacattgaacattccataatccccaccaaaaatttggctccctacttagttcacatatattgagatttaatcaaatgaatcataatcgaaacatagatcctaatattagtgggaggaaaacaaaaaacataaaaccccaatcaaaat

SEQ ID NO: 84576 - DNA, 749 bp, Arabidopsis thaliana columbia
agctattacgtcgcatgcacgcgtacgtaagcttggatcctctagagcggccgcccttttttttttttttttttttttggtcctttttttgaagagagcaagagaataataaatcaaagctttaagattataacaagtttttttagcagtaacagaagtgaaatgttaagagccaattttgagctgtttgcaaacagataatcctaaaatcactgaaccaaggaccgagaaggctccttgccttgaacgccaaaactcgccccccctcaggggccccctaatttcaatccaaaacccttctcgaacctgttgggtgaaggccgtcaagagagcccattattaccgatcacaaacaatcagctttgcttctttttcggaatccaaacggcatcttgagccatcactctggttcttgcatcttcctcactcaatccatctctctccatcagtctcttaagttgtgtctcttgactaacccacacaaccacaataggtttagtccatttatccatcttcacttcgaacaacaaagggatatcgacaactatcactttagctccactcgcccattggttcagaatttcccagaagataccacttgatatgtatggagccatcagcttgtttagaagttgacgcttggaatcagacgagaccacaatctgaccgagttttggccgatccacttctccactaggaagcagaatctcctcaccaaaagctgcaacgactcttttccatccaccgct

SEQ ID NO: 84577 - DNA, 742 bp, Arabidopsis thaliana columbia
  unsure (1)..(742): unsure at all n locations
tctatcaaccagctattacgtcgcatgcacgcgtacgtaagcttggatcctctagagcggccgcccttttttttttttttttttttttncgtctatataactttattattttaattaaatacatgatgggacccacttgtatacacttctaacgacaagttttacgttaatcctacgctaattgtgtaattaatctcttgcgcaatcaaagcttcatcttcctttacaagttacacagttagggctccgatggtaatctcaccacatctgtttcccaacagtgagaatttcaacatctttcatcgccataccaattgttcttctcctttggtcctgtaggaccttcctcgccggataattccaccggaagttttctaagcactgtgggcaagcgaaacccctaaccgtcctcgggaaatcgattcacccaatctctctatctcctctcttggaatcgtacacaaccttgggtccccattctctccaaggtactgcaaccacggcgggtctggccaacacactgtttccgctgagatactccgctgcaatgatcccgtaccgggagcccgaatctaccaagggttcactacgcgcaggggtatttcttatcccaatcccaagcattgtcgatccctgtaagtaagtcccagccctaggaaagcttgcgtgaccatgttttgaaaagtaaaacaacggctttgttgcttcccggaaatgatttcaagggtcgtatgctttcgat

SEQ ID NO: 84578 - DNA, 1016 bp, Arabidopsis thaliana columbia
  unsure (1)..(1016): unsure at all n locations
nnnnnnnnnnnnnnnnnnnnnnnnnnnnnnnnnnnnnnnnnnnnnnnnnnnnnnnnnnnnnnnnctttttttttttttttttctctgaaatatttcttctttttattcttccatatgcaaagataatttaaaggaagaagtaacagctgtacacaaatctaaaggagagaatatgaacacacagacttgtaaaacttaagaagtattggccatggagtcgatgagcaactcatatccctcagggacatgagactgtagacggacgcattcagccaacgcagggacgtcggatgatacgtctagaaactgagccacaaagagaagcagatgaaaatcagagatcctcttcacgaatgggaggctccttgctcgctccatatggcgttttcaaagcccgcattgttgtttgagtgttcctgttctctatcgggaaggtacacgacaacggtcccggatgatccaagattttgaccgggaacaagggaggaatcattatcgacttctttaacacccttgactccaacaacaacctcttttttcaacttggagagcttgggatcatcctcaggtccaatctcagtctcgaaccatgcttgcttaaacaacctaacgcacatatcactcatctgaaacggctcaaagtgaacatcagcaccaccatcctcattggatctcaagcttctacaacagcagtgacccactccttcaaattcgctctcagcgtgaagctgagccgcaagcaacacctcaacgttagacagagtgtactccttcttgtcctgagtcacagtctggttgaatataaacccaactctcctcatncctaaccctaaaggaatagcatcaacacgtttctcttccttagagtctctcattagaattagattatcctccatnccttgctgcggtggntcgtagattaaattcacctcaacctgaccatccttagagacgttnccgtacatgaatccaccgcgtttgacagngaaggcaagcgactcgttgacgaaatgctg

SEQ ID NO: 84579 - DNA, 590 bp, Arabidopsis thaliana columbia
gattggcgacatttttgggaaatctagagactaataatcaatttcgtcaaaagatcaaatcttgctaaattttcttctgctcgtttgattttccgaatcgttggtttcgataagtgaagaaaagatggggaatttgttcgtgaagaaaccacagatcacggaggttgatcgagcgattcgctctctcaaaacccacagacgcaagcttggtcaatatcagcagaagcttgagaaagtaattgaagcggaaaagcaagctgcaagagacttaatccgtgaaaagcgataggacagagctttgttagcattgaggaagaaacgaactcaagaagagttattgaagcaagtggatcaatgggtcatcaatgttgaacaacaatgaacagatattgaacttacgagcaaacaggaggcagtgtttgagagcttaaagcagggtaatagtgctagtaaggccattcaaagcgaattggaccttgatgatgttcaaaaacgaatggatgatactgctgatgctaaagcttagcaagatgagctgaacgctatattgggagagaaactatcagcagaggatgaggaagatatattag

SEQ ID NO: 84580 - DNA, 676 bp, Arabidopsis thaliana columbia
atacgacttacttagggaaagctggtacgcctgcaggtaccggtccggaattcccgggtcgacccacgcgtccgccacctcgttcgtaaaagctccgtcggttactccgccttgaggtccgtttcgtacctccgtcaatctgccgttacctctccacctccgattttctccgccgccgcttcaaccgttcgccagttcacttccgccggctatccttccaacagttttcaattgacgccgccgacgaattggggaatccggatagttccggagaggaaggcgtttgtgattgagcgattcggtaaatacgctacgacgttgccgtcggggattcatttcctcattccgttcgtgggatcgtattgcttatgttcattctctcaaggaagaagctatcccgattccgaatcagactgcgattactaaagacaacgttagtatccacatcgatggtgttctctacgttaagagtgcggatcctaagttagcttcttatggcggttgagagtcctatctatggctggggtacagctggctcagaccacaatgcgtagggagcttggcaagatcactcttgataagacctttgaggaacgagacactctgaacgagaagatggtggacgccatcagtgttgctgcaaaacactgcggtcttcagtgccttcgttatgagt

SEQ ID NO: 84581 - DNA, 727 bp, Arabidopsis thaliana columbia
ccacgtcgcatgcacgcgtacgtaagcttggatcctgtagagcggccgcccttcatttttttttttttttttttttgtatttcaaagaaaaaactggcattacagggacacagccttctttaggaaaaaaattggcattacatactgcattaccctggggttttttttttggtttccttcccttaaactatgtaacaaagagattatttaactttctagaagattgcccctaccacaagctctgttatgaggtcatctgtcagcattacctcaatctctctacctatgattgcaatggcatcttctaaactcagccactgcaactccttctcctccacatcatatttgcttggtttctcgtcttttcttgggaccaaatctcgcagagtctcttgtatcttgttggcatcccatttcgggcatacctttggggatttaacccaagggggtggatcccacaaatgcggaccccggggtccaccccggaattccggaccgggacctgcagggggacccactttcccttaagggagacgcattaaaacctggcggaaacaagggcataactgtttcctgggtgaaaaagttatccccttccaatttccccaccaacaaaccaaaacccgaaaacattaaaagggggaaaaacccctggggcggggccctaaagggagagggaggcctcaaccctccccacattttattatggtggggtgggggggccctc

SEQ ID NO: 84582 - DNA, 341 bp, Arabidopsis thaliana columbia
gaggaactagttccctatatttcttctttcttcacacacatattctccaattcttacataaatatcaaataaaccaaacttgaaacttgttgtgcttaagatgacgaagaaatcactgacaatgtttctttttatacttctgcaatttctgctcgtaaactctctatcttcaaagcattcatcacccaaaccaaaaccagatgcagaaatcactataatgggttttgtttactgcggatgtttgctccaaaaacagtttctctaaaacacagttacttcatgtccggtgtgggaagtgaggatagtctgccgattcaaagcagcttcgtcaacaacggcag

SEQ ID NO: 84583 - DNA, 678 bp, Arabidopsis thaliana columbia
ctatgacgtcgcatgcacgcgtacgtaagcttggatcctctagagcggccgccctttttttttttttttgttgttggatatcacatatccatccatattagtaaaaaccaatctatacatctgtggtttttttaaagaattgacaagtttttgtttctgttttttggtaatgaaatcgaacaaattcaaagaattgtgaagttaataactcccaaaacacttactgcttctgtacatgttcatccttctggatgtccccatgagaagtattgttcatgttggccgtatcttgattaagcagattagagaatccatttccaatcgatttccaccagctcgaccgctctgaggtagtttgatcccactgggcattactggtgcttgaggacagttcgatagatgtggctgactcggtctgcagcccagagaatctcacagctcctagtagctttccgggaagctctgctccgggctgactctcaatggggaccgcaagatcaactggcaaggtagtaacgtagccaaatgcgagatgaacaatggccctagcggccattgaggacccaataccgacatcaatctccacaaagtttttccctgaaacatatttgcaagagagtgcacgtccaatcacacagatcgcttgctctccaacagcttttttaacaatccaagggc

SEQ ID NO: 84584 - DNA, 637 bp, Arabidopsis thaliana columbia
atagacgagctatgacgtcgcatgcacgcgtacgtaagcttggatcctctagagcggccgcccttttttttttttttttaactttaaattatttaatatttattattataaaatgcaaagagttcttgattaagactctccaatagacttgctcacagtgacaagtaaacatatttaaccgccagtaattctacatatccacaaaagaatcatacagattaggcttataaagttaatcaaagctttataaaattacaccttccatgcatgtagatgtaccagcaacgattcctgcgttctcccaggagtttctctggcaaggaccagagccctgacaacttctgtttttacctcaccaagacactcattactttccttctgaataccctctctctggcattacagtgtgagttgtgtcggcctcaatgctcatgtcagcttgagttaacagttccgtgctcatttttgcaagcttctgtaatgcactggtcgcagcttcaacttcaaggttagctgcctcaagctgaagcatctctatggccagatcacccattgttttttccccgactctctcttgtgccaaggcatatagcactttcaaatcttcactgtcattgatcgtttctcggacgcgtgg

SEQ ID NO: 84585 - DNA, 776 bp, Arabidopsis thaliana columbia
  unsure (1)..(776): unsure at all n locations
accatagacgagctatgacgtcgcatgcacgcgtacgtaagcttggatcctctagagcggccgcccttttttttttttttttgtgtaactaaaaagtagttatgttcaaattttcttacaatgcattactcgctcacaataaacccagatccatctgttttactggctaatatacaataaacaaaatccaattatgcaatcctaagagagaagtgaaaacactctcgacaaattacagaaaaagtttcagaagacgaaaacaattttgcttcagcagttgatgccacacttggaagtgtcaggtcctttggtcttgagcacaaaaggatcaattcttacccaaagcctagagaagatagatgccaataacactgaccaaatcaccacaatggttggtgttctgttctgtctacccatcagacctttgaggaatgggtcgagattaacaatgacccaaaaggagaacaagagtttaccacatagaggtccccaagactgatatccattgttaatggcatctgagatgcctgcaacaacgccaacaatgtttatgattaagacagttgctggagggatcagcagtgttgtccatttgaatgcgtaaagttctccaaagtcatcatcatctgttgcctttgatgtgacggtgaagtttgcgtcaatgcctgctaagattttgaggagaccttggacaaccgcaaagngatgagctgagattcctccaatgaccnagaattgctcgtttctccaccattcctcaatgctaactccgctcc

SEQ ID NO: 84586 - DNA, 747 bp, Arabidopsis thaliana columbia
ccgggctcttatctgcgccatctgtttctccaattaataatctccttaaatccggatttgttattaattctaatcttttccaattgatccactttcctcctctgagtttttaagactaatagagagatatatagagagagattgcttctggttttgccttccccctttgtttgacctctcttttctttcttcccccctttgtgtttcccgcattttctcgggaaaatctaaaggaacaaaaacattaaaagtttgtgattttctgattatttctttatttaatcgagacccattgtttctcgcctgatttggcgcaaacccttttggattctggtgaaaaaggttgggatcagaggaagaatgatgacgagtatggaagggatgatggagatgggtgtattggatgatattataaggagattgttggaaggtaaaggaggtaaacaggttcagctttcggaggtcgagatccgtcaactttgcgttaacgccagacaaatcttcctttctcagcctaatcttctcgagcttcatgcccccattcgcatctgcggtgatatcccatggacagtacccaagatcttctgaggctattcgaatacggaggctatcctccttcaagcgaacctatctctttcctcggcgattacgttgataggggcaagcaaagtcttggaacattatgtttacttttggcttacaaaattccggtcccttccaagtaatttttcttgagtggtatccatt

SEQ ID NO: 84587 - DNA, 727 bp, Arabidopsis thaliana columbia
catgcacgcgtacgtaagcttggatcctctagagcggccgccctttttttttttttttaatctaataggggggacatatagattgaagaaacctatgcaaaagatagactataattgacaaggaacctatacacatattcaagaaaacaaaacctagatacagtagttactaattaacaataatatttaccaaaaataaaactcttaggctccggatacagtttggtcggaacaataagaaaatactacatgcacaatctcaaccgtggttgggtaattccacgttatgacgacaaagcggacaagtgttccgattactcaaccaattcgagatacactctttatggtaataatgccgacaaggaagctctgagagcctctcattagcagcaagctcctctctacatatagcacaaaccactaaacctgtctccatcatttcctcagccgtaaaactccaccaccggaagttcctcccctgcgttaagccaccgcgtacaagaggatgaattaccgagaactagaccaaagatttcatcgtaagatccaaacgtgttgactccatgattgctccgtgaatccaagtagtggaggtaacggaggtattcgtcgccaattgatgtagtgtctgcttcgaaatcttcttcggtcggagtttggtctggttcggtgaggtttagaggaagatgaaactcctcagccattgattttttttttcctttggtgt

SEQ ID NO: 84588 - DNA, 553 bp, Arabidopsis thaliana columbia
  unsure (1)..(553): unsure at all n locations
tcaggtttctgggttcatgaaaactagtcaagtagagcgattacatataatacgcacaaacaaacaagaagagaagaagaaagctccctgtacaagaaatacaaagctccacgagaagaagaaaccaaaacaaaagacttctttttctgggaaactgttaaaaacccatcatcacaatgaaaaccctcagattctctgtttcttccttcttcttcaacctattcgtcatcttcatcaagttgaacaatctgagcccgtctctgagcagctttccttctgatgaagaagccccatctcatggctgctttgatctttagccatcctacaacagccttgcccgagtttggacgggcttcttcgnaatcagccattgacgtctgaccaaaggaatggggcccaaactatcttctcccaggtgcaagggggttggtgggnacaccattcatggtaanagctcacagtggtgcaaacggcggctcgggattgggagtcaggccaaacttccccggaaaaccccaacccnggggcgggnttgcacctggangaanccgga

SEQ ID NO: 84589 - DNA, 1140 bp, Arabidopsis thaliana columbia
gtcgtctcttgttccttccgctgccaacaaaatggagctgtcgtctgcgtccgccatattaagccactcctcctccgccgctcagcttctcagacctaagctcgggtttattgatttgcttcctcgtcgagcgatgatcgtttcttctccttcttcttcgcttcctcgatttttgcggatggaatctcaatctcagcttcgccaatctatctcttgctctgcttcttcttcttcttctatggcattaggtagaattggagaagtaaagagagtaacaaaggaaacgaatgtttcagtgaagattaatttggatggtactggagttgcagatagttctagtggaattcctttccttgaccatatgttagatcaacttgcttcgcatggcttgtttgatgtgcacgttagagctactggtgatgttcacattgatgatcatcacactaatgaagatatagctcttgccattggaactgctctattaaaggctcttggtgagcgtaaagggattaaccggtttggtgacttcacagctcctctagatgaagcgcttatacatgtttccttggacttgtctggtcgaccatatcttggttacaacttggagataccaactcagagagttggaacatatgatactcagttggtggagcactttttccagtcgttggtgaatacttctggtatgactcttcacattcggcagctcgctggtgaaaactctcatcacataatagaggcgacgtttaaggcgtttgccagagctctacgacaagcaacagagactgatccacgccgtggtgggacaataccaagttcaaaaggagtcttatcacggtcttgaaagctaatcaaacacacaagacagttcccagattcacacttcatcgtcgagttcatgagccatcgtcaattctcttatggtaccaaatgccaagcctgttggatcttgctgttccattccattacagaagcacaaagagcaaaatgtgaaaatagattagagatcacacagttcagaagatcataggctcatctttatattaatctgttgttgcagagtgtattaaacctcttaccattgctgtatcatcatcaactgagaacttactgtgagttgaagtgactgtaatttgcttt

SEQ ID NO: 84590 - DNA, 884 bp, Arabidopsis thaliana columbia
  unsure (1)..(884): unsure at all n locations
actcgacgtcgatgcacgcgtacgtaagcttggatcctctagagcggccgccctttttttttttttttttttttatcgtcaaatttgcgaatctggcttcagattctttatatgacattgttattagtgttgagagagtggcacattctttataaacaagatttcagaagttcccttgtcttaatcgaagaattagtttcctcggtctctactatgtgtatacatgatgtgcttggatctcaggtttaaaccatggggagttttctagagtaaacaacgtacataggatctgaacgccctggatttggagatatatcaacggcctgaggagcttcaaatcctccggcgtagtggaaagtatgatccaacaatgagagcatgatctgcgtcgccagttgatgtccataatcgagatggctttagtaaagaagcaacgggtccgagaagcccattagagcgagcccccggggctaaaggattctggtcaattcccttgaacaccttcaagcggctttggaaagataacccacacttacccacattggttataacttgggaaagaattgccttcaaaaggcagatttgaattgagatttaagtcttggactatgtactcggtgagaaccggattccgcttaagctcttcttcattcatacccattccaactattcgttcttgcctataccccggtggataatgactgacccaactgctacacatatcgagtatgctnactcctggagtatcgctntgaggnaaaaccttggagtaatactttgtcaatgcagctatagntggatcatcaatgtgtgttacaaaccttggagcttcgtagaatgttgaancagacgactcatcgtatctctggaaatcttcttctttg

SEQ ID NO: 84591 - DNA, 787 bp, Arabidopsis thaliana columbia
  unsure (1)..(787): unsure at all n locations
cccccccccggttggnnnnnnnnnnnnnnnnnnnnnnnnnnnnnnnnnnnnnnnnnnnnnnnnnnnnnnnnnnnnnnnnnnnnnnnnnnnnnnnnncttttttttttttttttttatgacaatatagtaaagagatgatttttatgtttatacataaccaagaaagaatacagtttcttttcttttgtcaatgataagtctaccatttaagtgttaaaactattttatataattaacagtacaaagaacaaagacacctacaataccaagctatatatatgtatagttgttagaccccaatctcttaccatatcactgactttgcttcccatgttagaggtaatgaagaagggtaaaagctatttccttgtgccaagtatggccagagcgtaagacggggaaagaaaagtccaactgggttccttggacctgggatcacctttttccggcgaccgttctcattcggcccaccacgtccgatcgaattttctctatcatctcttcattggtgctatcaaacttgaattctttgttagagcctgtagaaaacgatcttagcttctgactctgttcgctctctgtttctcccgacgttttacaacagtttggtcttaaatgttcgccgcttgctttttcatgtgaaccggaacggtttagcttgcttgcaagacaccgtgcaacgtcttcaccagtcaactcgaaagaaactctgtgaggtacccccgagagcttcatcattatgccttgacgacccgtggtccgaattggctaaagangcaacctcagg

SEQ ID NO: 84592 - DNA, 723 bp, Arabidopsis thaliana columbia
cactatacacgactatgacgtcgcatgcacgcgtacgtaagcttggatcctctagagcggccgcccttttttttttttttttttatgcacaaataaaagatcttttggcttaagagttaaaacaccaactgtgtttgcggttggaggatacaaagaaatgatggttctctgtatcaaaccctcatctatggaagtctttttttccatagacaacattctcaaacagtaagttacaaatacagaatcgatggcactttcatcgcgaggtattgtgtttccaccaccaagacttgttttacgtatacatgtagtcatcctatagcttctggataaaggaaagaacgagcatcttgtattgtacagagaagagtttgtgtatccacaaaatagcttcatgaacgggcgctgacgactgggaaaggagtcgatgaaactttcctttaggagaagtgataccttatcgttgttggattgcacatttgttatggtgtgtgactgcagattagagcaaagagaatcaaggtacgaccttaggacatccatgaagccttttgcagcatccacctgcacatcagtacattcatacactggtcttttctttgctaggtagctttctccgacgagctttgagtgataaggacttaacgcattatataagtctcgatactgaagcagctggggcatacttggtgacttaacctggttctttagaatatccacgac

SEQ ID NO: 84593 - DNA, 458 bp, Arabidopsis thaliana columbia
attttctataaagagataacaaacttcagaaacttctagggccatttttattccggtgcatcctaatcatgatatctgttgtaatcatcactgagttacttttggagtacacgacggctcttgctaaactcaccgccggggttcttccgagacggcaaggcgacagaaatgttatacgtattggcggtttctctctgccttgtcctcctagatcctcacctgttccagatttttcttctcatcttggcgatttctgaactctgcgctacgccttaatctcaattttggtttttcaccggagattatgactgccaagacttttttcccggcgtctgatctctccgtctgtagaataccttttttgtattttcttaaattttttgttttgttcctgaattttgaatggctcagagttgtaaaagatgtatcgaattataatagagactatgatttaactc

SEQ ID NO: 84594 - DNA, 984 bp, Arabidopsis thaliana columbia
ccacgaatcaaagatggcttttgccattgcttctgctctcacttccacactcacattatccacgagcagagtccaaaatcctacccagagaagaccacatgtagtagcgtccacatcatccaccggtggaagattaatgagagagcgcttggtggtggttcgtgccggcaaagaagtttctagcgtctgtgaaccacttcctccggaccgtcctttatggttccctggtagctctccacctgaattggctcgatggcagcttacctggtgattttggttttgatccttttggtttagggtctgatccggacaccctcaaatggtttgcacaagctgagcttatacatagccggtgggcaatgctggccgtgaccggtatcataataccagaatgtctcgagcggttaggtttcattgaaaatttctcatggtatgacgcagggtctcgtgagtacttcgcggattccactacgctgtttgtggctcaaatggttttaatgggctgggcagaaggtagaagatgggctgatttgattaaaccggggtctgttgacatagaaccaaagtacccgcataaagtaaatcctaaaccggatgctggttaccctggaggtttgtggttcgattttatgatgtgggggagaggttctcctgaaccggtaatggttttgaggactaaagagattaagaacggcaggctagcgatgttggctttccttgggttctgtttccaagctacctacactagccaagatccaattgagaatctcatggctcatctggctgatcctggtcattgcaacgtcttttcggcatttacatcacattaatgaggattagcttggggcgaatataatattttttatatatttatggatgttgaacttttgtatagtgtcactcgccgttgttacaacttctgcttacttaattaacatgtaaaatatattttatatatatgtagaagaaagaaacaagaagaga

SEQ ID NO: 84595 - DNA, 814 bp, Arabidopsis thaliana columbia
  unsure (1)..(814): unsure at all n locations
cttcgaattccaaaggtagaacagtagaagaaatcatggatccagctgaaatnagatatttggaagaagaggatggtccgttgatgaagacaatcaaaggtagtatcactggttttggtgctgggactatttacggaaccattttagccacatggaaagatgttccaagagtggagagaaatgtggctcttccaggacttattagaacactgaagatgatgggaacccatgggctgactttttgctgctataggaggggtttacatccgggtttgaacagcttggttcagaatttttaggtcccaggggagggtttttccaatgggggctatttgggggggttttctccccttggagctttcttgtgcctttggcttataaggggcaagggngcatnccgnccancgattactccaaggtgcaacaactagctgttacttctgctttgattgattctggaggtcagacgacaagagtagacaatggcgagagaagactatccttacaccgtcgagaaaagagctgaagctgattcctgatttctcttttggtcactgagattaataagatgtgcattcgctgatccggggatcttgagataatctcttttgtttattttatctggatatgtgatatcatgatactctttgctcttgtttcttcttgttttcttgagagcgactttctcacatcttttgtctgaatgtttcctgcaataaaaattcaactttgtctgccnnnaaaaaaaaaatatataaaaataaaaaataaataaatattatattttatatataataatatattttatatatct

SEQ ID NO: 84596 - DNA, 563 bp, Arabidopsis thaliana columbia
  unsure (1)..(563): unsure at all n locations
gatgaacagctggttcagaattttagatccaagagagatttttacaatggtgctattggtggttttgtcgctggagcttctgtgcttggctatagagcaaggagcatcccgacagcgatagctgcaggtgcaacactagctgttacctctgctttgattgattctggaggtcagaccacaagagtagacaatggcagagaatactatccttacaccgtcgagaaaagagctgaagctgattcctgatttctcttttggtcactgagattaataagatgtgcattcgctgatccggggatcttgagataatctcttttgtttattttatctggatatgtgatatcatgatactctttgctcttgtttcttcttgttttcttgagagcgactttctcacatcttttgtctgaatgtttcctgcaataaaaattcaactttgtctgcagatgtaaacaaatgttttagctttcagtaaaaaaaaaaaaaaagnnnnnnnnnnnnnnnnnnnnnnnnnnnnnnnnnnnnnnnnnnnnnnnnnnnnnnnnnnnnnnnnnnnnnnnnnn

SEQ ID NO: 84597 - DNA, 652 bp, Arabidopsis thaliana columbia
  unsure (1)..(652): unsure at all n locations
tattctactcactatagggaaagctggtacgcctgcaggtaccggtccggaattcccgggtcgacccacgcgttcgcggacgcgtgggcggacgcgtgggcaatcgctctcatccttcgcttcttcgaattccaaaggtagaacagtagaagaaatcatggatccagctgaaatgagatatttggaagaagaggatggtccgttgatgaagacaatcaaaggtagtatcactggttttggtgctgggactatttacggaaccattttagccacatggaaagatgttccaagagtggagagaaatgtggctcttccaggacttattagaacactgaagatgatgggaacccatgggctgacttttgctgctataggaggtgtttacatcggtgttgaacagctggttcagaattttagatccaagagagatttttacaatggtgctattggtggttttgtcgctggagcttctgtgcttggctatagagcaaggagcatcccgacagcgatagctgcaggtgcaacactagctgttacctctgctttgattgtgtctggaggcagccncaagggtggcaatgcaggnatctttccttcaccntcgggaangntaagtgtccnnatcntttggnctngtaaaagggnatcngga

SEQ ID NO: 84598 - DNA, 669 bp, Arabidopsis thaliana columbia
ctatgacgtcgcatgcacgcgtacgtaagcttggatcctctagagcggccgccctttttttttttttttttaaataaagctttatatcattgataagagattttgggttcaagaaaaacattgaaagtaacacatacacaaataataaggctttttaaagaaatataaattgagtcttataacattacacaacagacccactctattgggcccaataaaactagggcctctatagagtaacgcaaagaggaggaggaagaggaagcacagttttattttgaaagatacacaagtagaggggagccatggcatcaccatcctctgggaggtcctcctgaggactgcccactcaatctgtcgaggagggtgttgaagtcgatggggttggccactctcttccatccgctggaataacagccatgacatggtctcctctgaaacccatgctcactagcttctctatcaggtcaccgtattttgatctcaacacaggtggagcaccaatgttacctgcacctgcctggtgcggctggggagggatcccacctccttgtggaccttgcaagtaaagggcttgctgcttctgctgctgcggctgaagtggtgggtattgcattcccccacctttatacatgggattggcatacccctgaaggaggaagaagtccc

SEQ ID NO: 84599 - DNA, 855 bp, Arabidopsis thaliana columbia
  unsure (1)..(855): unsure at all n locations
atgatactccagctctctacgactcactatatggaaagctggtcacgcctgcaggtaccggtccggaattcccgggtcgacccacgcgtgcgcccacgcgtccgatagtttctctctctttctctaaactttcacctaagatcgatcaatggccaagggaagaggcagtgcatcatggtcggctcgagccatagtgactctcatggctgtgtcagtgttgttgcttcaagctgactacgttcaagctgcaacgtacacggtcggtgactctggtatctggacctttaacgctgtgggttggcctaaaggcaaacactttagagccggcgacgttcttgtgtttaactataatccgaggatgcacaacgtagtgaaggtagatagcggaagttacaacaactgcaaaacaccgacaggggcaaaaccttacacttcaggcaaagatcgtataactttgtctaaaggacaaaactttttcatctgcaattttccaaaccattgcgaaagcgatatgaaaatcgcagtcaccgcggtttgatcgaacatctagcaatgaaaatagtttgataacttgttatgttcttaagaaactattgaagtatgcaataaaactcgtatcaaaactttttttgtttttcttatgttttctgaaaagtatccggtgcggtctctctagagaaccagagtcggttttgtagtttggaagattcaaacggacctcttattatatttattataatatagttataaaaatatatttcaaaaaaccaaaaaaagnnnnnnnnnnnnnnnnnnnnnnnnnnnnnnnnnnnnnnnnnnnnnnnnnnnnnnnnnnnnnnnnnnnnnnnnnnncaa

SEQ ID NO: 84600 - DNA, 706 bp, Arabidopsis thaliana columbia
  unsure (1)..(706): unsure at all n locations
gtaattccgttnnnnnnnnnnnnnnnnnnnnnnnnnnnnnnnnnnnnnnnnnnnnnnnnnnnnnnnnnnnnnnnnnnnctttttttttttttttttttttttttttacccgagaaaaggtaactgcattatccatgaaagtgtagcatcagtttgagtacaaaagagaatacaaactcataaagaaaacagtcaagacctgacgttcatgggagttgagctcttctaagactagtgggttatgcttaggaatcatgagatggatttggcacgagcatttgggatcctcccttttgactccgagaaacattcatgaaaccataaccccgagagacccaggaggagaattgtatttgaaaatggaccccaagagaggcatgccaatagagacatgatactcccaacatactgtggatctctaatgactccaaatgggaactctgtaacccatggtatgttcttcccgaatcgaacaccgtaataagtcccagcttcacctaacaattggtataccctgaagttgagaaactggccaaaggccatgagaggccagaagtagagcggagacggccaggagagagaagcaacggagaagagagaaaggagttgagcagccttgagcacgtgagaaacacgtgccattaccgtcgatgggtctctttctcggccgcagagattgacccatgactgaggattcgtccacacgt

SEQ ID NO: 84601 - DNA, 529 bp, Arabidopsis thaliana columbia
gttctatatacaaccacattatagggaagagctggtccgccggcaggtcccggcccggatttccgggttcaacccacgcgtccgcccacgcgtccgcggttagagctcgctgttggaacagttgtttcgttcattggatacacattcactctaacattggcgtgtccaagggcttgtaaacacgtttggagatctacgtggagacttttgctgctattgacaggatcaattccattttaaacgcggtggacatagatgaggctcttgcctacgggttagaaagagatatacatacaaagaaagtccaagatgaaaaccttaaattgttcttgtctgctggcccaaatgtgaatatccgtcacctcgataagtactacatgtcaaatctgaaatcaactaacaatctacgtaccctaacatgggctggagatgtctgtcttgatgatgtgcattgtgcttatcctctacgacccgacgtgaaagttcttgatgggctgagtttgacgttgaattctggtactgtaactgc

SEQ ID NO: 84602 - DNA, 684 bp, Arabidopsis thaliana columbia
gtagagctatgacgtcgcatgcacgcgtacgtaagcttggatcctctagagcggccgcccttttttttttttttttttaggttcaaaaactgcctctgatttttattttatttttaccattacttacgaatttagttgggttactagttttacagttaacagtttaaactctaatctctcgcgcgtataaagtgaaacgccgatgcaaaaacaaaaaccttacatcccaaaacacctacgaatcttctgggccaagtccaactctttcaccagagaattcaacatcagtccccgttgtaacaatctccggctcccttggaaattcgctttctgggcttaactccttgaacgcgtcgaccacggtctgcaaccgagcaaacgaactcaatgaggagagacgcgaacgtcgcgagaggcaatgcactcgcgctttcataaggccttggtggccccaccaacggggaagccccgttagccgtctccagatgcggcggaagtacaagccgtgcaggccatgacacctgttttgagaaagtaggtctatggttcaacgcttcacggtgattcttctcgccccagcttggtggtatctctagaactgcctcgcttagggatttgaaggcgtagattggaggcgcgtggttttctggtggatctgaatcttcgagggagagcagttcttgt

SEQ ID NO: 84603 - DNA, 716 bp, Arabidopsis thaliana columbia
cggaattcccgggtcgacccacgcgtccgcaaagctctctttcttctctctcgagatttgctaacttgtcatttgcggatgttgagaatctgaactctgttccggcgtcggaagacacagagtatggatttaaacggccggagatgtacagcacaaacatagccaattccataacttcctacgctcgtcatgtttttgttctttacaaaactcctgaagcttggctctctcacgtcgaagaagaaggtttacctcaacgtttcgctacgttgcttaaagatcgcaaatctgatcttcttgttcagacgaagctcaatgtatgtgaaggtggtggatctgacggtgatgttttgatttttcccgatatgatcagatacaagggggttaaggatacggatgtggaaggtttctttgaagatgttcttgtgaatgggtagccatggagttctgggatacaagaagggatatctgggacatttgtatttgtgtgtactcatgctagtcgtgacaagagatgtggtgtttgtgggccagtgatcttagagagggttaagcaagagattggttctcgagggctgtcgggcccgattacactgaaacgttgttctcatgttggacagcacaagtatgctggtaatttgatcatcttctgtcctgattcagctggaaagattactggcaattggtatggctatgtaacacctgatgatgtacct

SEQ ID NO: 84604 - DNA, 713 bp, Arabidopsis thaliana columbia
aatttccgggtcgacccacgcgtccgtattcaaatagtctgggtcaattgcaagctagggaagtgttctttcccaacttcccggtttctgacacccagtatcagcttatgtctttggatgagcgacttcttctggaactacagagcattggtgtgtttcctgaggcaatgcctgatctggctgaagaaactatgagcactgatgttatggagttgaaggaaggcatttatcaggagatcctacaacaagaagaaaaagctggagaagcttatcattaccatccagaaggggaaagatgttgagaaaaggaaaattgagcatcttgctatggaccaacttgtggaaacagcccacaagaaaagaatggcatgccgtggaagtaaagcagctaaagtcaacaaggttacaagacaagtggcgctggggttcattaggcggacagttgctaggtgtcgtaagttcgaagaaactgggtttagctgtttttctgatcccgcacttcaagatatcttgtttagttctcccagcaacgatgcaaaatcatcagaaaatggcggctctggaacagccagtaacccgctcaatgaaccttctaatcatcacgctgaggccaacggttcaggtgcagtgtctagtacaaagaggagagaagcattgatagaagatggtatcggatgcgcttcctccaaagtcacaacgagcaaaggagtgca

SEQ ID NO: 84605 - DNA, 684 bp, Arabidopsis thaliana columbia
  unsure (1)..(684): unsure at all n locations
ttccgttnnnnnnnnnnnnnnnnnnnnnnnnnnnnnnnnnnnnnnnnnnnnnnnnnnnnnnnnnnnnnnnnnnnnctttttttttttttttgttgtgttgtagttttaacattccaaaaaccaaatctatgtttgaagaaatataaatcatctctcactaaagagttttttagaagaaaagcaaaaaaataggactataccattctcactctctggtggtatagtggattatattacacatgtgcggccgagtatatggaccccgccaattttggaacattaaatcctaccaatacctggaataaaggtggacccaaaatcccaatatgggtggactccaggagttgcaggcaggaaccggggatgcaatcagattcagatgtatgcaagcgagcttctgtcaaaatctggttgtggcctgcctcgtgttggagtcagcggtctctggatattcagctcctgcatccaagcgtcgtctccagaatgttctggagagttctctggagataagatgggaggtggaagaggatgaattaacttgggaacaatcaccaatcctctgccaaccaccaatatagctcctgcattgttcgcacttccgcagtaatttgtggcggagaaaagcgtaatcaactgtccctgtgcaaatctttctaatccatccatcacacattcatgggccct

SEQ ID NO: 84606 - DNA, 962 bp, Arabidopsis thaliana columbia
  unsure (1)..(962): unsure at all n locations
tcnnnnnnnnnnnnnnnnnnnnnnnnnnnnnnnnnnnnnnnnnnnnnnnnnnnnnnnnnnnnnnnnnnctttttttttttttttttttttcactgaatatgaaattttaaagcaagaactttggtctgcagctgctcttaaaacgaacatacaacacaaacttgtaagaaatctcgactaactacacttacgtctttgcttatctgactctgaataaaatggaaactgaatattttagcaaaacagtggtgtgaaaaacctttaaacccaaagatgctcctccatcgtgctgaaaaccatgcctatctaactaacggtaagagtcacacaactgcataggcaaaatgatataccaaagggaacaatgtatcaggttcttaataatctaccgtcataagttgtatcacaggttccttgtcttcaagctgtgctttttctgctgccttttcagtttcctctacaacaaaagccttgagcgattcaacgtctttttttcctttatatttcggaacttcttccccattggaaaatagcataaatggtggatacgagtgaatttcaactttggtgcaaacagctctgctagtaccacagtctacttcaccaaacctcaatttcatcgtctccctccattgcttttcccaagtcttcccacaaattccccagtttcttgcagtgtttacaccaaggaacanaaaactttacgaaccacgnagtatccttctcctttatcttgtcagaaaaggtttctggtgtcagtgtaatgacttccgctttaactaattcaatcggtataaaaaggagaagtataatcatgggagcaacaagccgagcacctagcgtcatcgtagcaaaaccccaaattttgatacttcaccagtcctgttaacttttcttccaaatttgcaacttctgcaacaccaattccgagagcagaagaaagagaggaatgtcaaagcatg

SEQ ID NO: 84607 - DNA, 687 bp, Arabidopsis thaliana columbia
  unsure (1)..(687): unsure at all n locations
nnnnnnnnnnnnnnnnnnnnnnnnnnnnnnnnnnnnnnnnnnnnnnnnnnnnnnnnnnnnnnnnnnnnnnnnnnnnnnnnnnnnnnnnnnnnnnnnnnnnnaagacaaaaagacaactgaaaacatgcctgaatatacaagtaatgacacagttttgatcccataaaaaaaagacattggaatgctaaggaagcttggtgaaaagatcctgaagctgagtgtggctcaccacaacaccaagtttctgtgaaattgctgctgtcactgtttcgggatccaagcttgacaatgtatccgcaccgctcatggcaatgtactcgctcaaattgtgcaagattccatcttgggcaacaatgggttcataggggggaggttcgagcagtccaacttccatcaggttctttcatgtgtcttctatcggaagcgaaatgcttaaagaacagaggagcatgaacaatgcggaagaacctctggtactctgcgaaaagctgaaaagatggctggatagtttcagtcacatatgaggctaagggtgaagggaaaggcaaagtcgaatcaagatcccacaccaaaggctcagaatcactttctttcttcctctggacacagatgacatgataatcccacaggacaaccccatcagctctgggactagctttctgatgccaaagtggaacctgcttcttc

SEQ ID NO: 84608 - DNA, 724 bp, Arabidopsis thaliana columbia
gaattcccgggtcgacccacgcgtccgcccgacagtgtctttcttgagaaattttggaaactctgtgcagaaatgtttaacacttcagatgagaccgatgaggaggatgaaaataaggaatacattgaagagacaaacagagatgtttcagtcattgctgcctgcaagttggttgctagtgatgtggttccaaaggattatctaggaccagagatcatatcgcatcttggtatgcatggacctggtgtaacaggcatcataaagaatcttattacattcttaaggaaaaaagaagatgacatctctaatatctatctcgaatccttgaaacgggcctatcacccggtattcaagtgaacttttctagtggccgtgaagcaatcccagaggtagataaaattgtccttgaagcagtcggcgggagcttgcaggtgggctctcaggaatgtatatcggggctgcgcgcaacaaatacagattggagatattgagtgtggtgaaggaaggtgttgagtttgcttttagggacgccccaaagcaactgttgtttctggaagttgctatccttccatttgcaaccagactctcagtgtctgacatcattgacattaagaacgacgttcaggggcgtatagtgcatgttaatacagacgaagatcccagtggatggcgttcttgcttcaccttcttggaaaccttggaggagaaatgcttgaaaaacgaa

SEQ ID NO: 84609 - DNA, 762 bp, Arabidopsis thaliana columbia
  unsure (1)..(762): unsure at all n locations
gtaactacgttgagctatgacgtcgcatgcacgcgtacgtaagcttggatcctctagagcggccgcccttttttttttttttttttatcaatttcttttaagttccacgcgaatgaaatagtgcttttcaatatttcattacatttggcgagagagaacattacaatgaaattgcagtgtcaaagtaaatcttctgtacatgtttcaatcaaaacctttttctttctttcttccttctctttgagagcaaacatcataaatccacaaaacaatcaaactcacccaaaagacttccacgatttgactcagcacacagtacttatgttcaattctattgattcgatctcgtgaggcagggcaaagcaacaagccagatgatgtttcatggtcctttttgggctgtgccctttgatgtaatcttagacttgagtgctaagctacttatatcgtcgtctccttcaagatcactgaaagaaacatcatcctcattcactgtaaacattggagcccaagaattagcagaatcttcttcttctggccaatcatcatcatcatcatcaacaacatctttagatgtttggctaaggcttgcactatttttgtcgttcttctggattggtttttcctcaataacagctttatcgatgaactgagcgttttcagacccgtgtttaaaatcgcgatacataatcgaaggnggtttaaaagnatatattcttggagaaanaaactcaggaggagcatggttgtagtaattagaag

SEQ ID NO: 84610 - DNA, 687 bp, Arabidopsis thaliana columbia
  unsure (1)..(687): unsure at all n locations
nnnnnnnnnnnnnnnnntgacgtcgcatgcacgcgtacgtaagcttggatcctctagagcggccgccctttnttttttttttttttttttttttaactacaaacataaatagttttggcattacatcacaacacatagcaaatagattaatatgaaattatagattatatagtttcttaaacttaccaagattcaaggcaatgcattataatgattaagatcagtccaagcttgaattccattgttccattcacttcctcctcctcctgtattagcattattactaatcactccttcattatcactgttattaccaaaatacccactcctgtctgattatctcctttcttcgtcggcgacgacggcgatgatgagtttacgatctcaagattccgataaagaataggttgtggcctctcgacgacaacagtttcttccttagaattaccaaaaagcatcgccatcctctgttgctgaagcctccagtgtaaatcttggtttaaacaactcaaagtctctatagaagaagctaagtttccgtcgcttgctccggcggttgtgaaccccgtcggtgaatggttgttgttgaaatctccaaaacccattagggataaacccgacccgacatcaacgggtgtgttttcttggcccgaggacatccggacgcgtgggtcgacccgggaatta

SEQ ID NO: 84611 - DNA, 823 bp, Arabidopsis thaliana columbia
  unsure (1)..(823): unsure at all n locations
nnnnnnnnnnnnnnnnnnnnnnnnnnnnnnnnnnnnnnnnnnnnnnnnnnnnnnnnnnnnnnnnnnnnnnnnnnnnnnnnnnnnnnnnnnnaattaaaatagtgtattttattttcttaaaacataaaccatacatgataatacaaatccatataaactctggagaaagatttgcttatgataatgttcctttggagagttgcgttgttcatgttgctttgtggaagacgcaagtaatgttccaggtcattagggctgcagttattctccttttgtcggcggttgtaaacctcgttggtctaacgttcttactcggtccacatatgtactgttgtttaggtgccgtgaacatgaagtttgccggcatccgagcagtcttaaccgagttaccagcgctaccaacagataactggaatgcactttctgaaccaggttttaagaacacccccttttgcagcaaattacccgatctgctgattgaaaggaagtcccgggaagcaaatcgacaactgttggcttacgaacgcaggactgcgggatatttcctttgaacatggaacaacctccttgccctgtcgtttttgcacccaacatgttccagatcacttctttcttggtccctctccagctcattttccatcctggaatcgaacgttgcttctggtaattgtaggctgtaaccactgcaacgtagccatcaggcgtccagttcaanagatcccatttgactgtgatgtttccatagttgctggtgagagcttctgtagaaatgagacaggnaanagaaaccaagagcaggacaatcatcgtggagaagagagac

SEQ ID NO: 84612 - DNA, 717 bp, Arabidopsis thaliana columbia
attcccgggtcgacccacgcgtccgcatcttcttcaggctcatctttcatctctattccatcccttacatcttctctaggagcgcatttggtatgaaatgtagactcagaacacctcttacaagaatatcccccacaactccaatccattttcttacgacaaacaccacatactgaatcaataataccaagaagagaagtgcgagaaatgcgatgatcatggcggttgatattgatgacccatggaaatccagagcaattgttatggggagtgaaattgcattgaagacagacatatgggcttcgatctccatggaggccgcaagtgggtgcaagtaaaagtgatcaacttttggcataaggggcttagctccatgggtttggggggtgttttggccgtgaagatttagtggtggtggaagagaaacacatcgcaaatccaaagtaaagttacaagcggaacagtgattaaacatttcgtcagagatctttttcccacatgaactacgattcccatcagtataagccggtggttgaccagtgatgagttttattgtgtgtaaggagtgggaagggtggtatacctcagctccatacttttcgcaatccacatggaatgccaaatcgcattcatgcgatttgtgcggatatccactgcctacctttccacaagttaagcacgtgaaagagcttctcaccatctctagccttgggtttg

SEQ ID NO: 84613 - DNA, 663 bp, Arabidopsis thaliana columbia
atgacgacccatgcacgcgtacgtaagcttggatcctctagagcggccgcccttttttttttttttttttaaaccattttaattctctttagctccatccttcattcaaaactccggaaaacaactaaataaacaagaagggcaccgtttacaaagaggtattaaacggctgcgtattttgcttaattatctctgaatccaaaaataaataaaagcacaattacaataaccaaaaaaatctttccaatgtttttttttgtttctctgatcttgatgaaaaagtttcaaagaagacaaacttcttgatcttcagcgataaccatacgactaagaggactaggtccaagcttcttcttcctcctcatctgatttctcttcctcacaatctccatttgatctctctttctattctcccattaatcgcttcttcttccgccaccacgaatctccctcatcaccgcgttttccctcaacgacttccctctaaatatcctcctccctgaatccacactcatcctcgccggcgccaccgccactgccgtctccataggaagaggcttcgacggaggatagcttgaacttcttctcggcgggacgtgaatccgaaaaacgttctcgtatggaccaatcggagcgcagaggcaaaccctaatgaaagaattc

SEQ ID NO: 84614 - DNA, 688 bp, Arabidopsis thaliana columbia
acactacagttgagctatgacgtcgcatgcacgcgtacgtaagcttggatcctctagagcggccgccctttttttttttttttttttttcaaaactaatattttatcatttacaacaaaccaaagaacaaataaaacctgtgttgttcatacaaatatctgcaacttgaggatgaggtttatttcctcatgagctcatttagtgatgtgtataagatgtcaattctatcaacatgaaaagaacaatctgactcctaaaaagccatcagctatctgttagctacaacaagcaatcagcagcacccgccgctcgtcctggtggttctccttgatgcggtagacacgcctaataacgaaatttccaatatcacacaaaaccttaaagacttttcctcccaaatgaaacacggcagcaagtctaatctctgcacccacttgtatgatcctttccataaaagtctcatactcacaggcagagagagcttgaaaactaaaagattctctcagaaaacggcaagcaacttgattacatgatcttattacgtagagccttaagtcggggttttgacttgaggagtgattactcacttgtcctaatccactcaaagagattccatggcttttgccatttccatttgaattgaacaatccactggtgatgacttatcttccacctccaaagtctccca

SEQ ID NO: 84615 - DNA, 684 bp, Arabidopsis thaliana columbia
cccacgcgtccgtcaatgaaaacctaaagcattgcttttgccttcatggtatcagagctcatggaacatagatccatggaactctactctgttccttctctcaatatttcaaattgtgtcaccgtcactcttactgccaagaactatattctctggaaatctcagttcgaatcttttcttgatggtcaagggcttctgggttttgtcacaggctcgattcctgcaccaagccaaaccagcgttgtttcagacattgatgggtcaacatcggcttcacccaatcctgagtactacacctggttcaagacagatcgagttgtcaaatcctggctccttggttctttcttagaagatattctcagtgttgtggtcaactgcaacacttctcatgaggtatggatctctgtagcaaaccactttaatagggtttcctcctctaggttatttgagctgcaaagacgcctccaaaatgttagcaaacgtgataaatctatggatgaatatcttaaggaccttaagactatttgtgaccaactagcctctgtaggaagtcctgtaacagaaaagatgaagatttttgctgctttgaatgggttagggcgagagtatgagcctatcaaaaccactattgaaaactccatggatgctctgcctggtcctagtctagaggatgttattcctaag

SEQ ID NO: 84616 - DNA, 909 bp, Arabidopsis thaliana columbia
  unsure (1)..(909): unsure at all n locations
nnnnnnnnnnnnnnnnnnnnnnnnnnnnnnnnnnnnnnnnnnnnnnnnnnnnnnnnnnnnnnnnnnnnnnctttttttttttttttttttccaagttatcttgtttttattacaaagtgctaaactttttttcacagaaagctaataattaagcttatcaatcaatcaattaagctttttgtagacaaaactgctaacatgaacccaagatcaaatagttgacaaatgataaagaagcttttgctacattacatgaaatgacatgagatgattttgcttgtgacaaacaagtctctatcaaacattttttctttcggttggttcactagtctcttcacaatctctttctttgtcttgtttcaatagggtttcaatagggtttcaatagggtcccttgacttggttaccatggctgaatcattccattcatcaggagaaatccaaaaatggaagccccaaacgaaactattcatttaacacccaactttctccttggacccaaatttaccctttgatggagtttaatagcctaataagggtaatacatgactcaaggacgggaggcacaaaaataagctatgaggtttgcaactttttcgattaagacttcttctcaaagaccaacttgaagcggttgatcgttcccgacattatccccctcgcggagtccattttgttccccactttgtcaagcaagnggttatgattcttaacttcttcatgtatgtctccagtcactctcttgagaaacgaaactctgtcctgaagattttccaaagcttcatnattatnacgttcgtcatgagcatacgaagaagaagctntcaagcgaccttcttcaagtccatcaaggccatcaaagagagacgttctcgaagcacgattctcccttcgaaagttcatttgatt

SEQ ID NO: 84617 - DNA, 657 bp, Arabidopsis thaliana columbia
  unsure (1)..(657): unsure at all n locations
nnnnnnnnnnnnnnnnnnnnnnnnnnnnnnnnnnnnnnnnnnnnnnnnnnnnnnnnnnnnnnnnnnnnnnnnnnnnnnnnnnnnnnnnnnnnnnnnnnnnnnnnnnnnnnnnnnnnnnnnnnnnnnggcaacccatctttttatatcattggattatgtttaacagtaacaatatgtttcccaaatacctgttttattggaatatgtttccaaaaaacaaaaaaaaaactttccaagttctgcaaagaaattgaaggtagagagagacccaaaagggaagagttgctgagttttgcatcaggagctttgggaaaaaaataaaacgacttctttttacctttctaaatgtagaaggccatatacttgggggttgcactgaacttttgataacctttaacaactttgttcactgcgtccaaaaagtccttttcagtcacagactttctcctagctccgattgcatacattccggcttctatgcatacacttctgatatcagctccggttgagtttgggcagaggccagcaaggagttcaaaccggatgtctctttcacaactcattgttcgggtgtgaatcttgaagatctgtgttccggacgcgtgggtcgacccgggaattccggaccggtacctgcaggcgtaccaactttcccta

SEQ ID NO: 84618 - DNA, 709 bp, Arabidopsis thaliana columbia
  unsure (1)..(709): unsure at all n locations
actatngacgagctatgacgtcgcatgcacgcttgcgtaatctaggatcctctacagcggccgcccttttttttttttttttttttaattggaattgtcacttactttgtatttgccaatacaaatagagttgtgagagaacccaaacttttcctttgttattgtcacaagtaccagaaatcagacaagcctctgtaaatatccattcataattactgttaccacatatacactttaacatgtaaaagaagaagaaaaatgatggtggatgatcttaattagctggctggagaatgaaactttgagaagctttttgattttggtaaattagggttttacctgatgttttctggtgttggagatgatagagcagacttgtctatatcaccatggctacttgaggaagagtgtgacttgagatacgacaatgccacttctagcatcacttccacttctttcttgtactcgtcaattgcccctgctttaatcttcgattgcatcaaacaccatttcttgaaatgtacaccgactcttatatctataacagatgaagtctcgtctttagcttccaagcgccatcgacagtggacctcaaagtaagaaccaaaaggaacatcatgtggctgttgcactgtttcaaaaaccagcactttcttatctggtgatagaacaacatgctgccattccgtcacagcagtgtctggtggac

SEQ ID NO: 84619 - DNA, 419 bp, Arabidopsis thaliana columbia
cccacgcgtccgcacaagtgaagaaaacagagagagaaagacagagagatctctctctccttcacacacacagatacacatggccatcgcgagcgggtcatgggtagccactgtgaaccaccatgctaatccccacagcttcacttctccgaccaaacccattttctttctttctcaaaagcctcacaatttccatgtctgctcgtctcgatgctctatggttcttgaggaagatgaaaagaagtcaccgagtcctaaagaagacaagtggccattttttgaacctggtccgaatgaccttaaccgggtcttatccaggtttctccgagacccggaaactcggaaactttcttctgaattctacgagaaagctaaggagaactctgagttgagaacgaccaagcatctgataagttact

SEQ ID NO: 84620 - DNA, 695 bp, Arabidopsis thaliana columbia
  unsure (1)..(695): unsure at all n locations
cactantgacagagctatgacgtcgcatgcacgcttgcatccgtctagaatgctctacagcggccgcccttnttttttttttttttttttaaaaggatgctcgtcctttgtttaataattgacagaagaatttgatggatacaaatttaaagaattcggaatctgcttctgtccaaggtgattattcattcacatttaaattgaaaaagattttacatgctacatgctacatgctaccaacgtaggatttatttacagaatcattttttcaccttctcttgccatcacaaagaatcaaagaacccttgttcttcctccacacattgaatcccccaaacctcctcttccagcgagctttctcttgttcaagacttgagatcaacatatacctacagactagagattccgggttttccgatagagaacttgttttgactacgtcccttaggaggaactgtccgcgagaggaataaggtaccccttgaatctttcctgctggaacgctccatatcttgattcatcactatgctggactggctccaacttccacacttcaactctaccccaaggtcccggacgcgcggaatnggatttccctnccggtttgtgaagagggntcncagggngcaaaattcncaaccaaaggcaatngaaannnannnnnnnnnnnnnnnnnnnnnnnnnnnnnnnnnnnn

SEQ ID NO: 84621 - DNA, 1289 bp, Arabidopsis thaliana columbia
accgaaaaaaaaaaactgtccatgtaccacaccatgagattagttgtcagatagatattcgcgagacgagaagctccaattaaaaaccctagagctcatctctctctccaggtacggccttttcgtttttggctttcaccggcgtggatctccggtgacggggagattcggaatttcggagagattttagatcatgtatagggagagaggtatggttggatcgaagtcggaggtggtcgatcggaaacgaataaacgagattcacgataacaggccttcgcattcgatgtctcagcctgtcaatggaaaaggcaaggtaacatcgacctccgttttgatggggaagcagcaattgcatgataaggaatcttcacgttctggttctatctctaagactaacatttccgacgctgtggatatatcagacacagacagcgaagaatcagaggtcagtggttctgatggagaggacacctcgtggatatcttggttctgcaaccttcgtgggaacgagttcttctgtgaagttgatgatgattacatccaggatgactttaacttgtgtggactcagccatcaagttccttactacgactatgcccttgatttgattttggatgtggagtcttcgcatggtgagatgtttacagaggaacagaatgaattgatcgagtcagcagcagagatgctatatggaatgattcatgctcgtttcatattgactagcaaagggctggcttctatgttagacaaatacaaaaactatgactttggaagatgcccaagagtttattgttgtggccaaccttgtttaccagttggtcaatccgatatccctagagcaagcaccgtaaagatatactgcccaaaatgtgaagatgtctattacccacgatcaaaataccaaggaaacatagatggagcttactttgggacaacgtttccacatctgttcttgatgacgtacgggcatctgaagccacaaaaggcatcacaaagctacactcaaagagtgtttgggttcaagctacacaagccgtgaaggaaacaaggaagaagaaatgcacccttgggttttgagaaacaagaaatgtgtgtaaacaaaacaaaaagaaaaagaccatttgtcatcacagaaggtgaaactagttccatctctctctctctctctctttctttgtttttggtattgtgtttaggtttagataaaacattagcagcatggactggtgaactgaaatcccatattattgtaatactttaccttattgttcttttttgctttctta

SEQ ID NO: 84622 - DNA, 462 bp, Arabidopsis thaliana columbia
gaggattaaacagattcgctcagttctcaaaacgatgaaagtagcggagaagattgttttcctctggaatgattccgatggatttgctgcaaccatttctgatactttaaaccctagccctagttcccctcttcgcaaactagaagaacagatccagcttccgttggataagtatggcgttgaaggtgtggaaaccggcgggagtatcgttcatttcgtagatgaaaatgaagtttatcaggtctcgatttttcttcttcgaagttatgagcctccagtactagtgtgtgctatgaatgaactgctggacctaattacaaggggatcgtcaactctacccacaatcatagctcctttctttgtggcggcatctaagctcaagttcaataacagaatccctggaagcaaataacagaaaagctagtcttcattacgttcaagttgctacagaaacagagacca

SEQ ID NO: 84623 - DNA, 664 bp, Arabidopsis thaliana columbia
gacactatcgactaactatgacgtcgcatgcacgcgtacgtaagcttggatcctctagagcggccgccctttttttttttttttttatctcaaaccaaaatacaaataacaaaatcgcaaagctaaccagcctgaaatgtagggaatcaccattcagttactaaaatacaaaatagttatccatgggagcatacaaaatatttgacagcgacttggtggaagtatccatcaaattcgaaacaaacttggtgattgatgattattacatgaacagcacccagcataagagggacttaactgcaaaatttacatgtggctcaaagcctccgaaaatcaactaatttaacgaccaaaagattgaccttaaacgaaaagttcatcactacctttcaagtaattaaagaacaaggactacacatgtgctagagcatcttggtattgcaacgagttctgtagggaaggcacactttgccttcttcgggtaggtaaaccattgagccttaactcccccaggaccgggtgaattcggtaggaaatatcttactagctccatttgtccttcataccttgggatagaacgtttcaattccacaaacttgagcgacgataccacaacaccaagggcacttgttgaagcccatccacattttgggtttcttggctt

SEQ ID NO: 84624 - DNA, 622 bp, Arabidopsis thaliana columbia
acactatacgttaagctatgacgtcgcatgcacgcgtacgtaagcttggatcctctagagcggccgcccttttttttttttttttttttttaggggtcaacatcaacttttatttaccaaatgattacatccaattgaaggtaaataacattctcctctatcaaattggaccaaaatgcaatggtttgatctaatatcaaactgaaacactatcggatccagcgctacctgatcgaggaaccattgcatttttaaaccacaatgagatacataatactccacaaatgagaatattatcatctcttagaccacctacacagactctaagcgacacgagaacaactactaaaacggaagagaccaaaacctagtctgaagtacaaagtaaatccatactactagtccctattgatcagaatgtaatccatggccccaatagcattaccgcccggaggcgcatccatcagaaaggccccaaatccccggctttcgttggcccggtcttaaacccaaaagcgggccatatatccgactgacccgaccaatgatacaaaggcaaaccagccgggcgagagcttttttccagctaacccatgaacatcaggctactaatcgattaaag

SEQ ID NO: 84625 - DNA, 753 bp, Arabidopsis thaliana columbia
  unsure (1)..(753): unsure at all n locations
tgnnnnnnnnnnnnnnnnnnnnnnnnnnnnnnnnnnnnnnnnnnnnnnnnnnnnnnnacaagatgtctctcatgtcttcttttgttgctttcttacttccaacagaattaagcattgatgtataaatcattcaaagacggtttaatcaaacatatattagaccttaaaacattatgtgacttggaagacagagcccaactgtggtaaataaagaggacatctctgagatcaacttcttcaagttttagatagagaggtcagcgagatcaaatgttctttccaccgctttgcaccaagacgccactttcttcttcctgattccttcttccatagcgggtctgaaaactttggagttcttcgccttctctcccgactcgaatatgtctgcttccttccagaatcccacagctaatccagctgcataggctgctcctaatgctgttgtctctatgtccactggcctcaccaccggacttcccatcagatcagcctgaatctgcatcagaaggttgttagctgtggcaccaccatcaactctgagcaagaactcccctttcccgttattaagggaacccttttcacctgcatctttgttcatggagtcaaggacctcntttacctggaaacacatgctctccagcacagcccgagcaatgtgagacttgttggtgaaccttggggatttccaatgcccaccaccacggggcggttttttcttccacccagggagccaacccaagccggttgaaacgc

SEQ ID NO: 84626 - DNA, 621 bp, Arabidopsis thaliana columbia
ccggtgcttcaatggcggttcttcacattatcttcactgcgtaattgaaaaagttgttctctcttcctcttaatttcgagttgtgttcttaaaaaactccagagctgattcgattctcgagaagaaactaagccgacaataaagttcagatctggaaaaaagcgagctccagattacaaaaagaaacagctcgttttttttcactttcaaaaaaatggaagctttgaggatttatctatggagtctctgtctctctctgtgtttgattatctatggagcaaactcagatccattagaagacaaacgcgcattgcttgagtttcttaccattatgcaaccaactcgttcactcaactggaacgagacttctcaagtctgcaacatctggaccggagttacttgtaatcaagacggatctcgaatcatagccgttagattaccaggcgttggactcaatggtcagattcctccaaacactataagcagactctcagctctcagagttcttagtctcagatccaatctaatctccggcgagtttcctaaagattttgttgagttgaaagatttggcctttctttatcttcaggataacaacttgtctggtcctttgccattgga

SEQ ID NO: 84627 - DNA, 740 bp, Arabidopsis thaliana columbia
  unsure (1)..(740): unsure at all n locations
nnnnnnnnnnnnnnnnnnnnnnnnnnnnnnnnnnnnnnnnnnnnnnnnnnnnnnnnnnnnnnnnnnnnnctttttttttttttttctcataagtggaaaatcttattaacgttaaccaaccatacatgggctaaaaaaccaaaagcccaacatacactgagattacaagaacatttgaagtcctaaatgagtccaagaacattgcttaaagatgaagaactgatattgtggctccaaccaatcttacgtgtcaacagctgaaaacaacacagcacacgtttggatgagtaatctaaaagcatttccgacatcttcctttgccgtctgagattgattccggtgagaaaaatcaacattgataatgaaagcaagtttgattcttctgggtttcaccttaaacaaaccaatcgaacttccagataaaaacttagcagctaagggcaatattaatatgcaacgaaaacttcttcttttcttcaacttaagatgcaaatctctaaattgattcctgcaaatctcaaactcaaaagatcgaattggataataaagatctttaagcgaaaaatcacctaaaccattatcaccaacataagatctatgagattattgaaagaaaaacaaaacaacgttggatacaaaccaaatccggccaacgacgctcatggaaacaacgctgccgggcaagagccaatcaacactactaaaaaagccagagatgctagaaattagaccccgataaa

SEQ ID NO: 84628 - DNA, 749 bp, Arabidopsis thaliana columbia
  unsure (1)..(749): unsure at all n locations
nnnnnnnnnnnnnnnnnnnnnnnnnnnnnnnnnnnnnnnnnnnnnnnnnnnnnnnnnnnnnnnnnnnnnnnnnnnnnnnnnnnnnnnnnnnnnnnnnnnnnnnnnnaaaaaagatgggttagctttgaaagcaaaagatccgtcaaaaatacaagggcctcatagttaacctgtagtaatgaagagaggcatctcaaaatgcaacgaaaaagtgaaataccccttcctacccctcgccaaaatcttgaatatctcatttaagttctttcttcgacggttcttcactccgaatcgctttccatgctccccattgccttcaatcctctgggtctcttcttggaagccttcttctctcttacttcatatctctctttgcacagatctggataaccaagctcctggactcaccagaaggcaatgtcctccggaccaattgggctcgttttttaggtctttgaggaagcttgcaccctttcatagccaaaaaatcttcttccttctttttattggacaaagctatatacaactttggccacacatgcttttttgtttttttcacaggttccttaataattttccccctttcatttattcccatggaaccctttgggggataatacctattctccttctggggcgaagccataaacgatctccgcacattgactagagaaataggggtcttgttagggccggttaaaaaggttcaaaagggtgagccttctcttaaaaagagacccccccgaaaa

SEQ ID NO: 84629 - DNA, 491 bp, Arabidopsis thaliana columbia
  unsure (1)..(491): unsure at all n locations
gacatttgatggataaatttaagtacacaatgtgtctgtaagacaagaaaataataataattggacatttctgtaaaggcacaagcctctgcgcacttgagcggcacttaagaagaaaaaaagagacttcaatgaagattttctctatacaaaaagtttctactcggaatttactctgagacatctcttccaaatagggtgctgattgccttcccgggatcgctttgtttaataagagattcgccgactaaaactgctttgacaccggcttcttgaacaaaggcgatatcttcgggagtgaataacccagattctccaaccacaaggatgtctcctttgacggatcagttcgccacgctctccctcaagtagcttctttgtggataccaagatctaccccaaatggtttcaagggttacgggttattgatggcaatgagcttcgactccttcaattggaaagaacacgatccatcttccctttcgncangg

SEQ ID NO: 84630 - DNA, 654 bp, Arabidopsis thaliana columbia
ctctcgcctctcggtgtccttgtatacagtacttcagttgtccgatctctttcagattctgttgccaaacttcatataaacttagtgagcggaactggatttggggagaatggcttcttctttagctcaatctagaatcgtcgagtctccagaatcatctttcacctcttgaagcaaacaacaagctcaggagtctggtcaagatttctccccaagtatctgaagccttgtctaatggacgtgctgttgtcgctcttgagtcaaccattatctcccatgggatgccttaccctcaaaatctgcaaacagcaaaagaggtggagtcaattgtgagagaaaatggagcaatccctgcaacaattgctatccttaatggagtaccttgcataggtctgagcgaggaagaactagaacgtcttgcatctctcggaaaaagtgtccaaaagacagcgggaagggacatagcaaatgttgtggctacaagaggaaacggtgcaactacagtctctgcaacgttgtttttcgcttcaatggttggcatccaagtttttgtgacgggcggataggtggtgtccatagacatgccaaccattcgatggacatatcatctgatcttactgcacttgggaggactccaatagcagtgatatcagc

SEQ ID NO: 84631 - DNA, 978 bp, Arabidopsis thaliana columbia
  unsure (1)..(978): unsure at all n locations
gggaaggttgtccccctgccagtacccggcccgaatttccgggttgacccaacccttccgggccacttccagcttctgcaacgttgtttttcgcttcaatggttggcatccaagtttttgtgacgggcgggataggtggtgtccatagacatgccaaccattcgatggacatatcatctgatcttactgcacttgggaggactccaatagcagtgatatcagcaggcgttaaatcaatacttgatattccaaagactcttgaatatttggaaactcaagaagtgtatgttgctgcatacaagagcgatgagtttccagcatttttcacagaaaaaagtggctgtaaggcaccttcccgtgtaaatagccctgaagactgtgctagagtaatagatgcaaacatgaagctaaaccgtcaggcggggattctatttgccattccaattccgaaacaccattcagccgctggaaatcttatcgaatcagcaacacagcgtgctcttacagaagcaagggaacaaaacgttactggaaatgcagaaactccattcttacttgcacgggtaaatgagttaaccggaggcacatcacttgcagcaaacattgcgcttgtgaaaaacaatgcccttatcggttctcagattgcagtagccctttctcagctgatgtgagcttccttatcaatcccagactcaagctcaagcgcaagttattcaggttcatgattcaggacagatcaaagatgttttggattggtagttatcaatttatattggttatcaaagatttttctttagctaaagaaactcgttaacttattatcacatgttatatattagtcattagatttatatcatgtggtacccttaaagattaaactattgaaattttaatttatatcacaaaaaaaaaaaanaaaggacggccgctctagaggatccaagcttacgtacgcgtgcatgcgacgtcatagctctc

SEQ ID NO: 84632 - DNA, 718 bp, Arabidopsis thaliana columbia
  unsure (1)..(718): unsure at all n locations
nnnnnnnnnnnnnnnnnnnnnnnnnnnnnnnnnnnnnnnnnnnnnnnnnnnnnnnnnnnnnnnnnnnnncttttttttttttttttttttaacatagcaacactcgactgtccatctcacattggtaacactaatcaatataaacattacaaaacccgtaacgccatcacaaattcgaaaagaaaaaaaaagtataacactaccacactttatactgatcatttttaacaaaatagaaaaaaacaaacaagattttgttcgctcgtggtgatattgttatggtaaagaaaaaaaactcatctacatgatatttgcaaaacacctagcggcaatgtaaattcctaatctcccttaatcccaaaaattcatgtgcactacatgtaacgaataataatcaataacctttttctgcttttgttttcttgattcttcaatggacaatccagggttttttcctggacctccatagtaaaaatagttaccccacacacgattcgtcccacctcttatatcataacaattgggatggtctgcgagaatctttagattcgaagcgggtataagagtgttgtcccagtcaacaatttggagattccggaaataagatgctttaccaaaaccttcaccggcaaaatgtccactacccatttgagtcgtagtgtgtgaacccgccgggtcgttgttcacaatctcgcccccgaatggaccatgcctccat

SEQ ID NO: 84633 - DNA, 607 bp, Arabidopsis thaliana columbia
ctatacgacctactatgagggagcgctggtacgcctgcaggtaccggtccggaatttccgggtcgacccacgcgtccgcgccgcaacaatatcttttgctttctctctcattcttcaccagtaacaagcccatctctcgattcttcactctcaaggaaggagacgttttgaaaatcagaaatggtgaagatatgctgcataggagctggttatgtgggtggtccaaccatggcggtgatggctcttaagtgtcctgagattgaagtagtcgtcggtggatatctctgaaccaaggatcaatgcttggaacagtgataggcttcctatttacgagccgggattggaagatgtggtgaaacaatgcagagggaaaaacctcttctttagcacagacgtggagaaacatgtatttgagagtgatattgtatttgtctcacgtaacaccccaaccaaaacacaaggtctgggtgccggcaaggctgctgatcctactactgggagaaggcatctcggagatccctggtggctcaatctagccaagcgtgaggaaaaaacacggttcccggaagaacggaataggctatgaaagatcccggccccaccgcag

SEQ ID NO: 84634 - DNA, 805 bp, Arabidopsis thaliana columbia
ttcgtgacactatcgatgagctattgacgtcgcattgcacccgtccgtaagctggaatcctttaaagcggccgcccttttttttttttttttttggggataaataatcctttacagaaccagaagtttttccttacttacacggacgagtaaatacaatccatcgttacactgcggtttctgccttatggaagattatcaaacgtataaaagtgttgcgcctaccatttgacatcaagtgttaaagcttcttgaggaacaagtaatgatggaaactttgagaatgacatgttagacatcaaactgctccatgcttctgaatccacttcaatgaaaggcactacttttctcagcctcactgctttcaacttatctccttcgattttcgccgttacttcaaaccaaacccgttcgatcttgggttttgctctcgatgctacttttttacttatcacactatcattattgccaatacttctctagatctttaactgaaaccggaccattcctgaagcctttagttaagttgttacaaaactaagctgcatgccgtggttccattccctaaagagttacaaaaacttttttccaatctttgggggattctttaaaacccacgaaattaatcttttgaggaaaaccccatccgcttatcctcggtaactttaggaaagccttcttatacatttaaccattttttttcctcagatcaatataaaaaacgagactatgcttctataaaattctagagaatacgactcacgatactacatccttttagtaattgttgggactgtgtctcctta

SEQ ID NO: 84635 - DNA, 605 bp, Arabidopsis thaliana columbia
  unsure (1)..(605): unsure at all n locations
agactatcgttgagctatgacgtcgcatgcacgcgtacgtaagcttggatcctctagagcggccgccctttttttttttttttttttgcaaaagaatatattcggattttttgaaaaattagttgaaagagttggagattatgtcgacatgtattatacatatggaggtaacctgtgaaagagagagggtgctctaaactgatcgaagttccaaaaccttatttatttttcacatctcaggcgaaaactcaacactcaccttaaataatcagctgtttccttgaggaggaccggtcatggttcccatcagtttatcatccggtttgggagtagaagatgcctttggcgtttgtggtcctccacttccttttgggccaagtaacctccggcctgaaggtgctctcgctaatgatgaaatggccactgctgctacagttgccacacgaatccctttatgcacgtctacatactcatctggttcactcacaatctcctcctgcaagagtcctctacacatctctaacgggagaaccattangcncancccatcnccngaggatggganccngctgcggccggagacgtgcaaactgcgtnggaagant

SEQ ID NO: 84636 - DNA, 745 bp, Arabidopsis thaliana columbia
  unsure (1)..(745): unsure at all n locations
nnnnnnnnnnnnnnnnnnnnnnnnnnnnnnnnnnnnnnnnnnnnnnnnnnnnnnnnnnnnnnnnnnnnnnnnnnnnnnnnnnnnnnnnnnnnnagctaaaacttcagtttcataataggcataatgagttatatattcaaaagtataaaatttatatcattgcaacttaaacacgaaaaaccaaagacggtctttagagtccagaagtgaagggtatgccggtgcgtgggagccatgctgtaccagcgataaactttccaacagtgaaagcagatgcatcggaagctctacccaacacatgaaaccctttccaactgacacgccacctcgtgggatgaagctggtccagtattcttatattctgcatagaagagagtgtccagaccaaacaccgaaccttcaatccacggagaccacccgacttggactcacaacattatccaaatacgtctgaagaaccacgggttcgtgagaacttcatccaagggccggcccatgtacgtcttaacggtaccggccactgggtttagatcaggagccggtaggattcttggggtatgggtagggacccctgtgtgctgaaacggatcagcacgaccttgtgcgggaattacattggcttgacctttgagtggccgcgagggaagatgagacagttttggaaaacagcagccgcgttaccgaatatgaaatcgacggttccatagatgtaacactcacgggaaaaactggcgttgagaatgga

SEQ ID NO: 84637 - DNA, 1106 bp, Arabidopsis thaliana columbia
  unsure (1)..(1106): unsure at all n locations
nnnnnnnnnnnnnnnnnnnnnnnnnnnnnnnnnnnnnnnnacgcgcacnnnnnnnnnnnnnnnnnnnnggctcgagctcgagccgaatcggctcgagcggctcgagcggctcgagcgccacgcgtccgcctttttacctgttcaacgaaactcctgagctcagcttcactttgctcgacgttatcttcttcgttcagcgacaatggcgtcgattacgaacctcgcctcttctctctcttcactctcgttctcctcccaagtttctcaaagacctaacaccatttccttcccccgcgcgaattcagtattcgcattaccggcgaaatccgcacgccgcgcttctctatctatcaccgccacggtatctgctccaccggaggaggaggagatagttgaactgaagaaatacgtcaaatcgaggcttcccggaggatttgctgctcagaagattattggcactggacgacgtaagtgcgcaatcgctagagttgttcttcaggaaggtactgggaaggttatcatcaactatcgtgatgccaaggagtaccttcagggaaatccattgtggcttcagtatgttaaagtaccattggtgactttaggatatgagaatagctacgacatatttgtgaaagcccatggaggcggtctctcaggtcaagctcaagcaattaccttgggagtcgcacgtgcactcctgaaggtaagtgcagaccacagatcgcctttgaagaaggaaggtttgctcactagagatgcgagagtggttgaaagaaagaaggccgggctcaagaaggcgcgtaaagccccacaattctccaagcgttaagagttttacatatcattggatcaactcttcaagtagactcctctgcctccattttttttaaaaacttttcttgtctattatcggtcttttgtttcatgttaatgtttatgtgtagacgaactaatacaatctctgttttgtttgaatggaacgcaaagttgatatgcttttgtaacaaatgaaagtatgaattgtggtccaaaaaaaaaaaaaaaaaaaaaaaaaagggcggccgctctagaggatcctagcttacgtacgcgtgcatgcgacgtca

SEQ ID NO: 84638 - DNA, 792 bp, Arabidopsis thaliana columbia
  unsure (1)..(792): unsure at all n locations
gcccccggccggtggtttggcttccggtcactatagaagagctatgacttcgcattgcacccgtccgtaagctgggatcctctaaagcggccgcccttttttttttttttttttacaagaaaaactagttgtatagagatttttttgggttcatcccaagatgggctaaaaactgtaaaaacggatactaggaattgtatacaccacaaaattacgtataagaaagtctaaacaaaagtaaggtaaaaaaaaccaacacagtagtaatccaaaaatccaaaatctaaaagaaatagcctctatacgcttgggctgggcctataacccgttgaagatccggattcatgaagtccgggttcgggtcctaaattggatctccctcttttcacagagttcatcttctccaatttgagtccggctctgaatcttgcgatgaaatcatcggctttggtatctacgtcggggctcggacagaacatactcccggcggcctccttacttccagctgattgagctacatccggatcatcaggttcgtcggagcttatgctgatgtcactagccatcctgacgtaatctccacgcttcacgaatttccaagccggcattttaaacggcggaggaggaggcggcggcgggatcggcattagtggtgattcgcttcctgtgcctacgtattgagttactttagctggcggatttggtttggatgtccgtgattccaccggagctttttcgagcttccaggttgatgcgcgtgattcatatctccgttcangtggtggtgggaga

SEQ ID NO: 84639 - DNA, 827 bp, Arabidopsis thaliana columbia
  unsure (1)..(827): unsure at all n locations
agctctgacgtcgcatgcacgcgtacgtaagcttggatcctctagagcggccgcccttttttttttttttttttttttttttaaagggaaaaagactattttaaaccaaagaaaaaactacaaggttcgatcttattttctttgccgcccacgcaaaataatcagaagccatatagcctatagagaggcatacaaccaaacaaaaagtcgaaaggggggccataactcaacgaacactcattttttcttgttgcctcttctcctttgaattcttcatgattcaaattctaacgactcacaaaaacatatctgagagtgaatcgccaaaaggcaggttatgtgaagaatataaagttaccggaaaaggaagaaaatcatcccatttttcactttccgggaaggaggccggcgaaataagcttatcaaaggcatccaagacccccgagttgtgatgcctaggaaacttgaaaagcactatcaagtatgaccctagaacccagaagcaaagagcaagtcgaacgttacactcgccacctggtatatattaaggctagcctttgttgagtcgtaaaaggtgaaacttccatctaaagattcatgttgaacactcacttcagcagtataatcctctagttccttcttcagagccatgattaatggttcgttctttgagagaaacggtgctacccgaggtgtttgtgacaaaagaaccaaccatgatctcacatagaatggatttacagccaaactactgtcatcagcaaaaatcttaatttcttttccttggtgaccatagatatgtttcgnnaagtttcagccaccaactt

SEQ ID NO: 84640 - DNA, 443 bp, Arabidopsis thaliana columbia
gttcacagatttacaaagaaacttgtcttcacgttaatcacgccacgtgtctgaacccaatttccaacgtgtctctcacattctcgaattcgactcttttagtggttctcgtcctctctgggcttttagactgggctcgaaccatctccattccaccgataacatcgaaacccgccacgtgtcctccctcctctgtctctcgtctatatatccacgctcttgttcgtcgattcgagatcacacacacaaccaccaaacacaaagcttttcaaaacccagagaaaatgttcatcgagagcttcaaagtagagagtccaaatgtcaaatacacagagaatgagatcaattcggtgtacgattacgaaacaacagagtgtcgtccacgagaatcgtaacggtacatatcaatgggtcgtgaagccaaagactgtcaaatacgattt

SEQ ID NO: 84641 - DNA, 688 bp, Arabidopsis thaliana columbia
aatccgagggagaggttcgtcagttcacagtacatgttattttgggttctctgttttcactgaaccgcggttttgatgttttgaaacatctttttggcagggaaagtttcactctttccatcctgtggccaccatactcagctacctcaccaaggcaccacttgtaccgccgggaactccggtgattaacgcactgtcgaagcagcgggctatgctggggaatattatgagggcgtgcgttggactggctcccgaggacaccattgttcatggaattcaagtgaaccatgaagaagcatgattctaagccctttaattagctcataatttaagagtctttaatttgggtcgtggtttggtttttatataaggtttttaaattatgaaagcttgtgtttctgagagaccaaagagcttttagtttggtccctctctgtagggtgtgaagtaacttgtatttgaagtaatccaaaacaggttggtatattttgcaagcccctgtgtctaggtcctggaccacctaatttcaaaatctcttatgattttgtttcatatgtttgtaaaacagcttatcttttgagatatataatcatggttttggttccaaaaaaaaaaattaaaaaaagaataaacacaagggcggaccgctctagaggatccaagcttacgtacgcgtgcgtgcgacgtc

SEQ ID NO: 84642 - DNA, 1931 bp, Arabidopsis thaliana columbia
  unsure (1)..(1931): unsure at all n locations
gtctatatatccacgctcttgttcgncgtttctagatcacacagtgtgagtaatttagcaaagcttttcaaaaaccagagaaaatgttcatcgagagcttcaaagttgagagcccaaatgtcaaatacacagagaatgagatcaattcggtgtacgattacgaaacaacagaggtcgtccatgagaatcgtaacggtacatatcagtgggtcgtgaagccaaagactgtcaaatacgatttcaaaacagacactcgtgtccccaaattaggggttatgcttgttggttggggaggaaacaatggatcaacactaaccgctggtgtcattgctaacaaagaaggaatatcgtgggcgactaaagacaaagtgcaacaagctaattactttggttcacttactcaagcttcttcgattcgtgttggatcttacaatggtgaagagatctacgctcctttcaagagtcttcttccaatggtgaatccagatgatgttgtgtttggtggttgggatataagtgacatgaatttagcggacgctatggctagagctagagttcttgacattgatctgcagaaacaacttagaccttacatggagaacatgatcccgcttcctggtatctatgatcctgatttcattgctgcgaatcaaggttcacgtgctaatagcgtgatcaaaggtaccaagaaggaacaagttgatcacatcatcaaggacatgagggagtttaaggagaagaacaaagtggataagttggttgtgttatggactgcaaacacagagcgttatagcaatgtgattgtaggacttaatgatacgacggagaatctattggcttctgttgaaaaggatgagtctgagatctcgccgtctacgttgtatgctattgcttgtgttcttgaagggatccctttcatcaatgggagtcctcagaatactttggtccccggtcttatcgagttggctatatcgaataattgtttgatcggtggagatgatttcaagagtggtcagactaagatgaaatccgtttgggttgatttccttgttggagctggcattaagcctacttctattgtgagctataatcatttgggaaacaacgacgggatgaacctctcagcgccacagactttccgctctaaggagatttcaaagagcaatgttgtagatgacatggtagctagtaatggcatcctctttgagcctggtgaacaccctgaccatgtcgttgtcatcaagtatgtaccatatgttgcggatagtaaaagagcaatggatgagtacacgtctgagatattcatgggagggaggaacacaattgtgttgcataacacttgtgaggactctctcttggctgcaccaattatcttggatcttgtccttctcgctgaactcagcaccagaatccagtttaaagctgaaggagaggggaagtttcactctttccacccggtagctaccatactcagttacctcacaaaggcacctcttgtaccgcccggaacagcggtggttaacgctctgtcgaagcagcggccaatgctggaaaacattcttagggcatgtgttgggcttgcgccagagaacaacatgatcatggagtacaagtgaaggatgaggaagaagaagtaaaggtacctaataagaccttaggatatgaagaacactgctccattgtttcattaatatatatcattttgtatgtatattatatgaatgtgtgtgtgagagataatatggataagcttagggttattttgtgtgatatggatctggtcggtttatttggtgagaaaattagccaaggttttggatcacatgtgtaaaagattaagtaattatgcttgtgtctccttgtaatataaccaaacttatgatctaaaaaaaaaaaaaaaaaaaaaaaaaaaaactaaattactcacactg

SEQ ID NO: 84643 - DNA, 2040 bp, Arabidopsis thaliana columbia
  unsure (1)..(2040): unsure at all n locations
acacggacgcgtgggcccaaaaccgatccaaattccgagaaagacaaccaaattttccttttcctctgcaaaaatgtttattgagagcttcaaagttgagagcccgaacgtgaagtacacagagaatgagattcactctgtgtacgattacgagacgacggaggttgttcatgagaagaccgtcaatggcacttaccaatggattgtgaagccaaagactgtcaaatacgatttcaaaaccgatattcgtgtccccaaattaggggttatgcttgtgggtttgggaggaaacaatggatcaactctcaccgctggtgtgattgcgaacaaagaaggaatctcgtgggcaacgaaggacaaagtgcaacaagcgaattacttcgggtcactaactcaagcttcatcgattcgtgtcggatcttttaacggtgaagagatctatgctcctttcaagagtctccttccaatggtgaatccggatgatgttgtgtttggaggatgggatataagtgacatgaacttagcagatgccatggctagagccagggttcttgatatcgacttgcagaaacagctcaggccttacatggagaacattgtgccactccctgggatcttcgatcctgatttcatagctgctaatcaagggtcacgtgctaaccacgtgatcaaaggtaccaagaaggaacaagtcgaccacatcatcaaggacatgagggagtttaaggagaagaataaggtggataaggttgtggttctctggacggctaacacagagcgttatagcaatgtggtcgttgggatgaacgatacaatggagaatctcatggagtctgtggatagggatgaggctgagatctctccttcaacactttatgcgattgcttgtgttcttgagggaatcccgttcatcaatggaagccctcaaaacacctttgttccaggtctaattgatatggcgatcaggaacaatgttttgatcggtggagatgatttcaagagtggtcaaaccaagatgaaatctgtcttggttgatttcctagttggcgcaggaatcaagcctacttcaattgtgagctacaatcacttgggaaacaacgatggaatgaatctctcagctccacagactttcagatctaaggagatctccaaaagcaatgtcgtggacgatatggttgctagcaatggtatcctctttgagcctggggaacacccggaccatgttgttgtcatcaagtatgtaccgtatgttgcggatagtaagcgagccatggacgagtacacatcagagatattcatgggagggaagaacacaattgtgatgcacaatacctgcgaggactctctcttagctgctccaatcatcttggatcttgttctcctcgcggagctcagcaccaggatccagttcaaatccgagggagagggaaagtttcactctttccatcctgtggccaccatactcagctacctcaccaaggcaccacttgtaccgccgggaactccggtgattaacgcactgtcgaagcagcgggctatgctggagaatattatgagggcgtgcgttggactggctccggagaacaacatgatcatggaattcaagtgaacatgaagaagcatgaatctaagacctttaattagctcataatttaagagtctttaatttgtgtcgttgtttggtttttatataatgtttttaaattatgaaagcttgtgtttctgagagaccaaagagcttttagtttggtctctgtagggtgtgaagtaacttgtatttgtagtaatccggatgggttggtatattttgcaagtgtgtctaggttggaccataatttcaatatctcttatgattttgtttcatatgtttgtaaaacagcttatcttttgagatatataatcatggttttggttccaaaaaaaaaaaaaaaacccacacgtagctcnnnnnnnnnnnnnnnnnnnnnnnnnnnnnnnnnnnnnnnnnnnnnnnnnnnnnnnnnnnnnnnnnnnnntagaatnnnnnnnnnnnnnnnnnng

SEQ ID NO: 84644 - DNA, 766 bp, Arabidopsis thaliana columbia
  unsure (1)..(766): unsure at all n locations
gtgtacactatagaagagctatgacgtcgcttgccaccccgtacgtaagctgggatcctctagaagcggccgcccttttttttttttttttttttcgataaaaaggatttggctttactttttcaacggataggctgggttgaacgtggaatttgccgggttcattgggccttcgctatatgacaatgacctgacgatttagtggctttcatggtcctcgtgctctggctcctcctttatgatcggagtttcctcaaacaagtgcatgtccactggtgtgcttaacacccactccatggttgccgcctgctctgggaatatgacctcctcgccctctaccttgcctaccaagacgccctggtggtccatgcgcacagttggctcaacaacaggaacattggctgtgttcctagccgagcaaatgagccggatggaggagtgatacacgctagcctgttgcttatagccagctgcaaatttgttggaaaatacacgagtgacacgagatagcatgatggagcgtgacaatgtagagaggatagcgggaacgcacacacgtgcacgagcaaatacacgggaacggtgaattgtcagaataattggctacaactgttgcgtggctggcgcgcaagcgttgtgtggattgagcggacgcatggnnnnnnnnnnnnnnnnnnnnnnnnnnnnnnnnnnnnnnnnnnnnnnnnnnnnnnnnnnnnnnnnnnnnnnnnnnnnnnnnnnnnnnnnnnnnnnnnnnnnnnnnnnn

SEQ ID NO: 84645 - DNA, 781 bp, Arabidopsis thaliana columbia
  unsure (1)..(781): unsure at all n locations
nnnnnnnnnnnnnnnnnnnnnnnnnnnnnnnnnnnnnnnnnnnnnnnnnnnnnnnnnnnnnnnnnnnnnnnnnnnnnnnnnnnnnnnnnnggggattacaatgtgtttctttacacaacaaccaaaccaaataagaacaaattacaaataagaattcctttacaagaaaatatacaaactttaaatcaatatttaataacaaacaaaattaagagtattaatcgaatatctttgtgtatgtattgtctttaaaactatgagtatacgacccgaacaaaatccagttctaccatgggacaggtgacgatgtgggtgacgttaagtctaagaaacttttccagcaagaatcacttgtttcatcatcaagaaacttctcccagtcctctagggaatctgaaccggatgagtgttgagctgtactggggtgggtccaactgggtgtcccggggagagaccgataccggaccagtagatggggtttctagtagttgatcaccatagtcacacggcattaataccgggtctgatttgaatattgaaccttggtggggctacgggctaaccccgagttatattagcatttgaacctctgttttaaagataatttgtactccccgaaccaagattaacgcacgggttttgactttcgcagaggacgtccttacaaaacagtttttatatctaaaggagcgggaactctgataaatcgtcgggaagcgcgagaagcttcaaaagttaaaattggatggttccgcattgcgtagtatatctgatacctaca

SEQ ID NO: 84646 - DNA, 848 bp, Arabidopsis thaliana columbia
  unsure (1)..(848): unsure at all n locations
agatcatgcctgcctacttgaggacgctattaaacttggacaaagataatgaaaggtcttnatgggctctctatctcaaggcccatataagccctagaattaggttgttttttttagcgagtggaaacaactatcaaaataacattaacaaaacacacacacacatacacattctagtacaccattctactctcaaatgtctttttgtcttctttcaggggtttcatagagccttttcttcctaaaccaactcaaacactgaaaattacacatctttttcatttttttattcatcatggggaagctggaacttgatgatctgcagcaccagaaactggagatgaagcagcttcctctttcgaaatggcaacgtagtttgtaggagcagccggcctgttgagagtctcccttctccctgcttcttttgcagaagacctgcttccattctggttggcattcaaagataaacgccggttatgtgttccattggctcctccgttgttagctcggggccccaccgttttcttagcactgaccggccttgcagggcttggcctggggctaaaggcagattcttgctctacatgtggctgttcttgaaccttcttttgttccctcagcctccgtttctccttttctcgttcttgcctaagcataccggactcgtctagcattagctggcagaggaacaccatcgtaggcaaaggacatgctggggttttttttccaaagcccggggtcttgggcaaataaatggtgttcaaaccatgggcagggaaatttttggttaacccaaaaattccgagatctttttttcaaaattcttttttgggaaaaatcaaaagggg

SEQ ID NO: 84647 - DNA, 767 bp, Arabidopsis thaliana columbia
atagaccagctatgactgcgcatgcacgcgtacgtaagcttggatcctctagagcggccgcccttttttttttttttttttctttctaattaattggattgataagtacatattacaactatactaatttagtaattttacattacacatccaacgccaagactcattcatcaactaaactcctatttgacaactgcaattcctccttaaccggactactatcttccttgctatgatgaacctgaaccggtttatacgtataaatcttggcgcaccatagataatacacaagattaacagcttgtaacacagtaatcaaccagtaaaaatactcaagcctccctcggttcaaattgttatccggtaaccaattgctcccatccggtttagcactgaatttatgaaccaaagtcaccacgcaaagtgctcacataggtttccgatcgaaatcgccatccaaaaaagcgccgttgccgtgctcctcatactctccggggccggatcggaggaggactctaaatgcccgtgggacatgaaagcttcagcggctccatggggaccatattggggaaccaaccaaagaaacgggattggaacaatcgtgtgaggtttatcgaggagaccgtgctcaatcgcgacgctctttcgctttacttcgacgaatccggcaactaacgtggcgattatcgagattacgaatccgattcccatacgggggaggaacgtgatgcccttttcgagaccggtgaatttgcgagcgactttga

SEQ ID NO: 84648 - DNA, 739 bp, Arabidopsis thaliana columbia
  unsure (1)..(739): unsure at all n locations
tnnnnnnnnnnnnnnnnnnnnnnnnnnnnnnnnnnnnnnnnnnnnnnnnnnnnnnnnnnnnnnnnnnnnnnnnnnnnnngcggccgcatccacacgtggctgcagacggtttcacatacgaagcagaggctataagagcgtggctggatagtgagcatgatacttcaccaatgaccaatgtcaagctttctcacaccagcctaatagctaaccatgctcttcgttctgcgattcaagagtggcttcaacatcatttgtgaaaataaaatccttcaaaccctcaatccctgttctcttatgaaaaaacgtttttgccttttctgcgggaggcaacagagtaagtgagtaagattagtgttttcagtcttccttatacatatacatacgatctaatcatggatagcagcatatttgtttactttttcaagcatagtgtaagtcctccatatcagtcatatatgaaaaggagaagcctggtgagattggttggtgggtatgtatatatatatatatatatatatatatatgttctgtatgaaaaaaaaagttatatgcttattcggtttgtgtgagaagaactgccactattttgttcttccattatgttcggctcttttaagaacaaagattagcctctaattattggacatgatctcactgatgatgcctttgcttagctaaaaataggatgagtcttacatttttagtcaagactatcgtgtaaaacttgttttcctca

SEQ ID NO: 84649 - DNA, 366 bp, Arabidopsis thaliana columbia
agatgcgcacattggcaaagaacaacgaaaacccgccagacggttttatgtgcccaggtggatggaaagttctggtggattactatgagagcttgactccggcgggtaatggtagactaccagaagtggttccggtgtaagacaaaactgttcgtttcaaattgtaacgtttgtgttgtgaagccttgtagcaacaatcattgttgtattgggagagaagcctatgtataatctggcttgacctttttccaaataaaatacagaagaaaaaaagactgtttttcgtttgcaagataatttacgaaacttgtaatatttgggcctcaaactttgtaccatattaatgaaacgattgtttttacatat

SEQ ID NO: 84650 - DNA, 430 bp, Arabidopsis thaliana columbia
  unsure (1)..(430): unsure at all n locations
cttttctcataaagaatagccgatccaagactagcgaaagtttcaggcttcatgtctctttcttccctaagctgatataacttatgacgaaatacgagtcgctggtacaatgtctggacatcggtggcgagaccggaaagtccgatgacgagatgatcgtggatcttacatattctctgaaaatcggtagcaatggtttgtaattgcacaccaagcctccgatcactagctatagcgaagcaattcttccctaccatagctccgacggcacttccattgtactcgaagatcgacatcggaaaattagggtttactgagtgaagcttcgggagttttcctatcggagaagaaatctgagcaagagaagaaccgtacgcgtgggcggacggatggagccccccgggaaatccggnccggtccctgcaggcgt

SEQ ID NO: 84651 - DNA, 1601 bp, Arabidopsis thaliana columbia
caacaaattcacattcctctctgtttttttgttttcgattctccttcttcaatggcttccatgtccaccgacttccccaaaccaacctctttcatctctcaacctctaacaaaatctcacaaatccgattccgtaaccacatccatttcattccctgcgaattcgaaaactcgtagcttaagaaccatctctgtacgagctggcttaatcgagccagatggtgggaaacttgtggatcttgttgtaccggaaccgagacggcgagagaagaaacacgaagcggcggatttgccgagagtgagattgacggcgattgatttgcaatggatgcatgtgttgagtgaaggttgggctagtcctcttcgtgggtttatgagggaatctgagttcctccaaactcttcatttcaatttgttgaatctcgatgatgggtctgttgttaatatgtctgtgcctattgttcttgcgattgatgatcaacaaaaagccctaatcggtgaatctaaacgtgtctcccttgttgattctgatgataatccaatcgctattctcaatgatattgagatttataaacatccgaaagaagagcgaatagcgagaacttggggtacgactgcaccgggtttgccttatgtagaagaggcgataaccaatgctggagactggctcattgggggtgatcttgaggttttggaacctgttaagtacaatgatgggcttgatcgtttcaggctttccccgtttgaactgcgtaaggagctagagaaacgtggtgcggatgcggtctttgcgtttcagcttaggaacccagttcataatggacatgctcttcttatgactgatactcgtaggagacttcttgagatgggttataaaaaccctatccttttgcttcatccattgggagggtttacaaaagctgatgatgttcctctaagctggcgaatgaaacagcacgagaaggtgctagaggatggtgttcttgatccagagactactgtggtttccatattcccatctccaatgctctatgctggtccaaccgaagtccaatggcacgcaaaggctaggatcaatgctggtgctaacttctacattgtcggtagggatccggctggaatgggtcatcccgtggagaaacgtgatctgtacgatgctgatcacgggaagaaagttctaagcatggctcctggactcgaacgactcaacattcttcctttcagggttgctgcgtacgataagacacaaggaaagatggctttctttgatccctcaagggctcaggacttcttgttcatttctggcactaagatgagagcattggcaaagaacagagagaacccaccagatggatttatgtgccctggaggctggaaagtccttgtggattactacgacagtttgacactaaccggaaacaccaaacttccggaaaagattccggtttaagaccgataaaaccatttatttgtttttgtttctcaacataatgattattccttcttgttgtaagatttagaaagctatatgaacaaaagtaacacaaatcttacatacatataaactaaaaaaaaaaaccagtatgaatctaacttttaatc

SEQ ID NO: 84652 - DNA, 1129 bp, Arabidopsis thaliana columbia
tttttttttttttttttttaatctggaacacttggtacgaaattaaaacagaaacaacaaggtacatagaatgatcgagtactggaacaagataacaactgctatttcttcattttcattgaactctatcaatagcaaataaaacatccgagagaacgaaccacaatatccagtttcagagaaggaacatagttactatgggacgagagcttctacataaccgggttaaggagtataccgaacttggacaaaagcagatatgtgatatcagatcaatccatccttcccttcaggattctctccttcacctcctttggtgttacaacgtagacatgtcctccccacccactaagacaatcgcggtcaactgaagagagaagtgcttgtgaaattgtctcgaatagttcctcagcttccatatctggtttgaacatggcttcacaggcaccatatagagattctgaagcagttcccgagacaacaaaatctttagctaactccttggctccaatagaatccatagtgcaaatgaagggtttgttatcatctcccaatccagcaatcacaggttggcacaagaatgggccaaatcttttctcataaagaatagccgatacaagactagcgaaagtttcaggcttcatgtctctttcttccctaagctgatataacttatgacgaaatacgagtcgctggtacaatgtctggacatcggtggcgagaccggaaagtccgatgaagagatgatcgtggatcttagatattctctgaaaatcggtagcaatggtttgtaattgcacaccaagcctccgatcactagctatagcgaagcaattcttccctaccatagctacgacggcacttccattgtactcgaagatcgacatcgctcgtgccgaattcggcacgagtggcacgcaaaggctagaatcaatgctggtgctaacttttacattgtgggtcgtgatcctgctgggatgggtcatccagtagagaaacgtgatctttacgatgctgatcatggaaagaaagtactaagcatggcaccaggactcgaacgactcaacatccttcctttcagggttgctgcatatgacaagacgcaaggcaagatggctttcttcgatcc

SEQ ID NO: 84653 - DNA, 1855 bp, Arabidopsis thaliana columbia
  unsure (1)..(1855): unsure at all n locations
nnnnnnnnnnnnnnnnnnnnnnncnnnnnnnnnnnnnnnnnnnnnnnnnnnnnnnnnnnnnnnnnnnnnnnnacctacgtcagggcaaatctctatctctctccattagagcttgaagcagccatagcctaacaaaaccttcaacaatggcttcaatggctgccgtcttaagcaaaactccattcctctctcaaccactaaccaaatcatctccaaactccgatctccccttcgccgcggtttccttcccttccaaatccctacgccgccgcgtaggatcaatccgagccggattaatcgctcccgacggtggtaagcttgtagagctcatcgtggaagagccaaagcggcgagagaagaaacacgaggcggcggatttgccacgtgttgagctgacggcgattgacttgcaatggatgcatgtattaagcgaaggctgggcaagtccactcggaggtttcatgagagaatccgagttcctccaaactcttcattttaactcgctacgtcttgacgacggctccgtcgttaacatgtccgtgcctattgttctcgctattgacgatgaacaaaaagcacgtatcggcgagtctacacgtgtcgctcttttcaattccgatggtaaccccgtcgctatcctcagcgatattgagatttataagcatccaaaggaagaaaggatagctagaacatggggtacgacggctccaggtttgccttacgtagacgaggcgataactaatgctggaaactggctcattgggggtgatcttgaggttcttgagccagtgaagtacaatgatgggcttgatcgtttcaggctttcgcctgctgagttacgtaaagagttggagaagcgtaatgcggatgcggtgtttgctttccagctgaggaatcctgttcataatggtcatgctcttcttatgactgatactcgtaggagacttcttgagatgggttacaaaaaccctattcttttgcttcatccgttaggtgggtttacaaaggctgatgatgttcctttagattggaggatgaagcaacacgagaaggttctagaggatggtgttctcgatccggagactacagtggtttcgatattcccgtcacctatgcattacgctggtccaaccgaagtgcagtggcacgcaaaggctagaatcaatgctggtgctaacttttacattgtgggtcgtgatcctgctgggatgggtcatccagtagagaaacgtgatctttacgatgctgatcatggaaagaaagtactaagcatggcaccaggactcgaacgactcaacatccttcctttcagggttgctgcatatgacaagacgcaaggcaagatggctttcttcgatccctcgaggcctcaagatttcttgttcatctccggcactaagatgcgcacattggcaaagaacaacgaaaacccgccagacggttttatgtgcccaggtggatggaaagttctggtggattactatgagagcttgactccggcgggtaatggtagactaccagaagtggttccggtgtaagacaaaactgttcgtttcaaattgtaacgtttgtgttgtgaagccttgtagcaacaatcattgttgtattgggagagaagcctatgtataatctggcttgacctttttccaaataaaatacagaagaaaaaagactgttttcgtttgcaagataatttacgaacttgtaatatttgtgctcaacttgtacatatatgaacgatgtacgattgtttttacatataaaaaaaaaaaaaaaaaaaaaaaaaaaaagggcggccgctctagaggatccaagcttacgtacgcgtgcgtgcgacgtcatagctcttctagag

SEQ ID NO: 84654 - DNA, 768 bp, Arabidopsis thaliana columbia
cgaaccgggccccccctcgaggttgacggtatcgatatgcttgatatcgaattcgcggccgctgtttttttttttttttttattttttatttttttttttttctaagggattcaactgttagcaagtaaaagatccatatctttatcgtagtgctccattatttaatgaaaagggttttgcctattaaactactttctcttactgtttatttgtacctagctaccaaccattagagaggaacttggatcacttcatgggctctggggatcatatgccggttgcaaatccaggcgatggacccatcgtctctgtatctaactcgccagaggccaaatttttctgcaatatccctcccggttgagcaagatctgttccctcaagtaatcgatgagccactgttgagctgccctttgtgctggttcctgaatacctctatctctgccccgggtcctacccaatgcagcagccacccctatggccactgcagatccggccgttccacgcatgacagttgtgttggttaagaagctatactatggctcaagtcaagtataatttgtcccattccagctggcccaaattgctccttattcctttatgcaaaaaataacccaactttcaatgaagattttgttcatttttttgggaaccccaaacgccctttcccaaaagttgtggggtggtcccttatccaggccatttatcggggtgaaaaaaaccccaaatctgtaatctccttttttaccgaacatgttgcctattttttc

SEQ ID NO: 84655 - DNA, 932 bp, Arabidopsis thaliana columbia
  unsure (1)..(932): unsure at all n locations
atgacgtcgcatgcacgcgtacgtaagcttggatcctctagagcggccgccctttttttttttttttttttttttcgaagatagacgctaaaattgaggataacacacattatagacaaaaaagtaaagcaaatcacatgtcaacgtccaaagcattggaaccagagacagtatgtgtggttgtcgacccgacacataatccccaacctcttactgaccggaaagaaaaataactacctgatccaccgacaattttaactcctggcaacattcaagcagcggacggtgcggtcacgtagttgagccggccagcttcagtaagagcggtgatgaacggcttcagattcacgagatcgacctctgtgtccacaacggtaacaggtttcttgtaatccaaggattcgccgccgtaaatgtcccaccattttttcactaacatttttatatcttccctctccatgttcgcttctttccctgtgtatctccacggcttcgaacccgctgcacagtagtgacccacccttcgacttttcccaagcctctacattttccgggctgcacgccaataacatcgcaaggaccgagattgtacactaaaggaatcggctttgtaagattttcttaaagtacatgttcaaaaaatcctgttcagcgaaaggagtcggaggagtgattttaagtgttcgtagtagaacctcgtaagtctcgaggttaggctcgtacaagaacattccggcgttgaagtaaagagccggtggctctccaantccgcttttggccactggactttgtcggggcattgttggcaatatctgatcttgtattgcggcgtgtgactccatgttttctcacagaaacaatccatcaccgcgtacaaatagccatctggtaggtcaaacaagtgatcgatgttttcgtaaacttgaatgtct

SEQ ID NO: 84656 - DNA, 670 bp, Arabidopsis thaliana columbia
ctatcacgtcgcatgcacgcgtacgtaagcttggatcctctagagcggccgccctttttttttttttttttttttttaatcccaaaagatagtaatacaaataaaaaggcatggaccttgttaaacaaagtacgctacgaatacatcacaatacaaatcatgaataatgatcatgatggtaaccatgttcatcatcctgatggtatatcaaagcctatacacttgaaaacacaagtgttcaacgactataatattatttggcttcttctcatcttctttcttgtgaacggatcagatttttctaaagtaatgcaatctctcaattcaaatggccaaaaacgtaagacaacgaagtgagaccaaaaacagagactctaagagtaaaagaaacactctttgacacttcagctatcgatatacaaaacatcatctttcgacaagttcattttcccattcttcctccgcccgctccttcgagctccatctgattctcccctctttctcaagacaaaagagaggtataaatatgcagcttcccattcatcagctgataatgtgctctgatcattgctaccatcacccaaagcaccaagccttctcatgagttcgacaaactctggctttttcatatactcatggacaaactcgtgggagttcttcacaaatacca

SEQ ID NO: 84657 - DNA, 695 bp, Arabidopsis thaliana columbia
agctatcacgtcgcatgcacgcgtacgtaagcttggatcctctagagcggccgcccttttttttttttttttttttttcccgcgcattcaaacactttatgcattagaacttctaatttagaagtataaaacacattgtctgaacaaaatccgtgagtatgcagagaacactagcatacacagtttactgcgaacaaattgcttattggaagtttccgttgcaagaaaaagacattgtagaccaaaggcaatcttcccttgaagcgcaacattgtcttttgttattcatcttattctgtttcgtccaatagccccccttgaaagtagattcaaatgttcatagatctgatcagtagatcagcgtttgtctttgactttattatcagctctgcgttgggtcggtcattataatccacccgccatttagcaacatctgggggtttaccagttgagatatgccggttttcaacacgttgcattgctgtatcgagattcacatcgatgaaccatttctcatcaaacatatctgagatgtctttccaagacccttcttctaacaagatgtaggttccttctacaattaccactttatgctggaggctaacaaagatatcatcttcaactggatccccaactccatgatcaaatgatggcacataaactgagccctcgtttttacagcttccggcacgccg

SEQ ID NO: 84658 - DNA, 682 bp, Arabidopsis thaliana columbia
atgaccagctatcacgtcgcatgcacgcgtacgtaagcttggatcctctagagcggccgccctttgttttttttttttttttttttttactcatcaaggaaaattgtattccaacatcacgtttacagaaacaaatacattttgtttgacaatagcttattctgattaaataacatttaaactgaactatttacaacggaaactagaagaatacaaaaacagcgcggggggtgtgaaatcaccgctttcgcgttgccgtgtttctttctgaataaaaacgttgatcagctgccacgtcatcaccaacgacttttcaaaacgagttccactcaaaaaaatcagacaagacaactaaagtactatttcttctactttccccctggggacttaaaacactatataactgggcccccacatggtattacacttggccatccgccgtggcatacatcctccaccaacccaacaaatccggtcttttaccagatgcgaaacgcgttatcccacccaaaccgggtaccaccggtttctcgacgtcaaataccgatttttcaacagcctcccgaggaagtcggttcctgatgtcctgtgtgtttatcggagacgtgtgagtctcaccccctgacacgtctttgacagcggctttgatcctgaaaataactttgaaactcgccataaaccc

SEQ ID NO: 84659 - DNA, 807 bp, Arabidopsis thaliana columbia
  unsure (1)..(807): unsure at all n locations
gacctctaattcttctcactaaaaatatcaaaagctttcacattacaatatctccctctctctacacaaagctctctatgccacaagtcgatatagaagcctttgtttcttcagtatgcatcggtggctccgaccaccgcaagatcgtatgcgaaaccctcgccgacgactcaacgatcccaccttattacaacaactccgccgttagtccgagtgatttcccaccggaatcttatttcttgtcaaacgatgctcagctagagtggctcagcgacaacgccttctttgatcgtaaagactcacaaaaaggaaactctgggattctcaattctaatcccaactcgaatccaagctcgcaacggttcttactaaaatccaaagcgtcgatcatcggtttgcctaaaccgcagaaaacgtgtttcaacgaggcaaagcaacggagacacgcgggcaagaaccgggtcatcttgaaacgggtcgggtcaaggataaagacggatatttcgcttctggaaccttcttctcctaaagtctcttgcatcggtagagtgagatccagaagagaacgcagccgccgtatgcaccgtcaaaaatcaagtcgggtcgaaccggtaaaccgggttaagaaacccgggtttatggcgagtttcagagctattttcaggatcaaaggcggctgcaaagacgtgtcagcgcgtgagactcacacgtcgacgagaaacacacacgacatcaggagccgacttcctgcggaagcctgtggagaagtcaggtttcgacggcgganaaccggtgggaccccggttt

SEQ ID NO: 84660 - DNA, 682 bp, Arabidopsis thaliana columbia
  unsure (1)..(682): unsure at all n locations
nnnnnnnnnnnnnnnnnnnnnnnnnnnnnnnnnnnnnnnnnnnnnnnnnnnnnnnnnnnnnnnnnnnncttttttttttttttttttttaaatcaaacccaaaactgaatgtgatccatgctactatctaaattgtctgaacatatgatctcaaagtcacttggattgtacaattctcccatctcaaattatctcaaactgaatgcaggaactaaacattcttcctctatacaatcttcttcccctattctatccccgtccttgatgcccagatgatagctacaactaccgcttagacgctcgtctacttgtatttctggtcctgcacaacggttgatccctttcaggtggagctttttcgacatagggagcaatcaaggtctccaattttacccaccacagagcaatcgcagaagttgtttgaggcatcggaggggaagcactctatgatttcccccatcaaagtctgcccttgatcactacagtggccatagccattctgcatggatggccccaacacagtcgacaatcactggcgtaatttcagacacagaggagcttcgccgaagtcttttcacccatagcctatgagctgactttctccatgcaccaatcaaagcttcttcgggcagagatgaactaaatggcatatactgcagattttaatgattgcaactgacaa

SEQ ID NO: 84661 - DNA, 467 bp, Arabidopsis thaliana columbia
  unsure (1)..(467): unsure at all n locations
aaggattcgaagctggttgtttcccaatctgcataagaaatatcgaaacacttccacacaaaatccacgcgctctctcacgctcactcactcgcataacacttgttccttcttcgtctcaatttcaaaaaacgacgatctcttcgatgctttctcttccttcctccttcatttccttctgactctgctcttcttcttcgtcttggatcttcgaatttgtctttgtgatttgagtgttatagaataaagatctgtttggagtggatccattcaagtaattgaagaactcaacgcagaagatggcttcaatatcgcattcatcactagctttaggngggagcttcttctgctttctgcttcaanattacttncggagttcggggcaaatnggggttaaatggggtncccttgaaaaccttngggaggggcnngtgtttnntacccncaagggggnngnctttngggggt

SEQ ID NO: 84662 - DNA, 685 bp, Arabidopsis thaliana columbia
  unsure (1)..(685): unsure at all n locations
nnnnnnnnnnnnnnnnnnnnnnnnnnnnnnnnnnnnnnnnnnnnnnnnnnnnnnnnnnnnnnnnnnnnnnnnnnnnnnnnnnnnnnnnnnnnnaacacaagtcaaaatgggaacaaaagctctcacctttacaataaaataatagagaataactctcaagataacaataataatgaagaaaaaggaccagagcattaacagcgaaggggaaaacacagaatctaatccattccaaagatcctgtacaagaagagaacaaggtcccaaacttttcagacttggcaaaaccgaagggtacatctcatcgggaggcttccagtctcggacaggttaagcagacagagagcacctgaaagaatgttcaaaagaaatcgggtgtttatataaggagcttagcctgaagattcaatttctttcccatgggcttctgaaaggttcctcttcaatcttctcaaccaaatatcggaatctaatgggataagggggcccccatagactgtcaacatagtccgagaatgctttcaaaacggttgagatatcgccgagcttctgctgaatcaatcttttggaccaagaggtctctctccattgaagagctccttcaactgaatccaattcagggaagtctccagaacagaaataaagcatgtatatcaagctctctgcatctgaggcagcacagagt

SEQ ID NO: 84663 - DNA, 838 bp, Arabidopsis thaliana columbia
caagcaaagcaacactttcactaatcctctaatggcagaagacaagatcttaaagaagactccggcggcgaagaagccgcgaaaaccgaaaaccaccactcatcctccatactttcagatgataaaagaggctttgatggtcctgaaagagaagaacggatcaagcccttatgctatagctaagaagatagaggagaaacacaagtctttacttccagagagtttccgtaaaacactttctctacagcttaaaaactctgttgctaaaggtaagctcgtgaagatcagagcctcttacaagctctcagataccaccaagatgataacgaggcagcaggacaagaagaataagaagaatatgaagcaagaagataaagagatcacaaagaggactaggtcttcttcgacaaggcctaagaagactgtgtctgtgaacaaacaagaaaagaagaggaaagtgaagaaggcgagacagcctaagtctatcaaatcttcagttggtaagaagaaggccatgaaagcttccgctgcttgatcactgaggaggaggagaagaagatggaactgtgtgtgaatatgaagaataaggttttttgttgtctctgtaaatgcatcatgactttgttttggtttggtgtggtctcttttgggtgtaagagtaaagagtcttcggatgtataaccagtactaccatgtaatatactctaaatagatagatttttacttgggttgataaaaaaaaaaaaaaaaaaaaaaaaaaaaaagcggccgctctagaggatccaagcttacgtacgcgtgcatgcgacgtcatagtatatctatagttcagttaaat

SEQ ID NO: 84664 - DNA, 833 bp, Arabidopsis thaliana columbia
tatagtgtgaccgcctccggtgccggtccggaattccggggtcgacccaaagcaacactttcactaatcctctaatggcagaagacaagatcttaaagaagactccggcggcgaagaagccgcgaaaaccgaaaaccaccactcatcctccatactttcagatgataaaagaggctttgatggtcctgaaagagaagaacggatcaagcccttatgctatagctaagaagatagaggagaaacacaagtctttacttccagagagtttccgtaaaacactttctctacagcttaaaaactctgttgctaaaggtaagctcgtgaagatcagagcctcttacaagctctcagataccaccaagatgataacgaggcagcaggacaagaagaataagaagaatatgaagcaagaagataaagagatcacaaagaggactaggtcttcttcgacaaggcctaagaagactgtgtctgtgaacaaacaagaaaagaagaggaaagtgaagaaggcgagacagcctaagtctatgaaatcttcagttggtaagaagaaggccatgaaaggctccgctgcttgatcactgaggaggaggagaagaaaatggaactgggtgtgaatatgaagaataaggtttttctgttgtctctggaaatggatgatgactttgttttgggttggggggggccccttttggggtgtaagaagaaaagagtctttcggatgtataacccagtacctacccagggaataatacctcttaaatagagaagaatttttaacttgggggggggaaaaacccgctccacacctatgtgtctcatcaaaaaggggg

SEQ ID NO: 84665 - DNA, 692 bp, Arabidopsis thaliana columbia
  unsure (1)..(692): unsure at all n locations
aggttcgannnnnnnnnnnnnnnnnnnnnnnnnnnnnnnnnnnnnnnnnnnnnnnnnnnnnnnnnnnnnnnnnnnnnnnnnncttttttttttttttttttttaggaaaaacgttaaactcataacaataactctaagctattatcattcaaattaatacattacatatgatatatcaaaccacattctctcatgtttcactttataaccaataaatcaaatattagcagcagaagaagaagaagcttcctctaacttcattctgcgccgagtttgcatcggtaggaatctgatctttgtctctaacagtcatcaatgagcaagttcccggcgattctggtggcaagaccgtgttttccgacgagaaaacacgtttaatggccggaggaacaagctcagttggatgagattgtggagaggcaacgtagaagcatttgaataatccctgtgaagtttggtcgatcgtttggaccctctttccagcaagatgttacaaccatggcgaaatccttgggtaaaccgtctgcgcttggcctcacgtccttgaatgcagcagcgtaagcggcttggagatttgacatgccttcaaaaggtaatttgttgtggataagctcccacaagacaatggcgaagctgtatgcatctaccttatggttatagtgttttttctcaccatgcctcaacgtgaccgt

SEQ ID NO: 84666 - DNA, 671 bp, Arabidopsis thaliana columbia
ctatcacgtcgcatgcacgcgtacgtaagcttggatcctctagagcggccgccctttttttttttttttttattcaaatcgattcgtttagtatgaagtatgggaaatgagttaaaaagtcattaatctcaaccttaataaaacaagtatagacacattccccaaaaggcaaaaatgggaggctaaaatgttatcattatgatgatctctcaaagagacctttgacataaaccatgcctttctcattaagctgaagctctttcctcatttcttcgacctgaacatcatctccttgaaccacaatctcatccaatctcccttttgatcccaccatcatcttcacttttatctcctctttccctcgacgcccttttccagtaatacactcctgcgaggggactaaggggaatgatgaggaaccaattgggttccaaaatcaggaactgtaatgggtaagacaggaccaacacttgctaggcttatacatggacaaaacgtaagcagagcagcttgtcctctacttggaaccatctttccttcaaatgtgattgtttctccacgatcagtgatattgaaattcttccttgtgaagaaagatagaatctctccagctacttgctttggctccttcttgacgtcattaacaacaaacgtctttctcactatctttc

SEQ ID NO: 84667 - DNA, 775 bp, Arabidopsis thaliana columbia
  unsure (1)..(775): unsure at all n locations
ccgtnnnnnnnnnnnnnctatgacgtcgcatgcacgcgtacgtaagcttggatcctctagagcggccgccctttttttttttttttttttttttaatgttgggagataacattaaaatgtgacttctcatgttatgtagtattttctaaagtaagacagtttcctacttccgtggaaagtggcttcgagttcttggcataatttgaggaaatcttggtaattttctgtcagggaacatggaggaggtagctggagaagaagtaggtaatggtggattaatgattggtcttggtttgatttctttgatctcaactacaacgcaatccgatgtcagaaacgtttgagccactgatgaagcgtgttccaagcaacatctcacaaccttggttggatcaattataccagccaacatcagatcttcatattgattctttgcagcattgtaaccgtacatggtgtttttgttcgataagaccttttctatgacgatattgccatttgtgtctgcgtttttggctataagtcttatggggtagctcaatgctttcttgaagatttcagctccaatcttctgttctgtgttggcaagggtctctttgattctgtccacttttgtagccagtcgcaagagggcgcaaccaccaccaactacaatcccttcttcaattgctgacttagttgcattcagggcatccttcaaccttttacctgtttatcccttcaactcaactttgtgttagtgcacctacctggattattgcaatttccaccagac

SEQ ID NO: 84668 - DNA, 822 bp, Arabidopsis thaliana columbia
  unsure (1)..(822): unsure at all n locations
atgatacttccgcctctnnnnnnnnnnnnnnnnnnnnnnnngaatgttgagacgaattgaaaaggaaccagaacaactactaccacgcgtccgcgatttcgccgggaacggagaagaaaaccctagatatggcggagaagcttgcgccagagaagagacacgatttcattcacaatggtcaaaaggtatttgagtgggatcaaaccctggaagaagtgaacatgtacataactttgccgccaaatgttcatccaaagtcattccactgcaaaatccagtcgaaacatatcgaagttggcatcaaaggcaaccctccctatctcaatcacgatcttagtgctcctgtgaagactgattgctcgttctggactctagaggatgatataatgcacattaccctgcagaagagggagaaagggcaaacatgggcatcaccgattctgggacagggtcagttagatccttacgccactgatcttgagcagaagcggctcatgctccagaggtttcaagaagagaacccgggattcgacttctcgcaagctcagttctcgggtaattgtccagatccaaggagcttcatgggcggtattcgttctgactaaataaataatagtcccactcttgttgctataatagtatgtccattataacaaactcaaaagtcaccatgacttaaacaaaatgtctcatgtctcataaataaaccccctgctttttggttttaataaaaaaaaaaaaaaaaggcggccggttttaaagattccaggctaacgtaggcgtgcatgcgacgtcatagtctttctatagttcacctaaatc

SEQ ID NO: 84669 - DNA, 802 bp, Arabidopsis thaliana columbia
  unsure (1)..(802): unsure at all n locations
ccnnnnnnnnnnnnnnnnnnnnnnnnnnnnnttagcaccgaccttccgggtcgtaccactcttaaccattaacaatgtcgtctccggcgactactatcaccttctttttcttcttcactctctcatccttcttctacatcacttcttcactccagaacaacaacaacaacaacaaacacacagcaaccgttaactccttaaatatcccctccgccgcggcggagattacgctagtaaacccaaagcttccgccgcggagtctctccctcacatcctccaaaaaattcgaaggatcttcaaatctagtccacctccgttaccacatgggaccagtcctctcatcttctccgatcaacatctacgttatctggtacggacaatggtcacgcccacacaaatccctaatcagagatttcctcaattctatctccgacgctaaagcaccttctccctccgtctccgaatggtggcgcaccgcttctctctacacagatcaaaccggatccaacgtctctagatcccggttaatcgccggagaatactccgattctaaatactcccacgggcaacaccttacttcgtcttacgattcagggaagtcattcgccttccgccggccagatccggttcccctttccgggtgggatcattaaaaaacgggaatgtattctagtttcttgaccgttcacaaccgacgttccacgaatggccaaggaatttttttggcccgcggcccaggttttggtagggaattttccaacctaatttttcaacctttttccccgggtccggaatggggttt

SEQ ID NO: 84670 - DNA, 1799 bp, Arabidopsis thaliana columbia
  unsure (1)..(1799): unsure at all n locations
ttcgtccgcccacgcgtccggtacggcaacacaaaccaagagagtgtaagttaagcgacatgtgttagagatatccggagatctcaaccgttggattctttctccttcaaatcaaattataaatcccatcaaacagagagagagagagaagaggaggagaattcgaagaataaaagataagaactttgacgttttgaagcttaaagcttgaaacttgtttcatccatggcggctcgtagagtgtcttctcttttatctcgatctttttcagcttcctctcccttactgtttcgttctcaagggagaaattgttacaatggagggatcttaaggagatttggaacctcttctgctgctgctgaggaaatcataaacccatctgttcaagtttctcacacacagctcctcatcaatgggaactttgttgactctgcttctggtaagacgtttccgactcttgatccgaggacaggcgaagtcattgctcatgtagctgaaggcgatgctgaagatatcaatcgagctgtgaaagctgcaaggacggcctttgatgaaggaccttggcctaaaatgagtgcttatgaaaggtcaagagttttgttgaggtttgcagatttggttgagaaacacagcgaagagctcgcgtctctagagacatgggacaatggcaagccttaccaacaatccttgaccgcagagattcccatgtttgcaagattgttccgttactatgctggatgggcggataagattcatggactaacaattccagctgatggaaactatcaagttcacacattacatgaaccgataggtgtagctggacagatcataccgtggaattttccacttttgatgtttgcttggaaagttggtcctgctcttgcttgtggtaacaccattgtcctcaaaaccgctgagcaaacacctctcacggctttctatgctggaaagcttttccttgaagcgggtcttcctcctggcgttctgaatattggttcgggattcggtgcaacagcaggtgctgccctcgcgagtcatatggatgtagacaagcttgcttttacaggatcgactgatacggggaaagttatacttggattggctgctaacagcaatcttaagcccgtaactctggaacttggagggaaatcaccgttcatcgtattcgaagatgctgatattgataaagctgtagagcttgcacactttgccctcttcttcaaccaggggcaatgttgctgcgcggggtctcggacatttgttcatgagaaagtgtatgatgagtttgttgagaaatcaaaggcacgcgcattgaaacgtgttgttggtgatcctttcaggaaaggcattgaacagggtcctcagatcgatttgaagcaatttgagaaagtgatgaagtacataaagtcagggtatccgaagcaatgctactcttgaatgtggtggtgatcagattggagacaaaggttacttcatccaacctactgtcttctctaatgttaaggatgacatgcttatcgctcaagacgagattttcggtccagtccaatcgatcttgaagttcagtgatgtggatgaggtgataaagagggcgaacgagacgaagtacgggctagcggcaggggntttcacgaagaatctggacacggcaaacaggggttcaanggcntttaaagctggtaccgtatggggtaactgcttcgacgnatttatgcancaaccatttggtggttcaaaatgantgggattgggnaanaagccttcagcccaaatncctgcgtcagnngngcnccgtc

SEQ ID NO: 84671 - DNA, 658 bp, Arabidopsis thaliana columbia
  unsure (1)..(658): unsure at all n locations
attggnaccaaggttcttcacccaaccntctgtctcccctaatgttaaggatgaccttgcttatccgctcaagccgggattttccggtcccagtccaaatcgatcttgaagttcagtgatgtggatcgaggtgataaagaggccgaaccgagaccgaagtacgggctagcggcaggggttttcacgaagaatctggacacggcaaacagggtttcaagggctttgaaagctggtaccgtatgggttaactgcttcgacgtatttgatgcagccataccatttggtggttacaagatgagtgggaatgggagagagaaaggcatatacagtctcaataattacttgcagatcaaggcagtcgtcactgctctaaataagcctgcctggatctgatctctggagtgtggtttcagcatcataaatgctcaaacaaaagaaatagactctataaagttacaatagtaataattaaggtcatggtttgtaatttgagtaacggattgtgatacttctaataaatttttcattgttgtttattcctcacagagctgttgtccccctgccatttctcacaaaaaaaaaaaaaaaaaaaaagggcagccgctctagaggatccaagcttacgtacgcgtgcatgcgacgtcntagctcttctata

SEQ ID NO: 84672 - DNA, 447 bp, Arabidopsis thaliana columbia
ggcagccgaaccctagctttcataaaattttcattcatcatcgttcttgcttcttgctaaaggccttgccttgtgcttcctcgtcctatctctcttacctccgtaatttgttcgtaagagaagtatcgtgatgggtactgagagaaagaggaaaattagtctgttcgatgttatggacgatccgtctgctccggcgaagaacgccaaaaccagtggtcttcccgacggcggaatcaacagtctgatcaataaatggaacgggaagccttattcacagagatattatgacattctggagaaacggaggactctacctgtctggctgcagaaagaggagtttctcaaaacgttgaacaacaatcaaaccctaattctggttggtgaaaccggtagtggtaaaactactcagattccacagtttgtgatagatgctgtggatgctgaaac

SEQ ID NO: 84673 - DNA, 729 bp, Arabidopsis thaliana columbia
  unsure (1)..(729): unsure at all n locations
nnnnnnnnnnnnnnnnnnnnnnnnnnnnnnnnnnnnnnnnnnnnnnnnnnnnnnnnnnnnnnnnnnnctttttttttttttttgagttaaaactggaccatgtccattgacagacatgatttcatcttgtatatgccaaattgagatttggttcctggtaccgtacaattatactagtgtctctccttgtaactggttcgttcttataacattaaagtagagtgataatggtaaaaatggtgtctctgaaactcgaattgtattttgtatcgttgcatggtaagcgacaagtgacctatcttctccgcttcgattctttacgcatttctgcaaagtaattctcaagattctgcttctcccacagccttttctgcaccagatcttccttcctatattcatctagattagcccatgcgtcggcaggcacactaagtgatcttcgggttaggtatgatgcgtcttcccatgaataaggagctttcttgaccttatatctccacacccaactgctgtaccatactagaagcttaatgatagtgtatggtaggagaatgaatctaacaccgagaagttcccagaccgatggtttttcaactccttttatttgtaaataaagttcgttgcttaactctttctggaggttctggtcaatttggtttgaacccttttttttggtacttactccacctgggcgttcaattctaaagccttgagcttattttttgtagc

SEQ ID NO: 84674 - DNA, 614 bp, Arabidopsis thaliana columbia
agctatgacgtcgcatgcacgcgtacgtaagcttggatcctctagagcggccgccctttttttttttttttttttttcaaagaggcaaaaagattttatttgcatatgtattacaacactttaccatcatctatatactacttttagttcatattataacttttgagctttacaaatgctacaaacagagtgttaagagttcagagatactcaacagggaaaccaacgacgggttttatctcagaggccagggaccgtagctcactcacttcattgtctgtcagactccaacctatcgctccagcaaactctttggcttgttctgcgttcttggctcctggggaaggggtatcacggttccccttgtggccaccaaccacgttcaatgccgaactggggtggggagttttgccggaagtttccacccaattgggtttgattctattcaacagggggttgaagctttgttcaagaactcacgccgtattaaatgcgaaccccgagggaccctgagggggtgggggttctttttggggggtggttttttaaccccaagtttaggaggccacccctttggaagccggaattgggggggggaaaatttattggcccaa

SEQ ID NO: 84675 - DNA, 766 bp, Arabidopsis thaliana columbia
  unsure (1)..(766): unsure at all n locations
nnnnnnnnnnnnnnnnnnnnnnnnnnnnnnnnnnnnnnnnnnnnnnnnnnnnnnnnnnnnnnnnnnnnnnnnnnnccacgcgtccgcgtcgttgtctgggaatcggtgacttttgaatctttgcgactctcttgtagtgataaattgatcgttatctactttgatactctccggtcgtttttctccggtgctggagatccgattccttatcttttctgtcttggctcgagatccgagccaagcagtaaagaagacgactttgtttcacgatttggaatttgattcctgcgatcacagatggcatcgggtgagggaattttgacggatggacagtggaaaaagcttgaaatagcaactcataattctggaagtttgtcatcatcgcctaaatctcatactctctttgctgatctgaacattaagtctcccactggtggcaaaggaccagttgctgggattcctaataggcatgtgcgacgtactcactcagggaagcatattcgtgttaagaaggagggtgctggtggcaaagggacttgggggaaagcttcttgacactggatgatggtgacccctggaattgataagaatgatcccaattacgaaatnggagaggacncatatganggcttgttgatccccgggntcaaacccgtggaaggttccaaaaagcngnagttcccncattgggaaantttncccggggggtnnaaanggggggnttccccnggganttggtcaagggaanccccttntcccaaggggc

SEQ ID NO: 84676 - DNA, 610 bp, Arabidopsis thaliana columbia
  unsure (1)..(610): unsure at all n locations
atcttcttcatcgatttctctcttccaaatctcccaaaagatgtcgaaccctagagttttcttcgacatgagtctcagcggtactcccatcggacggatcgagatggagcttttcgctgatacaaccccaaacacggcggagaatttccgtgctctctgtaccggcgagaaaggaatgggaaagctaggtaagccacttcacttcaaaggatcgatcttccaccgtgtgattcccggattcatgtgtcaaggaggtgatttcaccgccaagaacggaaccggtggtgaatcgatctacggtgctaagttcaaggacgaggacctttatcaaggaagcatacaggagctggggattccctcaatggctaactctggtcctaacactaacgggatctcagttcttcatcttgtacccgtaaagacgtcgtggttagatggtaagcacgttgtttttggcaagttgttaaaggtctttccccccgtagaggcggtttagnaagttggnctnnttttngaaannttccaaagtggtnccacantggtttgggaactttttaggcttgttgnaantggncttncntttttgnaaangggctttcttggttctcgc

SEQ ID NO: 84677 - DNA, 893 bp, Arabidopsis thaliana columbia
gcaggtaccggtctgggattcccgggtcgacccacgcgtccgatcttcttcatcgatttctctcttccaaatctcccaaaagatgtcgaaccctagagttttcttcgacatgagtctcagcggtactcccatcggacggatcgagatggagcttttcgctgatacaaccccaaacacggcggagaatttccgtgctctctgtaccggcgagaaaggaatgggaaagctaggtaagccacttcacttcaaaggatcgatcttccaccgtgtgattcccggattcatgtgtcaaggaggtgatttcaccgccaagaacggaaccggtggtgaatcgatctacggtgctaagttcaaggacgagaactttatcaagaagcatacaggagctgggattctctcaatggctaactctggtcctaacactaacggatctcagttcttcatctgtaccgataagacgtcgtggttagatggtaagcacgttgtgtttggacaagttgttaaaggcttggacgtcgtgaaggcgattgagaaagttggatctgattctggaaagacttccaaagtcgttaccatcactgattgtggtcagctttcttagatctgagtgagaaagtgagagactttgatctttatgagtaataatggtgtcttttgctttcggttgttcttcctcttaccttaatggattattctgtttagggtttgagttttcgtttcagagtttgtaacaaaacccttttgtgttttctggggtttgaaataattatgagcttacccaattgcttctttgtgtttttgcttctatgaacaagtagtaactgattcgtcttctgattcttcaactgaatcgtgaatcttaaaaaaaaaaaaaaaaaaaaaagggcggccgc

SEQ ID NO: 84678 - DNA, 940 bp, Arabidopsis thaliana columbia
  unsure (1)..(940): unsure at all n locations
aaggcggccccctagtgtgtcctttgcccggctccttagtcggtgatttgggttagggaaattcccagaagcgttcttgttccaatttaaaccccctaagaaagtgccccaaggaccgtcgaattcgggcaccccggccccttttaagatttttttcccatttccaaagatttaccataaggttttcgccaaagttaacgggccccatggagggttgaaggaggttttgctgatacaaccccaaacacggcggagaatttccgtgctctctgtaccggcgagaaaggaatgggaaagctaggtaagccacttcacttcaaaggatcgatcttccaccgtgtgattcccggattcatgtgtcaaggaggtgatttcaccgccaagaacggaaccggtggtgaatcgatctacggtgctaagttcaaggacgagaactttatcaagaagcatacaggagctgggattctctcaatggctaactctggtcctaacactaacggatctcagttcttcatctgtaccgataagacgtcgtggttagatggtaagcacgttgtgtttggacaagttgttaaaggcttggacgtcgtgaaggcgattgagaaagttggatctgattctggaaagacttccaaagtcgttaccatcactgattgtggtcagctttcttagatctgagtgagaaagtgagagactttgatctttatgagtaataatggtgtcttttgctttcggttgttcttcctcttaccttaatggattattctgtttagggtttgagttttcgtttcagagtttgtaacaaaacccttttgtgttttctggggtttgaaataattatgagcttacccaaaaaaaaaaaaaaaaaaaaagggcggccgctatagaggatccaagcttacgtacgcgtgcatgcggcgtcatagtncatctatagtgc

SEQ ID NO: 84679 - DNA, 806 bp, Arabidopsis thaliana columbia
  unsure (1)..(806): unsure at all n locations
nnnnnnnnnnnnnnnnnnnnnnnnnnnnnnnnnnnnnnnnnnnnnnnnnnnnnnnnnnnnnnnnnnnnnctttttttttttttttttatttaaaaggacatattgaaattagttttggataaagttttatttcgttacatagatgttcatagttgacaacatcggaatcgataagtattttaaagtagtaaaagatacgtgaagccatgcatgaacaaacttctgtagcttaggaagatatcattggagagaaatatactcccctagcgtcaaaagacccaccatctcttccatggaaccccctggtaacattccctttaggctccaacacaaatttgggcccaatggccaaatccaaatgtctgagagatccccccttttgccgtttttgaaagtcaaatgccgtaaggacccaaaataggttcccctcactgatatggccggtatgtaccctccacagatgtcatatattcattcggaaagtccacagccaactcctgcggtcctccattcttcatcccgtgataacgtgtcaccacttggccatcttggtcataggcaatggtcatactccttatatgagtttcaggaaaagtaacatacacctttcttacaccgtcgaaattaggaccatcatcccaatattcccctccgggtatgcccccctggggttctgatttggtaggagcagtctttacatatgcaccaagagatccggantacgccaagcagatccatggaagccaacgatgacttttccatcgactccaagtgaaaacttagtacccttttgatatccaataaat

SEQ ID NO: 84680 - DNA, 599 bp, Arabidopsis thaliana columbia
gagctctgacgtcgcttgcacgcgtacgtaagcttggatcctctagagcggccgcccttttttttttttttttttttttttaacccaaagattcaataagcataacaataatcgatcatcccaaacaaatatgtctttagaaagtagagatctcaacttctcaactttatccccattataaaaaaggtctccttgaaaacatgcattccttaaacaaagtcttccactagtagcatgttgttctctagatagatagatatttcttgcttaatcgatggataggcgtggaacacaaaagtccacaagcagcacagatggccctacgcccgccaaataaaacatcctgctcaaagccactttgacaactacaaacttcttcttgtaccataccttcactattgccatggactttccttggatcttctctgttccaactactatcccatctctaagtccaacgtagcgcgcatactcacctgacgaggcacagtaaattgcctaacaccggacgcgtgggtcgaccccggaattccggaccgggacctggcagcgtaccagcttttccctatagggaggtcgtatttaaaagcttggcggta

SEQ ID NO: 84681 - DNA, 688 bp, Arabidopsis thaliana columbia
  unsure (1)..(688): unsure at all n locations
attacaagatgatgattttctatttttatgatcgggcataagcgtacaattaatcatcatgagacatatatatatatatatatatatatgnncaacaacaacaacaacaacaacaacaacaacaacaacaacaacaacaagccacaccttaagataagatgaaatgaagaccgagatttatttataatcagcagcatgagataatatctagtttaaaaagagccaaaacaatatcatccaaacccctaaaacaccgggatggagattgggttggtgatgatngatgaaggggatgatggcccaagggggtattaaggtncccgggaaatccaggggggtttccccggacgcggtcaatcccctgggaccattaccctaaaccccctcaacgntgacaaggggancgtgattggccctttttgagcaaaaccaaactcttcttcagcttccttcaagagttgtccaaacaaaggatgattaaagtacataacgggaatcacaaatctctcttgctcttctccttgtcctaccttcactgccaaacacccttttggtaccttttcatgatcatgctcatgatgatggagacgtgggatgtggaagctccagtggctcatgactttgtctccgttacccatgggccgataatattagtatagataatatatactatggtttagttagtttg

SEQ ID NO: 84682 - DNA, 810 bp, Arabidopsis thaliana columbia
ttcgttacactctagacagagctatgacttcgcatgcacgcgtacgtaagcttggatcctctagagcggccgccctttttttttttttttttttttttttttaaaacgaaaaaaaaagttctctattcatgtgtacatttaggaaggaacacattgcataaattacataaacaaaaaggaactaatatacacgttaaaaataaaccttaaaaaaatgaaaatcaagaagatcgaaacatttggtcgaggatgatggtaagtgccatggccacacgaggttccatctccgattcaacgataagcttatagacatttttgccaaaggcaactcctccgatcaccgtttctttcctcttgatctccgccgttttcttcttgttcctcctctcatccaatattttgcagcttctttgaccgtaagatccttctatttcgaacaacaccgtcttctttgcgctaacccacgccaagcttttccggataagatattatgctaacgttctttctcgccgggaatattggatctctctttgtttctccatcgcataccatccagcaatcttcaagactcaacttcttgcggcaaatggaaaggaggggaaagccggaagcatccctaaggaccatgtttgtctctaggacaattcatgtagtttgcaactttaaagacaagctctccaatgcgcgtgtaaaaccgtaatcccctccaatttgaagaaaaagggactttttttcacaccggtaaaaaaacactggctggtttttgttattaaaacaaaaccttttttttcgaaatggtgctttggggaa

SEQ ID NO: 84683 - DNA, 963 bp, Arabidopsis thaliana columbia
  unsure (1)..(963): unsure at all n locations
cacgacgtcgcatgcacgcgtacgtaagcttggatcctctagagcggccgcccttttttttttttttttttaaacaaaaaaagtttattgcaatatagtttttacgtgattcacaaatattaacaaacacctttcacaagattcacatgaaactaccaaaacattacaaaataatacaaagttttactcagaagaaaagctttattgagaagaagcacaaagaccacccctttttttttgctgttctgtaattatgagttttgttttaacccactgatccttcaagcttgatgctcataagctggttaacttcagctccaaactcatcaggtaacttgttgaaaacatctctgcagaaaccagagatcattgccgctaatgctctctcgtgatcgattcctctctgctggaaatagaatagctgatcttctccaatcttagaggtactcgcttcgtgctctactttcgccgatggattctttacctggatgtaaggataggtatttgcagctgctttgtctccgataagcattgagtcgcaagtcgaagtatttttagcaccctcagctttggactgcacctgaacaagaccacggtaacaatttctcgaatgcccggccgaaattccctttgaaatgattctacttttgggattctttcctttgtgaatcatcttagtccctgtatcagcttgctgataggtattagtcaatgccacggagtaaaactcgccaacagaatcatcgccttctaaaaccacgctcgggtacttccaagttatcgcagaccctgtctcaacctgagtccacgagatcttggaacgatccccagctgcaaagaccacgctttgtgaaaaaattataaatcccacctttaccttgttcatccccagcataccaattctgcaccgtgagtacttaatctcagtccttcccacaatagagctcaaccacagcanatgag

SEQ ID NO: 84684 - DNA, 775 bp, Arabidopsis thaliana columbia
  unsure (1)..(775): unsure at all n locations
tnnnnnnnnnnnnnnnnnnnnnnnnnnnnnnnnnnnnnnnnnnnnnnnnnnnnnnnnnnnnnnnnnnncttttttttttttttttttaacaaatatttaagacattaatcaagtaattaaatggaggacaaattgtgtgttacaatcttcaagaatatacaacttcaggaggatcttttagacaaacttataagtaataacaggtaaaactaccaagaaggggggcctatcctcaaatttacattactcgatacaaatgcaaaagtaagaacagacagaagaagaccagagtattacttgatgtcgcgaagctgccagaagcttctaagattgatctacatagacgctgattcgatcttctcgataacttccagccgcgttttccttttccaacctttcatggtggctactaaattcaccagtccaacgacctgtgcttttggatattccggatgagcccttgcccagtgaacatattccgtctctggcagatagtacgccttgataaatgtttcgactatctgtaactttggcttcacttttgttggcacaaagtgctgtaacccatttattagaacctgaagatctaatgacatgagaacacgtccttcatcagtacatctttttattcgagataagccttcaaccagcatctccgcaaatatttcaactccatattcaagtaggaggttttggacctcctgtggaatgcctccatgagcaagccttgttttgtagtgtttgaattccccgagcatnaaatcaacatnaccca

SEQ ID NO: 84685 - DNA, 802 bp, Arabidopsis thaliana columbia
  unsure (1)..(802): unsure at all n locations
nnnnnnnnnnnnnnnnnnnnnnnnnnnnnnnnnnnnnnnnnnnnnnnnnnnnnnnnnnnncttttttttttttttttgtaaagataaaaacttgaagaacagagcatttgttggctggaaaaaaacagagaggtttaaattaagaaaagtcgtaaacattgttctcctcccctgccctcaaatctcacagatattatgactgcgggtttatctgccggagtgtaactcatgtaactcccacgatggaattttccggctaagaaactcggaaataacgttggcctccaatatcttcaaggcttcttcattcggcaccgacctcggtgtcttgtactgactcacagaagagcctctagacagaaagaagttcatgagctcgtcaaaagcgccaggcttaacaaccttaaatctcaagggggccccaatgatcttatcattcttccggcctttttctgtatacagcatcgagaagactccctcaacagtgaagcaagcattcttccataacatcgcggttaggttcaaacttggcgtccttgactttgctcccgagttcccaatagagtacatagtgtcctggaaacgaggacgaatctacacggctagtgaaatccatgagcatcaggtcatgtggctcaagcaggagctttgcgtttgtcacctgccttgaggaggtcgtcttcgtaggtcttgtccatgtcgatgttcagaacaactttctggcttcccacgaaaaaaaaatgtggcgcattgttgtagaaaccagtcgctcttaaaacgtcccccacacggtacctatata

SEQ ID NO: 84686 - DNA, 744 bp, Arabidopsis thaliana columbia
tgacttcgcatgcacgcgtacgtaagcttggatcctctagagcggccgcccttttttttttttttttttttttttttttttttctttttttttttgtaaaaaacatgtttaacactctttacttctgtgtggccttaaatttggcaaaaaccacaaaaaatttgacctttcaagacacaagaatttggctccgtgagaaatagactcgaggacaatgaagtaagccgagaagtgttaccaattaataccacatgtgcattttgtttagagagatagcttccaatcttcctccagcatacactgctttgatccccaagctcttcctctatcccgtagcaactggttatacttcatagtacgttctcctctgcaaggagcaccagctttaatcacacctgttgcgagacccacagataagtcagagatgaaagagtcctctgtttctccacatctatgagatgtcaccacaccccactgggcatcccttgccattttcactacttcaatggcttctgttactgtaccaatctgattcaccttgagaagaagagctttacaagaagactcctgtttggcacccctcaactcgttttgaattccgacccgtgggtcgacccggaaatttcggaccggtacctgcaggcgtacccacttttccctattgtgagtccttattaagaacttggcgttaaatctgggtcataacctgttttcctgtgtgaaaattgttttcccccttcccca

SEQ ID NO: 84687 - DNA, 1079 bp, Arabidopsis thaliana columbia
  unsure (1)..(1079): unsure at all n locations
cgccnnnnnnnnnnnnnnnnnnnnnnnnnnnnnnnnnnnnnnnnnnnnnnnnnnnnnnnnnnnnnnnnnnnnnccacgcgtccgattgatctcgctaaacagatgcttcaggtgcaaccaaactcatacgcactagtggtgagcacagagaacataaccctaaactggtacttaggcaacgaccgatcaatgcttctatctaactgtatcttccgtatgggcggagccgcggtacttctctcgaaccgctcctctgatcgcagccgttcaaaatatcagctcatccataccgtccgtacccacaaaggagctgatgacaacgcatttggctgtgtttaccaacgagaagacaacaacgcagaagaaaccggcaaaatcggagtgtccctctctaaaaacctaatggcgatagctggagaagctctcaagacaaacatcacaactctcggaccactagttctaccaatgtccgaacaacttctctttttcgcgactcttgtggcccgaaaagtcttcaaagtcaagaaaataaagccttacattcctgatttcaagctagctttcgagcatttctgtatccacgcgggaggtagagccgtgctcgacgagattgagaagaacttggatttatccgaatggcacatggagccatcgaggatgacgttgaaccggtttggtaacacttcgagtagctcactttggtatgagcttgcgtatagtgaagctaaaggaaggattaagagaggagataggacttggcagattgcctttggatcgggttttaagtgtaatagtgcagtttggaaagctttgagaacgattgatccaatggacgagaagactaatccatggattgatgagattgatgactttcctgttcaagttcctaggatcactcccattacatcgtcgtagtgttttaaattcttttggagaactaatttgttatgttttattaaatgtaataacttacgtgatttgatatttttttattatcttaatatatatggttgcctttttnnnnnccaccttaccnccaggnngcagccgctctagaggatccnagcttacgtacgcgt

SEQ ID NO: 84688 - DNA, 962 bp, Arabidopsis thaliana columbia
  unsure (1)..(962): unsure at all n locations
atttcnnnnnnnnnnnnnnnnnnnnnnnnnnnnnnnnnnnnnnnnnnnnnnnnnnnnnnnnnnnnnnnnnnnnnnctttttttttttttttgtccaaaaaatataattcagatttggtatttagattctatgcattacaacgtggaaacgagatacgtaaatacccacatacaaagatacattatattgttgtagcttgaacatcatcatcaaatctaatcgggtaaataaacatcggatttgaagtgaggaagaagatatgaaaagaagagctataaagaaacgaaatttggctaacgattgaacgcaaccgaaagagcaacaccaaggacaagccatgctccaatgaagtatcccaaaatcctcgttggtcctacatcttccggttcctgaggaggtggctcttccctggatggttccatgatgtcaacctcaaatggccacacgtaccgttctgctttttcgcttcttgctagactccaatcgtacattcttctctcttccacggtcgacaatatcgtatatgactctttgataagatccatcttggtcttgagttgttcttcatctagtccttgttccttcaactctttaactctttctttgtaaccaattgtaacctgatcataagaacaatttctgaaaatcccaagccgtccataatgatcaacatctgtaattggaaggccacgtagcgcgcgttcgacgttgagagcggatattaaagatggagactctttcggtgcttcatcaacggcggtgctagatccacttcggtttctgcctccgccgatacttcgctggagttcctagccngcgaananataatccgcttcgtgttgatagttggcttccatgggaaagagnacgtgcttggtacgtgatggaggantgattcaccgggaatgtggactaaagatngttgagttatcgtcgataaggaanccatagctccaaggttt

SEQ ID NO: 84689 - DNA, 383 bp, Arabidopsis thaliana columbia
  unsure (1)..(383): unsure at all n locations
ccatttggtnatccgggaaggtagtgncagtattgnatntgntgtaccaaagtcgaagctgaaggaatccagagtggaactcctaagagtaaagtggtgattgtagacagtggtgagcttcccctgtaactcaacaactctagttttctccatctgatcatccattgatgtgagctctagtgtgcttgatgacttttgtgttaaaacgagtgtcttggtttctttatgaaagattctaccggctttatttctttcgtctgctttctagctcgagctatgtctgactttatacacaaatgtctttcagtagcaaaaattctgcacttatgccgttttgcattgtcgacatttgttgtatttatagaagttacacgataatatat

SEQ ID NO: 84690 - DNA, 908 bp, Arabidopsis thaliana columbia
  unsure (1)..(908): unsure at all n locations
nnnnnnnnnnnnnnnnnnnnnnnnnnnnnnnnnnnnnnnnnnnnnnnnnnnnnnnnnnnnnnnnnnnnnnnnnnnccacgcgtccgtacggctgcgagaaacgacaggggactgtggagaaacactttagcacggtgcgacaagatggcgagctcagtgacgctgcttctatggagtcttcttcttctcggtacactaagcgctattcaggccaaaaagtctaaggaaaacttaaaggagatcacacacaaggtttattttgatgttgaaattgatgggaaagcagctggtcgtattgtcatgggtctatttggcaagacagtccccaaaactgtagagaatttccgagctttatgcactggggagaaaggaataggtaagaatgggaaggcgctccattacaaggggagttcatttcataggatcataccaagctttatgctccaaggaggcgattttacacatggaaatggaatgggaggagaatctatctatggtgagaagtttgctgatgagaacttcaaactcaagcatactggtccagggttcttatcaatggcaaatgccggtcaagataccaacggatcacagtttttcatcacaactctacaaacctagctggctccatctgatcatccattgatgtgagctctagtgtgcttgatgccccttgtgttaaaacgagtgtcttggttactttatgaaagattctaccggctttatttctttcgtctgctttctagctcgagctatgtctgactttatacacaaatgtctttcagtagcaaaaattctgtacttatgccnnnnnnnnnnnnnnnnnnnnnnnnnnnnnnnnnnnnnnnnnnnnnnnnnnnnnnnnnnnnnnnnnnnnnnnnnnnnnnnnnnnnnnnnnnnnnnnnnnnnnn

SEQ ID NO: 84691 - DNA, 462 bp, Arabidopsis thaliana columbia
atacgactcactttagggaaagctcgtacgcctgcaggttcccgtacactataaccggagagagcgccgattccgtcgtcagaagaatcctcgtaaacaatcatgggtaaggtacacggttccttggctcgtgccggtaaggtgagaggtcagacaccgaaagtggcaaagcaggataagaagaagaagccacgtggccgtgctcacaaaaggttgcaacacaatcgccgtttcgtaaccgccgttgttggatttggcaagaagagaggacccaactcttctgagaagtagatgatgatgatgatcacacttcatgaagcttgaagttttactttctcgttagtatgaattctgcaatatccgctttgttatcgatatttgcttatttggtttttctatagacgatgtaattctcttgttcatttctccatcgaattgacttttgaccatacttttttcgac

SEQ ID NO: 84692 - DNA, 780 bp, Arabidopsis thaliana columbia
  unsure (1)..(780): unsure at all n locations
ctacgacgtcgcatgcacgcgtacgtaagcttggatcctctagagcggccgctcgcgatctagaactagtctttttttttttaagttaaagaagacatgttcataaacatggaaaggtcttaaagcaaaattgtttatttatacaaggaacaaattatactcaagtccaatgctttggactgataaatctataaacaattcaacatctttcaatgctaatcaatacccaaaatgcttctactatttagtatttacatataacaaatcttgactctcacatagcggagtccgacccaccagaatcactccaagctctgtccgacatgaaattcggagggcaaaaccgggaatttcaccgcattccgctgcgaagaaggcgatatcggactaccaaccttcctcctctggcatatttcccaataatcatctaagcaacctttatcaaccatcggcaagaaaatcctctaaccggttaacaaccaatggaagtggattccttcccctttgtaacagctcctggcttgataataatccgttgtacgtttcacaagctccatcactttcctctcttcacctttcgctattttcacctcttcctctaccgaatcaaaaaaacgtcatcatcggttttcacaaaaccttccctttcttgttcccttctttcacaatttcttccaaattcaaacggttttttccgcaatttcttttccggcctactaaaacccgcncaagggaggcaaggaaaaccaatggtttgggcaaaaccaaaaccccggtttt

SEQ ID NO: 84693 - DNA, 389 bp, Arabidopsis thaliana columbia
gcgtccgcagacgagtgggcaaattagggttttctgggaattaggttgattaaattatgcgaggcggtggtaggagaaggtcaaacggtggtggtagttctggcaaaaacaaggctaaatcctccaggacagagcacgagaaccaatcataattccgcggcggggtcttcctccggtggtcgtcaccgacgtcagaataatactactttgtttgttgaaggaggtattctctccgactaccgaaaagatcctaacttttcgacgccatctcgtggaggaagctcttcgggaaagggattgagatctagaagcatagagcgtgtaaaagcttctgcttccacgagtggtccaaggaaatgcagtggtaatacttatgtgtatcaatatcc

SEQ ID NO: 84694 - DNA, 953 bp, Arabidopsis thaliana columbia
  unsure (1)..(953): unsure at all n locations
nnnnnnnnnnnnnnnnnnnnnnnnnnnnnnnnnnnnnnnnnnnnnnnnnnngggctttccttcattggtcagatcagacgacgttttacatcttcttcttcttcctcttcgatattcgtcagtgtgtgtattttggggaaaactttgtgagcaaagagcgagaaaatgagcggagccggtaagaaaatcgcggatgtggctttcaaagcttcaaggactatcgattgggatggtatggctaaggtccttgtcacagatgaggctcgtagagagttctctaaccttcgtcgtgctttcgatgaggttaacacacagctccagaccaaatttagtcaggaacctgaacctatagattgggattactataggaagggtattggagctggcattgttgacaagtacaaggaagcttatgacagcattgagattccaaagtacgttgacaaagttactcctgaatacaagccaaagtttgatgctttgttggtggaactgaaagaagcagaacagaaatcgctcaaggagtctgaacggttggagaaagaaattgctgatgtccaagagatcagcaaaaagctcagcaccatgactgcagatgagtactttgagaagcacccggaactcaaaaagaagtttgatgacgaaatccgtaatgacaactggggatactgatcatgtttctccatctccggcttggaaagaaaactctctttctctttctctgttctcttactgtgattttgtgagccaatcataacaataataagtacaccattcacttaagcagtgttgagatcttcattccaaggaagataaacgcatttggttttagttatcaatttcacaaattgtttcgtttcgttcttcagtgaataataagagtcaaaaaaattatcattgtcaaggaaagaagaagactcttgactcgtcaaaaaaaaaaaaaaagggcggcc

SEQ ID NO: 84695 - DNA, 463 bp, Arabidopsis thaliana columbia
gtgccctttcgctcacgctttgagtcgtctctcctctcttcttaatccgccgtctctcactttttcgccggcggggttagatcgtacagagctcagatctacggggcttttgatcctgcgattactgttgctttttgtttgttaatcagagagaatgttgggaatcttgaggcaaagagccatcgatggagcttcgactcttaggaggacgcgattcgcattggtttctgctaggagctatgcagctggtgcaaaagagatgacagtcagagatgctctaaattctgcaattgatgaggaaatgtctgctgatccctaaagtatttgtcaatggggtgaaagaggttggcccaatatcaaggtgcctacaaagattcacttaaaaggccttttgtggggaaatttggtcctgagagagtttacgatcacccctattacttgggttggatttccctggaatttg

SEQ ID NO: 84696 - DNA, 613 bp, Arabidopsis thaliana columbia
  unsure (1)..(613): unsure at all n locations
gaacggttgtgntancgttgaangaggttcccccactgggtcttgccagaaatttgcnncgttttagaagggggctttcgnactggntgccnccgtcgagaggattgcaggagctgatgttccaatgccgtatgcagctaacctagagagattggctcttcctcagatagaggacatcgttcgtgcatcaaagagagcttgttacagatcgaaataaaatcgtcaacatcaacacatttcttctttgatctttaaagggaaaggaaaataagaaaaaaggagaaaaatgatctctctgtctctcacttttgctataagaaaccaccattcctcgtgatttatttcatcttttgctattattctttactgcagcggttttcgtttttctttttgtcccttcccaaattgataattctaatctttggggttaattgataaaaattgatcgagaatgctagtaaaggagttcacaacacctgtttttccatcaaataatgaatgaggtgtgcctaaaaaaaaaaaaaaaaaaaaaaaaagaaaaanaaagggcgaccgctctagaggatccaagcttacgtacgcgtgcgtgcgacgtcnnnnnnntgctacctaa

SEQ ID NO: 84697 - DNA, 1524 bp, Arabidopsis thaliana columbia
  unsure (1)..(1524): unsure at all n locations
nnnnnnnnnnncnnnnnnnnnnnnnnnnnnnnnnnnnnnnnnnnnnnnnnnnnnnnnnnnnnnnnnnnnnncccgccccgccgccacgcgtccggaaaaaaacagtgccctttcgctcacgctttgagtcgtatctgctctcttcttaatccgccgtctctcactttttcgccggcgtggttagatcgtacaaagctcagagagaatgttgggaatcttgaggcaaagagccatcgatggagcttcgactcttaggaggacgcgattcgcattggtttctgctaggagctatgcagctggtgcaaaagagatgacagtcagagatgctctaaattctgcaattgatgaggaaatgtctgctgatcctaaagtatttgtcatgggtgaagaggttggccaatatcaaggtgcctacaagatcactaaaggccttttggagaaatatggtcctgagagagtttacgatacccctattactgaggctggatttactggaattggagttggtgctgcctatgctggcttaaagcccgttgtagaatttatgacgtttaacttctctatgcaggcaattgatcatatcatcaattccgctgcaaagtcaaattacatgtctgctggacagataaatgtacccatcgtctttagaggacccaatggtgctgctgctggtgttggagctcaacattctcagtgctatgcagcgtggtatgcctcagttcctggtttgaaagtccttgctccgtattcagctgaagatgctcgtggtcttcttaaagctgccattagagaccctgaccctgttgtcttccttgaaaacgagttactatatggtgaatcattccctatttcagaagaagcccttgattcaagtttctgtcttcccataggcaaagccaagattgaacgagaaggaaaggacgtaacgatagtaactttctcgaagatggtcggtttcgccctcaaggcagctgagaagctcgcagaagagggaataagtgctgaggtaataaatcttcgatcaatccgtccgcttgaccgagccaccatcaatgcttcagtgaggaaaacgagtagattggtaacagttgaagaaggtttcccacaacatggagtctgtgcagaaatttgtgcgtcggttgtagaagagagcttttcgtacttggatgcaccggtcgagaggattgcaggagctgatgttccaatgccgtatgcagctaacctagagagattggctcttcctcagatagaggacatcgttcgtgcatcaaagagagcttgttacagatcgaaataaaatcgtcaacatcaacacatttcttctttgatctttaaagggaaaggaaaataagaaaaaaggagaaaaatgatctctctgtctctcacttttgctataagaaaccaccattcctcgtgatttatttcatcttttgctattattcaaaaaaaaaaaaaaaagggcggccgctctagaggatccaagcttacgtacgcgtgcatgcgacgtcaaagatcttctatagt

SEQ ID NO: 84698 - DNA, 626 bp, Arabidopsis thaliana columbia
ttcgggttagacccacgcgtccgtgcgtacaaaaaaacacagctcttgttgttattgcttatgccgtgttgggagatcccgattcttgggaagatcctgatgagtttaggccagagaggtttctagcttcttcaggaggaaaaggagaggagagagagcaagaacttaagtacattccttttggcagcggaagaagaggatgtcctggagtaaatctaggttatatattcgtaggaaccgcagtaggaatgatggtgcattgcttcgactggagaaccaatggtgataaggtcaacatggaagagactgctgctggaattaccttctacatggctcatcctcttaggtgtactcctgtgtctcgaatgcaactgcagatatcgcagttcgtgagttcatgaattgtgattagctaacaaagaagcttcgcattttatgttgccatggctaaggtttttccggcctagttggctacttttggggttttgtgaaaccctataaccagttgggtattgtccctctgtagaggtgtggaccgggtccatatttgatgactttcaattgaactaaataacgaatggcggtcgctgtagatgatgcactctttctttcgcacgcatgcgatg

SEQ ID NO: 84699 - DNA, 389 bp, Arabidopsis thaliana columbia
  unsure (1)..(389): unsure at all n locations
gcctctccagattattcagcctgaaggtccaagttttcgtgtaaggggttactttgtcgagtggcagaagtggaactttcgtattggattcactccaagggaaggtttagtcatacattcggtagcatatgttgatggcagtcgaggtcgaaggcctgttgcacacaggctaagttttgtggaaatggttgtgccttatggcgatcctaatgagccacattacaggaaaaatgcttttgatgcaggggaggatggtctcgggaaaaacgcacattcgcttaagaaggggtgtgactggctgggatctatcaagtacttcgatgcccatttcacagatttcactggaggagttgaaacaattgagaactgtgtntgcttgcatgaagaag

SEQ ID NO: 84700 - DNA, 770 bp, Arabidopsis thaliana columbia
actatcgaacagctattacgtcgcatgcacgcgtacgtaagcttggatcctctagagcggccgctccggacgcgtgggttggttactaaatttactagaaactactaattctcgttgtaaatgaataataacaatcacacactagtaacctgaaatgtaaataaattaccaaattattccattattgtgacttaccataactctcgtacttccgggtgttcataaactcggtcaagtatgaagaattaaagcctttgatctttttgtactctttccaccacttcatgaaactgctttcctctaagaatatctccggcgaaacctcacgttttgtgattatctcccacacgtatccctcaaactccacgagttttctagtcaatacctctctcacatcgtctctcatccccacagttgtattcaactgattaattacaatcaacgaatcctcaacttcagcccaaaaacaagaatcaaacgtcaaaagatcactcaaatctctctttttgcatctttccttttctattaatatcgattccattccaaaccatttctcaagcataacatagtggtgagaccttcccgtagttcgatactctttccgaccctcgaggtaatattcagcaatatcgagtggttcgatcatccgtctgtaattgttccccgagaatagaaaccgtctcttgagaatcgatgcatcgctctgcggcctcctctctacttcttcaactactgatttccaaaaacggtttaagctctcggacgcgtgg

SEQ ID NO: 84701 - DNA, 935 bp, Arabidopsis thaliana columbia
  unsure (1)..(935): unsure at all n locations
cactatagaacagctatgtacgtcgcatgcacgcgtacgtaagcttggatcctctagagcggccgcccttttttttttttttttttttatgtgtacttattttgctataattagaagaatttgtcacttcacaaaacacgagagtgtataggctttttatttccaatctaatttacaatgacatgactctataacaacattaataatacagtggcgtatacaaagcacaaataatttgatttacagtagaaagaaattagaaagtgaaagtggttcattgccaaaaggcccaaaacattcggatgtttcttggagatcccaaaacagattcaagaaattccaatggttttaccaagaagccagagaacaagagacaattcaggtccgaagattgtatggagagtacctctatcaagtgtaaaccccataccactgtgattcctgcgctgcttattccccgaaataactccactagagcttgccggttttgggaatgacatggtactgaaagcataaacaggaatgatgtcattattgtctagatcatcttcttcatcaccatactcggcactgtctgattctgtcaacgtaacaacatcatggacattgttgttatcattgttgtttctagcaaccaaagttggagtctctactgtctgatcaaaggattctactgtctgatccaaggattctaacgtggcgcatacatgccatttcgcagctaaacatgtaacagcctgagccttgtgtgtgatctttgatgcacttcgtaatagtatcagaagtgcagtaactgaatgtcatagaacaaagagcgagttctccagctctgtagatattgacttcagtgtaggctttggtagtaataagcagagnagnaaactgacttccagtaactagaatcaataancatagaatgaaagnacgatatctat

SEQ ID NO: 84702 - DNA, 723 bp, Arabidopsis thaliana columbia
gaattgttcttaggtgcacactatagaagatctatgacgtcgcctgcacgcgtacgtaagctcggaattcggctcgagccctaattgtgtgtctgtagctttctctctctctctctctctctctctcgcgaagaagaagaagaagaaggagatcaaggaactcgaagtgtgtgtgtgtgtgtttgccttctcttgtcttttagttttttctctctttggctgtgatttcgtcggcgaagagagacatagatcggatatggcggctgataatacgggttcgaaatcgagctccgctgcggattcttacgttgggagcttgattagtttgacatctaagagtgagatcagatacgaagggatcctttacaatattaatacagatgaatccagtatcggacttcaaaacgttcgatcatttggaactgaaggaaggaaaaaagatggtccacaagttcctccaagtgacaaagtttacgagtacatattgttccgtggaactgatatcaaggatttgcaagtcaaagcttctccaccagttcagcctcctgcatctactataaataatgaccctgctataattcagtctcactaccctagcccgatgccaacatctggtagcttgccttctactgcgagcgggtcactacctgacattagttctcataatggacaacctggacaacatggaatgggattccaaaacgcaatgcctttgtatcaacc

SEQ ID NO: 84703 - DNA, 554 bp, Arabidopsis thaliana columbia
tgcacgcctacctaagcttggatcctctagagcggccgccctttttttttttttttttttttttttagttatctgaagggggttgtgttcttatcataataaagttgctacctttacatctttattccatagaagaaatttttgagagctttaagatagaatgttatcatcatcactaagaaataatatttgatgtattgcgtagataatcaaaacaaaacttgtagaacatacgattaaggtccatcgtcaacctctgtaaaggccagcatttatcttagaatgggacacaatcgaatgtgaggtgtttctcactcgctgacttctcgggagcatgtggacccccaaactacgggtggatatcgggggggaagctccggcgagttggaatcacttccggcgatgtagatggttcgattacttcctctgatttcggagatttgttatcatccgacgattcgggctcgcgactagggcttcgaatgggcttagaatcggaatcggctttatccgcggcggcgttagggtttagataacggctgacgtcgaaattg

SEQ ID NO: 84704 - DNA, 679 bp, Arabidopsis thaliana columbia
  unsure (1)..(679): unsure at all n locations
actatcaaccatcatttacgttgcatgcacccgtacgctagcttgcatcctatcagagcggccgccctttttttttttttttcttcagaggtaccagaacggtgctgtggtcttaccataataaaggtgctacctttacatctttattccatagaagaaatttttgagagctttaagatagaatgttatcatcatcactaagaaacaacctttggtgtctcgtgtacataatcaaaacccaacttgcggaaaatacgattaagggccataaatccatctcggtaataggacgccagcgatttatcttaggaattgacccaatcgaatatgacgtcttcctcactcgctaacttgccggaatcttgacacccaaaatacgtctgggatatcgtcgggggaagcccgcacgagttggaatcacttccggcgatgtacatgggtcgattacttcccccgattccggagatttgttatcatccgacgattcgggctcacgactagggccccgaatgggcttagaatcggaatctgctttatccgcggcggcgattgggtttatataacggctgacgtcgaaattggtaacggcgttgagtccaccgtactctattgccgacatgtcnnangcgattgctgcttcttcttgcgtggctgcacgtgcacagggttttaaatgtta

SEQ ID NO: 84705 - DNA, 790 bp, Arabidopsis thaliana columbia
ctttttaaaggtttcaaaacctggagctccaccgtggtggcggccgctctagaactagtggatcccccgttttgcattatttcgcggccgcctggaataaaaagaagaagaaatgggtgttcttgatcatgtctctgaaatgtttgactgctctcatggtcacaagattaaaaagcgcaaacagttgcagacggtggagattaaagtgaaaatggactgcgaaggttgcgagcggaaagtgcggcgttctgtcgaaggcatgaagggtgtgtcttctgtgacgttggagcccaaagcccataaagtcactgtagtcggctacgtcgatcccaacaaggtggtggctcgaatgtctcacaggaccggcaagaaagtcgagctctggccatatgtgccctacgacgtggtcgctcatccttacgctgccggtgtctacgacaagaaggcaccctccggttatgtccgaagagtcgacgaccccggagtgtcgcagctggctcgtgctagctccaccgaggtccgctacaccactgcatttagcgacgagaaccccgcggcttgtgtggtcatgtgatgtcatatggactactactgtttcaatttgttatggcttaatttaatggcttgtttggtacattaattacccttacgggaggtttcttggcttgggttttaattccttgggcctgtattcccttacactttttttgattggcgggcccgcaaaatttcgtttttaaagcttttttggattccccgtcgaacccttgaaggggggggcccccggatc

SEQ ID NO: 84706 - DNA, 482 bp, Arabidopsis thaliana columbia
acgcggacgcgtggggtttcaagggttttcgtttttatcttttcctccgaagaagaagataagaggttgaagaagaagaagatgccaggtccagttattgaggaagtgaatgaggaggctcttatggatgccattaaagagcagatgaagctccagaaggagaacgatgttgttgttgaggatgtgaaagatggagacgaagacgatgatgatgttgatgacgacgacgatgagattgctgatggagctggtgagaatgaggcttccaagcaaagtagaagcgagaagaaaagccgaaaggcgatgctgaaactcggaatgaaacctgttactgatgttagcagagtgactatcaagagatcaaagaatgtgttgtttgtcatctcgaagccggatgtgttcaagagtccgaactctgagacctatgtgatattcggtgaggctaagattgatgacatgagctctcagctacaagcacaagc

SEQ ID NO: 84707 - DNA, 761 bp, Arabidopsis thaliana columbia
  unsure (1)..(761): unsure at all n locations
aggaacatgagttctacagattctgaacattacgagcaccagatgactactaacgggatcttccctggtggattgaggaatggcaaagtctctcccggtgtgaacaacagaatgtttgatctatctactgattttgctaatcaaatgagtcgcacagcaacaagttcacagcaaccaatgagacaacagagtcaaagccacgaggaacaagcacagataatgagaaacttcaatgagagggctagaacacagcacaactccacttataatcatcctaaagctgatgctccaccgaagatttcgtcaccacaatccgcaagaagtgaagattcaggcaatgcttctctagcagcagcacgagcatggatgtcgataggagctggagggaataataaacaaacatttgaaaatgctagtaatccgaagagcagccagatttctgcggagtccttgtataatccatcaagagaacattttcaccaacaagctttcaaaccgagagatgctgaagagacacagttccatcctcaaaggaatggtttccctttccagacatttgtgcaccaacctgttcacgggatgatgaacggaggataccaaccatttcaaaacaaccgaccaattgttttccctcagatggctgccccaacttctgatttctcaagattccatgtccagtctcaatggcgaggaggcattactccacaagtccagttgaagcagagacaagagaatttcaatctcncaccagatttgaacat

SEQ ID NO: 84708 - DNA, 1011 bp, Arabidopsis thaliana columbia
caagctatgcatgcctgcagttggggggtgccgcctgctgaattcacacgagttactgttggtgtctggtagaataatcaccgctagaccgagtggctgatcgactggcccgtgccaattcccgcgttggtgcaggtgccagtcgaccagcgtcgacaagcagcaggagcggccgcccaagccgaagcagcggaacctgctcgacaacgccagcaacctgctgaccaacttcctcagcggtggcaacctcggggccatgcccgtcgctgagggcgcggtcaccgacctcttcggcaagcccctcttcttctcgctttacgactggttcctcgaggtgaatgcgcgtcccctttctgaaccctgcaacactgacatgttatcataggttcgatatcctttgttctccacttatggctatgtagtaaaattcgattagacacagcccctgcaacactgacgtgttatgatgtcttaattcacagcatggctctgtctacaagcttgcttttggacccaaatcgttcgttgttgtctctgaccctatcgttgctagacacatcctccgggagaacgctttctattatgataaggtatgctgtctcgcatgtgtcggatatggattgttgaaaactcgttagaggaaaaggattgttcgttgaaaaaactatggaatatacaaggaattggaccatgaccaccttacacacatgatggccacattttgcatatattattacgtcagtggagagttgacttccctgataaataataattggtgtagtttggcgggtttctttcttacatggtattttttttacttgaaatcagggagttctcgctgaaattttaaaacccataatggggaagggtcttatacccgctgaccttgatacctggaagcaaaggagaaaaggttagaaaggttggatatccaatcatattttctgtgttttttttagtttggactgaccacaatactgcaggtcgactctagaggatcccgggtacgag

SEQ ID NO: 84709 - DNA, 842 bp, Arabidopsis thaliana columbia
  unsure (1)..(842): unsure at all n locations
ggataccaatttcgcccaggaaccaagctatgcccatgattacgccaaggcttgcatgcctgcagccacccgggcagcgtccagtgcgacatctttctcaaggaacgccggccgttcgccgtggcgtcgtgcagcatatgcaaggagtcctacgccaccaaggctcacgcgctgacggagcccatcgacgtctacagcgagtggatcgactcatgcagggaagccaacgagggtgtcgtcgcccccagccgcacctcgacggcgaggccaagaggaggaggaagactcaagacgacggctcgtgaccgttcttgcaaacctattgcaaacattgcggttgctgtttcttgtggcgtttctatgcataggtcgtagttttttttccgttttgctggagcccagaattgtattgtgatttctgacaggcagcggcgtctgaaactccgaattgtcctgtggttgaagcaatgcttgaacgatgtatcacagttaatgtttgttacatagaatagttgaataaacgtagatattgtagatgtaaattctgatgagcccattcttacgccctaataagggtgaggattggagaaaattgcagaaggaatttatagtttatttctctttcatctcctaatccccttgtcagccaaatcaaccctaaagtttaatggctaaattctagatcatggcatccaaatggagcatatatatggtatcttctttgggcggtaggccgcaggtcgacctataggatacaggggnnnnnnnnnnnnnnnnnnnnnnnnnnnnnnnnnnnnnnnnnnnnnnnnnnnnnnnnnnnnnnnnnntnnnnnnnnnnngcg

SEQ ID NO: 84710 - DNA, 1291 bp, Arabidopsis thaliana columbia
acgccagcttgctgcctgcagctactacacaagtggaccacatgcgtaagcccagcacgacctttagcggaaaaaggcacgtttttttttctaatgcaaacttattaatcctttgggtgcttccaagttgaaagattaagtaacctgaagtcctgaaccctctgttggagtgcaatcaagccgcgcacccaaaaagtctgtgacgaccagcaaggagatctcaaaatgcgcactgttactgatcagacacaactggagcacgacaacaagaatgcttggagcttctgcctgatgggtacagtctacgttcaagtggaagcagcatccagcgtgtcccctggttttcctggagctgcctcgcggatgatcctgagggactcggcgaagtcgtccaggagctgacgggcatccggaaactgcgcttcgtccaccgacaggactagcttcacggagtttatgtagctctggtagtgcacagtcagggcctgcatgatccagagaccaccacacgcacgacacacggttacaaccagccacccccgcatgttcttcggattcaggtcaggtgcactgaatgaacgcttacatgtgggtgcccgtaggtgctgggcgcgatgtagacgatggggttgccgcagaacagcacctgctcagtcggcccgaccatgctggagaaggacagggtggtgtgcgtgaacatgccgtagcagagcgcagcagctgcctgcaccaaactctgtctgtcaggggtgcgcgcgcggccgcgcgcggtgatcaccggtgaatcaatagcgccgggtcgatcgagataggaaaggaaacccagcgcacgcaccttgatgccgaagagtctgagaaccatgtccccgctccagaaggtgaaggccgactccatggagctcttcttcctgcgcgtcaccttggccgccgtacggacgtactccgtggggtcgtcgtgcttggccaggtggaaggggatcagcatgtagcccagcttgtttccccacctcgcggcgccgttgttgtcgctgccggactccatcatgcttgccagtgcctaccggttgttatggctagctgtgagcaacagcaagaagagggataatcttccccgcagctggcatcctgtgtgatcaaacaggtcacgtggcagagaagctctccgtggtatgccgggcgtcgcccgtctgttgacgagaccagccgcccgcaccgtgaggctctgtacggtcgctctcacctgcaggtcgactctagaggatcccgggtaccgagccgatatcttttttcc

SEQ ID NO: 84711 - DNA, 817 bp, Arabidopsis thaliana columbia
acgcccgcttgcatgcctgcagcaagagtagagtgttgtggacttgtggttactaatcatgctaataagatttgcaaggtactttgaaatgtttattgctattatttgttcatttcaacaggtagctgcctgcctatgtatcatccatttaataacaaagttgtcaaccggtgatactgggagcttgtctttctcattcatgaagaaaattcagatcatatcaacaaaagtaaggcatctatgagattttgatgttggtttgttggcatcaccttgtttacactgtcttgcttctgtttgttttctagaaaagtacttcacctccaattttttttggtgtcagttgtatggaaaaattagactaggacatggtaaaaatatctgcgagtgtaaaagaaggggtgaggcctctattggagaatgccatttcgattgggatgcccactatatcacaccacatcaccaaagtagtccctttcaagttctggtaggttagagatcaaaacttgatgagagtggtacaaaccaaaagaagatagtaatattgtaaaactaacaaataatagtgtgaggcggacggtgtggtatcgagcttggagacctgccttagggtctaggggagcatgctgatgctggagtgacaccgaaggaaggccgcaagagcggaccccactgcggcggcatctgccatagtgtctgccttggatgcaaggcttgtgaggctgctgtgtcatgcactcatgctgtcctggccaggtggcagatcaggtagcaccttgctgcaggtcgactctagaggatcccgggtaccgagcga

SEQ ID NO: 84712 - DNA, 861 bp, Arabidopsis thaliana columbia
  unsure (1)..(861): unsure at all n locations
nnnnnnnnnnnnnnnnnnnnnnnnnnnnnnnnnnnnccaatttcacacaggaaacagctatgaccatgattacgccaagcttgcatgcctgcagtacatcatccactccatccataaaatcttttgttatcttgtaaacaagggtgaaaatgaactccggctgttcagaccatttgacaaaatgatattccatccttgaagcaatagggtgaactaattcatcaatcgcccaaagcccattgtcgaagcaagcggtcctagtgaaatacttcaaatctgccagggcaggagtcacttttgctgtctgacacaggcgcgattcacggttcccctgcacatgttggagagcacacagtgcttggaagctttgagagtatctcgctttatttccctcattcatcaagactagaggattcggaatttgggggtacttatccttctctgtgtctggtgaagacaatgaaggtggccatcccagtgatgctagtagagcccgataatccgtgagtgcttgaggcctcagaatggaaagagttttgtccactctagaatcaacagccatgacaaggttggcccactgtggcctactagtgctgatccgtactaattctcgctcaatatccttcacagcgtcaacagcatggagcagcttcccttgcttccattcagtttcctgcatttgacagttgcaaactaactgctgagccacacatatcagcatgacatttgatcagctgcatctgcaggtcgactctagaggatccccgggtaccgagatcgannnnnnnnnnnnnnnnnnnnnnnnnnnnnnnnnnnnnnnnnnnnnnnnnnnnnnnnnnnnnnnnnnnnnnnnnnnnnntt

SEQ ID NO: 84713 - DNA, 804 bp, Arabidopsis thaliana columbia
acgcaagcttgcatgcctgcagatgggcgtcggcctgccgtctgacttgtactacgcagacagttcgcaggcggcggcggcggcggcggctatgacgacgacgtcgtcgtatgcagcaccagatggccaagtccgaccaccagtgggcggcactgcagtcgtcgctgcacagcatgctgggttcagtcatccagacagaggctgatgaacaggtaatttatttatttaccatatatacgcatgcatgcatgcaaacggtacttgtgttggaagaatttggcatgcatatcgaagtaccaaacatggcatgtttccttgggttattatgcatagaaaataaattaaaaaaaaacatggcatcaggcttcttcctggattggccaaatggtcacagtgccatgccatgcatgcaaacggtagaagctagccagaggaaagacgatgcatccgtacgtatatcttgttgtttgtgtgaagctatagctcggccttgatgcttctagttggaatctgcgcagagagccctgcatgcgatgatatttttgggtcctcgttaccatcggaacgtgcgtacgtgacaatagcgcagtccaaaaccaccgtgttgcttctcatgaacacgtgtcgtttacgtacgcgacggcgacggcgacggcaattggcgttgagtagtacaatttgagtatttcagttatatttttttgcgaattattattttgtgatcaagtttagagttcttgtgaaaattttctgatgcgcaggcagttattaacgtactccactcatgatgcatgcaggagcagg

SEQ ID NO: 84714 - DNA, 1054 bp, Arabidopsis thaliana columbia
acacccgcttgatgcctgcagccaccaggtcctctacggtggaggagaagaatggaggatgctgccaaacggtaggtttttgccggcttctacagttctacttattcaggaaacctacttgttacaaaagctcctgatattttaagccgttccatgaaactatctaggtcactgcgcagtgcgcacgtatttctttgatcgcttaactgcgagctctgctgctatacggctagacagatgcatcagtgccctactttcaggaagcagtgctagactgcgcagtgctcacccatccactgaaccagtgttccctcagatccctgatttaacacaacccaccctcacattgcctatgcttcaggcaaagaaataagcatagagaatggagcaaccagctccagctattccgctcacagcactccacatagcgatcgcgaactctagcctcagctccctggcattcatttcaaatgaaggaaattggaattgttgtgtttagtactcatcaatttttgatgattgaagctccacaacttgaatatgataacaacttatggtgaagataattgagttccaattcaaccacatgctaaaaactgtgaagcagcccttaacagataaccatagttttggtttcagtctgaatgttcattgaatggtgagagtcttttcttagtctgaagtatggccttctggcatcggtggagaaattttgtatgctaaacttgcatgtatatcatggttcttagtgacagatgccggttacaatctgttattcaaatcttcattagagaacgtgagttgtaccaaattctactatttacctatatgacattaacaagtggtgcttagatagccatattctagttttgactatgcttctacgacccaagcatacggtcctgcaagctcctgtacactcgctcacctgattttgacttcactgacccgtatgcaaactgttttggaccaggttgagatgggactccgcttcacaagacagtctccacggtttctctgcaggtcgactctagaggatcccgggaccgagatg

SEQ ID NO: 84715 - DNA, 473 bp, Arabidopsis thaliana columbia
cggacgcatgggcttgaaatcgatggaaagcaatcgaacccgaaattctctcatttctcaatcaaaactatcttctttcacttctgggcaagaagctctgttgtggaacatcggaaatcagaactgaaacagaaacagaaaccatggagaagagagaagacgaacaacaaaagcgcgacgattctagattcaatcaaacactcaagaacgtccaagggtttcttaaaggtagaagtattcctggtaaggtattgttgactaggagatcagatcctcctccatacccaatctctccaacatatcaacggagcttatctgagaatgacgccggaagaaatgagctattcgaaagtcctgttgaggtggaggatcacaattcaagcaagaaacatgataatacatatgctggtaagctacgatcaaactctagtgctgaaaggagtgtgaaagaagttaaaacttgaagataggtg

SEQ ID NO: 84716 - DNA, 1203 bp, Arabidopsis thaliana columbia
ttgcatgcctgcaggtcatgcatgtgcctgcgacgacggacgaaggcacgggcgggcgacagcttggcgaatagcgaggcaagagataaacttcgcatgcagtgcagtgctttacccgaaatggcttggtaatgtgatactgtcgtttcgggtgtccagcgttggctggaaccatgcagctttgctttgctttgctttgcttgcaccaaatctgagtaacgttcgggtcccatctccagcgttggtccaggtactctaagcgttagtttgggactccaaaaccgaagaggattggaaagaccaaaatctcctacttatttaaaattaaacaaggagaagattttaactcctccaattcccttcaattttgtggctcttaaactagctataactacggtagcactagggtagggaacttgccaaatccagacgtgcgaagagaggcattgagctctcgccagccacagcaagccaatgtcatgccaacgctcaacatgcgcccgttacacaaacacaaagctgcacccgcgcgcgcaggccaagctctctagtacccactcccagtataagtagtggtagtaatacttcacccagaggctcagagcacggcaacatggtgcaatgaagttgggagaaggacggctctgtctgtaccagacaacatttgcttgtctttaacctccaagccttcattttctgatctccatgccatttacaccagcactgtcggatcggattccacgtaggactagccacaggtgacgtcgacatctggttctacgtatcggcgtcgaagctgcattctatacggtgtcagaactcagtacccagcttgcagctgcactactaggtgaggcagttgttttcttttccattttctttttttttcaaatggtcacaggtagcagtagaacaccatttatttccttctctatgataccatacctactctgatactcgacctccaaggtagttgagattagtcgtagcttagtcatgacatttcactatgtaccgaattgttaagcctcctcctcttctacaccaggcggaatcaccagagccggtccaggtagtagtccctggtgacctcgtcgctcagctccgagccctccacctccacgcggctggcctccgagctcttgaggctgaagctgtccggcgcctgcaggtcgactctagaggatcccgggtaccgagtga

SEQ ID NO: 84717 - DNA, 1409 bp, Arabidopsis thaliana columbia
taagcaagctatgcatgcctgcagaaattaaccgacctagccgaagttctcgatcgagttttgcccaaagtttgtccacaataatcccacggctccacctctacccactgcaccaaataaaatcaagagataaacacagcaagttgagtttgaaaaacgttgggcaaacgaccagagatacgaatatacatacatacgatagggagagaagaaaaaaaattagccaaataacaaaaaaaaaaaacagagttggtgatgtgatgtatcgttccatgtttgcaagactggaaagaaattgacgaacctcccttcccttatcgtcgtggtccttcaatagaatagcagcacgtcgatcgacgaaccttattcctgggcctctctggctataaatacagcccttcttcccctccccacagcagtcacacgaagacagcaagctaaacactcgtactctgtcgtctccttcccgactcccgagcccacagatccttttgccaatggcacatcctgctagtgctagccatgcccgcctgaccaccaccatcctcttcatgtcgcttctgctggtcttggctactgcttcactgggatgcccatgctcatacacctgtgagaacgagctgaactggcgcgtgtatctgaagcaagttgtcggtactggaccaagtcacaaccaggaggtaattttcagacctcagcacgctaatctgttcggccagaccgtcgttcaggactggacgttggtagacgcgcctgctccaggccgaaaggtggtgggacacgcgcaaggcgtgcatgtcttgtctgatctagccaacgtgcgctggttcgtctccctcaacatggtgttccaaggtgacaggttagcattttcgcttcctgccctccgtccctcccatctgttcatggtgcgtcggtcgataacaacccgtgcttgttgtgcgataggttcagcggatccacgctccaggtgatgggagttcttccaccggagggggagtgggctgtcgtgggagggacaggagagttggctctggcacgcggcacgatcaagcacagaatagctggaagcgcacccgagaccaacttccggcagctggatatccacgccttctacgcgaacggctcagccacctgcgtaggtacatctcttcgctcctgttccaaacttccagcggtctagggctaggctttgcttgctgttgatttcgtagtgcagacttgaggatcggagtagtaaacaaagtctgtcaaagcatgaagaacacaacttcacttcacagtcttgtctctctctctctctctctttttaaacctttaattaactgatcgatctaaggagccattatcttggtttcattttctatccacaggttctgctgcaggtcgactctagaggatccccgggt

SEQ ID NO: 84718 - DNA, 803 bp, Arabidopsis thaliana columbia
ccatttggcaatccgtcgtctctgcacccagcttcaggtttgtcaattttattgccaatgactagtaacggaatcccggtcaaagatggcttgctcaagaggtcatggagttccccctttgcaatggccatgttttctcgatctgccgcgtcaacaacatacctgcagaaacaaaacaatttaaacatctgacactagaagttctcattccttattgattttctatcagctacgaccttcagattaagaaaatcatgcagcaagtttcaatgcagctaggtttaaaataaaaaacctgtggaagtaaatcagaataaaaaaactgtacagccggcacaacttccagctcattgtttcagaaaaaataacagaaacgcagaaacaggtaaaaatgattcatcattacctacataaaagaaaaaatgtaaagaattgaaagaaataaacagtgcaccaccaccatgatacacgaaaaggcaaaataaaaaaggtcaacaaataaacaagatcatcagtatttatatattgcaacggcaaattaacagagcataaaaatatgatcaacacatgacataactaagatacaaattggcataaaggaagataactcttatcttgaccacaaagacaactaaaatataacccaatgggagagaagtaggctatgaggaccctaaagatagcgcttagaaaaggtggatagttgagaaataatttgtacataaaattgataaatcggactatagcatgatctagacagccgtacccaaataatagacatgtatgcaagaaaccctcactaa

SEQ ID NO: 84719 - DNA, 579 bp, Arabidopsis thaliana columbia
  unsure (1)..(579): unsure at all n locations
atgannnnnnnnnnnnnnnnnnnnnnnnnnnnnnnnnnnnnnnnnnnnnnctgcaggtaccggtccggaatcccgggtcgacccacgcgtccgcggacgcgtgggcggacgcgtgggcaaaatcctagatttctcttcatgggtttccgacaatgtctacagaatcgtaatcatcttcctctacaacaccaccgacactgcttctctcctctgtttccaatcccaatcaactcaatctcttcaatctctcactcgccctcaaatcaactggaactcgatccaaatcgtctccgacaaaacctcaccttacgctagtttccgtacagagaaatggatcgttgtgtcggtgacaaagcacccaacagaggagctcaaaggtttggtcaagattaaaggatggcaagttctagcgatcggaaactctttaacacctaaagattggaatctcaaaggtgcgatttttctatctctagatgctcaagctgagcttaattaccggatttttggaccatccgccttatgatcccctcgtacgcaaacatgtcggttacttggttgcgatccagcatggtgcaaaga

SEQ ID NO: 84720 - DNA, 796 bp, Arabidopsis thaliana columbia
attacgccaagcgttggtgcaggtcgacggtgagctggctagctagctgattctgctgcctggtcctcctgctcatgctggttcggttctgacgcggcaagtgtacgtacgtgcgtgcgacggtggtgtggtgtccggttcaggccgtggaggccaaggcgctgaacaaggaggcgctgcaggcggaggtcgggctcccggtggaccggaacatcccgctggtggcgttcatcggcaggctggaagagcagaagggccccgacgtcatggcggccgccatcccgcagctcatggagatggtggaggacgtgcagatcgttctgctggtacgtgtgcgccggccgccacccggctactacatgcgtgtatcgttctactggaacatacgtgtgagcaacgcgatggataatgctgcagggcacgggcaagaagaagttcgagcgcatgctcatgagcgccgaggagaagttcccaggcaaggtgcgcgccgtggtcaagttcaacgcggcgctggcgcaccacatcatggccggcgccgacgtgctcgccgtcaccagccgcttcgagccctgcggcctcatccagctgcaggggatgcgatacggaacggtacgagagagaaaaaaaacatcctgaatcctgacgagagggacagagacagattgattatgaatgcttcatcgatttgaattgattgatcgatgtctcccgctgcgactcttgcagccctgcgcctgcgcgtccaccggtggactcgtcgacggattcccgggaattcactgggcgtcgttttaca

SEQ ID NO: 84721 - DNA, 950 bp, Arabidopsis thaliana columbia
gcaacttgcatgcctgcaggtaagagacaagctagtgatccagtacggacagacaagcacacaactacacaagcatcgtcctgtcctcacttacagtcttcgtggaggtacgtcagcccacgcgccgctccgatcgcaatcctcatccgcttcggccaatccatcacgggcagcccttttcctgcgcgcggatcaagatcaacaacatatcatatcatatccaacatccatgcatgcatacgcatgcgcgcgccaagaaaagaactcaccgtgcaggtgatgctccagcgtcttgttggccacgaactcgtagacgaggagtcggtggttctcggtgacgcagtagccgacgagcgtgacgaggtggcggtggtggatgcggctgatgatgtccacctcggcgcggaactccttctccccctgcccgctgcccagcttgagctgcttcaccgccacgcgccgcccgtcgcccagcgcgcccatgtacaccttcccgaacccgccctcgccgatcacgttcgccgccgagaacccgcccgtgatgcccgccagctcgtcgtacgtgaaccacgacttgttggcccccgacaggtcgtacgagctcgacgtcccgctcggcgacggcgacggcgccggcccgttcgacggctggtacacgtccgccgacaccacgcccgcggctgcgccacactgacgttccggcaccacgatgctgtgcctgcgcgacggtgccgctcccgcttcctcccccggttgccctgcttgccggttgcgcacgcgattatcagcagcgacgccagtgccaggaccagcccggcaacggagatcccgatgaccaccgcctcgttcttcatgttgctgttgctgcccgacccacccccacccgcggggggcccaggcggggacctccacatgccgcctgcaggtcgactctagagatccccggtccg

SEQ ID NO: 84722 - DNA, 1283 bp, Arabidopsis thaliana columbia
tgcagcagagaacaagacggcatcgccgcctccaaaaggcggagaaccgactgtgaaccgtcaatcagctaaagttcatgttgaggttgcccaggttgtgcgcgcgcggaagatgggagacgatgtcagggatgtggcagaagtggcgatggagaggaagagacctggtgcatcacttccctcttttgctttccttgttagttgaatgtggtgttctgaatttctgatctcctttttatccttgtaataggagcgggaagttaactatgataagtcgcgatcactcattccatcatccaaattttcaaagatcatatattgttgtgatagacaccatgctaagggaaaaaatcagcaatctagtacagtagacaattccgattccaaattctgatggttaatatcagatgtgaaaattcaagaggttatccattcctaggatcagggaggataaaagttttattccacaaggcagatagggctgcaaaaatgctattcgttgagcaggtactgtggcgaaaggtaaccaaaaagggcatcattggtaccacatggaactatagttgagagaaagggatgatacaacagaagatgacaaataaaaaaaataggacgcataaagggaaatggcaatcccaacaaaccatcttcacaaggcaatgataactgccctcgctttccagatggtgaatctattagagttggtgccctgccaataagatgaaagtacagtaagccctttgtgaaataccaataccatttaacaaaagtttatcatgggaagtacagataaagaatgcttacttggttttctaacagctcgatgctcatttgattaaattcagaccagtacctgacctgggataagaaaacaatgcacagaagacaacttgacggtcgcctgacaagcaaggggatgctaacagctcgaccaccccaaattaagtataccagtatacaatttgggcagtgttattcaaatctgagtctgactccagattttcatccatgctatgtgccctaaactctatgaagttgcacacacaactctgaatagtgcattcaaatggacagaactgaattctagtaaacgacaccaatctgtgcatagctaccgcatatttgggtttctctctttaatttttgctagttttgcatttatgagcttatctaatatggggggctcaagagggattgggtcaagacatctctcatgggcagcattgttcacctgcaggtcgactctagaggatcccgggacggctttcacttttttccatggt

SEQ ID NO: 84723 - DNA, 1079 bp, Arabidopsis thaliana columbia
acacccgcttgatgcctgcagaccgtggcgtggtgcggggccgcttggatccgttgctgtttgcgccgtgcggtgtggaatcgaactgtttagatctaagtcccgctagatgccgtggcggtggaatctcggttgatctgtgtgtctgagcgcctgtgtagctcttgtggctgtaacatacatctgctgatttggctctcgacggcttaggccgcgggagcttagatggcggagcaccagctgctccctaatcaggttggttctcgtgtggatctgttgacttgactgtaggttgcagacttgcagtaggacgctggcactgccattgaccaggagctgcacaacaggggcaaagctaggttatttttaggaggtgcagataggggtggtaatgacctctagattttgcactataaaatgtaatgatcggatcgaattgggatcagcctctattcctattcatttttgaactaaaaataattaagggccctaacttattgtgaagaaacatttggatcttgatccactaccacggtgtaccacccctaggtgtagatgcacccccaaaaatacaagttctatatatttagttaaaatttcaccatgtatgcatccctataaaaaatattatgcacattcaattttgttctagctttgcaactgagtaccgagtactagcataggaattttgttctagaatatgtatcggtagtatactctgctagtactcactaggtgtctcccgagaaatgagaaatgtgtttcttgttttgacacttggcactattggtcgagagtcaagactatgagctgaactgctgaaatgtctaatgttagcagtttctgcactggttcaattgcagcctgatttagaaatgctggggacagctggctgtgccatgcaaaataaaatgtgttagtaggtactttgaagggaaactcaaactttgtatttccagttaaccatgatttaacttgtggtcacaggcgaacgcgagatcgggtgtcgctgtgaacgatgagtgcatgctgaagtttggcgagctgcaggtcgactctagaggatcccgggacgagtg

SEQ ID NO: 84724 - DNA, 1079 bp, Arabidopsis thaliana columbia
tcgcaacttgcatgcctgcagctctatcgctcgcaagaagattaatagcactacagcagagaacacactcgaatttctttggacagaccaaaacgggtggtctgccgccttttgtttttttttcttttattcagactcgcggcgtgatccggatcccacgttctcacgccacccacactctagtcaagccgggcgcactccgcacgttgcgcggcggcgatcgcgtcgtatggcgtggctcaggacaggcctcggctcgcgcccttattgactcaatagacggaaaacaaaaactcccgccaagacaaacgagcagagagtggaagtatctaacaatctccccctacttctactctcctgatcatgtgatttacataactcctatcaatctacggatcttctggagctgcatcttcccaagtgccttggtgagtgcatcagccagttgataagcaatcctgatctgctctagctcgatgtcgccacactccacacactctctggtgaaattgaacttgatgtcaatgtgcttactgcgttcatgatggactagattcttcgcgagagcgattgccgccatgttgtccatccgaatcgtcgttggctgagcaggaaaacctagcacctctttcttccaacaaactatgtagccacatcacctaagcagctgctacaacgctcgccatgtacttcgcctcacaggatgatttagccacagccttctggctttgtgactgccatgagaccggggctccttccgtggaagaaaatggcaccagtagtgctacgacgatcgtcgacgtccccggccaagtcattgtccgggtactcgactagctttagactcccttctccccacttgtactgtagtccgtaatctgctgtcaccgtgacatagcgtaggagatgttttagtgcagcttgatggtcggtctttggacactccatgaaccggctcaagaagcctacaccgaatgtgagataagaccttatgtgtaagagataacgaagtccaccgattattcttctgtactaggttggatcgcctgcaggtcgactctagaggatccccggtccgc

SEQ ID NO: 84725 - DNA, 921 bp, Arabidopsis thaliana columbia
gcaagctatgcatgcctgcagcgtattgctcactcgtggtcgtggaatacatcgaaatcacagctggtccactctaggtttacgaaagcactgtgtacaattaagcatttgcagaggtgttcaaactttgcgaatgaagctacacacttggagcacacaccaagtaactggaccaagtcatacaagtctaccagcattcttcctcgatggttctgtcagggcgtcaggaagaggtagtacaatagaaaacggcaaatataaaatgactccagtcatcatgcatcctacatgacctacaaatacacgaccatcttccgccaaaagtttcaaatctcttgctactccgctttctagctacacccttccttataaaatacgcaagagtgcagctgcgcagccgccgtcgcgcagccagccatggccatcaaagatgagccgcagccgctgcacatcctcttcttcccgttcctcgcgccggggcacctcatcccgatcgccgacatggccgcgctcttcgctgcccgaggcgtcaggtgcaccatcctcaccacaccggtgaacgcccaactcatccgctcggcggtagaccgcgccaacgacgcctcccgcggcaccgagggcgccctggccatcgacatcgcggtcgtgccttttcccgacgtcggcctgccccccggcgtcgagtgcgccccggcgcttaacaccatggacgaccgcgaaaagttcttccacggggcccagttactccgcgagccgttgcgacggttcttggcaggagaacgccggacgctgcgtgaccgacagtttcttcgactggtccgccgacgccgccgcggagcacggcgtcccgcggatagcgttcctcggcagcagcttgttctcgcgggcctgcaggtcgactctagaggatccccgggtacc

SEQ ID NO: 84726 - DNA, 1308 bp, Arabidopsis thaliana columbia
gcaagctatgcatgcctgcagacctgggactcccttactcaaagccgaaagaccaggagaaggcgaggtgctggatcagttccctgaagcaatggcttagtaactcccagctggcggttggagaggtgtctgacatcgggaccatctgaagcggcctctttctggagtgttggttcgtggcctagagtctggaagggagtgtgtgcgcctgtgtgtgctggtggtcgttttcctttggttttttgcaactctctagtgtgtctgttcagagtggtcggttcttgttatcctggcctgtatcgttggatcttttatatgctttcttaaaagcagagtaataaaatgttccttcaaaaaaatgcagttatcctatactaccttgaatggagcaagttcttcatccagtgccaatgtttcttttgtctgcaagagggggaacatttcaaggagaggagacatgttcttttctgctttatatatccttccagaagctaaatatattgcagtattattgttaaaacccattccacgcagcattaatccaacctaagcagcacaagtacaagcatgtaaaggttcagaatcgtcatatttgcttgaagataaaattcatgaagcttctttccaagcagaaacaccatcttttaaatacagacatacctccaaaggagtcagtggacatttcccattcatccttattgctccaggccttattacacgtcctggccttgtaaatttccctctccaacctttttccctagctgcatccagttccttcttctcattgtcaccaccatcaaagacacaacaagagaaggctaccatatcctgaaaaaggaatggttagtgattgataattctccagtctactcaccatggacataccatcagacaacaaaaacgaacagaaaagtaaacttgggtgtttcctgtacacccttggaatatttaattgtttcaggaacaaatggggatagaaaaccaacctcttcaaagcggagatgcactgctacatatttcccattattttcagcacttttttctctcatccgagaaattaaagtgttagatatagtagtgattggtttagaaaattttagggcttcaaaatttgctagacatcgtagacgttgaacagctggaggagcatcaaatgacagccggtttgcaaaaggtgatatccttatgagtctgaaatttagaggcaagtttaaagttcacataagcaaataataactagtacttggggatatgacaaaatagcagatagcttcaaaactgcaggtcgactctagaggatcccgggac

SEQ ID NO: 84727 - DNA, 1053 bp, Arabidopsis thaliana columbia
gcaacttgcatgcctgcagctggtgttgcagcagagggtttagtgcctaaagaaacaaaagtacatgcagagaaagttgccaatctctcagtaatgttggctgagaatgcagttgttctgctgatgcttgtggaagatcatttgaggtcacgcagtcaacaatttttcatggcctgtttagctgatagtgctgcctcacctgcttcaatggcttcatcagctgtcagtaggtcaaattcattgagtagaactggcagtgagcatttggaagctggggactcgagacagtctttgtcaagtgatgctggtggtcttccagttgatgtatgtatatctagaatgtcctttcaatgtttcatcatgttacatcattacatgtcaaacttctttctatgttcttgagtatcggtgaatttgctggtgtcatctaaatgtttttagtttgtaagaagcactatagtattgttagggaatatataatatagaagattgaagtccaacttctaggaacaacttatcatgaagcaataaacaatactatttgtttaaccttgtaatcagtaaggcccttagccattacgggaaccaagcatgaacttctgaagaggctgcattatgaccgaacaccctgcttgtagcttgtaggttcttaattaacaggaatgtctgtagctagtaggttatcttatgatatgttaacactcctcatgttgaggctctctcaggccttagatgtggaataagagtgagcaacaattattttatttaattgtgctaatcaggattctaactcgagacttctggctttgataccatattgagttaaatgcgccaaccagcttaacccaaaagcttaagctgatggagagagattgacaattcagttgtattctaacagcatcactggtttttttgttgtttatatcttttttctgtgttgcccattgactactctgtttcactgagttttggaactcaacaagcataaatgtaatccaaaagaatactgtgtttactgcaggtcgactctagaggatcccgggaccggtacga

SEQ ID NO: 84728 - DNA, 863 bp, Arabidopsis thaliana columbia
caacttgcatgcctgcagtagcaatctcctaatcaagccactaactctgccctaatcgccgccaaatgcctgctgcaccagcggcagcggcgcacaccttgcactgcaatgctagctacctcatcatgcgaccgattccatccttactgggggctcgctgcgccacgtccggcgtcgccgccgttcgccccgcggtggcgctgggccatctcccgcgtctgcccctcgtcctgctgctggacgccgccgctggcgttgagcgcggcgagcatgccgatgttggcgtccattgtcgtcccggcggggaagttgttggcgcttcttgttgacatgaactggagcggcgcctgcaccgtgctcccgccgccgccgaacgcccacgtgggctgcatccagaaggcgccagcgccggcgctgttgggcgccacggcccacattgcggtggctggcgtgacgcgggccttgtgttcctcggcgtcgccgccgtcgggatgatgctggcgcgccgcggggtccttgaacaggtcgtcgtcgccctccctgtagcgcttcctcatgaactccccggcgccgggatcttgcggcgcctgctgctgcggaggcggtgggaggagctgctgctgctgctgctggtgtgggtgatggtggttccagccgagcatggcggcgacctcgtgctgcggcggcgggaggtggtggaaggcgacggcgcgggaggcggaggacgggtgggacgcgccggcggcggagcggagggagacggcgagcgaggagaagttcgccgggatggtcccggtgccggtggcggcgacgatggcgggctcggcctgctgcaggtcgactctagaggatccccggtccgc

SEQ ID NO: 84729 - DNA, 851 bp, Arabidopsis thaliana columbia
gcccgcttgcatgcctgcagtgtgatgtttgagaacacgccgccctctgggactcgtccatgaagttcattgaaagagagattcaggcttgtgaggtagctgagattggcgagggactctggaatcgtgccagacagggagttgtacgagagatccaacgttttcatgctacttagcttgttgccaagtgcacttggtacccgatcctggagcaggttcttcgatagattcaggtaggtcagtgtactgagcgctcccagcgaaggtggtattttgccgtggagttggttggaagaaaggtccataaacgttatcgccttcagaatttcagtaccttccggcgggaacgagccacgcagggcgttgcgagacaggtcaagacccacaatgttctcgagaccccatagccccgggggtatcactgaggtgaggtggttgtttgatagctctaacacctgtaggttgctcaggttcccgatgctatctggtatggggccatggagctcgttgttggccaggcccaagccaaacagctctgtcagttccccgatgcgtgcggggatagttccagacaacctgttgctagacaggtcaaggcctctgaggttcctcagttccgtgatggattgcgggatttccccgtttaatcggttgttgcggagatcaacgaacgagacgctgctcggcatgtttgggatgtgtccggttatttggttctcaaacgcccggaagatctggagagaggagaggttggccagcgtagagtttgggaagctaccggcgaaggaattgctgttcatgacgatgtatttgaggctcctgcaggtcgactctagaggatccccggtacc

SEQ ID NO: 84730 - DNA, 826 bp, Arabidopsis thaliana columbia
  unsure (1)..(826): unsure at all n locations
aagnnnnnnnnnnnnnnnnnnnnnnnnnnnnnnnnnnnnnnnnnnnnnnnnnnnnnnnnnnnnnnnnnnnnnnnnnnnnnnnnnnnnnnnnnnnnnngcacgagtggtatacagagagatcgaagaaagagagagagagacctatacagagatggcctccggcggtggctccaagcagctgaaggctagtcttctcatggtggtagcagctctgctcctcctcatctgcacctgcactaccagggggcaagcggcaaggccggagccaggatccgagggccacacgccacagcagctgcgcgctgatgtatccatctccgtcgttgctggtcatgagaagaagagtggctcatcagtggccgtggtggaaatgcgtcgagaagatccggatcaggcggcgagagaatgtgaggacgacgacggagacgacgaacaggagtgcctgatgaggaggacgttgctcgctcacaccgactacatctacacccaggggaagcacaactagctagtcactgctcactagcctgtgctgctggctcatgctcatgtcatgtcgaggaaacaagttcaagggacaaaaacaaaacaaaaaagctcgcatggttcacgagctagcctagccaacctgaagttctacagtgccgtacgtcaactgtgtggattggttttaaaatatattaccctaagtctttttctttctgcagttctgctagctgtggattattttcatatatatatatatacctcgctaattaccccctgtgatttcccatcggctttctcgagggggggcccggtacccaattcgccctatagtagtcgtata

SEQ ID NO: 84731 - DNA, 970 bp, Arabidopsis thaliana columbia
aagcagcatcctgcagccaacggatcggaaccaaggcaatgtgtgcaagaatctataactcccttgccaacttcgaggcagttcgtttatatactccattccccccttccattattggacagatagatagagaagaatgattgaatgaaggccgagattcttctgtgtacttgcatgaatcctttgcccgtacgtacttcattcctccccggccggcccaagcggatagaagaaaaaagctacgcaaggagctgcgtgtgcgcgcgcgcggaggacaaaaggacgcgatcacgtacgtgccgttacggccggccggccggcgccatagccgttaccatctccatacataacgctcaagtacgtacgcgcgctgaccgtaccgatgccttctctgaacagctccatacccatccatgggcatcgatcccttgccaatcggggtcaccggccggtcaaagcatgccggccggcgggccgctaattttaatttcgccgtcgtcgtgcatgcagcacatgcttgctgctgacccccaatggtttgttcgggtacacttctccatcaacataagtgcagcatgacaacagtagtggccttctacatgtgtccgatttgcagcctcagctcttgctctttgtccatcagcataagtgaatcatggcaataatgggccttttacaattacatgtgtcccatttgcaacctttcgtgtctttcggccgggctagctgatgctgaacggcgtgtggtttctctccttcaacatgaccaatgaacagaacagagataagcagctagctagtagctagctaccctcgctcgaagtgacgtcctacttcctgcaacaagagctgccctctgcccacacaaggatgcgtgtgacgagaggaatccccatggctgttgagagagccaacagcaagttgcatggctgcaagcctgcaggtcgactctagaggatccccggtaccg

SEQ ID NO: 84732 - DNA, 1380 bp, Arabidopsis thaliana columbia
  unsure (1)..(1380): unsure at all n locations
nnnnnnnnnnnnnnnnnnnnnnnnnnnnnnnnnnnnnnnnnnnnnnnnnnnnnnnnnnnnnnnnnnnnnnnnnnnnnnnnnnnnnnnnnnnnnnnngcacgagtcaacttgcgtgccagaagttctgtctacttgtgctgatcagtcataccttggaatattactgaattgttgcctttgttgctcactggcttcaatacttcatacaccactaaatgagacatctgcaagattctttgcagcctcagttgttgttgctctagaagaacttcatcagaagtccattatctatagaggtgtttcggcagacattcttatgctcgacagatcaggacatctgcagctggtggattttaggtttgcaaagaagttggaaggtcaaaggacatacacaatatgtgggatcgctgactctctggcaccagagattgttcttggtaggggtcatggatttcctgctgactggtgggcacttggagttttgatctatttcatgcttcagtcagacatgccattcgggtcctggagggagagcgagctggaacctattacaaaaattgccaaaggccaccttgttatgccagtgtctttcagtgcagaagttgttgaccttataaccaagctactcgtggtcgacgaaaacgcgcgccttggaaccagtggtgctgaagctgtgaagaaacacccctggtttgatggcactgattgggagcgaatagcatctgggacttgtgcagcacctgaagaaatcactgagcgcatcaactactgtatagaaactcttaatgaggacttatccgcatctccttccgtgccgattgaagacccagatgatctccctgctccagagtggatccaggattggtgatctcaatagttgcatgactgtccaatgatgaattgttctagttgaggaaaacgtctctagtttttccccgagcattctcatatcaaatggaagaaggtatacataagagttgatcgaactgacaagttgtacataccaaagattattccttctgtgatcatagatcagaatttgagatgccaagcaacagagactttggtctatgtttgctgcatagttcctggtaagaaggatctggatagtttgttggtgatccatgtaattatatatccaatttgggccctcccttgctgtttcggaaatggatactggtcgggaggaaggtcaataattatcgttgtgaatacggacatttctttcatctgcccctgtcaatcgatttgtacaagatcaagttttccaaatataattatgaaggttccccaacccaaaaaaaaaaaaaaaaaaaaaaaaaaaaaaaaaaaaaaaaaactcgagggggggcccggtccccatcgccccctagtgtgcgc

SEQ ID NO: 84733 - DNA, 1063 bp, Arabidopsis thaliana columbia
gcaacttgcatgcctgcagtatttgatttaggtggctctttgacatcttccttgggtgtagttttctgcaaccaaggtacggtggcctccacgcctggaggaagatccaaatcatcaaatttatcagcaaggtgctggttaaagtcagcttcatcgaagtcataatcatcttcgtcgtagccatcaaaatcatcatcacaatcatcctccatatagtaatcctcttcttcttggacttgttggggttctggttctgatatttgcagagaactacttgagctggaaccagcttgatcgctggaagaaccctgtaaaacagtaggctagccagtaattataccaatcaaagcattaaaagaatgcacgaaaaggacaggcaaagtccttctgttccgcgatccagaaccctatgtttaattagtcgtgtggacgctggactgattggcagttagtagtagtataaaaatatgaatagaacaaatgcatctttatcataaaggccaaaacaactgccgcaatgcttatcgcaatcctttgcaggatgaaataaaatcgaagggaagccatctcctgacagcgttcaccgatccgctagattaatcgaagaaacgaaatcaggtcaattatgaccggcattgcatcaatcaacccaagaaagacccccgatcgtaccatattcgctaccaactcatccccagcgaacacctcggcactcgaattgacgcgtccaaatcccaaaccctagtgccctaagaaacccctggccgccgaaaacccccaatcccggcggcaacccgaaccctaaacgacacgcgaatccgcccgagaccggaatcgcgcgaggatttcgaagggtggccgagaaggcgacgaatcgaccggctccggaagggtaatggggaacggaaagcgagacgagcgggagaggaggtgacctggcaccgctggcgcttctgctgctgcgcggctccacacgacacggcgcccgtcgcctgccacgacgaggagctcccctgctgcaaggacctgcaggtcgactctagaggatcccgggtaccgagtc

SEQ ID NO: 84734 - DNA, 1039 bp, Arabidopsis thaliana columbia
  unsure (1)..(1039): unsure at all n locations
tagtaannnnnnnnnnnnnnnnnnnnnnnnnnnnnnnnnnnnnnnnnnnnnnnnnnnnnnnnnnnnnnnnnnnnnnnnnnnnnnnnnnnnnnnnnnnnnngccccaggaaggtttggctggtggactcaaagggtttgattgttgactctcgtaaaggctcccttcagccattcaagaaaccttgggcgcatgagcacgagcccttgaaaaccttgtatgatgctgttcagtccatcaaacctacagttctgatcgggacatctggagttggaagaacattcacaaaagaaatcattgaggccatgtcttccttcaacgagaggcctatcatcttttcactgtcaaacccaacctcgcattctgaatgcactgctgaacaagcatatacatggagtcagggccgttcaatctttgccagtggcagtccatttgcccccgtggagtacgaaggaaagacttttgtgcctgggcagtcgaacaatgcctacattttccctggactcggcctcggtcttgtgatctctggagccgtccgtgtccacgaggacatgcttctcgccgcctcgaaagcgctagctgatcaggccacacaggacaacttcgagaagggctccatcttcccacccttcaccagcatcagaaagatctctgcgcacatcgctgcagccgtggctgcaaaagcctacgagctcggtctggcgacccgtctgcctccccccagcgacctggtgaaatatgcagagaactgcatgtacactcccgtctaccgcaactaccggtagtgctgcggggatcaattttgcagtaataaaaaatctatcaacgcggatggtactctgttgtttatagtccctgctgctaaccacccttgttgctggtgctgctggagaggcattgtacctgtccatgcatatatgatatatatatgttgtaacgttgtgaaagcaaacaatcttgggtaccaatgtttgttattcaaaaaaaaaaaaaaaaaaaactcgagggggggcccggtcccaatcgccctatagtgagcgt

SEQ ID NO: 84735 - DNA, 613 bp, Arabidopsis thaliana columbia
  unsure (1)..(613): unsure at all n locations
cttggtaagntccgccaaccggcnccaanaatccggtttaccggtaagctccgcgtnccgggttacttcccgataaaccggattttggtggggtttaggttctttcccncatgttccaagaccaatccggttgccttcttcttcangaggattctgctttcaccaaactcacttttcctttataagggagtaatatcttcaccgtccattgaagggacctacaagataggtattaggtgaagctttcctttgaagactagattgagagatctctgaatttatttcaaggtggtggcatggaatcttcagctgatggaatccggcgaattatgtggaagaagctcttggtgttgatttgattaagcccgaccgacggagcagaggtggatcgtggatcagccggcaacgtcagtttcaacatctcttcatctcacgttggacacgtgttggcaacgtggcactttttttgtcttagccttatctttagaattgggtgggttaagctgggctttaaattttaatcaaagttgtaaatggtcagggattggtctattcatacgcatctgtaacaccctttattgggttttaatatccaatatgaaatatggccgac

SEQ ID NO: 84736 - DNA, 957 bp, Arabidopsis thaliana columbia
gcagtaccgcaccggaattcccggggcgacccacgcgtccgacaaacaacatgcattcttaaacataaatggctaaatattagtttctctctcttctctatcatgtatctttgagagagagaaactttctactttgtttatagtttctaatctaaatcagatctacaaataaattttcgttttaacggataaagcttccggcgttgtccggtttatctttccgattagatcggattttttgtttgtgttttagtttttctttttccacatgtttacaagatcaattcggtttgctttcttcttcagaagaattctgctttcaccaaactcatcttttcctttataagggagtaatatcttcaccgtccattgaagggacctacaagataggtattaggtgaagctttcctttgaagactagattgagagatctctgaatttatttcaaggtggtggcatggaatcttcagctgatgggatctccggcaattatgtgggaagaagcctcttggtggttgatgttgaataaagcccgaaccggccagaaaccaaaaaggtcggattccgtgggaatcaagccccggccaccggtttaggttttcccaaccaattcctcttttcggttcctccaaccggttgggggacccaccgttgtttcgggcccaatccggtgggccccctcttttttttttaagtgccctttaagagccccttctaatttctcttgttaaaacaaaatttcgggggagtgaggggcgtttaaaggaccttcggggccctttttataaacaatatttttaaatttccacaaggggtggtttcaaaattggggcgaaagggcgatttggggcccctttttcacattagcccttattggtacccccccccttttttttgggggtgtctttttttttctcccatattggaaaatttgggcccccccaaaaaaaaataaaa

SEQ ID NO: 84737 - DNA, 885 bp, Arabidopsis thaliana columbia
caagctatgcatgcctgcagtgataaaattattcagtgcaacagatataaatcattgaattgatgcaaaacagagcattattttctacaaaatatacaacagtgcttttattaagcaggcagaatgagcaaatgaagtgtagacagattggtcctatagtgttgattcatggcatacaaacgaatactaatactaaatgcgttattcacaatgccatggaatatgactaatactccctttttttgacagataaaggtctacacggattctaaattatgagcgtgttgactttatacacaggaaatgtgaatatatggtaccaaatcccccaggtcccagccattctctttatacgataatacgtaacaactttgcgagttccactaatcatcaactcagcaaacaaacatcaaatattaagcccgtggacagtaagaaccccgggatcatcaaaagcatatacccgatttcgtgtggacctagtcgaaatttgcgccggactaaaagaaagtaccctatgggctgcaacaatcaacgcagtagaagcgtacgaaggaggttaatcaaaaaggcgaacttacttctgcccatggcgacggcagctgagggaggcagtcggtgtcggcggaggcggcgaaacgaggaaggggtgcgtctagggcttggagggaagagagggacactttatatagagagtgcggacgcggaatggagccgtaccgccgtgggttttgtgcgtcacggcatgcgactggcagatgctagggcttggggaggaatgggacgaaaaaacacacaggagcccaataaaattggcgactcctttctctcaaggccagagaacacaactcctgcaggtcgactctagaggatccccgggtaccg

SEQ ID NO: 84738 - DNA, 1041 bp, Arabidopsis thaliana columbia
gcaacttgcatgcctgcagcatttgatgtgatttcctgttgaactaatatttggacccatcgcaaactaaattcaagaaaccagcaccagcggggcaaattggaccagctaattaatcgcagacagattgtttgggctaatttgagagccacaaaaccgaagaagagttagggctaatttggaaactcaaatccccttcgggattgaaggagattggagaggaaattagtccatttccacctcaatctcctccaatcctgaaggggattagaggttcccaaagtagcccattaggggctaaaatatctttgttagggctagtatggtaatcccattttttcaaggggctaaaatatctttttaccaagggaaattatttcattttcccttgagaaaatagagtttccaaactaactcttattcaattttgaaaaaaagaaaattttagcactcccaatctcctctggtattttagctctcaaactcgtcaatacaggataacgatcacagacaaatctgaatatctggttgccacgaaaactacaagagagaaactcagaggggtgcaagcgcaatccacttgggcttgctcgtatcgtatcgtacgcaggtagcattttatttttgtttttccttggcagacaacagacagatcaagcatgcttgcatttactcccagtcgaactcagtcccgagaatcccaaatcagagaatggtttttgatttaggacaagaactcatcaccgtccagctcaaaaaaaacaaggccaattcagctcaagaaccgaaggtcgatctgggggctgggccgctgacatccacgtatctcgtcagaaagcacattcttttgcgcccgggcataattgatattagcgatgatggataaatagaggtaacattgggtgtgaactgtgaaggagctgaaccatctatccatcatcacaaatgtagtatattacagcaaatctaggggggttacacttgtttcttcccgctatatcctcactctgcaggtcgactctagagatccccggtaccgac

SEQ ID NO: 84739 - DNA, 851 bp, Arabidopsis thaliana columbia
  unsure (1)..(851): unsure at all n locations
nnnnnnnnnnnnnnnnnnnnnnnnnnnnnnnnnnnnnnnnnnnnacacaggaaacagctatgaccatgattacgccaagcttgcatgcctgcagtgctcctgcacctcctcgatgtcgtactgggtcagcatggacgacgcgtttcccatggctccccttccttccttccttcgccctacgatccaacagtagttgccgccgaagagcgcggcggtgaacttggctggcgtggatgggaagaagggaaagggacgcgagggcacgggacgacacagacgacgccacgccacggccgcatattctcatgccaaaattcccggttgccggagacaccgagcctctgcctgccagtgccaggtgccaccgcgggctcatttattggctgacgtgtcgtgggcctcacgggtttctttactactgggctgggttgtgttggtcccaaaagaaaataaatatacgcgggcctgctgctgcccttgccgtattttccttcttcgttgggaaattggtcacccaaattgggtgtagatctagagacagatgagtaaaaactaaccgcaagtaattatagtcaccccgggagcaataataattatgtcatcatgtaatcctcaccggacaagacatcttgccaatccggattccggagcaccatcgcattcgcagaccaccaaagtctgctttgcgtccatcaaaatgcctgataaccagttagcaaatccacactaattaattagtcacatctaggtagctgcaggtcgactctagaggatcccgggaccgagtnnnnnnnnnnnnnnnnnnnnnnnnnnnnnnnnnnnnnnnnnnnnnnnnnnnnnnnnnnnnncta

SEQ ID NO: 84740 - DNA, 1116 bp, Arabidopsis thaliana columbia
tagcaagcttgcatgcctgcagatatattatctaatacatatatacatgtttagtccttaaacctgccactttctggcaattggtcatggtctatctgggcattgaagtactgagtcaaggagaataactatgaaccgtcaaaaaaacatgttcacaggttagagagaatccaccaaagcatatactaaaaagtgaagaatattaattgcatgagcttaagaaaatactacttcagatgagaagtataccatttttccaacacctggtgatcccacaaatattattttgtctactgatgatacaagagcttggcctgtttccgcaaaactaaaaaccaacaaaaaacagagtccaggtaagaaatgtgcagctagcctgtaaactaataagaatttagaaagctgcactcatacccagttattatgtgcaccagattctcaggtgcaccaacagctgaaagagctgcttgtataatacgaaaataaaagcagcccgaccaagtcgcatgttctgagacctataaaaggtaattttaccattcagaataatcatgaataatgtctaatgcacatcagaaaaattagatattttagaggccacaaaaatgtctaagagcagcacaaaggcatatataacatataaatacatttaacttagaaaaacaagaaaataagttaatgacacaattgtatgcagtgttgccatgctacattctttctcggacaatgcaggaggaagggagagaattctactagcattcagtataaataaaggatcaatccaataaaagctcagtagagaattgttctgcatttatttgacaagggtgctttctatgagccaacatatgctcaatatgaaatttactaatttctagaagatcatactaggttaacccaacaaaagtataattgaagataggatacagaacataaactatagctctcagcttcaatggtggcacataatacatgagatatcaagattgctgaataacaaaaaaatgatctatgggtccacgtctccacgatgtgtacatgaaaatggttggttaaagaacaaattttaaaaaaaacttgacctgcaggtcgactctagaggatccccggtaccga

SEQ ID NO: 84741 - DNA, 788 bp, Arabidopsis thaliana columbia
gcaagctatgcatgcctgcagagccctgtgtgagactagcagaacattctttccaagctgcatgacccatcatttcatggggcagtggtagggcagtagcgcaactttccgacaaaccaatatttcctgtgtctctaaatttcacacttgcatgtagttgtagattatgcttaccatgaccaggtaacttcagagcaagatcaagaatctcttctgttctttgaagacaaagcttcatacggtcaccagatgacaatgaagtatgtattgtcccatgggaagaatcataaagctgctgcatggaacgatcatgaggtatggactgagaaatgtattgttgctgttgctcctgctgcctgagctgtagcatgttgttcaatagagaggattgaggttcagggactccaggaatcaggggttgcaagtgtagctctgatagcagatactgttgttggttgatgtttaactgaggatcatgatatattccaccgagaaacttttctggctgtgtgatttgagagttcaaacaagctaaagttggttgattctgtgttaaaacgtaatgctgttgagcatcaatacttatttgctgagaattatgcagattttggtgcacatttagtatctcttgagtaacatctataccacacataccagcatgcagatttccagagtcagcattatttgaccgaagtgacaatccagaagtagcagtcggtgcttgtcctttttctgcaggtcgactctagaggatccccgggtacgagctcgaattcactggccgtcgt

SEQ ID NO: 84742 - DNA, 888 bp, Arabidopsis thaliana columbia
tagcaacttgcatgcctgcagcagtgcacgcgcccgccccatcaaaggccggccggacacagaacagcacgccgtgtgtgcatatgtcagtgtcatattcatagtactagctaactagccatcatcagcggcgtgcgatcaacgcgcgctgcatcgcattgcatgcatgtgccacgcacgcacggccgccgcaatggtgaaacgccgctgtcatctgatcacacacacaacacaaaaccatactacagcgctcgctactgcacacacgcgctgccctgcctcggaccctcaatcggagtgcagagaacgaccggtgagcagtagctgactgagagagtagcggcacctttttcatggagccgagctgcacgacgccctccctgacagcgatcagggcgatggtctgcacaagtgcagagcaaagcggagaatgtgagcgagagggggggaaaaaaagaaaaaagaaaagccgacgcaggcaggcaggccaattggccatggcatggcagagtcagctagctggccatgtcttggcatcgcagcagagaggtaggccacacagcccacagctagctagcgctagctgcttgcctgctgatcaaaaggggccggattgcgatttgtcgaaggccttaaaagttgtgcaccctaggatgcccgcagcttggaacttgcgccctccccacgttcctcgggatgctttgcgaaagaacacagggccatattgtggcattggctttcacacaggagatttagtgggctttgaggtaaaacgacggttgcagttttagatttgtgtaaaaagataagacagagatgcgaggaacatactttagcagagtctgcagggcgactctagaggatcccgggacggtttcaactttatcc

SEQ ID NO: 84743 - DNA, 816 bp, Arabidopsis thaliana columbia
atagcaacttgcatgcctgcagcgtatgatcacggtttgtgaccagccatgacagcacttcaaatatagagtatttctgtatgaccaaagtataaaacaacttaccaacttctctcgtcagtcatcactgcaattaaatttatctatgaaagatgtgctgtaggtttgatgcctacttcttctttacatgtttttaccgttctcatattagatgactatttcttattcttataccttttcgccccccttatttttttccccagaaaacatgtgccatatgcttgaccacaatgaagcctggtcagggccacgctctattcacagcagagtgctcgcacaccttccacttccactgcatttcggcaaacgttaagcatgggagcagcagctgcccggtatgccgtatcaaatggaaggagctcccgttccgaggtcccttgcctgctgaattgccccaaggaaatgcgaggatcaatccagttcatgggtaccaaaatgggggccatatgagcataccgcggccacttcctcgcgcacgctcttttggccggcttcatcatctggccacgctgctgcctgacgctgaccctggcactttcaacgacgacgaacccttggatttgtcgtgcgaagaggctaaggctaacggcactcagcagggctgtttgagaacggtagagataaaagcatatccagagttcacccaagtgcctgaaaatacatcagaaagaaacttcactgttctagttcacctcaagggcaccgcctgctcagcaccttctgcaggtcgactctagaggatccccgggtaccgag

SEQ ID NO: 84744 - DNA, 1074 bp, Arabidopsis thaliana columbia
gcaagctatgcatgcctgcagtaccagtacgtcgccatgcatatagcagagaggctagggaaggaatctgggtcgtcgtgctttgagagatctgctttcgcaactccaatgcagcctagtagctaaccacctctctctctctctctcttcgcctggccgtggccggggttgtgtagtgtgtgtagggtagctaggaataaagcgagcgagctggcccaaggcctatctatgcgaaagacgacgatatcactcacatcaaaggaagagaaagagacacggggcccacgccgacccctatatatatccacgtacgtacagtagacacggatcacacacaatgatggcgagacggcatcagcatcagcagcagaggatgtgttgttggaacggacagacagcgtgctaactgacgtacgtacgtacgaacgaaagctgtaggctggctggaagtttgttgctcagctcagctcagctcgttcgttcgcttcactctgaccaacaaagcatggaaaatggcatgagatcgacacctcaccaacacacgcgcaaataaaaccagtccaaaataaagggagcagcagcagtgcatggccggccggagagcaagcctacgtactccggcagctgagctattatattgggtatatattattgcagcatgcagagcacgcacggaggccgatgcatacatacatacatactgcgcttgatggccgtatacttgctcatcgatcgaccgatatatctcgctctttcgttcatgcatgtgctcgtcaatctctgaatctgagaggcagggcgatctggtccagtccaagtcaatggtaaaagcaggccagcagttgggaagcttcaatcttcaagttctgcatgtcttcacgccatgtgacagcacagcagcctcatacgtacctgtgcccgcgccagagagaggccggtgtctttgcgagcgtggtcgccgtccggtgccagaaacccagagaaactaactgctagctactactggccggcagcaagcgtagtggtaacctctaggcgcctgcaggtcgactctagaggatcccgggtacgagt

SEQ ID NO: 84745 - DNA, 705 bp, Arabidopsis thaliana columbia
  unsure (1)..(705): unsure at all n locations
attgatctcaatataactgctcccaaaaaagcttctctagctgatgtgggtgttgtgggggatctgagcaatgaagatgggaacaaagcatctgctgcatcgtactactcaggctggtccatgggtgcaggatccgggcttggtaaaactggcctatacagtacacagcagcagcagcaacaacaacaacaacaacaagcacctgatatctcagacgatttcttctccagcctcagtaaccaaaggtaccaatctggtggctttaagcagtgaaattgtctgtgatttggtgttgagatgaaaaggcatatcaagtttgattctacattccatactggaaatgtaagtttttttaatgggtttgttgttcttgcacttcattcatgggacaatttggtcggtgacttatgggccaatggtggtggggcggttaccttggggtttaaataaaaaaaaaaaaaatggccttaaggttttttttaaaaaaaaggacctttaataatgggttaaaagttccaattggttaaaaaaccaaaagaaaatgattttcttcccccccaccaaaaaatttttttaatggggggtaattcttaatccaaaaaagcctccaactttaaaaaaaaaaaaaaaaaggcggcccgctctagaggatccaagcttacgtacgcgtgcatgcgacgtcatagtcttnctatagtgtcacct

SEQ ID NO: 84746 - DNA, 783 bp, Arabidopsis thaliana columbia
cccaagcgaccgcccacgcgtccgggctaagcgagacacacacacacgcgcagtcttcttcatcttgcttgcttctggttgcttaaccaaaacaccatggaatctccctaaatttcctcacctactcacttccaatttcaacctgctcgattcttcccctcttcttcgcaaaagccctagttttgatcatcgcacttcactctcctccgcatgagaaatcgagaaatccgctcgacgtagtagatagataaaaccacaaagttaggtttttttcaattgggtatggaacctcgtgttgggaacaagtttcgccttggccgcaaaattgggagcggctctttcggagagatttacctcggaactgatgttcagactaacgaagaagttgctattaagcttgaaagtgtgaagactgcgcatccgcaattgtcatatgagtcgaggatatatagagttcttcagggtggaactgggattccaaatatgaaatggtatggtgttgagggggactacaatgtcttagtcatggatttgcttggtccaagtcttgaagatttgtttagttattgcaagaggcagtttagcttgaagactgttcttatgcttgctgatcaaatgataaatcgtctcgagttcattcattctaagtcgtatcttcatcgtgatataaagccggataattttctcatgggcttatggaggcgggcaaatcaagtctacatcatagactatggtttggctaagaaatatagagacagctcaactcatagacatattccatac

SEQ ID NO: 84747 - DNA, 654 bp, Arabidopsis thaliana columbia
tccacggtatcgataagctagatatcaaatccccggccgcttcaggtttggatctggatgttcttcttcaaagggcccaggcttgcaaagttcagagtagcatgtggtccaaaattggccgactcaaacgctcttttatgcctaagcttaaaggaaacagtaattatgggtcaggagctacaccagggctcatgtcttgtattgctggaaggctcttgtgtgatacagatctgtgttctcgtgacttgttgaaggaggtcagttattctttaacggacctctcaaagacacagctgaaccgggacaggaaagagatagcgcctaatgatattcccaaaaatgtttcagtcatccaaaacacttgtgggaacttattgaatgtggtgagacggatgcatggttatccatggagctcatgtttcatctaagtgttcttcctctcactcttccagcttactcaacataagtggcaatctttgggggaaaacacttcaaggggccccggcacagaggatcgaatactacttactacatacattccactcgaaaaagttcattctccctgacaaaatttcacaacgtatgaaggaaataaagtcatcaaaaagaagaatggattatgctccagaagaccgcaatgtagatgaattggat

SEQ ID NO: 84748 - DNA, 666 bp, Arabidopsis thaliana columbia
ccccccaggtcgactgtatcgataagctagatatcgaattcgcggccgccttctatctttccctaaactgctgttgcaggaataaaggattgtcacttctacttcatgtttccagagaagggccagaccaccacctcctgggctatgcgggggaacaaggtgatgtgcagaaaaattcatccagtttaaagaggtataatagttactcgtggagtaggttgacttgaggaagggttggaggctccaggttggaggagaagcttttgctttgttttcgtggttctgctagggccagcagattcttgtatgtgagcttcattcttctcaggagcaacacagctttgtagtctgatcagccggatgacctttgtaaggtctttggtacctgagagagatttatccttggtgtttggaagatcctcaagaggcaagcgcctttcagtttgggggtgcacaacttaacatattgtcagagtgccgtctctaagccctcccatgatttggtcattagtagggatgggaggaggaggtggtggagttaccttataagaactctggtgactttcctgcgggagacgtcttgtgcccgaagtttctgagctatcatttcttggtctgactcttggaggagctgtatcccttccttgaggagtctgataagaatct

SEQ ID NO: 84749 - DNA, 395 bp, Arabidopsis thaliana columbia
ctctctctctcttggaaaagtcaaaatcaagggtttcgtcgtcgctttgactggcttggactcgcttgctgattgagaagcgaaaaatgcttgaatcaggaatttgcaagtatgcgtgaacaaaggagcaagaaacaatgatctaaagaagatgaagttccacttactgttagagagacgtttcctaagatggtgatggaagaaagatcttgtcatactgctaacagagttggggatgtccaaatgggtaatggtcataagcgtggaagaagcgaagattcatccagcaacaatgttagtataggtgtggagactgataaacaggatatgttgtcaaacaaagcccaaaagaagtgggtctttggaaaatgtgtcaatctttcagctgtggatgc

SEQ ID NO: 84750 - DNA, 738 bp, Arabidopsis thaliana columbia
atggaattgccgatgccatttgccggtccgcaatttccggttcgacccacgcgtccgcccgtggcaacgaatgaacgggttaaaggctccttaaaggtcacaagagcgtttggtgctggtttccttaagcagcctaaatggaacaatgcacttcttgagatgttccaaattgattacgttgggaagtctccatacatcaactgcttaccgtctctctaccaccacagattagggtccaaggaccggtttctaatactatcatcggatggtctctaccaatacttcacaaacgaagaagctgtttcagaggttgagctcttcatcacattacaacctgaaggggatccagctcaacaccttgtgcaagagcttttttttagagctggctaagaaagctggtatggttttccatgaatttgcttagggttaccccaaggtgaccgaaggcgggtttcacggatgatgtttcaatactagcgatctctttagaaggaacaatgtggaaatcttgtgtatagaaaacaatccctatgagcatacacacaagaacaaattggtgtgttcatggagacagagatcgatctctcatcaactctgaatcatgtactatgttgatataaacaggagataaaaaaagttttggcaactacttagatgtccaattgtgtcattaattacaagtcaaaggttggttctttgaaatgtgaagttttcttccacctagggaaaacaaccgtt

SEQ ID NO: 84751 - DNA, 726 bp, Arabidopsis thaliana columbia
ccgggtcgacccacccgtccgaaaacagagtgttcctgaaattcctaaaataaaagacttccactttccagcaacatggatgcttgatgttagttcacagtcggtagaaattgaacttggtgtcgatttcgcaaaaatctaccatgactctgctctttacaagcgaaactcagagcttgtgaaacagttgagccagccagattcaggatcaagtgatatacagtttaagagaacctttgcacaaagctggtggggacaattcaaatctattctatggaaaatgaacttgtcttattggagaagcccttcttataacctaatgcgtatgatgcacactttagtctcttctttgatcttcggcgcacttttctgggaacaaggccaaaatcttggtactcaaccagagtatgtccacagtatttggagcgatctacgggttgggacccttcttagggataaacaattgggcatcagctcttcaatatttcggaccagggggaaatgttttgtcccgggaaagattcccaggggtgtactcagcgcctgcttttgcattgggtcaagtggtccctgagataccctattttttcatacaagctgccgagtttgggatcgtaacatatccaaaggaacggttttatccttcagcctacaaaagactttggggcactcttacttatgttttgctcacttactccctttcaactaccctggcgaggttcctcg

SEQ ID NO: 84752 - DNA, 584 bp, Arabidopsis thaliana columbia
  unsure (1)..(584): unsure at all n locations
aaattaggtgcatagcaaaaaaaaataacacaatcgtgccaccgaaccaatcgggccgcccttttctaccgccggctaaatttgacggtcacatatagagccccaaaaactctccaccatgtccactcttcctttcgcgccttctgtcacccatgcgcactttagccactccctctcccccatgtttatcctgcgccatctccctcttacacgccatctccgtttatcccgaaataaccgcgtcgcttccgttgtatccgccgccgccgttcgccaggacgcttccctctggactccagctcctctctctctaatcgaatcagctgcagaatcgcttttccacatctcaatcgacatttcaaacgctccggatctcgtagcttcgtacacgagaccccgggtcagtatctccaagatccggtgttcctgatggttgagaaggccttcttttatgggcaatggttttcctccttccttgggggtttttggnggngntttggattnttggntaaagggatcgttggttnccgggggggtttttggggtttagnaagggnacccttaggtagntttatnggatnttc

SEQ ID NO: 84753 - DNA, 724 bp, Arabidopsis thaliana columbia
tccgggtcgacccacgcgtccggggtttggaaaagtatataaaggtacattatcgacgtctaacttggacatcgcggtgaagaaagtttctcatgattcaagacaaggaatgagagagtttgtggcagagatcgcgaccattgggcgtctcagacatcctaatctagttcggcttcttggctactgtaggcgcaaaggagaactctatttggtttacgactgtatgccaaaaggcagtcttgataagtttctctaccaccaaccagaacagagtcttgattggtcacaaagattcaagatcatcaaagatgttgcttctggtctctgctatttacaccaccagtgggttcaagtcaattattcacaggggcattaagccagcaaacgttcctttctttgatgattctttgaacggcaaagctcggtgatttttgggctcgcaaactctctgtgaacacggggttgatccctcaaacctctaacgtggctggtacgtttggatacatctcaccagagctttcaagaacagggaaggcaagcacaagttctgatgtattcccgtttggaatactaatgttagagattacttgcgggcgaagacccgtcttgccacgagcattttcgccgagcgagatggttcttacggattgggtgcctagattgttgtggaagaagacctattgccagtggttgatgacagggttaagcctggatgattagtacc

SEQ ID NO: 84754 - DNA, 745 bp, Arabidopsis thaliana columbia
atttccggtaagacccacgcgtccgcagagacgacgagagaaacaatggcggagtctgcgatccgaaccatcgtcgaatcaattcactcatcgccgacgcaagccgtcgtgtatctctccggcggtgcctctcagtctttaggttggttaatgtcagttcctggagcttcgaacacacttctcgaagccgtggttccgtattccatgatctctatggttcaattactcggcagggttccgaaccaacactgtagccaatcaatggcgaatgaaatgggctttgttagcttataatcgtgctcttaagctttctaagccaggatgtgcggttcttggtgttggttttactggaacgttagcaacctttctcgttcccaaagcgtggggattccatagggttcttttttttgtcggttaaaagggcttccaacccggatattgggaaacttcagttactctaacaaagggaaaacgaagccgagaggaagaagataaagtggcaagctctgtactgattcaggctatggctaaggcatgccaagtttctgagacacttgactctggcttgactgattctgaggtgcttaatgagtctgtaatccagtttagtgaagaagaagaactagaacagcttatagatggacaaatatgctctaagatctatccatattctaaagcagaatcatacgggtcggataaagatagaaagattatactgcctggttcctttaaccccattacatga

SEQ ID NO: 84755 - DNA, 988 bp, Arabidopsis thaliana columbia
  unsure (1)..(988): unsure at all n locations
gctccttacaatcaagctgcttatcaacagcatcctcagtttcaatacgctgcttatgaggagcagcagcagcaacatcaccagagtcagcagcagccacgcggtggatctggtggtgatgatgtcaagactctttgggttggtgatcttcttcattggatggatgagacttatctccatacctgtttctctcacaccaatgaggtttcttctgtgaaagttatacgcaacaagcaaacttgtcaatctgaaggatatgggtttgttgagtttctttcacgttcagcagctgaggaagctcttcagagctttagcggtgtaacaatgccgaacgcggaacagcctttccgtttaaactgggcatctttcagtactggtgagaaaagagcatcagagaatggtcctgacctatccatatttgttggagatttggctccagatgtgagtgatgctgtcttgcttgagacttttgctggtagatatccatctgtcaaaggtgctaaagttgtgattgattccaacactgggcgttccaaaggttacgggtttgttaggtttggtgatgagaatgagcgatcaagagctatgacagaaatgaatggtgctttctgttcaagcaggcaaatgcgtgttggtatcgcaaccccgaaaagggctgctgcttacggccaacaaaatggttcacaagctcttacacttgctggtggacatggagggaatggttcaatgtctgatggagaatcaaataactcaacaatatttgttggcggtcttgatgctgatgttactgaagaagacctcatgcaacctttttccgattttggggaggttgtttcagtgaaagatcccagtagggtaaaggatgtggcctttgtccaattttgcnaacaggcaaaagtnctnaggaagccntcgggnacttnnaccgggncagtaattgggagnacacttttccgcctttcatngggaagagnccnacaaacagttg

SEQ ID NO: 84756 - DNA, 736 bp, Arabidopsis thaliana columbia
ccgaatttccgtttcgacccacgcgtccggaggaaaacagcgatgtgtttgaagatggggagatggaggatggtgaactagagggtgatttgagttcgtaccgagttttatctagcaaaacgttagctgatgttgttgaggctttgattggtgtttattacgtcgaagggggtaagattgcagctaatcatttgatgaaatggattgggattcacgtggaggatgatcctgatgaagtcgatggaacattgaaaaatgttaatgttccagagagtgtgctcaagagcatcgactttgttggtcttgagagagctcttaaatatgagtttaaagagaaaggtcttcttgttgaagctataacacatgcttcaaagaccatcttcaagggggtttcgtgttaccacagattggaatttgttttggtgccgcggtcttggttcctctcatccacaagacatctatttttcacatacacaagccttcctcctggtcggttaacagatcttcgagctgcagcggttaacaacgagaattttgctcgcgttgcggttaaacataaactccacttgtaccttcgtcacggttcaagcgccctcgaaaaacagattcgggaatttgtgaaggaggttcaaaccgagtcatcgaaaccggtgtttaactcttttggtttgggagactgcaaagcaccaaaagttcttggagacattgttgaatctattgcaggtgctatttttct

SEQ ID NO: 84757 - DNA, 588 bp, Arabidopsis thaliana columbia
agctatgacgtcgcatgcacgcgtacgtaagcttggatcctctagagcggccgccctttttttttttttttagactataaatgttatcttctatgtaagtaattacacagctgggttctaaatatcttctacatctaattaatgacctcaaaaattgttacatatatgtgatccttgtgaattggatctaatgaagctgaaaagtgacggtgataaatgtatctacagggcaagggatggtcaagccgcccattggatgatcaaacccaaactcttgttcagatttactcaacaaagcttgaaatgaaggctggttcaaatatgagactggcactatgtatcttttcatctggctttctccaacgtacactgcaagaaacccttttggtgtcgaagctgccattgatcgaccttgaaagatcttctttgcgcccataagacctcggaacactcccatttttttgttctgctctgatggatcctggaaaaagattcagcttaaaaagtctcctttagcttattagattagcggacccgtgggtcgaccccggaaatttctgaccggtacctgcaggcgtaccagctttc

SEQ ID NO: 84758 - DNA, 612 bp, Arabidopsis thaliana columbia
tagacgagctatgacgtcgcatgcacgcgtacgtaagcttggatcctctagagcggccgccctttttttttttttttttttattagaaataaaataaatgagtaaaaaagaataggaatagctcaaatttttatatatattccgtcagaaaaagagcaaaatatgacaagagatttatcttgagccgtctttttaagtttgacagtgttgagtctgtcttcttggggctcaagtcattgctctggttgagaaataaatgaattagctgttttctttttttcagagagagagaggtaaaaatgtgaagattgtacaaattgggaaatgagagagagatcaagaagaaataggttcctttggtgttgcttgttgtgatttcaggagcagtcgttgttgcttcgccttctgcagctggtacttgttgtggtactgcttcagattcggtggaagaagatagtactccttggagaggaggggcaaaagaggaattggatgggtaaacgaggaaagaaggagaagaaaaccgttgatgatgatgttgttgaggattatatggttgaggaagatgatgatggtgttggtatggtactctaggagcttgaaaagaatagc

SEQ ID NO: 84759 - DNA, 602 bp, Arabidopsis thaliana columbia
tgacgtcgcatgcacgcgtacgtaagcttggatcctctagagcggccgccctttttttttttttttttttttttggttggggcaaatattaattaattaacgcaaaaatatatacaaaattctatcctccaataaaggagaatccaaaatccaaagagctgtaataatgtcccaaactcaaaagcttctctggtggaaattttctcaccgtaagtgggagaaaaacaaataaaaaggagaaaaccctggcttctatcatcggccttcgtgaagatcttctgagaaaacaagttggtcgtgtaatacttttcctgatcaaaagcgcttagaccagaataaggaccagaagagaacatagaagaggttacttctgactcgaacgtagctgatgattgtctccggttaggacgagctttatttgaagtgtttaaaaccgggtcttgatactcaaccacccgttgaaccattttaagtgactgaaccacttcgcccatcgttggtctctggctagcttcaggtgcaacacaagctgcagcgattgtgcatactcttatgaaatcttctttcgggtattttcctttcagtcttgaatcgactagttc

SEQ ID NO: 84760 - DNA, 610 bp, Arabidopsis thaliana columbia
ctatgacgtcgcatgcacgcgtacgtaagcttggatcctctagagcggccgcccttttttttttttttttttaagtagcacgaaaccaatcaatgatttgggtaatgtaatacaaaatggacgaattgatcagttaacgagagttacggacaaagaataaagtcggcaagaaaaaaaatacaagtatgaaacacgttgtaacatcactgatgttcactggaagacaacaaaaaacaaatatggtgaagacatggcaaaacaaagacaagtcttctcaaattcaataagacaagaacactcgtgggccactcacttcgagagacacatcacgaaaagtgataaattcacactggtttctttgaccaccaagaataaatttaagaaaaatccaaaaaatttaggaaaagttgggatactttgcgacgcgcctagacaagaacacggtgcacccatccttgggcgatatagtagggcagtacacgatctcatcacaaccgtctgatcgaagcctcttgaaatccaacaacgacgagaacattgcaatgaagagtacgaggtggttcaacgcgtaacgctggcctacgcattggtgaggcccccatccaaaagc

SEQ ID NO: 84761 - DNA, 508 bp, Arabidopsis thaliana columbia
aggaaagctcaaaatatcctcttgtattctgatcaaatttctgtaatatcatcgatggtgctatccaaagagaatatgttgaaatactcggcacaccttcgtgcttacaattccgcatgtggagaccatccagaactcaaatcctttgattctgagcttcagcagaaaacctcaaatctgataaactcgttcacctctgatgccaaaactgggttggtgccactgccccaacacgcagcatacaaggagttcaccaagcacctagctgaagtaaaccaacaggtgtcagactacatcattggatatggagaagtagtgtgggagaactcaactctgagatctttggtcgaaacctattttgaaagtgccaagaagactttggacattgccgagaatgtaacagaatacgtcgatgaagcaaaaaggggcgaacgttacattgtagcggccgtggcacagtttgaaaaagacaaagaaaatgatgttggcaaaaaaacgaagaggtatg

SEQ ID NO: 84762 - DNA, 338 bp, Arabidopsis thaliana columbia
gctcaagtcacgcagctaacaaagtacagatttttcccttgtttcgattgcaaaagcgcataagcttcgtacttgccaaatctgaagtcaaaccaaatacactggtcaaacaaaaagtcgacgagccccagattccgatagcaaaaccagtcggacccaggatttcgatgagccacactggttagcttccgacccaattcacgtcctaggtcaccgagaacgtgacttcgttgcatgttttggttttgttgagtcggatgagttttatttttggcttcgctctcgaccagtagcagaaagctatggaaggtgctgctgtggcggaagggctgtgggga

SEQ ID NO: 84763 - DNA, 406 bp, Arabidopsis thaliana columbia
  unsure (1)..(406): unsure at all n locations
aaaaaaacgtaatcgtagcctatttctggtacgcttctttgcatgaaagacaaataaatacgacagatagatttgaattgtcagaaagaatccagagaaagctattaacgttcctgagattttggacaagtactacaccatctacagaccacaacaacgagcacacggaggtgatttaaggttagtctcttcattattcacaggcaattctggtttcaaaactgctcaggcagatagcaaacgcttgaaacgcagaaatcggatatccataatccatggtaaacatgtccttcccaactttcccaaactgggagtatgatcctctcagatgtctgccctgctttcacagtcacttaactgccacaagctgnaaagttctttaaccgaaggccactgtggactcgga

SEQ ID NO: 84764 - DNA, 611 bp, Arabidopsis thaliana columbia
cctaacttggcatgcacgcgtccgtaagcttggatcctctagagcggccgcccttttttttttttttttttttggatcgcaaagacatcttttatggtatatatcacaaaaaacaaaaacaacaagaaacactcatatgactcagactctacaaacatcatcgtatagcgtttacagatctcacgcgactgcaagctttacattaacagcggctacaaaggcagcccaagccaaacacggctttaccagattaccagcgaccggacttatctcattaaaggccttgtagcatccgaatcaacgcagccgatttgacccaaccacaccgcaagccccgctactcccggacccgacgcggaacgtaaccggatcccaaaccaaacagagcaaaaactgagctaagtaaagatacagagcattgggcttcttgtggaagccaccgtcaacccatacaagccacgcagccaagcccatcagaccactagaagcgagacacgttgtgtgtaggagccacagaggtgggatccacgacgaggacttagctcgattcccgtatccgtcgcttgtgccgaggaaatacgtagcgaagagcgtcacgagcacaggagccg

SEQ ID NO: 84765 - DNA, 1735 bp, Arabidopsis thaliana columbia
cggacgcgtgggcggacgcgtggggctcttcacagccattcaatctcataagacatattgccggagaaactctctcggggggtcgcttcttctgcattttctgcttcccaatggcttccagaattgctgattctctcttcgccttcacgggcccacagcaatgtcttcctagggttcctaagcttgctgcttcttctgctcgtgtttctcctggtgtatatgctgtgaagccgattgatcttctgttaaaaggacgaactcatcgaagtagaagatgtgtagctcctgtgaaaaggagaattggatgtatcaaagcggtggctgctccagttgcaccgccttcagctgacagtgcagaagacagggaacagttagcagaaagctatggattcagacaaattggagaagatcttcctgagaatgtcaccttaaaagatatcatggatacacttcccaaagaggtgtttgagattgatgatctgaaagctttgaagtctgtgttgatatctgtgacttcatacactttggggctcttcatgattgcaaaatcgccgtggtatctgctaccgttggcttgggcatggacaggaactgcaattaccgggttctttgtgataggtcatgattgtgcacataagtcattttcaaagaacaaattggtggaagacattgtgggtactctcgccttcctaccacttgtctacccatatgagccatggcggtttaagcacgaccgccatcacgccaaaaccaacatgttagttcatgacacagcttggcagccagttccgccagaggagtttgagtcatcacccgtgatgagaaaggcaatcatttttggatatggcccaattagaccttggttgtccatagctcactgggtgaactggcacttcaatctgaaaaagttcagagcgagcgaggtgaatagggtgaagataagtttggcttgtgttttcgccttcatggccgttgggtggccactgatcgtatacaaagttggtatattgggatgggtaaaattctggttaatgccatggttgggctatcacttctggatgagcacattcacaatggttcatcatacggctccgcatatacctttcaagcctgcggatgagtggaacgcggctcaggcccagctgaatggaactgttcattgtgactaccctagttggattgaaattctctgccatgatatcaacgttcacatcccgcatcatattagcccaagaataccgagctacaatctccgtgcagctcatgagtctatacaagagaactggggaaagtatacaaacttggctacatggaactggcgattgatgaagacgataatgactgtgtgtcatgtctatgacaaataggagaactacattccttttgaccggttagcccctgaagaatctcagccaataaccttcctcaagaaatcaatgcctaactacacagcctgattcgccatggtctcaaactagtcttttgaaatctcaatatctttttgcagtcgccgatgttatatgtaagctttccaagcgatgagcttctctaacacttcaccaacgctttatactgttatcttctttccaatcttatcagaagagagaaactggtcaaattatctcagcgattgcaattcttttatcagtttcttagctataagaagattgaacagtctatatagtttgcaatgtactgtaatgtgatgaaaatttagttgatgagaaaaaaaaaa

SEQ ID NO: 84766 - DNA, 876 bp, Arabidopsis thaliana columbia
  unsure (1)..(876): unsure at all n locations
nnnnnnnnnnnnnnnnnnnnnnnnnnnnnnnnnnnnnnnnnnnnnnnnnnnnnnnnnnnnnnnnnnnnnnnnnnnnnnnnnnccacgcgtccgcccacgcgtccgcccacgcgtccggacaagaggacgcgtagagagctcagcaactgtccgtcacgcttctgcagatgccagaccctgggcagagctcgttgaccggtcagcgttttcccggccaccatcgctctcggaggcaacgtctcgagtaaggaagaacttttcctatttccgagccaattacataaccttagtggcaatcttactcgccgcgtctctgctcacgcaccctttcgctctcttcctcctcgcatcgctggccgcttcttggcttttcctctactttttccgtccggcggatcagccgttggtcattggaggacgcacgttctccgatcttgagacgctagggatactctgcctgtccactgtggtggtgatgttcatgaccagcgttggatcgctcttgatgtccactctagcagttgggatcatgggcgtggccatccacggagcgtttcgtgctcccgaagacctgtttcttgaagaacaagaagccattggatctggacttttcgcattcttcaacaacaatgcctcctaatgcagctgccgctgccatagccacctcagcaatgtcacgcgttcgagtctgagattgttgaagagactacattcctacaccgcatttccaaagtgtgatatttattcatattgaattgttgtaacttgtaaccattcttttgtcatttctgttttgtttactttgttgctggaattttgaaacacaattcatcttactatacaccattaaaacgagagtcagtaaagaagaatttt

SEQ ID NO: 84767 - DNA, 816 bp, Arabidopsis thaliana columbia
  unsure (1)..(816): unsure at all n locations
nnnnnnnnnnnnnnnnnnnnnnnnnnnnnnnnnnnnnnnnnnnnnnnnnnnnnnnnnnnnnnnnnnnnnnctttttttttttttttttcatataaaaatacacatactgacgaattatttgtacacccattaaagtgtgacattaatcacattacaagcatgaaccaacacacacacacgtgtaaataaatagaataaaatgaaactggaaattaaatcttgagttgaaatgggtaagaaggccaatccttgagatcttcttcttgcctccttaccttaaaatcatcatcatctacaacactctcatccaaataatcactatacttcaacaaaaacgctaacacaagaacaatccactctaagcaaaacatcaatacacacaaaccaccagcgagtttaagtatcactgcaccgtcttcttcccgaacatcaagttttccaaggaaccttaagaaatcccccttgttcccccgtgaatatcaagaacagagaccgccccttgaaaaaatgccccttgagggactgtgcctaccatgtgtgaaccgtataatctaccgctcgcggtgccggatgtggtcgagccgaagatcgagcagccggataccgcggtagcgattgtgagagtgtagaggaagataagggagagaccggagagagatgggaagagacggagggagattgtgaggaagatgcaacttgaggctgagcctaagaggatgtagttgcagagaaggaagatgttgtgtgtgttgcctttcgatttcganattcccattttctcgaattcaagaagagaactttggtttttttttgggg

SEQ ID NO: 84768 - DNA, 551 bp, Arabidopsis thaliana columbia
  unsure (1)..(551): unsure at all n locations
nnnnnnnnnnnnnnnnnnnnnnnnnnnnnnnnnnnnnnnnnnnnnnnnnnnnnnnnnnnnnnnnnnnnnnnnnnnccacgcgtccgcggacgcgtggggatcaacaaaaggaaagaatggcaaaagctatggagctttgggtgggagagatgaagaagatgagtgagaagataaacactagaaatccattgatgcaaaggaagaattcaacatctgttgtgtccaaacaacaacaaggatcagaagaagaaagaggacttattaaccaaaagattagagagaaaaatgaagctgtaactatgtctgagctcactgtttgtcttctcatggaccgttttgttccttggtgatctttccatacccaactacttctagatctcttctttggtgatgtgtatatatatatctagaaactacatgtagtatgtctatatatcagattttgtttgtgcagaccatgtttttaagtttccttgtaaacctgtgaaagtaatgtgtttgagaaacatatttttattactttaatcaatagaagtcaatttatttttttt

SEQ ID NO: 84769 - DNA, 766 bp, Arabidopsis thaliana columbia
ctatgacttcgcatgcacgcgtacgtaagcttggatcctctagagcggccgccctcgccctttttttttttttttttatcgaattttggatctaaatgtcaataaccaatggttgttatatacaaacccaaatctgagactatagaaagatgaaaaaccaacttaaaacacataaatattatatacaaagtggacataaatagatgaaatttgtttgaaagaaattgctatgtgcataacaagaaacagagagaatgtaatgttcaccgaggaagaggagcataagggacaagatttggatcagaagtaacgagaggcaacttgtcaatgtatatcaacaacctcttcagattctccttgtaaatcgctggtaaatctgcaatctcggcgctacaagtgtatatccatagatcaccagaattcactcttttcaagctgcctcgacagaacgggcacgactgtgaccgtgcacgccagtttctgtagcagtttatacacatggagtgattgcacgtaggaagaacaactttgtttcgaatctccaagcagattccacactcttcttccctctccaaatagatctccgacatctttcctttatctgttctggcctttttacggtattctttgtcacatatttccctttggtttcctttctttttacattgggtgatcccctccattgaaaatttgccattaggcgtaagggaaaaccaaaccccaattcattggaaaatttcttgtgggattacttagagttttttgg

SEQ ID NO: 84770 - DNA, 795 bp, Arabidopsis thaliana columbia
agaagagcatgacgtcgcatgcacgcgtacgtaagcttggatcctctagagcggccgccctttcttttttttttttttttttatttggaagccataatttgaaatgtactacataatctggtccacatcttcaaaccaaagccaaccaaaaaaaaaatcctcagctacaacaacaacatcgttttatagtctatggtttcagaaacatttcctgtgaaccactgatggtccagtctcgtcataatctgctttagtaacgtgctgattctgcggaaacaccactttagctagtatggctcctccaacccaagccgaatacatccccaaattctccggcatatattctggcggtttcaccagtgttggcctaatggcagatgagcacaagtttgcttctttctggaatctactttcgaatcctgtcatggaggttgtaccaccacaaagtacagtgttctccaagagctgcctatggttctcagatgacactgtggagataatccggacaagctgctcaacgattccatgctcctccagtcccagtattgatggctgaaacagaacttctccaaccgagtatttctcttgcccgatgcttatcacctgtccatcaggaagagtatgctgctcgatttcacagttttggggttttttttgtaaagccaattttcgtgccctcgggcaccaagtttggccaataactgggtttccctttggaggttttttttcaaaacatttcagtaacaattggcttggagaaatttccatttccaaaccggggttttggggtttttt

SEQ ID NO: 84771 - DNA, 447 bp, Arabidopsis thaliana columbia
aaaaaacaaatcaagcaaatttatttatcttggtcaagagacattgattctcttaaatttctgcaaaattaagctcagagattcacaccgcatctgaaattgtgctcagaggggttccaaatattaccagtcgttaggaagcaatcacgagttgttttaggaattagtgaacgtgataatggctagcaatgagatggaaaaatcgagtaaagagaaggaacctaaaacacctcctccttcttctactgcccctccctcttcacaggaaccttcatcggctgtgagtgctggcatggctactccagattggtctggttttcaggcatattctcctatgccgccgcctcatggttatgtggcatctagtccccaacctcacccttatatgtggggagttcagcatatgatgcctccttatggaactccgcctcatccttatgttgcaat

SEQ ID NO: 84772 - DNA, 663 bp, Arabidopsis thaliana columbia
gctgccgtaccggtccggcattcctggtctcccttggctccaaggacattgcgggcatagccatgggcattgaaattgaatcgcatgagtttgacccagttggttcaaagcttgtttgggagcaagtcttaaagcctttgtatggtatgaccacagacaaaaccgttgttgaagaagaagaggctaagctagccaaggtcctcgatgtttacgaacacaggcttggtgagtccaagtatttggcttctgataaattcactttggtcgatcttcacactatccctgtgattcagtacttgcttggtacaccaactaagaaactctttgacgagcgtccacatgtcagtgcttgggttgctgacatcacttctaggccttctgctaagaaggttctttaagtgactcacaaactgttaatcagaagattgaataaagtggcgatgacctcattgccctaattctcataaacaataaaagtggcgatgacctaattgccaaattctcatacactctgtgatttttttgtgtgggccccctcggttttttttttttggtttgaatgtaatcttcaataataatgagtcttgatatataataaaaatatatttggtagcctgaaaaaaaaaaaaaaaaaaaaaaaaaaaaaaggggcggccgctctag

SEQ ID NO: 84773 - DNA, 597 bp, Arabidopsis thaliana columbia
  unsure (1)..(597): unsure at all n locations
gttctctctacttcaataaatctccaccttgctttaagaacaaagtcttaacaaatggcaggaatcaaagttttcggtcacccagcttccacagccactagaagagttctcatcgctcttcacgagaagaatctcgactttgaattcgttcatatcgagctcaaagatggtgaacacaagaaagagcctttcatcttccgcaacccttttggtaaagttccagcctttgaagatggagacttcaagcttttcgaatcaagagcaatcactcaatacatagctcatttttactcagacaaagggaaccaacttgtctccccttggctccaaggacattggcgggcatagccatggggcattggaaatttgaatccgcatgagtttgacccagttgggtccaaagctttgtttggggggcaagccttaaagcctttgtttgggttggccccaggcaaaaccgttgttgaaggaggagaggctaagcttgccaagggcctcggtgtttcggccacagggttgggggccagatttgggttcggaaattcccttgggggcttaaactcccggggtagcaatttntggaacccctagaacctt

SEQ ID NO: 84774 - DNA, 899 bp, Arabidopsis thaliana columbia
accggtccggaattcccgggtcatcacaaagatctctctacttcaataaatctccaccttactttaagaacaagaaaaacacagtattaacaaatggcaggaatcaaagttttcggtcacccagcttccacagccactagaagagttctcatcgctcttcacgagaagaatgtcgactttgaattcgttcatgtcgagctcaaagatggtgaacacaagaaagagcctttcatccttcgcaacccctttggtaaagttccagcctttgaagatggagacttcaagattttcgaatcaagagcaattactcaatacatagctcatgaattctcagacaaaggaaacaaccttctctcaactggcaaggacatggcgatcatagccatgggcattgaaattgagtcgcatgagtttgacccagttggttcaaagcttgtttgggagcaagtcttaaagcctttgtatggtatgaccacagacaaaaccgttgttgaagaagaagaggctaagctagccaaagtcctcgatgtttacgaacacaggcttggtgagtccaagtatttggcttctgaccacttcactttggtcgatcttcacactatccctgtgattcaatacttacttggaactccaactaagaaactcttcgacgagcgtccacatgtgagtgcttgggttgctgacatcacttcaaggccttctgctcagaaggttctttaagtgaatctcaaactatttatcgatcagaagatgtaataaaagtggcgatgacctaattgcccaattctcataaactctgtttttctttttgtgtttactctgtttttctgctgccgagtgtttgatttgaatgtaatcttcgataatgagtcttgatataataaaatatttcttatttt

SEQ ID NO: 84775 - DNA, 2073 bp, Arabidopsis thaliana columbia
ggtgcagagagagagagagagagagagaagcgaagacgatggcgatgatagggatgaacattattgggctattcatggttcttatgttgcttctcatctccctcatcatccttttcgcctgcaagccatggcgatatttttctcgtttccgatcctcctctcgtttttcttctaccttcaaggtgggggatttgcagagaccacttatttctgatgatggaaatttgatccaaggacaaaccagtgaggtaacaagggaatatgatttagagggagcttgctaccaaaatgatggacttttgcattcatctctgactgagggacggttttacaaacaaaggcttccttcgtcatctccccatttctcccaaggtgaaagctttgttctagaagtaatttctgaaccttctgacaatgctttggtgggccaaacgcttaaacttccagctgaaaaaggttccttggcagaagtgcaaacatatgactggcagaataacagaaatgaaaacttgcaatataatctggaaaaggatcgacttattaatctttctccgaggctcgtggaagatcaaagaagttggctgttcctggaagtcatcgcgggtcctgccattgggcttcaacatgctgtgaactccacaagttcctccaagctgccagtgaaacttggaagggtttctccttctgatttggcattgaaggactcagaagtctctgggaaacatgcacagataacatggaactctactaaatttaaatgggagctggtagatatgggtagcctaaatggaactctcgtaaactctcattcaataagtcatcctgatttaggcagccggaagtggggtaaccctgtcgagcttgcaagtgatgatataataactttgggaacaacaacaaaggtctatgtccgtatctcctctcagaatgagtttcagatacccttcaaaattggtgtggcctcagatcccatggctatgcgtcgaggaggcaggaaacttccgatggaagatgtttgtcattacaagtggccgcttcctggggctaataagtttggactgttttgtgtttgtgatggacatgggggatcaggggctgctcaatccgcaatcaaaattattccggaggttctagcgaatattttatcagactcgctgaggaaggagaaagtgttatcaaaaagggatgcttcggacgtccttagggacatgtttgctaaaacagaagctcgcctcgaagaacaccaatatgagggttgtacagctactgttctcttggtttggaaagacaatgaagaaaacttcttcgcacaatgtgccaatcttggggattcagcatgtgttatccatcttggtggcagatatatacaaatgactgaagatcatcgagtggttagcttgagcgagagaaaacgattccaagaagcaggactagccttgagagatggagagactcggctttttggtataaaccttgcgaggatgcttggagacaagtttccaaagcaacaagacagccgtttcagtgcagagccatatataagtgagcctttgcgtatcgatcaatctagtaaagacgtatttgctgtattggctagtgacggcttatgggacgtggtaagtccgaagaaagctgtgcagcttgtacttcagatgagagataaagagagagggagagagagtagtgcggagaagatagcaaacggtctgctgaatgaagctagagcgatgcgtacaaaggacaacacctccattatttacttagatttcgatacttccctgtaatgttaggaaacatcttttaagatatttgggaagtgtctttcttttgtgtaccatctttttatgtattagtatttttgttagggtataagagagacaaaaaaacctcagatgcagagatttaggatggatcgtcttggtgagcgacattggtttcattatctttacttatataattaataatattatcagttaaaaaaaaaaaaaaaaggaaaaaaaaaaaaaagggcggccgctctagaggatccaagcttacgtacgcgtgcatgcaacgtcatagctgttctatagt

SEQ ID NO: 84776 - DNA, 755 bp, Arabidopsis thaliana columbia
accgtgacttggttccccgcgcccgtccacgggattcctatacagcggacgcccttcgtggtcgtcttacttttttttcatgacgagattgaacacaggcgatagcgtttttatgataagctttggagctggttctaagtgtaatagctgcgtttgggaagttgcgacagatcttactggtggtgaatcaaatggaaatgtgtggaatcattgcatcgatgattatccaccaaaaatcgattctgaatccttattttggagaagtttggcttggattcaaagatgaagatccctgacaactttcaaggctcccctgaccggctttacatgtgcaaaacggtttactggcacataaagacggcataaccgcaagacgcagaaaaccacccccggtgatacaatattctctctttcttaatttcttcacttcttgcctttcgttaaaatttttacgtctttttgtttaaatgcattgacctggagatatgactgttaaagaaactttaattagttttttatttagtctgattttttttcgtcgctataatctgctaaaaacctactttgaaataagggttctaagggacatgcacttgcaatactatgagaattacttggttgccatcatattggaatgctgccttttttttctcttgttaaacgtggcattcatttataatattgtattgcagtcgttccactttttcccttctattgtttgtaccttgctttcgccccaaccaaataccatttcc

SEQ ID NO: 84777 - DNA, 382 bp, Arabidopsis thaliana columbia
gactctcaccagtcacaaccaaaaaaaaaaaaacaaaacaaaaaattatattcaagagaaaaaggaaaaaatgaatttcatctccgatcaggtaaagaaactctcaagctcaacaccagaggagccagaccacaacaagccagtcgaaggaaccgaaacagctacaagaccagctaccaacgccgagctcatggcaagtgccaaggttgtagctgaagctgctcaagccggagcctctgctgatatcttagacgctgccgagaaatacggtaagttcgatgaaaagagtagcactggtcagtacctcgacaaggctgagaagtatctcaacgactacgagtcgtcacactccaccggtgctggtggtcctcctcctccgacg

SEQ ID NO: 84778 - DNA, 645 bp, Arabidopsis thaliana columbia
  unsure (1)..(645): unsure at all n locations
aatacgactcactttagggaaagctcgtacgcctgcaggtaccggtccggaattcccgggtcgacccacgcgtccgtacggctgcaagacgacagaaggggcatccaaaaaaaacaaaacaaaaaattatattcaagagaagaaggaaaaaatgaattgcatctccgatcaggtaaagaaactctcaagctcaacaccagaggagccagaccacaacaagccagtcgaaggaggccgaaacagctacaagaccagctaccaacgccgagctcatggcaagtgccaaggttgtagctgaagctgctcaagccgcagctcgtaacgaatcagacaaactcgacaagggtaaagtcgccggagcctctgctgatatcttagacgctgccgagaaatacggtaagttcgatgaaaagagtagcactggtcagtacctcgacaaggctgagaagtatctcaacggctaacgagtcgtcacactctcacccgggtgcttggtgggtcctccttccttccgnnggggttaaggcttnggccagcaaagtttagcctttnggcccgggggttnagaaaagncggtttaaggngttttgttggttggnnttgggggnttttccannntggctaaagntttttttaanggnattt

SEQ ID NO: 84779 - DNA, 840 bp, Arabidopsis thaliana columbia
  unsure (1)..(840): unsure at all n locations
nnnnnnnnnntaggtaccactatagaagagttatgacgtcgaacccacagatggggcatccaaaaaaaacaaaacaaaaaattatattcaagagaaaaaggaaaaaatgaatttcatctccgatcaggtaaagaaactctcaagctcaacaccagaggagccagaccacaacaagccagtcgaaggaaccgaaacagctacaagaccagctaccaacgccgagctcatggcaagtgccaaggttgtagctgaagctgctcaagccgcagctcgtaacgaatcagacaaactcgacaagggtaaagtcgccggagcctctgctgatatcttagacgctgccgagaaatacggtaagttcgatgaaaagagtagcactggtcagtacctcgacaaggctgagaagtatctcaacgactacgagtcgtcacactccaccggtgctggtggtcctcctcctccgacgagtcaggctgagccagcaagtcagcctgagccggcggctaagaaagacgatgaagagtctggtggtgggcttggaggttatgccaagatggctcaaggtttcttgaagtgatttgatctttaattgttgttcatcattttcgtaataataaattaaataactagtatcgtttgtgactagtttatgttgcttcgtttatgtttatggggagtgacgagtgagtgtaataacttctggtgatcatgaatctaatccatctttgttgtgattaaaaaaaaaaaaaaaaagaaaaaaantaagggcggccgctctagaggatccaagcttacgtacgcgtgcatgcgacgtcgtagtgttcnnnnnnnnnnnnnnnnnnn

SEQ ID NO: 84780 - DNA, 729 bp, Arabidopsis thaliana columbia
  unsure (1)..(729): unsure at all n locations
nnnnnnnnnnnnnnnnnnnnnnnnnnnnnnnnnnnnnnnnnnnnnnnnnnnnnnnnnnnnnnnnnnnnngcggccgcattgtatcgcgtgaaaaattggttttccttgatggaacttctataccgaaaacaaggcttcagaaaaagaaaaatgatgaacaagttccggaagggtgggtgcaatgtgataagtgtgaagcatggcagcatataatttgtgctttgttcaacagccgaagaaatcatggagaatccaccaagtacacttgccctagttgctatatacaagaggtggaacaaagagaaagaagaccattaccactaagtgctgttccgggggcaacaagtttaccagttacttctcttagcaagcatctagaggagcggttattcaaaaagttgaaggaggaaagccaagtgagggctagacttcaagggaaaccttatgaggaggtcccaggagctgaatcacttactgtcagagttgtggcttcggttgataaagttttggaagtaaaggaccgtttccttgagcttttccgggaagaaaattatccatctgaattcccttataagtccaaggccatttttttgttttaaaagattgaaaatgtggaagtatgcttgtttggtatgttcgttcaggaatttgggacagactctggacctcccaatgagcggngggtatacctttcttatctggactctgttaagtattttagacctttcc

SEQ ID NO: 84781 - DNA, 728 bp, Arabidopsis thaliana columbia
gccgaattgtgtatcgagccccccctcgaggtcgacggtatcgataagcttgatatcgaattcgcggccgccatttttttggtcagccaagtgctgtgtggacggtgaaaaagaatgtgagcgatgagtttgatgcatacatcgttgtctcttttaccaatgctactcttgttctttcgattggtgaacaagttgaagaagttaatgacagtgggtttcttgatactaccccatccctggctgtctctctgatcggcgatgattctctcatgcaagtccatcccaatggtatccgccacataagggaagatggacgcattaacgaatggagaactcctggcaagaggtcaattgttaaagttgggtataatccggcttcaagtggtcattgcattgagcgggggagagcttatatacttttgaggcagatatgactgtgccagctgaatggaggtggagaagcattgaaatgtctggtgcatgtggcttgcctggacaattgcccctgttcctgaaggaaggaaaaaggcctccctttcttcctgtggggccttatgataatactgtgcgcattctatctctggatcctgacgactgtttgcagattctcagcgtgcaaagtgtctctttagctccggagtctctgctattcctcgaagttcacgcatccattggtggagatgatggtgctgaacacccggcaaaatttctttcttaattcttgggtg

SEQ ID NO: 84782 - DNA, 749 bp, Arabidopsis thaliana columbia
  unsure (1)..(749): unsure at all n locations
actttcgttnnnnnnnnnnnnnnnnnnnnnnnnnnnnnnnnnnnnnnnnnnnnnnnnnnnnnnnnnnnnnnnnnnnctttttttttttttttttcctcaaagaatgaaatgttgatgttccgtgttactgtcataagctatgatatttaaaacttacaagaggtgtacatgctagctttttttggcttgggaccgtatctacgcggttgaagaaggaaaaaaaacaaaaaaaaaaaagtcttggatcagtacttgacgacatggtggcgtaaccatagttcatacatgatcatgtgaaatgcgtcgaatttgactggaggtgagttccattgaaaatgcttctgcacctgcacaacaacaaacccaatcagcttcttggtatacaatactgggataagatgggtggaaattctcctttaccttgaccaagttggttatgccaccggaaccaacctctgagtgacggtatgtccttgggggtctgccttaagggtataggcatcttgcccccggggtacaaccgcaaattttcgccaatccaggatgtcgttgaaagggaggccgtagtagtctgataatatgacaggaatacatccgtaatggatcgagtccgttatgcgagcgctgtttacttgagaaccaccagggcatatgcagaatttagtccggtagaatctcttttgatacaccaaatgccctgtagctttgttaattctgttgtttgaaatatcaagctctgtgtcgttttc

SEQ ID NO: 84783 - DNA, 644 bp, Arabidopsis thaliana columbia
cagatttcctcatcctctattagggaagaagaaccaaaaccctaatcctatcttctcctcttataaatcgcttcaacaacagtttctttctcttctgatttgatccatgatttctcatctggaaccctagtttatacatccatcgggtgttactgttctttatctgggcaatcagtggtgtttttgttccttttgtatatctgtcgagacttctaggtgtgaaatcaaagcttgtttggtttatatcgatcttggttttagctgaatcgttgttaagatggctggaggtggaaacaggagagatgaaggatcgatcacgatccagagcactaatttgtttgcagcattggacactcgtaagaagaagaagaagtctgacaaggcagggaagagcaaagggtcttctaagtcacgagagccagagaaggagcctgagcctcaggtctattgggctcctacgcctttgaaagttaagtcttgggctgatattgatgatgaagacgacgatgatgactattatgcaaccactgctcctcctcagtctggttggagtacttctctgccttcccatactgattccaaagacgttcatgttgaggaaagtgaaagtgaggaagatattcctgatgaaagtgatgatgatg

SEQ ID NO: 84784 - DNA, 775 bp, Arabidopsis thaliana columbia
tcactatagcgattgctggtacgcctgcaggtaccggtccggaattcccgggtcgacccacgcgtccgatcgatcacgtatccagagcactaatttgtttgcagcattggacactcgtaagaagaagaagaagtctgacaaggcagggaagagcaaagggtcttctaagtcacgagagccagagaaggagcctgagcctcaggtctattgggctcctacgcctttgaaagttaagtcttgggctgatattgatgatgaagacgacgatgatgactattatgcaaccactgctcctcctcagtctggttggagtacttctctgccttcccatactgattccaaagacgttcatgttgaggaaagtgaaagtgaggaagatattcttgatgaaggtgatgatgatgtggaggaagagcaggaacaggaaacagaggtacaggttcatccagagcctgaggtgaagaaagctcctgaagttcctgcacctcctaaagaggcagagaggcaactttccaagacagagaggaaaaagaaggaacttgctgagcttgaaactttgttggctgattttggagttgccccccaagagaacaatggcctagaagaatctcaagaggcttggaccagataagaaagaagatgtcaatgggaaagggagagaaaaagggagaatgccacaggttgggggagtcaaaggcttccaaaaaagaagataaaggaaggattagccccaaggaggtaaaaagaatcttaaggagccacaaagcaaccacca

SEQ ID NO: 84785 - DNA, 815 bp, Arabidopsis thaliana columbia
  unsure (1)..(815): unsure at all n locations
nnnnnnnnnnnnnnnnnnnnnnnnnnnnnnnnnnnnnnnnnnnnnnnnnnnnnnnnnnnnnnnnnnnnnnnnnnnnnnnnnnnnnnnnnnnggaaaatcaacttttcttttttaatatgccaaccatttacatctaatacattgcattgatttctttcttctcttctatcaccatttttcctaccacaaccagactctttaacactactaacaaagaaaaataaataaagtcatagaacctaaaaagactcttttcttcttcttcttctcctacagtacctacccactcactctcaccctctgttcagcatctcacaaatacactaaacaacccctaaatctaaaagggatttaattacggactcttcctcctgcttaaactaagcaccccctttctatctacctattacattttttctttctaactacatctgcttcctaagtttatcatcgaaaggaaaaacaaatcctttccttcagttttccccttcattcctccctttacaccctcagctaaacgttcctagtacttcaggacagaatcaacggttaaattcccaaatgattttaacattgggcttcttttgcttccacaaatggcgattgaacactatctgcattagaatcactacctgatgaactcccacctgaccctgaatcactagacgaggaactaccaccactagaactggaactgcctgaagaactagaaccactactagcagcagctgcaactgcngtaccatntctttcgatctctanagatggataatcttcgattggtatgtcctctccaatgtcaacatcctcttccc

SEQ ID NO: 84786 - DNA, 732 bp, Arabidopsis thaliana columbia
  unsure (1)..(732): unsure at all n locations
nnnnnnnnnnnnnnnnnnnnnnnnnnnnnnnnnnnnnnnnnnnnnnnattctctttcagcttaacgtcactattggtatcctcttcgccaatcttgtcaactatgggaccgccaagattaaaggaggttggggatggaggttatcgttaggtttggcgggaattcccgcgcttcttctaacggtcggagctttattggtgacagagacaccaaacagtttagtcgaaagaggtcgtctcgatgaaggtaaagctgttcttcgtcgtattcgagggaccgataatgttgaaccagagttcgctgatctccttgaagctagtcgacttgctaaagaagttaaacacccttttagaaaccttcttcaacgtagaaaccgtcctcagctcgtcatcgccgtcgctttacagattttccagcaatgtactggaatcaacgcgattatgttctacgcgcctgttctgttcaccacattagggtttggtagtgacgcttcactttactcagcagtggtgaccggagcagtcaacgtcctctcaactttagtctcaatctactccgttgacaaagtcggtcgccgagttcttctcctagaagctggtgtccaaatgtccttttntcaagtnggaatcggcatttatccttgggggcaaaggaacagcanttttncaaatttttccaagggttnngaattttggngggggaatnncntganaanngnggttgtttngctgg

SEQ ID NO: 84787 - DNA, 887 bp, Arabidopsis thaliana columbia
  unsure (1)..(887): unsure at all n locations
gagacttaaagcctgagaatttcttgcttgttagtaacgaagaagattctccaatcaaagcaacagattttggactctctgttttcatcgaagaaggtaaagtgtataccgcgcgtccggggagcgcatactacgttgcacctgaagttctacatcgaaactacgggaaagaaatcgatgtatggagcgcgggtgttatgctttacattcttctcagtggtgttcctccattttggggagagaccgagaagactatatttgaggcgatcttagaaggaaagctggatcttgaaacttctccttggcctactatatcggaaagcgcaaaagatttgataagaaagatgttgataagagatcctaaaaaaaggataaccgcagctgaagcacttgagcatccatggatgacagacaccaaaatttctgataaaccaatcaatagtgctgttcttgttaggatgaagcaattccgcgcgatgaacaagctcaagaaacttgccttgaaggtgatagcggaaaacttatcggaagaagagataaaaggattaaagcaaacgtttaagaacatggatacagatgaaagtggcaccatcacttttgatgaactaagaagcgggttacatcgtcttggatctaagcttacagaatctgaaatcaaacaactcatggaagctgctgatgtggacaaaagtgggacgnttgnttacattgagtttgtaactgcaacaatgcatcgccatagattggngaaagaagagaatttgaatgagnatttaatcctccgcaaagcagaccggnttttncccangggncggcttnacacccatgcctgggntgcatgggtgtntccgnccggggggnccgggnngggnttaaccnngggtnat

SEQ ID NO: 84788 - DNA, 662 bp, Arabidopsis thaliana columbia
  unsure (1)..(662): unsure at all n locations
actaagaaacgggttacatcgtcttggatctaagcttacggagtctgaaatcaaacaactcatggaagctgctgatgtggacaaaagtgggacgattgattacattgagtttgtaactgcaacaatgcatcgtcatagattggagaaagaagagaatttgatagaagcatttaaatacttcgacaaagacagaagcggttttatcacaagggacgagcttaaacactccatgactgagtatggcatgggtgatgatgcgaccatagatgaagttatcaatgatgttgataccgacaatgatgggaggataaactacgaggaatttgtggcgatgatgaggaaaggaactacagattcagatccaaagctgatcagatgatatatattcaactacagtgacgaatgcttttgcttcatatataataattaaaataaactaataataaacacgaatgcaatgagaattaatgcattcctatgttttttcccttgagatgtataaataataaatatgatgaattgcgtaagtatgatgaatcaaaaaataaaatgaaacttatggcccatttaaaaaaaaaaaaaaaaagggcggccgaaaacannnnnnnnnnnnnnnnnnnnnnnnnnnnnnnnnnnnnnnnnnnnnnnnnnnnnnnnnnnnt

SEQ ID NO: 84789 - DNA, 811 bp, Arabidopsis thaliana columbia
ccctgggcagtaccggccgaattccgggagaccccccgtccgattttttctccgacgttgcttaatcctcgaattctccggcgattggtggctgcgtctcctccaaccttcttactccgaccgatgacagcagcttctctcacctcaccagctcctccttaagccaacatttcgtcaagctaacttccaccacttacggtcttctcaatctcgactcttcttcaccttctcctccgtctccttcctcctcctcctccgccaaatccgttatcacgccaatgactccgcctgagagattcactatcaacggtaaggaggcggcgatgatgatggttaagtctgagccgacgacggaggttattaacttctgggagctaatgtcaggtttagacggcgatacttgtcgattctctccgattccggtgaaatgtaatggattttccggcggattaaagaaagagaactccgatcctaatttgaaaaaccctaacgattacgaggttttgaaaccgctagatccgaaactagcggaggaatctgagaggttatgtgacggcggagagaatcgcgtcgcgatttatacgacgtcgttgcgcggagttcgacggacctttgaggcgtgtaacgcccgagaaagctgccaatggaaagttttggggtaatcggcttgtggaagagaacatgctgtcccctgggaatacgagggaatttaaaacaaagcaggtcacttcccaattcctaaatggggccggggaggaaattcccacccggaccggcccgacgatttaggccctcctcctccggggtcttc

SEQ ID NO: 84790 - DNA, 407 bp, Arabidopsis thaliana columbia
agatttatctccgattgaaatcggatttcatcttagtttgcttttctttgttttcttttgattccggtattttgccggtttaaatttccgacttgttcggaatttcttccggttttattgccggttttttgataagatcttttgcaagttgcaaatcaccacttccaatcttggcagatgtctaattccgggagagttttagatggatctttgttcattggatgcttgagttttcttccatgtgaaggtaaattcctcgctttgctaataagagcgtaagggcgtcggttcttcatgggtgatagatcaagatgtttgcggttgattggagaggagtatgaagagttggggttcacgtcgtgttttgatggtcctccaaggattattccaatcctcatcagctgaag

SEQ ID NO: 84791 - DNA, 660 bp, Arabidopsis thaliana columbia
  unsure (1)..(660): unsure at all n locations
tgtcattccgttnnnnnnnnnnnnnnnnnnnnnnnnnnnnnnnnnnnnnnnnnnnnnnnnnnnnnnnnnnnnnnnnnnnctttttttttttttttacataacgcagttcttgatgcatctacattaataaagatctctcttacgaatggttttgaagagttaaattaatccatttattttgtggtaagaaagattaaaaaatgcaaagaaaaaagctacattgattgaaactacagtaaaatctgcgtatgatcgatcagagaattaaagcctttatcttgttggagatctcgtagacaggcatttgccgcacgacacgagcttaagtaacgtatgtggtcttgcccttcttgttctcaccttcaacctcgtggccctgcgacgtgtgccccttgaggatttccagcataacaagcttcttgatcttgggtcaaggctccgattttcttggtccagcttctcggcgatagacacggccttgcgtttagaccaaccgttctggagtgagcatccgtcagcttgctgaatcacatgagccaacgagaccttacctctcacaatgctttggctctggttctgactctggcttgcttcccaatggttgcttctaactcgggctacgcagaggaaccaactggctctgtcctctcctctttctga

SEQ ID NO: 84792 - DNA, 643 bp, Arabidopsis thaliana columbia
agcttgacgtcgcatgcacgcgtacgtaagcttggatcctctagagcggccgcccttttttttttttttttgtctccatgattaagaaccattaagaattcgaaaataatcacacaacattaaaaaatgtttaactcacatgaaatatcaacataataaacaatggactaattaatataaataatgatgtcgtaactcttaactacttttttgtctgaccatcgattagatatcggaataaaccccattcttaagagtgctccatcgatgcaaaacgtgaccaagaccatcatagaaaacgacgcgtagttcagcttcggatgtgtaaaccgacatggaatccttgtccatcatagtaaaacctccatctccttgtgggggcccaatccattccacatctcctttccacggccttggggcgcacctccacttggtcataaatggtattcccactggttgatgcggcttaggggccccaagcaatgatcatgcccgtttatatagagatccacttcattagcctcgaggataggtaaaagttgtttctcaagctctatggtatttccgtggtgacctgcacttttgatcgtgtgatggcctaccactattttccatttagccattgattcttgcaatgccacat

SEQ ID NO: 84793 - DNA, 1393 bp, Arabidopsis thaliana columbia
cttaactaaaaaagaatcgacacacaaaaagagagagtttataaaatacacgataatatcaaagttaaacacacaccaaccaagtaaacaagatacaacacaattggaatctttcttctttgacaaaaaaaaaaggaatctctctctttctctgattctctcatgtccatgcaacaagaaacgtctcacatgacggcggctccacagaccaacggccatcaaatcttccctgagattgacatgtccgccggcgattcctcctccatcgtacgagctacagtcgtccaagcctctacagtcttctacgatactcccgccacgctagataaggcagagagactgctttctgaggcagcggagaatggatctcagctagtggtgttcccggaggctttcatcggtggatatccacgtggctctacctttgaattggctattggttctcgtaccgctaaaggacgagatgactttcgcaagtaccatgcttctgccattgatgttcctggccctgaagtggaacgattagcgttaatggccaagaagtacaaagtatacttggttatgggtgtgatagagagggaaggctacacgctatactgcaccgttcttttcttcgattcacaaggtctgttcttaggtaagcaccgcaaactcatgcctacagctcttgaacgttgcatttggggatttggagatggatcaaccatccctgtgttcgatactcctattgggaaaatcggtgctgctatttgttgggaaaataggatgccttctttgagaaccgcaatgtatgccaaaggcattgagatttattgtgcacctactgctgattcaagagaaacttggctagcatcaatgactcatattgcacttgagggtggatgttttgttttgtcagctaaccagttttgtcgtcggaaagactatccttctccgccggaatacatgttttccggttcagaagagagcctaacaccggactctgttgtctgcgctggtggaagctctatcatttcacctttgggaattgttttagctggaccaaactatagaggagaagctcttatcacagctgatctagatcttggggacatagcacgagccaagtttgattttgatgtggtcggacattactcgaggcctgaagtgtttagcttgaacataagggagcatccgagaaaagcggtcagcttcaagacgtcaaaggtaatggaagatgaatccgtctaacaaatgatcatttgttagacccaaactttctctgtaatttgatgaagtttatctgtagtaaacttcaagacttgtgttgtaattgaaatcgataaaaaaatctaaaccgttagattgagtgttgtcttctattcctcgtttatactatgcttggttctgctca

SEQ ID NO: 84794 - DNA, 639 bp, Arabidopsis thaliana columbia
  unsure (1)..(639): unsure at all n locations
atgacggcacgcgcacgcatgcttggatcctctagagcggccgccctttnttttttttttttttttttaaagacaaagagtgattgcttttaaagagtaatggcacaagtaccaaatttatccacatgaatcacaaaatacacaaaccaagcccttagtagatttcctctagatgtcaatcttctctgtataaaagactgaaaactttatattcaaaaggcatctcaaaaacagagagagtgaagaacacttttgcacagcgagattaaaaaaaaacccataagatacctctaacataagcggtttctttcatacgcaacgaaggaaacatatagactgtaggtgaggctcacagagaacgcatcaaaacccgtctttacctctaatatttatagcacgagggaagtgttaacaacacaaagcatgtggcttcatttgtcagaatgaccccttctggccttacggcgagtatgttgatgaggctgtcggatagggcttcttcgtctttgtgcagaagagcgaacagaggaatttgtacactatgaagatgggtaaggccaacaaagcagaggctgcaaaccaaatgaactctttggtggcaaaaggttccaacagctcatggctcttcagtttacttta

SEQ ID NO: 84795 - DNA, 649 bp, Arabidopsis thaliana columbia
  unsure (1)..(649): unsure at all n locations
ctgacgtcgcatgcacgcgtacgtaagcttggatcctctagagcggccgcccttttttttttttttttttaaaatgaattgaaataaataaatagtcgatgtggatttaaaattgttttaaaatacataaaccaatataaactttccaaaatgactacactgatgaaagctaataataagtcgatacaggttatactaagcaacactatcagagagaaaatctgtgctgtcttgttgcttcttcctcctacgagcatcaacaagcttactagaatgtgttccaagcacttcggtgatggcttttggcaaccagaagccaggccgctcaagatatggtgcgcggtcaataaccaatggttctctcaaggttacatcaatcccctgataagtccacaatgctagtggtgctgcacctttgaggccaagggataaccagccaagaccagccactgaaatgtctatgcttttcacgtcccagctatttcccgacacctggatctccttctcttcccatgttcccaattcagacgctctgttctctccaattggtggctgaaggcgtaaaccggaatggccctggaatatttcttcggcatcctctgtttttcctagatgcaatgaaccattggtgccaatganngatngtttt

SEQ ID NO: 84796 - DNA, 446 bp, Arabidopsis thaliana columbia
caaaaaacagaagagaagcgttttgaaacgaagaaccaaacaggttcttcgtcccttttgcctttagggcacaaaggggaagcctttttcactgggtatgtgttgagaatttggggtttttaggtttttggctcagaagagagaatctgggatcttaaaaatcgaaactttctagatgtggttttagttcaacttagttgtagaagatgggatcaaatcaaggttcttccaggttagataccgtagagattaaagctctcatttaccgggaaattgggaatcaaagagctgagagttacttcaatcagctcggaagattctttgccttgaagatcaccaaatctgaattcgacaagttgtgcatcaagaccattggtagacaaaacatccatcttcataaccgtcttatacgttccatcatcaagaatgcttgtattgccaaatct

SEQ ID NO: 84797 - DNA, 835 bp, Arabidopsis thaliana columbia
  unsure (1)..(835): unsure at all n locations
nnnnnnnnnnnnnnnnnnnnnnnnnnnnnnnnnnnnnnnnnnnnnnnnnnnnnnnnnnnnnnnaagaagaaaaggagagagcatccatatcaaataaagctaaaaacttgtaatagttataacaaaaagggatcactctgtataataataaaagctcaaaaacacaccaaaaggaccaggcaatttcattcccatcaacaacaaaaaaaaagataaatgaaaacgaagagtaatatataccaaactatataactcgattcaatttcattcttgtttttttgttttgttgattaggaaatcgattaagctacagaagaacattcccttgcaaagtgaccttccttaccacacttgtagcacgcattatcattacctcccccgccgtcgtctctctggtcacaatcacgagccaagggaccagaaccaccacactggtaacacccacaagaaggctgtctcttagccccacaatctcttgcaatgtgaccaactcccaccgcatgaataaccaagttccactaccaccaccaccgcttctgacgtttccggcagcaaccttctgagtacaatccctagcaaagtgaccaacatcaccacaagtgtagcaaccatcgtttccacctttgaccgctccacgttggtctccgtttccaactgatttctgagnacaatccctagccacgtgaccaacatcaccgcaagtgtngcaaccatngttnacacctttggtggctccacgttggtcaccgtttccaggtgaagnacaatncctagcgaagtgaccngtatcaccanaattgtnacaaccttctcctcctctagatctacgttcacc

SEQ ID NO: 84798 - DNA, 860 bp, Arabidopsis thaliana columbia
attgacgtcctctgcagtaccggtcctggaattcccgggtcgacccacgcgtccggaccaagttgtgacgattttgtattcgggttacgaaactgtctctacgacctcaatgatggctcttaagtaccttcatgatcacccaaaagctcttcaagaactaagagctgagcatttggcattcagggaaagaaaacgacaagacgaaccactcggtcttgagcgacgtgaagtcaatgaagttcactcgagctgtgatttatgagacatcaagattggcaacgatcgttaatggggtcctaaggaaaactactcgtgacttggaaatcaacggttatttaatcccaaaaggatggagaatttatgtatacacgagggaaattaattacgatgcaaatctttatgaagacccattgatctttaatccatggagatggatgaagaagagcttggagtcacaaaactcatgctttgtgtttggaggtgggacaaggctttgtcctggtaaggaactagggattgtcgagatctcgagctttctccattactttgttacgagatacagatgggaggaaataggaggggatgaattaatggtgtttccgagagtttttgcaccaaaaggcttccatcttaggatttcaccctactaatttctaactttttaaataaaataatatagattttatgcacgcagaggatacagaagacgtttatgaagaaacaagagaagataattataaattttttttttttttgacacatatttttgttctcatttaagagtcttctggtcatatgtacataaccataagcagcataatcttattatatatctatttctgtataactctatttgaact

SEQ ID NO: 84799 - DNA, 858 bp, Arabidopsis thaliana columbia
  unsure (1)..(858): unsure at all n locations
ccgggtcccacccacgcgtccggaccaagttgagacaattttgtattcgggaccgattttgtttctccgacctcaatgatggctcttaagtcccttcatgatcacccaaaagctcttcaagaactaagagctgagcatttggcattcagggaaagaaaacgacaagacgaaccactcggtcttgaggacgtgaagtcaatgaagttcactcgagctgtgatttatgagacatcaagattggcaacgatcgttaatggggtcctaaggaaaactactcgtgacttggaaatcaacggttatttaatcccaaaaggatggagaatttatgtatacacgagggaaattaattacgatgcaaatctttatgaagacccattgatctttaatccatggaaatggattaagaagagcttggagtcacaaaactcatgctttgcgtttggaggtgggacaaggctttggccctggtaaggaacttagggattggtcgaaatcttgaggcctttcttcaattacttttgtttacgaaaaaaccagaatggggaaggaaaattgggaaggggggattgaaatttaatggggtgggttttccccaaaaaggttttttttgggcaaccccaaaaaaggggctctttccatttttgttaaaggaaattttcaaccccccttaaccttaaaatttttggtgaaacctctctttttttaaactcttagggattgggatctctatgggattttttttatgtcccccccccccttgaggggttttcccccaaaaagaaccctttttattgtgaagggaaaacctcccgcggaacgggatttttttttttaaaaagaggcnttttcccttttttt

SEQ ID NO: 84800 - DNA, 690 bp, Arabidopsis thaliana columbia
  unsure (1)..(690): unsure at all n locations
cgccnnnnnnnnnnnnnnnnnnnnnnnnnnnnnnnnnnnnnnnnnnnnnnnnnnnnnnnnnnnnnnnnnnnnnccacgcgtccgatttcctttaagcaaacgagcttgagaagctttccgatttcaattccttttaattgacgatgccttcttcgttctccaagccggatttagatccttcttcttcgcctccaccgatttctcctttatctcaagacagctcggaggctgagcgccggcttcgagaagcggaggagaggctacgcgatgccatggcggagcttcagcgtagacaacgctctgcggcgcgtggatctcacgcggaattgtgtgatcacgctgacgtttcttgcgtcgccaatgccattgggaatttatgtcagagctttcttctctcttatggtgttagagttgggatcgggattcttcttcgcgcttttaagctcgctaggggacagtcttattcgtctcttctcgatcttaagcaacttgtttcagagaaagatttgatagttagggaggaagcatgtcgtattggtctactntntggtggcntactggctcgatcatgcccttagatgctgtttgaggaagtggagaaagaaagagacgccattgaattcgtaagtttatttatttatttgtgtgcctaagattcgattggtgatctctntcttataatgctctact

SEQ ID NO: 84801 - DNA, 763 bp, Arabidopsis thaliana columbia
  unsure (1)..(763): unsure at all n locations
ttggccgtctgttgtaccggtccggaattcccggttcgacccacgcgtccgcttcgggagcttggacaacttgaacaagaccttgtttttggtgatgctggaatgaaggatgtgattaaatatttgagtactcaagaggaggcaagccgtgaaggtaagttacgcctgttgatgatcctcgcaacaatttaccctgaaaagtttgaaggtgaaaaaggtcaaaatctaatgaagttggccaaactctcatctgatgacatgaccgctgtaaataatatgagcttacttggttcagccgtcgatgctaaaaagattaccccgggaggtttcccttttgaaatttgaccttcacaagaaaaaacgagctgtcaggaaagagcgccaagaggaagcagcatggcagttatctcgtttttaccccatgattgaggaactcatcgaaaaacttagcaaaggagaattgccaaaagaggatttcccatgtatgaacgacccaagcccaagtttccacggatcaacctcactttcatcagcagcaagtagtagtcaaggtcaagctgctcagtccatgagatcaagacgcacaccaacatgggctaaacctcgaggttcagatgatggatattcaagtgattcggtattgagacatgcgtcaagcgatttcaggaagatgggacagcgaatatttgtgttcatcgtcggtggagcgactagatcagagttaaaagtatgccacanactatccacaaaactcaaaagagag

SEQ ID NO: 84802 - DNA, 400 bp, Arabidopsis thaliana columbia
cgggaggaaaaagaataaaaccaaagcaaaaaaatggctttgaaactcacttctccgccttcagttttctcacaatcaaggagatcatctccttcttcgttaattccgataaggtcaaaatccacattcaccggatttcgatcgagaaccggtgtttatttaagcaaaacgacggcgcttcagtcgtctacaaaactgagtgtggcggcggagagtcctgcggcgacaattgcggcggatgattgggggaaagtatcggcggttctgtttgatatggacggcgtgctttgtaacagtgaagatctttctagacgcgccgccgtggatgtttgtacggagatgggagttgaagtcactgtggacgaattcgttcctttaagggaacaggtgaagccaaatt

SEQ ID NO: 84803 - DNA, 414 bp, Arabidopsis thaliana columbia
gcttgaaatcactctctttcatccttccccgcgcactgtgtctcgctctctctctcccacatttccattatctcctttactttctttctttgagaatgtcttctacaacaatcggcgagcacatcagactccgacgagctagaaaccaaacaatccgtcatctccacgccgccgacgatgatccgccgctaagccacgtcgttcttccgatttcacaacctaatcgcttctgtaactccgcaatgtcttccttctttcccctcccgacttcctcctccaacgaaagcacgaggaagaaaccgtaccaaacgtcgtcgtttcgagggatgggttgctatgccgcagcagcagcagcagctcaagaggtttctgttccctccgtcattcgctactccgcggatttggatgccagaa

SEQ ID NO: 84804 - DNA, 1895 bp, Arabidopsis thaliana columbia
  unsure (1)..(1895): unsure at all n locations
acgcgtccgagatcgcgtgggatcactttcctcgatctcactttctctctcttatcatcatctcctggtattctctctctctcatctccgtgatggtgctctcccacgccgtatcggagtcggacgtctccgtccactccacattcgcatcacgttacgtccgtacttcacttcctaggttcaagatgccggaaaactcgattcctaaggaagcggcgtatcagatcatcaacgacgagctgatgcttgacgggaatccacggttgaacttagcctcctttgtgacgacatggatggagcctgagtgtgataaactcatcatgtcctccatcaacaagaactatgttgacatggacgagtaccccgtcaccaccgaacttcagaaccgatgtgtgaacatgattgcacatctattcaatgcaccgttagaagaggcggagaccgccgtcggagtaggaaccgttggatcatcggaggccataatgttggccggtttggccttcaagcgtaaatggcagaacaagcgcaaagctgaaggcaaacccgtcgataaacccaacattgtcaccggagccaatgttcaagtgtgttgggagaaattcgctaggtactttgaggttgaacttaaggaagtgaaattgagtgaaggatactatgtgatggaccctcaacaagctgttgatatggttgatgagaacaccatttgtgttgcggccattcttggttccactcttaatggagaattcgaagatgttaaactcttgaacgatctcttggtcgaaaagaacaaagaaaccggatgggatacaccaatccacgtggatgcggcaagtggaggattcattgcaccgtttttgtatccggaattggaatgggactttagacttcccttggtgaagagtatcaatgtgagtggtcacaagtatggacttgtgtacgcagggattggttgggtgatctggagaaacaaagaggatttgcctgaggaactcatcttccatatcaattatcttggtgctgaccaacccacctttactctcaatttctccaaaggttcaagtcaagtcattgctcaatactaccaacttatccgattgggccacgagggttacagaaatgtgatggagaattgcagagagaatatgatcgtcctaagggaaggacttgagaagacagaaaggttcaacatcgtctcaaaggacgagggagtgccacttgtcgctttctccttgaaagatagcagctgtcacactgagttcgaaatctccgacatgcttcgcaggtatggatggatagtgccggcctacacaatgcctccaaatgcacaacacatcactgttcttcgtgtggttatcagagaagatttctcgagaacactcgctgagagacttgtgatcgatatagagaaagtgatgcgtgagctcgatgagcttccttcgagagtgattcacaaaatatcacttggacaagagaagagtgaatctaacagcgataacttgatggtcacggtgaagaagagcgatatcgacaagcagagagatatcatcactggctggaagaagtttgtcgccgacaggaagaagacgagtggtatctgctaatcgaaatatatttacttcaaatgtttgaagacttttattaataatgcataattgcattgatttggatatttgaatgtttcattcccctttatcgctgaaccaagtttcatttccctttattgctgaagtaagtttcatttccctttattactgaaccaagtttcattcgactttgatttgtaatatcttttgatattnnnnnnnnnnnnnnnnnnnnnnnnnnnnnnnnnnnnnnnnnnnnnnnnnnnnnnnnnnnnnnnnnnnnnnnnnnnnnnnnnnnnnnnnnnnnnnnnn

SEQ ID NO: 84805 - DNA, 771 bp, Arabidopsis thaliana columbia
tggccgtctgttgtaccggtccggaattcccgggtcgacccacgcgtccgagttactacagaagcgaaatgttgccattgttgaaacgtcacatggtgttaaagttcacgcttacggactcacggcttgctaacaatggcctgccaccatctatccaacgactgagatgtcgtgctaattaccaggcactgctatacacaaaggagattgaggacctagggaagattttggttaaccggttaagaaacaacactgagccgtatatcgctctgcatttgagatatgagaaggacatgcttgcctttacaggatgcaaccacaatcttacaactgaggaagcagaagagctgaggaatcatgaggtacagtgtcaaacatttggagggggaaggggattgtttagcccgagagagccgggttcaaaggcggatgtccaatgtctccgcgggaagcagctttttttcttaaagccatgggatatccgtcctccacgactgtatatatagttgctggtgaaatctatggaagcgagagtatggatgctttccgtgcagagtacccaaatgtcttctctcattcaacccttgcgactgaagaagagttagagcctttcagtcaataccagaatcgccttgctgcgttggactacattgtggcccttgaaagtgatgtttttgtgtatacatatgatggtaatatggctaaggcggtacaagggcacagaaagttttgaaggtttaggaagttcataaatccagacaggctgaattt

SEQ ID NO: 84806 - DNA, 407 bp, Arabidopsis thaliana columbia
cggacgcgtgggcggacgcgtgggctcttggttcttttccataagcttataacatatattttttttaaaatctactctgcgttaaaaaaatgaaaacacgtagcagcagtgtgggtaagatcaaagggtgtttctcgatcagtttcatattcagatgtatcagagttctcattaacagatctgtttctttttccttatctgattaaacaatttccttcagaattttacttttttgaacatatatagtttttctctgttcctatatcttgagttttgtgagaggttaattatatgaaattttacgcattattgttcatctatatcgaaaaacaatgtcaagaaagccatgttgcgtcggagaaggcttgaagaaaggagcatggaccaccgaggaggacaagaaactc

SEQ ID NO: 84807 - DNA, 398 bp, Arabidopsis thaliana columbia
aacaaagtcatcctcttcgtcttctttctctgaccaaaacagagcgaaaagcaaaaatgaaaagtggagggaacacaaacactaaactcatacttgttcatccatacattcaaaagcaaacaagcacaaatcgtctatggcttctcgctttcgtttctttcttcacaatcgcttttctcctaactcttctctacaccaccgactccatcatctcttctaaaaacaactccgccaccgtctcctccgccgtcaattctgccgtcaccaccgctaccatctctcagttaccaacaacagccatcaatgccatgctccactacgcttcaagatcaaacgacagctaccacatgtcatacggagagatgaaatcaatctccgacgtcctccgccgctgctct

SEQ ID NO: 84808 - DNA, 856 bp, Arabidopsis thaliana columbia
  unsure (1)..(856): unsure at all n locations
atgctacttccagctcctatacngactcactatagggaaagctggtacgcctgcaggtaccggtccggaatcccgggtcgacccacgcgtccgcccacgcgtccgcccacgcgtccgaaaatctcaagataaacctatagttgtcttgtcaaacaatcaaaccctttttagatatagaaaatgggaatcaaattcagccaaggtccttcgaatacaaccattcacaacagaagtcatcaagatggtgaggatcaaaggaacgagacggcgacgaagatcaatcatgacaagcctcaaaatcaatcaagtagctttcagattccacttcattatccaaagtatacaaagagtgattatgagaaaatgccagagtggcaattggatcggcttctgagagagtacggcttgccggttatcggagattcttacgagaagaggaaatttgccatcggagcatttctctggtcgtcggagaacgagcactagatcatatgttatccgaatagacgtcatcgtttcatatgggactgtttgaataagattaagttggtgaaagcgtggaaaagaaacatgtttgcatgtagatattatcctggacatgtatgttttatataatatatatatatgtattaaagtatttggatatatggtgtgtttctctactctcccatgtatgttaccctcatggncacgacattttgtaataaactatactaagcnttaataatttttctagcgttttcnnnnnnnnnnnnnnnnnnnnnnnnnnnnnnnnnnnnnnnnnnnnnnnnnnnnnnnnnnnnnnnnnnnnnnnnnnnnnnnnnnnnnnnnnnnnnnnnnnnnnnnnnnnnnnnnn

SEQ ID NO: 84809 - DNA, 4242 bp, Arabidopsis thaliana columbia
gaaaaacgaaactcatcgaacaaatttcgaggctttgcttcttgaatctcacaagaagccgtacagtttctcagctttctagtgttttctcgggtagaagagagatagagagacagagcaaagcctaataagcgatggggaacaagagattcaggtctgataataatgcagggaaaccaacttccgtcgaagctactaggatttgggcgactaaggtcatcgaagactttcgagcctctgggaacgaagtttacacgtttgagcataatctatcaaataacgaacgtggagtgattcatcagatgtgcaggaaaatgggtattcaatcgaaaagttctgggcgtggggaacaaaggcgtctttcgatattcaaaagtaggcataagaatggaaacaagaatgaagctaatgagaaatcaaataaagagaagctcaaatgtgtgtcatttccgccgggagcagatgttattctgcaggagttatttactcattacccaccttgtgatggagatacggctgcaacatcgtttaccaagtactctggtaacaagggtaaacaaggacaatggaaagatgattttttccggaaaccacagattagcagtgaggagattctagaaaaagtggcatctttgagttctagacttaagaaggataaagctcttaaggagatcactaagctgcggtcaaagcttcccatcacatcctttaaagacgcaattacatctgcagtggaatccaatcaggttattctcatttctggtgaaactggttgcgggaaaactactcaggtgcctcaatatcttttagaccatatgtggtcaagcaaaagagaaacttgcaaaattgtttgcacccaacctcgtcggatatccgccatgtcagtttctgaaagaatatcttgtgaaagaggtgaaagcattggagaaaacattggttacaaggttcgactccaaagcaaaggtggaaggcactcatcagttgttttctgcacgaatggtattctcctgagggtgcttgtaggaaaaggctctgttagcagtgtttccgacataactcacatcattgtggatgaaatccatgaaagagattgctattctgatttcatgttggcaattataagggatttgcttccatcaaatccccatctccgtctgattctcatgagtgctacgcttgatgctgagagattttctggatattttggaggttgcccggttgtccgtgtccctggattcacttatccagtgagaaccttatatttggaggatgtgctctctattctgaaatcaggtggagataatcatctaagctctaccaacttgagtatatcagaccacaagcttgatttgacggatgaggataaacttgctttagatgaagcaatcatcttggcttggacaaatgacgagtttgatgccctcttagatctagtttcttctagaggaagtcatgagatctacaattatcagcaccaatcaacctggctaacaccactaatggtctttgctggaaagggcaggatcagtgatgtctgcatgctcctctcctttggtgcagattggagcttaaagtctaaagatggtatgactgcattagaattggctgaagcagagaatcaactagaagctgctcaaataatcagggagcatgcagacaattcccagtctaattctcagcaaggacaacagttacttgataaatacatggcgacaatcaacccagagcaggtcgatgtgagtcttatacaacagttaatgaggaaaatatgtggcgattcagaagacggtgcgattcttgtttttctacctggatgggatgatataaataaaacaagacagagattacttgagaaccctttctttgcagatagtgctaaattcgacattatatgtcttcactcaatggttccagcaggggaacagaagaaagtttttaatcgcccccctccaggttgtcgcaaaattgtgcttgcgacaaatattgctgaatcagcagttaccattgatgatgtggtttatgtgatagatagtggccggatgaaggaaaagagctatgatccttataataatgtttcaactctccaatcttcttgggtatcaaaagcaaatgcaaaacagcgtcagggtcgagcaggccgctgccaacctggcatttgttatcatctctattctagacttcgggcagcctctatgccagattttaaagttcctgaaatcaagaggatgccggtagaagaactctgcttacaagttaagatacttgatccaaattgtaaaacaaatgatttccttcagaaactgttggacccgcctgttgatcaaagtattgcaaacgccttaagcatactacaggatattggtgccctgacacctcaggaagagctgacagaacttggagagaaatttggtcatctcccagttcatcctctgattagcaaaatgctattcttcgctgtgttagtaaactgtctggatccagcacttactctggcatgtgcagcagactacaaggaaccatttacgatgcccatgtcgcctgttgaaagacagaaagctgctgctgcaaaacttgaacttgcatcactttgtggaggtgacagtgatcaccttgcagttgttgctgcctttgagtgctggaaaaacgcaaaaggaagaggtctttcagcagagttttgctctcagtactttgtctctccaagtgctatgaagatgttggatcaaatgcgtagccaacttgagtcggaacttaaaagacatgggattattcctaacgacatttcaagttgtagccaaaattcgcgtgatcccggtatactccgtgctgtgctagcagtaggattgtatcctatggtgggaagattgtgcccagcttttggtaataatcgaagaactatagtagagactgctagtggtgctaaagttcgtgtccattcgctgtcaaacaacttcaacttgtcgtctaaaaagtatgatgaatctttactcgttttcgatgagatcactcgtggagatggaggcatgcacataagaaactgtactgttgctcgtgatcttcctttgttacttatctcaacagagatagctgtggcccctacagggagcagtgattctgatgatagtaatgaagaagaagaagatgatgaagaagcagcagctaatactaatgaagaaggaatggacatacataaagaagagagtaggcgtggagcgaaaatgatgtcttcacctgaaaattcagtcaagttagtagttgatcgctggctgcctttcagaaccacagcccttgaagttgctcaaatgtacattttgcgggaacgactaatggcttctattttattcaaggtaacacatccacgggaacatttgccacctcatctcggagcttctatgcatgcaatagctggtattctctcatatgatggtcatgcaggactttcatgtccaccggagtctatggtaccaaaacattcaaggactgagatgtatgataccggtggatgggaagagaaaccaaactctttccttaactcactcttttggtctctgagtttgaaagagaacaagcatcctagtcccacgaataggaatcagcagcataactacaacatggctccaacagaagctgcatcgatacctaggcagcaaaactataagcaaagaaatcccaaagcaaccaacaataccgattcgggtaagaagaaagagaagatgtttgttaatcccaccaataggattaaccagcctgaagctgcttctacgggtaagccatcaaagcacaaatcagccaacagttcgggttcgagtaacaagaaagagaacatgccttctgatcaggcctatgggaataagcaacataacacagttccaagagaagctgccgcaccaatggcgaagaatcaaagcagtaagaaaaccaagaccaggtcaggcaacaactcggattcgggtaagaagaaagaacagtatattccaaagaggcaacgcgaagacaaagcagaacagaagtgagatgcatgaaaagagattgtttttggttttgggttttggtttgggtttgggtttgggtcccatgaaagcagaggaattgatgatgtataaaaaattcatgtttggatccatgtctcttcggtggttcttggctcaaagtgtttctatttatctaatcatgaaacggagtttttaacggtttcatgttgctctaatatgttccagagtattgtaactattgttgttgttactc

SEQ ID NO: 84810 - DNA, 438 bp, Arabidopsis thaliana columbia
cttcactctaattgcgattgattctcctgtcttctccaatttatcagagaaattgcagagatgacacctgaatcaaacgctccctcagtagatccacaatttgtaggcaatgggtttgttcaagaatactataaccacctttatgattcaacctcggaagtacacaaattctatctcgaggatagtatgatttcacggcctggtctcgatggtgagatagttactatcaaatccttgaaagggattaatgatcagataatgtccattgactacaaaagctcaaggatcgagattctaactgctgattctcaattaactctaaagaaatggtgttgtacctctagtaacggttttagtgatcggaaacattgatgaaggatgaaattctcttaaaatttctttcttggtgtcgctgtatggtaacttcctttttgcctt

SEQ ID NO: 84811 - DNA, 794 bp, Arabidopsis thaliana columbia
ccgtccgcggtaccggtccggaattcccgggtcgacccacgcgtccgtatgtttgcccaaattgaagaaatcataatatccgttagactggcatttttgaactgctttctggattttcctgcgcacttggagcaaattggtgctgatctttcccaaagcacctccagacaagataattggaaaaacggatattctgatgagcatcaggaagaaccatcagccaacacctacggaagtgtaattgatcctcacaggcggttgttgatggtcttaagtaatataggttactgcaaagatgaacttgcttcagagctttacaacaagttcaaatatacatggttacagtctagaggcaaaaatgaaggcagtaggtgatctttcaaggtctaataatggctttcctcctgggctcgggagagcaagggtcctcgagcattacacttttgctaaggcaaatttgtccaggacagcggccacaaattactttccttggcctctggtattccaatgggggccagccccccaggggaaaggcatccgggatcctgctgttgggcggctgcacactcttgtagctgtccatgcagaggtctttgctggtgctaaacccctcctggacaagattcttggcgtgctgatcgaaggtctaatcgacacttttctgagtgttgtggaagaaaacagatcaagtgacctaagatcaattgatgcaaatggtttctgccaactgatgtttgagcttgaatattttgaaacagtactgtattcatattttacaagcgctgcaaccgagt

SEQ ID NO: 84812 - DNA, 963 bp, Arabidopsis thaliana columbia
  unsure (1)..(963): unsure at all n locations
cccacgcgtccgaaaaaaaaaagaaagctttttgggaacataaacaccatcgaaggagggtgggaggtgttttatgttcatgggtggagcttcttggccaacctgaccccattcatcatatcattacccactttcttctcctaaattattctctcttatctctctctctctctttttattttctttctttcttaattcatctaaactctctctgcttttgcttttcgtaattccttacatttcactcaatattaatcgccagaatctccgatccacccacaaatttagcaattttctgagatttgatcatttgggtcaccaaaaaatcttgtctttttgatctgggtttaacgccaataacatatgggaaacattagcagcagcggtggtgaaggtagacgccgtcgacggcgaaaccatacggcggctccaccaccacctcctcctcctccttcttcttctcttcctccaccttcaacatcatccaccgcatccttaccacaaccactcttgggctcccgtggcgatggccagatacccttatgctggtcacatgatggctcaaccgactccttacgttgaacaccagaaagccgtcacgattcgtaacgacgttaatctcaagaaggagtctcttaggcttgaacccgacccggataatccgggtcgctttctcgtctcctttacgtttgatgcaaccgtctccggaaggattagtgtcattttctttgctaaagaatccgaagattgcaaactcacagcgacaaaggaagatatactgccacctatcactctagatttcgagaaaggacttggtcagaagtttaaacaatcatctggttctggtatagacttttcggtctttgaggacgttgagctgttcaaagcnnnnnnnnnnnnnnnnnnnnnnnnnnnnnnnnnnnnnnnnnnnnnnnnnnnnnnnnnnnnnnnnaacggaatcat

SEQ ID NO: 84813 - DNA, 810 bp, Arabidopsis thaliana columbia
tgccgtaccggtccggaattcccgggtcgacccacgcgtccggggagagaccaagattgaaggcagaagagtggaagctcataagacggttaggataaccggtgttgttgttgagatcggttcgtttcggttgttggatacgaaggatttggataaggatttgagattagggtttttggaattgagaagtgttgctgaggttagaggaaggattaaggttttgggaagaaagagatggaaagttagtgtgatgagttgtaccatgagactaaatttaaccggtcggtttattcaaaatttgttatgtgaatagtagtgagtgaatgatcggttttatgatccggtttaagaagatttatttgtttgttgttgtttttttgggtgttttgtgtttttgcggtattgtaattgtaatggtctttgtctataaagggaacatcaatattgtagaaaaagtacaaaattgattagtctcaaaaaaaaaaaaaaaaaaaaaaaaaaaaaaacaaaccaaaacaaaaaaaaaaaaatatatataactaaactctaattctaataaaaataaaacggggggggcctttttaggggtcccaggtttacttcccggtgttggggaagtaaaactttttttatagggccccctaattcaaattacctgggccgtgtttttacaacctttgtgaatgggaaaacaccctggcggttcccccaaattttaattcgcttttggaaaaacaaattccccctttttttccccaggtttggcgtgataataaagccagagagaaggcgcccccccccccggttttc

SEQ ID NO: 84814 - DNA, 782 bp, Arabidopsis thaliana columbia
tgcagtaccggtccggaattcccgggtcgacccacgcgtccgcttgagggtcggcaatcgggcggcgggcgcatgcgtcgcttctcccccgccagattcaaatctttcttccaccatcgtcactcattgcttctcctccggtcgtaagtatttggaaccttgaagacttaaaaataacaactttttatagtgggcgctgtccaatatattggagagcttgacagtgtaataagatatatactctacaagcgttatacccgaagactgggtctataaatcaatgtcagaaggtgaaatggccatcattaaaccagagatgatgaaatcctatatatggcttgaaactgctgatggctcaatccaacaaagtggaacaagcaggttgcaatgttctgtcccatgatatgtcaaggagtaattcagaagggtgttggggcttctaagaacttcgcaatatctcttccccagcgggtcaatcccagccatgttaagcctgatttttggttcctgcagatttcatcaagtacctggacgttcaaataaggaacgtaaagtttatgatgaaaaattcatccggatggatacaaagaggctctgtgagttgacctcagccgctgacagtttgcagttgaagccgttggttgatcttactagtcgtgcccttgcacgaattattgagggaataacccctgaggagatacgcgaaatatttcatttgcctgatgaccttactgaggaggagaaattagagcctctaaagaacacaatggatgatccacggc

SEQ ID NO: 84815 - DNA, 793 bp, Arabidopsis thaliana columbia
cgccgtaccggtccggaattcccgggtcgacccacgcgtccgctctcaacgttgccagtgaagttcgccgtcgccggagctcatggattgaccaccgccgtttacacactatcaaaatcctaattcgaaattcttccaccacgcttctccttttcaaaatcgtaacaattttactccatcgctccggcggcgattcgcgagctctccgcttcatggccctgaagaaggaattgcgccgtgatgagaaattggatttataaagagaataacaaatgcaaagtttcctgggggagctgaacacttgtacttggatctcaaagctttgttcgctcttagacggtggtgtgttcgtcggaggggtcgaagcaatctttcccttggggacaacgcgaaacgctcttggacatggaaatgttacatctgaaccccatattgtgcttctgctgcaatgtcatcttcaactcttctcctaccttcagaagctattagtaagccacaactgtcccgaggttcaagtatgttcagcattttagacccccaaagtcgtcaaaaatgtctcacccttccagatctatccatgagatgagcttctcgaatgagttgctgtttgtgaaacgttattgacagccatttggcttagggaacatatgtagaaagaagagttggtgtttagtttatgagtttgaacacttaaaactttttaaaggctacacattgacaaggatgaagaaaggctcaaaatttggacacaaaggatgtaaggcctgaagcttaattaaaccttttttggagc

SEQ ID NO: 84816 - DNA, 577 bp, Arabidopsis thaliana columbia
  unsure (1)..(577): unsure at all n locations
ggttgccgcgcaccgcacccacgcgtccgcggacgcgtggggcgggaggtctacaactaaaagcctttgtgtgtgccagattagctccctactaatccgccgccgcacctcctcgatctccgcccagctcccttcttttctatctatctattcagttgtttctccggtaacaaccagctgaggaagaagaagaagtagtagccgtgatgatgatgatgacgtcacttggtggtggtgctggaggcggcggaggaggtggtggtagtggtggtgggagatttgtgacgtatccgccgcctctatctgtgcctccgtcggctcctcagtcacctaacttctctggtggtctccgatcacagccttctttctctcgttgaggcaagagatgtatcgtttctgaagttacttgcagagcgtcacaaaggcttactgcatttttgcctgtggttccacatgtttgcgggntaatgaacccaagagatcgggtttaatnatcccnagancaaattggggttaanctttcctggnagttnnccgggtttattggnaaggggcaataagggggggttttcngtgg

SEQ ID NO: 84817 - DNA, 648 bp, Arabidopsis thaliana columbia
tcgtctgcggtaccggtccggaattcccgggtcgacccacgcgtccgcttcacttcaacacacacacccaatttacagactaagcctctcttcaaatctccgctgcccacttcttcccagtcttcgtgttggttttgtaattcgctacccaaaacgcaattcccgaagctgagactcagtaatggatcaagtcacgggcttcgtatacaagctctcttacgtaacgagacgccaagtgaaggtgaagataataatgggtttggtttttttcctggggatatcttctctttatcacaggaaaagctcgggagtaatagcaatggtgaaacttctcatagtgtaatcgatgtggaggcatctcttgcacatcctcaaggtggtggaggaaatcgagctgggctttttagaactccaatatctggcggtggtcaaactgctacatcagctcatgctttacctcggcctgctttagctgtgcggaacttggtggaacaggctaggcttgctcatctgtgcacagtgatgtccagaatgcaccaccgcacggaagggtacccattgggctcattggtagattttgcacctgatcggatggggcatccaatatttgtgttttcaccgctggccatacacacacgaaatctcttg

SEQ ID NO: 84818 - DNA, 863 bp, Arabidopsis thaliana columbia
  unsure (1)..(863): unsure at all n locations
cgtccctgtaccggtccggaattcccgggtcgacccacgcgtccgcaacaaacaacagtgaaagataaattcagcataacaaaacaaaatggagtcacggaagattaacctaatggcgacagcaatagctttaatagtggcggctatggtggtggcagctgctgatgataagacgaaagacaaggaggagtgtacggagcagctggtcggtatggccacgtgtcttccttacgtgcaaggacaagcaaaatctccgacgccagactgttgctccggtctcaaacaagttcttaattcaaacaagaagtgtctttgtgtgatcattcaagacaggaatgatcctgatttgggtctccagatcaacgtctctctagctctcgcacttccttctgtttgtcacgccgctgctgacgtcactaaatgccctgctttgcttcacttggatccgaattctccagatgcccaagtcttctaccagctagctaaaggtttaaacaaaaccggcccagcctctgctcccactggctcgtcccctggacctataagcatttctccgacttcaggatccgatgatggtaacaacagtggtcgaacgacctctgtgccaggcaggaaccacgctcaaagcttctataaacaatggctggggctcgaagttgtgcttccatttcttcgtaattttttatattttcatcctcgtatagataaataatgatggcgcaaactgaaaagcatgtgatgttgattagtgaaattgcggtgacgctgatttttgcagctcctgttttgaatggtggagttaattctagttcgagaactcttcntgatatcttgtgtgacgcaatacgagctacagtttttct

SEQ ID NO: 84819 - DNA, 2763 bp, Arabidopsis thaliana columbia
cagacgcgtgggtccgtagctttggaagatcccacaaaaacacattccatgcatcatatccttctctctctctctcttctttctcaaagagtaaaatgaaacacaatctctgatgtgaagtcggttctgtccttataaatacccattaagacttctctctctctctctttctcaccaaatagtttcatcatctcttcttcactaaatacttagacagagaaaacagagctttttaaagccatgtctcttcagtatcatgttctaaactccattccaagtacaacctttctcagttctactaaaacaacaatatcttcttctttccttaccatctcaggatctcctctcaatgtcgctagagacaaatccagaagcggttccatacattgttcaaagcttcgaactcaagaatacattaattctcaagaggttcaacatgatttgcctctaatacatgagtggcaacagcttcaaggagaagatgctcctcagattagtgttggaagtaatagtaatgcattcaaagaagcagtgaagagtgtgaaaacgatcttgagaaacctaacggacggggaaattacgatatcggcttacgatacagcttgggttgcattgatcgatgccggagataaaactccggcgtttccctccgccgtgaaatggatcgccgagaaccaactttccgatggttcttggggagatgcgtatctcttctcttatcatgatcgtctcatcaatacccttgcatgcgtcgttgctctaagatcatggaatctctttcctcatcaatgcaacaaaggaatcacgtttttccgggaaaatattgggaagctagaagacgaaaatgatgagcatatgccaatcggattcgaagtagcattcccatcgttgcttgagatagctcgaggaataaacattgatgtaccgtacgattctccggtcttaaaagatatatacgccaagaaagagctaaagcttacaaggataccaaaagagataatgcacaagataccaacaacattgttgcatagtttggaggggatgcgtgatttagattgggaaaagctcttgaaacttcaatctcaagacggatctttcctcttctctccttcctctaccgcttttgcattcatgcagacccgagacagtaactgcctcgagtatttgcgaaatgccgtcaaacgtttcaatggaggagttcccaatgtctttcccgtggatcttttcgagcacatatggatagtggatcggttacaacgtttagggatatcgagatactttgaagaagagattaaagagtgtcttgactatgtccacagatattggaccgacaatggcatatgttgggctagatgttcccatgtccaagacatcgatgatacagccatggcatttaggctcttaagacaacatggataccaagtgtccgcagatgtattcaagaactttgagaaagagggagagtttttctgctttgtggggcaatcaaaccaagcagtaaccggtatgttcaacctataccgggcatcacaattggcgtttccaagggaagagatattgaaaaacgccaaagagttttcttataattatctgctagaaaaacgggagagagaggagttgattgataagtggattataatgaaagacttacctggcgagattgggtttgcgttagagattccatggtacgcaagcttgcctcgagtagagacgagattctatattgatcaatatggtggagaaaacgacgtttggattggcaagactctttataggatgccatacgtgaacaataatggatatctggaattagcaaaacaagattacaacaattgccaagctcagcatcagctcgaatgggacatattccaaaagtggtatgaagaaaataggttaagtgagtggggtgtgcgcagaagtgagcttctcgagtgttactacttagcggctgcaactatatttgaatcagaaaggtcacatgagagaatggtttgggctaagtcaagtgtattggttaaagccatttcttcttcttttggggaatcctctgactccagaagaagcttctccgatcagtttcatgaatacattgccaatgctcgacgaagtgatcatcactttaatgacaggaacatgagattggaccgaccaggatcggttcaggccagtcggcttgccggagtgttaatcgggactttgaatcaaatgtcttttgaccttttcatgtctcatggccgtgacgttaacaatctcctctatctatcgtggggagattggatggaaaaatggaaactatatggagatgaaggagaaggagagctcatggtgaagatgataattctaatgaagaacaatgacctaactaacttcttcacccacactcacttcgttcgtctcgcggaaatcatcaatcgaatctgtcttcctcgccaatacttaaaggcaaggagaaacgatgagaaggagaagacaataaagagtatggagaaggagatggggaaaatggttgagttagcattgtcggagagtgacacatttcgtgacgtcagcatcacgtttcttgatgtagcaaaagcattttactactttgctttatgtggcgatcatctccaaactcacatctccaaagtcttgtttcaaaaagtctagtaacctcatcatcatcatcgatccattaacaatcagtggatcgatgtatccatagatgcgtgaataatatttcatgtagagaaggagaacaaattagatcatgtagggttatca

SEQ ID NO: 84820 - DNA, 347 bp, Arabidopsis thaliana columbia
gctaaactaaatacaaagaaacgcgacttattgggtacaggggttgtgagagctaacgcagagatgtacacgcggggatgagatatgtagagagaagacaaagtgtttcctcaaggaaatatctatgcccaatggtttattaccattgaaggatatataagaggttgggtatgacagatattcatgttttgtatggctgaagcataatatgatcttcacttataagtttacagaaatttatattcttgtcttctatttaacctaaatctcatctttttttttttacctttttaattaaaaaaattttctctagtcatattcattgttatcttatttattttttttta

SEQ ID NO: 84821 - DNA, 644 bp, Arabidopsis thaliana columbia
  unsure (1)..(644): unsure at all n locations
ccttnggtttnnagggttggttncaagggccggtttttttgcttaccaaaggagggctcccttacatgttcccggggttggtaacttgtcccctttgggacccgagttccacccattgttgggccccgggaaaattcaagaagctcactgggggttcaaagccaagggacttcttattttgggtcacttatcaatgggatctataccgggggaacccccctaccaagatcacgttcaagacaccgaccacactgtccaggactttcccggtcacagcttttatagtcccagaagaacctgccaaggaggaacctgccaaagaggaacctgccaaggagaagagcagcgaagccaccgaggccaaggaggctgttgcaatcaaggaggtgtcgcagtcaaagaggcggcctaatcagctcagcttcagcagataaaagagacccgaatttttaagtgtacttcaagaatttgaacaaatcatggagagttagtgtttctcactgctctaactatcatgtattatctacctaccacttgttgctgcttgttttacctgtaataagatatcaatatcatcctgttccactaaaacttatccttaattatctataaactacaatacagctggttctgtatgtcacttc

SEQ ID NO: 84822 - DNA, 620 bp, Arabidopsis thaliana columbia
  unsure (1)..(620): unsure at all n locations
ggaaagctggtacgcctgcaggtaccggtccggaattcccgggtcgacccacgcgtccgaccgggaaaatcaagaagctcactggagtcaaagccaaggaacttcttcatttgggtcactatcaatgagatctataccgaggaaccccctaccaagatcacgttcaagacaccgaccacactgtccaggactttcccggtcacagcttttatagtcccagaagaacctgccaaggaggaacctgccaaagaggaacctgccaaggagaagagcagcgaagccaccgaggccaaggaggctgttgcaatcaaggaggctgtcgcagtcaaagaggcggcctaatcagctcagcttcagcagataaaagagacccgaatttttaagtgtacttcaagaatttgaacaaatcatggagagttagtgtttctcactgctctaactatcatgtattatctacctaccacttgttgctgcttgttttacctgtaataagatatcaatatcatcctgttccactaaaaaaaaaaaaaaaaaagggcggccgctctagaggatccaagcttacgtacgcgtgcatgcgacgtcatagctaatnctatagtgtnnnnnnnnnnnnnnnn

SEQ ID NO: 84823 - DNA, 827 bp, Arabidopsis thaliana columbia
  unsure (1)..(827): unsure at all n locations
nnnnnnnnnnnnnnatacgactcactttagggaaagctgcgtacgcctgcaggtaccggtccggaattcccgggtcgacccacgctttaagacagctaaaactaaatacaaagaaacagagatgggtttggttacagaggaggtgagagctaaggcagagatgtacaccggagatgagatatgtagagagaagacaaagtgtttcctcaaggaaatatctatgcccaatggtttattaccattgaaggatatagaagaggttgggtatgacagagagtcaggtgttgtatggctgaagcagaagaagagcatcactcacaagttcacagagatagataagcttgtctcctatggaaccgaagtcacagccattgttgagaccgggaaaatcaagaagctcactggagtcaaagccaaggaacttcttatttgggtcactatcaatgagatctataccgaggaaccccctaccaagatcacgttcaagacaccgaccacactgtccaggactttcccggtcacagcttttatagtcccagaagaacctgccaaggaggaacctgcccaaagagggaccttgccaaggaggaagagcagcgacgcaccgagggccaaggaggctgttgcaatcaaggaggctgtcccagccaaaagaggcggcctaatcagcccagctttagcggtttaaagagccccgattttttaggggacccaagaactttggccaaccatgggagttgtgttccactgccnacaccatgatntcnccnccnctnttcngggcggaattcttagccgggggnncngntttnngnnccccgngngtc

SEQ ID NO: 84824 - DNA, 935 bp, Arabidopsis thaliana columbia
aggcacgcctgcaggtaccgggccggacctcccggggcgacccacaacctccgcaaggaggaacctgccaaagaggaacctgccaaggagaagagcagcgaagccaccgaggccaaggaggctgtagcaaccaaggaggctgccgcagtcaaagaggcggcctaatcagcacaggcttctttatataaaagagacccggaaagttaaggggacctcaagaatgcggacaaaccacggagagggaggggttctcactgctctaactatcatgtaggacctacctaccaccggcagcggctggcttacccgcgataagaaaccaagacaagccggggcactaaaaaaaaaaaaacacaggggcgcccccccaaaaggaccaaagctgaccgacgcgggaccgcaacggacaaactccagtaaagggccacctaaagccaatccaccggcccggcggtctaccacgcgcgggactgggaaaaagcccgggcgccacccacaccaaaagcgccttggagaccaaaacccgcctccgccaagcggggggaaaacgcggagaaggaaccggaccggagccgccctgcccaccattgtgccacacccgaaagggcggaaggggcccgcgcccccgggacgcggccaataaaggcgcgcacgcgaggggggcaaacccacaccgcaacgatcgacctgggcagcgaccaaaggcacgcccatgaagcaacacgccaactaagtcacacacggagcccggtgacccgcgcaagacccaacacagtggcctccctacaggcggagaagaagggcccgccgcgcccaccaccagaaacggaaagggaaggggcgccgaacgggccacacgccacgaaagagatgcgccccgagaatggagggcacaggctacacgggacccgcgtcaacggaccaccaacaccaac

SEQ ID NO: 84825 - DNA, 672 bp, Arabidopsis thaliana columbia
cccctttgattgacctgtccgtctgcagtaccggtccggaattcccgggtcgacccacgcgtccgacgtcacgaatcgtgtcccacttgaaacccttggcatataaatgaaagaacttcttattattacttcccccaggtcgagagcattcacttaaaaccctaaattgtgacgaccgcaccggcattgcagacaacgttcgtgtcatcaaccgacttgctgaaacattcttattataggggatcgccatcatccgaacaatgtgatctcttcctaaaaacaagatatgttcttactgcgtatggtgccgacgccgtcggagatgtctctcctgacagagcaatttacttaatcgggggagccatcgatcgcgctctccgacggagctgcatgtcccgatcctcttgaaacgcaaagacacttgtccggaatgtgacggaacaagatttgagaggaaaggacgagtgactgtggtagccaccaccgaacggaaggatctgcctcagatcgtgcgtgctaactgctctggactgatgaagcttaacctgatcgatggacactaggtcttgttcatatatatgtcaaaagctgcatgtgtcgttcctgttggttatctacaatatacctctgcaaaagtagatagcttggaatgatcaatggttgcttggagat

SEQ ID NO: 84826 - DNA, 648 bp, Arabidopsis thaliana columbia
gccgtctgcggtaccggtccggaattcccgggtcgacccacgcgtccggagacatgaaagtagacttcctcttttgcatggttcaaatgaaaagaaaaacaacggagacctagattttctgatggctgaatttgcagaggtctctggacgtggaaaggaaaatggaagtcttgatactacgactagatatcccagtaaaacaatgacaaagaaggttctggctattgaaggagttgcttcaacatctgggattgcatctcagacagcatctggagtactgtcaggttcgggtgttctaaacgctagacctggaagtgccacatcatctggtttacttgcccatatggtctctacgctgagtgcagatgtttgcaagggaatacttggagaaagttgctgacctgcttcttgaatttcctcgagctggtacggcagtaaagtcctttttgtgcagccaaagctttctcagtcgtctttttcagatgttcaaccgtgtagaacctcctattctgttaaagatactggagtgcacaaatcatttatcaactgatccaaattgcttggagaatctgcagcgtgcagatgcaattaagcatttgatccccaaccttgagcttaaggatgggcatcttgtttatcagatccatc

SEQ ID NO: 84827 - DNA, 323 bp, Arabidopsis thaliana columbia
atcaaatcaaaatctcaactctagagatttattgttgacccgtttaccgcgattctctcctcaattcgccggtaaacccctaactctgtcggaaaaccctaattcgccgcgacggaaattaccaatactcgtttcctcgtagcattggatttttaaagctgttgattccagctttgttgaggttaaagcaactatgaagcctgttcttcactcgggttcttcatccaatggattttcacacaggagatttgaaaaggaggcatggatgaataacgcacagccttctgttgacaatacagaaaacggttgggacgctgaaagtg

SEQ ID NO: 84828 - DNA, 650 bp, Arabidopsis thaliana columbia
ctgcggtaccggtccggaattcccgggtcgacccacgcgtccgctctccttcgtagattcgtgtattgtacagatttgtagagaacgagagagagaggagaacaaaatggtaggcgaagaggagacgaagaagagagtagtcactgaatcgctaggatggttaacggaatcttcgattatgccaaagaagcatcgcgccatcgaaggtgttggtccttcctcaatcatggagcttaaagctcagctctataagtctcaggaggaagctaaacagacaaaggattttacgggatccgatgctcaataccatcgcgccaaagaaaggattgccgccaaagattctttcgccgcgaaaaactccggcgtcggaaagtcgcaatttaaaggacaagcttgagcacaaagctgtaaaagttggagcagttagttatgccgcattggagaaaaaggctcagttgtatgataaacttgctagaggagagctttctgatgaagaaggtgaagagaagtactgtgttgacttctttaggaaaggaattcaacatgaagatccaaaaccatcaagcacttacaacagttccatttcagcaccacctgaagatttcaagcaagatggtgaagatgatggttcgctttttagcaccaaattg

SEQ ID NO: 84829 - DNA, 647 bp, Arabidopsis thaliana columbia
ttcctgtaccggtccggaattcccgggtcgacccacgcgtccgagatgtttacgaagctatttcggtgtaggacttacttaattttctttagttcacgcgtaattccttaggcattggctctgtgagttaaggttttgaatatgttagaagttggatccgaggtaaagactgctgtgtgctttagttcatcacattattcagcattaagggtcagattttcaattatgcatcgcgtcattagaaagtgaaaagattttatactttatgattttgttaagcttcaatatacttgttttgtatcaaaatgttcaaatctctttgtcgtctggtatctgtttcagattatactctgaagttcttagttatatacttaatatatgtagcggtttgggcttactctggtatggtattgatttggttaaatacagtttatggggcttcagatagcaggagcgtctctaaatctcctgtgccaaaaagaaccctcgccgtattgccttgctcgtcctgtcgaattaacaaacgttgcatcgagaatggacatctacaatctgctactaacaaaacttcctttgtgtgctgagcaagttcttcaggccataggagaaataatcctgatttctcaagaaacaataagcatggttta

SEQ ID NO: 84830 - DNA, 643 bp, Arabidopsis thaliana columbia
ccctgtaccggtccggaattcccgggtcgacccacgcgtccgagcgtggagttaactatgaggaagaagatgtttctattccccatatttatgtctctcctatgaatggggtcctcgctgtctcacactcgcctatcgatgttaacccggaagagtttgatagctatctgaactctcttgataacttgatgcagcaacctccagaagaggttgggcgagactcgtctgttcttgttagtgtaagctctccaatgagagaatacgaatgggctgaagcccgaatgaagatctcatctctcctggagaaggattttactactttgttcctctccaaggacgcagcagagatagcagcattagcaactaaactaaggaaagatccaaaccttactgctgaagagatagttaggttgaagctgatggaagagattccgaccttcagcgaagtgttccaagagaacaaaggggtgattgaagaagcagataggttcttctctgctctggaactcaacaaagccaaggtagcatcgcttaaatacgaatacagcgacctgaaggaaaaactaggaagtatccaaatggaagtagacacaaactctgagacaatccgtcaaatcgatgaccaaatcgctcaacttcaagc

SEQ ID NO: 84831 - DNA, 643 bp, Arabidopsis thaliana columbia
cgcagtaccggtccggaattcccgggtcgacccacgcgtccgtggacaaatacataatagtcctcctggaggtgggagtgccgagtttaatcctacgttgcttggatcatttggaattaaaagatttagtaaggcccgttgcttttcttgccaaaatggtgggtcgtccacgtcttgctgtagatctcgtgagcaaaggtctgttagatcctaatagaatgaaaaaattactcaaccaatcaagtccaagagaagtcatacttgatattttgatgatcatatctgatctatcgaggatggataaggctttttataaatacatcggcgaggcttctgttttacagcctttgaaagaatatcttacccatgtgggtccaaatatacgtgcaaaagcttgtagtgctcttggcaatatgtgcaggcacaatgggtatttctacagcgctcttgcgggacatcaaatcatcgggctcctcattgatcgatgcgctgatccggacaaacgaacacagaaattcgcttgttttgctattggaaatgcggcttaccataacgacacgctgtatgaagagctaagaagatctataacgcagctagcaaacgttttgaccacggctgaagaagacaagacaaaagcaaacgc

SEQ ID NO: 84832 - DNA, 667 bp, Arabidopsis thaliana columbia
ccgcgcccccccttgatttgcctttccgtttgcggtaccggtccggaattcccgggtcgacccacgcgtccgctctctctcgctcgctctctccatcttcatctctcttgctgaaaaatggcgaactcgagaactgtcttaatcttgtgcggtgactacatggaagactacgaggtgatggttccgttccaagctttacaagctttcggaatcaccgtccacaccgtctgccccggaaagaaagctggtgactcttgccccaccgccgttcacgatttttgtggccaccagacatattttgagtcacgaggtcacaatttcacgctcaatgcaacgtttgatgaagttgaccttagcaagtatgatggattggttataccaggaggacgtgctccagaatacctggccttgactgcatctgttgttgagctggttaaagagttctcaagatctggcaagcccattgcctctatttgccatgggcagttgatattggcagctgcagacacagtcaatggtcgaaaatgtacagcttatgcaactgttggaccttcccttgttgctgcaggtgccaagtgggtcgaaccgataactccggatgtctgtgttgttgatggtagtttgattactgcagctacatatgagggtcatcctgaatttatccaga

SEQ ID NO: 84833 - DNA, 814 bp, Arabidopsis thaliana columbia
tgaagttaaaagcctaaaattttggtttcaaccttctacaataaatccaaatcactaaccatgatgaagcacttgctaagcatcttcttcataggagctttgttgcttggaaacatcaaaacaagtgaagggtctttgtcttctgcacttgaaactactccaggcagcttgctatccgatctctggctagaccggttccctgatccattcaagatcttggagagaatcccattaggactcgagagggacacaagcgtggctctgtctccagcaagagtagactggaaagaaacagcagaagggcatgagataatgctcgatatccccggtttgaagaaggatgaagtaaagatagaagtggaggagaacggagttttacgagtcagtggagagaggaaaagagaagaagagaagaaaggagatcaatggcatagagtggagagatcatatggaaaattctggagacagttcaagctacctgataatgtagatatggaatcagtcaaggccaagcttgagaatggtgtgctcactattaacctcacgaaactatctcctgaaaaagttaagggtccaagagttgttaacattgcagctgaagaagaccaaactgcaaaaatcagctcttctgaatccaaagaactctgatattgaagaaactatatattactttctgagtctgaagagagttattataaatccaagagttttgagtttcatattgtgtaagctaaatggagtgtcatgttttgtaacctatctaccaaaatctctgtaaccttctctatatgcaataaaatgttcatttctttat

SEQ ID NO: 84834 - DNA, 1116 bp, Arabidopsis thaliana columbia
  unsure (1)..(1116): unsure at all n locations
nnnnnnnnnnnnnnnnnnnnnnnnnnnnnnnnnnnnnnnnnnnnnnnnnnnnnnnnnnnnnnnnnnnnnnnnnnnnnnnnnnnnnnnnnnnnnnnnnnnnnngagcaatgaaaacattgattaatggtttcacatttcaatacactcaatgaaacagggcaccaacccctatgaccgcagatggaatcaaaaacataaaatgcccttgcagttgcccgccatttcgtcataaatacttttccattaagtcattttggcaagtcctttttaaacattacgaggagcggttttggaatcgacctgcgatttataatttgaccgggaaaacagagttactgaaaaacagtttaacgtttttagttttagtaacaagtaaaaaacaactccacaaccaaatcctaaggcggcactcgagccagttttcgacacagcggcgcagaccaccatgatgaaggaatcttctttggagttcatgtctttggaagccattgccagttcgattcccgcgaatagcaacagaacccctaaaattccaatcggaaactgactcagaatccttacaaaggagtttccaaacaccagacccacaatcagtttcccgattccgagaaaaataacggataatccactccttgccccaaaccgatactgaccagctaacccaccagcaccgtgacagacgggcatagcgccaaaccagcaccctattaagttcatcaccccaacgctgatggagactgtagtcgcagagagttccttgtcaaacaagtcaattggataattttccaaactgcgatcactgagttcagtacagagagtggaatctgaggaatcgccgccctcagaaacccgattttccaatcatcccaactgattctcagaatgtggaacttcgagggaccgaatttaaggtctttgaaaatggatggatcacgtatgaaacagagcactaacccgagtgcgaacacgatcagcgcagatggaatcgaagacagaagacgcagtctcctccggcgagactggctttcgttgctggaagtctcggcgagatctccatcttcagcttctctgtcgttgccagagccggtgganaaaatgatnaagagcagagcagct

SEQ ID NO: 84835 - DNA, 724 bp, Arabidopsis thaliana columbia
gtgacactatatatagagctatgacgccccctgccctcagcttggaatcctctagagcggccgccctttttttttttttttttttttttttttaaaagttaaacttcttttttaatgaaaattaatcgcacttgtatcatcatgtacaatgctaaaagtaatgattgaggatcttaacaaaagaaattgaattttctaacaaatctagacaattgaagcaagtgggtttagtggagccctagactcaaccaatggggttggcttgggtctagaatcatcttaactacatcttctacaaatgaatcaaaacaagaatagcaaccaccctttcatcaggctactaccactactgctaactgctggctgctgccaggtgtcatatgatggtgagtacacctcactggtggcggaacaagatggacttcactgctctcgtgttcaagcccacaacctgccagtatagtgtgtattgagcacgtggaaatttcgtcgaaagtggtttgacctaagtcgttttgactggacaagtttttgagatgggctttaactctttcttgcagacgttctcctgccatggaagacattgtgtttggcatgtggctgtgtagactttgatgattactaaccaagggatcaccctgagccagtccatgatggaatcctaaatcgatcggtcgctcaccaaagaaatgtttttattagacacaacgcccgaaatgctttt

SEQ ID NO: 84836 - DNA, 685 bp, Arabidopsis thaliana columbia
cacgcgatcctaatagatgagagtgatgactcagagagctacagcgatctttctctttgtcttgataaagccaaggagcttcttgctctcatcaaactacccacgggatggttgccattgaaggatatgacggaagttgggtacaacaaaacaaaagggtttgtgtggatgaggctgagaagcaagattgagcatacattccgtgagataggtcgcagagttttatatgacacggagataactgcgtttgttgaggaccgccgtatgaggagacttaccggagtcaaaagcaaagagctcatgatctgggttcctgtgaatgatatcttcatcaaagagaaagatcctgagaagatcacctttgctaataccaccggcctgtcaccaacatttaaagtttcagcatttcaatgtgaaggttgataaataaaaagaaaagaggagtaaccacacttccttgatgaaagcaaccaataaagaacagaagttggtccatactcaataagagatagtttaattaaatattaaggacacccctttcttacaatgaattgcttatggatcatcacagtaaaaaaacaggctctgcaattgatgccttgatgtataacagggagtttccaatccacatatttgtaatcaaaaaaaaaaaaaaagggcggcccctttacaggatccaagctta

SEQ ID NO: 84837 - DNA, 742 bp, Arabidopsis thaliana columbia
cgcgtccgaacttctgtacatacttttcgaataacttcagttgctgcgattttgcttttcctccctttaagaacaacaatggtttatatattaaaagggaacgtaaccagcaccaccagacgcaaatgttacaccggttaagagatcttctggtttcaaatttggatttcgatatgccgtttacaggcttgagaagttttcagagtgttcacaaaacacaaatgcaactaaaagtgtgtgtttagttgttatctattggggaaattctcgaaatataatcaaaattacatctgagaaagcaacgtgaaatttacctctaaaatcagtcgcaactttgccgttgcaaaaatcttccggttaggaattccacccgtcaaaaatcgattggccgtaaggagggataatttgcattcttggccaaccgttggcataatggtcgtcatttattcccggcatcaacgatttggatctccggaccactattttcgcccggagtcgttcggttgggcggctgcttcacccaaagcgttggtggacgtcttacataacaacacgagaaagaaaacacacccaaaacgggctttgaagaaaaaagaagtaacgggatggaatatttataacttgtttcgttttaatgggtaactcttttggtttccttttggaaagcttttttgggaatgattggaggtaaaattattttttttttgtttgaaggcttgggaatccgaccattgttgaaaac

SEQ ID NO: 84838 - DNA, 575 bp, Arabidopsis thaliana columbia
ctactaaatagagaatcagagagaatagttttatatcttgcacgaaactgcatgctttttgagacatggcaatcttccgaagtacactagttttactgctgatcctcttctgcctcaccacttttgagcttcatgttcatgctgctgaagattcacaagtcggtgaaggcgtagtgaaaattgattgcggtgggagatgcaaaggtagatgcagcaaatcgtcgaggccaaatctgtgtttgagagcatgcaacagctgttgttaccgctgcaactgtgtgccaccaggcaccgccggggaaccaccacctttgtccttgctacgcctccattaccactcgtggtggccgtctcaagtgcccttaaacatatacacatacagatgtgtgtatatgtcttccgcgagcacacacgtacgtttatgttttaaggacaatagtatgtatgagcagctataaacaaaccagaagttaatggttcatgttgaactagtataagttgtatgaactgtgcttcttttgaacaaccacttttgctgtaagtttagcaaccctatttaataaattagagattac

SEQ ID NO: 84839 - DNA, 717 bp, Arabidopsis thaliana columbia
cgggtcgacccacgccgtccggacgattcaacttgagtacaccgatgcaaaagagagtctcctccatgctgctaggaaagcacctgttgcatctttgggattcagaatccagtgcaacaagtgggctatcatagttcggctgttgttgggtgaaatacctgaacgatctatcttcactcagaaaggaatggagaagactcttaggccatattttgagctgaccaacgctgtgagaattggtgacttggagctgttcgggaaaatccaagagaaagtttgccaaaacatttgcggaagacaggactcacaacctcatagtcagactccggcacaacgtgattccagaacaggacttgcgcaacattcagcattttccctactccagaattctcctctaccaggattgttgctccaaaaagcttggagacctggacctcagccgaacccagtggctgatgcagaaagcatcgtcgctaaagccattagagatggagcaatcgacgcaaccatcgaccacaagaacggttgtatggtctccaaggaaacaggagacatctactccactaatgaaccacagactgcgtttaactcgaggattgccttctgtttgaatatgcacaatgaagcggttagagcactgaggttcccgccaaacacgcacagggagaaagagagcgaggagaaaagaagggagatgaaacagcaagaagaggagct

SEQ ID NO: 84840 - DNA, 640 bp, Arabidopsis thaliana columbia
acgccccacgcgtccgttgagtttatgtttgatctgacagtgagactgcaactcgtgttctctgcactcgctaaagactatgaactgccgtttcgggtggggaggttcttcagatgggtcaaatgggtgggcatttgataaaacaacaacacaatggcaaaaagtggtaaatatgtcagatgagagatccctcttttccttttctttttcccgccgtctctgttattttgaattagtagtctctcaattttataacacggtggaagctttttcttgggtcacaagtatggcaatcggagagcttttggttattgaaacagagaatatggaagtcatgttgttgtaagttatatagattatgatcaaatgcttttgtaactagagttattcttttttctcactatctatcttattccttgtttgttaaagaaaacaaaacagggattaaccctttacaaaaaatgagcgctatggtaccacattttattaaaacatgtgggagttgcgtggggaaacaaaacacgacagtggggcgcgccttatttaaataaaataacaaaaccttgttctcattccactcttttcgaataggatacaaccccttgaacctttggttccaatatttactgccctcgccccc

SEQ ID NO: 84841 - DNA, 796 bp, Arabidopsis thaliana columbia
  unsure (1)..(796): unsure at all n locations
nnnnnnnnnnnnnnnnnnnnnnnnnnnnnnnnnnnnnnnnnnnnnnnnnnnnnnnnnnnnnnnnnnnnnncttttttttttttttttttaaacaaaatctcagcgttgcattaatcaaagacagtgcccaaataattggtacactaactgttagttttgtcgttttacactaactgttatataagtctccttataaaaagataacatggagaagtgttgttttggttctcagtgtttgagccagtagtttcttagctgagccatatgcaacaatatctcgtcccgaccttgattcgtcacactgctggtcataatccatggcggtgttgtctcaaagaacccttggatcaagtcttggaactcctttatgttcgcctccggtttcttccctccatttttcttcttctttctcttgtcgcattttgtgaatatcaaagtcattgggacctggttttgaccaagccagcttgcatacccgagatcgattggcctttacaggaatgctggcatcaactagtaaaaacaccgagaccaatgttgatcgatttagaaaataagtctttggtgaatctggttccagtcttgtttgagttcatgcggtgctgatgcatacccgtaaccaggcaaatctaccaagtaccacttgtcgttgatccggaaatgattaatgcattgcgtctttccaggtttcttagaagtcaaggcaaggcgtttcctcctcaccaacgaattgagaagcgatgatttcccaacattggatctcccaacaagcgcaaactccggcaacccatcgctc

SEQ ID NO: 84842 - DNA, 711 bp, Arabidopsis thaliana columbia
  unsure (1)..(711): unsure at all n locations
cgnnnnnnnnnnnnnnnnnnnnnnnnnnnnnnnnnnnnnnnnnnnnnnnnnnnnnnnnacaaaccaaaaaagagagtccaccaactctacacgcaattcatccaattatcttgctgtcgccattcgccaatatccatccccatcttcttcgatttctgagattcggtcgaaaatcatcagatgggttttcagaacgaagctagctcctcctcttatacccttaaaatacctccaccggccagagaggactcgcctcttctcggcaagggacctcccctctccagccagtttaagaccttcgccaacgtcttcatcgctgtcgtcggcgctggtgttcttggtcttccttacgccttcaagcgaaccggatggctcatgggtgtcctcctcctcgtctccgtctctgttttgacccatcactgtatgatgcttcttgtctatacccgccgcaagctcgactctttcaatgctggcatctccaagatcggctctttttggtgaccttggattcgccgtctgcggctcctttggggaggatcgtcgttgactttattttatcaattctgtctcaaagctgggtttttgtgtnggataatcttnatctttcancgggnactanttttagntaaatntatccgancccttnaanngcccaccaattnttggggaatnnagtttnaaaangttgggnnttaaatccttgggggggtc

SEQ ID NO: 84843 - DNA, 480 bp, Arabidopsis thaliana columbia
  unsure (1)..(480): unsure at all n locations
acaacaaagttttgataggttttccgaattctttaaactccttaaatttttaatacatctcaatcaaactccacttatactaaaaataatccatattgcatttttaaaaattctaaaagaagaatcacatgataacttgataagcacttttaaatgatagatgtccacgtagaggaataagacaaaaagacaaaataaagaaaaaggacgaaatctaaaagagggaaaataagtaacaagtcccagaaaagggagtatgatctttctcggnccggatcctcggaactccctcgaaggctcgaaccctccccttggttttttaccncgatataggaagtccggttcccgggacccttatccccctcccacacttccccttttccaccgggcagggggcaatcagctagggcgaaaangggcctaacagggggttgccccgggttctaaggcaaccgttcccaagcttgttcccgggantgt

SEQ ID NO: 84844 - DNA, 590 bp, Arabidopsis thaliana columbia
  unsure (1)..(590): unsure at all n locations
tgatactccnnnnnnnnnnnnnnnnnnnnnnnnnnnnnnnnnnnnnnnnnnnnnnnnnnnnnnnnnnnnnnnnngcaccacgcgtccgcccacgcgtccgagaaggacgaaaatcggaggaggaagaagaagatcgattcgatttgtgatcaacgatgagctccttcaatggaaacagcaacatcgacaacctcctaatccaaaccctacttggacgtctccaaattcgtccccctaactctcatttcctctctcaatccctagacgacctcctcttcaaatccgacgacagcgacggcgatgatgacggacaaggtcagaccagtctcgacagagaagaagctaggcttgagaaagagctaatccgagtcatcgtctctggtcgaagcgattctctcaagccgaattcaggtcaagccgtgacagtcaacgaacaccacatctgcgttgggtttcatgacgatgaggaatcggattatcgtgtttgggagtggcatggtcatatcatggtgtttgatgaagaaatggggacacgcctgatatttctacgggaaaacttcgagaggtggctgtgaacttcctattacccc

SEQ ID NO: 84845 - DNA, 725 bp, Arabidopsis thaliana columbia
  unsure (1)..(725): unsure at all n locations
nnnnnnnnnnnnnnnnnnnnnnnnnnnnnnnnnnnnnnnnnnnnnnnnnnnnnnnnnnnnnnnnnnnnnnctttttttttttttttttttttgagtttgtaaggagatggataaattaaattagatgataagatgataaatttaagcccattacatacacaaacatacaatataggaaaggtgagtggggagaagagaaaaaaaagggtatgcaaagattctgattccttaccatatgggccaacacagtccgagtctgacaatatggtcttaaagacggaagaagtaaggatttgtcataatttagagtagttgttccgccatggacaacctccttcgaatgcattttccaggacgtcttccattctctttgccaatatcacctccagactggaaagtacagcggcgggtacttcaactaagtctttcgagttcctttgcggtaggaatcactcttttgataccataccggtgtgcagccaatatcttatctttgcatgccaccaacaggcagaacgagacctctgagtgtcatctctccggtcatggctgtgtctgctctaactcgtttctgactgaacaacgaaaccaaagctgtcaccaaagtcactcccgcagaaggcccgtctttcggcactgcaccagcaggaaagtgaatgtggatgtctcgtccatcaagaacattcatatcccctgcaagtgccagcttaaaatccgacgcacga

SEQ ID NO: 84846 - DNA, 726 bp, Arabidopsis thaliana columbia
  unsure (1)..(726): unsure at all n locations
nnnnnnnnnnnnnnnnnnnnnnnnnnnnnnnnnnnnnnnnnnnnnnnnnnnnnnnnnnnnnnnnnnnnnnnnnnnnnnnnnnnnnnnnacacaaaactgtaatcgcatactgtgcacacaacaaacacacttaatacacaagtatatctcaaaagagttctctcagctgcgtaaaatctctaaatacaaaagcagccgggggagagattattcgtcatcatcaattatataatcatcggttttcaccagaaaacacactagtttcagccatccaacagattcctcaagctacagaaagcttcaggcgaaagactaaaacaccttctcttctccaatggcaccaccggcttgtcccctctgtccattgtcatgaaacataccaccaccgcagttaaattatcaaatgagttccgccccagagcctccatcactagctctcgcgcacatcttgttggatcgttgtgccggtttaagccacgcctaacaatgctaaccgcttcttggctcgtcaaggcatcccaaatcccatcgcacccgaatcacaagaaactcatcggcttcaggttagagttatctgcttgatttctggttccgagatcagtggagattgagagccgtgtggcagttttaaatcccagtcgcccagagctcgggttacagctaggacttcatttaggtaaccgtcattagtgatgaaaccgccggattcctccactcttcttctct

SEQ ID NO: 84847 - DNA, 1077 bp, Arabidopsis thaliana columbia
  unsure (1)..(1077): unsure at all n locations
nnnnnnnnnnnnnnnnnnnnnnnnnnnnnnnnnnnnnnnnnnnnnnnnnnnnnnnnnnnnnnnnnnnnnnnnnnnnnnnnnnccacgcgtccgatctcctcttactgcttcgaattcgatcgttactagaaactgcgaccacgacattggtcgtggcctcgttggggaagaagtagtcaaagtcacccgcatcgattgggacacgttcttcttcatcaacctaatcgaatcttttatcctctcttcgatcccaacatcgataaattattattaccatttgcggcgttgttgagtgatctccgcgactatggagagatcagcgtcggtgggtgttaacgacggccgttttggtggcaaccaattctattcgccatctttctcttcttcttcttcttcttcttccatgagacatgttaattacagttgtggatcttgtgggtatgaactaaacctgagctccacgaatcgaatcacatcgacaatcggatcaaagtacggtaaatccatgaagagtgggatcatatctttcttcaacatcgacgagggaagattcagtcaggtcgatgagttccaatgcatgcctcacttctctagatactcttggggttttgtttcgacacagaacgaagcttctatgtcgcaaatgtaataattatatcggcaatgcttctcaggagaaggctcctgagtatgcacttgttacacaaaacctcggatccgcacatccgcctaggactggtagtgttacggaagtacgatatcagaataccgctcgcttcaacccttcttcctgcggtcgctttgctgtgagtgcttccttctactaactgtatatacccgccgatattctaaaatcttcttcggagtttcggatttagatcttcgatgaagtgtttgttatcggcttggtactgttttgataaggttggtttggcttttcagttgtatagtagtaacaacaatttgccttatgtttcttgctcaaattcataattggtgtttaccaattttattgtcgaaaagctgtgtacaacaattcaaatactgtatttcaagtgtaatgtaaaacattttatc

SEQ ID NO: 84848 - DNA, 760 bp, Arabidopsis thaliana columbia
  unsure (1)..(760): unsure at all n locations
gaaaaaagaaaaaaacttgaggtgcnnnnnnnnnnnnnnnnnnnnnnnnnnnnnnnnnnnnnnnnnnnnnnnnnnnnnnnnnnnnnnnnnnnnnnnnnnnnnctttttttttttttttgaacagaaggacagaatatttaaaaaactaaaaagaagatctaagcattgttctttttcctgtaaaatttacacaacttttttttaccccacaaataaacgaattgtatagataagccaaaaaaaactagacctaaaatgccagttcatccactagaacaagaaacagaatttgagccatagctaatagcttgcaagctcgaatgagtcatatttgtcatccatctccttggaactccgtttgattcaccagccagattatatgcataagatctccacttgtttccaaccatctttacgaggactctataaacccctaaccttcgcgctttctgtgccctctcgaagaacaatgagactagagaaagtcgaaaagctattaccaacaaaaacatccgctcttaaacacaccgcgtaatctatagccgattgtatcaaatatgaatacttcccatatatctcctctttaaccccaagcttcttcttctcaaatggtattaaaccgtctctccaaccacttaaaaccgatgaatcttcttctttttcttctaagagagtatctgctactgcaaggtaaagaactgttggagtctttaaacctgaaatgttccctactctgtccaaaatctctcggacgcgtggg

SEQ ID NO: 84849 - DNA, 533 bp, Arabidopsis thaliana columbia
accaaagagagtatcagatagaaatagttctaatattttgtacaactcacagaaattgcatgagtttcgaacatggcagtcttccgaagtacactggttctgttactaatcatcgtctgtctcaccacttatgagcttcacgtccacgctgctgatggtgcaaaggtcggtgaaggcgtagtgaaaatcgattgtggtgggagatgcaaagatagatgcagcaaatcttcgagaacgaagctatgcttgagagcgtgcaacagctgttgttcccgctgcaactgtgtgccacctggtacttctggaaacacccacctttgtccttgctacgcctccattaccactcacgggtggccgccttcaagtgcccttaaaatttcctcctgtggctgtttctgtttcgacttctatttcggaatatatgtacatgtgtgtgtacgtgtgtatgtacacaagtactgctatgttttggaggacaaaagtatatgtatgagaagctataaactaattagaagttggtggttatgcgtatt

SEQ ID NO: 84850 - DNA, 449 bp, Arabidopsis thaliana columbia
  unsure (1)..(449): unsure at all n locations
cagatcaaccccttggttcctgttgatcttgtcgttgatcactcgatccaagttgactttgcaaggtcagaagatgccgcacagaaaaatttggagcttgaattcaaaaggaacaaagaaagatttacgttccttaagtggggttcaacagccttccaaaacatgctggtcgttcctcctgggtctgggattgtccatcaggtcaacttggaataccttggacgtgttgttttcaactcgaaaggatttctctaccctgatagcgttgttggaaccgactcccacacaaccatgattgatggattaggagtcgctgggtggggtgttggaggaattgaggcagaggcagcaatgcttggtcagcccatgagcatggtgttacctggcgtggtcgggtttaaattttgattggaaaagttgaaggaagngggttacnacctacctnattt

SEQ ID NO: 84851 - DNA, 411 bp, Arabidopsis thaliana columbia
  unsure (1)..(411): unsure at all n locations
gtggtttagatgatcgtacggttgggatcggcggatattacgatgatatgaatatgatgagtaatgttaatcattggggtggttcggtttacactaaccaacccattatggctaatgatatcaatatgtattgattaataaaattaattaaaataattagatgccccttttttgtctttttattttaaaatttagcccattttggtgtttttgggttggtgtgatgatgtaattatagtacatgcatctttgattggttggaaggataaatataacctttatatatatattggggcatatatatatgagttgtactttgtcatgtattggtgtgtgttttgttataattatatgattatatatgtttatgttatcatgattttgnctttcacccttaatatnccaattgtt

SEQ ID NO: 84852 - DNA, 826 bp, Arabidopsis thaliana columbia
  unsure (1)..(826): unsure at all n locations
ctcatcttctcttccttatctccttaaaaatcttctgctgttttcttttttatatttagagctcctctgtttcttctccaataaccaaaataaaaaaaaaaaactcttcctctgtttgttttcaagttctgacatcataaattcagaccgagaaaacataaaaatttgagtcttttgatgatcggaaactgatgactcccgttctctgcgaaatcctgctctctgggctcacggtcaaatctgctctctgccgtagaacccatctcgttcaatctttctccgtcgtcttcctctactggttttacaacgtttcatgaattgctacaaactctaattaattttttcagacagatcataaaaaaaaacccaaacataaaacataaaactctgtcctttttttgtcttcttgtaacttttcttgttaaaaatcaatggcgtcatctagcagcacataccggagctcaagctcttccgacggtggtaataataacccgtcggactccgtcgtcaccgtcgacgaacgaaaacgtaaaagaatgttatcgaacagagaatctgcacgtaggtcaaggatgcgtaaacagaaacacgttgatgatctaacggntcagatcaatcagctatcaaacggcaaccggcagatcttgaacagcctcaccgnaacatctcagctttacatggagntccaagccgngaactntggtctcaccggnncagatggggggggttnggancagnnccaatctcncaangggtcgtnggtttggtcaaccacggggnagggttngggttgcanntngcnggtggggtttntntcnacggtggg

SEQ ID NO: 84853 - DNA, 823 bp, Arabidopsis thaliana columbia
tgcagtaccggtccggaattcccgggtcgacccacgcgtccggacagatcataaaaaaaaaccaaacataaaacataaaactctgtcctttttttgtcttcttgtaacttttcttgttaaaaatcaatggcgtcatctagcagcacataccggagctcaagctcttccgacggtggtaataataacccgtcggactccgtcgtcaccgtcgacgaacgaaaacgtaaaagaatgttatcgaacagagaatttgcacgtaggtcaaggatgcgtaaacagaaacacgttgatgatctaacggctcagatcaatcagctatcaaacgacaaccgtcagatcttgaacagcctcaccgtaacatctcagctttacatgaagatccaagccgagaactctgttctcaccgctcagatggaggagcttagcaccagactccaatctctcaacgagatcgttgatcttgttcaatccaacggtgcaggatttggtgttgaccagatcgacggctgtggttttgatgatccgaccggttgggatcgacggatattacgatgatatgaatatgatgagtaatgttaatcattggggtggttcggtttacactaaccaacccattatggcttaatgatatcaattatgtatttgaattaataaaaattaacttaaaaataatttagaacggccccttttttttcggcttttttaatttctcaaaaattttagccccaatttttggggttggtttttttggggcttgggccggtggaaatgattgttcaaatttatttggttaccacttgccctctctttggaattggggttg

SEQ ID NO: 84854 - DNA, 743 bp, Arabidopsis thaliana columbia
cgtcgcatgcacgcgtccgtaagcttggatcctctagagcggccgccctttttttttttttttttttttcaaatttaacaatatttcaaagttattgccatcgcattgttacacacaagaacaacgcagtttattgaagaagcaatttaaaccaaaggtaaccagttaacaggaatcacgcgcaatcatgagacaaaaacaacaaaaggcaaagctaaaatctccaaatcaagaactgggaatatgtagacttgatggcaaagggtttttggttcgagaaacaggagtgcacttaagaggctgagccatggacaacgcagttgtttcagcagcctcattcatgtttactttctctccttcaattctccaatcaaagcactgcaccattaccccaatcacgattcctagaggagatataagctagattttgatccaggacagcctctcctttccgcggagaaaggaatggatttcaagacttcctctcttacctcgtcctcttgctctgatcttgaagatgctataaccctctcaagtttaaactcctcaggatccttccagaaattaggatctttcattatagcataagtattaacaacaagtaatgttttatccggtatgtaaaaccctttgagattacaccttttttgaaaaatccttaccgagatagaccccggggggatgcaatttttagcctttttttgacttaccgattgcaagtaaggggaggttggtaaaataat

SEQ ID NO: 84855 - DNA, 512 bp, Arabidopsis thaliana columbia
  unsure (1)..(512): unsure at all n locations
tccnnnnnnnnnnnnnnnnnnnnnnnnnnnnnnnnnnnnnnnnnnnnnnnnnnnnnnnnnnnnnctctcgggttccacgcgtgctccttgctcctctcgcttttgaatggagatgtgagctttcttcattcaaagagcaaaactatctaattccatggcgttctccctcctctctccaattcctacctctgcctctctttttttcactctctccgccattaccgcttctaataatgcttcctcctcctctctctcccgtctttactctttatatcaccccaaaggaaccttacgaaccagaaccgcgacctcgtttttcggagcttctgggaacttgaggattgtttccatggcggagaataggcaattggtttgtaggattggtggcggagccggtgctgaattggatgatatggatgaaggtgaaatccagaggattggaaatgaagacgaagacgacgatgaattcatacaagtccatgctaataattcctctgctgcttcgcctgaga

SEQ ID NO: 84856 - DNA, 219 bp, Arabidopsis thaliana columbia
cgtccgattagctctgtctcaaaaaatgaaattctctaattaaccacaacgatctttagagccttcttcgctcaccgatctctgaaaccctggtttgctctcgtcctcttcgttttctatgagtatgtcgcagtctcgagctgtccaaagatcgtcttcacctaatggggatagaggtgagaatcagttagtggtttatgacttggaagggaatgatga

SEQ ID NO: 84857 - DNA, 646 bp, Arabidopsis thaliana columbia
atctagacaaagagtgttgtctgaattggctctgtctcaaaaaatgaaattctcaaattaaccacaacgatctttagagccttcttcgctcaccgatctctgaaaccctggtagtttctatgagtatgtcgcagtctcgagctgtccaaagatcgtcttcacctaatgaggatagaggtgagaatcagttagtggtttatgacttgaaaggaaatgatgatactgaagaagaagttctaccggttcaatctcagcctttgtcatctagaacacagtgtccctctatcggggcatttacggttcagtgtgcaagttgtttcaaatggagactcatgccttcaatgcagaagtatgaagagattagggaacagcttcttgaaaacccgtttttctgcgatacagcgcgtgagtggaagccggatatttcttgtgatgttcctgctgatatctatcaagatggaactcgtctttgggctattgataaaccgaatatctctcgtccacccgctggctggcaacgtttactgcggattagaggtgaaggaggtaccagatttgctgatgtttattatgttgctccgtctggaaagaagcttcgattaactgtggaggtccaaaagtacttgaatgacaactccgaatacat

SEQ ID NO: 84858 - DNA, 759 bp, Arabidopsis thaliana columbia
  unsure (1)..(759): unsure at all n locations
ctatcttgacgttgtatgcacgcgtgcgcgcgtacgtaagcttggatcctctagagcggccgccctttttttttttttttttttttttncaacagaaacgagattacagatttattttaacggtaaaaaattacaaatatgattggctggaatttacgatacataaacatgaaacatctacgtagaattcaacaaagcaacaaaggaacattcttttgtggcatcactcgatcacttttcttaaattaagaaagacagaggattttgcatctttatcaaggatgagaagggaaaggaggccattttccgaacttagggtgtggaatgtatttaggtgggaaggggggaaacttgggaagggggggacatgggttccttggaatcaccaccactggcggcttgaagattggtttgtagataggacccggggccttgaaaatcggcctgtgaagtggaggaaatgtcttctttgggatcaccactggaggcttgtatataggcacgggtggcttgtaaatgggcttgggtatctttggtggacacggtttcttggggataaccactggtggcttgtagataggcactggaggcttgaaaatgggaaccggcggcttgtaaaagggttaatgaccaaaatttggtggacaccgggtttttattggatcaccaccggtggttttgtaaaatggggggaccaagctttccttgatctttagggaaactcccgaccccgttgggttaaaccccagaaaaatttcc

SEQ ID NO: 84859 - DNA, 538 bp, Arabidopsis thaliana columbia
aatgtattaggtcacactatagaagagctatgacgtcgcatgcacgcgtacgtaagctcggaattcggctcgagatccccctctgttcgatcccgccgcggtgagaagcgatgaagtcggagactttaacattagttctggtgtatctcgccggaatcatggagagagccgatgagtctctgcttccaggagtttacaaagaagttggagatgctctacacgtggatcccacagctcttggaacattaactctgttccgctctattgttcagtcttcttgttaccctttagccgcttacttgtcttctagacataaccgagctcacgtcatcgctctcggtgctttcctctgggccactgccactttcctcgtcgccgtctccactactttcttccaggtggcagtatcaagaggcttgaacgggatagggctagccattgtgacacccgcgattcagtccctagtcgctgactcaactgatgactataaccgtgggatggcatttgggtggttaggattcacatcaaacattggttc

SEQ ID NO: 84860 - DNA, 721 bp, Arabidopsis thaliana columbia
  unsure (1)..(721): unsure at all n locations
nnnnnnnnnnnnnnnnnnnnnnnnnnnnnnnnnnnnnnnnnnnnnnnnnnnnnnnnnnnnnnnnnnncttttttttttttttttaagttgaggaacacaaaattataataaaattgaagacttgttgttaatgtcacacacaaacacacacaattctattttatgaaaacagagtaaaagaaaacagaatagattagagatcttcttcatcgaagtctatacgaattttaagtctccataaatttccctatactcaacaaatgctcaatccctaagtcaggacttgggaagagtatatgctcataagactctaatccccctgaatctccacaactcctcctttcctccgttgtcaccggccacatcgtcagcctggaccattagctgtcgtcgtttgaggctgctttcggttttggaccgagctcgccgggtttggaaaccaatggtagacatttggctccggggatctgtccatgttcagacagctccgtcgcgatctctctaatcccccggcgattcggggttccacttccttcgtcgtaaatgctctcaagtatctgaagctgtgttgaagtcggagtccaccgatgcctagtcgatatcctatgagaacttgacgatgcccccatcggatcaaagtatccgccaaccattggcctcactcctgatgagagtggatggtaagaagagagggagttgtggaggaggaccagttggtcac

SEQ ID NO: 84861 - DNA, 658 bp, Arabidopsis thaliana columbia
  unsure (1)..(658): unsure at all n locations
ccacgcgtcaacccaagcgtccggcgagatgactacagaaggggacaacaactaaaaccacatttatcattacagtctgatttgagctaagttctctcatcataaactctccttggagaatcatggctatttcaaaagctcttatcgcgcttctcttctcatatctcttcttgttctccaactcgcccaggctgatgtcgaaaactcgcagaagaaaaatggttacgcaaagaagatcgattgtgggagtgcgtgtgtagcacggtgcaggctttcgaggaggccgaggctgtgtcacagagcgtgcgggacttgctgctacaggtgcaactgtgtgcctccgggtacgtacggaaactacgacaagtgccagtgctacgctagcctcaccacccacggttggacgccgcaagtgcccataagaagaaacaaagctcttaattgctgcggataatgggacgatgtcgttttgttagtatttactttggcggatatatgtggatcgaataataaacgagnacggacgttgccgttgtaagtgtgagactggatantaatgggccaattngtggaacctgcaagtttccttggtttnnaattngnttnccaaaantggaaanccnnnncggggannannngganaaccccaattgaaaaa

SEQ ID NO: 84862 - DNA, 701 bp, Arabidopsis thaliana columbia
cggcacctctattcgattcacttagggacagctgtgccgcctgcaggtgccggtccgctattcccgggtcgacccacgcgtccgtacggctgcgagaagacgacagaagggtacggaaactacgacaagtgccagtgctacgctagcctcaccacccacggtggacgacgcaattgaaagaaaaaaaaaacgagaagcgttttctttctctccaaaatccattactcgcgaactttcctctgctaagtgttcactagaaagaggtggtgattatgagttcaagcgaagcgtttcccgtgatgcaggagatcatgcttgagtttcgtgctgggaagatgtctttgcagggaacaagagttgtccctgatgcacgaaaaggacttgtccgcatagctagaggtgacgagggactgattcatttccagtggcttgatcgaaaccagaatacagtagaagatgatcaaattgttttcccagatgaagctctatttgaaaaggttaatcaatcctcagacagggtgtatattctgaagttcaacaggggtgaccgcaagttcttcttctgcatgcaggagcccagacctgaaggtgaggcagaattgcgctcttcacgcaatcaatgccccaatcacccactagagcatgtaacattcctaccttgttacaaacagtctaggatatgactgcatccttgtactaat

SEQ ID NO: 84863 - DNA, 812 bp, Arabidopsis thaliana columbia
  unsure (1)..(812): unsure at all n locations
aggtgacactctagaagagctatgacgtcgcatgcacgcgtacgtaagctcggaattcggctcgacatttatcattacagtctgatttgagctaagttctctcatcataaactctccttggagaatcatggctatttcaaaagctcttatcgcttctcttctcatatctcttcttgttctccaactcgtccaggctgatgtcgaaaactcacagaagaaaaatggttacgcaaagaagatcgattgtgggagtgcgtgtgtagcacggtgcaggctttcgaggaggccgaggctgtgtcacagagcgtgcgggacttgctgctacaggtgcaactgtgtgcctccgggtacgtacggaaactacgacaagtgccagtgctacgctagcctcaccacccacggtggacgccgcaagtgcccataagaagaaacaaagctcttaattgctgcggataatgggacgatgtcgttttgttagtatttactttggcgtatatatgtggatcgaataataaacgagaacgtacgttgtcgttgtgagtgtgagtactgtattattaatggttctatttgtttttacttgcaagttttcttgttttgaatttgtttttttcatatttgtatatcgattcgtgcattattgtattatttcaatttgtaataagattatgttacctttgagtggttgtttatcatactttttttcaaaggtaagaggttttggnnnnnnnnnnnnnnnnnnnnnnnnnnnnnnnnnnnnnnnnnnnnnnnnnnnnnnnnnnnnnnnnnnnnnnnnnnnnnnnnnnnnnnnn

SEQ ID NO: 84864 - DNA, 578 bp, Arabidopsis thaliana columbia
cgcgcaagctctaatacgactactatagggaacagctggtacgcctgcaggtaccggtccggtttcccgggtcgacccacgcgtccgaatcaatcttgagattgtgtcaagaaacctcaagagtgaaaatgagttttttcagatcaaagacttcaaaaactgaaacacaacaaccatcatcgtatggacaacaacaagacgctatgtactcatcttacggaaccgtgagtgacgaagtgttattacagattcatggatgcagagctcatctcatcaacggatccgaagctgtggagctagccgccggagacttcgagcttgtacaagtcttagacagcaacgtagccttagctatggtcgtgaggatcggaaatgacttacaatggccggtgattaaagacgagccagtggtgaaacttgactctcgtgactacctcttcacgttgccggttaaagatggagagccacttagttacggcatcacgtttttccctattgatgaaaatgacatcgtttttgtgaatagtatcgagttgctagacgatttcttgagagagaattcttgtttctcttcgtct

SEQ ID NO: 84865 - DNA, 825 bp, Arabidopsis thaliana columbia
  unsure (1)..(825): unsure at all n locations
tgggttgcaattcnnnnnnnnnnnnnnnnnnnnnnnnnnnnnnnnnnnnnnnnnnnnnnnnnnnnnnnnnnnnnnnnnnnnnnctttttttttttttttttggatcataagaacataacttttttactgcgatgaagaatcataatattcgacaaaaaagcataacagagatctcgagttcgagttctatctctgatatagacctaaatcccaaagcataagcattgacatctggttaaccaaaacaaactaccaacgttcatatgatgaaggtctgcctccaggacggctaggacggtcataaggacctggtctgcttctgtagggtcttccctcatcgcgtatcggtcccatatctccatatctgtcacttgtatcccttgcgtatctgtccctgtcatagcttctctctctcccgcgataattccatcctcaagattgatgttcagggcatcccatacctatcactccacaaaaacgggtctcctgggtggtccgtatctctcaaatggatagtgatcacgaggctcatacttgtctccactgtcgaagcggtccctgtagctatatcgtcccccatcttggtcacggcgtccatccatgtagcggtcaaactcacgctcccgctcccgctccctctccagatcacgatctccatagcgatctcggtgtccatctatgtctccaatacgagagcgcatcgcaaggggaactctgaaccgttctcgatcgtcaccagttgatgggcaatntcgagcccaatgaccagggcgtctgcatttaaagcactcatcctcggttcccttccctcgagatgaatagcct

SEQ ID NO: 84866 - DNA, 732 bp, Arabidopsis thaliana columbia
  unsure (1)..(732): unsure at all n locations
atttcnnnnnnnnnnnnnnnnnnnnnnnnnnnnnnnnnnnnnnnnnnnnnnnnnnnnnnnnnnnnnnnnnnnnnnctttttttttttttttttttgctcaaccatatgatttcattaatatataatagtgaataacagttctatcatataaataaataatttataatccaccacatgacaacagatgggttttcccattttatttaactataaacagtattttgctctcacagatccacaaggacaagcatattcaaggatgttttagttcttaaagaaaagataaagagagaccagacgcatagtggtaacttggtctacaagttagagtggccaagccggagaaggacacggtgccacgaagtgttgaagaactcctcttaggttccacaccgactccacattttccggttgaacattcgccgccgaatcaaccgctttggcgatgacctctgtagtctgtgaaacatcaatggtggcttcaaacaacacccatggcccatttgtcactggagctgtgttctgagatgtacggctttcctggttcctgcgttctagaagcttccacccagtttttgcctccatccagggatatgtccactctttctatcccgcgtccacctcctgaaaccgcatatcctttgatacttacctttccaggcttcaccatttgcacatcctccacagagcagattgcactctgaacagggaaatccatttgcggtctcctag

SEQ ID NO: 84867 - DNA, 420 bp, Arabidopsis thaliana columbia
cggacttcttgggcggacgcgtgggcggacgcgtgggtggagatttttctaacgcagaatctgagaataagctaaccgattccgatttcgagttcgtcgccgggaggaatgaaccggttgaaggagcaaaaggggccgaagttcgacggcgaagaatcacctccacctgattttgatgaagatcgaagtgtgggtgaggtagacggaggagatcacacgccattcgctggaggtaaagtcagaaggaaagcgtctcgctatagagagcatcgtggtgactatcttcacgtttcttctcgtcctggattgatgcgaattctggagaaacaaggtgatacatcgattctttttgctgataaagttttgaagttcaccggctcggggaagatgaaacggcgtatttttatcctcactgatttt

SEQ ID NO: 84868 - DNA, 1169 bp, Arabidopsis thaliana columbia
  unsure (1)..(1169): unsure at all n locations
nnnnnnnnnnnnnnnnnnnnnnnnnnnnnnnnnnnnnnnnnnnnnnnnnnnnnnnnnnnnnnnnnnnnnnnnnnnnnnccacgcgtccgcccacgcgtccgtacggcgcgagaagacgacagaagggtacggctgcgagaagacgacagaaggggaacgcagaatctgagaataagctaaccgattccgatttcgagttcgtcgccgggaggaatgaaccggttgaaggagcaaaaggggccgaagttcgacggcgaagaatcacctccacctgattttgatgaagatcgaagtgtgggtgaggtagacggaggagatcacacgccattcgctggaggtaaagtcagaaggaaagcgtctcgctatagagagcatcgtggtgactatcttcacgtttcttctcgtcctggattgatgcgaattctggagaaacaaggtgatacatcgattctttttgctgataaagttttgaagttcaccggctcggggaagatgaaacggcgtatttttatcctcactgattttgcgatctatctaattgatcccgagactgaagctatgaccaggagaattgctttgtcatcagtagagaagatgtgtttaagcaaattgagtgataacttcttcgctatcattattcccacggaatatgatctcttcatggccagcactaggaagactgagcttgttcaggtcatggtagatgtcactaaaagtgcttctgactatgaacttgaagtgcttctctctaacagatttgagtacaatgcatctgcctcattagtaaaggaagtttcttttgaggaatctgaagggggtatcaagaccaaatttgtgtggaagtgactacatctcaactttcctcgctgttcataaactttggagggaccactagtaagatctgtttcgactttcgaatgtcttttctgttggttactaatagctgaaatcatggtggtatgtgttgtttattatattctgtttcgactttcgaaaatgtgaatggattctttcatgtaacacaagaccagtagtgtcaatataagatacaaatggttacaagtatatttcaaatattgttagnnnnnnnnnnnnnnnnnnnnnnnnnnnnnnnnnnnnnnnnnnnnnnnnnnnnnnnnnnnnnnnnnnnnnnnnnnnnnnnnnnnnnn

SEQ ID NO: 84869 - DNA, 694 bp, Arabidopsis thaliana columbia
  unsure (1)..(694): unsure at all n locations
nnnnnnnnnnnnnnnnnnnnnnnnnnnnnnnnnnnnnnnnnnnnnnnnnnnnnnnnnnnnnnnnnnnnnnnccacgcgtgcgcgcacgcgtccgtccaattgttcttctctcttcttcttcttcttcttcttcttcttcttcgccgcttcttctctctcgaattcaccccatctcaagtgtacgttagcctcctccctctaatggcgactcgtcttcagtttgagaacaactgcgaagttggtgtcttttccaaactcactaatgcctattgcttagtcgctataggaggctctgagaacttttacagtgcttttgagtcggagttagcagatgttatccctattgttaagacctctattggaggaacacgaattattgggcgtctttgtgctggaaacaagaatgggcttcttgtacctcatacaacaactgaccaagagcttcaacacttaaggaacagtctacctgatcaagttgtggtccagcgaattgatgaacgtctgtctgctcttggaaattgcattgcctgcaatgactatgtagctctttgcccacaacgaccttggttaagggaaccgnggnaataatagcgggtgtacttggcgttgaagntttccgcagacaatttcaggaacattnttgtgggaagtnnnnngcccttccaacaaggnggatggccnccccaaactcnnc

SEQ ID NO: 84870 - DNA, 771 bp, Arabidopsis thaliana columbia
tcactactagggcgaattcgagctcggtacccggggatcctctagagtcgacctgcaggccgcagccccccctcaattagtacttagtggcagtcaactggatcaatcaaattgatcccatcttttccctagaaatagaataaagacaagaatggcccttaaaattgcggaggtgcttctgaattccaacgcttccacagagccgccggcgccgcgtgcgttgctaagctaacccaccctctccgccacggctgacctgctcaaccgcttgctctcgtggatcttggcgtacaccctcttcgtccggacgcagagcaggacgtcgaggccgaacccgacgacgcaggcgagcgccatgatcaggaagacgaggcggtagcagtgtgcgccgacgcaggtgttgccgccgccgggcaccgcggtggcttccgcgtcgtagaggaggcccgccagcaggcccgagaagacgaaggagccgagcggcaggttgaggatgaggacgttgtagacgagaccgtagtacttgaggcccaacagctccgacgccgtgggcacggtgaccgccagccgcacgccgtagcaggtgccgacgaccaccgagccgatgaagagcgagcctggcatcgccacccccatcaccatgtatccgacgggcatcagggcctccggggctgcgttccacagcgggcggggaattcctcgtgtcctgggcgctatatttggcaacattttccttctctgggtttggaggtatatgagtccattccatac

SEQ ID NO: 84871 - DNA, 779 bp, Arabidopsis thaliana columbia
cccatagggcgaattcgagctcggtacccgcgggatcctctagagtcgacctgcagcgtgccctacagtgcacggcaccgcagcacacacatctcacacgcggatagcgccagacgagagcgcggccacatggcccgcatgaacggagaacgacgcgcgccggcgcccgtgcgctccgatcgcctaccgtcgataggccaagcgttccctgagcggatcatggccacacgcggacggcggatcgcccggagccccgcaccaaagcacaccggccacgtcccgcggcggtcggcgcccgtcggcgtcgctcgttaaaccaaaaacgcgccattagcctgacggcagcgacggacaccgacgagcccgcgccgcgacgcccgccggattaactccgccgttgaacgctccgccgcgttgcgcatggaggcatgctttgtttgcttccgaacgccgccgagagcgaggcataggcgcatgtgcatgtgcgtgcctgcctgccgccagaagtagccttgcccgcgcgcgcaacggcggctggcccgtataacgtgacgttcgcttgggattttgcaggcaggctgttagcgtcgtgacgtgcaagcgaactgggttcgcacagctgtgcgatcctgcgtcccacaggcgacggcgctgtccacgtctcgccaccgtatggtccacggcgtcgcaccgtgcgcgtttgcaggtgctgggtgctggctcagtataaaatgcaagcttgcattcgcaactgttagccgacacgctcgggattcaac

SEQ ID NO: 84872 - DNA, 770 bp, Arabidopsis thaliana columbia
atagggcgaattcgagctcggtaccccggcatcctctagagtcgacctgcaggaccccctcggctacgaccagcccagcagggccatctgcgtggctcatcagggccgccgccgaccccatcgccaagctcccctcgctcgacaccgccgcaggctgccccgcgcacccggcctccgccaaggaccacgccccgcctgctggtgacaacgacgaccaccaccaccagcagcagctcacgaggtccggatgcagcagcacgtccgagaccagcaagggctccgtcctctccctctcccgctccgagagccgggtcaaggcgcgggaccgcgcacggggagcggagcgccggttgccagggacaaggacaaggaccccgccgctgactccaggcgcgccgcggctacaagctcagcgcaggcgggcatccttcaccgagctgctcacggggatggctgcggccagcagcgccgcccccgccgaacacaagcaccaccagcagtcgttggtgtccctggcagccgccgtccgtctccgccaccaccgactacatcgggttcgcgcagccccggaagggcgggggacacgccatggcgcagcacttttgcctgccccgctccccacctcggcaacattgcgtccatcgccatggccccggcgcagcactaccaccacttggccagcggtgccgtcactgtcgcctctggcgcggggcgagcccgacgcgcgatatgacgcacttctcgttcttgagagggagtttattcccgtg

SEQ ID NO: 84873 - DNA, 915 bp, Arabidopsis thaliana columbia
ctctttcgtttttccctttttctccaatcacagaaaagaaaagaaaaaacaatggcggatcagctcacagacgatcagatctcagaattcaaggaagccttcagcttattcgacaaggatggtgatggttgcattaccacaaaggagcttggtaccgtgatgcgttccctcggtcaaaacccaaccgaagctgagcttcaggacatgatcaacgaagttgttgccggatggtaacggaaccattgatttcccggagttcttgaacctaatggctaggaaaatgaaggacactgactctgaggaagaactcaaggaagctttcagagttttcgacaaagaccagaacggtttcatctcagctgctgaattgagacatgtgatgacttaacctcggcgggaagcttactggtgaagcaagtttgatgagatggtttaagggagcttgatgttgatgggtgatggtcagttcaacttcggaaggggtttgtgaaggttatgatggcctaagtggggggtgaaacaacttcttcggctttctccttttttttttttgactaccttcttatgtaatttcataaagaatgttccttcgctttgttctaaaatttaaatcatggctggtttttgctggttaaaaagccgcgtagggtctgtgtttttaccttttgtctaaatgactcattgttcatgttattgacaggttcagaacctgattcttgaaatataacagtaatgagatcttcttctattatcttcgtattgatcagtctctttagaatctgtcgtcgtatgtagaagcaagaagatgcttatcggttgcggtaagggtagggagcttaacccgagttggctcagacgatgaatgtaaaggagagaagagtatagaagttgtctcagacattccattgttgaagt

SEQ ID NO: 84874 - DNA, 955 bp, Arabidopsis thaliana columbia
  unsure (1)..(955): unsure at all n locations
gtccgcgataaatacggttgctctctcgttttttccagcagagacactttttctaattttctcttcttcttcttctttctcgttttgagagaaaacaaaaaaattctgaatctacaggtttcacgaaaaggagaagaaaaaaacaatggcggatcagctcaccgacgatcagatctctgagtttaaggaagctttcagcttattcgacaaggatggtgatggttgcattaccaccaaggagctgggtactgtgatgcgttcccttggacaaaacccaaccgaagcagagcttcaagacatgatcaacgaagtggatgctgatggtaacggtaccattgatttcccagagttcttgaaccttatggctcgtaagatgaaggacaccgactctgaggaagagctcaaggaagcattccgggttttcgacaaggaccagaacggtttcatctcagcagctgagctccgccatgtgatgacaaaccttggtgagaagcttactgatgaagaagttgatgagatgatcaaggaagctgatgttgatggtgatggtcagattaactacgaagagtttgttaaggtcatgatggctaagtgatgctgttttagaaccaaacaatggctctataaacttggtttgcatctcttacatataaattcttatgttatgttctataatttttattcatgggactcgaggtatgttttctgcttgtttaagacgcgaatgttttatcccttttatgctctattttgcgtctgaacattttcaaaagtcttgtttttttgttgtcttgctcctgtaatttgtaaccttggtctagttcgcggttttttattaatggtgtctctctagtaaagcattgtatcatggtttgtgaaaaagaaattaggtcctatcnnnnnnnnnnnnnnnnnnnnnnnnnnnnnnnnnnnnnnnnnnnnnnnnnnnnnnnnn

SEQ ID NO: 84875 - DNA, 626 bp, Arabidopsis thaliana columbia
  unsure (1)..(626): unsure at all n locations
caagaatatctctcttctacagtaaacaaaaaaatggcaatgaatggtttgtccaagatggctgtagccgccgcaactgctcttctcctagttctgaccattgtcccgggcgcagtagctgtgacttacactattgaatggaccactggtgtggactactcaggttgggctaccggaaagactttcagggttggtgacattctagagttcaagtatggttcttcccacacggtggatgtggttgacaaagccggatatgatggctgcgacggctcctcctcgactgagaaccattccgatggagacaccaaaatcgatcttaagactgtaggaataaactatttcaatctgttctacaacctgggcacttcagtggcgggcattaagcttagcccgttaatgtcgttggccggttttttccggacctccggccaattccagggcacctttttcaaactccggggaccttcttccacaccgggattaacctccgtttggggggttacccaaaacccacaaaaccaaccctggggaaggttaaattttcttcttttcaccaaaggaaatgggtggcgttaagggggttatngtacgtttggggnggntgatggtttggnanggtttgg

SEQ ID NO: 84876 - DNA, 998 bp, Arabidopsis thaliana columbia
  unsure (1)..(998): unsure at all n locations
gtacgcctcgcaggtaccggcttggaattcccggctcgacccacgcgtccgcaagaatatctctcttctacagtaaacaaaaaaatggcaatgaatggtttgtccaagatggctgtagccgccgcaactgctcttctcctagttctgaccattgtcccgggcgcagtagctgtgacttacactattgaatggaccactggtgtggactactcaggttgggctaccggaaagactttcagggttggtgacattctagagttcaagtatggttcttcccacacggtggatgtggttgacaaagccggatatgatggctgcgacgcctcctcctcgactgagaaccattccgatggagacaccaaaatcgatcttaagactgtaggaataaactatttcatctgttctacacctggtcactgcagaaccaatggcggcatgaagctagccgttaatgtcgtagccggttctgccggacctccggccactcccacgccaccttcttcaactccgggaactcctaccacaccggaatcacctccgtctggcggatcacccacacccaccacacccacacctggtgcaggttcaacttctcctcctcctccaccaaaggcaagtggtgcgtctaagggagtgatgagttacgttttggtgggagtctcgatggttttgggttatggtttgtggatgtaattggtttagagagccagggtggagtcagtgcttttgcctttttaaattattttggtttttggttgtaagagaatttgggtttgtgtgccacgtcagaagctcttcattattcgtaggatttttattatctcggcatttgattatcgctatcatcatcatcatcacgttcacttattctcttgttgtattaaattatactattaattttcattttcgttcatgtggaaaaaaaaaaaaaaagcgtaattatcatctgttctcttcttcatattcgtttnnnnnnnnnnnnnnnnnnnnnnnnnnnn

SEQ ID NO: 84877 - DNA, 1719 bp, Arabidopsis thaliana columbia
  unsure (1)..(1719): unsure at all n locations
ccaacgcgtccgcccacgcgtccgcaacattcctgaagagagccgtgtttgtgtcttgactgattcttctctcaagcttttttaatctctctctcttttcccacgtaattcccccaaatccattctttctagggttcgatctccctctctcaatcatgaaccttcttctcttctagaccccacaaagtttcccccttttatttgatcggcgacggagaagcctaagtctgatcccggaatgtctgtctccgagctcaaagaacgccacgccgtcgctacggagaccgttaataacctccgtgaccagcttagacagagacgcctccagctcctcgataccgatgtggcgaggtattcagcggcgcaaggacgtactcgggtgagcttcggagcaacggatctggtttgttgtcgtactcttcagggacacaccggaaaggtttattcattagattggacaccggagaggaaccggattgtcagtgcatctcaagatgggagattaatcgtgtggaatgctctaacgagtcagaaaactcatgctattaaactcccttgtgcatgggttatgacatgtgctttctctccaaatggtcagtcggttgcgtgtggtggattagacagtgtatgttctatctttagccttagctcaacggcggacaaggatggaactgtaccggtttcaagaatgctcactggtcacaggggatatgtttcgtgctgtcagtatgtcccaaatgaggatgcccaccttatcaccagttcaggtgatcaaacttgtatcttatgggatgtaactactggtctcaaaacttctgtttttggcggtgaatttcagtctggacatactgctgatgtactaagcgtctcaatcagtggatcaaacccaaactggtttatatctggttcatgcgattccacagcacggttgtgggacactcgtgctgcaagccgagcagtgcgtacctttcatggtcacgagggagatgttaatacggtcaagttctttccggatgggtatagatttgggactggatcagacgatggaacatgcaggctgtatgacataaggactggtcaccaactccaggtctatcagccacatggtgatggtgagaacggacctgtcacctccattgcattctctgtgtcagggagacttcttttcgctggctatgcgagcaacaacacttgctacgtttgggataccctcttgggagaggttgtattggatttgggattacagcaggattcacacaggaatagaataagctgtttggggttgtcagcagatggaagtgcattgtgtacaggaagttgggattcaaatctaaagatatgggcgtttggaggacacaggagagtgatttgaagaagatttaacgaaaagtaggagtcacgtctccagttgttggttaatatattctgtagtcgggaagtaaggttcggtttgtggaaggtgtttggtttgaaatagtggagtggttagaagaattaaacttccctttttgtagtgtgctttgatttatttatttcttcattgggaactaaactccttcaacacgctactcaatgtgaattctgtaatcaattgtgtacccaccagtctttactttactatcatctcttcatattgaacgcagaagataaaacgctactannnnnnnnnnnnnnnnnnnnnnnnnnnnnnnnnnnnnnnnnnnnnnnnnnnnnacattc

SEQ ID NO: 84878 - DNA, 784 bp, Arabidopsis thaliana columbia
tcgtctcctacccgtgatcctgtagagtcgacctgcagcgcaggcatgcgaagcagaccatcggcggcgccgttacgttttcctgactgcattcactagggagggcatactgcgcgataaggccatgggcgagggacccacgacgaaaccactcccactccggggttgcgcttgcgggtggggagaggagccgtgccgtgccgtcgaaaagactccggccggccagccaggccgttggggggcggcggcacttagttgacacggcaccggcaggcaccatcgctcgctaataaaccgggtgtgcctggcagcgagcgccagaaaaagctggcgcgctcgggttgtgagtgcgatccctgcaaggccattgacaacgctggagcagcgaccaaatcagctcacaggatcctggaaagcatcagaaccaccctcgacacgatctgagttcaccaccggcagcggcagcggcagcggcaccgacagaaccatctgcggtggccacgcacaaagccgggcggtgagacccagtgcacacatcaggcagcattaccggcatcgacaccggaaccgagagtcataaaccagagatgcgacacatactacagccttcaggaaagcaagcacgtagtcacaccatcgactcaagggctccacttgggaccaaattacatataagtatatttactggatcgcgcaatagtattgacggtaacattgggaatccacatctattgtcacaacacacggcggcttgttttgcatacaaatcttggcaataaattac

SEQ ID NO: 84879 - DNA, 568 bp, Arabidopsis thaliana columbia
  unsure (1)..(568): unsure at all n locations
ccnnnnnnnnnnnnnnnnnnnnnnnnnnnnnnnnnnnnnnnnnnnnnnnnnnnnnnnnnnnnnncctccgtcccacgcgtccgcctccgtcgtctcctccttcttcctccgtcgctcaatggcttcctcaacaatctcctcggatataatcactccatcaaacaccaaaatcggatggatcggaaccggagtcatgggccgatcaatgtgtggacacttaatcaaagccggttacacagtcaccgtcttcaatcgaaccatctccaaagctcaaactctcatcgacatgggtgctaacgtcgccgactcaccaaactcagtcgctgaacaatccgacgtcgttttcaccatcgttggttatccttccgatgtccgtcacgtccttctcgatccaaagtccggagctttatctggtctccgtcaaggaggtgttctcgttgatatgactacttctgagccttctttagcagaggagatagctaaagctgcttcctttaagaattgtttctcaatagacgctcctgtctcaggtggagatttaggagctaagaatgggaagctatctata

SEQ ID NO: 84880 - DNA, 512 bp, Arabidopsis thaliana columbia
tacgttaggggacccactctcggataccaaaggttgaagttcaaccagtatccaaacacgtccctcgtccagattaaaggagtttaccctccggaggaggtaaactggttctagggaaagaggatggcttacatcttcaaggctaagacaaagaagaacgggagccactacccctgtatctggggaaaggttaccaggcctcacggtaacagcggtgttgtccgtgccaaatttacatccaaccttcctcccaagtccatgggaagcagagtgagagtcttcttgtgtcccacccccataaaaaacaatgcaaaaatggcttaaacttaaaatttaaccgccttggttttgttccccagtttgttattttggattttgaaattgaaagcatttcctttctttgtttggaaaaaaaaacaaaaaaaaaaaaaaaaaaaaaaaaaaaaaaaaaaaaacaaaaaaagcggccgctctagaggatccaagcttacgtacgcgtgcatgcgacgtca

SEQ ID NO: 84881 - DNA, 686 bp, Arabidopsis thaliana columbia
tacggctgcgagaagacgacagaagggtacggctgcgagaagacgacagaagggtacggctgctgagaagacgacagaagggggcagcctttggatattcggcggaatcgaaaatggtcaagggacgccaaggagaacgagtcagactctacgtgaggggaaccatcctcggatacaaaaggtcgaagtccaaccagtatccaaacacgtccctcgtccagatcgaaggagttaacactcaggaggaggtaaactggtacaagggaaagaggatggcttacatctacaaggctaagacaaagaagaacggtagccactaccgctgtatctggggaaaggttaccaggcctcacggtaacagcggtgttgtccgtgccaaattcacatccaaccttcctcccaagtccatgggaagcagagtgagagtcttcatgtatccgagtaacatatgaagcaatgcaaaaatggcttaaacttataatttagccgccttggttttgttcactagtttgttattttgtattttgatattgaaagcatttcctttctttgtttgaagtgtttggagattctctaaattgactttgatcatggatccggtttttcatcccaaaaaaaaaaaaaaaaaaaaagggcggccgctctagaggatccaagcttacgtacgcgtgcatgcgacgtgatag

SEQ ID NO: 84882 - DNA, 527 bp, Arabidopsis thaliana columbia
cccacgcgtccgcccacgcgtccgcaaactcagtgagtgagtcaccgaaaacctcttgtagtagattcgtgacgggtttgatcatctcttcgaggtcggttctagggtttcactacgagaatggacggagatgagctcaccgagcaggaaactgctctttatgaccgtcaaattagggtatggggagctggtgctcaaagaagattgagtaaatctcatgttttggtatctggaattaagggcactgttgctgagttttgtaagaacattgtgttggcaggagtaggtagtgtgactctgttggatgatcgattggttacaacggaagtcttcaacgcaaacttcttgattcttcctgatgaaaatgcttatgtaggcaaaaccgtagctgagatttgttgtgattcacttaaggattttaaccctatggttcatgtttcaatagagaaaggtgatttgtcaacacttggtgttgattttttcgagaagtttgatgttgtggttatcggctacagttctcgtgctac

SEQ ID NO: 84883 - DNA, 783 bp, Arabidopsis thaliana columbia
tcggtaccggggatctctagagtcgacctgcacggacgataatcacgtgcatgaatactgaacaactaagtagcagaaccatgttagagtagctcaagctcatttgaacacttacaagcttatctttcatggcaaacattattgcgcttgcatgttcagctgcattgcccacaataggaagcaaaataacactgataaaagccaccggtaggttcaatgaatcagatgctccctgacaacaatagatcaaaacagtgaccagttacatcatcgcagaggtatcagatgacctgtaatactactgatgtacatcatggtaataataataactagtaagtaattacatttttcctagagatagctgcttttaaccatttccaaatttaacatgaacattttccctggcagtgcttcagtatcaccaaaatataattgtctgtcaactttagaaagctacctttaacgaatttcacttttacagattaataaaagctgacttttgtatcctttcttgttggattagagaagaatacctcaatggcgttaactagggactcaggaagaaaagccacccagaatggtaacaccggcagccatggtactggcccccacatgccaatctcagcttcttcatcttcttccgggctatcctcgctaggcgcctcctccacacatatttccgaatttggggaaaacatgtattgcaccattccatactaaaatagtgcagtattgcaagaaactttttatcacaaggacgtggttcgccaaaggcatttctgc

SEQ ID NO: 84884 - DNA, 694 bp, Arabidopsis thaliana columbia
tgatactccagctctatacaactcacttatagggaaggctggtccgcctgcaggtaccggtccggatttcccgggtcgacccacgcgtccggaaaaattcattcctctttgaatgttgttttttattcccgtcgtacagatcaaaaaccaaacagtccctctcgacctactggattcccgttttgcttttgatcacatcttcgtcattgagcttcttcttcttctcgatccctgttggttttggttgttgtttttgatgaactgatagtggagatcagagatctggaaaacagagccgtgtgttactgtttcggattgatggaactgaagaaacgttgtgagaaagttagggaaactgtgaagaaatgaagttttacatatcagcgacggggattaagaaggttacgatatcaaatcccggcgtcggaatcggtaaaggaagcggaggatgtgcggctgcagcggcggcgttagcagcgcggagattctctagtcgcacgttgttactgttgctgctgctgctcgctatcgtcctcccttttatcttcgtcaggttcgcgtttctcgtcctcgaatctgcctccgtttgcgattcaccactcgattgcatgggactcagacttttccgtgggggcgacacatctctgaaaattggggaagagttgacacgggctctagtggaagagacgacaga

SEQ ID NO: 84885 - DNA, 787 bp, Arabidopsis thaliana columbia
tttctcacgtatggatgcacccctatattagtgtatatcattgctttaagaacttctaatttaaatgaattagtattatatctaaaaggaaactaatcaagctattgaaatatataaacttggcatcttggcgatgaagaaaccatccttcgaagttcgaaccacagcactgctattgttactattcatgtgagtactttgcatgtgcagtacgccctggccataacacgggtgtgttataacttccaagtacacaataagagaaaagcaggcccatcttataacattcaggttgatgtgcggtagtaaggatacaaggtgtcatcccacaacttattcagcctgccattttagttattttatacctatcagatccaatagtagaggtgggtagttctatgcttatttaccagtttccatgtgaaaaggtatgcccatgcctaggtgggattgacataaatagaattatcattacatacagatgtagtcataatgcagaacatgatttgttcagtgaccattttcattttttttgtactgttgtgatggactaattgtggttgatgactggctgatgtattatttggtattctcgttcatatagggcacggaggaaattcaggaaacaagatttaacactgcaatatctgcaatgatggagtttctgaatgctgcatacaaggtgaaaccaaacttatcttaatttctctagcaatattaggatttataaatattggattttgaccagggtagtaaaaattatatcctcatcatcaaggacttccag

SEQ ID NO: 84886 - DNA, 783 bp, Arabidopsis thaliana columbia
tccccgccatcctctagagtcgacctgcagaactcctgtggatcggtgagccgagggcgctatggggatattcttcagcaaggcggaaccgccgccgcccatggtgctggtgccgccgctcttcgactaccctcccatcgctgcccgcaccaggttcgccgcttcccctctctcctccattcggacccttctgttttgtgacctgtgaggcagggaagccaattggttggtagcctcagtgtgcacgaatcgccgtacgctctgcataactgttagactagacggttgaatcgtcgtgattaatcatgcttgtcaagcaatcgcgattgatcgctcgcgtgttgtgaaatggaactgtggattggtgaaatgcgccagatcgctgacaccagttggcagtactgttgctcgtctcaattctggtagcttgctttttcttggagcacgcacatctctggcagatgccttttcctgcatagttcataagggtataaagttagttttagtccactggaaggatgaaacatcactacattgcacttagggtggcatttatgtcagccttggttcttcattgcaccagtattgaacatgcaggatggcggtgccagcatatgagctaatgtttgggaaagtctccctgcagaatctgtttgaggactactttgatcaagctgggaatatgacctcaagggtcatgttgaagccgcttgaagaccctcacgttgatttgattgctactgtatcctgtcaaacattacttggcattcctgctacggctcc

SEQ ID NO: 84887 - DNA, 776 bp, Arabidopsis thaliana columbia
ggtgtcgtctccccgcgatcctctagatcgacctgcaggctgccgtgctccagtgttgttattatggttcagcaactgctcaaggaaccagagacgcaaaagacgtatacgaatgaaaagtgggttttaagcaagcagagggctgggtatatatatatatatatatatatatatatattctttgcatcacaagaaatcatgtgcacccacagccacagggggcacgggtctctaggtttacctggccggggtattgatctggtaggagccctgcatggttcctttctccagttgtgggtccctatacaaataaaatgaaaaaggaaaggcactgtgtcacatgcgtgtgcgcgagaataaaagccacagtactggccggcccatggttgtctgaatgtatgctagctagctcacctactacggccgtgcaagctgaaacaaagttgtatatgttaacacagttttacgttgtagattgcaatgtccgcggagtaaaatttcaaataggcaggaggtgacatatggagttgctagacatggccatatatcgatgcagttttaatttactgcttctttccttcctgttaactgacctctctccaggatctatcactaactttgtattctccttcgttgtgagtaaaaatggtgcatgtggactacgtgcccttgaattcctttaaaaaggagtttatcctgggtcgatactataaaaccgatgccaagactaaggatctcgtatttttgtcccggttgtatggaagccccgggactaa

SEQ ID NO: 84888 - DNA, 783 bp, Arabidopsis thaliana columbia
ccccgcgatcctctagagtcgacctgcagcgggtcgacggcggcggcgtcgcagcgtactgggaagctgccggtatatgtacgtgttagctagtgaaatcgccttgggatcatcgtcagaagatctagcagctgtggcggcgccttgcttacctcgctggctccggtgacagctggccagcgtcggcgcgtgggcgtggctgcttggaggacagtggcgacgccgcgatcttttcctacgagacaaggcagacggcattggtaactcaaatcacacactggccggcaggaagcatgctgtgcaagcgcaaccgcacaccgccagcttgggcttggcattggtttggtcgagtagctagctttccgttcttctccacccatgcacgttcctagcattgaccaattcagaacacacatgccatgcgaacctctagtcaaaaacctagttattaatcacgtttaactttgcatgatcttcgatatgtgtttttttaccattaatttttttatatgtgacatattcttaaactccctcaaatgcaaggtattttcaagtacttttggacaaaggactttgcatatattttgcatgcctatataaactaaataatggatgggtgatagacagataatgctatttgcatgcctatattttgcatatatccttaagttgtactcaaatcatgcaatgagatgctacatgttctgaaatttaaatatttgatgtttaaacaagttcagatggagatacatcttgtaccaaagttatagtgctcaacaagac

SEQ ID NO: 84889 - DNA, 777 bp, Arabidopsis thaliana columbia
gggatcctctagagtcgacctgcagcctggcagccagaatggactagcgatagattctcaaacagctgatcttgacgaaaaaaaatgacggatcgagacactggacattcggtcgccgtcggagtaaacctgatcatctagatggtagacttttggtggaagacaccgttctttctctctctgaactctgaagactcgtgacctgccgtgcgacgtcctgataccaactgcggcagtgtaccaggtcgacggggagatctgttttgctccgtaaatacgcactgatgcggttgccactggactgccgtggcgtctatgccagtgcgtttgaagtcttctttttcatctttctctctttttggttttttttaccgcacctttctctcattttttaccgcacctttctctcattttagtgagagtagttcctttcctttcctagacccaagcagacctgtgggccgtggccttgctcgagaccaacagcaaatttcggctgtgtctttgtatgtcctaacaagcccatagtggaagaccggcccggtccacgaaacccgttctctcctctccttgttaacgatcccatagaaacacgccgtcgtgcgtcattgcttacacgatagtgaccacgcacgccgcgggccggcaaaccgtaccgtcgccggaagattcgtactgcttgctgcgtttcgactttggattggacccgtccccttgcgaccaaccgaaccgcctccaatcgtctctctgaatcatgcctctcgcactgtggcgctg

SEQ ID NO: 84890 - DNA, 776 bp, Arabidopsis thaliana columbia
ggggatctctagagtcgacctgcagtgtcacattcagaattgcatttaactaaagttgaactatcaatatgttgctccacatgaatacaatctaacttgatcacctgttcatggaaaattacttattgtacatatttgtgccatcgctttccctaactagactttctctatgttttaatatcgagatgtacaacaaatacacatggattggagtggaaattgaattaatcccacacccctacacgcacacgcattcctttcttatgcatatttgatcggatgagattattttgtttttgaaataaggcgtaatggatgtaagaaaatgcctcgatatttatataattgttttataaaaacagagagggtgagttatgaattcccagttgtccttttcaccttagcagttaatatcgtgatttagttatactatgagtgatcttaacattttcaattctttcttgtcctttctactattgaaaacaaatagatggacaataaacaagaagctgagaagactgaagcactactcctgagagtatttgattatgcatggaacaagcttcagaatggtgcttgtcgccggcaagaaatactgcataagttagaactgcgagcagccaaccataggtctctacttagcagagtaagtgacatgaaacaaaaaatatttgggcagaaagcaggtataaatattaaagggaaggtgggccagcttacacctcgcctagcaaaataaaaatatgctcccaagggttccgacaattcgtcggttc

SEQ ID NO: 84891 - DNA, 785 bp, Arabidopsis thaliana columbia
cccccgcgatcctctagagtcgacctgcagtctgcaccccatcggccgaatccaaaaaagaatgtgaaacaaaagatcgaaagcagaagaagggtttcatgcgcgtgcacatttttcgtacttcttcttcttcgtcgtctttctaactcccttgatgggggtctcttcgttttcattcctttttcccgtaccaaacggaatggcgaataaaagcaggcagtggttggagaggagactcttgaacagatcacggccgtgtggtattttagtgtggcgaaattgcagcgtgagaagattgtgcaatggacgcaggagcagataactaatagtgcctttatcctcttgaattctgctagtacttgtctctgcacctgctagaccttgctacctaggaactgcatgctgtcatcagaagttgattgtacatacatacatacatacaaagagaattgaaaatataagattatatatagtaagaaagagtcatgtctcttagttttgttatagttaagtatgtttgaatgaactagacctaataattagctggctaaataattggtagtaaaattagctagctaaataatgggtagtaaaattagctagctaactattattccctctgtacccttgggtctcttgattttgttatatctaacttttataagttaattgttagctctagtgcattcaaacaggatcttagagctacaacatccagtcttgatagtattattctctgttactaaaatgcttgggactatgctccctaatctcagtagagctgt

SEQ ID NO: 84892 - DNA, 764 bp, Arabidopsis thaliana columbia
cgcgatcctctagagtcgacctgcagcctagttctgttctcaccctcatgcgtatgtatttctacgcgcgattcaatgatgcaggtccaggatgtcctagaggcggcgaaggtgcttgaatggctcaaggagaactgcacggtcgagtatatcaggcgatgagtcccacgatgctgggtcaaggaaggctgctcctctgagcagcgagaaagatggtggctggtgtggcggtaggcagttttgcgagtggccttggtccttgccaatgtcaaacagcatgtgcttgtgaccagcatgttttcggtgtggctaacaaacatttggaactttagttataaatgggcacaagtgcttgtgaccagcatgttttcggtagagatgatcacattgcattagggcctgtttgtttgggattataatctctcaacattatataatccaacatattataatttgaactttataaattcatactgtatccgcttggccgatcttgcgtaaggataatcatggaaattaaaaacgctatacgaagtgcataaatataaatcaccaatcggtgtatactataaactaaatttgaggaactagtcttgcacttaaataggataaactaaaataaaataaaataaagcctgagaagcctacgaatcgccaaccatgttattatcagaaataagtaaagtcgtagctaaacggagccacgacagcgggcccgcaggcgctggcgctcagcggaggacttctggaacctggcgcgggcg

SEQ ID NO: 84893 - DNA, 1131 bp, Arabidopsis thaliana columbia
cacacgcgtccgcaaaaacactatggataagacaatgacactgttcttgctcttgtccactctcctcctcacgacttctttagctaaagatctctgtcataaagatgacaaaactaccctcctcaagatcaagaaatccctaaacaacccttaccacctcgcctcatgggatcccaaaaccgactgttgctcttggtactgcctcgagtgcggcgacgctactgtcaaccaccgtgtcacttccctaatcatacaagacggcgagatctccggtcagatcccccctgaagtcggtgacttaccgtatcttacatcccttatcttccgcaaactcactaacctcactggtcacatccaacccactatcgccaagctcaagaacctcacttttctcagactaagctggaccaatctcaccggtccggttcctgagtttctgagtcagctcaagaatcttgagtacattgacctttccttcaatgacctctctggttccatacctagttccctctcttcattacgtaaactcgagtatcttgaacttagtaggaacaagcttacaggtccgataccagagtcatttgggacgttttcaggaaaggtccctagtcttttcctatcacacaaccagctctctggtactataccaaagtcactaggcaatcccgacttttaccgcatcgatttatctcggaacaagcttcaaggcgatgcttcaatcttgtttggagctaaaaaaacaacatggatcgttgatatatcaagaaacatgttccagttcgatctctccaaggttaagctcgctaagacacttaataacttggacatgaatcacaatggcatcacagggagtattccggctgagtggagcaaagcttattttcagttactgaatgttagctataacagactgtgtggacgcatccccaaaggagagtatattcaaagatttgattcttattcctttttccacaacaagtgtttatgtggtgcacctcttcctagttgcaagtgaagattccagcaaaaccaagcattatctctgatataccaaataattaatcaagtctagtgccaattgtgtttttattttgaatgattaataaaagcatgaaccaatgttttagcttg

SEQ ID NO: 84894 - DNA, 374 bp, Arabidopsis thaliana columbia
tttggaccgaaaaaaaaaaaaaagaattcatccccaaatctgcacctcctctcatcttcttcatctccttcaatcttcattatttataacctagaacgactgaatctttctctctctttatctccattttctaggtgtgcttatcacagctagaaagttcttacatttaaatcgccctagttggagaaagccgtcggtttctcattttgaaatttccaaggagatctgaaagttttaattttttggatcgatttcatcgttatcatactccgatcatcagttccgttcaagggttaatcgtaaatcgttcatcgggttacttaaagaggtttactgaaagcaaaatactttcttactcattgtagggagtaaga

SEQ ID NO: 84895 - DNA, 506 bp, Arabidopsis thaliana columbia
  unsure (1)..(506): unsure at all n locations
cgancaagtntcaggccccttntgccctgggcatgagatggcccgttgtgaagccccacctctgggagcattcaggcctcaaagttaagcagccaacaggtttcagatggcaggtgctctattcaggttcaaagggtaaataaccccgatttgcgattgatcaacccattcgctggcttacgcgaaccctgaactaataagcatttgggtgtgtatataaaccgaaatcttacaaaagataaataaatccaaagctttataaatgtttttactgcctctatatagatctgtgcggctagagattgaaggtaacttcttagtatacaaaatggtgattacattaataatcaagatagtccgagccatttcttgaatactaaaccagcttctctcttcttgagctgagactcgctctgaacttttggagctttgcctttataagcagtcttgtgatacttcaagaagagcatccgatacttgtacttatcaacaaacatatttttttt

SEQ ID NO: 84896 - DNA, 2372 bp, Arabidopsis thaliana columbia
atcaaatgtcgatgatgacggtgtgggcacttcgacggaatgttcgtcggaaaaatcactcgatgctcgtgagatatatttccggctccgcatcgatgaagcctaaggagcaatgtattgagaagattttggtggcgaacagaggcgagattgcttgccggatcatgagaacggcgaagcgtttagggattcagaccgttgcggtttacagtgacgctgatagagattcgctccatgtgaaatctgcagacgaagcggatcggattggcccgccctcggctaagagacttagttacctcagcggtgtgactatcatggaggcagcggctcggactggtgcacaggcaatacaccctggctatgggttcttgtcagaaagttctgactttgcccaactctgtgaggattcgggtctaacattcattggacctccagcatctgctattagagacatgggtgataaaagtgcatccaagagaattatgggagctgctggagttcctctcgtgcctggatatcatggccatgagcaagatattgatcatatgaagtcagaagctgaaaagattggataccctataataatcaagccaacacatggaggtggggggaagggaatgaggatagtgcaaagtgggaaggattttgctgactcgtttttgggtgcccaacgtgaagctgctgcttcttttggcgttaacactattcttctcgagaaatacattactcgaccgaggcatatagaagtccagatatttggtgacaaacatggaaatgttcttcatctatacgaaagggattgcagtgtgcaaagaagacaccaaaagattattgaagaagctcctgcggcagttggatattataatgctgggacggtggaatttatagttgacaccgagtctgatcaattttattttatggaaatgaacacccgtctacaggtcgaacatcctgtaactgagatgattgttggtcaagatcttgtggaatggcaaattcgggttgccaatggggaacctctccccttaagccaatccgaggtgccaatgtcaggtcatgcctttgaggccaggatatatgctgaaaacgttccaaaaggatttcttcctgcaactggggtcctcaatcattatcgccctgttgcagtctcaccatcagttcgggttgaaactggagttgagcaaggagacactgttagcatgcactatgatcctatgattgcaaagcttgttgtcttgggaggtaatcgtggcgaagctttagtgaaactgaaggattgcttgtctaactttcaggtagcaggtgttcctacgaacataaatttccttcaaaaacttgctagtcataaggagtttgcagtgggcaatgtagaaactcattttattgagcaccataaaagtgatctatttgctgacgaaagcaatccagctgcaacagaagtggcatacaaggcagtcaagcatagtgcagcattggtggctgcttgtatctccacaatcgagcattctacttggaatgaaagtaatcatgggaaagttccatcgatatggtattcgaatcctccttttagggtccatcatgaagccaaacaaaccattgagctagaatggaataatgaatgcgagggaactggctctaacctcatatcactcggtgtaagatatcaaccagatggaagctatctcattgaggaaggcaatgattctccaagtttagaactcagagtaacacgagcaggaaagtgcgattttagagttgaagcggccggattgagcatgaatgttagtctagctgcgtacttgaaggatggttataagcatatccatatatggcatggttcagaacaccatcagttcaagcagaaggtaggaatcgaattctctgaagatgaagaaggtgtccaacacagaaccagctccgaaacatcatcacaccctccaggaaccattgtggcccccatggctggtttggtagtcaaggtccttgtcgaaaacgaagccaaagtagatcaaggtcaacctatattagtcctagaggcaatgaagatggagcacgttgtgaaagcaccatcctctggaagcatacaggacctcaaagttaaagcaggccaacaggtttcagatggcagtgctctattcaggatcaaagggtaaataacacgatttgcgattgatcaaccattcgctggcttacgcgaaacctgaacctaataagcatttgggtgtgtatataaaccgaaatcttacaaaagataaataaatccaaagctttataaaaaaaaaaaaaaagggcggccgctctagaggatccaagcttacgtacgcgtgcatgcgacgtcaagatcttctataggtgacccaaaataccccccc

SEQ ID NO: 84897 - DNA, 842 bp, Arabidopsis thaliana columbia
  unsure (1)..(842): unsure at all n locations
gtcggtttccatgttataagataggggttgaagactaatcgcagtatcatccgcggttcacttccttcgtttcgaaattattagggttactgcgtatttgcactctccttcttcggctctccagcttgacaatgcctcgctatgatgatcgctatggaaacactcgcctctatgttggtcgcttatcatctagaactcgtaccagagaccttgagcgtctctttagcagatacggaagagtacgagatgtggatatgaagcgtgattatgcctttgttgaatttagtgatcctcgtgatgctgatgacgcaagatattacttggatggacgggatttcgatggaagtcgcatcactgtggaggcatcaagaggggctcctcgtggttcgcgggacaatggtagcagaggcccacctcctggttctggtcgctgttttaattgtggtgtcgatggccactgggcccgagactgcacagcaggagactggaagaataaatgttaccgctgtggtgaaagaggacacattgagagaaactgcaaaaacagtcctagtccaaagaaggccaggcagggtggaagctattccaggtcaccagtcaaatcccgctcccctcgtcgccgaaggagcccaagccgtagccgtagttacagtcgaggtcgcagctacagtcgatcgcgatccccagtgagaagagagaaaagcgtggaggacagatcacgcagtcctaaggcaatggagcgatctgtatctcccaaaggtaggggccaaagcctttagttccagaccngaaaagtgnttgatncaagccccaaggcntggnttcaaacttttgattggtag

SEQ ID NO: 84898 - DNA, 376 bp, Arabidopsis thaliana columbia
aacctcaattcggcgatttctctatcaaaaagtctcattcttcgtctggatttgagaggaatttgatcaaatcgatgaatggatctgtttccgaagatgattcttcgattgaggtggtggatactccagcggtcaatggatgcggcggaggatttagaaaagtcacggttctgccgtcaacttctgctggagatatcgctggattgttatctggcgttgaggttgcggcgaggacgtctctgcctgtgagaggacgcgccgttttgaatttccggtggggcgttagggttcctacggagaatcagacgcgatttcgatccaacggcctgctatttcgttgaggagattcccttttttgggtgatgaaataaaatag

SEQ ID NO: 84899 - DNA, 664 bp, Arabidopsis thaliana columbia
ctcgtgcctttgatgatatggtatttagtgagcatcaaatgagcaagataaaaaagagtgaggaaatatcaatagagagggagaaagagattcaacaggttgttgaatccgtaagcgagcttgctcagatcatgaaggatctgtcagcgcttgtgatagaccagggtacaatagttgacggattgactataatccccggaacgttgctagtacaagtccggcgatggtctcaaacacctccaaaaggcggaacgtaacacagagacaaggaggtatggtgatgtgtgcgtctgttcttgtcattcctctgcttcatcatgctggtactcttaatcctcaaggagattcctgttgtgacacaaggagatccctcatttttttaattcttttgaaacgcgaacaccacaatttttgcggttgcggagtgttctgtcccacaaaatgtcctgaagagaaaaacgaactgtgttgtctatctctgctcagtggcttttactgcagcctctttctgctttcttttttatttcttatggcgtttacatagggaaacattatcacttttgtattgagtgtgtgtaagttggcttcttacgagtttataatggatttatttactgtcaagaatatattaaccatgattttaagaatctgtggagaagagatc

SEQ ID NO: 84900 - DNA, 481 bp, Arabidopsis thaliana columbia
  unsure (1)..(481): unsure at all n locations
gtcaaagaatgggactttcattgagagtgagacgtcgtggaggaagtgttagcaagaaagagatcattccggtgacaagttgctcggaggaagtggagataaccataccatcgcagtttcaatgtccgatatcttacgagctaatgaaggatccggtgattattgcctcggggatcacttacgaccgcgaaaacatcgagaagtggttcgagtccgggtaccaaacttgtcccgttacaaacacggttttgacaagtttggaacagattccgaaccatacgattcgaaggatgattcaaggttggtgcgggtcgtcactaggcggggggattgaaccgaatcccgacggcacgtgtacccggttacgggtcatcaagtctccgagatttttgagaggttatcccctttttcggggcgtggagactttaggccgggttcaatggggattggttcggaggtttagcggtttgggaaannganc

SEQ ID NO: 84901 - DNA, 440 bp, Arabidopsis thaliana columbia
gcgggggtatgtacgtctgctgccagagatgcttcttccgtttcagctgcagcttcagcttcagctggctctgagatggatgccagagttgaatttgatctagatgaaggttttgatggagacgatgcacaacatggggacgcaaataacttctctggatctgtagttttgacgcctactcctctacaaccacttaataccttaccttttccggtggctcctgtatctagtggaattcctgcatccattactgttgctgctgccgtcaaaggtccgtttgttccacctgaagatctgttgagatataaaggggctgctggttggagaggatctgctgccactagtgccttccgcccagctgagccaagaaaagctcaggatgtgttactgagcattaacaatacctctacatctgatgcatctacttctgctggcaaaca

SEQ ID NO: 84902 - DNA, 486 bp, Arabidopsis thaliana columbia
ttaaatcttatctactttctatttctttttaatcaaaattaccgttcttaactatggcgaagtggtttttcactatcttcttggtttttgccctagcctcagctttagcttgtggcgcaagaaacgtcccagtaggcctctctgaccaaaagaactacctcggatatggtggcggatattccggcgttggagacaatggtttaccctttggtggcgtcggtggaggtgtgtctggtcccggagtaaatcttggttatgggggattttggtggtgctggtggcggcttaggcggtggtttgggcggtggagcaggccgtggagttaggcggtggcttaggtggtggaagtggaattggtgccgaaccagtggagaagtaccggaggagttcatttcccttgagttgttactttggttttttaaggcgtcatcggtccttattaagctaggtctagcttaagatgatgtcataataataatttatcat

SEQ ID NO: 84903 - DNA, 642 bp, Arabidopsis thaliana columbia
  unsure (1)..(642): unsure at all n locations
gattcaaaagaatccagttcatgatacttgatccccatgtttttcgagataacattgataaattgtcactttaaagaagattgaacaactcttttggtaggaaaccataaagccataaaancacagaatacaaagtagaacgagattgttgtattctttattcaaaaagtggaaggaaaataaagaaatcatcatttcttcttgaagaggaagtgtgcaatcatccactcgtctccattgttgtatgcgacaagctcagcaagcgcgatgaagaaggttctccagtaaaccgtccacttcactgcttcttctttcccataagtcacttccattatctcttttacggcaactatctccttatccattcctttcagccactcttcacttgtctttgcataatgcgtcccgttaacgagccaatgatccataatcgnaacattttcttggaaatataggnggagatctgctgatggcattgttcctccgttgaagaagtgtcttgtgancagtcatcgcattnacatccncaagtggtagcattgctttatggnagngttngtgncaaacagnggcttnttcctnaaccagttccnatttttttaagaggccncanggtttcaaaatnncnacaatttgggggac

SEQ ID NO: 84904 - DNA, 391 bp, Arabidopsis thaliana columbia
gtttgcttatgagcacaagatttttgtcggtcctttttctagaaagttccccaaggctcaagtatgggttgcaccaagacaatggagctggccattgaacttaccacttgagtttttcggtatctttcgtgctaaaatcatcaaagacagggacttatctacgccatgggctgaggagatcgaacagaaagtcctaagctccccagaagttggaattggaccatatgtcgaagtagcgttctaccataagcggtcaagaacccttttagtcactgatgctgtgatcttcgtcccgcggaaacctccctcgagtatcagcaacgaatcctttgttggcctcggctaagaatggactagctgtgaaaggttacttagcaaaggtaaagacatt

SEQ ID NO: 84905 - DNA, 467 bp, Arabidopsis thaliana columbia
  unsure (1)..(467): unsure at all n locations
ttttttttttggtaaagcaaagtgaaaactttcttgaaggagagttttgcaacagtaagtttgtttctaacaaggatactacaacaatcacaagaggatgggaacctaaagatagcagcttctaaacattctgtgttaataaaaacaatcaaccaaaatctgaaatccatcaaacctaacaaatccgcgaaaagaaaccgtatgatcatcatcagctcggaatctcgttgtcagattggctatcgcctccgaattcttcgtcttcaccttctaattcatcatcatcttcttcaccctcttcttctcctacctctccacctcctcctcctcctactgggatagacgagaagggatccttgacatggttaaccgaggtttgtatagtaactgtggaaccgcatttgttgtgtttacatgcgtgtatgaagtggttgntnncnggaataagncaagcagnacattgatct

SEQ ID NO: 84906 - DNA, 1063 bp, Arabidopsis thaliana columbia
  unsure (1)..(1063): unsure at all n locations
gtgaccggncccggnaattncccgggtncgnacccacgtcgntccgccaagctcgctgtcgtctaaaagagcttaaaaccggaattactattcttcaatcatttgttcgtggagaaaagatgagaaaggaatacacggagttactgcagaggcatcgagcttctnctgctatacaaagccatgttaagagaaggattgctagccaacagtataaagccacagttgatgcatctgctgtaatacaatcagcaattcgtggagagctggttagaagatgtgcgggggatattggatggcttagttctggtggcaccaagagaaatgagtcagacgaggtgctagtgaaggcatcatatctttccgatcttcagcgtagggttcttagaaccgaagctgctcttcgtgagaaagaagaggagaacggcatcctccgacaaagagtccagcagtacggtaaccggtggtctgaatatgaaccaggggtgtcatccagggaagaaatttggcaaaagcagatgaaatctttgcaatccagtctttccatcgcaaagaaaagcctagaggttgaggactcagcgagaaactcggatgcatcggtgaatgcaagcgatgcaacagatttagattcaggaggtagtcattaccaaatgggccatggcaggtcaagaagtgtaggcgtgggtttaagcgtgataagccggttagctgaggaatttggacaaagagctcaggtaatttggtgacgacagaaagttcttgatgggaagtgaaatctggggtcaggtggaagcaaacttgaaccttttcttgagacggcacggtctccttttctacacgtttgatgtaactacggtttttggctttgctgctacaagtgagaaggctccttgggactgaaagagtcatgtttttcatttgccacccaaatctattggcaaattcagtaaataatttttatattatacagtatatctatttgtcaaggattccaaagtccagtgaaccattgctgtatttgaatataaatagtcgtggcaaaaacaaatcaatatttatatttctt

SEQ ID NO: 84907 - DNA, 509 bp, Arabidopsis thaliana columbia
  unsure (1)..(509): unsure at all n locations
tcccccccagtggaagacttggaagaactcttacccctttttttaagtccctctcgttgcaggaaccgttaaccttggtagtagagttatccctcccggtatgcccgttaatgattggacctctttatccggtttagacacacctcggagttaccctcctgtcatagacagcatcttcaagctaaggggaagcccaacccacctctatcgtcgatgagatgaggaagtcattgatcgatccctatgtttcaattttgtttgttccccccccccacacatcccaacattcgccaatgtgtcaatgtcagaaaattttcatactctactgtttgcaagaattagctgttttattttatttttgtgtggtttttcacagtttaaaggaaatctgttgatgtctctttgaatctttctggagtaaccccaagctcaagggcgcccgctctagaggatccaagcttaggtacgcgtgcaggcgacgtcatagattttnntagagtggcacctaa

SEQ ID NO: 84908 - DNA, 778 bp, Arabidopsis thaliana columbia
aaggatacctccaggttttattacaattcattttagggaaggctggaccgcctgcaggacccggcccgaatttccggggtcgaccccacgcgtccgcccacgcgtccgcccacgcgtccgattgcattgcctgcaatgactatgtagctcttgcccacaccgatcttgataaggaaaccgaggaaataatagcggatgtacttggcgttgaagttttccgtcagacaattgcaggcaacattctcgtgggcagttactgtgccctatccaacaaaggtggaatggtccatcctcacacctcagtggaagacttggaagaactctcaacacttcttcaagtccctctcgttgcaggaaccgtgaaccgtggtagtgaagttatcgctgcgggtatgaccgttaatgattggacctctttctgcggttcagacacaactgcgactgagctctctgtcatagacagcatcttcaagctaagggaagcccaacccagctctatcgtcgatgagatgaggaagtcattgatcgatacctatgtttaaattttgtttgtttggatgacacacacatcccaacatcgccaatgtgtcaatgtcagaaaattttcatactctactgtttgcaagaattagctgttttattttatttttgtgtggtttttaacagtttaaaggaaatcctggttaagttttaaaaaaaaaaaaaaaaaggccggccccttcaaaagatcccagcttacgtacgcgtgcatgcgacgtcatagctctttatagtgtca

SEQ ID NO: 84909 - DNA, 570 bp, Arabidopsis thaliana columbia
aggtgaattatagaagagcttgacgtcgcatgcacgcgtacgtaagctcggaatcggtgtgtaagtgaagaagaaaaataaggaagaagaagaagcagcagcaatggtggagaagtcaggaggagaagtcaatttcccaaaattggagaaaccaacaggcaagaaacagacagcgacggttgttgtgggagtgttggcggtgggatggctggcgatagagctcgtgtttaagccattgttcaagaagctgagctcctccaaggacaaatccgattccgacgatgccaccgtccctcccccgtcgggcgcctgaatatggtgagtgagaatttaacaaagcctctgcgggagacacgtgtgttgaagctcattttattagcaaatcttgtgtttctttttgtaatatcgttcggacttttacgtactgctttgatgatgtccttttttaatttatcccccctttcaaataaaatcccgacaagggtaataaaatcaatgagagatacgatgtaattggtttttattttcttgtttgtcctgggttttgttggtactaaataaatcttgatt

SEQ ID NO: 84910 - DNA, 626 bp, Arabidopsis thaliana columbia
atcaaaccctaaacctaaaaccccttattttcccgccaatgtatcaatccatgaatctatcagtttcttccaatttcactcaccgatcactcctcgaatcacgatttcctatattctccaccggattccgcaaatccgtcaatctcaaacctccccgtgtctcatctggtcctgaatccaacgattcaggtcacgaaaccttaaccgataagcttatccatctcctcagagctgttccagattgggcagacgagattaaagagcgtgggatgcagcagaaacgctctctctacacacacgagaaatgggttgaacatagaagctctcttcgccatgtgcgtcatctactctcgagcttttcttcacgagttatactctccctgattccacctgttttcttcttcacaagcgtcgcggttgtgatcgctagctacaactccgccgtggctttggattggcttcctggtatttttccaattcttcgatcctcgtcgttgccgtatcagctcacagctccggctttggctcttcttctggtctttcgtacggaggcttcggattttaggtatgaagaaggaaggaaagcctggggtgggattattgctggaactaatgatttagctagg

SEQ ID NO: 84911 - DNA, 423 bp, Arabidopsis thaliana columbia
  unsure (1)..(423): unsure at all n locations
tcattaatgtcttcaaaggtctcaacatcttgaaaccacaagacacgtacaagacggccttacattgcagtgattgccgttcttggaggcattgctttgctcttagaagccatcacttgggtcgttgtactcaagagaaaatcaaacaactcaatgaagcctcttaggacctaagccaacaaagatctggtcaacttattaaaggttcatctgcagttgttgttattaatttattatgagctcttgtattattaatgtttatagaacaagggtgtcacatgtattattgtnctcttgttttgtagctttttgggtttgtttgttgagtattcttgggggtatgaattctttgtagggggatgaatgntttttgaaaaaaggtcctnattttacctttggaatcaatgnggttttttccagttc

SEQ ID NO: 84912 - DNA, 441 bp, Arabidopsis thaliana columbia
  unsure (1)..(441): unsure at all n locations
tatgncggtccncanttcttnatgtgcaaggccnttgggnatccttaatctcacgccttccntcttctctgnganccgctttcntccnccntatttgaagatccctgttatcgacggggtctcccagagcctggaattggcttctcttggggtgcaagattacattggatgcgcgtctatccacggggttggaccgtcggttgcggttttcgatgcgcttggggatggaaaattggactgtgcgtttgtgtatccttcggccattgcattcaagagagcagatggatgggctgattcaacatatgaaaactattcttttggaaggatctgcttcttccttttgatttgtgttttgacaatcaaaactctctcttttgtccagaggcatagatggtctctgtaaaaaaattagtcgaaataaattaacttcaaattctcctc

SEQ ID NO: 84913 - DNA, 526 bp, Arabidopsis thaliana columbia
  unsure (1)..(526): unsure at all n locations
gcggcggaaccgtttcctgaaagtctcccccctctaaagcggaccnctgatttccccccctgttactccgggactggctgttaccgacggtggtcacccgaggatgtacgacccggggaagtcgtgcctgagctggtcttgccgcttagaaagactagaccaagatatcgtgaggatggaatcaacggttcggagtggtctaaggttgagcggatggatccgtttctgtttgctaggaagttttctccgcaggctcttgagccgttgctgggtatggctcgaaccgtcttgttcaatgactcagccggtggtgtgtgaatggtttctctaatggtattgttgtaaattcagttttagttttagttttttttttttttcttttttgtggggaaataataattgtaatttaaatgggtagctgggaaaaacaaaaacccgagtataccattatcgtgagtaaaaaagtaaactcgtcctactcgaatctcatcataatcttcatattagcaaatggaaccaattcatt

SEQ ID NO: 84914 - DNA, 318 bp, Arabidopsis thaliana columbia
ctggattctggtgtcaaaaatcgtaaacagacacaaggaggcactacattaagtactgggtactctactcataacaatgccaactcatcacttcggtccaatatgtataacccttccagtactgcacaccatcttgaaaatccggatactgccttatcagtacctgatccaggagactgggacccaaattacaggcaagtaaacgaagatatctctctaatttaccagttaatgaatgtcaaggttctttgtctgtatgttagtgtgtatatgatgtgtacttgaacaaatctggctggtttagcatgaattcgtgat

SEQ ID NO: 84915 - DNA, 5245 bp, Arabidopsis thaliana columbia
  unsure (1)..(5245): unsure at all n locations
agcataccagaaaacgacattctgttcatatggagttttttcaccagatcgagagcacgaagaagatgattactgggttttgatttagtcggcgaaaaatccgtaatctcattgttcgtgatctctgggttgtttttctggattgctggtgcggctgattctagtcaggattgtttttggggtccctttcgctctatttgaatctgcgtctgggttgttaagattgtacaaggggtttcgtggttatttatggaacctcgtgtggggaacaagtttcgtctcggccgaaagatcggtagtggttcgtttggagagatctatctcggtactaatattcatacgaatgaagaactggctattaagcttgaaaatgtgaagacaaaacatcaacagctgctctatgaatcgaagttatacaggattctacaagggggaactggtgttccaaatgtcaaatggtttggtgttgaaggggactataatgttttggtgatggatctactcggaccaagtcttgaagatctcttcaatttttgtagcaggaaactttcattgaagtctgtcctcatgcttgctgatcaaatgatcaaccgtgttgagttttttcattcaaagtctttccttcaccgagatcttaagcagaccaacttcctcatgggccttggaaggcgtgcgaaccaggtatacatcattgactttggtcttgctaagaagtatagggatatgacaacacatcagcacattccctacagggaaaataaaaacctgacaggaactgcgagatatgctagtatgaacactcacttgggaattgaacaaagtcgaagggatgatcttaagtctcttggttacatccttatgtatttcctcaaaggaagtcttccatggcaaggactgaaagctggaacaaaaaagaaaaagtatgaaaggattagtgaaaagaaagtttctacatccattgaggctttatgtcccattgaggctttatgtcgtggttacccatccgaatttgcatcctatttccactactgtcggtcgcttcggtttgatgataaaccagattacgcttatctgaaaagaatatttcgagatctctttatccgtgaagggtttcagtttgattacgtgtttgactggacaatcttgaaatatcaacaatcacaactaaccgctcccccatctcgagccctcaatcctgctgtgggaactagtgccgcattgcctccgggcatttccaacatcgatagatacacaggggaggaagaagggcgaccacatacggaatcatctcgacggagagtttcaggggctcttgataactcagggaatatttcgaaccaaccgacatcctcaagtgctagagactccatgatcccgagctcctcgttgtttgcacaatcagcaggagagtaactgtagtaagtggcagccgggacaattttccaggcagcggaggattgttgcagagaagccgtacaggtgacgtcagccgcggcgtgtatcccgagaaactctcctggggaggctgggaaatccacaagaagacactacgaatcagtagttaaaggcatcgataatcttcaagtctcggacgaacaccatccccactgatacattaattttactcagtgacctttttattcctttttccgttattacactacgaaaatttgaaaatacaatttgattgatccaccatgaaatttggtcttcactacaatatctatgattattggggctcaaacgtaacaattaaaaataaagatgcacaaatgcaaaattcttcttctccgatccggttctgcaatttcaccggatccggttcagctcattagctcaattcttcacagtcgtcgtccatgctttctcacttcttactggaggtctaatctgaggtgacgattcccagaattgttgcagagatctgataaacttgttcgtcttcactgatcggaactggagcttggagtttctatatcgacgatactcggtgagtcttcgtcctcatagtcgtgagatctatttgatcgcggatagtttggtttttatgattacataatctctagttttgtggtctagtggaaagttgatgacttcactggaacaaccttcctggcttcctgctacttatgaatggacatatttgtacagagtgctcttagctcttatatcaatttggaacaaagcgcggtaaataacaaagctcttcgtttggttgatctttttccagtgctttccaccatttctcctcacaataaactgttggcaagttcatctgggtcctcctctcctgaaacggcagtttcttaactctggggcaatttgtgatgactaatgtttcaactttttggaatgaaaatcgagatgggaggatgctgtttagttctggcagatccctagttctcaaggtcttcaggcttgggaacaatgttggatcttcgacggatggactctcgtgttcgcttatcaattcctctatctctctgcagtcgaacagttcaatcacctctagctttgggagtttctgaacccatgagacattcttcagcttgttgcagtgtgaaatgtttatgcaacggatattccgcagacaatcttggcttacagaatttccccacactctggttaagttgtgaaggctgtgtaacgtcagaacctctagactcggaagccaatcattttcaaaatctgcgggtgtgaccaggtactccaagtcatggcaacttttaatgctaagtcttctcaggttcctgccatggttagtgagtgatgggagattgaagtagaggagttcattgcactcttcaacgtggagatgctgtatatgtttatgcaaagcaccgaactcgaagagagtttttagggtctccaatgagagaacagtgataccgagtgtggttaggttttccaagtattccaagtcagcgaatccgagttcttctgcttcatcttctccaaagctctgcagttcccaaccggcgtaactgtagtacaagttcagaacctcgagcttgctcagccaacatatggcatctcgtgggatcgtctgaagaaactgagttctttgtaggtccagatgcttcagttttctaagattcccaagctcctgtggcaatacacttatctttgttcctgacatagacagatgatacaactccaccaaatacttgatagacaacggaatctcagtgatacttgtgaacgacaagtccaagactctgagaacaggcatatgcatgaaaaaccctgttggaatcttcttcaaagagctgttctgttggagcatcagtgttgtcagtttcgggcatatgagtttttcaggcaaggtctggattctgttatctaacaatgagatcaccaacgcttgtcgccagttttctgctttaggagcttcagtatgtcccatgctaggctcaactaggatcagctccttataagtcccctgttcagatgccatccacaatgcaaagcttctgaccacattatgcatcttcacctgtgttttctcatctccggtttccaacaaacatgccgctttcagatccccaatgagaaaatatcccttgtaaatggtgttaacgccatgggagctggtgagaaacccttcgccgacccagtactcaacaagctgctcgatctctatagaatgttcttctgggaataaagcgcagtacaagaaacaagaccgaagcagatcactctcgaggttgtcgtagctgaatttcaaaagggcaaatacatagttcatacccttcatctctgctggaaatctagtcagaacttcactagcatggatccactcttcttctgtctctctatgagccatggctcctcctaaagtgatcaacgctagtggcaatcctccacatttactcactataatctccgcgagccggcgaattgatgatgactctaaaagatcttttctccataccttactacagaacagctcccacgcgtgtttcttctccagaaactccactctcaacttgtattccgcacccatattgttgcataatgctatagaccgtgtcgtgaacatcaccttgcatttgttttccctgtcaggtcgaggaactccagttttctccaagtctatctcttcccagacatcatctagcaacaacaagaaacgtttctgtctcaaagctctgtatatcttcaaagctctgttttcgccggtctccttctcgtcccaagataaacccaaccgtgctccaacggcttgctgaattgtacactcgccgaattctctggacatttgaacccaaatcagtacatcatactgatgtccttttgtgatcagctcgttgttaatgctctgcattaacgttgtcttcccaaccccaccaggtccataaacaccaatgattcctctttcttcttcttcactgagaaattccaaaacctgttccatcatcgtggtatttccgacaacggacttgatgggtatctctctacaagttacttgaattgacccgccatctgttttgatagcttcagagcgttctctcagctcaccaatgctcttcaatatggcagaaaccttcttgcacagtttgtagtcggcacaaccgaaacaactgaggtatctcctcctcattcgcgtcctctgttcccgacgcctaaacctcactaaaagtagggctgttttagtctccgttacttgcaccgcactaagccactctctggcacgatttgagcagcttcgtccctctagaccgtcttgttggatccgtaaagtcaggtcatcacgtatggccttcaagtcaccgatggctgtttcaagatcagtgatggcttgtctaagatcagtcttatgtcctcttctctccgccatattcatagattcacacaacacctgagcacagccaacgataagagatgagatgaaatccatttcgatgatttctcgctctttcttttacttgtctgagctaactaactaataaagatgaggtgttgactcataaagattaaagtaaagtcaactttaataaagctgtcttgcttgcttgtatgacttggttcaagaaacgagtagagagagataggaatcttcctcgaagtctcgaactgttgtttgcatgcttgtaatttctactggccaagtgaaggcccgataacaaaattggccctttaagagcctttttatgcccaaaaaaaaaaaaaaaaaaanaaagggcggccgctctagaggatcccagcttacggacgggtccatcgacgtcatggctgttctata

SEQ ID NO: 84916 - DNA, 386 bp, Arabidopsis thaliana columbia
agaagatgctaccttttctgtgttgaaaatggatgagattgtcaacggggaatctaaaaccaacttggaacttgataaacgtcgctgacgcaagtaaaacaattgtgagaggaataagcggtggagctgaaacgattgctaaagagagagttgacaccgtagtgatcggtgccggagtcgtaggtttagcggtggcgcgtgagctcagtctccgcggcagagaagttctgatcctcgacgccgcatcatcgttcggcaccgtgacgagttcccgcaacagtgaagtcgtccacgccggaatctattatccaccaaactctctaaaggccaagttttgtgtaagaaggagggaattgctgtataaatactgctctgaatatgaaatc

SEQ ID NO: 84917 - DNA, 416 bp, Arabidopsis thaliana columbia
  unsure (1)..(416): unsure at all n locations
aaagaactatggaattacggtatcgaagaatcagagtctcacacaccggaggatccaatgcctgtggcataataacatgattcaacaatattctaatgatgtgttatcaatcaaactgaattagcttttccccaaaacatcgagcatagcttaagcagatttcatatgtgagaggtacacaaaagctgatgatgtaagttctctgcaaagccaaagttaatcggataccaaaagtaattcaagacacatcggaaagtactgtattatatcgttttttttttccttgttttggggcagaagaaagaaaggttctctagtaagactcatgacatgttgtacagagtctatattaaccttctcttgaattcagactcgtttttgtaggattccaagtataatgcaaatncccttttgtt

SEQ ID NO: 84918 - DNA, 369 bp, Arabidopsis thaliana columbia
  unsure (1)..(369): unsure at all n locations
gggaaatccatctattcttgtnacggcgacgaacttttgtccgccgaattttgctcagccgagtgacgacggagggtggtgcaatccgccgcgcgagcttgttgatctcgccatgcctatgttcctcaagatcggtctataccgtgcaggcattgtccccgtctcctatcgcagggtaccttgtcggaagataggagggataagattcacagtaaacggattcagatacttcaatcttgttctggtaactaacgttgccggcgccggagatattaacggagttagcgtaaagggatcaaagacagattggggtgaggatgagtcggaactgggggacagaactggcaatccaacgccgttctcatcggc

SEQ ID NO: 84919 - DNA, 541 bp, Arabidopsis thaliana columbia
  unsure (1)..(541): unsure at all n locations
cgcgtccgatctctctctctcttattaactcaatgacggcgactgcgtttagggtcggcttgtggttggccgttacggcttcctttctcttaaccgcaacaaacgccaaaatccccggcgtttacagtggcggaccgtggcagaatgcacacgccactttctacggtggcagtgacgcctccggcacaatgggcggcgcgtgtgggtacgggaacttgtacagccaaggatacggtgtgaacacggcggcgttgagcactgctttgttcaacaacggattcagctgtggtgcttgttttgagattaagtgtactgatgatccgagatggtgtgttccgggaaatccatctattcttgtgacggcgacgaacttttgtccgccgaattttgctcagccgagtgacgacggagggtggtgcaatccgccgcgcgagcattttgatctcgcatgcctatgttcctaagatcggttttacgtgaaggatttnccngttctnttgaaggaccttttgganangggggnaagttcaagaanggtnnc

SEQ ID NO: 84920 - DNA, 630 bp, Arabidopsis thaliana columbia
cgaagggatattgtcctatgacatggtctctgggaaatggaaacagttcattatacctggcccaccagacctgagcgatcacacgctggctgcgtgcggagagcggttgatgctggtgggtctactgactaaaaacgctgccacttgcgtttgcatatgggagctgcagaagatgacactgttgtggaaggaggttgacagaatgccaaacatatggtgcttggagttttacggaaagcacattaggatgaattgtctgggcaacaaaggttgtctgatattatttgtcccttgaggtccagacagatgaaccgtctgataacctacaatgctgtgactaggcaatggaccaaggtccctggctgcaccgttcctcgtgggagggaaaagactttggatcgcttgcggaaccagcgtttcatccctcccctacagctaggggcttgatcatcctttcccccctgggacaatttccctttggccaagcttttgagggttcgtattcgaaccgggtccacacaccgggttggggtcccttttttgttggtttatttcggttttgatttttcgagactgtaataatacaaaaacgttctgtattgtaataaataactttgggttgtgtggatc

SEQ ID NO: 84921 - DNA, 474 bp, Arabidopsis thaliana columbia
  unsure (1)..(474): unsure at all n locations
ccaaaatatcctcctagtaaagagattgatgcgaaaatgcgtgatgaagcgaaaaggcaacaacctatgagggcggagaaacaagaaagacaagactctatgacgagaatatcacacgagagaaaatttntaccaccggtcaaagcaaataactctctgtcaatgacaatggagaaacaatataaagatttgaggagtagccgcgatagtttcaagtcgtttaaggaggagaggactcctcatggaccagttcctgattatcaaaatatgcagcacaacaggaacaatcaaactggtgtgagaatttcacactcaggtccattgatgagcaaccggaacatggctaagtcaacaatgcatgtgaaggaggatgcacttcctagataccctccagctagagtaaacccgaagatgttatcaggctcagtctcctccaaacattattagaacgggaagatcaaccagtcacgaacc

SEQ ID NO: 84922 - DNA, 505 bp, Arabidopsis thaliana columbia
gggttttggcgttttgagttgataaaccattcttagttgtgaatcagggatacaagagagagaggaaagtggttttacggtgaccggagagatgaacggagaagggatctctgatggtttgtcggctgagaggaaagtggaaattagagtgaggaagaatgggagaaaggataaggttatagttgagaaatctgctgctcaaggtttacctgaaggatggatcaagaaacttgaaataacaaatagatcaggccgtaaaaccagaagagatccattcttcattgaccctaaaagtgagtatatctttcaatccttcaaagacgcatcacggtatgttgagactggcaatattggacattatgcacgtaaattgaaagaaagtgatatcgaagatgatgattccggaaatggaaagactgttcttcgtctggagtatgtggacaagagatctgcagatgatgtattggaaaaagagaaaacgatagatgatgtcagaagaagtaaa

SEQ ID NO: 84923 - DNA, 440 bp, Arabidopsis thaliana columbia
cccacgcgtccgttaagagtcaatatggtggtcatgattttggttcgacatcttcatacggtccttggatagaatctgaggttgggattactgagtatgcaaaactaggaagcagcaacaaatctcaaggtcagcggacattgaatccattggcccgtcagttctctcttgcagatgctaaacaaaagccatatggctatggtaaaaaccaagctgcagatgatttatcgctagtggtgaatactagcggtttatacattccagctcgttatagggacgaccataatgtagtagatgcagacttagcacaatcctcagtaaatgtggagcgttttcttcccaacatgtcacatggcggttcttcacttataactccaaaggcagacagtaactttgggtctactaagtggattgcggtggagccaaaccctacattttca

SEQ ID NO: 84924 - DNA, 576 bp, Arabidopsis thaliana columbia
  unsure (1)..(576): unsure at all n locations
cnnanagttntttncntttttanaanttgaaattttagggaggggtttctaggtttttatacccaagaaaaccttggcccaaatggccccaattacacgggccattccgacttcgatcactgacctggtccgacactcctttgccttattagcagaaccgaggatgccacccaacgaaataattaaaggaacaaaataaccaagagaaaaacaaatcactcgtaaatcgcaaagattaaaagaaattttgctgataataatactaaaaacggaaatattttccacaagccaccggaatattcccaagaaaattaaagggaaaacccagggctggaaaatgtctcatctctcttcttgtttgtgtcttcttccattgtaaaaaataaaattaaaaaacatcttttgggtggtttttcagatttcagactcgaaagtttttgccggagaaagtctgaccaaactgccacgtggcaggacgcaacgttccatgaggtaggaggacgtcggtcagaggccggttactcggaaagagagtnatttgccgatgagaccgccttttggnttgncnggttctgt

SEQ ID NO: 84925 - DNA, 470 bp, Arabidopsis thaliana columbia
gtcacgtttgttcatctctctcttatatatttgtttaaaggcttcgtctttgttcatttgcttttgttgatctcattacttgttcatcaatggcaagtctttgtttccaatctccttccaaacccatttcctatttccaacccaaatccaatccatcgccaccgttattcgccaaagtctccgtctttcgatgcagagcttccgtacaaaccctcgtcgccgttgagccggagccagttttcgtctccgtcaagacttttgcgccagccaccgtcgctaatttgggaccagggtttgatttcttaggatgtgccgtcgatggtctcggagaccatgtgactctccgtgtagatccctctgtacgagccggtgaggtctcaatctcggagatcaccggaaccacaacaaaactcagcacgaaccctctccggaactgcgccggaatcgctgctattgctacgatgaagatg

SEQ ID NO: 84926 - DNA, 599 bp, Arabidopsis thaliana columbia
gccggagaacaaaaaatgaagcatctcatccgccgcctctctagagtcgccgactcatcctccgaattctccatccgccgttccacctcctccttccgcaaccgtcgcggtcaccatcgtctccacgcgccgccgccgcctccgtggtcaatatgtccagctagaagagtcaacaccgtccccgctggtcacgtacctgtctacgtcggcgaggagatggagaggttcgtggttagcgcagagcttatgaaccacccgatcttcgttggtttgctaaaccgatccgctcaagaatacggttacgctcagaaaggagttcttcatatcccttgccacgtcatcgtgtttgagcgcgtggtggaaacgctccggttgggagggtttgaagggtccggtgcatctcagagaatcttgtggcttcgttgctctccggtgatgagttgatacctgaaactacaagagtagcttttgaaggaggatccaaaatcggcggtttgatattttcctctggttttctctgttttctttcaaattttccggtttttttactttctcggttttgtaaatatataattatttttacaccaggtttttttttt

SEQ ID NO: 84927 - DNA, 780 bp, Arabidopsis thaliana columbia
  unsure (1)..(780): unsure at all n locations
nnnnnnnnnnnnnnnnnnnnnnnnnnnnnnnnnnnnnnnnnnnnnnnnnnnnnnnnnnnnnnnnnnnnnnnnnnnnnnnnnnnccacgcgtccgccggcttctctcattctcatggtagctgttacgcctgcagttgtcgttgtttgcctcatgttcttcatcagacctgttggtggtcacaagcagatccgtcccactgatggagccagctttactttcatctacggtgtctgtcttctacttgctgcctatctcatgtccgttatgcttattcaagatctggtcgttgttagccacaacgtaatcactgtgttcaccattgtgttgtttgtcattcttgttgtcccaatcttggttccaatcatgacaagtttcttcacggagacaaacgagcctgatgacacaatagaagaacctcttgtcccaaaacgagaagaccaagaaccaggactgcaaacacctgatctaatcttgagtgaagtggaagatgagaagccaaaagatgtagatttgcttcctgcctcagagagacataagagaattgcgcatttgcaagcacagctaatgcaggcagctgcagaaggggcggttcgggtgaatagacggagagggccgcatagaggggaagatttcactctaacgcaggcactggtgaaagccgacttctggctcattttcttctccttgctgcttggttctggttcgggtttgacagtaattgacaatcttggtcagatgagtcagtctcttggttatgataacactcacgtgcttgtgtc

SEQ ID NO: 84928 - DNA, 409 bp, Arabidopsis thaliana columbia
  unsure (1)..(409): unsure at all n locations
ttttttttttttttttgcaaaaagatatcgagtcagaatgcncgatcacacaattatacaaaacactgaattaaattcaaagattcactagaaacctcggtttacaaatactttaatcacacaattatacaaaatcaacgaaatttaaataatacaacacttacagaactaagacgcatacaagtcaacttcgacagattataccaaattaaaaaacaaaaacatcatcaatttgtattaccttgagagaaacaacgaaacaaagagagtgactcaacggatttttcttgtagagggagaggacagagatgatggataggaggaggnggacaaccgnngcaaacaatgagacggcgttgctcctccaccatgncggcaaacttgtcgtggttatgancagattttgccc

SEQ ID NO: 84929 - DNA, 3435 bp, Arabidopsis thaliana columbia
aaagttatcaattttacaacattaccgctataatctgcttgattctctgcaaaaagagaagactttttaccgagaagaagtcctctggctcattgaagaaactcaacgaaacaaacccagttctcatatatcgttttaagggattacaaaagctaatcgaagatgaatccagagaaattcacacacaagacaaacgagacaattgctacagctcatgagctagctgtgaatgcaggacatgctcaattcactcctttgcatttagctggtgctttgatctctgatcccaccggtatatttcctcaagcaatctctagtgccggtggcgagaacgcagctcaatctgctgaaagagtgatcaatcaagccttgaagaagcttccttcacaatctcctccacctgatgatattccagcgagttctagtcttattaaggtcattcgtcgtgctcaagctgctcagaagtcacgaggtgatactcatttggctgttgaccagttgattatgggtcttcttgaagattctcaaatcagggatttgttgaacgaagtcggtgtagcgacggcgagggtaaagtctgaggttgagaagcttcgtgggaaagaagggaagaaagttgagagtgcttcaggggacacaaattttcaagctttaaagacttatggaagagatttggttgagcaagcagggaagcttgatcctgtgattggtcgtgatgaggagattagaagagtcgtgaggattctttcgaggagaacgaagaacaatcctgtgcttattggagagccaggagttggtaaaacagctgtggttgaaggtttagcacaaaggattgtgaaaggagatgtgcccaacagtcttactgatgtgagattaatttcgttggacatgggtgcgttagttgctggtgctaaataccgaggagagtttgaagaaaggttgaaatctgttttgaaagaagttgaggacgctgaaggcaaagtgattctctttattgatgagattcatttggttcttggtgctggcaaaactgaagggtcgatggatgcagctaatctgttcaagcccatgttagctagagggcagcttcgatgcattggtgctacaacgcttgaagaatacaggaaatatgttgagaaagatgctgcctttgagaggaggttccaacaagtctatgttgcggagccaagtgtgcctgacaccattagtatccttagaggactcaaggagaagtatgagggacatcatggtgtgcgaatccaagacagagctcttataaatgctgctcagctgtctgctcgttacataactggtcggcatttaccggataaagcaattgatttggttgatgaggcttgtgcgaatgtgagagtccagcttgatagtcaacctgaagagattgataaccttgaaaggaagaggatgcagctggaaattgaacttcacgccttggaaagggagaaggataaagccagcaaagctcgacttatagaggtgcggaaagagcttgatgacctgagagacaagcttcagcctctcacgatgaaatacagaaaggagaaagagagaattgatgagattcgaaggcttaaacagaaaagagaagagctcatgttttctttgcaggaggcagaacgaagatatgaccttgcaagagctgctgatctaagatatggcgcaattcaagaagtggaatctgcaattgcccaacttgaaggaacttcttctgaagagaatgtgatgctcacagaaaacgttgggcctgaacacattgctgaggttgtgagccgttggacagggattccagtgacgagacttggccaaaatgagaaggagaggttgattggtcttgctgataggttgcataagcgggttgtgggacagaatcaagcggtaaatgcagtttctgaggcaattctaaggtcaagggcaggacttggtagggcacaacagccaactggatcattcttattccttggaccaactggtgttggcaaaactgagctcgccaaggctcttgctgagcagctgtttgatgatgaaaacctcttagttcggattgatatgtcggaatatatggaacaacactctgtctctcgcctcattggggcaccaccagggtatgttggtcacgaggaaggtggacaactaactgaggctgtgaggaggcgaccttattgtgtcatactctttgatgaagtggagaaggctcatgttgctgtcttcaacactctgctccaagttttggatgatggtcgattgacagacgggcaaggcaggacagtcgatttcaggaactcggtgataatcatgacatcaaaccttggtgctgaacacctccttgcagggctaactgggaaagtaacaatggaagtggcccgggactgtgtgatgcgggaggtgaggaaacacttcagaccagagctcttgaacaggcttgacgagattgtggtgttcgaccccctttcacatgaccagttgaggaaagtagctcggcttcaaatgaaagacgttgctgtccggcttgctgaaagaggagttgctttggcagtcactgatgctgctttggactatatcttggcagagagttatgacccggtgtatggtgctaggcctataaggagatggatggagaagaaggtggtgacagaactgtcaaagatggttgtgcgtgaggaaatcgatgaaaactccactgtttacatagatgcaggcgctggtgatcttgtgtaccgggtagaaagtggaggtctagtggacgcttcaacaggcaagaagtcagatgtgctgattcatattgctaacgggccaaagagaagtgatgcagctcaggcggtgaagaagatgaggatcgaggaaatagaagatgacgataatgaggaaatgatcgaggattaaagtcttgacctccaacgtgtgagttcttttgaggtgttgtgattgtatgacttgagctttcatgctctgttttggttttgactcttttggtagactataatggtgtggaactgtaaaaaagtctactttattatgttttcgtatatgtaaatcattttacataagaaatccattgtacgtcccataatcttttggggttttttcatacctttgggatcttatcttacttaatgctacgcatcagtggttaagagctgtcttaacaatctcatcaacgacacctttagcgagggggaagaagtggccacctccggcaacctcatgatagtgaagccaaggaagcttatctgcaatgtaacgttgcagcgtcacaggcactaacatgtcctcgtctccttgccacaaatgaacagagccttctctgtttaaaaacggattctcgagttctaaaggatcaaattcccaatttccaaaacccacaatcatatcacggttaatactctcatgtattccttgctgccttacttctgccaaatg

SEQ ID NO: 84930 - DNA, 543 bp, Arabidopsis thaliana columbia
  unsure (1)..(543): unsure at all n locations
cagnnnnnnnnnnnnnnnnnnnnnnnnnnnnnnnnnnnnnnnnnnnnnnnnnnncgacgtgttaatcttcttcctcctgaagatctctctctgaaagacattctcaaattttctcgggaaaacacctttttctgattcgtttttctccagatcattccttctttcttatatccgatttcttcgggaggaggcgaagagacggtcaacaattttatccaatgtcgcgccgtcttttcgcctgtttcggcctcaagaaatcttcaactaaacctatctctggtggtaacaattccgccgccgtagccgcagaaattcccgccggagatggtcccgttctcgtccagctattctcgtctcagggatgtaaaacatcgcccgcggcggagatgttgatgtcccggctaggtcgaggtgatttcgacgctcagatccgtggcgaagatggtggatctggatctccgacgatggttttggtgtttcatgtggattattgggattacaaggggtggaaagatccgtatggatcgagccaatggacggtga

SEQ ID NO: 84931 - DNA, 993 bp, Arabidopsis thaliana columbia
  unsure (1)..(993): unsure at all n locations
nnnnnnnnnnnnnnnnnnnnnnnnnnnnnnnnnnnnnnnnnnnnnnnnnnnnngcttctcacactaacccacgcgtgcagaaaaagagctcgaaacaaaaatggagggaaccttctcgccgctttgcttacgttcttcttcgaacctctgttacttctccagtaatgtttcaccagattctcaccgttctataggatttacattggttgattcgctccggccaacgaacttggtttccctgcgaacgggaaataaacgttcgtcatcgtcttcactacggctatttctctctccgactagaagcgctctccgtacgccgactatttccgcggaggaggtgaaagatgtcccgatgccgaagattgataagagcggccgattaagcagtcctcgagccgcacgcgagctcgctcttgtaatactttatgccgcatgcttagaaggctctgacccaattcgtctctttgagaagagaataaacgcaagaagagagcctggatacgagtttgacaagagttctttgttggaatacaaccacatgagctttggaggacccccagttaaaacagaaacaaaagaagaagaagatgagcttgtgcgccatgatgaaaaagaatcgaaaatcgaagccgaagtgctttcagctcccccaaagctggtgtacagcaaacttgttttacggtttgcaaagaaactcttggctgcggtagttgataaatgggatagtcatgtcgttatcatcgagaaaatttccccgccagattggaagagtgcaccagctggaagaatattggagttttcgattcttcacttggcaatgtctgaagtggcagtccttgaaacccgacacccgattgtcattaacgaggctgttgatcttgcaaaacggttctgcgatggatcagcaccacgcataatcaacggatgcctaaggacatttgtcaaggatagagcaacaacatcaacacctcaagctttagaattgaagcaaga

SEQ ID NO: 84932 - DNA, 502 bp, Arabidopsis thaliana columbia
  unsure (1)..(502): unsure at all n locations
tttttcttaaaataaaatttaagagcttgattaagttttgatcttcattagctatctataagatagtcactagctagctatcttttattagtgatagtaacaaaacaagtaaagacagctacgaagattattagaaaaaccttaagatgattaaatttgaaacgtacgagtatttgaactccactgagctagacgttaagaaacaaaaagaaagagtcaagtgagaactaatgttgctttcgtcttcttgaaacaatctccgacgcccaagccttgcctatatcagtctggaacttacctgctgttgattggaaaaactcttctagatctttcccttgctcntgntnatattccaaagcntgtagtatcagctcaaactttatcgaaatcttttaacaactttgggctcaggngaagaagtctccttcgggatnctcncccaaagctcagcggtttcttttgctccntncngcctccacccaaagngtttggcacaatgggc

SEQ ID NO: 84933 - DNA, 1357 bp, Arabidopsis thaliana columbia
gcggccgccagtgtgagtaatttagaaactccgagtggccgaaacagagatttcgcagaggaaccatcactgattgtgtcaccgaaccattgatcttcaagttccgatccaatttcagatatgtcgaggattattggtagaaaagggattaactatatccatagactaaattctgcgtcgttcacgagcgtatctgcttcttcaatcgagaaagggcaaaatcgcgtgattgatgcttcgttaactcttattcgtgaaagggcaaaactcaaaggagagttagtgcgtcttttaggtggagctaaagcttcaacatctcttcttggtgtaccacttggtcacaactcttcttttcttcaaggtcctgcttttgctcctcctcgtattcgagaagctatttggtgtggtagcacaaactctgccactgaagaagggaaggagttgaaggatccacgggttctaactgatgttggggatgttccggtacaagagattagagattgtggggttgatgatgatagactgatgaatgtcataagtgaatctgtgaagttggtgatggaagaggaaccattgcgtccgttggtcttaggtggagaccattccatatcttatcctgttgtgagagcggtttctgagaagcttggagggcctgtggacattcttcatcttgatgcacatccggatatatatgactgttttgaaggaaataagtactctcatgcatcttcttttgctcgtatcatggaaggtggctatgcgcgtaggcttttacaggttgggatcagatcgataaaccaggaaggacgggaacaaggcaagaggtttggagtagaacagtatgagatgcgaaccttctcgaaagatcgcccaatgttggaaaatctgaaattaggggaaggagtgaagggggtatacatctcgatagacgttgactgtctcgatccggcatttgcacctggagtgtcgcatatcgaaccaggaggtctctctttccgtgacgtccttaacatcttacacaaccttcaggcagatgttgtcggggctgacgttgtcgagttcaacccgcagcgtgatactgttgacggcatgacagcaatggttgcagctaagcttgttagagaattagctgcgaaaatctcgaaatgaaacagaatggtaattttggagtttgttttttgttatgtttcatcgtgcaagtttgtaacattcatataggtacttgaatgcaataagtctggctcatagacggagtatcaaacaaacataatatgaattctgatctaaggctataaaatcaatgttcatatgcctaaaaaaaaaaaaaaaaaactaaattactcacactggcggccgc

SEQ ID NO: 84934 - DNA, 390 bp, Arabidopsis thaliana columbia
cggacgcgtgggcggaagccattgattcagttacagttacaagtttagggttttaaagccatatcttgcgaatggctataatcgcaggtaatcatctctaaaattctctctgcagtttgtctttcccgaattgataagtcagtcgcttctgcaactgtgttccttctgatacccaaaactttccatttgggatagtggcagaattagtggaagaagtaagcatgagcagggtcgagcatgtattgaactatctgaaacgtaggcagctcgagaatcctggtttcttatatgcaattgaggacgattgtgggaatgttttctgggcggatccaacttgcaggttgaattacacctactttggtgataccctagtctttgacaccacctata

SEQ ID NO: 84935 - DNA, 377 bp, Arabidopsis thaliana columbia
tttttttttttttttccatcaaaactagtcaactttattacacagctccagattttggacatcaaaggctcagtgttgtcatacaaatgcttttgtgacttggtctctatcaaaactagtcaacggttttacaaagtaggtagagaatgttttcaattaccagctagagaaatctttaaaccctgtggaggctgacgcagtaggtttttcttttcttagacactccaatggttgaaatatctgagtctagggaacctttagtgtctttagtggctgtactactcatagctttcaagtattttccgacaacaccgcaccggtccagcttctggtggttcctgatcccgggttgctgtaccagggcccgatcttctcaa

SEQ ID NO: 84936 - DNA, 468 bp, Arabidopsis thaliana columbia
ccgtttgcagaaatggagactggtgctggtataggtttgtaccctttgcatcgctgcaaaaccatttacctagtgagacatgctcaggggattcacaatgtggatggggagaagaattataaggcttacatgtctcatgactactttgatgctgagttgacccagcttggctggaaacaggtagatagtttgcgtaagcatgttcattccagtggacttcacaagaagatcgaactggtcatttcgtctccactgatgagaaccttgcaaactgctgttggtgtttttggtggagagggctacacggatatgagtgatgtactacctctaatggtagcaaatgcaggaaatagcagccgtgcagctatatcgagtttaaactgcccaccagttattacagaggagtcctgcagagagcatttgggagtgcatccatgtgatcagaggagaagtatcagcgactatcag

SEQ ID NO: 84937 - DNA, 607 bp, Arabidopsis thaliana columbia
  unsure (1)..(607): unsure at all n locations
nnnnnnnnnnnnnnnnnnnnnnnnnnnnnnnnnnnnnnnnnnnnnnntttaaannnttaaaancgatctgaccgcgcgtccgaagaaaagaagaaattcgggagtcggagaaattgtcgggtggatcgatgaatacttgtcagtttatggataagcagataatggatctatcttcttcttcatctctaccttccactgatttcatcgatctgatgaacaatcatgacggcgatgatcaccagaagaagcaggtgatcggcgataatggattggactctaagaaagaagtgatcgttcctagctatgatttccatcccatacgtcccaccaccgccgcacgattgtctcactcggctttagatctcgccggatccacgactagggttaattggtccgcctctgattataaacccgtttccactacttcgcctaacactaattttggatctctcgattctattgaaccttccaagttggttcctgacaagggtcaaaatgtgtttaacacgactattatgtccgagattatagataggacaatgaagaaacataccgataccttgcttcatgtaatggaaggtgttagtgcacgtctttcacagctgga

SEQ ID NO: 84938 - DNA, 368 bp, Arabidopsis thaliana columbia
cggacgcgtgggttcgaccaaaaccttctcctctcctctgggagatctccatcttcttcgcttcttcgcttccccgcctgaaacaattactcgatctcgccggcggaacaagctctccgtttctctttccggcagatcgattcttccaattccttattcctttctaggtcttccttaagaaacccttactttcttcaaaatctgcatttatggcgattagggttaccttcacctactccagctatgttgctaggagcattgcttcatccgccgggactcgtgtcggtaccggcgacgttagatcatgcttcgaaacatgggttcgtctcaggttctgcggccacaatcagataccagatattgttgat

SEQ ID NO: 84939 - DNA, 522 bp, Arabidopsis thaliana columbia
  unsure (1)..(522): unsure at all n locations
agaagatgaaggaaggagaaccgcaggatattctctcatttccaacgcccaaacctcgaaacgaatgctgacatcattcacatcaagatgttgaggaacaacacttttgtcacggttacagattccaaaggaaacgtcaaatgcaaagctacatctggtagtttacccgatctgaaaggtggaaggaagatgacgaattacacagctgatgcaaccgctgaaaacattgggagaagagctaaggctatggggctgaaatctgtggtggttaaggtgaacggatttacgcatttcggaaagaagaagaaagctattatcgcgtttagagacggtttcacccaacctcgaggtctngatcagaatccggttaggtctnccatcgggggccactactagggaagctcataattgttgcaggttaccacgggaancgtcgggtgttnaaagaaaacggccnntgtcgtnggctcttgttnattctttggncccntngaaccnctttttttttgnaagtattanttt

SEQ ID NO: 84940 - DNA, 1649 bp, Arabidopsis thaliana columbia
atccttcgtcctcatctgccaaaaacttcgtacgagtcgctacttctctctctatatataaactccttaccactctctttttctgattttttgacgttaagagatagaaacagagagagatagagagatagagttatggctttggcgatgatgatccgaaacgcagcttcgaagcgaggaatgactccgatctccggtcatttcggtggtttgagatctatgtcttcatggtggaagagcgttgagcctgctcctaaagatccgatcctcggagttaccgaagcttttctcgctgatcctagtcctgaaaaagttaatgttggtgtgggagcatatcgtgatgataatgggaagcctgttgtcttggaatgtgtcagagaagctgagaaaaggcttgctgggagcactttcatggagtaccttcctatgggaggaagtgccaaaatggtggacctaacattgaagcttgcctatggggacaatagtgaatttatcaaagataaaagaattgctgcagttcagactctgtctggcactggagcctgccggctctttgcagacttccagaaacgtttttctcctggttcacagatctacattcctgttccaacctggtccaaccaccacaacatctggaaagatgcacaagtccctcaaaagacatatcattactatcatccagaaaccaagggcttggatttctcagcattgatggatgatgtgaagaatgctccggaagggtcattcttccttcttcatgcttgtgctcataatcctactggagtagaccctacagaggaacaatggagagagatatcacagctattcaaggctaaaaagcatttcgcattcttcgatatggcttaccaaggttttgctagtggagatccagcgagagatgccaagtccatcaggatctttcttgaagatggtcatcatattggaatttctcagtcctatgcaaaaaacatgggactctacggccagagggtgggatgtctcagtgtgctttgtgaagatccgaagcaagccgtggctgtgaaaagtcaattgcagcagctagctagaccaatgtacagcaacccacctttgcatggtgctcagctggtctcaaccattcttgaagacccagagttaaagagtctgtggctaaaagaagttaaggtcatggctgataggatcatcggcatgagaactactttgcgagaaagccttgagaagttaggatcgcctttgtcatgggagcacgttaccaaacagattggaatgttctgctacagtgggttaacaccagaacaggttgaccgcttaacaagcgaatatcacatctatatgacccgtaacggccgtatcagtatggctggtgttacaacaggaaacgtgggataccttgcgaatgctatacatgaagtcaccaagtcatcttaaatcatttacttacatgtttcagccaaacatacaaattttgtttgaagagtcaataagacaggaggctagatttgtacttctgcaattggttttgtgggaactgaaagtttacccataaacagtaatttattagcgcattttttcgttagctgggcaataaaagcaaagcctaaacgatggatttttggatatacaaaattcggattgttttctttcttctc

SEQ ID NO: 84941 - DNA, 245 bp, Arabidopsis thaliana columbia
  unsure (1)..(245): unsure at all n locations
ttacttctcaataggaaccattcagtttacaaaacacaacagagaggtaagtcacgcatcgagaacnnnnggttctttttcttttttcctttctcgtttaattttggagtcatcaggtaatggttttgagtttgtcttgttgtgtctatagaacatttgtaacatcttttacttaagaggtatttaatcttctttatgtcaaagagtttgtctctgtttattggcattttcgtctaaaaaaaaaa

SEQ ID NO: 84942 - DNA, 568 bp, Arabidopsis thaliana columbia
  unsure (1)..(568): unsure at all n locations
cgtgatgtggcttgggcaccgaacttgggtctcccaaagtcaaccatagccagtggttcagaagatgggaaagtgatcatatggaccatagggaaagaaggtgagcaatgggaaggtactgttttgaaagatttcaaaacaccagtgtggcgggtctcgtggtcgttgaccggtaatttgttggctgtttccgatgggaacaataacgttacagtgtggaaagagtctgttgatggagagtgggaacaagtgactgttgttgagccatagattgttgtttgtttgtttggttatcttttgttttgtggtaatatcaaaatgtggtgtgttctgtatacaatttctagggacctgtttctctctatacgtttctcaggaaagtatattcttatgtattttaatcagacaacagagattgcaaaagaaatgtatttttcataaaactttttaattccgataatgaggttttttttactggtaaaaaaaaaaaaaaaagnnnnnnnnnnnnnnnnnnnnnnnnnnnnnnnnnnnnnnnnnnnnnnnnnnnnnnnnnnnnnnnnnnnnnnnn

SEQ ID NO: 84943 - DNA, 588 bp, Arabidopsis thaliana columbia
  unsure (1)..(588): unsure at all n locations
ccccgtgcaggaagagcatgactgctgcaattcgtgagaggatgttcgtgaagcatatagaaagaaaggttggggggttactaatccagatttgattgaccagtgtaaacgagaaggttttctacaaagagtaaaggatgaagaaggtgaagggtgtaatatatatgggttcttggaggtcaataaggtggctgggaacttccactttgctcctgggaaaagctttcatcagtcgggcgtgcatgttcacgatcttcttgcttttcagaaagacagttttaacataagtcacaagatcaatagacttacttatggagactactttcctggcgtcgttaaccctcttgacaaagtcgagtggagtnaagncacacctaaatgctatgtaccaatactttatcaaaggttgtaccaccagtatncacaggtntcagngggcacacaattcaatcgnatcagtttcagtgcccgacatntaaagggctcagaagnaggnaactgaatctttcccggggtttcttcttcaagnccttcccatcangnacatttgggggccaattatttgncttttngggttttcccnagtnc

SEQ ID NO: 84944 - DNA, 353 bp, Arabidopsis thaliana columbia
gtagcttttaagaaagaaggaaacatcatcagaagcttctctctcagattgacagaagaataagattccaagctcctctctttcttctcttaaagaaaagatgttgtgtagaatggtggtggtgactggccggaaaaagaacccccgttcggttccggtttatctgaatgtatacgatctcacacccatcaatggctacgcttactggttaggacttgggatctatcactctggtgttgaagttcatggagttgaatatggttttggagctcacgatcattcgactaccggatattcgaggtggacagagcaatgtcggttcacattaggagtctatattgattggagactga

SEQ ID NO: 84945 - DNA, 950 bp, Arabidopsis thaliana columbia
  unsure (1)..(950): unsure at all n locations
atgatactccagctctatacactcactataggaagctggacgcctgcagtaccggtccggatttccggtcgaccacgcgtccgcgaccgcgcaattctccctttagcttcaaagatccgaggcagaccagttagagtcaatgtcaagattcgaatgggattagggctattcatatcattcttagcaatggcggtttccgcaactgttgaacattacagaaggaaaaccgcgataagccaaggactcgcaaacgatgccaactcaacagtgagcatctcagcaatgtggcttgtaccacagtatgtactacacggtttagcagaggccttgaccgggataggacagaccgagtttttctataccgagtttcctaaaagcatgtcgagtatcgcagcttcgttgttcggtctaggaatggcagtggctaatatcttggctagtgtgatcctaaatgcggtaaagaatagctcaaagcagggcaatgtgagctggattgaagataacatcaacaagggtcactatgactattactattgggttttagcgatcttgagcttcgttaatgtcatctactacgttgtgtgtagctggtcctatggtcctacggtggatcaggtgaggaatgataaggttaatggtatgagaaaagaagaagaggaagttattaaattaaactaagcccaattggttgatcataattaaatggtgtacgtgtgttataaaattctatatatttgtatgtaattagattattatatcatggatttggattttcttaggatgtaaaggttgatgttaattaatgggtcgtgtgtttatttaattattccccnnnnnnnnnnnnnnnnnnnnnnnnnnnnnnnnnnnnnnnnnnnnnnnnnnnnnnnnnnnnnnnnnnnnnnnnnnnnnnnnnnnnnnnnnnnnnnnnnnnnnnnnnnnnnnnnnnnnnn

SEQ ID NO: 84946 - DNA, 1009 bp, Arabidopsis thaliana columbia
  unsure (1)..(1009): unsure at all n locations
atgtactccagctctaatcgactcactatagggaaagctggtacgcctgcaggtaccggtccggaatcccgggccccccacgcgcccggtgcggcctcttcctcttcctcttctaaacaatgacggaggaagaggtagctatggaagtggaagctctagaagcagtttacagcgaagactgcgttatactggattcgtatcctcctcatcttcacctccatatcaagccccgtaccgccgaaatctcttctcagcagtttgtggaagccgttgttagattccaagcaggttctaagtatccagatgaaccacctcggattagtctgattgaatccaagggtcttgacgagcaaaggcaaaagcttttgattggcatagtgcaagagaaagcttctcaactatcatcttctttaatgcttgtagaactttgtgaggaagcagtggagaggctcacaattatgaatcacccggagggagattgtccactgtgtttgtatccgttattccctgaggatggcgggagtaaacaaatgccatttatgaagctgatgtcttgttttcattggttccactgtgagtgcatcattaggtggtggaattggcttcatgcacaggaagaggctgattcgaaatctggtgacactttacatatgcgtagaggatcaactgctcgagaaggtaattctggatcagcagataaaagcttgggaaactgtccagtgtgccgcaaaatttttcactcgagtgacattgaacatgttcttgacttagttggtgctcaatcatctctacaggactntagtttaataccaggcaaggaccaagncccgntgctccagtcagattcagagancataagaagagagcggtttnaggtctattctaaaagacggcaggntgaaaaagggtggttttgggtcaacccgntngaaaaacatattcggtggtgcccggntatntatcttncctccacctggctcatntatnaacgtnacggaaccgtgganga

SEQ ID NO: 84947 - DNA, 1709 bp, Arabidopsis thaliana columbia
  unsure (1)..(1709): unsure at all n locations
gttcaagcttcgcccacagttgccaaatcgcactanttgctcccacagctaaaagttgattctgaaaacctctctctctttgtgaacaagattaaaaagacgacttctcttttaacttattcctcctctgcttcttcaagatccattgtctgcaatttcaatcccttgtctcgtcatggattccgtcttctctaacgttgctcgtgctcccgaagatcctattctcggtgtaactgttgcttacaacaatgatcctagtcctgttaagatcaatttgggtgtcggtgcctaccgaactgaggaagggaagcctcttgttcttgatgtggtgcgtaaggcagagcaacagctagtgaacgatccgtctcgggtcaaggaatacattcccattgttggtatttccgattttaacaagttaagcgccaagctcatcttaggtgctgacagtcctgcgattacagaaagtagagttactacagtccagtgcttgtctggtactggttcgttgagagttggggctgagtttctcaaaacacactaccaccaaagtgtcatttacattccaaaaccaacttgggggaaccatcccaaagttttcaacttggcaggcttgtctgtggagtatttccgctactatgatcctgcaacccgtggtcttgacttcaaaggcttgctcgaggatcttggcgctgcaccatctggagctattgtcttacttcatgcatgtgcacacaatcccactggagttgacccaacctctgaacagtgggaacagattcgacagctgatgagatctaaaagcttattacccttttttgatagtgcatatcagggttttgctagtggtagccttgacacagatgcacaatctgtccgtacatttgttgctgatggcggtgaatgcttgatagctcaaagttacaccaaaaatatgggactttatggggagcgtgttggtgcccttagcattgtctgcaagtcagcagatgtggctagtaaggttgagagccaggtgaagcttgttgtgcggcccatgtattcgagcccccctattcatggagcatcaattgttgccaccattctaaaaagcagtgatatgtacaacaactggaccatcgagctgaaagaaatggctgaccgtataaagagcatgcgccaacagttatttgaagctatacaagctagaggtacacctggtgactggagtcatattatcaaacagattgggatgtttacatttactggattgaacaaggagcaagttgaattcatgaccaaagagttccacatttacatgacctctgatgggagaataagcatggcaggtctaagttcgaagacagtgcctcaccttgccgatgctatgcatgctgcagtgacccgcctcggctaaactagcgaccatacatttttttgctgtttctacaaataaaatgggacaaaaaaaaagaacaccgtttttgttggcttatatactatggtttttttctgatggtaccatatgtttcctcatgtcttttgactaaagatggttgaaccaaaaccaaagtgaggattgtgacattgagatctaccgtttctaagaaaatattggttactttaatttgccaccaacaaaaaaaaaaaaaaaaaaaaagggcggccgctctagaggatccaagcttacgtacgcgtgcatgcgacgtcatagatcttctaagttgtaccta

SEQ ID NO: 84948 - DNA, 597 bp, Arabidopsis thaliana columbia
taaactcagaaacaaacaaaagatcaagaagaaacatggtgatgatcaagaccacaatggtttccctttttgctctagcggcggttctcctaatgattctagccccggcggcagaagccgtgacgtgctcgccaatgcagctaagcccatgtgcaacggcgataacgtcgtcttctccaccatcggctttgtgctgtgcaaagctgaaggagcagaggccatgcttatgtggttacatgagaaaccctagcctccgtcgcttcgtcagcactcccaaccctcgtaaagtctctaaaagttgcaaactccccatcccaaggtgttagaaagtcagaaaagtgtttgctgtgtatgatcatcctatatatgtttgaatcctactgggggtgtgtgtttaaggatgtttatttatgcccgctataagtagtagagttaaataagtgagtggtactcttggtgatgctttgtatgcatcttatttaaatgggtgctatctcattctgggtggtggtgatatatatatatatacatgatggtgtaataactgagatgatataatatatggaaattatatttccaaaaaaaaaaaaaaaaaaa

SEQ ID NO: 84949 - DNA, 896 bp, Arabidopsis thaliana columbia
  unsure (1)..(896): unsure at all n locations
atgatttgccnnnnnnnnnnnnnnnnnnnnnnnnnnnnnnnnnnnnnnnnnnnnnnnnnnnnnnnnnnnnnnnnnnnnnnccacgcgtccgcccacgcgtccgaaataattgagttttttttttaattagaaacaaatggggttgagtggtgttcttcatgtggaggttgaggttaagtctccggctgaaaagttctgggtagcccttggcgacggcatcaatctcttccccaaagctttccctaacgactacaaaaccatccaagttctagccggcgatggcaacgctcctggctccattcgcctcattacttatggagaaggatctccactggtgaagatatcggcggagaggatcgaagcagtggatttggagaacaaaagcatgtcgtacagcatcattggcggagaaatgttggagtactacaaaaccttcaaaggaaccatcaccgttatccctaaggatggtggtagccttctgaaatggtctggtgagtttgagaagaccgcccatgagattgatgacccacacgtcatcaaggactttgctgtcaagaacttcaaagagatagatgagtatctccttaagcaaactagtgcctaacactagaacctttaaattatataagagggttcgaccgtctctataagatttttctaattaagaagttgaataaagtggaacccctttatgaatatccacgttttatgatttcggagtttatgcagcctagtaggccataagctttttacaaaagccaatttagtcgaacattttgaaaaaatcgaaccttgtggtagagtaattatttggctcaaaaaaacaaaaaaagnnnnnnnnnnnnnnnnnnnnnnnnnnnnnnnnnnnnnnnnnnnnnnnnnnnnnnnnnnnnnnn

SEQ ID NO: 84950 - DNA, 593 bp, Arabidopsis thaliana columbia
  unsure (1)..(593): unsure at all n locations
nnnnnnnnnnnnnnnnnnnnnnnnnnnnnnnnnnnnnnnnnnnnnnnnnnnnnnnnnnnnnnnnnnnnnnnnnnnnnnnccacgcgtccgttctcttattataagaagacaggagtgccaaaacgtgtaatgttccatgagaatggtgaatggattgatttgcctgatcatattctatgcgacatcaggaatgatcttgaagcaaagagagctacaattgagttcaattggtgcggtcgccattttctcctggatttcttgcacatgtatcgactagacttggaaacaggtgtaaaaacccagcttgcttggattgatattgctggcaaatgctttttccctgaaacttttgacaccctcgaaagggacggctgccatcatatccgtggggaagatccggaacaacatgatcaacgtgagatcaagctgcacattgaaattgatgtaaatagtggggagttaccgaggctgaatttgaatgtggtcactgacgagtctggtgacaatatggatgattttcaagctgttcagagatcctcaaatgggccaaatgacgaggcatcagaggatatctgcagccgtgagcttgatga

SEQ ID NO: 84951 - DNA, 304 bp, Arabidopsis thaliana columbia
  unsure (1)..(304): unsure at all n locations
gagagagagaagaaatggattcatactcttcgccgccgatgggaggttcaggtagttcggtttcgcccgaagtaatgatggagtcggtcaagactcagctcgctcccgcttacnccgaagagttaatcgagactttgaggacaaaatgttttgacaagtgcgtaacgaacccaggatcaagcctcggcggaagtgagagtagctgtatttccagatgtgttgaacgttacatggaagctactgcaatcataagtcgttctcttttcactcaactttgatcattccagctacctcttnctttttt

SEQ ID NO: 84952 - DNA, 549 bp, Arabidopsis thaliana columbia
  unsure (1)..(549): unsure at all n locations
cnnnnnnnnnnnnnnnnnnnnnnnnnnnnnnnnnnnnnnnnnnnnnnnnnnnnnnnnnnnnnnnnnnnnnccacgcgtccgggtttttgaaatttctatcttccatttccatctgatgaatctctgacgatgtctttgagaactcgagcatcgtcatggcctcgtcttctacttcgccggaaccctagatcttcattttctcgtcagatatctactctcgattcctcaacatcaacatttcccagaagaatctccggttactactcctcctccttctttcccgtaaatcaaacgccatggatctcatctcagaggtaccgtttcttctcctcaagcacaatgtcaccatcggaagctgatagagtagtgagagaacttatagcagaggttgagaaagagaagcagcgtgagagagaggagagacaaagacaaggacttgattacaaagacattgatgccgaagacgaagaagattacttagggattgagccgtttatcgagaagcttaagaagcagaatttgaaagatgatggttgaataaataggcgt

SEQ ID NO: 84953 - DNA, 581 bp, Arabidopsis thaliana columbia
  unsure (1)..(581): unsure at all n locations
ctaaggttcaactatggcgactcttcgtttcactctacttcttcttgtcttcgtcgtcgggatcttcttctccttctcctccgtttctcatgtacgtgcaacaagtgaaatcaatctcaggatcgaaccattttcctcgccgttcgcgacggatcttgcaaagctgcaaactcaaattggctacaagtttaacaacatcaaccttcttcgccgtgcaatgactcatgcttctttttctcaagagaacaacaaagccttgagtatctttggaacccatatcattgaaaccgcggtctctcttcagtttctcgctaaagatatcgatatttcctcgaaagcactgggccgtttgatatcagangtttcaaatgtggaatcccccatgtgctctttganngaaaaccggttgggttttggggaaaaaataatccagaatttctacttaagaaagaatnccatcgaaactcgggccattccttttgtttctggcttttagggcaanctttttgggancctattaccttattgatgntngaacngggtgaataaaaccctccnagggtttccntggaaaggtaatg

SEQ ID NO: 84954 - DNA, 539 bp, Arabidopsis thaliana columbia
  unsure (1)..(539): unsure at all n locations
atgatctccnnnnnctctacgactcactatagggacagctggtacgcctgcaggtaccggtccggaattcccgggtcgacccacgcgtccgcccacgcgtccggaggactcccaaaacagaaccaagattgctgagttgctccgttaccactcaaccaagagcggggatgaattgaccagtctcaaggactacgtgacaaggatgaaggaaggtcagaacgatatcggcgggttcactggggggagcaagaaggctgttgagaactctccattccttgagaagctcaagaagaagggtatttgaagttctctacatgggtgacgctatcgatgagtatgctattggtcagctcaaggatttcgaaggaaagaggcttgtctctccaaccagggaaggtctgaaactggatgagactgaagacgagaagaagaagaaagaagagctcaaggagaagtttgagggactctgcaaagtgatcaaggacgttttgggagacaaggttgagaaggttatcgtctctgaccgtgttgtggactca

SEQ ID NO: 84955 - DNA, 568 bp, Arabidopsis thaliana columbia
tgatcctcagcgctacacgactcactatttggaaagctggtccgcctgcaggtaccggtccggaattcccgggtcgacccacgcgtccgctcagcaatgattgggaggagcatttggctgtgaagcatttctctgttgaaggacagcttgagttcaaagctatcctctttgttcccaagagagctccttttgatctctttgacactaagaagaagcccaacaacatcaagctctatgtccgtcgtgtcttcatcatggacaactgtgaagacatcatccctgagtacctcggatttgtgaaaggtattgtcgactctgaagatcttcctctcaacatctcgagagagacattgcagcagaacaagatcctcaaggtcatccgcaagaaccttgtgaagaagtgccttgagctcttctttgagattgctgagaacaaggaagactacaacaagttctacgaggctttctctaagaacctgaagctcggtatccatgaggactcccaaaacagaaccaagattgctgagttgctccgttaccactcaaccaagagcggtgatgaattgac

SEQ ID NO: 84956 - DNA, 729 bp, Arabidopsis thaliana columbia
  unsure (1)..(729): unsure at all n locations
cagctctctacgactcactattagggaaagctggcacgcctgcaggtaccggtccggaattcccgggtcgacccacgcgtccggttctctacatggttgacgctatcgatgagtatgctattggtcagctcaaggaattcgaaggaaagaagcttgtctctgcaaccaaggaaggtctgaaactggatgagactgaagacgagaagaagaagaaagaagagctcaaggagaagtttgagggactctgcaaagtgatcaaggacgttttgggagacaaggttgagaaggttatcgtctctgaccgcgttgtggactcaccctgctgtcttgtaaccggcgagtatggctggactgcaaacatggagaggatcatgaaagctcaagccttgagagacagcagcatggctggctacatgtcgagcaagaagacaatggagattaacccagagaactccatcatggatgagctgagaaagagagctgacgcagacaagaaccgctaagtctgtgaaggatccttgtgcttctcctctttgagaccgcccttntcacctctggtttcagccttgacgngccaaacactttcggaagcaggattcacaggatgttgaagcttggactnagtatttnattaccgntgattctttttgaagcccgttgttnaaattncntccccctttaaggcggnttnnttnttcgggaaggtngcaaanttggngnatgtcgnct

SEQ ID NO: 84957 - DNA, 465 bp, Arabidopsis thaliana columbia
  unsure (1)..(465): unsure at all n locations
ctctttgacactaagaagaagcccaacaacatcaagctctatgtccgtcgtgtcttcatcatggacaactgtgaagacatcattcctgagtaccttgggtttgttaagggtattgttgactctgaagatcttcctctcaacatctcgagagaaacattgcagcagaacaagatcctcaaggtcatccgcaagaaccttgtgaagaagtgccttgagctcttctttgagattgctgagaacaaggaggactacaacaagttctatgacgcagcttttctctaaggacccggaagctcgggtattcctcgggggcttcccaaaacaaggacccaagtttgcggggtttcttccggtaaccacttaacccaagggcgggtgattgnatttgacccagtttaaagggcnttggggncaaaggttttnagggaagggtcaaaaccggtnttttttnnaataacttgggtg

SEQ ID NO: 84958 - DNA, 418 bp, Arabidopsis thaliana columbia
gggcacgcgcacgcggctttctaaggaccttcagatttactttgacaaagtcacggagtgggctttggcgcaatcgggctccaccctctgtagacaagcactcgccagcttggaaattgatcctggactccacccattagttccctttttcacttctttcatcgctgaagagattgtcaaaaacatggataattatccaatcttgttggctttgatgcgtcttgctagaagcctccttcataaccctcatgtacatattgagccatatctgcatcagttgatgccgtctattatcacttgccttattgccaagcgcttaggaagaaggtcatctgataatcactgggacttgagaaacttcactgccagcacagttgcttcaacgtgcaaaagggttggacacgtttatcacaatttg

SEQ ID NO: 84959 - DNA, 847 bp, Arabidopsis thaliana columbia
gcaggtaccggtttggtattcccgactcgacccacgcgtccgctggatgagaccgaagatgaaaagaagaagaaagaagagctcaaggagaagtttgaaggactctgcaaagtgatcaaagacgttttgggtgacaaggtcgagaaggttattgtttctgaccgtgttgtggactcaccgtgctgtcttgtaaccggcgaatacggctggactgcaaacattgtgaggatcatgaaagctcaagccttgagagacagcagcatggctggttacatgtcgagtaagaagacaatggagattaatccagagaactccatcatggatgagttgagaaagcgagctgacgcagacaagaacgacaagtctgtgaaggaccttgtgcttctcctctttgagaccgctcttctcacttctggtttcagccttgatgagccaaacactttcggaagcaggatccacaggatgctgaagcttggactgagcattgatgacgatgatgctgttgaagccgatgctgagatgcctccccttgaagacgatgctgatgccgaaggtagcaagatggaggaagtcgactaatttatcacacaaaagtcgactaaattattagcggtgttataagactatggttttctttttttcttttcgttaaaacttatgttattttggtgattatcttcacgaattttttctatggttttattgttgtgaagatatttctctgaactcggttttatgacaaagattctattatgctcaaaaaaaaccaaaaaaagggcggccgctctagaggatccaagcttacgtacgcggtcatgccacgtcatagctcttctatagttcccct

SEQ ID NO: 84960 - DNA, 2543 bp, Arabidopsis thaliana columbia
  unsure (1)..(2543): unsure at all n locations
nnnnnnnnnnnnnnnnnnnnnnnnnnnnnnnnnnnnnnnnnnnnnnnnnnnnnnnnnnnnnnnnnnnnnnnnnnnnnnnccacgcgtccgggaaaaagaacgatctagaagaaagaaaaaaaaaggaaaagaaacccttatggaggttcccacaccactctatatataataacatccttctcctaaatcccgcatcagtacttctctctgcaaattttgctctctttatctctcgatttgattcataaaccctagttcttagattttttttccgatcaacgacaatggcggacgcagaaacctttgctttccaagctgagatcaaccagttgctctccctcatcatcaataccttttactctaacaaggagatcttccttcgtgaactcatcagtaactcttctgatgctttggacaagattaggtttgagtccttgacagacaagagcaagctcgatggtcagccagagctcttcattcacatcattcccgacaagactaacaacaccttgacgattatcgatagtggtattgggatgaccaaggctgatttggtgaacaaccttggaacaattgcaagatctggaaccaaggaattcatggaggcgttggctgctggagctgatgttagcatgattggacagtttggtgttggtttctactctgcttacttggttgctgacaaggttgttgttactaccaagcacaatgacgatgagcagtacgtgtgggagtctcaggccggtggatctttcaccgtcaccagagacacctctggtgaggctcttggtagaggaactaagatggtcctttacctcaaggaagaccagatggagtacattgaggagcgaaggcttaaggatttggtgaagaagcactctgagttcatcagctacccaatctctctctggattgagaagaccattgagaaggagatctctgatgatgaagaggaggaagagaagaaggatgaggaaggcaaggttgaggaagttgatgaggagaaagaaaaggaggagaagaaaaagaagaagattaaggaggtttctcatgagtgggatttggtgaacaagcagaaaccgatttggatgaggaagccagaggagatcaacaaggaggagtacgctgctttctacaagagtttgagcaatgactgggaggagcatttggctgtgaagcatttctctgttgaaggacagcttgagttcaaagctatcctctttgttcccaagagagctccttttgatctctttgacactaagaagaagcccaacaacatcaagctctatgtccgtcgtgtcttcatcatggacaactgtgaagacatcattcctgagtaccttgggtttgtcaagggtattgttgactctgaagatcttcctctcaacatctcgagagagacattgcagcagaacaagatcctcaaggtcatccgcaagaaccttgtgaagaagtgccttgagctcttctttgagattgctgagaacaaggaagactacaacaagttctacgaggctttctctaagaacctgaagctcggtatccatgaggactcccaaaacagaaccaagattgctgagttgctccgttaccactcaaccaagagcggtgatgaattgaccagtctcaaggactacgtgacaaggatgaaggaaggtcagaacgatatcttctatatcactggtgagagcaagaaggctgttgagaactctccattccttgagaagctcaagaagaagggtattgaagttctctacatggttgacgctatcgatgagtatgctattggtcagctcaaggaattcgaaggaaagaagcttgtctctgcaaccaaggaaggtctgaaactggatgagactgaagacgagaagaagaagaaagaagagctcaaggagaagtttgagggactctgcaaagtgatcaaggacgttttgggagacaaggttgagaaggttatcgtctctgaccgtgttgtggactcaccctgctgtcttgtaacaggcgagtatggctggactgcaaacatggagaggatcatgaaagctcaagccttgagagacagcagcatgggtggctacatgtcgagcaagaagacaatggagattaacccagagaactccatcatggatgagctgagaaagagagctgatgcagacaagaacgacaagtctgtgaaggaccttgtgcttcttctctttgagaccgctcttctcacttctggtttcagccttgatgagcccaacactttcggaagcaggatccacaggatgttgaagcttggattgagcattgatgacgatgatgctgttgaagccgatgctgagatgcctccacttgaagatgatgccgatgctgaaggtagcaagatggaggaagttgactaaattatcacacacagtcgacttaatcattaggggtgttgagacattggttatctttttatcttttttttttttttatgttttcgtttgaactaatattttggaactattttctggagtttatttcttctatcgctagtattcgtgaagattttttctctg

SEQ ID NO: 84961 - DNA, 776 bp, Arabidopsis thaliana columbia
  unsure (1)..(776): unsure at all n locations
gcaaccacgcccgcaggaaccggnccggaatncccgggttgacccacgcgtgcgggcgaagcaaaaacaaaaatgaaaactactcatttctcttcctcttcttcttccgatcgcaggatcggtgctctgctccgtcatctcaattccggctcagattcggacaacctgagctctctttatgcatctccgacatcgggtggtacctgnggttgggtgnactctcatcttgttcaagctccagaggatcctattcttggggtgacagttgcatacaacaaagatcctagcccagttaagctgaatttaggagttggtgcttaccgaactgaggagggaaaacctttggttcttaatgttgtgaggaaagctgagcagcagcttatcaatgacagaacaagaatcaaggagtatcttcccattgttggattggttgagttcaacaagttaagcgctaagcttatactaggcgctgacagtcctgctattcgggagaatcttattaccaccgtggagtgtttgtctggtactgattctctgaaagttggaggagagttttttcctcaacattaccatcagaaagcactgcacatcactgaagcaagatagagggcccatccatacattatcacacttgctgctctacctgtgaaaacttaccaccactacaatcccgcgtcgcgtttcatgaacctccattgacaaaggctagtccttgagattgcccattatttcaagactgactttacttttcagagccattctatgctctacactta

SEQ ID NO: 84962 - DNA, 1677 bp, Arabidopsis thaliana columbia
  unsure (1)..(1677): unsure at all n locations
agctggcacgcctgcaggtaccggtccggaaatttcttcattcgtaaacaaacacacacgaagcaaaaacaaaaatgaaaactactcatttctcttcctcttcttcttccgatcgcaggatcggtgctctgctccgtcatctcaattccggctcagattcggacaacctgagctctctttatgcatctccgacatcgggaggcaccggtggttctgttttctctcatcttgttcaagctccagaggatcctattcttggggtgacagttgcatacaacaaagatcctagcccagttaagctgaatttaggagttggtgcttaccgaactgaggagggaaaacctttggttcttaatgttgtgaggaaagctgagcagcagcttatcaatgacagaacaagaatcaaggagtatcttcccattgttggattggttgagttcaacaagttaagcgctaagctcatactaggcgctgacagtcctgctattcgggagaatcggattaccaccgtggagtgtttgtctggtactggttctctgagagttggaggagagtttttggctaaacattatcatcagaaaacaatttacatcactcagccaacatggggaaatcatccaaagattttcacgctcgctggtttgacagtgaaaacttaccgatactacgatccagcgacgcgtgggttgaactttcaaggtttattagaagaccttggtgctgccgcacctggttctatagtgcttctccatgcctgtgcccataaccctactggtgttgatccaaccattcaacaatgggagcaaatcaggaagttgatgcgatcaaagggattgatgcccttcttcgatagtgcttatcagggctttgcaagtggaagtcttgatacagatgcgaaacctattaggatgtttgttgctgatggcggagaatgcctcgttgctcaaagttatgcgaagaacatgggactctatggagaacgagttggagctctcagcattgtatgcaaatcagcagatgttgcggggagagttgaaagccaactgaaactagtgataaggccaatgtactcgagtcctccaatccatggtgcatcaatcgtggctgtaatcctccgtgacaagaatttgttcaacgaatggactctggaactgaaggccatggctgatcgtatcatcagcatgaggaaacagcttttcgaggcattacgtactcgaggcactcctggagactggagtcacatcataaagcagattggtatgtttaccttcacagggttaaacccagctcaagtctccttcatgactaaagagtaccacatctacatgacatctgacgggaggataagcatggctggtctgagttcgaagactgtacctcaccttgcagacgctatccatgctgttgtcaccaaagccgtctgagaaactgaacaccaccatgacaccaaagcttcataataaagattttgttcttttctttctattatagcatttccggcagtgacaagataaatgtcgttactattattattgtttcatcccagtatcaataaagtacgcaagaaagcttttgtgctccnnnnnnnnnnnnnnnnnnnnnnnnnnnnnnnnnnnnnnnnnnnnnnnnnnnnnnnnnnnnnnnnnnnnnnnnnnnnnnnnnnnnnnnnnnnnnnnn

SEQ ID NO: 84963 - DNA, 496 bp, Arabidopsis thaliana columbia
gggaaagctggtacgcctgcaggtaccggtccggaattcccgggtcgacccacgcgtccgcccacgcgtccagaagaagactaactgtgttttttttttctttcctcgatgcctagatcaagcagatgggtcaatcagcgagctacctctaagattaaaaaatttatactctttttgggtgtagcctttgtcttctacctctacagatacccttcttcgccatcgacggtggaacaatcatccacttccatctacaacatttccgttaaggatattgaagggaaagatgtgagtttgagcaagtttaccgggaaagtgcttcttatagtcaatgtagcctctaagtgtggtctaacacatggaaactacaaagaaatgaacattctgtatgccaagtacaaaactcaggggtttgagatcttagcatttccttgcaaccaattttgtagtcaagagccaggcagcaacatggagatcaaagaaacccgttgcaata

SEQ ID NO: 84964 - DNA, 492 bp, Arabidopsis thaliana columbia
  unsure (1)..(492): unsure at all n locations
aaggngttttctgcgggagtcggatccttgtancttgggatacccagcatgcttgtttgngacattcccaacttgagtgccagtcagaccattaggcttcaactattcgggagagtatattgcttcagccagtgaggatttattccattgatattgctaatgtccaaaccgggcggacggtgcatcagattccatgtcgggcagccatgaacagtgttgagtggaatcccaaatacaatttacttgcatatgcaggtgatgacaagaatcccaagtataatactgatgaaggtgttttccggatatttggttttgagagctcgtaggaacagagcactgaatcgggaaacatgatacacaactccacttgattgttccttgttgagttagaaaaagtttatgtgcctagtgtacctaaatatgtattgtcagtatatcaagttggaataatcttacagtatcactaaatacattgaaagtttgcagttcaaa

SEQ ID NO: 84965 - DNA, 838 bp, Arabidopsis thaliana columbia
cagcactatacgactcacttagggaaagctggtacgcctgcaggtaccggtccggaattcccgggtcgacccacgcgtccgcattttctcaaactctctctaatccataaaaatggaagcagtaacggcgattaagccacttatcagagtcgctgctctctctggttctctccggaaaacctccttccatactggtctcctccgcgctgcgattgatttgacgaaagaatcggttccgggattgcaaattgagtatatagatatatcaccgttaccgttaattaacacggatcttgaagtcaacggtacttatcctccagttgttgaagctttccgacagaagattcttgaagctgatagtatcttgtttgcttctcctgagtataacttctctgtttcagctccacttaagaatgctcttgactgggcttcaagaccacctaatgtttgggcggacaaaccagctgctattataagcaccggtggaggttttggtggaggaagatcgcagtaccatcttcgacaaatcggagtcttccttgatcttcatttcatcaacaaacccgagtttactctcaatgcatttcagccacctcagaaatttgatgcagaaggaaaccttgtcgatgaagtgactaaggagaggttgaaacaagtccttctctcgttacaagcattcacacttcgacttcaaggtaagtaaatgaagtggattaattcttgatcatttgagattggtcgtgtgataaaaataatgccaattgttgtgataataaacagtgtataacactctatttctcattcatttatgttttaataaacgattggtgaactggtg

SEQ ID NO: 84966 - DNA, 400 bp, Arabidopsis thaliana columbia
ttttttttttaaagaaagatctttgccaaaaacttctgagttggttattacagatcattaagaatgctcgaaaaagaaattctcacgtccgtattgaaaaaccttcttcaagacactcagttctaagatcttccatgagaccctgaaacatagatggcatcgctcgtcacaagcagcatccacacctaagtgaagcatccttttcatgggatcagcatcatccacagtccatgcatacacctctgtgtttctccggagcggacaactctatctaattcttcatcgcaatcaggggatgataatctcccacaacccgtagctcccctcattctcagcaggctgtctctcgcccccagacaagggctcttaccatcacaaatgtctccccaccatagtatct

SEQ ID NO: 84967 - DNA, 400 bp, Arabidopsis thaliana columbia
ccggggcaagagaggttctaagaacatacgaccaaatcctctctagccgtacccccactaactcgatacggtccattaatcacgacaaggtttccgttgtctggcttccaccatcgtcgtctcgttggagacttttgagaaaactgtcggcgactcagctcttctcgcctcagcgtatcgaagccacgaaaacgttgagggagaacaaggtgaaggaactcgtgagctttcatgagtgaaagcagcgagagagaagaagctgttgatatatctcgtgctaccttcatcactgctcttaatatcatatcaaacattctgttttctgtcgatctcggtaactacgactcgaataaatccggtgtgtttcaagacacggggattggtgtcatggaagcttgtc

SEQ ID NO: 84968 - DNA, 563 bp, Arabidopsis thaliana columbia
  unsure (1)..(563): unsure at all n locations
aaacacaagtagatgtaatatatattatgaattcagtgaaacaatagttaaaactcaagttgatcaatcatcaatagcatgtgagcaataagtgtcaaaagagatacacatacacatcaaaccccaacaaatacattccttcatgtacactgattttacactacctcttcaaggaaatcatggatcataatgtctattggcatctaagcaagtccacttaacatatccatagtgtgttggcttctacgtctaaagccgttccccaaaaattcaagattgattgacgtattgaacaggaacaagtcccgccatcttcccatctcttccagggccgcttcttctttacgtaaaaccagccatcaacttcatactctatctccaattcctcttctgccgtcaagtttagctcatcatctcctcgtgctgtgaagcatagagcgtgttccaatcttggacagagttggggnggtctcacacngntcanaatcggacagccngggnaggtccaagtccgntggggcagaacgaagggggggctnnctatggggcngctcatgggggga

SEQ ID NO: 84969 - DNA, 490 bp, Arabidopsis thaliana columbia
  unsure (1)..(490): unsure at all n locations
aagcaaaacatacatcaaaacgctaaagtttaaacccctcgccatcatcagatcttcagacttctgaggatcatggacaaagtgatgagaatgtcttcagagaaaggagtggtgatcttcacgaagagctcatgttgttcttctgctacgccgttcagatcctgttccgtgaccttagggttcaaccaaccatccacgagatcgacaacgacccggactgccgtgagatcgagaaggctcttctccggctcggctgttccacggcggttccagctgtctttgtcggaggcaagcttgttggctccaccaatgaagtcatgtcccttcaccttagtggctctcttgtcccattggatcaaaccctatcagtccatcctttactagcaaaattaaaccaactcaatatataatatctaattattagctagtgagaataaacacagttacagctagagtgtgagctagctagatattcagtngaaagtcgtct

SEQ ID NO: 84970 - DNA, 307 bp, Arabidopsis thaliana columbia
actcttcatagaatcagcggatagacctggactattagttgagctggtgaagatcatttcagatatcagcgtcgctgtttgaatctggagaattcgacaccgagggtttgttggctaaggtgaagtttcatgtaagctacaggaacaaagccctaatcaagcctctccagcaggtccttgctaatagtctgaggtacttcttgaggcgtccatcaactgacgagtcaagtttctgattatgcccatttttcaaaatctcaagtctcattcctcgtgactactatttttaccactttttttttttttt

SEQ ID NO: 84971 - DNA, 862 bp, Arabidopsis thaliana columbia
aaaataaatttgtattaaccactctttaaattcatcctctggatctgttgtactcgtatagagaaaaaatggcgtatcctgagagatctctcattgttgatcctagaagtggtttctgcaaatcaaactctacattctatagcaagcgccaaccattaagtctcccgccaaatctttcgcgtgacgtcaccacattcatctcctctcagccacaccgtggcaaaaccgcctttatcgacgctgccacaggccagtgcttaaccttctccgatctctggagagccgtcgatcgcgtcgccgactgtctatatcatgaagtcggaatacgaagaggcgacgtcgtcctcatcctttctccaaactccatcttcattcccgttgtttgcctctccgtcatgtctctcggcgccgttttcaccaccgccaacactctcaattcttccggtgaaatctccaaacagattggcgccagtaatccaactctcggcggcactacgcgccagctggcaccaaaactccccgtcgctatctccgtcgttctcaccgacgacgaagtttaccaggagctcactagcgcaatcagagtcgttgggattttaagcgagatggtgaagaaagaaccgagtgggcaacgagtcagggaccgagtcaaccaggacgacacggcgatgatgctttactcgtcgggaaccacgggaccgagcaaaggagtgatctcgtctcaccggaatttaacagctcacgtggctagattcatatcggatgatttgaaacgagacgatattttcatctgtaccgatccgatgttccacacctacggtttattgacctttgctatgggcaccgtagcattgggttcaac

SEQ ID NO: 84972 - DNA, 1444 bp, Arabidopsis thaliana columbia
aatgaattttggggtcaaattcatttcaactgattcaatcaattctcatgaattccatcttgtcaagcgtccttcctgctcccgaagatcctgttctcagtgtaatttttgcttgtagagatgatcctagtccggttaagttgaatttgagcgcaggtacctatcgaactgaggaaggaaagcctcttgttcttgatgttgtgagaagagcagagcaacagttagccaacgacctggacaaggaatatcttcccctcaatggacttcctgaatttaataaattaagtaccaagctcatcttaggtgatgatagtcctgcattgaaagagaatagagttgttacaacccaatgtttgtctggtactggttctttgagagttggagctgagtttctagcaacacacaacaaagaaagtgtcattttcgttccaaacccaacgtgggggaaccatccccgtatttttactttggcgggtttgtctgtccagtatttccgttattatgatccgaagagccgaggactcgacttcaaaggcatgctcgaggatcttggcgctgcacctcctggagctatagtggtacttcaagcttgtgcgcataaccccacaggagttgacccaacattcgaacaatgggaaaagtttcgacgactagtgagatcgaaaagcttattacctttctttgatagtgcatatcagggttttgctagtggtagccttgacgcagatgcacaagcggttcgtatgtttgtagccgatggaggtgaatgtttgatagctcaaagttatgccaaaaatatgggcctttatggggagcgtattggctctcttacgatcgtatgcacatcagaagatgtcgctaagaaagttgagaaccaagtgctacttgttgtgaggcctatgtatcttacaccacctattcatggtgcatctattgttgccacaattctaaaaaacagtgatatgtacaatgactggaccattgagctgaaaggaatggctgaccgcataattagcatgcgtcaacagttatatgcagctctagaagctagaggaacacctggtgattggagtcacattattaaacatattgggatgtttacttttaccggattgagtgaggagcaagttcgcttgatggccaaagaatatcacatttacatgacttatgatgggaggataagcatggcaagtctaagttcgaagacagtgcctcaactcgctgatgctatacatgctgttgttactcgcatcgcctaattaaatttgcgattctgttcttttgttgtttaatttatgaacacaattagagaataaaactgcgttcttggtttacatttaataagatagcacaaagaagcaatattatggatgatattgtttctagttggtagtcaaacctaccaaaatgaggattgggacctttaaaccaacacagttttttt

SEQ ID NO: 84973 - DNA, 489 bp, Arabidopsis thaliana columbia
ctcaatctttttcgtcgtcaaaagccaaagctttttgcttttttgtcttaatgggtttcatctcttgcatctcatttccgacgatcaattcaagaattctatcgactcaccacttttccaagcactcgacttcagcgtcttcttcatattcacttaagtttgctttgagacgtcaggaggataaacccaaagtctcgttttttcttccattaacgtcttcgttaatggcgacccctattcaagcctcttcttcctccaccattggtgagaccagtgatggcttgaaggtccagtctcatgtttcaattggagcaaacgatctgctgattgttggaccgggtgttcttggacgcttagttgcagaacagtggagacaggaacatccagagtctcaaatctttgggcagacagtaacaacaaatcatcatggtgagttgtgagaatttgggtttcaaaccatctcttaaaggaaccgcatatgggggaaag

SEQ ID NO: 84974 - DNA, 527 bp, Arabidopsis thaliana columbia
  unsure (1)..(527): unsure at all n locations
nnnnnnnnnnnnnnnnnnnnnnnnnnnnnnnnnnnnnnnnnnnnnnnnnnnnnnnnnnnnnnnnnnnnnnnnnccacgcgtccgcccacgcgtccggaaacaaacacgagaagaaatacttctacaaaaggaaagaagaagataaaagaaatccttcaaaaagcagatgctgcagggacaacttctgatctctatatggcttacaaagggcctgaggaaaagaaagagagctcaaatgttgttcatgatgtttcgaaccagaacctgttacctgccatacctcaggctgttgaagccattgtggatactgaaccagtgaaaaatgaaccagaagactgggaagatgcagccgatgtttctacaccaaagctggaaactgcagataattctgtgaatgcaaagagaggttcctcagatgaggtcagcgacaactgcatcaatacagaaaagaagtactcccgggatttcctcctaaagtttgcaaaccctgggtactgctcttcctgagggattgaacgtttcgcctg

SEQ ID NO: 84975 - DNA, 582 bp, Arabidopsis thaliana columbia
aatacgacttctatagggaaacctggtacgcctgcaggtaccggtccggaatttccgggtcgacccacgcctccgttcttcttctcttgatcaccattgctattgcatatgctgcaactcctgcccaaccagtatttccatctgcatttaacgcagaagtctccacatatagaggaggacaaacaccagtttaaggggaatggttctatagcggggctctcaatgctgaaagatttgattgtgatatgattgatcacaatgaccaacctgttcatgaagcattttatgcacttcataatgaatcaactgagatatttgatgaccactgctggggggagcttctcatgcagaaaacttaacattggatccaaaccttttgttccatctctcaactggattcacttatactggattagatgttggccaaactcaatatgccaaccccggcatacaaatggataaacccctaccaactgataaaccaaaggttcctacatcaaaggactgtcaaaaacctccggtaaagaaaaaaatctttggcggaaaaatggatcatttaccctctggcgttgtaaggaagtt

SEQ ID NO: 84976 - DNA, 403 bp, Arabidopsis thaliana columbia
  unsure (1)..(403): unsure at all n locations
aacttaaccacaacctaatccacaaaagagttatagaatcatctgatggcgtctactgagaaccctgaccctgaaactggcaaatctgaaccgattcccgcgtcggctacaccaccaccctcatcagccgccagtttcctagattgtcgtaaaatagacattataacaagagttctgcttttttccgccactctgactgctcttatagtaatggtgactagcgaccagacagagatgactcagctccctggggtttcgtctccggctcctgtctccgccgagttcaatgactcgcccgctttcatatacttccgtgggttgctctcgtggtagctaagtttctatgcgctcatatcaacacctgtctncccctctctactcttgaaatctgaggtcactgcac

SEQ ID NO: 84977 - DNA, 781 bp, Arabidopsis thaliana columbia
  unsure (1)..(781): unsure at all n locations
atncatctatcatctatttgatttgtttaaggcttacattgagaatatcaaagaggagaaaaagaaggaatcagccgatgaggcagtcttcccatgtgtccttcagattttacctaactgtgtgttcaataagaaagacccaatagtccttngagttgatgtcatcgagggtatacttaagattggaacccccatttgcgtccctggcagagagttcatcgatattggccgaattgcctcgattgagaataaccacaagcctgttgactatgcaaagaagggcaacaaggtggcaataaagattgttggttcgaatgctgaagaacagaagatgtttggaaggcactttgacatggcaaggtgagctagtgagtcaccatatcgaggagatctatcgacatactaaaatctaactaccgggatgaattatcgttggaagaatggaagctagtagtgaaactgaagaacatcttcaagatacagtaggagattccaaatgtctactttggagcttgaaacaccctcacatgncttggttatgccgtgtctgcggccgatgccaggacaaatagatcggcctccctggttcctagccgggagaaccttccacaggagattttggaagnggggccagagaggttttggtttttgggttaattccctcccttttttnggccttccccccnggaaaggncggnaaatngggccaggaccnccagctggngaatcccngggggaaaanncctngggccttgggaaaccccaacncctttaaanggtt

SEQ ID NO: 84978 - DNA, 434 bp, Arabidopsis thaliana columbia
  unsure (1)..(434): unsure at all n locations
catgatgtaccaagaagcagcactcctctaagttctcctcttcgtctcttcgaatgtcgtcttatcggccccagtccgcgatggtttattaccaaacggcaacttcgagttgggtcctaaaccctcccaaatgaaaggntccgtggttaaggaacgaaccgccgtaccaaactggaacataatcggctttgtggagttcattaaatccggtcagaaacaagatgacatggtcttggtcgtaccgcaggttcctccgccgttagactaggcaacgaagcctcaatcttcccaggaaaatatcccgtcctaccctggccgtctcttcttcaataacggttcagcggcgcttcggaaccctgcgcgcaagacggggaggcttcaattatttcccgtgacggatgagtcaggtgtgatccctattcagacaatgtacg

SEQ ID NO: 84979 - DNA, 445 bp, Arabidopsis thaliana columbia
  unsure (1)..(445): unsure at all n locations
tgaaaataaagaacagtacagagcggaggaggttaggattcttctcatgcgccaccggaaacccaatagacgactgttggagatgtgatcggaattggcatctccgacgaaagcgtctcgcgaattgcgcgatcggattcggtcgtaacgctatcggaggacgagatggtcgttactacgtagtcacagatccatctgaccacgacgcggttaatccacgaccaggaacactccgtcacgctgtgatacaagaccgtccgttatggatcgtcttcaagcgagacaatggtgattactctaacctcaagagctaatcatgaacagctttcaaaaacaatccgatggaaagaggcgtgaaccgttgcaatccgccaggcgggtgcttgttatttacgngttcangtattttttcggnntanttatcannccntgggggttaaatgtt

SEQ ID NO: 84980 - DNA, 621 bp, Arabidopsis thaliana columbia
  unsure (1)..(621): unsure at all n locations
aagacatgggcaaaatggacacagctctacgttatcttcaagaggctttgaagaaaaatgagagacttcttggtcctgaacacattcagactgcagtatgctaccacgctcttgccattgcgttcaactgtatgggtgcattcaagctctcacaccagcatgagaagaaaacatacgacatacttgttaaacaattgggagacgatgattctaggacacgagactctctaaattggatgaagacgtttaagatgcgtgacttcagatgactgcacaaaagcagaaaggacaggcagctaatgcagccaacacgcaaaaggctatcgatctcctaaaggcacatccagacctgatacatgcgttccaaaacgcagctgctactgggaggacaaatgcactgaactctgctgtccttggggagactcaaccacggggcagaggttttaatgaaagagcactcgtgctcagctttaagttagganggaagcagctncaaaggggctnctggttcgcccccagggtggtgttccagttnaagcnttncaccggttttttagttcaaannntggtnaattccgccnagttttgntttngaaaggttngggnaacggggngggaaag

SEQ ID NO: 84981 - DNA, 716 bp, Arabidopsis thaliana columbia
gcggtcgcgcgggatcgattctcgtctctctctctttcatcgcagcgaataatccaaatcgaaagcaatttctctcgacgaagaaaagagaagcaatcggagtctgtggaggtaaagaagtacacgatcaaatttcaagtcagagtttcggggaaaaaaaaggaatgggggatcatctggtgagagctgaggaattcgagaagaaagctgagaaaaagctcaatggatggggaatattcggatctaagtacgaggatgctgctgatctgctcgaaaaagcagctaattcctataagctcgccaaatcatgggatcaagctggaaaagcttatctaaaacttgccgactgtcacttaaagtcagatagcaaacatgatgctgctaacgcctatgctgaggctgctaaatgctacaagaaagttgacactaatgaggctgcgtcttgcctagagcgagcggtgaatatattttgtgagataggaaggctcaacatggctgcaagatattacaaggaaattgctgagtattatgaatctgatcagaagttcgagcaggctattgcttactttgaaaaggcagctgaattctttcagaatgaagaagtgaccacttctgcaaaccagtgcaatctaaaggttgcgcaatatgccgcccagcttgagcagtatgagaaggcaatcaagatttatgaagacatagcacgccattcactcaac

SEQ ID NO: 84982 - DNA, 1289 bp, Arabidopsis thaliana columbia
  unsure (1)..(1289): unsure at all n locations
ctatcgggaaagctgtgtacgcctgcaggtaccggtccggaattcccgggtcgacccacgcgtccgaaaaagctcaatggatggggaatattcggatctaagtacgaggatgctgctgatctgctcgaaaaagcagctaattcctataagctcgccaaatcatgggatcaagctggaaaagcttatctaaaacttgccgactgtcacttaaagtcagatagcaaacatgatgctgctaacgcctatgctgaggctgctaaatgctacaagaaagttgacactaatgaggctgcgtcttgcctagagcgagcggtgaatatattttgtgagataggaaggctcaacatggctgcaagatattacaaggaaattgctgagtattatgaatctgatcagaagttcgagcaggctattgcttactttgaaaaggcagctgaattctttcagaatgaagaagtgaccacttctgcaaaccagtgcaatctaaaggttgcgcaatatgccgcccagctggagcagtatgagaaggcaatcaagatttatgaagacatagcacgccattcactcaacaataacttgctcaagtatggagttaagggccatcttctcactgctggcatgtgccacttatgcaaagccgatgttgtttccatcactaacgctctggagaagtatcaggatctggatccaacttttactggaacacgggaatgcaagttcttagcggaccttgcttctgctatcgatgaagaagacatcgcaaagttcacagatgttgtcaaggagtttgatagcatgactccactggattcatggaagacaaacaatgttgttgagggtgaaggagaagctcaaggccaaggagctagaggaggatgaccttacatagacatatttatccagagcgttgctttttattcattcccgggttgtattgtcactatgtccgttacttcatgtccgactcttctttgattttattgtgtctggttttgagttttaaagtttcttaagaggtttggtcaaattgggtttgtttggtatcgacgtctacaattgttctctgcgtctcgtcacttcatttatgggaactactcaagtctggagttttttttatattggttaaanatctgtggagagttttnttcgttcagcgattatttgatgcatcgagaggatcatgtctcgattatttgtttgcttttacgtctacatctatctaataaacgtgtgctttttcttcctgttaacgacaatttgtagtgttttgattaaaaaaaaaaaaaaaa

SEQ ID NO: 84983 - DNA, 575 bp, Arabidopsis thaliana columbia
ctttcccttaaaatcaacagacagaaagtgagtgttatagacttatagtgagaaagagataaagatagaaagaaaagagagaaaaagagagaatgagatttagtgatattttctgctcttctccggcatcaaccgccgtacgacatagtacacttcaccacgacggaaatgttaccggaggtcgcagatctttccaaagccacctccggagccaaaaccctagtaagaagaaggataaaactgtcccttgcttctcttccgagatgcctttaatccctattcctcgtcacttgagctgtagaaactcctttgaatctccaagcgggtttcgtccgaaaatcgcttcggctcgcggtagcgttgttcaaatccgccggaaaagctctgctgacgtaagtgacttgaggagatcaaggagttctctgctaagatcatcggccaggtatcttttaaaagatcataagtctttgaaaggtgatgataaggacctctggttatcatcggatcgttctaaagatttggattctttaccgcgaaccgcaacggtaacttcttcagcctcaacatcttcttcg

SEQ ID NO: 84984 - DNA, 400 bp, Arabidopsis thaliana columbia
cattcgttgatgaaatgtacaagaggctgaacgaaaccattcaagactatcaagttatcatttccagatggccagaatatatctttgttctggagagtgccattgctgatgttgaaaaggcaacagtggaagctctggagaagcagtatgcagatgtcttatcacctctcaaagaaaacttggctccaaaaaaactaagcttcaagtatgtccaaaaactgaccaaaagatctgtgattccatatgtagtcccggatgagctgggcattctattaaactccatgaagaggatgcttgatgttctacggcctaatatagaggctaaatttaaagcatggtcttcatgcattcctgatggtgggaatgcagctcctggtgatcgtctttctgaggtgacagt

SEQ ID NO: 84985 - DNA, 371 bp, Arabidopsis thaliana columbia
  unsure (1)..(371): unsure at all n locations
gactagttcttgagtttgacttgttaaacccctaaaaatagtacctataagaggcttctttttcaacttctcattcttcatttccggcgaagttatggaccgatcaacgccggaacataactcatctccctcacacaagcgtctaagcgtgagtttctcgtctcaatgatggttctctgcgccaggcatgcgaatcggctctcgaagaaactaaagctgaagtcaaagaagcgaacttgcagcggcggagagggtggaggagaaagattccgatggaatatgataagctcgtcgatgagttctcctcggccaaaagagttgttcacggctttaagcaacaaggcggtgaccatggtcccccggnaaaaacc

SEQ ID NO: 84986 - DNA, 575 bp, Arabidopsis thaliana columbia
cttacccttggctggcatagaggcgatactttcgtgcgatgatccccaaattgcttctgaggaggctgtttatgattctgtctggaaatgggcacggggacagtatagttcattggaagatcgtacagagattctgggttcacgccttgcactctacatccgcttcccatacatgacgtgtcgaaagctgaaaaaggtactaacgtgcagtgattttgagcatgaagtagcatcaaagcaagtattagaagcgctcttcttcaaagcagaagccccacacaggcaacgcatcctcgcagctgaaggatcggactccatgaaccgccgtttcatagagagggcttacaaatacagacccgtaaaagtggtggagtttgagcttcctcgcccgcaatgtgtagtgtacctggacttgaagcgagaggaatgcgcaggactattcccttcaggaagagtctattctcaggctttccacttaggaggtcaaggtttcttcctctcagcacactgcaacatggaccagcaaagctcgttccactgctttgggctattcctcggaatgcacgagaaagggg

SEQ ID NO: 84987 - DNA, 512 bp, Arabidopsis thaliana columbia
  unsure (1)..(512): unsure at all n locations
ctctcaattcttttactgtttattttctttgtaatcaacaacagtttaactcttcttcttcttttctttatcaagaacagtagtttctcaatncttgattatgatactaagcaagagacctcatctaatgatccgtaaattgtctgagatgttggttccaagaagcagatctgctgctattaaaccggaggagtacacggccagtccgagaagtccgttggatttgaacttcccctccccggttcactcgaagcggttcggttctggtggtgtcggtttggggattgttgctgcgttggaggaaactagcaacggggcttaaccggccatgatcccgtttcgttactccgcgagattccagggtgcccggaggattgatcttttcgggattgagggaatacactttttttttacggggcccaaaaagggggccggcccaaaggtntntttacaaacggncggccgggggtttaaaatttntntgnaaaaangntttttccgggggggttnna

SEQ ID NO: 84988 - DNA, 403 bp, Arabidopsis thaliana columbia
  unsure (1)..(403): unsure at all n locations
atcggcaggaatcttttatatgttatgtataataataattgagaatatggaaagagtatgtaagttttgtaaagcgtatagagcagtggtttattgtatagctgatacagcaaatctttgtttaacatgtgatgcaaaggttcattcagctaattcactctcgggacggcatttacgtacggttttatgtgattctggtaagaatcagccttgtgttgttcgatgttttgaccataaaatgtttctttnccatggatgtaatgataagtttcatggtggtggctcttctgagcatcgtagaagggatttaaggtgttatacggggttgtccccctgctaaagatttccccggttatgtgggggtttccggttatggatgacgctgaatgatgnttcgttagag

SEQ ID NO: 84989 - DNA, 558 bp, Arabidopsis thaliana columbia
  unsure (1)..(558): unsure at all n locations
ctagaaaggtcaaacccaaattctacaagtatccacattttccccaggtcccctgtcctataagttatcttcctctaacaaccggatcaattagcatccctctctcttctccccagtgataaaaacaggaccaatatcatgccctcgcaaactttatttatctcctcgggaagtaagctcctcaaggactgtctcttggatatcccaagctttctcaatctcctgaccataatgtccctgaaacgccgcttcccttctttattcggagggcacagcctattaaaaagagccttgtcgnattncagttccagatctctttagctattgatgttgtctatttatgtgtgtttcaggtgatttaacacatttcctcgatgatttgtgatccaactctgtttctcttttgttgttgcactctcatgttcccacttttgtctcaagtgttaaatcataaatttagtcctcagtaaaaaaaaaaaaaaagggcgaccgctctagaggatccaagcttacgtacgcgtgcgatgccacgtcatagctcttgctatagtgtcacct

SEQ ID NO: 84990 - DNA, 357 bp, Arabidopsis thaliana columbia
taagtaggatttgtgcagtaaagaagtaaaacgggatctgtcaaaagaaggaaaaagctctcgcttgcttggctagtatttatcattttgatgaaagtaactcttttttgttcaaagacttttagtgtgattttcaggaccaagggctttgagggtagtgctagctgtagtaatagtaatgaaggtgtgggatcgtgtttctggtttatgtaataaaggcacaaaaaacaaatgttggtcttatattatggttttgcctctcttaaaaaaaaaaaaaaaagggcggccgctctagaggatccaagcttacgtacgcgtgcatgcgacgtcatagtctatctatagttcgcctcaatt

SEQ ID NO: 84991 - DNA, 517 bp, Arabidopsis thaliana columbia
cagacacatcttcttcaatcgtcaaaccagaaatgaatcctccaccgtagatttttgttcatccaacggtccccagctgatgattgacattttgctctgtttcccactactagacttttgtgactcatgaaaggtaagtaaaaaggcattggagatggaatctaagtaggatttgtgcagtaaaaaagtaaaacgggatctgtcaaaagaaggaaaaagctctcgcttgcttggatagtattaatcattttagttctcttaacctattgatgttgtctatttatgtgtgtttcaggtgatttaagacatttcctcgatgatttgtgatccaactctgtttctcttttggtggtggactctcaatggtcccacctttgtctcaagtggtaaatcagaaatttagtcctcaataaaaaaaaaaaaaaaaggcggccgcttctaaaagattccagcctacggacggcgggccatcggcgttccatagcttcttctaatagtgtcaccataaatcaatccg

SEQ ID NO: 84992 - DNA, 441 bp, Arabidopsis thaliana columbia
gatgaatcctccaccgtagatttttgttcatccaacggtccccagctgatgattgacattttgctctgtttcccactactagacttttgtgactcatgaaaggtaagtaaaaaggcattggagatggaatctaagtaggatttgtgcagtaaagaagtaaaacgggatctgtcaaaagaaggaaaaagctctcgcttgcttggctagtatttatcattttgatgaaagtaactcttttttgttcaaagactttagtgtgattttcaggaccaagggctttgagggtagtgctagctgtagtaatagtaatgaaggtgtgggatcgtgtttctgaattatgtaaaaaaggaagaaaaaacaaatgttggtattataaaaaatattaatttaaaagggttagcccggccgctctaaaggatcctagcttacgtacgcgtgcat

SEQ ID NO: 84993 - DNA, 898 bp, Arabidopsis thaliana columbia
  unsure (1)..(898): unsure at all n locations
nnnnnnnnnnnnnnnnnnnnnnnnnnnnnnnnnnnnnnnnnnnnnnnnnnnnnnnnnnnnnnnnnnnnnnnnccacgcgtgcgcgcacgcgttcgcccacgcgtgcgcccacgcgtgcgtacggctgcgagaagacgacagaagggggaagaaaaacagatcaaaatagagaaatattgaaattcgtgcgttgagagaaaaacgttgaacgatgggagccggtaatggagaaacgccaaaacctacacagatttcaatttctaaagatcaattcctcgcttggaaacgccaaaaggatgctgagttattagccaaacaagctgaagcagcaaggaaacgacaagaggacatagcttcaggtcgtgttccaatgaatggtcgtgagcttttcttgcatgagccttgggttttcgacgatactcatcattgattctgggctattcactacttcttcataggtaacagagatcattcgactctcattagtactgctacttgcatctgagtttatgaattgggccaatggatctgcagaattgtgtgtgatctgatgaaaccattgttgtgtttttttgtttcatctcaagaaactagctaaagagatctgttactgcattatctattgatgttgtctatttatgtgtgtttcaggtgatttaagacatttcctcgatgatttgtgatccaactctgtttctcttttgttgttgtactctcatgttcccacttttgtctcaagtgttaaatcagaaatttagtcctcagtaattgtgacttaatcgttggctctgtttnnnnnnnnnnnnnnnnnnnnnnnnnnnnnnnnnnnnnnnnnnnnnnnnnnnnnnnnnnnnnnnnnnnnnctnnnnnnnnnnnnnnnnnnnnnnnnnnnnnnnnn

SEQ ID NO: 84994 - DNA, 533 bp, Arabidopsis thaliana columbia
  unsure (1)..(533): unsure at all n locations
atgattctccagctacatacgactcacttagggaaagctgctacgcctgcaggtaccggtccggaattcccgggtcgacccacgcgtccgcccacgcgtccggatcattcgactctcattagtactgctacttgcatctgagtttatgaattgggacaatggatctgcagattgtgtgtgatctgatgaaaccattgttgtgtttttttgtttcatctcaagaaactagctaaagagatctgttactggggncccaacccacgcagaccgctccttaaagtttacctggggttggggcttaaccacgtatcacttctttggggggctttaatgtttcatttagtctttttgggcccacccccaccctggcggattggcctcaaaatttttttttcacggaaacccccgggatggtttttagatttcctcgctgcccactgtttatatgtgctgtttattttatttggtggtctgtccatttcctttaatatttgccgcgggccgtttgttatttatctacattgttcgttttc

SEQ ID NO: 84995 - DNA, 380 bp, Arabidopsis thaliana columbia
  unsure (1)..(380): unsure at all n locations
gtaagaacatacacaaaggttaaaaatttgctccataacagaactggaataacatatgatgctgagggaagaatagatatgagtgatgattggtggaatgancgcattaaggaatggcctgcagctataaagtatagaaacaagcttgtaccaaacatggatgtgtttagagaggagttttgtccaaatcttgttactggagcagagggatggagcgcccaacaaggagaaacaagcttagattctagagttggtccagaaaatgatgatgaagctgattcatttatgccaccaccaccaccacaagcaccagctgtaggatcacagattagagcgggaagttcatcacagttaagagcgggaagttcagggtcaaaaag

SEQ ID NO: 84996 - DNA, 414 bp, Arabidopsis thaliana columbia
  unsure (1)..(414): unsure at all n locations
ggccgacccacgcgnccgaacnacaagctccaaaagcnnncnccnncnatttttctcttatcncnannncgtacggaggggtgtaaccgttgcgatggagattgaccctcgagatcgtacttccggtgaacgaccgatcattatggtcaccaacgacgacggaatagacgcgcctggccttcgttctcttggtcgtgtcctcgtctccactaacctcgacgatgttcgcgtttgcgctcctgattcggagaaatctgctgttactcacagtataatatggagtagaccactcactgcatcacgagttgagatccatggagctactgcttattctgttgatggaactcctgcggagtgcactgggttgggctcatcggaagcactctttgcttcttgatctggcctggttctgag

SEQ ID NO: 84997 - DNA, 665 bp, Arabidopsis thaliana columbia
  unsure (1)..(665): unsure at all n locations
ccagctccaatacgactcacatatatggaaagctggcacgcctgcaggtaccggtccggaattcccgggtcgacccacgcgtccggaaatctgctgtaagtcacagtataatatggagtagaccactcactgcaaaacgagtagagatcgatggagctactgcttattctgttgatggaactcctgcggattgcactggtttgggcttatcggaagcactctttccttctcgtcctgacctggttctgagtggtataaacgtgggtagcaactgcggttataacatcgtctattctggaactgttgctggcgctcgtgaagccttcctttatgatgtgccttctgcctccatatcatatgattttgattggaaacgtggagagatgaatgctaatgattttgccctttctgcccaagcctgcttgcccattatcaacggcatactcggtgcaatcaagaacaaaactcaccctatgcaatgctttctgaatatcgatttgccgactgatattgctaaccacaggggatacaaactaactagacaaggtaaaagcatgggtaaaatgggatggagacaagtggaagaggaagcacangggccgaagatgttatcaacaatgacaatggatacagagtcaggagtagtctcatcagagaacgacaca

SEQ ID NO: 84998 - DNA, 1124 bp, Arabidopsis thaliana columbia
ggttactcttcggttcttttgagcctagagttgcgtattgtgatgctgctgctgcaatagatgatgattaccttggtgctatacggaaaatgtctgcggatgttttgcagcgtcaaccccttgcgtatatttctaggccccgcgtgcgcaatatccagccaaaaccagttctctcggcctttgagttcagggcacttgcaatgactacagtgagatcccttttgatgttttatttgcctcttttggagcctaaaacggcttcagaggatgatgatgatttcctaaacaatgctgcagaagaaaaccgccacacagacttgattgttcctcttaaaaagtcagcaaagcaaattgcccgtgagaccacagttgtgaccactcggagagtccttgaaaggctggctctgagttatgtctcacagcgtatggcatggaaacttctaaaggatgtgcctcagtcggctttacgcaaggctcaaagagggttgccgacacatgtatatatctttaaagtcagccaaacaactcttagaggtcacttcctgggaatcgcagcatcatgggtagttcaagtaggcattgaaatctacagatgtgtgttcccgaatgttaaacccgaggaagaagaagaagaggagaaagtcgagatatcacagcaagctaaggatctcggaaacaaagttgtgggtatcacagtacgatgtggcgcgtccttagtatttgctgccattggagccgggatatgttcttgccttatccgtccctccacgggccaatggatcggttgcgcgctgggagacttggctggtccgatggttgtttcggtttgcctgcagaagactcttcaagctgattattaagttcttgtgtggaaattgaattcttctacttgaatcttgatgatccaaatgaaatcatagagcttgttttttgtttctgaaatttcttattgtcttcactgaaccttaaaaacaatgatcaatagatttctcaaaatgtacctacttttgacaacagcacaataagtcaggtatttattttcctcaaaaaaaaaaaaaaaaaaaaaaaagggcggccgctctagaggatcccagcttacggacgcgtgcacacgaagtcacagc

SEQ ID NO: 84999 - DNA, 436 bp, Arabidopsis thaliana columbia
agaaaactaaagaaaagggggctctttgattcaaagatccaaactttgacaattcaaaatccaacatagaacacggatcaagctttcaaattcagacagagatatgtcgtgtgcatcctcatctggatcagaggaagacgatgagggtcccgatgctttccgttttttggtggatatcacgccgtgagaatcggagaccagtttgccggtggccgcttacattgctcagagaaagcttggttggggccaattctccaccgtttgggctttggcctatgatactcgccacttctaattatgttgctttggaagattcagaaagagcgcccttacaattttgggtcaaagcctgccaacttcccatggaaattcggaacctttccttccaacccttgcttgcttgactggggggattcccctcgcaaaatttcccaac

SEQ ID NO: 85000 - DNA, 404 bp, Arabidopsis thaliana columbia
  unsure (1)..(404): unsure at all n locations
actggaaattttattaacagatggtgccagatcagcctttgggaagcgtttgatatctgcaggaaaaaggttccagggcatgggacaatatgccaaagattgcgaaangatgatcacaactggaggggtcttatctgcaaaaacatcatctgtttcagtcagcaatgaatctaagtcaggaacaaggatgtttaagtttggggagcttcaagttgctgtgactccagagaaagcctacaccggagctgccattgcgttcatctacgggatactttcatggcaaatcagtcaagggatccgcagcataccagaggactcattgcagtatgcaaatggcaatgcattgctaatcggcaagtcttctaagaggggctcttctagctcttttttattggggcaaccgg

SEQ ID NO: 85001 - DNA, 849 bp, Arabidopsis thaliana columbia
  unsure (1)..(849): unsure at all n locations
gactgaacgtctgtgaagttcacgaccaaaccagtcttactctctcttaactaataatattgagatggcagacaatttgaatttggtgagtgttctgggagtcttattggtattaaccatcttccataatccgatcatcgtctacgccggcgagggtgttcccaacgtagctttgttcactttcggagactcttactacgacgccggaaacaaagtgtttctcagccaaaggaaagatcttccacaaacctattggccctacggaaaatcccgcgactaccccaacggcaagttttccgacggccacatcgtccccgacttcatcgctgatttcatctctattccgaatggagtactcccaccggtgcttaaaccgggcgttgatatttcacgtggagtcagctttgccgtcgccgatgcttctattctcggagcgccggttgaatctatgacactaaatcaacaggtggttaaattcaaaaatatgaaatcgaattggaacgacagctacatcgagaaatcactgtttatgatatacattggtacggaagattatttgaattttcacccagggccaaccccaattgcagacgcttctgctcagcaagctttttgtcactaacggttattaacccggttaaaggacggcaatcaaaattgttgtactcttttgggngcgngtaaaattcgngggttcaaatttgctagcacccattgggngtncttaccgntncgtaggncaaggntnnaaaaccggaaacgngtttttcgggnttgccnaatngttttggccaanaacattacgggaaantcgggccnattntaaaccggntttctaaaattaggntt

SEQ ID NO: 85002 - DNA, 588 bp, Arabidopsis thaliana columbia
  unsure (1)..(588): unsure at all n locations
nnnnnnnnnnnnnnnnnnnnnnnnnnnnnnnnnnnnnnnnnnnnnnnnnnnnnnnnnnnnnnnnnccacgcgtccgcccacgcgtccgtacggctgcgagaagcgacagaaggggagagaagacagaacaaaaaaaacacaagaacagggcaaggaaaatgtcggttttcctctgtttcctcgtcctcttacccctgatcttaatcttcttgaacgttttgaaaccttcgaaatataagcttcctccgggtccaaagaagcttcccatcatcggaaacttacaccaacgcaggacactacatccgaggaatcgccgtaatctcgccgaaatgtatggaccagtggcgcttctccaatacggattcgtccccgtggtcgcgatctcttcgaaagaagcagcagaggaagtgctaaagatcaacgatcttgagtgttgtagtcgaccagaggcggccggaatgagagcaactttttacaacttcaaagacatcgggatggcacccttcggtgacgagtggagtctgatgcggaagctctcggtggtcgagctcttcagcgtgaaaaagcttcaatctttcaagtatatca

SEQ ID NO: 85003 - DNA, 538 bp, Arabidopsis thaliana columbia
tgatctccagctacatacgactcactatatggaaagctgctacgcctgcaggtaccggtccggaattcccgggtcgacccagtttctctcttcgagcttccggaatctttggtgatcaccgaccggatctggacgaagaatctcgttaacaaactcaacaagcattctccaaagcttcctcctttttcttcaacgatcgtcattgcattgtaatttggagagtttagctacaaagtctgtcttcatcgaattaagatctatctgatttttctgggtggttctcatgtgtgagatttttgatgggtttagagttgtcggatatggaaggttcttcttatctttgatttgttttatatattaagcggcaaaatttgaggttgacttgagcgagaatctggattctttcgaggagtatttaatgttcctgagaattccctgtatttggcgcaagttttcatttttctgagtgttataaatttagaatcattactccccagatagagagagagggtgtaatctgaagaaagctctttgggga

SEQ ID NO: 85004 - DNA, 444 bp, Arabidopsis thaliana columbia
  unsure (1)..(444): unsure at all n locations
agacttcagagttgaagttgaagctataggtcacgttcgacataaaaacttggtccgccttctcggatattgtatggaaggaacgcagaggatgctggtgtatgagtatgttaacaatggaaatttggagcaatggctccgtggagacaatcaaaatcatgagtatcttacatgggaggcacgagtgaaaatncttattgggacagccaaagcgctcgcgtaccttcacgaggcgattgagccaaaagtggtgcacagagacattaagtctagtaagcattctgcttgttgacaaattcaattctaaaattttctgactttggncttgctaaactactttggtgctgatagnggttttataaccccctagngttttggggaccntncggttnnggagctnccnngntttncgattncggtctcttnnttngaaaagggtttttt

SEQ ID NO: 85005 - DNA, 629 bp, Arabidopsis thaliana columbia
gcgagctctatacgacttacttagggaaagctggtacgcctgcaggtaccggtccggaattcccgggtcgacccacgcgtccgggagactttgacttcttctgatgaactttcttctgcacttcttctcattaagcctccttgttaaaataatttgagatggcgataggaaacccagaagtagcaactatggggaaggagaacactgaagccgagtcctctaatggaaacgagtctcagttaagttctgacttaacgaagagtcttgatctggctgaagtgaaggaagacgaaaaggataataaccaagaagaagaagatggactgaaagctgaggcttcaacgaagaagaagaagaagaaaagtaaaagcaagaagaagaagagttctcttcaacagactgatcctccttcaattcctgttcttgagctcttcccttctggagattttcctcaaggtgaaatccaacagtacaatgatgataatttgtggagaacaacatctgaagagaagagagagatggagaggctgcaaaagccgatatataactctcttcgccaagcagcggaagttcatcgtcaagttaggaagtatatgagaagtatattgaagcctggaatgttgatgatt

SEQ ID NO: 85006 - DNA, 549 bp, Arabidopsis thaliana columbia
  unsure (1)..(549): unsure at all n locations
tnagtccgtcggatcccgggngccccngccgtcagttccctcatcaaaggaatactctgcaacttcactcctgatgagttctgtccagatcaagtccccggagctgtcctagaagagcttaatgctgcagagagcattggtgataggaagctatcagaagcaagcttcccttatgcagcttcttctgtttcttacatgcctccatcgaccatggatatagcagaaaaagttgcagaggcttcagcaaaattgtcaaggaatgtgtctatgatacagagaaaagggtacacaagcgacgaggagcttgaggaactggactctcctcttacatccattgttgacaaagcgagtgacttcactggttcagcgacttcaaatgcaagatacaagcttcttcgacaagtgtgggtttagtttggaaccaagtcgaactgtaagtagtatgtatgtggttggtgtttggtattgcaaagagaatttggttgacttataaaaaagttgacttcttcacctaaaaactcataaactcaaatcaaagcttctcgaaag

SEQ ID NO: 85007 - DNA, 498 bp, Arabidopsis thaliana columbia
  unsure (1)..(498): unsure at all n locations
ggggacaccgattctnaaagcacaagatgtgcccacgaaattttcagggaacaaaggtgaagctgttgttgaggcagagctagttgttgatggagtaagctggaatgtgacgtgtgttagtatgggcaatcctcactgtatcacatttggtaaaaagggtggaccgaatctgaaagttgatgatttgaacttaccagagattggtccaaagttcgagcatcatgaaatgttcccagctcgaacttaacacagaatttgttgaggtcttatcacgttctcatttgaaaaatgcgtgtgtgggagccccggagcaggagcaactttggccttgtgggaacttggagcttgtcctctgggttgttgcagcaagtccctttgaaggtccgagccgacaggaaatgcacggtggatctaccgggcggaccatttggagatagagtggaaacaggaagncaaccatatctacatgacgggtcctgcagaagctgttttctatgg

SEQ ID NO: 85008 - DNA, 361 bp, Arabidopsis thaliana columbia
  unsure (1)..(361): unsure at all n locations
cgaaacacgcgaccgccaaaataccagtttccatgttaggatcagaaaacagagcactccgaagtccgatgatgtctacctaaagcttctcgtcaagctttaccggttttctggtgaggagatctaacagcaacttcaatgctgtgattctgaaaaggcttttcatgagcaaagtcaacagagctcctctttcactctctaggcttgtagagttcatgactggcaaggatgacaagattgctgtgttggttggaactatcactgatgatttgagagtccatgagattccctgccatgaagggttacctccctttaaggttttccttangaggggctaggggctagaattttaggaaaacct

SEQ ID NO: 85009 - DNA, 601 bp, Arabidopsis thaliana columbia
  unsure (1)..(601): unsure at all n locations
nnnnnnnnnnnnnnnnnnnnnnnnnnnnnnnnnnnnnnnnnnnnnnnnnnnnnnnnnnnnnnnnnnnnnnnnnnnnnnnnnnnccacgcgtccgcccacgcgtccgtacggctgcgagaagacgacagaaggggggcggttccatcaccacaacgccggacgacaatgggtattgatctgatcgccggaggtaagagtaagaagaccaaaaggacagctccaaagtctgatgatgtctacctcaagcttactgtcaagctttaccggtttctggtaaggagaactaatagcaagttcaatggtgtgatattgaagaggcttttcatgagcaaagtcaacaaagctcctctttctctatctaggcttgtggagttcatgactggcaaggaagataagattgccgtcttggttggaactataactgatgatttgagggtacacgaaattccacccatgaaagtgactgccttgaggttcacaaaaagagcaagggctcccccctttgggaaaagctggaggtggaaatgcttaacctttgaccagttcgttttaaaagctccattgggccagaacacggttttttttaaaggacctaaaaatt

SEQ ID NO: 85010 - DNA, 666 bp, Arabidopsis thaliana columbia
  unsure (1)..(666): unsure at all n locations
cccacgcgtccgcccacgcgtccgcccacgcgtccgcccacgcgtccgcccacgcgtccggttggaactatcactgatgatttgagagttcatgagattcctgccatgaaggttactgccttgaggtttactgagagggctagggctagaattgagaaagctggtggagagtgcttaacctttgaccagcttgctctcagagctccattgggacagaacacagttcttcttagaggaccaaagaactcgcgtgaagcagtgaagcatttcggacctgctcctggtgtgccacacagtaacactaagccatatgttaggcataagggaaggaagtttgagaaagctagaggaaagcgaaagagtcgtggattcaaggtctaagaagatgttttctggtttcgttttgcttggtttaagtatcgaagttttggtagggaacgctggttcctctttaccctgttccagactttgttttaagttctgtttttctattctcaagacaattggatattttgctttgtcttttaatcttactactattagctgcaatgagattttatctagaatttggatttgatcagtatttggagttcatagtatcattatggtctatttcgtttnnnnnnnnnnnnnnnnnnnnnnnnnnnnnnnnnnnnnnnnnnnnnn

SEQ ID NO: 85011 - DNA, 884 bp, Arabidopsis thaliana columbia
gcaggtaccggtctggaattcccggctcgacccacgcgtgggcggccacaacgccggacgacaatgggtattgatctgatcgcaggaggtaagagtaagaagaccaaaaggactgctcctaagtccgatgatgtctacctaaagcttctcgtcaagctttaccggtttttggtgaggagatctaacagcaacttcaatgctgtgattctgaaaaggcttttcatgagcaaagtcaacaaagctcctctttcactctctaggcttgtagagttcatgactggcaaggatgacaagattgctgtgttggttggaactatcactgatgatttgagagttcatgagattcctgccatgaaggttactgccttgaggtttactgagagggctagggctagaattgagaaagctggtggagagtgcttaacctttgaccagcttgctctcagagctccattgggacagaacacagttcttcttagaggaccaaagaattcacgtgaagcagtgaagcatttcggacctgctcctggtgtgccacacagtcactccaagccatatgttcgggccaagggaaggaagttcgagaaggccagaggaaagaggaagagtcgtggattcaaggtttaagaaagttgttgccgccattggacttgattctggagtactgttgcttcttggttgctttcgtaatcggatttttgttagggaactctgttttttctttcctctttcagacatgctactaagtttgcttctactggattcatcgtgtggttattacacttgcagctttactatgttaaactaaaaagcggccgctctagaggatccaagcttacgtacgcgtgcatgcgacgtcaagctacttctatagtgcgtcctaa

SEQ ID NO: 85012 - DNA, 739 bp, Arabidopsis thaliana columbia
  unsure (1)..(739): unsure at all n locations
cnnnnnnnnnnnnnnnnnnnnnnnnnnnnnnnnnnnnnnnnnnnnnnnnnnnnnnnnnnnnnnnnnnnnnnnccacgcgtccgcccacgcgtgcgcccacgcgtccgcccacgcgtccgcggacgcgtgggtgaacaatgggcaatcactctggcactctcagtcaccgaaaactccaacgacgatgctagatcgggctctttcctctcgccgtcctcactccgacgccgatctctctgcttccggcgaatccggaaccgacgaatctaaaaccaaacgcccacacatctacctccttgcttccaatttcctttctcggatcggtcatcagtggtggccttgtctcattctcgctctcctcttcctcgtccttctcttcctcatctccgttgctttccattctcacagctttgtttgcatctcccgcttcgatcccgctgctcggatcgggtttttcggtcttgatggcctcgaatcggattttggtgccctaggtgttccttggtgcagatcgaaacatggaaaagaagttgagtggacatccaaagattttacttcaaggggctaggaggaggtttgtgcccggtaatatgaaacacggcccgttaaaggaccaatattgtatggaattgggtttttgatcaaaaggctttggggtatgggtcaattgnccctttgggtaaaagccaggtattnttgattntgggtggggcttttaagggaagtctcctttgggtnt

SEQ ID NO: 85013 - DNA, 894 bp, Arabidopsis thaliana columbia
  unsure (1)..(894): unsure at all n locations
ttctaagtacactctccgtcttctccaccgcgacagattcccttcagtcacttaccgtaaccaccaccaccgtctccatgctcgtatgcgcagagacacagacagagtctccgccattctccgccgcatttntgggaaagttataccttcttccgattctagatacgaggttaacgattttgggtccgatattgtttccggtatggatcaaggaagtggtgagtatttcgtcagaatcggcgtcggaagtcctccgagagatcagtacatggtcattgattccggtagcggtatggtttggggtcaattgtcagccttgtaagctctgttacaaacaatccgaccccggtttttgaacccggctaaatccgggggtcttacactggggtctcttgtggctcttccgtctgtaccccgtttgaaaaccccggttgtcactccggtgggtgccgttacgaggtcatgtacggagacgggtcttacacgaagggaacgttagctctcgaaacgctgacgtttgctaagacggtggttagaaacgttgcgatgggatgtgggcacccggaatagagggatgttttttggagcttgccggtttattgggtatcggaggcggttcaatgtcgtttgtgggtcaattaagcggtcaaaccggtggtgcgttcggttattgtttagtgagtcgtggcactgactcgaccggttcattggtattcgggcgggaagcgttgcccgttggtgcctcgtgggtccccttggtccggaacccncgggctccaagtttttactacgtttgggtcaaagggcccttnngagtaggaggcnnccggattccntnanccgatggnntttttaaccntnnntaaaaccngttaccgtgggttttgnttantg

SEQ ID NO: 85014 - DNA, 425 bp, Arabidopsis thaliana columbia
cccacgcgtccgcttttttaaaaaggattactactgtttacttctctgaatgcgttcactgcttcacccgtactatcttactcacatctccgtctcattctcttatccggcgcacggctctcgccgccatggccaccaccgcctcctcttccttgctcctcccttccatatctctcaacaatctctcctcctctaaaaatgcctcctttggcttcgccgccaagaatctcagccgatctaggatttctatgagcgtctctgctggatctcagagtactactgttcacgattctctgttcgctgattacaaacccacctctgcttttctctttcccggtcagggagctcatgcagtaggaatgggaaaagagtctcagagtgttggagcagctggagagttgtataagaaagctaatgatatctta

SEQ ID NO: 85015 - DNA, 686 bp, Arabidopsis thaliana columbia
  unsure (1)..(686): unsure at all n locations
agcccaagcgtccgggaaacatcacacattggtgacaaaaattcttaggaaaaccaattaatggaggtgcacaaggtggttgctccgccgcataagagcacggtggcaaagctaaagacaaaactgaaggcgcctttcttcccggacgatcccttaagacagttcagaggacaaccaaaccgtaccaagctcatacgcgccgctcaatacatttttccaatcctccaatggtgtcctgagtacagcttcagcctactcaaatccgacgtcgtttcaggtcttaccatcgctagtttagctattcctcaggggattagttacgcgaagctagcaaatttgccaccaatcgttggtctatactcgagcttcgtgccaccgctggtttatgcgggtcttggcgaagctcaaggagatctaggcagtggggaccagtctccatagcgtcgttaatcttaggatccatgctaaggcagcaggtcttctcccgtaagacgaccctggtctctttctacaggctaagccctctctgctacctccttgtgctgggcccctgtcgagcctctcttggattgcccagggtggggttaataataggctgtctacaaaagggcggtaataggggttatgggggggngagcataantggncntccaaaggtangggtggttggganccattccaagggg

SEQ ID NO: 85016 - DNA, 454 bp, Arabidopsis thaliana columbia
gaagcagagagagagagagtgtgagagagaaagcagcttcttcttcttctcctcctcttctcccttatgtggatttcaaatccttctctgctactctctcttcacatttctctaccaacattcttcttctgacactcaacacacacactgcaacttccacagctaaatctagcaacaccaagtcaaaatccgccactaacgatgcttcttcaaaacttctccaacaccattttccttctctgcctcttcttcacactcctctccgccactaaacccctaaatctcactctccctcaaccaacacccttccccctggattccgtcggtctccatggtcatcacgggggggtaaatggatctctttttgcaaaggaggcaactaaggtcaccatcatcatcctcatcatcatcatcctcctcatcatcattcctcttgccgtaccgggaacccaat

SEQ ID NO: 85017 - DNA, 474 bp, Arabidopsis thaliana columbia
gtaatgttgcaaccgtggatagagaagtggatggaggtcttgagactcttaatgtagacttacccgctgtgataacaactgatttgaggctgaaccaaccaagatatgcatcactccctaacataatgaaggcaaaatcaaagcctataaagaaaatgacggtgcaagatctgaaagtagacattaaatccgacatagagatcttggaagtcacggagcctccaaagaggaaatctggggttatggtttcttcggtggatgagttgatagataaacttaaaaatgaagctcatgttgtttgaacggaagaaacatttgtctttttcccattctgctacacacttctttcttcttaatctaccgttgctgttttcaggcaatcaaagtgggaggtaaattaaataaattcaacgtgtgggtccttcgcttattccagtaattccaatggtcttccactgtaaaaaaatccttcct

SEQ ID NO: 85018 - DNA, 1056 bp, Arabidopsis thaliana columbia
ggaatcccgctcgaccacgcgtcccgtcttcttcttcctcgcttaaacccattaattcaatttcttcatagccagcaataagatctggcaaattaaaccattccactatgcttcgtatagttcaaatcacgcttctttgtttcgttctcgccgccgggatctcgatctccgccgtgatcgccgagaatgaatctatagacgagatccttctagcgaatggattacctttggggctatttcctaaaggcgtgaaaggatttaccgttaatggcgaaacgggacggttctcggtttatttgaatcagtcatgccaggctaagtatgagacagagctgcattacgatgagattgtttcgggaacgataggttatgctcaaatcagggatttatcgggaatctcagcgcaagagctgttcttgtggttacaggtgaaaggaatccgagtcgacgtgcctagctctggtcttatattcttcgacgttggtgttcttcgcaagcaatactctttgtctttgttcgagacaccaagagattgtgtcgcggttcgtggcgatgccgagtttattggtgaaaacaaggttcagtcttcgatgttgccattgtatcaagtagatcaaactcttggaagaaacactgtttagcaggagttgaagaaatgttgttatactatacgagaaagatggaaaagatagatagatgctctcatctattcttgaagatactttctactgttttgatctcaaatcttaggcatgattcatggtcagatgcttcattctttcccttcccccatcccagtgttgtttctgcattgctttctccagattgcgagggtgacagaaccgagagaatctgtgagcggaagttagacggtaacaacgatgtcaggattggtttggaaaagatgttgaatgaatggctcagatttggttgaagtgatgaatgtttattattgtattctttttgtcttttgttctgttttgtacttttctcatgtaagcccagacataaataaacataatcttgtatttagccgaataagtgtgattataactc

SEQ ID NO: 85019 - DNA, 491 bp, Arabidopsis thaliana columbia
cctgcaggtaccggtccggaattcccgggtttacccacgcgggcgaacacccgtccggaaaattgcaggtacttcatcttatgattgcttcttcaaacactggttctgttatttatttcgtggctgcggttatagcgacttgcacaaggtggcatcattggtccaacgcattaggttttctactcatggcctttcccaaaattctggggctggcaacttttctcctgcttctctctttctggtatgtatattctcaatactctgatcatattgcgctgtccctgattattttatcttaataatgatctgagataagacaatgatgcttcttcatgttatagggtagatgtttgccatcagggaaatggagaggaggatgatgatgatgatgaagaaaatagcatccaacaagtgttgcttgaaaaaagcaagagcaagccagggtcttcgaatgcaagtgatccgagaaagtgttgctctttccatggtat

SEQ ID NO: 85020 - DNA, 566 bp, Arabidopsis thaliana columbia
  unsure (1)..(566): unsure at all n locations
atgatattgccnnnnnnnnnnnnnnnnnnnnnnnnnnnnnnnnnnnnnnnnnnnnnnnnnnnnnnnnnnnnnnnnnnnnnnnccacgcgtccgctcgatttcacaggcggaataaacaagttggatggactcggcaaaaagtatttcttctcatcccaaccaatttaggctctatgttattgttatatggttacagttattgttacttttcatggcgtgtatctgacacatccatcatgaaaattgcaggtacttcatcttatgattgcttcttcaaacactggttctgttatttatttcgtggctgcggttatagcgacttgcacaaggtggcatcattggtccaacgcattaggttttctactcatggcctttcccaaaattctgtttctggcaacttttctcctgcttctctctttctgggtagatgtttgccatcagggaaatggagaggaggatgatgatgatgatgaagaaaatagcatccaacaagtgttgcttgaaaaaagcaagagcaagccaggttcttcaatgcaagtgatcgtagaaagtgttgctctttccat

SEQ ID NO: 85021 - DNA, 478 bp, Arabidopsis thaliana columbia
agtagagccactggtgaaggactttggaagcagatggaagacagcgattgacttgatggacaaagacatcataactcccttcagtaactccttgtgtggtatggatattttcagagctgcattgacacaactattgccctattacacaagactcacagactgcatcaagaagatagatggtggatctgctctgaatagggatcttgtctccatccaatctatcatgtacgagatcaggaaatactccaagactttctgaaagatagcatatgtggctccttaatgaagagtatgtaagataagtcaaaattttcaaagtgaatctaaagccagtattatgggtcagtaatgtatctatcttcaaaccagtaagagttcctctaatgtcttctttgctaaatctcacatacttgccatatgttgatcattcataatgacaagcacgtctcgttttaagagccattcgttacattgacat

SEQ ID NO: 85022 - DNA, 571 bp, Arabidopsis thaliana columbia
  unsure (1)..(571): unsure at all n locations
gcaaattgaatgatctgtgattttgggctggctcgcgtttcttttaacgatgccccaaccgctatattttggactgattatgtagctactcggtggtatcgtgcccctgaactctgtggatcgtttttctccaaatatacccctgcgattgatatctggagtgtcggttgcatttttgcggaaatgcttttgggtaagccttttgtttcccgggaaaaacgttgtgcaccaattggatctaatgactgactttcttggtactccacctcctgagtcaatttcaaggattagaaatgaaaaggcgaggagatatcttagcagcatgaggaaaaaacagccagtccctttctctcataaattccctaaagctgatcctttggctcttccgccttntngaacgcctgctttcctttnatncgaaagaatcgtgcatcagctgnagatgcactagctggtnccatatttcaantgggttgtcaaattcagnggngtgacccaacaancanaagccaatttcaaaaggctngaattttnactttgngggaaanaagtttgttaaanatgnttncag

SEQ ID NO: 85023 - DNA, 390 bp, Arabidopsis thaliana columbia
ggacaagtcgaaaaggaaacaattagacagttgcaaggcaaagagacaggactccgtgaacacggtgagttcatcaaagtccgactcatcccatatagagagctctggcgcaaaacagctgacgctaaggttcttatgagcattggtctctatgaaatggctcagcgagagggtcttgtgtccagccagagactgaaacccaactcttgatcgcctacaattctctgaaatatacaataactggattcagtcaaccagatgcgatagattgagattaggacgttcttatggttgtgcaaaggagtttttagataaatgttatcgctttataacttggtaccatgacaacttgggaacttatctttagaaccaaaagattttgccaaaccc

SEQ ID NO: 85024 - DNA, 480 bp, Arabidopsis thaliana columbia
  unsure (1)..(480): unsure at all n locations
gacccacgcctccgcggacgcgtgagtgcctcttcctttttctttccttatatcgagaaaagcctctgcctcatatagagataactaaacagaacagagcaagaactatacagccataacaatggctgtcacaaaacttattctctttgcttctgcattacttctaacagctctatttatcggcgttaatgcatccaggtccaatgaaacatggcatgaacatgcagttgagaacccagatgaagtcgctgccatggtggacatgagcattcgaaacagcacagagcggagaagattaggttacttctcctgcgccaccggcaacccaatcgacgattgctggcgttgcgaccgcaaatggcagctccgtcgcaaacgtttagccgattgctctctcatcggggttttgggccgcaaacgnaaatngggaaggccctcgancgggtccggtttnttanggtcggtaaacccnacccttgg

SEQ ID NO: 85025 - DNA, 498 bp, Arabidopsis thaliana columbia
gctgccacgcctgcaggtaccggtccggaattcccggttcgacccacgcgtccgcccccgcgtccgcaaaaaaccgacaaaagcctctgtctcggacagggacagagaaacagaacagagcaagaacaatggctgttacacaaatacttgtcgtctttgcttctgcattactcctatcaatgttcttcactggcgtcgattccacaaggtctaatgaaacatggcatgaacatgcagttgagaatccagaggaagtagctgccatggtggacatgagcattcgaaacagcacagcgagaagaagattaggatacttctcatgctcaaccggaaatccaatcgatgattgttggcgttgtgaccggagatggcaatcccggcgaaaacatctagccaattgcgcaatcgggttcggtcgcaatgcaatcggcggtagagacggtcgttactacgtagtgagtgatccaaacgacgataacccggttaaccttaaaccgg

SEQ ID NO: 85026 - DNA, 382 bp, Arabidopsis thaliana columbia
  unsure (1)..(382): unsure at all n locations
ctacgtctgagaggaggtgcgaagaagaggaagaagaagacgtncacgaaacctaagaagattaagcatacgcacaagaaagtgangctagcagttctgcagttttacaaggttgatggaagtgggaaagttcagaggttgaagaaagagtgtccttctgttagttgtggtcctggaactttcatggcgagtcatttcgataggcattattgtgggaaatgtggaactacttacgtgttcaagaaggctgatgaagagtaggttatgtctttttgcttttggaanttagattgttttttttttaattcagatattttgagatggttttatactattgagggatggtttaattgttgcataatacattatattatctttgatt

SEQ ID NO: 85027 - DNA, 541 bp, Arabidopsis thaliana columbia
  unsure (1)..(541): unsure at all n locations
nnnnnnnnnnnnnnnnnnnnnnnnnnnnnnnnnnnnnnnnnnnnnnnnnnnnnnnnnnnnnnnnnnnnccacgcgtccggttacaatttatttcttagctttttaagttttatagcttatcctgtgaaagttttatagtaagttgctgaaattggtaattagttgagaggcaataacattgttggttaggcgtactgactaatttctagttttgccagaaatgaatgtcttctggtttctggtattcatcatgtgaattctgtaatcaattcgagtctctggacattttgttaaacaaaatcaaaacaagacattaattttgacctttggagacattaatctttgggtttgttttccaccggatgcagctttatgtacatgtggaaatctatgcatcaataccatgagactcagaacagcatcgtggagcaagtccgggggctcattaacagatcgggcaaaggcgaatcaacatctgagctacaccgacaagctacacgtgacttggaatcagctgtctcttcttggactccagtttcag

SEQ ID NO: 85028 - DNA, 2104 bp, Arabidopsis thaliana columbia
  unsure (1)..(2104): unsure at all n locations
taggtgacactatagaagatcttgacgtcgcatgcacgcgtacgtaagctcggaattcggctcgagcttcgataatcgattcaacgacgaggatacggaaacagtgaggtcagagtatgatttcttcgacacgaggaagcaaaagcagaagcagttcgaatcaatgagaaatcaggtggaggaagagacggagacggagagagaggaagtacagtgtagtgaatgggaggatcacgatcattacagcaccacgagctcctcggacgcagcggaggaagaggaagaagatgatgatagagaatcaatttccgaggtcgggacacgctccgagtttggatctacggtgagaagtaattcgatgagacggcatcatcaacaaccttcaccaatgccgcaagtatacggtggcgctgaacaaagtaaatatgataaagcagatgatgctacgatatcttctggtagctatagaggcggaggagatatcgctgatatgaagatggtagttaggcatagggatttgaaagaaatcatcgatgccattaaggaaaatttcgataaggctgctgcctcaggggagcaagtctctcagatgctcgagcttggcagagctgagctcgatcgtagtttcagccaattgaagaaaacggtgattcattcgagtagtttattaatcaacttgagctcgacatggacctcgaagccgccattggcagtcaagtataggatagacacgactgcgctggatcaaccgaacagttcgaagagcctttgttccactcttgaccgtctcttggcatgggagaagaagctttatgaagaaattaaggctagagaaggtttcaagattgagcatgagaagaagttatcacagcttcaaagccaagaatataaaggggaggatgaagctaagttagacaagacaaaggcctctataacgaggttacagtcactgatcattgttacttctcaagctgttactaccacatctactgccatcatccgtcttcgtgatactgaccttgttccacaactcgttgagctctgtcatggctttatgtacatgtggaaatctatgcatcaataccatgagactcagaacagcatcgtggagcaagtccggggggtcattaacagatcgggcaaaggcgaatcaacatctgagctacaccgacaagctacacgtgacttggaatcagctgtctcttcttggcactccagtttcagtagtttgattaaattccaacgtgacttcatacactcagttcacgcctggttcaagctgacccttcttccggtttggcaacaacacgccgccaatcatcacaaagagccgctcgatgcttacgccttctgcgatgagtggaaactcgctctagatcgtattcccgatacagttgcatctgaggaatcaagagcttcatcaacgttgtcacgtgatatccgaaaacaagccgatgacacaagataagaaagaacagaatcagcatcaaaagagcttgagaagaaggcttcgtcggttagaaacctagagagaaaatactaccagtcatactcaatggttggtgtcggtttaccagagtcaggacccgataaccaacacatgttagacgctcgagacccgttaagcgataaaaagtcagagcttgcggtttgccaaaggagagttgaggaagagatggtgaaatactcaaaggcaatagaagtgacaagagccatgactttgaataatctgcagacagggttgcctggtgtgttccaatctttaacaagtttctctgctttgttcatggagtctcttcaaacggtatgcactcgctcatactctatcaaataggacattatatattatatatatatatatattgatatgcttacagagtttacagtaacaattgtgaggtcagttattgtaatgttccttttttaccaagaaagtgttggatacatttctatttattacaaggagaatgtatataaacaaagttttgaaaaaaaaaaaaaaaggggcggccgctctagaggatccaagcttacgtacgcgtgcatgcgacgtcatagatttaatagtagtgtnnnnnnnnnnnnnnnnnnnnnnnnnnnnggc

SEQ ID NO: 85029 - DNA, 462 bp, Arabidopsis thaliana columbia
gtttgttgaggaagacaatggagactgcaaagaagcagaacagaggttttgaggatgggaaaaccacaagtggggaggaagtgaaagcgctcggggaagagatcgcggcgttaaaagcgaagataaagacgttagaatcggagagtgaaagtaaaggcaaagaattgaaaggtgcacaaggtgaaacagaggctttgagaaagcaacctgatgggtttcttatggagtatgataggttgcttgaggataatcagaatttgaggaaccagttggagtctattgggcatagtcctgagggaaagaagggtatgtaagagtaaaaactaaggattctgttttgtagagaaccaagtaactataggaaatgtggttttactgatttttccttcatgtaatatgcaatatcgtctcctcttttgaatgtattttactattatattgcaatctagtaagtttggaccc

SEQ ID NO: 85030 - DNA, 646 bp, Arabidopsis thaliana columbia
caaattcaaatttcgtatgaacaaaacataaattctcaagaaattaagttgtgcaaaaactttataaactcagaaaagagttgatctaatactaaagtcgaattacattttaaaaaggtacagaaatcaaaaactctagcacgaaattgtccctggatccttttgatgagctctatgaggatgtgtacctcctgtttacagatggtacctagtatcataaatctgtgttgcgggaaaaagacgggagaggcacggcttcttgaggccgtagtatcacgagcagaccgaacatcccgagcatcgagaacaagaagccatttcagaagcttgtagtaatgcgtgtggaaaagttagtgagaattcgtctgagaaatggagtccattcttatctgccatctccaccattacagttcctgttgttctcactcccacagttggtagttttatccggtattttccagggcggtcatagatctggctctgcgttatcctcctctctccctggtaattgcctggaaccaacagcgtcgtagtaacgttgtagggtgcttgtgaaccagatggatatctatatttatcaacgatctcgatctcagcccagaagtttttgccttcctcatcacggaaacctctggtcgaatgcgtg

SEQ ID NO: 85031 - DNA, 838 bp, Arabidopsis thaliana columbia
  unsure (1)..(838): unsure at all n locations
nnnnnnnnnnnnnnnnnnnctcactatatggaaagctggtacgcctgcaggtaccggtccggaatcccgggtcgcccacgcgtccgtcttcctttaccaaatcttttcttctttactctttttcatcgtcgagaaaaaatggagttggatcttacacctaagttgcccaagaaggtttacggaggagatggtggatcttactctgcctggtgcccagaggagttgccgatgctcaaacagggtaacattggagccgctaagcttgctcttgagaagaatggcttcgctgtccctcgttactctgattcctctaaggtcgcttatgttcttcaaggatctggaactgctggaattgttctcccagagaaggaggagaaggtgatcgcaatcaagcaaggtgattcgattgctcttccctttggtgtggtcacatggtggttcaacaacgaggatcctgagcttgttatcctcttccttggtgaaacccacaagggtcacaaagcagggcagttcactgagttctatcttactggcacaaacggtatcttcactggtttctccactgagtttgttggcagagcctgggaccttgatgagaacaccgtgaagaaacttgttggttctcaaaccggtaatggcattgtaaagcttgatgcgggctttaagatgccacagcccaaggaggngaaccgtgctgggtttgntttgaactgtttggaggctcctnttgnatgtagacatcaagggntggnngcagggncgtttttttttaacacaaagacccttccctttngttgggnaggttggnttggggntnntnttntccggntcggtcaaa

SEQ ID NO: 85032 - DNA, 470 bp, Arabidopsis thaliana columbia
ctcaatactaaatcaagaacattgtaccggataatctctggtcgtattattgcaaggaatgtgattacgctacgcatttacactcatgtaagaaagaggaagaggcaaagaaagaagatcaaaaaggagaaggaagtaaaaactcgatgaattcggagttagctgcaatgttagaggctcaaagagaagtggagaggatgcagattgagatgcatttggcgatgcaaagtgctttgatttcgaaaaaggcgaataaggcagctctcaattgcatctaattcgaagaagttgggattcttcaaattctctttacttgtgtctgtttttcttctttttgttgctttttcttgatttatgttgttgttgctcctgcaaacttttcatgttgttgttgttgttgttgtttttctgttaaattgttatctgaaataaaagaattatcagtttttttaaaaaaaaaaaaaaaaaaa

SEQ ID NO: 85033 - DNA, 574 bp, Arabidopsis thaliana columbia
cgtgtgggttgagaggcatgatattgacgaggaaactgcgttttcctttgttcttcgtttagctgacaagaatctccttactatagtgaacaatccgaggtttggcgatgtgcacattggctactatgatgtatttgtgacgcaacacgatgttttgagagacctagcccttcatatgtccaatcgtgtggacgtaaataggagagagcggttattaatgccaaaaacagagccagtgcttccaagagaatgggaaaagaataaagatgagccatttgatgccaagatagtttcccttcatacaggggaaatggatgaaatgaattggtttgacatggacctccctaaggcagaagttttaatactgaacttctcttcggacaactacgtcttgccaccatttattggtaagatgagtagactcagggtgctcgtgattatcaacaaatggcatgtctcctgcgcgtctacatggcttctccatcttttgccaatttggccaaacttgaggagtctctggctcaagagggtacatgtccctgaactcaccagcttgaaccattccactgaaaaa

SEQ ID NO: 85034 - DNA, 947 bp, Arabidopsis thaliana columbia
aaattacttctcccgcggatttaatttaatatcccctacaaccttaatccttatttatccattattccaccttttgccctcttctctgttttcccattgagcctaaacagagcaccaatttgattaacaattctcaagtccaatgttctgaagcagagtaccaatgaagtgacggcggctgttcatcggagaagaaaccacaagcttcttcaccgcttagaaaatcctcgtgatcctctgtttgctctgttttcacaaactgtaagaaactcccgccagtaaccgtcacaggcggcgtcaatcttccgttatcagaacttgtttcgtcgttaagaacggcgcttgaatcgcaactatcggaagatccagcctcgacaacggtggaattcggtagaaggtcacggaggtcagtgaagcttcgccggtagttacacccagaggaatgttctagaaactgcagaggagacgaaggaatcgaatccgtcttgtgaacttcctcttccttaacaccctccgtaatagctttgttgttgttgttatcttcttcaccgtttaccttagctttgattttactaatctcttggagaagggaatcattgtcacggcggagagaatcgaaattgtggcggagagaatcgtattgacccttaagaacaccgtaatctttttcaagctgttttgttttccaccgtgcacgacggttctgaaaccaaacagctacttgacgaggttgaagtccaagctcttgtgctaatttagttttcctctcaggttcgagtttattctcaagttcgaaattcttctcaagagctttgacttggtcaacttttaatcttctcttcttctccgatagacccatgtgcggacgcgtgggtcgacccgggaattccggaccggtacctgcaggcgtaccagctttccctatagtcaacgtatatacaaggcgt

SEQ ID NO: 85035 - DNA, 683 bp, Arabidopsis thaliana columbia
cccacgcgtcaggcaagaagcaggaggttcaagcaccaaccagattatggctttctgaagcaatatcttcagaaaacaaaataaagtttttatttgattttcttattaccatattatatactattaaataagaaattcaaagttttttttttccattctttctttcttccggaggagggagagtatgatatgggtctttcacgtgtgacattgatgagatgatgaattcaaattatatctcataccaaaaaaaaaacacaaccaagagaaagaggcgtaaccttctgatttctttcttttaagatatcaataaaatctttcacattttctaatttttaattcttttcaagattttgttgtctccttcaacaatccatcagaagtacgcagtttggtttccaggttaagtgcttacgacctgatcagaaaacaagggactatggaactcacgtgagccaaaaagaacactccatttcgatggagaattatccagaaacacagtttattcccggagattcaatgatccagaatgctatagtttcttactctggggcatcagccggctgagaaagaagaactgcagcttacaatgtctcagcctcacaggagaggcaagcattggtcatatttgggggagattcacaaatgcagaacattggtccagatttccgttcttggggaga

SEQ ID NO: 85036 - DNA, 334 bp, Arabidopsis thaliana columbia
  unsure (1)..(334): unsure at all n locations
cttagctactatgaatagatttattgacaaaaagaaaccaaggatacaaataacattccttnacaaggagatttctatctctcttaccctgggattgcttcgcatgtaaagcttattcaaactgcaaatcaaataacataaaggaaattacttaatagaattcataatattcatatcaatcaccttccaaacaaatcatctaattattcccaattagccccgttatctagatcggaatgtatgaaggataagttgaagtttatcgttgaagaaaagaaaccgcacggaggagatacgcgaataaggtagttgggacagagaggaaagctaaata

SEQ ID NO: 85037 - DNA, 589 bp, Arabidopsis thaliana columbia
  unsure (1)..(589): unsure at all n locations
ccggggnggcgttcncggcccaaaactccnttcgggaccntgncccnaaatgcctcacgtttgtacncncacttcaccgtttggtcgngcttgctncacgggtctaagggagaatgaggaganccatcncgttggcaaaccncgtttgggagtggtttccaagtgtaactctgccgtgtggaaatgtaacccgtacgattaagacncctaaggacggaccatggtccgattgtatcgaccgttaccctgtctttattcccgaagttgtcaagctctaaactgaaaacgtctttgaacggtttagtaacggtttgattttgtgttacggtttaggtttatttggtctcggggtttggtttaaaggggattgagaaatgggaagttagagagaagaaaaagcaaagcataaatgtttgtatttaattgctctgcatatacttaaatctctgcttttcatttggggtattttttagtttctcgtgctgtaattaataacttgtggtgtactcaaataagaagaggtctctctgtttaataataacccccttggggggtttgcttctttgttttaaagaggtaaaaaatttaa

SEQ ID NO: 85038 - DNA, 1156 bp, Arabidopsis thaliana columbia
  unsure (1)..(1156): unsure at all n locations
cccacgcgtccgcaaaaataccctaatcacattttgtaacaataatacaattatacattaaaactctccgacgatgcctcaggcaccgatgccagagttctctagctcggtgaagctcaagtacgtgaaacttggttaccaatatttggttaaccatttcttgagttttcttttgatcccgatcatggctattgtcgccgttgagcttcttcggatgggtcctgaagagatccttaatgtttggaattcactccagtttgacctagttcaggttctatgttcttccttctttgtcatcttcatctccactgtttacttcatgtccaagccacgcaccatctacctcgttgactattcttgttacaagccacctgtcacgtgtcgtgtccccttcgcaactttcatggaacactctcgtttgatcctcaaggacaagcctaagagcgtcgagttccaaatgagaatccttgaacgttctggcctcggtgaggagacttgtctccctccggctattcattatattcctcccacaccaaccatggacgcggctagaagcgaggctcagatggttatcttcgaggccatggacgatcttttcaagaaaaccggtcttaaacctaaagacgtcgacatccttatcgtcaactgctctcttttctctcccacaccatcgctctcagctatggtcatcaacaaatataagcttaggagtaatatcaagagcttcaatctttcggggatgggctgcagcgcgggcctgatctcagttgatctagcccgcgacttgctccaagttcatcccaattcaaatgcaatcatcgtcagcacggagatcataacgcctaattactatcaaggcaacgagagagccatgttgttacccaattgtctcttccgcatgggtgcggcagccatacacatgtcaaaccgccggtctgaccggtggcgagccaaatacaagctttcccacctcgtccggacacaccgtggcgctgacgacaagtctttctactgtgtctacgaacaggaagacaaagaaggacacgttggcatcaacttgtccaaagatctcatgggccatcggccggttgaaggcccttcaaaggcaaacattacccaacaattaagggtccttttggtcctnaccggggntnaa

SEQ ID NO: 85039 - DNA, 1273 bp, Arabidopsis thaliana columbia
  unsure (1)..(1273): unsure at all n locations
gcctgcaggtcccggtccggatttcccgggtcgaccacgcgtccgagcttcattctttcggggatgggctgcagcgcgggcctgatctcagttgatctagcccgcgacttgctccaagttcatcccaattcaaatgcaatcatcgtcagcacggagatcataacgcctaattactatcaaggcaacgagagagccatgttgttacccaattgtctcttccgcatgggtgcggcagccatacacatgtcaaaccgccggtctgaccggtggcgagccaaatacaagctttcccacctcgtccggacacaccgtggcgctgacgacaagtctttctactgtgtctacgaacaggaagacaaagaaggacacgttggcatcaacttgtccaaagatctcatggccatcgccggtgaagccctcaaggcaaacatcaccacaataggtcctttggtcctaccggcgtcagaacaacttctcttcctcacgtccctaatcggacgtaaaatcttcaacccgaaatggaaaccatacataccggatttcaagctggccttcgaacacttttgcattcacgcaggaggcagagcggtgatcgacgagctccaaaagaatctacaactatcaggagaacacgttgaggcctcaagaatgacactacatcgttttggtaacacgtcatcttcatcgttatggtacgagcttagctacatcgagtctaaagggagaatgaggagaggcgatcgcgtttggcaaatcgcgtttgggagtggtttcaagtgtaactctgccgtgtggaaatgtaaccgtacgattaagacacctaaggacggaccatggtccgattgtatcgaccgttaccctgtctttattcccgaagttgtcaaactctaaactgaaaacgtctttgaacggtttagtaacggtttgattttgtgttacggtttaggtttatttggtctcgggatttggtttaaaggggattgagaaatgggaagttagagagaagaaaaagcaaagcataaatgtttgtatttaattgctctgcatatacttaaatctctgcttttcatttggggtattttttagtttctcgtgctgtaattaataacttgtggtgtactcaaataagaatatttctctctgttttattatttttaaattggagaataaacttctttgttttaaaaaaaaaaaaaaaaaaagnnnnnnnnnnnnnnnnnnnnnnnnnnnnnnnnnnnnnnnnnnnnnnnnnnnnnnnnnnnnnnnnnnnnnn

SEQ ID NO: 85040 - DNA, 803 bp, Arabidopsis thaliana columbia
  unsure (1)..(803): unsure at all n locations
cgaggttaataagaaaattaactaagaggagagagtgacacacacaaaacaagagagtaaaaaagcttaaaatgttgaacaaaacaaccctacctctactactgcagtactactatacataacgcaacagagtaagaaatatatcagctaagtgaagtcaatgtccccctttacccttgaatgttggaatgcttttagagaaacacacatcgaatcaatcaggtactttacacgattatctctttcggcttttgaatcccttctctcaatttggtacaagaaccttaaggcaagccacagagaccaaccagtgattgatcgaatcagtttgtcactgtgtgctcctcgtcatcccgattcgtccagacactcttccagaaagtagctgagctgtgtttccctttgagaccgagagacgtcgggtcttactacctggttgtcctttatcaacaacacgcattgcagcaacttctttccccattacagctacttctcttcgcatcttctttgcctcaacgtccatcgcctttgttaatgtttcaaccttcttggccaacatntcaatcgcttcgtccttgtctctcaggctctgatctttttcatgcgccgcttttcttaatgttatgacctctttctgcagcagatcgtacaagacacctgggangctatcattatttgttgccttgtcagntgattcttcttccccttttattgagctaggcgattcgcctctgctagttccttcagaanacttgtggttcaaaggnaaattcgatctcggtccatttattagnactttgctt

SEQ ID NO: 85041 - DNA, 451 bp, Arabidopsis thaliana columbia
  unsure (1)..(451): unsure at all n locations
annaaatcntangaaacatnntnnnnngnaanattaacaaatcaatacaaagatgagtcaaagagttcgattctcgttaactcggtttgagaaattagtcttccaaaaacgcaataaggtacaggacatggtaaacagatcaatagccagcaaaactaaattaattcatgttaagggctatttagagtgaacctaattttcgggatgatttacggagaagctctagtaaagaattagcttttcgtttagctctctctgtaccgcctcttgatagttccatcaatgggaacaacagctccaagtctaccaatggacgatcagttttgcagtatccctcttgcaaagacacagtagtatcgcagctgcgttctctcggtttcgcggttgatcctcctgggaaaatctatcaaaggtggantgcgtggcccccaaancgngtttncgngnntgg

SEQ ID NO: 85042 - DNA, 552 bp, Arabidopsis thaliana columbia
  unsure (1)..(552): unsure at all n locations
nnnnnnnnnnnnnnnnnnnnnnnnnnnnnnnnnnnnnnnnnnnnnnnnnnnnnnnnnnnnnnnnnnnnnnnnnnnnnnnnnnnccacgcgtccgtttgtctatctccctcttccatctcacatacttatatatttcatgcatgtcatgtgtatatatttcatgagttttgtctagttcatagaactgatgaactgatttagagagagagagatatatagggaaatttagagagtggtttgtgtgctttgagattctttgtgtgtgtgtgtgtgattaattactattgagattgagatcagaatgaaaatctccaaatctctctggagtgttatgatttctattctcttctatcttacttctgctccaccatttgtgatttgctcatctcttgaagtcaccattgataaccattcaccaagcaatctcaagactaaaggatccctagaacaagataagttgagtcatcaaatgataaatagcataaagcttcatggcattctcttatgggtttccatgggctttcttatgccaggggggattctcttcattag

SEQ ID NO: 85043 - DNA, 504 bp, Arabidopsis thaliana columbia
tacggctgcgagagacgacagaagggtacggctgcgagaagacgacagaagggggagcattagaaatggaacagttttttgctctgtttaccatttttctatcttttgctttccccgggagatgcagcgacgttttcagcagatctgatttccccgagggattcctcttcggagctggcacttctgcttatcagtgggaaggagctgctgcggaagatggaaggaaacctagcgtgtgggacactctttgttactctcgtaacattggtaacggagatgtaacatgtgatgggtatcacaagtataaggaagatgtgaagctgatggtagacactaacttagatgccttcagattctctatatcttggtctaggctaatacctaatggaagaggctctgttaaccaaaagggtctacagttctacaagaacctcatcagcgaattaataacccatgggattgaaccacatgttacactgtatcactacgatcatcctcagtatc

SEQ ID NO: 85044 - DNA, 1206 bp, Arabidopsis thaliana columbia
agatatcaaaaccgaatattcttttattcctcacacacacataggaacacacctgaatggtgcatcacacgggataacaacaacacacattcaacacaaacatgacgaaattaaagacaataaaccaaaccaaacattcagagagacacaacacaaccacatcatcacacgtttctctctctctctttcctctccgtcgtctctctctctctagccaccaccaaaatccttaaaacctagacttttctcttccatcgatggcggctaataacagatccgatcatgggtcagacgaaaacacaagactttacaatccttaccaaaactacgaagtcccaatcaacaaatctcagtacctttacaagcttcctacctcccctgagtttctcttcacggaggaggctttaaggcaacgtagatcttggggtgagaatctcactttctacaccggaacagcttacctcggtggctccgttgccggagcttctgttggagtcatcactggagtcaaaagcttcgaatctggcgacactactaagctcaaaatcaacaggatcttgaactcttctggtcaaactggtcgaacttggggtaatcggattggtatcattggattggtttacgcagggatcgagagtggtattgtggctgccacggatagagatgatgtttggaccagtgtggtggctggtcttggaaccggagctgtttgtagagcggcgagaggagtgagatctgcagctgtagctggtgctcttggtggacttgcggctggagctgttgtagctgggaagcaaattgtgaagcggtatgtgcccatttgaagactgcaagagtctaattggcagactctttttcgggtcgttgttgaaatttttgataggggaaatggtgagaatttgataggtttggtatgtcttggaatcataaaaatgaaaactttatttggtttctagaggtacaacaagtctgtatgtcaagtcataatgcagtttcactttgaagaataacctgcaaacctttttcttatattcatactgattaaatgttttgccgattggtaatttaaaaacccgaattcgtgtttgttctagttagtgttttatgtttctgtttttgatcaatgttaactctttcttgattcgttgagaaactgatgtgttgtaccccatttgaaaatgaagctcttctctcaagttttttctt

SEQ ID NO: 85045 - DNA, 781 bp, Arabidopsis thaliana columbia
tacactacagacgagctatgacttcgcatgcacgcgtacgtaagcttggatcctctagagcggccgcccttttttttttttgttatcaaaaccgaatattcttttattcctcacacacacataggaacacacctgaatggtgcatcacacgggataacaacaacacacattcaacacaaacatgacgaaattaaagacaataaaccaaactaaaccggaaacaaagtaaacacggaacataaacatataagagctatagtaatcataatctgctgattccgaggggaaccgaagcttgccaaaggatcgaagttgcccaaacgagggataacaaaagacacatcaagcttgtcttcatcaaccttcatgcaatcttcatcgctccattcacacacaatcctcatcatcatcatcatcaccatattgataattatgatattggataatgatgatgatgatgatgatgatcatttacacaacacccacacacgaacattcacaatcataatctccaagagatctcttcttcttcttaccttttgtgagtactcttgtgtttggggccatcccataaagagaaacttgaacctctcaaaaccctttattggtgagatcttctgatagattcagagggttcttgagcttcagtttctttaggggatggccatattttgtgtgtttggtgttgtgccaaagagagtttcaacaatggatgttgttagggtttttatggcttctctctttgtctttggcggacgcctgggtctaccccggaatttcg

SEQ ID NO: 85046 - DNA, 588 bp, Arabidopsis thaliana columbia
gacatttcagtctcattccacctggtgcggaggatcttagcacattccctagcacatgtagcatcttcgctaaagtttaaagaagtggatcaagctaatggaggcatcgaatctgtaattaaaaaggtggataattacttggcggaaggaaaactagcagaagcagcagcaacactagaagaaggtgttaaaggaagtaaagcagaccaaatagtgagtgattgggtctcgcgacgtgcaatgaaacagagccattacagaacaagctcttacgcttctccaatccttatgcaacctgtgttagcctcacttgaatcccttccagatcttccattgaggtacattgcttcttcttttttttttaattcgatactgagattcctggagttaacaattattttgcgggaagtagtaccaactctttttctggtgaagaggaagaattacgattctctattccaatgtttatgttgaatcacagctgttcatgttatctgaattagaatgttaccagaaagtttgatacaaaaataagatcgaatctcacgaatttatgatttttgtctggaatgggatcaggagatgttg

SEQ ID NO: 85047 - DNA, 682 bp, Arabidopsis thaliana columbia
  unsure (1)..(682): unsure at all n locations
ccnaacccngggcaaatggttttttttcnnnnnttccgggnntccngggganttngcccccnaaaaancccaaaaaccttggggggttttnccaactggcccaagttaccgggccgaactcatgccnctgtaaaaggccagcctaaatnccaaaggtacacccctttgtttgtgtaaaatacattcttgaaacgaaaaaagcaccagtataaagaagatgagaactgagaagcatagctaaattaaaacataacaaagcaccacaaatcttcgatgttcagaattcagcatttacagaagacaaccattgtatctcttaaccatttagtagacataagggaaaatggcatgccgattagccggataattctcaaacttccggagataccaacggtgcgtttctccagccgcgtatgtcagattagcagccacaaaaccaaagagtaaccagatggttatatctgttcctccactcgcaatcagtaaacccgcatacaaaacaatttctgccaagaaatgtggagaagacaccatcccaaaccaatctccatacggaataatgtactctttcgcttggctcggattttcccggagcgatccaagaatggcgtgacagcggcgctgatgtatccatccccaaangaaaatggctccaccaatccactggagtganccaagcttc

SEQ ID NO: 85048 - DNA, 550 bp, Arabidopsis thaliana columbia
  unsure (1)..(550): unsure at all n locations
nnnnnnnnnnnnnnnnnnnnnnnnnnnnnnnnnnnnnnnnnnnnnnnnnnnnnnnnnnnnnnnnnnnnnnnnnnnggcaaaatcagaacaaaacgagtggagctccggcgtgtgggctcacttaaccgccgtacggcaacaatcgccgcttgttcagtgcatcaccaacttcgtctcgatggatctcgttgccaacacgcttttatccgccggtgcatctccagcgatggtccattccgtcgttgagattcctgatttcactcctcatattcacgcgctctgcgtcaacgtcggaacacttacacctgactggcttccgtcaatgaaagctgccgctgaactcgcttctcagctccgaaagccttgggttcttgatcccgccgccgtgagttgctccggattccgattaaaagcgtgtttggagctcatcgagctaaaacctactggaatcaaaggaaacggttctgagattattgctctctcctctgcttcacgtggacaaactaagggtgctgatagctcacatgaatcaacagacgctatagaagct

SEQ ID NO: 85049 - DNA, 649 bp, Arabidopsis thaliana columbia
accaagcgtccgggatgaaggttttagtgaagcacgtgttcttgcggaaatcactcttttgcctgacaagatccgtgttgcgtcagggagacgtgctgtggccatggccacaggtgttattgataggtactataaaaatggaactccccagaagcaggttgtggtcgttgttacctcaggttggtctgtgctctgctttgatcacaacctgaaaaagctgtgggaaacgaatctgcaggaggatttcccacataatgcacaccatagagagatagcaatttcgataagcaattacacattgaagcatggtgatacgggtttggttattgttggtggacggatggagatgcagccatataatcacatggacccatttgaggaacttggcatgacagcacaaaatgctgatcaacacagaagaagtgctactgagaatcaggcctctgaagattctggagccataaacttgcgtcacttttctgtctatgcatttgctggcaagactggccttcttcgatggagtaaaaagactgatgatgttgaagctcacacctcagatgcatcacaattaattccacaacacaattacaagcttgatgtgcatgctctaaatagccgtcacccaggagagtttgagtgcagggaattt

SEQ ID NO: 85050 - DNA, 573 bp, Arabidopsis thaliana columbia
  unsure (1)..(573): unsure at all n locations
aaacncatttccntgccctttaggaatgtcggcacccntnggcngaccttcaaccttccagcgncanaaacattagccanttnccgggaattnccattcccatgaaaccctgataancattttgnncgttncnccagttanngccccgagttctggcagatagtgaaagtgcttgaaccgtttgcgatatcactggaacgtgaaggggaaccctgaatctgtcttcgagcaagatctgtaaggacccaaggaaaggtctgaaacactggatccagaagcttggaccagtccacgcaggaggaggcggtggcagcagcagcagcggccattggtggctcagccttgccgaagcctaaattcgcttgagagacaggaaagagtctcttttgtaaatttatatataatacaaaaagaagggttttgtgtttgtgttgtatcctttttttttgtggattgttgttgttagtgatctttcatcgtcaatgtcatcttctctggatttgatgtgtaatgactgccaactggggaatggttgtgatttgatatttatgggattcaaatatcgtttctact

SEQ ID NO: 85051 - DNA, 584 bp, Arabidopsis thaliana columbia
  unsure (1)..(584): unsure at all n locations
cgaaccantcccccgggttccccgacccccaggccttggaacccttacccnccggagaaccccaaaccccggntgaccccctttcccgttttgggggtanaccccttttccgagnggncatggnggtttncccgtggaggnaaccccatttttccctttggggaagggttacttgtgacgagggtccatgattaatcagaagatgatgatgaaaaatcaccatcgtgcccaagtgatggaggaagagtccgttccgtggtgaaggttggataagtgcactggagaggaacatgtgtttagggttagggttccccgaggagaagccattattgaagcttaaattcaaatcttatagattattgggtacgttagagcaaagatgatcacctctgtgatggttcagacgagtgaaagtagtaattaagaggatgattagttattttgtataagtaattatattaagagagttttgattggctttggagtattttgtgnngtgagaagagtgaaaaagtctatgtttttcgagtaaatgactttttttgtaagtgtaaatatgaaatgatgtgttttggtttaaactt

SEQ ID NO: 85052 - DNA, 592 bp, Arabidopsis thaliana columbia
  unsure (1)..(592): unsure at all n locations
tctatacgcgctatttcaagaccaaaccttttctctcttctagagtgaaactgtggaagcaactctcacagagcagcaatggcggagaagtcgagcttcttcgttcatttcagctgtcttctgcttcttctaactatcataataacatgtggagagggagtgaggaatccggtgaggccaagatcatcggagagaagagcattgatggacggccaagatctctcgaggccattgaagctgacatttggtgggccttctcgtaattggactgacgctattcccatcggtaatggccgtctcggagccacgatctggggcggcgtctcctctgagattctcaacatcaatgaggacacaatttggactggagtaccagcagactacacgaaccagaaggcccctgaagcattagcagaagtgaggaggcttgttgatgaaagaaactatgctgaagctacttcagaagctgtcaaattatcaggccagccttctgatgttaccagattgtgggagattgaatttagagttgncagttcgatcggagacaccaagnccctatcgcgggaaccncttgaactgcgacnaagaagac

SEQ ID NO: 85053 - DNA, 447 bp, Arabidopsis thaliana columbia
  unsure (1)..(447): unsure at all n locations
gcaagnccttacatctattaatttttcgacaatcgagtaaaatcataaatcaaagctcggctacaacacagttccaaagaaaagaaaatatatgtttaacagagaaaaactgtccagagatgattgtatatatattcttttggttcttcaaatttagaacaaagatgtaaaggcaaattcagaaaaagtctctctctcttgatcaatgttttgtgaacattccatccatcaaggaagagaaatcaaagtctttgcctgattgtgaagatggtgtggtgcttgttggttgggttgcggatgatgactgaggtttaccggttgagtttggggtcataccgttcacttgattagcttgacccattgtgtagaaactggatgatgggtattgtagagtgttctcttgcggttgtgcgggtctcgtgttcatgtttgccgttcatattcatg

SEQ ID NO: 85054 - DNA, 2133 bp, Arabidopsis thaliana columbia
gggaatcatctgatactcttcttcttcccagcgtccgtcgattgcttcaatcatctatcggcgacgagctccatccggtttgtctcctaatcagaatctctgatttcccgatccggctaattcctcatcgtcggatcaattagattatcttatcccaaggagaggagtgtgtgtgaatcggagagagcgagagacagagagagagagagggaaatgaacggtggtgatgaggtcgtcgcagcttcggcagacccatctctgcctttggaatggagattctctcaggtcttcggtgaacgaagcgctggtgaagaagttcaagaagttgatataatctcagcgattgaatttgataattctggaaaccatcttgctactggggaccgtggaggacgtgttgttcttttcgagagaaccgataccaataatagcagtggaaccagaagagagcttgaagaagctgattatccactgaggcatccagagtttcgttataaaacagagtttcagagtcatgaccctgagtttgattacctcaagagtttggagatagaggagaaaattaacaaaattagatggtgtcaaacagcaaatggagctctttttctcctctcgaccaatgataaaaccatcaagttttggaaggttcaagacaagaagatcaagaaaatctgtgatatgaattcagatccttcaagaactgtacgaaacggaaccgttgcaagctcgagcaattcaaacattacaaactcatgccttgtgaatggaggagtatctgaagtgaacaactccttatgtaatgacttctcattgccagcaggaggcatctcttcgctgcgattaccagtggtagtaactagccatgagtcgagccctgtggctagatgtcgaagagtatatgctcatgctcatgattatcatattaattcaatctcaaataacagcgacggcgaaacatttatttctgctgatgatttgcgaattaatctttggaatctggaaattagcaatcaaagtttcaatattgttgatgtcaagcctgcgaaaatggaagatctatctgaggttatcacatcagcagaatttcatcctacccattgcaatatgttagcctatagcagttcgaaaggttcaattcgcctgattgatctgcgccagtcagctttatgtgattcacattcaaaattgtttgaggaaccagagcaagcaggtcctaaatcgttctttactgagataattgcttcagtctcagacatcaaatttgcaaaagaaggaagatatctacttagccgtgactatatgacacttaagttatgggacatcaacatggacgcaggtccagtagcaactttccaggttcatgaatatttgaaaccaaagctctgtgatttatatgaaaatgattccatctttgacaagttcgagtgttgtataagtggcaatggcttgcgagcagctacaggttcttacagcaatctgttccgtgtgtttggtgttgcccccggaagtactgagacggcaaccttagaagcaagcagaaacccaatgaggagacatgtcccaattccgtcgaggccatccagagcactaagcagtataacgcgtgtcgtaagtagaggatcagagagtccgggagtcgatgggaatactaatgctcttgattacacaacaaagctgctgcatcttgcttggcatccaaacgagaactcaattgcttgcgccgctgcaaatagcttgtacatgtactatgcttaactcaatactcagcaaaaaagaagaagaagcagaaaaggcgcatttccttgctctagactctgtttttcttggttccgtatggtttgattgatggggattgctatatacatcatcatgattgtcactcacacatgatctgtaatcatcatcgtggacttatgggaatggcatggggagaaggcaagcagtgaaaaaccaatcattttctctctttctttttttcgttttaagtgcagaatttttcacttgtgcacttggaaactactttacaggccaagaaaaaagaacaaagaaaatccgattggaagaaatcgtgattttagtaagctaatcatctcgtatgacttttggatggatatagattagatttttataatc

SEQ ID NO: 85055 - DNA, 573 bp, Arabidopsis thaliana columbia
  unsure (1)..(573): unsure at all n locations
annccncgccctnctatgggtnctccgtccggaatgactntccngattnanccgtttcggctcanaanatcnggctncttggattttatcaccggtttggggcctccttggatcattatgtctgagatatttccgataaatataaaagtttcagcagggtcaatcgttgcattaacatcgtggaccactgggtggttcgttagttatggtttcaactttatgtttgaatggagcgcacaaggaaccttttacatatttgcgatggtggggggattgtcattgctttttatatggatgctcgtgccggaaaccaaaggacagtcgcttgaagaattgcaagcatcccttacggggacaacctaaatacacatttacatctattggcagtgtctttgcaaacattatttacataataaagtacacaacctgctcttcatagtgattgatgtgtaaaccttttccttgcgaacattgtcgtatatatcctagctatattttttccataaaagaaaacataaaaaaataatccaattcgcaattaataaaacaaaacccgacattagatttgtcctt

SEQ ID NO: 85056 - DNA, 835 bp, Arabidopsis thaliana columbia
  unsure (1)..(835): unsure at all n locations
acgaactctagtggttggatttggtttaatgttgatacaacaattatctggagctagcggtatcacatattattcaaatgccatatttagaaaagctggcttttcagagagacttggatcaatgatatttggtgtgttcgtgatcccaaaagctttggttggtctgattcttgtggatagatggggaagacgaccactcctattggcttctgctgttggaatgtccatcggatccttgcttattgggggttagcttcacgttacagcaaatgaatctgcttcctgaattgatcccagttttcgtcttcgtaaacattctggtctacttcggatgttttgcattcggtataggagggctaccttgggtcattatgtctgagatctttccgataaatataaaagtttcagcaggaacaattgtagcattaacatcatggactagtgggtggttcgtgagttacgctttcaactttatgtttgaatggagcgcacaaggaacattttacatatttgcggctgtcggaggaatgtcattcatttttatttggatgctcgtaccggaaaccaaaggacaatcattggaagaattacaagcttcgcttacggggacatcctaaatgcacatttatattgtaatatactattaattttgtttggtaaaaagataaaatttattttctgttgtcagtcgcattgcaaataataaatgtattttgtaacattatttgcatattgatattaataatattttaaaaaaaaaaaaaaaagnnnnnnnnnnnnnnnnnnnnnnnnnnnnnnnnnnnnnnnnnnnnnnnnnnnnnnnnnnnnnnnnnnn

SEQ ID NO: 85057 - DNA, 389 bp, Arabidopsis thaliana columbia
gaaattttgatatgtgactcgcttttttttatcttattagaattgcaacgagaacatacaagtcgaaaatcatacataagccggcggataaacaaaaatccctagagacaaagaccaaaaggaggaaaagtaatccctaaaaaccagacgtgccaaattaccaagaaaggtaaaagcgacaagataaactcgcaaaaggaagagatggagaccaaagcactaagctgacctattgttccatagaggttctcactaagatttccaaaagaacacgtgaagcagcaataagactggtaatgccacaaaattaagacatctttctgaagtcaaaccgccaggtacgaaagcaaagaaccaaatgatactagagagacaacaatcacaccaat

SEQ ID NO: 85058 - DNA, 1228 bp, Arabidopsis thaliana columbia
aggcaaaggagcaaaaacgaaaccacagagagaaagcctccgtctcccttatcaaagaagaagaagacgtgtataacaaaacactagacacattgtgaagatagaaaaaaatggagagagcagcaattctcccgagtgttaatcaaaattacctactttgtccttcacgcgccttctccacgcgcctccactcctctactcgtaacttatcgccgccgtcatttgcctccatcaagcttcagcattcttcttcctctgtttcttctaatggtggaatctctcttactcgatgcaacgctgtttcgtccaattcttccagtacgttggtaactgaattagccgacatagattgggataccgttggatttgggcttaagccagctgattaccgggtcgacttacgcctacgcattcatggagagttctcaaaaggcgagttgcaacgttttgttaatattgaaattagcccatctgctggtgtactcaactatggacagggattgtttgaagggctaaaagcttacagaaagaaagatggtaataacatcctcctctttcgtcctgaggagaatgcaaagcgtatgagaaatggtgctgagaggatgtgtatgcctgctccaaccgttgagcagtttgtagaagctgtgacagaaactgtactaacaaacaaacgttgggttccaccaccaggtaaaggttccttatatgttagaccattgctaatgggaacaggagctgttcttggtcttgcgcctgcaccagaatatactttcattatctatgtttcgcctgttgggaactacttcaaggaaggtgtggcacctatcaatttgattgtggagaatgaatttcaccgtgcaactcctgggggtacccggaggggttaaaaccataggcaattatgctgcagaactgaaggcacagtccatttgcgaaagctaaagggatatttccgatgtttttgtacccttggattggcattttacaaaaaagatatttctttgagggaagggtcttcggtcctttggcaaaataatatttttcaattctcgcggaaaaggggaaccaaatgggtggaattacattcttaaactctcccccttgggaaaaaatttaaaagaagggggggacaactcccatatttttttaacccccccgggggtgatttttacccttctcgacacacaaaaaggctattttgaaataaaggaccgcttgtgggctttcg

SEQ ID NO: 85059 - DNA, 688 bp, Arabidopsis thaliana columbia
  unsure (1)..(688): unsure at all n locations
tgatgaagaagacatcaatgactggcttccataaacttttaaagctctctctttcagattcctctctatccatttcattaacaccaaaacctttttcttctctctaaccaaacaagaagaggactccattttcgcaagaatggggaggcttaagcaatgttggtcaagtctgctagtattggcagtgttggtgatcggaactggagccgttcccatcacttatctccaaagcgccgtcgctaaaggagccgtgtgtttggatgggagtgcaccagcttaccattttgacaaagggtttggttcgggtgttaacaattggatcgtccacatggagggaggaggatggtgtaccgacgttgcttcatgtaatgaacgtaagggtacaatgaagggttcttccaaattcatgaacaaagactttggattttccggtatcttgggtggcaagcaaagcactaacccagatttctacaattggaacagaatcaaagtacggtattgtgacgggtcatcctttaccggcaatgtagaagccgttaatccggcaaacaagctgttctttcccggtgcccgagtttttgggtccgggtggttcatgaaccttttggctaaagggtttaaaaccgtcaaaacggttttttctcccggttgttcaattgggattngnttcgatnttattnngnanttt

SEQ ID NO: 85060 - DNA, 375 bp, Arabidopsis thaliana columbia
  unsure (1)..(375): unsure at all n locations
tnaggttcctgttgcgtttgtggtgagatcgaaagattcaaatatatccgaagatgaaatcaagcaattcgtgtcaaaacaggttgtgttttataagagaatcaacaaagtgttcttcactgactctattcctaaagctccatcagggaagatattgaggaaggatctaagagcaagactagcaaatggattaatgaactagggtttatatgatccccgtatatgaatgcaatcttttcaggaaaatgnaaccaaatttcggttttgtggaccaagggatttaaccttcccggtaaaaggattatatttggccctttttccccttaaggggtgtaaaaggggtaaaaagngggnntccnttttttttnggggggg

SEQ ID NO: 85061 - DNA, 2121 bp, Arabidopsis thaliana columbia
  unsure (1)..(2121): unsure at all n locations
ccagctcccnnnnaacgggaacaaaggctggacctccaccgcgggggcggccgttctaaaactaggggatcccccggcgtgcgcgaattcacacaaccaaaaaaaccaaccttttttttccacctaaatctttgaatatcacaatatttactatttacaatggcgccacaagaacaagcagtttctcaggtgatggagaaacagagcaacaacaacaacagtgacgtcattttccgatcaaagttaccggatatttacatcccgaaccacctatctctccacgactacatcttccaaaacatctccgaattcgccactaagccttgcctaatcaacggaccaaccggccacgtgtacacttactccgacgtccacgtcatctcccgccaaatcgccgccaattttcacaaactcggcgttaaccaaaacgacgtcgtcatgctcctcctcccaaactgtcccgaattcgtcctctctttcctcgccgcctccttccgcggcgcaaccgccaccgccgcaaaccctttcttcactccggcggagatagctaaacaagccaaagcctccaacaccaaactcataatcaccgaagctcgttacgtcgacaaaatcaaaccacttcaaaacgacgacggagtagtcatcgtctgcatcgacgacaacgaatccgtgccaatccctgaaggctgcctccgcttcaccgagttgactcagtcgacaaccgaggcatcagaagtcatcgactcggtggagatttcaccggacgacgtggtggcactaccttactcctctggcacgacgggattaccaaaaggagtgatgctgactcacaagggactagtcacgagcgttgctcagcaagtcgacggcgagaacccgaatctttatttccacagcgatgacgtcatactctgtgttttgcccatgtttcatatctacgctttgaactcgatcatgttgtgtggtcttagagttggtgcggcgattctgataatgccgaagtttgagatcaatctgctattggagctgatccagaggtgtaaagtgacggtggctccgatggttccgccgattgtgttggccattgcgaagtcttcggagacggagaagtatgatttgagctcgataagagtggtgaaatctggtgctgctcctcttggtaaagaacttgaagatgccgttaatgccaagtttcctaatgccaaactcggtcagggatacggaatgacggaagcaggtccagtgctagcaatgtcgttaggttttgcaaaggaaccttttccggttaagtcaggagcttgtggtactgttgtaagaaatgctgagatgaaaatagttgatccagacaccggagattctctttcgaggaatcaacccggtgagatttgtattcgtggtcaccagatcatgaaaggttacctcaacaatccggcagctacagcagagaccattgataaagacggttggcttcatactggagatattggattgatcgatgacgatgacgagcttttcatcgttgatcgattgaaagaacttatcaagtataaaggttttcaggtagctccggctgagctagaggctttgctcatcggtcatcctgacattactgatgttgctgttgtcgcaatgaaagaagaagcagctggtgaagttcctgttgcatttgtggtgaaatcgaaggattcggagttatcagaagatgatgtgaagcaattcgtgtcgaaacaggttgtgttttacaagagaatcaacaaagtgttcttcactgaatccattcctaaagctccatcagggaagatattgaggaaagatctgagggcaaaactagcaaatggattgtgatggatgatttcaaccaaaaagcaaaagatgatttcaatgtgtatatacatacaactgtttgacccaaccaaggaaacaaactcatacgaaccattgtcttttgttgttgttgttgttgttgttgttgctgttcttgcttgattcatgtaatgagcctttgtgatgaaggtggtttcttttttggtttcctatcatgtaacttgtgctggagaaaacagcgcggccgcgaattcgatatccagcttatcgatgccgtcgaccnnnnnnnnnnnnnnn

SEQ ID NO: 85062 - DNA, 481 bp, Arabidopsis thaliana columbia
  unsure (1)..(481): unsure at all n locations
gaatctaaagagaactaaaaagctcatgagactattacttagaagagaatcgatcagatatgattttagcgcatcttccaagattccatctctcaatcctcgcgaaaccttctttctctctctcttcttcgcatttcagtttcttaaaccctaagccttcggtaacagtatctcgaacccttttctcattcgcgtctaaatcgaatctcgccactgttgaacccataccattatcggtctcagattcaaccgatttggatgatgcacctgccgagattgcgctcgacaagctttttattccgccggagaccgatatatccggtgaagactcggcgagtttaacgacgaggatacttaagggttcgaatattgtgctgagcaagtacgcggcgagggacgcaccagggtgggttcaggctgatttaatggtgaaggggtaggttcaaaacggggggnttttcccgcccnttggnttcccgga

SEQ ID NO: 85063 - DNA, 440 bp, Arabidopsis thaliana columbia
tttaagaaaggcaaatattgttgaagagtgtctctctctctacataatgctggatttggtttccttttcgataaaatattattgttgatattggaaaagattacaaattacatcaccaaactagactccatctaatatttggatacagctacatgaccttacaatttcacaaacagttctacagcaccaaagcagagaacatacttacagagatcatctaaacgccagcttctggtagctaagttcttcatctgtttcctatgcgaggctttgcaaaatgcggagcagtctcttctcgagctcaaccaaggtctcaaatctgcgcttagcttctttctgttttgtgcggtagaggtcactgtctttcggtatgttgctcatgggtcagccggaagcgtcgttggtgttctcgcaactctttgtgacttcattgcagtagg

SEQ ID NO: 85064 - DNA, 998 bp, Arabidopsis thaliana columbia
  unsure (1)..(998): unsure at all n locations
ctctatacgactcatttagggaaagctggtacgcctgcaggtaccggtccggaattcccgggtcgacccacgcgtccgcccacgcgtccgcccacgcgtccggtaggatacaagaagacagttgtaaattgaatacaaattcatcagagactaaggtaaagagcaagttttgttatggtgaaaaggaaaaggaaaggttcagtagaatactaagttgttatgttggatcatataatttccataacttcactacaagaacaaaagcagatgatccgactgcgaatcgtcaaatcatctccttcactgctaatactgtgattaatcttgatgggattgactttatcaagtgtgaagtcttaggcaaaagctttatgcttcatcagattcggaagatgatgggtcttgctgttgcaatcatgcggaattgtgcttctgaatcacttatccaaagtgctttcagcaaggatgtgaatataactgtaccaatggcgccagaagttggactttatctggacgaatgcttcttcacgttcttataacagacactttgaagacagtcatgaagaagtgtccatggaagcatacaaagaagaagctgaagcatcaaattgaagcatatctattctcatatcggcgctacagagcgaaaatacggaaatatggctctttggttacattccttgaactatagaaactatccagacctaaactttggcagctgtggacaaaacacagaccaagttcttgttcataagaaaattgatgaaagagcaagtcatagtctctaagcaaaatgatggaagcttagtttgaagattttgacattgtttttgttattgttggttaatcccaccatttttgtaactttttaatcaaattagtatatttttgtgttgtaaggtgacagtaatgaaaaaaaaaaaaaaaggtnnnnnnnnnnnnnnnnnnnnnnnnnnnnnnnnnnnnnnnnnnnnnnnnnnnnnnnnnnnnnnnnnnnn

SEQ ID NO: 85065 - DNA, 538 bp, Arabidopsis thaliana columbia
  unsure (1)..(538): unsure at all n locations
agctacnnnnnnnnnngtttcttcttcttcctctttgcatcagnttgttagtcatttttttaaaaaacttaccccttttagagagagaaagagagagaggaaaaggaagaggagagagaaagagagagagactgagacaactcatcagttgttgcggctcaaagagagatcgagatcgagatccacacgacggagacgagagagagagagagagagctcaacggtgatgggatcttggcttccccagtattgcttcctcttcatcttctactgtcactcccacaataccaatcacttttcctgatatcgttagctgcattttctccgaaactcactctcttctcctactcaggatttgaacttcttacgttttgaacccggctgctcagagtaacttgctctggtttttctttaaatcaccaaaatgggttcgagatacccatctcatcagctcagcaatgggctatttgtgtctggtcggcctgagcaacccaaagaagggctccaactatgagtgcagtagccctgccttacactg

SEQ ID NO: 85066 - DNA, 589 bp, Arabidopsis thaliana columbia
  unsure (1)..(589): unsure at all n locations
ccccccctcgattacgacggtatcgcataagcttgatatcgaattcgcggccgcgcggctcaaagagagatcgagatcgagatccacacgacggagacgagagagagagagagagagctcaacggtgatgggatcttggcttccccagtattgcttcctcttcatcttctactgtcactcccacaataccaatcacttttcctgatatcgttagctgcattttctccgaaactcactctcttctcctactcaggatttgaacttcttacgttttgaacccggctgctcagagtaacttgctctggtttttctttaaatcaccaaaatgggttcgagatacccatctcatcagctcagcaatgggctatttgtgtctggtcggcctgagcaacccaaagaaagggctccaactatgagtgcagtagccatgccttacactggtggtgatatcaagagatcaggagaattggggaagatgtttgatattccagcagatggggctaggccaggaagtctggncccatacaggngcccttcaaaggctgggcanttgagnatngcaatnagggcaggggccatgnatgggggc

SEQ ID NO: 85067 - DNA, 790 bp, Arabidopsis thaliana columbia
  unsure (1)..(790): unsure at all n locations
ggagaatctgttgggataaagaaactgagtttcagaccgtnattcacgaaaacgaggatctgaagccgaagnaggatgtttctctgaagnaagatcgagtagttaatcgaagttactcgaggaagcaatattggccaagaagcaaccggaagaagagaatggcgagctcagtgagagcgagaaagactatgatttgctaccaaaagtggttgagttttcttctgagaacggtcatagaagtgtagaagagaaatctgctaaagtcgaaacccttgatcacgaacctccacaagagcagatcagcaatggaaacagcaatggcaacggtatggaggagaaagaagtgaatggaaaacccgaggtggaaaccgaaaagaaggagaagaaagatgagtcccaagatgatgacaaagatgattcggttgaagttatattcaaaatgtgggaaagttgccaaatcgagaaggaaagaagcttttccggacaaagaaatcagaactagagtcacaagaaggaggaagagggttcaagcaaaatcgatgaaagcgacaaaacctcaacagagaacatcggtgaaaccggaaacgctttaaccgcagaagatcagctttcgatggggaagaagatcaagaagaagaagactttacttggtaaagttgggaatcttctcaagaagaaagcacctgtaaaccaggaataccaaactcttcgaggtaaggcgggaaaaaaaaggtaaatcttatccatgttaaaccgatttctggataccccctttttgnnttccaccngg

SEQ ID NO: 85068 - DNA, 493 bp, Arabidopsis thaliana columbia
  unsure (1)..(493): unsure at all n locations
gngtgttggttccgatagattttaaccaanatacaccaaaacaaatcagngaaaccattgattngttcattatttccatgtaangtacacgcttttatcacaacagtctcttcccacaacataaatggagagaaccaaagagtcaaaatccaaaaactaaaccggactagtcacattggtaagttcactggaatgggaagcataccacctgtttttagagcttggaagatgctggtttgtccaggaaccaaaccaactcgtcttcagcagaaacagaaccagcaggtggtacattcccagtcttctttaaagctgcctccacagcttcagctttcccagaaccgcaaacaactagagctacatgtgcagatgagttgatgaccgggaacgtgaaggtgattctctcagacggtggttttggagagtcagagattgaaactacccatttcttgctctcgttgcagagacccatgncccagggaattaattgatg

SEQ ID NO: 85069 - DNA, 852 bp, Arabidopsis thaliana columbia
  unsure (1)..(852): unsure at all n locations
aggacttggtnttaagaccnggggggtccnctaaggcggggggnccagaancggtntncccnggntgggggttgttggngcttncccccagttaggggggtgtatggggggcnccctaaaggngtgcttggagatgaagcttcanggaagcgttgaagtcactcactcccatggtggatcaggcattgggactgcgcttcttgctgcttctcactctctctacccttgaaggactcttaaaaacctaccccaaaggngcgccatttttcggtaatttactgaaagcttttcgctatcagaaaacgcctaagccaagttctaaggcgtcataaaagaaagcattccatgtttttactcttccccaagactttctttgtagcaaataagtttccttgggagaaatatttgttttcatgttcttcaaaaataaaagactcagttcttcagattctgggattttattataaccagatatgttgtaaaaactacaaattcaaagctcacttcactggagttctgagtatataaagatttcatttttcctcatcattgagtacacataaaactactgtgtatgaatctcatatgcgtacacaaaagtttacttcaaatcatgttttaccaacaaatgggtacacaaaagatcaaatctttacttcataacaacataaaatctccaacagatgcattatcagaaagtggaacagaacctaaatcaagagtcagatgattgaacagagacattgttgagacgttcaagagccaagagaagagcttgagtaccaagatcaccttcaccatgagccttaagagacaagtaaagctgttgagcatgagctaaaccaggcaaag

SEQ ID NO: 85070 - DNA, 2096 bp, Arabidopsis thaliana columbia
  unsure (1)..(2096): unsure at all n locations
ttgtttttgacgaaccagtgtgagtaatttagatcggtattagatccatcttaggtttctctaatttctctcaattcactccaaaattttgattatttcttctttctggcttgtcaattttagtcatttgtaatccttgcttttgcgatcggaatcgtaaaaatccgatctttcttttagattcgttttgtttttgattccaaatcggaaaaatgggtaaagtagctgttggagcgactgttgtttgcacggcggcggtttgtgcggtggctgttttggttgttcgacgacggatgcagagctcagggaagtggggacgtgttttggctatcctcaaggcctttgaagaggattgtgcgactccgatctcgaaactgagacaagtggctgatgctatgaccgttgagatgcatgctggtcttgcatccgacggtggtagcaaactcaagatgcttatcagctacgttgataatcttccttccggggatgaaaagggtctcttttatgcattggacctaggggggacaaacttccgtgtcatgcgtgtgcttcttggcgggaagcaagagcgtgttgttaaacaagaattcgaagaagtttcgattcctcctcatttgatgactggtggttcagatgagttgttcaattttatagctgaagctcttgcgaagtttgtcgctacagaatgcgaagactttcatcttccagaaggtagacagagggaattaggtttcactttctcgtttcctgttaagcagacttctctgtcctctggtagtctcatcaaatggacaaaaggcttttccatcgaagaagcagttggacaagatgttgttggagcacttaataaggctctggaaagagttggtcttgacatgcgaatcgcagcacttgttaatgataccgttggaacactagccggtggtagatactataacccggatgttgttgctgctgttattttaggcactgggacaaacgcagcctatgttgagcgtgcaaccgcgatccctaaatggcatggtctgcttccaaaatcaggagaaatggttataaacatggaatggggaaacttcaggtcatcacatcttccattaaccgagtttgatcacacgctggatttcgagagtctgaatccaggcgaacagattcttgagaaaatcatttccggtatgtacttgggagagattttgcgaagagttcttctaaagatggctgaagatgctgctttctttggcgatacagtcccatctaagctgagaataccattcatcattaggactcctcacatgtcggctatgcacaacgacacttctccagacttgaagattgttgggagcaagattaaggatatattggaggtccctacaacttctctgaaaatgagaaaagttgtgatcagtctctgcaacatcatagcaacccgaggagctcgtctctctgctgctggaatctatggtattctgaagaaactgggaagagatactactaaagacgaggaggtgcagaaatcggttatagccatggatggtggattgtttgagcattacactcagtttagtgagtgtatggagagctcactaaaagagttgcttggagatgaagcttcaggaagcgttgaagtcactcactccaatgatggatcaggcattggagctgcgcttcttgctgcttctcactctctctaccttgaagactcttaaaacctacccaaagagcgccatttttcggtaatttactgaaagcttttcgctatcagaaaacgcctaagccaagttctaaggcgtcataaaagaaagcattccatgtttttactcttccccaagactttctttgtagcaaataagtttccttgggagaaatatttgttttcatgttcttcaaaaataaaagactcagttcttcagattctgggattttattataaccagatatgttgtaaaaactacaaattcaaagctcacttcactggagttctgagtatataaagatttcatttttcctaaaaaaaaaaaaaaaaactaaattactcacactcnnnnnnnnnnnnnnnnnnnnnnnnnnnnnnnnnnnnnnnnnnnnnnnnnnnnctacct

SEQ ID NO: 85071 - DNA, 547 bp, Arabidopsis thaliana columbia
  unsure (1)..(547): unsure at all n locations
gaacacatcgagagagcttcttccaaaaacctcaaacgctcctcacacaacgggtttaggagtgatggggtctctcgttcgtgaatgggttgggtttcagcaatttccagcagctacccaggaaaagctgattgaattcttcggaaaattgaagcaaaaggatatgaactcaatgacagttcttgttctgggtaaaggcggtgtcggaaaatcatccactgtcaattctcttatcggcgaacaagtcgtccgtgtcagtcctttccaagctgaaggattgagaccagtgatggtttcaagaacaatgggagggttcactatcaacattattgacacccctggacttgtggaagctggatatgtcaatcaccaagctctcgagttaatcaaagggtttcttgtgaacagaacaatagatgtctttgctctatgttgatcgtttggttgtntatagngccgttggctggtaanaaanttgttttgnattccccaacctttggaaagggttttgggaaaacctgttntctncnangccaattccccccgt

SEQ ID NO: 85072 - DNA, 566 bp, Arabidopsis thaliana columbia
  unsure (1)..(566): unsure at all n locations
tcgatttttggcgttctccatctgtaatgtaatgtttctgcaaaaacaagtgacaataaaaactttttcatggatctgagattttctccaaatctatatttgtgattgtttcgtgtagtttttctcttaaagttgtgttctttaagctctctcgtgctcaatcttacgtttccctttggtttgatttcgtgtttttgttattcgatttcacctttaacttttatctaatctcttgtttttgattttgtaaattgtaaaaagtttctggtgattctcttagcgaatttgggaaactttatctgtattttnctgtttcgccgtagatttaggatccttaattaatgaatttntgggtttcaatattcctcgtctctgcaatagctggatcatgcttancttctgggntttgcttacggntgacggtttgcaatcacggnttcgaggggttccgatccgtgatcgagcaaaaatgtcctcggtctttgtatncaaggccncctatcgaggtagatggggncttccagacaaacncatggttgaaanccttggaatnccaaantcccacg

SEQ ID NO: 85073 - DNA, 483 bp, Arabidopsis thaliana columbia
  unsure (1)..(483): unsure at all n locations
ctaanctnnanccttgatctcccttgcnaggagnctggtcagagtnnctngggnccagctcaacgnttgccncttgcaagnctctagccnaacgagccctgaggtgtngcctnctcgatgacccaacaagtgctcttgatccgatatcgacagagaacattgaggatgttatagtgaaactgaagaagcagagagggattactactgtgattgtttctcacagtatcaagcagattcagaaagttgctgatatcgtttgccttgttgtcgacggagagattgttgaagttcttaaaccaagtgagctttcgccacgctacgcatccaatggcacagaggtttcttcaactcagttcttgagaccattttctcattgatggttcctgcaagttatttgctattttgcttgaatcttaataatctctttcaagagaggaacaaatgctggttgaatgtaacaacacctttcatggtttatgtctt

SEQ ID NO: 85074 - DNA, 1449 bp, Arabidopsis thaliana columbia
atgcacgcctgcgtaagctcggaattcctctcgagctgggttgatcaaaagttcgaaacttttttttttccggcaatggagggactagttccggtacagagacttccaattaaagtggcttcaccttctctgtatcggtgtaacaattctgtctcaatcagacgttcaatttcaggttttgccatggacaggaagataaactttagggctccgtcgcaattctcgatccgagctcaacagtcggatttgaaggaaagcttagctgtgtcttcttcatcagtagaggataaaggaaatgttcttagaatcaaggaatgggaagtagagatgtatcaggaggaattagctattagtcaaggtattaggataaggagaaaaccaccaagtaaggctcctttgggatactctggaccatttgagttgagattgcataacaatgatgctgattctcctcgtaatatcttggaggagatcacatggtacaaagacgtagaagtttcccggatgaaggagctaaatccgcttgacgtgctgaagaaagctgtagaggatgctcctcctactagggattttgttggggctcttaggatggctcataaaagacctggcttccctggcttgatagctgaggttaagaaggcttctccaagtagaggaatcttaaaagagaattttgacccggtcgagattgctcaagcttatgaaaaaggcggagcagcatgcctcagcgttttgacagaccagaagtatttccagggaggctttgaaaacttggaagcaataaggagcgctggtgtgaagtgtccactattatgcaaagagtttgttgtagatccatggcagatctactatgctcggactaaaggcgcagatgcagtactgcttattgctgctgtattggctgacctagaaataaccttcttgcttaagatttgcaagaagcttagcttggctgcccttgttgaggtacatgatgagagagagatgggtcgtgtacttggaatagaaggaatcgagcttgttggcatcaataaccgaagtcttgaaacatttgaagtggacatcagtaatacaaagaagcttcttgctcttgaaggagagcatggtagacaaatccgtgagagagacatgattgtggttggcgaatctggtctgtttacaccagatgacattgcctatgtacaagcagccggagtcaaagcagttttggttggagaatccattgtgaagcagaacgaccctgagaaaggaatagctggactttttggcaggaacatttctcatacttagagaccatatcataatacatctccaaatacgtttcctagtacatttgttttgtatcttgctctgtgagtattgaggaaagactagaaaggtttgttggttctgatgtttaagacattttcaaaaaaccatcgaataaaatgaatcgaaatcgatttacag

SEQ ID NO: 85075 - DNA, 708 bp, Arabidopsis thaliana columbia
  unsure (1)..(708): unsure at all n locations
nnnnnnnnnnnnnnnnnnnnnnnnnnnnnnnnnnnnnnnagctannnnnnnnnnnnnnnnnnnnnnnnnnnnnnnnagccacgcgtccgcccacgcgtccgtttctcctttctctggccaaagttccgactttttgcttctcccagaggctaatcatggacgctgtggcggcgaatttgtttcaatctccttccttactgcgtcaaacttccgaaaggttgatattttcgacgcccaactgtcctggcttcatgcgaattagctccggacctcaatttcgtctcagacaaaactcttctcttaaattctcgagaccatttcaaagcggaacaacttgtgttaaatctcggagaagctttgtggttaaagcttcagcttctggtgatgcttcaacagaatcaatcgcgccgcttcagttgaagtctcctgtgggacagtttctgtcacagatattagtgagccatcctcatcttgttccagcagctgttgaacagcagcttgaacagctccaaattgatcgagacgctgaagaacagagtaaagatgcatcctctgtccttggaacagacattgttctctacaggagaattgctgaagttaaggagaaagagagaagaagggctttggaaganattttttatgcnttagtggttcanaagttcatggatgctaatgttacacttgtaccatccataacctnttcatctg

SEQ ID NO: 85076 - DNA, 397 bp, Arabidopsis thaliana columbia
cctgatccagaatatctgagccggaggtggcgttcaaagacttaaacgagtagtgggccaaagggctctataatgatagttcgccctcagcttttgtccaggattggcattctcaaaggagaaagatctgatcagggaaggattgatcgatcaagatcaggaagaggagaacgagggacaattaacgtaagaaggggaaagggctaaagcatctgcttccactttccgctgcagaagaagttgggggaggttacaaagcccttatttcaacagactgttaaccactttaatgcctttatccggctttgcaacaaagtgatcttcggtcgcactaaggcgcataagcagtacacttcaccgagattcaccaagtaaccctacgggattgatggttgtg

SEQ ID NO: 85077 - DNA, 472 bp, Arabidopsis thaliana columbia
  unsure (1)..(472): unsure at all n locations
tggagaaagaacccaagcaagagccagaggaagggagagataagtacgagccacatcagcaccagccaccgtatatctcgcagatgcagccagtgacgcacgaagcctacggtggtggcctctacggtcaggacgacgaaaaagagaccacaaatttagagaaagaggccaagaatatagagaaagaacctcagcagcaaagaccaccggccagtgatacacagagcgcagatgggcctgacgaggtaaagtcgttgacaccaaaacacaagcaaccagcttcttcgggtgatagagacgttgacataactggccagtnttacattcaatgaagggagtactctctttttttttggtgttgtaatgcctttctagtttcctatcatttgtgttttntttggagcaagtttttttggtnctgttttttcnagnaaggganttttggntnatcaacggncaaattttngngttt

SEQ ID NO: 85078 - DNA, 490 bp, Arabidopsis thaliana columbia
ggcagctaatatgatgagaccggagtttgcttacactgttgtgtacgtgaaggacgtagctaaatctgtagaattctactctagagcttttggtcacaacgtccgtcgtcttgacgaatcccacaggtggggggagctagagagcgggcaaaccacgatagcgttcacaccgcttcaccagcatgagaccgacgacctaaccgggaaggttcaggctacgcagtcagcacgtgaaagagcacccatcgaagtctgcttctgttaccctgatgttgatgccgctttcaagagagcggtggagaacggtgcggaggcagtgagcaagccggaagataaagaatgggggcagaaggttggatacgtgcgagacattgacgccattgttgtacgcatcggaagccacgttaagtgaattcaaaataaagactcgtaaaatatgatcattaactagtctatatacatatgaataaatattacaagatactttggt

SEQ ID NO: 85079 - DNA, 582 bp, Arabidopsis thaliana columbia
cttgtatacccggcggagagaagatgaagcaaccggagacaccaaacgcggcggaggaaaccaaatcagaacaaaagcagaaatcgaagaaattcccaactccgacggaactaatctctcactaccagaaacgagggctggaaccagcagaagcttcaataaaggtcatcgaagatttacaaaacgcgctcgtccgagtagtttcgtcctccagaaacgcctcgagcaaggataagcttgtaaccgacgcgaggaaaatcgacgccattaacgggaggcttgccgtcgtcgacgcgaagctggagacgaaacctggatacgttgagactttcgcgttagggttagcttctggtgcgacacttaacggaattagcgccgtttggcctcacgttaccagaggcattggtcaaatttggtcccccgttaggatcgggacggatccttcatctacctcttgaattgttagaaaggaaaattctaggttgatatggtttcttatgagtttttttccggtgttgtatttagtgaaatttgagtatcagcgacttcaatctttgtactgttgaacaataatctcattag

SEQ ID NO: 85080 - DNA, 958 bp, Arabidopsis thaliana columbia
caacaacaacaacaacccaaaacccaattttgttacctcttcttttctcaatcctaaagtcaaaacaattccattttttttctttgattatcttcaatcggaatttcaggtgtgagagatgggttctgaaggaccaaaagcaataacgattcatgtgactggtttcaagaaatttcttggggtttcagagaatcctactgagaagatagctaatggtttgaaatcgtatgtggagaaacgaggtttgccttctggattgtgtcttggtagctgtagtgttcttgacactgctggggaaggtgcaaaatctaagctttatgaggttttggagtctagtgttgtctctggagataagaacaacaatggaactgttgtctggcttcatctcggggtgaatagcggagcgacaaaattcgccattgaaagacaggcagtgaacgaagctcatttccgttgtcctgatgaattgggctggcaaccgcagcggcttcccatagttgttgaagatggaggcatttcaaaggcaaaagagacttcatgctcgacggagtccattttccagttattaaagaagaaaggctttgaggttgttcaatcagacgatgctggacgttttgtatgcaactacgtgtactatcactctctaaggttcgcagagcaaaagggacacaagtctctgttcgttcacgttcctctcttctccaaaatcgatgaagatactcaaatgcagttcgtggcttcactcttggaggcaattgcagctacttgctagtgtttataagaatccactaaagccaaatattgtaagtatacaatgtatatgacccatttgtctttctatgaagctctttgtgttcttttgttggaagggttggggatataaaaagacgattgcttttggttctcaaaaaaaaaaaaaaaggcggccgttctagaggatccaacttacctacgcgtg

SEQ ID NO: 85081 - DNA, 418 bp, Arabidopsis thaliana columbia
aggtggaggaggacatggcggaggatggcagggaggtggtggacgaggaggaggatggaaaggaggtggtggacatggcggaggatggcagggaggcggtggaagaggtggaggatggaaaggaggcggtggcggcggaggatggagaggaggcggtggcggaggaggatggagaggaggcggtggcggcggaggatagagtaatcgaccgtctctactcatctgaaaaccaaatattatgagtagaaatattagtgtaagcaaatggtaaactataataaacaaataacgtctcatgcacggtttaccgattcattaagccaccttacgtagcctagctcaaagccttaactgtcatgtaagttatatctgttgctcttcgtataatccaagataagtgaatattaaaacttcgaac

SEQ ID NO: 85082 - DNA, 388 bp, Arabidopsis thaliana columbia
aagaagcagcacagtggagaagatcacaaggcatatcaatggaaggggatgcagagttgttggcagcaaccgaggttacccctgaacctaaaagagatgagtggatgaccactctgcctcctgaaagaaaggttggagtggccgtgcagcaatcacccacgtttagtagaaatgctagagaaggacgcggagacactacagcgtggactgatactcctatggacaaagctgaaagagcaaagatgaattacttggaggcatacaacaaggcgagtgcgcttgcatcatacgatggggaaaatatgtaaagaagcatggatgctgagcttgtagacaagtataccaaagagaaaagagcaaagtctctggtagagaagcaccagagaag

SEQ ID NO: 85083 - DNA, 534 bp, Arabidopsis thaliana columbia
cccaattatgtcttattactcctctttcttcttccttttcctcttctcctttctcacgagtttcagagtttctgctcaagatcccacttacgtataccacacctgtcaaaatacggcaaattacacaagtaacagcacttacaacaacaatctcaagacccttttggcttctctttcttcccgcaacgcttcctactccaccggattccaaaacgccaccgtcggccaagctccagacagagtcaccggacttttcaactgccgtggagatgtctcaacggaagtttgccgtagatgcgtctcctttgccgtcaacgacaccttaactcggtgtcctaaccagaaagaagccacactttattacgatgagtgtgtacttaggtactctaaccaggatattctctcgacactaataaccaccggtggggttatcttgggttaacaacccggaatgtggcatctaaccaactagacctgttaagtgacttggttttgcctactctgaaccaagccgccaccgtagccttgaacagt

SEQ ID NO: 85084 - DNA, 453 bp, Arabidopsis thaliana columbia
  unsure (1)..(453): unsure at all n locations
ttcagccggaggatcctctggatggncccctctngctctgccactttttggnagaccatggnttcnccggctgataatgagtgntagataatgttaatggagangctgtccataggaaagtnccccgctcttacaagcccgggaggaagagtttgtgtatgagagttgttcccagttttcccaacaactgctggatcccattgatggctctttcacctttgtacctggaagtttgagagatccaaaagggagtcaattcgaagtcaaagtcgtagagtttcctctggagttaccggactacatcttctgaactctttctggcacaaggttcgttactctttcaagataatttgttgtatcgtttgctttgtccgtacagcatgcaatgtcctaataaaataaaggtgttggatcaactggtttacaagttcatgagaacagattattcttaac

SEQ ID NO: 85085 - DNA, 573 bp, Arabidopsis thaliana columbia
gggcattgagctaagtcaagcttttttccaagtgttgtaaagaacgggctacaacgaaagtaaaaaagatgaaaacttccgtcactgcgcaccactttgggctctggtccactttcgctccgtttacgcgaattggttgtatctgcccgctaggaacgctggcatctgttgacaacagtcccgctaaaggccgctgtctcttctcggcaaggtaagttagttaggaatcatagcagtcggtgaagctttttctttgttatgcacagatggttgggcgcagcttgctaaggaaaaagtgctaaagctttagctgcttgattgaccgaagagcctgactaccagagctagtaagctagcggaagagctcagctcctactataagctgataaagagctactatcaccaagagagggcgaagaaactcattaattcattgatgagggctccccattctctttctaaatctgcagtccaatccttcctaatttcgaaactcatccttaagttaccaggggcaaggtggacatgaatcaagagaataagctctttaatcagaatacatagttgaattta

SEQ ID NO: 85086 - DNA, 631 bp, Arabidopsis thaliana columbia
cggacgcgtgggcggacgcgtgggccgccttcaaaaattcccaatttgttttttcaaacaaacttgctcagatcctcttcttcttagggatcaatcttcaaatcaattgttgttaaaataaatgggattaaagcgaccttatgatgctgaagagatgcaaaagtgcaatgctaagcatgcaagacagcttagttacaaaaaccataaccaatttgacgaagctattccatatcatcatgcttctatggagaagaagacaaatgttttagtagaggatctgattggtctctgtgagaatcctacgtggactaatgatgcaaatcacgttgacaagggttttgaaacaaccggtttgtgtcaggaagattctcagtctggagtgacgactcagtcagatctttctcatcaatcttctggttcagatttcacctggaagccagtggaagatgtttatacttgtttgatgaatcaacctcctaggaaacaagttcttgttgggtctaatcatcaagcggatattcccgagtttgtcaaggaagagattcttgatcagtcagaggctcgaactaaggaggacttagaagggaagctgatgagaaagtgtgtgataccaatgtctgactctgaactt

SEQ ID NO: 85087 - DNA, 412 bp, Arabidopsis thaliana columbia
tgtttctcaacaattttctggtctcttagagtgagaggagagagatagagagttgtgttgggcgtggaacttggactagttccacatatcaggttatatagatcttctctttcaacttctgattcgtccagaagctttcctaatctgagatctgacatggaacaccaaggttggagttttgaggagaattatagtttgtccactaatagaagatctatcaggccacaagatgaactagtggagttattatggcgagatggacaagtggttctgcagagccaaactcatagagaacaaacccaaacccagaaacaagatcatcatgaagaagccctaagatccagcacctttcttgaagatcaagaaactgtctcttggttccaataccctccagatgaagacccattcgaac

SEQ ID NO: 85088 - DNA, 402 bp, Arabidopsis thaliana columbia
ggaaactgttgagcccaacgatgttgagcctcagcagggtggccgtggtggtggcggtggtggtggcggtggccgtggtggttgtaggtggggatgttgcggtgggtggtggcgtggacggtgcagatactgttgcaggagtcaagccgaggcaaacgaggttgtggaaactgttgaggcccaacaagctaagccatgaattgcgtgtaatacaaactctctatgtttgtatgcatgcatagctaattaccattacgtacgtatgtcaaaataaagcaaaaatagtacctaagaaggtacctagaggtcaataaaagaaaacgtaggttcatataatatgtattttgttatgtaggtgtttcttttctcgtggaatgttataaataataacaactgtttttt

SEQ ID NO: 85089 - DNA, 546 bp, Arabidopsis thaliana columbia
  unsure (1)..(546): unsure at all n locations
aggcattctaggaccagtgcagatgatactgagacagatgaagcatccttttctggtcaagatgatacaagtagtaattttnatatccttgagtgggcaaagtccaaaaaaaatgggtcgttgcaaatattatgtgagtattaccaattaaaatgcccggcaagaggttcaactatcacatttcatcctttggagcatcttcatccggttgaatatcatagacctaatgaagtggcattgcatactcctggttcagcaattgacctaagatcatgcagcactagtctagaactcgcggaggcacacacaacactcatggctgaggaagaagcagctgcattatcaacatggggctgttgcctcctttatgtgggtcacttcgggcttgacaatgtctttgatggtacttagcaggggcactnctttgcagaaacaggattgtatttggtttgccccaattttgggattttttgcagcatcagttttttnaaattntcccagtnaanccgccccttngggnggganccntttnaatccnggttttcc

SEQ ID NO: 85090 - DNA, 539 bp, Arabidopsis thaliana columbia
  unsure (1)..(539): unsure at all n locations
gcactgaaaacacttcagcccaaaccacctcccatgtnttatctcagccaggtacgtacacaactatggttcaacaacaacaacaacctctggctcaacaacctttcttacaccaaggcgttcagtatatccctcacccatcacaatacataccaatttactctcatcagcaacaaaactaccctgtttacgtgatgtccgtcccacaatctcagcagtatatcccagcaggaactcccccgctctacccgaactcaaaacccggcacaaactcgagacctgatagctgcccagaacggtttaccgagctgctccccctcatggttattcaggcttcagcaacagcatcagtaccatgggttacgctggagctcctcaacatagcacaaacgcaaacgccaattacggtactggagctnctcaacatagcacaaacgtaaacggcaactacggtggnccctttgaatacacaaacttttcaatacgagacagtgtattaccacacacaagcttctgctgnaaacaactcccattccatt

SEQ ID NO: 85091 - DNA, 333 bp, Arabidopsis thaliana columbia
acccacgcgtccgcccacgcgtccgcgatcttcagtgatcatcaaatcgtaaccagtaaaaaatcgatcatgtcgatgctcgattccttcttcaataagggtttcaaagctgcaaaatgcaaaaccttgctcaagttaacgatccctaggattaagctaatcaggaatagaagagaagcacagattaaacaaatgcgtcgtgaaattgcaaagcttctcgagactggtcaagaagctactgctcgaattcgggttgagcatattataacggaagagaagatgatggctgctcaagagatccttgagctcttctgtgaactcattgctgttcgt

SEQ ID NO: 85092 - DNA, 538 bp, Arabidopsis thaliana columbia
  unsure (1)..(538): unsure at all n locations
ggaaacaatactaaaaaaggttgaggtttcttgtataaagaaagacaaatataaaagaagaatattggaaggtaactaagcaccaaacccaaagtcaataaccattaacaaaaaccttttgcttcatctcaaagaaccacaaagagcgaaataagaaaacaaaaagagagtatcatcaatggatggtttaataccaatggcccttaaggccgtgaagaagaacctaactcgtcgtcgttacgaacgtctctcctattccgcaacaactcgtgagtctttacggcttcgctttccgatatttgaaatgaaccggtcgacgggtcgttcaaccatcggccgtggcttggtccccttggggagttttctcactcggttatttcaaggccggggaaccccaaaagaaaccgggtgggttttagcttccccgngaaggggtcttttttttncnccccgggggggggtgaaacctttttnagggttttaannggcccttnnngttttttttttttnaatcctngggcaaaaattttttcttttt

SEQ ID NO: 85093 - DNA, 535 bp, Arabidopsis thaliana columbia
  unsure (1)..(535): unsure at all n locations
gagaaagctttatgatacagataaaaacgataccaaagttgcttctgtttgatcaataagttttttggttttttgtcacaagatcaaatacaaacacagatagcaataatgtatttaacatgataagaatctttccagttttaaagaacaacttcatagagaataaaacaaacgaggaatgagtgtaatgaacatataaaccctctgttcatctactttccaagcaaacggcgaccacgttggtttgattgttgcacgctgaagttgagttcgtcaacatcatcatgaagatggtcaagtcctttgttctgcttctcgatttcgcttcccatggcaacagccatgttctttagctcgccgagtatatcactcaagctgaaagcccatcgtcttgcttagccttttccatctccannctctgataagcatcagctgattcggggangggtcccgggtcttgatggccncnggggctgagtcaagcccagttttcccttcccaagggaanctnccgtggggcaccnggtagngggct

SEQ ID NO: 85094 - DNA, 378 bp, Arabidopsis thaliana columbia
agcaagcttcggcgaaaatgggattcattacgactctttaactcatcgatcccaatttgaaaactcgcatttccattgattcctttgatcagttctcaagtcgaaggtaattttgaatcaggcgcgatactccaagttaggatcttcggttcgagcttttgtgtgatcgatctaaaaggctatagaatatggtgaaaccatcggatttcaaagcaattcaagggtttattcggctgcattacactcgggtcaaccctgtcacaattggccgatcaaacccatcagctttgtcttctccagctattccctccaatggtgtttctcagcttcagcctaagtttagcttccacagcttatcctcgaaacccacttccaaaa

SEQ ID NO: 85095 - DNA, 486 bp, Arabidopsis thaliana columbia
  unsure (1)..(486): unsure at all n locations
agcaacagtctctcccatctaccgctccgcctcctcagagtctccggtggttcttcaatctctaaatccactaatgatgaaaacgacgaacaatgatgttaagtctgagagcgatgatgatggcggatcggaaggtgatgctgctattaagggtactatcttagccggagttttgttgattggtactgttggtggattcgccggcgttggatatgtctacagggatcagatcaatactttcctcactcaatcctccacttacatcgaaggttatggtacagctgggtatgcnctgttcattgccgtctatgctgggcttnanatactagccattccagctttncccattnacgatgtcggctggttttttnttnggnccacccattggcacatcaagtttttatcagnggacnatggctgcagngttgctttctnaaatgnaagaattttcccgaggggntnctnagtagttnagcnanagagtcc

SEQ ID NO: 85096 - DNA, 407 bp, Arabidopsis thaliana columbia
  unsure (1)..(407): unsure at all n locations
gaggtcacttctcattttcacccaaatatatcaataatctctctataagttatctagttttcccattttcatctctaatctagcattttgaccaaacacacctatttttctcctttgcaagacaggttttcaaatatctatcacgttatattactaatggcagatctacaaaagatgatctccgagaagtcggtagtgatctttagcaagaactcttgctgcatgtctcacacaatcaagactctcttcttagacctgcgcgtgaacccgacggtctatgaactcgatgagattagcngagggaaggngntagagcatgcattggctcagctcgggtgnagccgccagtgccagtggngttcataggnggncactttttggnggggcnatcaaggcanggggnccca

SEQ ID NO: 85097 - DNA, 464 bp, Arabidopsis thaliana columbia
gagcttggatgctcctgttgaagagtggacagttggtggtactgcactgacttcgttgatggatgttgagagaagacatggtaaattcaagcctgttatcaagaaagcttatgggttgaaccttgaaggtgcaccgtttaaagaaatttgcatcacaccgagaagaatgggctttgaagattcgatacattagccctggtccaattcagtttaagggaccgggatctgatgcgagaaatcacacattaatgctcgaactcgggccccgcgcctaaagaattttggtactgtgagattcactcactgactcactttctttgttgttgttcgtttttgctgtaaaatctagttactgtgagtcaagtgaaccaacaagtggtcatcaatgtgtaagtcctgtattgtggtgtcacttgaatatagatgactcatgtgttaataataaagtttcgcaatttcataaa

SEQ ID NO: 85098 - DNA, 940 bp, Arabidopsis thaliana columbia
  unsure (1)..(940): unsure at all n locations
nnnnnnnnnnnnnnnnnnnnccacgcgtccgagagatttggtgaagacgatggagatgcaagaggctaatcaaggaggaggatcggaggtttctccgaatcagacgatttacatcaacaatctcaacgaaaaagtgaagcttgatgagctgaagaaatcgctgaatgcagtgttctctcagttcgggaagatactggagatattggcgtttaagacctttaagcacaaaggacaagcttgggtagtcttcgacaacaccgagtctgcttccactgctattgctaaaatgaataattttcctttctacgacaaggagatgagaatacaatatgccaaaacaaaatcagatgttgttgccaaggccgatggtacatttgttcctcgcgagaagagaaagagacatgaggagaaaggaggcggcaagaaaaagaaagaccagcaccatgattctacacagatgggcatgcccatgaactcagcatatccaggtgtctatggagctgcacctcctctatcgcaagtaccataccctggtggcatgaaacccaatatgcccgaggcaccagctccgccaaataatattctctttgtccaaaaccttcctcacgagacaactccaatggtgcttcagatgttgttctgccagtaccaaggatttaaggaagttagaatgattgaagccaaaccgggaatcgcctttgtggagtttgctgatgagatgcagtcgacggtcgcaatgcagggacttcaaggtttcaagattcagcaaaaccagatgctcatcacgtatgccaagaaatagacaatttcgttttatttgtgtttcgatgagatatgtttgtatctgtcaatgttacttcttgccatgggggctgtcttctgggttgtgtgatgctagatatccctctctacttacattttttcatcaaaaaaaaaaaaa

SEQ ID NO: 85099 - DNA, 585 bp, Arabidopsis thaliana columbia
  unsure (1)..(585): unsure at all n locations
ggcgcgtgtaaacggtgacggggctctaatggctaatcttcctcctccgctctccatgaaatctgtcgccctctcaggagcttcttctccttcttcttcctccaacaacgatcggaagctatcatcggcggagagttaattctcgatctcagcaatcccgaactcagagaaaatgcacttcacgagttgtctaagaagagagagatctttcaagatttggctccgcttttatggcattctgttggtaccattcctgctcttctacaggagattatcgcagtttaccctgcccctatctcctccaaccatggactcctgctcaatcctaacagggtgtgcaaatgcaccttgcttcttcctttcaagtgtggttgcttctcatacctgatacggggaatgttggttcctaaaaaggcccatctgccaattgtacctgtaatgcttttctttgaatacatcaaggaaattaaaggccggttttncggacccttcgggttnnctagntttngggggtanttgggngnccttgttaagggttggtgnacttgaggggcangttcctttgtaaacnngnttntccncttt

SEQ ID NO: 85100 - DNA, 494 bp, Arabidopsis thaliana columbia
  unsure (1)..(494): unsure at all n locations
cccacgcgttcagaaaattctcatcggcgtttagatcagaaacttgggaatcggagaagctcactgagaacaatggatatgagacgtgcttcgatgtgtatgatgttaatttgcgtctccttggttctcctttcgggttttggccagtttgtgatctgcagtgaagaaaaaggaacgtacaacgacaacgtcgtaaagatgaagcttggtggatttagcgattccaagaacgattggaacggtggaaaagagatcgatgatattgcactcttcgctgttcaagagcacaacagacgagagaatgctgttcttgagcttgctagagtattgaaggcaacagagcaggtggttgctggcaagctataccgtcttactctttgaagttatttgaagctggtttggaaaaggttttttgaagctaaaagttttgggtgaagccntgggttaacctttangcagcttcaggngttcaannatttntcccctcccttnaa

SEQ ID NO: 85101 - DNA, 588 bp, Arabidopsis thaliana columbia
taccgattcggagtttcgacccagacccacccgtacatctaccaacgagattcttctcgaaaatttcctgcgcctctccgtgtctgtgaaatcgattcaggttaaggatgtcgagagctacatacattatcggtgcccttgcgggatctgcggtagtagcttacgtgtgtgacaaagttatttctgatgataagctttttggaggtactacaccaggaactattactaacaaggaatggggtgctgcgactgaagagagattacaagcatggccaagagttgctggtcctcccgtcgtcatgaaccctatcagtcgccagaatttcatcgtcaagtcacgtcctgaataacttttgatgccttctcgtgcatcgttctcattcgttatggattcattttcgaatatctgctcttttgtgtttgatttgaggatcggctgattgctctagctggttatagtaataatttgtgttgatgcgtaacacattattcggatcaagcttttcccccgatgcataaccttttgtaaaggtttgttgattttgacggtaaatgaaatcgggccaaaagagaaaacctctttggccc

SEQ ID NO: 85102 - DNA, 509 bp, Arabidopsis thaliana columbia
  unsure (1)..(509): unsure at all n locations
aggttgntccnaccncactgttngcccncccccagctcagngtccccctgtncggcttcacanctcnttgccngcgatgatnccagaccctcctccacaaggtttgggatngagtatancngataatgaancggntggtctgnaaataaggtgtatgtggaaagtgaaggattttgggtcccngtgttgaactcataaaccggatcccataaggttgctgaagcttctggtcattacccttctcttcacttggaaagtcctacccaagttcgagctgaactatttacctcttctatcggagggttgagcatgaatgatttcataatggcggctaaaatagatgatatcaagacttctgatctttcccctaggaaaagagcttgggcgtgatcttcttttcattattttggaacatttttgtttgatagtatgtaatgtatgtgatgtattctaaattgtgtgtgatcggtctacatgtcgagttatatagaaagcattgtcataaccgc

SEQ ID NO: 85103 - DNA, 312 bp, Arabidopsis thaliana columbia
gagtgatgaggccaagacaccttctttgtccaaatgggctgagaatttctgtaatgatcccgctgtaaaacctgtcatgcccgagactgcaaagcttgctgaattcgcaaagaagatctttcctaagccgcaggcctaagttgttggtggactaggttttgtatttgtgggttgggttcttgcaagaataaattaagagtgttattgtttttagatggctttatctttgtgtgtgagttttaatcaggcgtacgttaaacgttacgtatgtatcaggtttggtgaatgattttatttaggttgtgttggaaa

SEQ ID NO: 85104 - DNA, 576 bp, Arabidopsis thaliana columbia
  unsure (1)..(576): unsure at all n locations
ttcgttccaccagcaccaaaccaacaatcggcgttaactccaattctttcaacattcacttctctcttcaacttctccgatcactctccatatccatctccatctctccattatcttcttcctggatcttctccttccttttctctccagttatctgcgttgagtagaactccgatctacttcgaggcacttaaagttttatcgagatcgaaatgtttcgccaagtctccgacaaccgccgaggatttcgtcggcgattacggaatcccttaacgttagcgacggcggcgatggtagtgacagtaatagtagtgatggaggtaacggaggaggaagaggtgattcaaagaaggatccggttccttcttcttcttcttcatcaaagtgacctctaacggcctcttngggaattccgtgaacccggttttaatgaaggtttttgggaaagttaaaggcggccttggngcaaatnttctacaaagggaagggnttaacaagccggcaagcttgcttaaaatncnagtnggntnttntgcccaaangnatnttccggggnggttnnncccnccggngntt

SEQ ID NO: 85105 - DNA, 524 bp, Arabidopsis thaliana columbia
  unsure (1)..(524): unsure at all n locations
gttaaaccctatatttgaatttccatttgctttcgaaccagtttattaaatgatacattgatcttacaacattaccaagcaatgaggacatagcacacaagtcactggggttcaatggagaccacaacaataaatatttatcagacatttgatgaactcacctcgctctaactactagtaggggcctaatgccataatgtaactgtgatgaatgaaattcactttcttcacggattttaaacctcttctttcgtcttttaggattgaaggttcaaaagattttgcgtctactgaggataggaatacatgaggaagaaggcgactgcagcgcctatgatgattccacccgttggttagccagaatgcagaagcntgttcctccaagatangncctcaagttccatgccggatatacngcgatgagagcnccactgnaacncaaatgaccgcctgaagagcacncgacnggtgccncagcnccggactagttgcagcattggctccatncctgnngaccanagctt

SEQ ID NO: 85106 - DNA, 2159 bp, Arabidopsis thaliana columbia
tcgatctttaaccaaatccagttgataaggtctcttcgttgattagcagagatctctttaatttgtgaatttcaattcatcggaacctgttgatggacaccaccattgatggattcgccgattcttatgaaatcagcagcactagtttcgtcgctaccgataacaccgactcctctattgtttatctggccgccgaacaagtactcaccggacctgatgtatctgctctgcaattgctctccaacagcttcgaatccgtctttgactcgccggatgatttctacagcgacgctaagcttgttctctccgacggccgggaagtttctttccaccggtgcgttttgtcagcgagaagctctttcttcaagagcgctttagccgccgctaagaaggagaaagactccaacaacaccgccgccgtgaagctcgagcttaaggagattgccaaggattacgaagtcggtttcgattcggttgtgactgttttggcttatgtttacagcagcagagtgagaccgccgcctaaaggagtttctgaatgcgcagacgagaattgctgccacgtggcttgccggccggcggtggatttcatgttggaggttctctatttggctttcatcttcaagatccctgaattaattactctctatcagaggcacttattggacgttgtagacaaagttgttatagaggacacattggttatactcaagcttgctaatatatgtggtaaagcttgtatgaagctattggatagatgtaaagagattattgtcaagtctaatgtagatatggttagtcttgaaaagtcattgccggaagagcttgttaaagagataattgatagacgtaaagagcttggtttggaggtacctaaagtaaagaaacatgtctcgaatgtacataaggcacttgactcggatgatattgagttagtcaagttgcttttgaaagaggatcacaccaatctagatgatgcgtgtgctcttcatttcgctgttgcatattgcaatgtgaagaccgcaacagatcttttaaaacttgatcttgccgatgtcaaccataggaatccgaggggatatacggtgcttcatgttgctgcgatgcggaaggagccacaattgatactatctctattggaaaaaggtgcaagtgcatcagaagcaactttggaaggtagaaccgcactcatgatcgcaaaacaagccactatggcggttgaatgtaataatatcccggagcaatgcaagcattctctcaaaggccgactatgtgtagaaatactagagcaagaagacaaacgagaacaaattcctagagatgttcctccctcttttgcagtggcggccgatgaattgaagatgacgctgctcgatcttgaaaatagagttgcacttgctcaacgtctttttccaacggaagcacaagctgcaatggagatcgccgaaatgaagggaacatgtgagttcatagtgactagcctcgagcctgaccgtctcactggtacgaagagaacatcaccgggtgtaaagatagcacctttcagaatcctagaagagcatcaaagtagactaaaagcgctttctaaaaccgtggaactcgggaaacgattcttcccgcgctgttcggcagtgctcgaccagattatgaactgtgaggacttgactcaactggcttgcggagaagacgacactgctgagaaacgactacaaaagaagcaaaggtacatggaaatacaagagacactaaagaaggcctttagtgaggacaatttggaattaggaaattcgtccctgacagattcgacttcttccacatcgaaatcaaccggtggaaagaggtctaaccgtaaactctctcatcgtcgtcggtgagactcttgcctcttagtgtaatttttgctgtaccatataattctgttttcatgatgactgtaactgtttatgtctatcgttggcgtcatatagtttcgctcttcgttttgcatcctgtgtattattgctgcaggtgtgcttcaaacaaatgttgtaacaatttgaaccaatggtatacagatttgtaatatatatttatgtacatcaacaataaaaaaaaaaaaaaaaaaagggcggccgctctagaggatccaagcttacgtacgcgtgcatgcgacgtgatag

SEQ ID NO: 85107 - DNA, 457 bp, Arabidopsis thaliana columbia
aaaaagagtctctctttgctctcaccacactaagaaagaagaagcgagggagaaggagactttttgactcggctgcttcttctcctttctctctgtcacttatttcccctctttgcttccgtcgattcatcccaatctgatcatctctttctccggttaaggtctcaggacttctcagattcgaattataaatgggaaattgttgtgcgagcccgggttcggagactgggagtaagaaggggaaaccaaagatcaaaagtaacccgttttatagtgaagcatacactacgaatggatctggaactgggttcaagctctctgttttgaaagatccaacaggacatgatatatctcttatgtatgatctggggcgtgaggttggtcgcggagagtttggtattacttacttgtgcactgatatcagaacgggcgagaagtatgcgtgcaagtctatatc

SEQ ID NO: 85108 - DNA, 2259 bp, Arabidopsis thaliana columbia
  unsure (1)..(2259): unsure at all n locations
gannnnnnnnnnnnnnnnnnnnnnnnnnnnnnnnnnnnnnnnnnnnnnnnnnnnnnnnnnnnnnnnnnnnngcatatgccacgcgtccgggaaacacataaaaaattaagagttgtcattctttgaatccccgcaagcaagaagaagaagaagaagaagagagtcaatttgtgtgttttgtcatttgaagaagagagagaaagaggaagactttgactcgtcttcttcctctcttcttctctctctatcactgcatttgtttttcctcacagcgaaccttgagatttgattagatggggaattgttgtggcaatccgagttcggctacgaaccagagtaaacaagggaaacccaagaacaaaaacaatcctttttacagcaatgaatacgctacaacagatagatctggagctggttttaagctctctgtgctgaaagatcctacaggacatgatatatccttgcagtatgatcttggacgtgaggttggtcgaggcgagtttggtataacttacttgtgtactgataaggaaactggtgagaagtatgcctgcaagtccatatctaagaagaagctgagaacagcagttgatatagaggatgttaggagggaggttgagattatgaagcatatgcctaaacacccaaatgtcgtctctttgaaggattcctttgaggatgatgatgcggtgcatatagttatggagttgtgtgaaggaggggaactgtttgatcggattgttgcaagaggtcattacactgagcgggctgctgctgcggttatgaagactattgttgaagttgttcagatatgccataagcaaggagtgatgcatcgggatctcaaaccagagaactttctttttgcaaataagaaagagacatcagcccttaaggccattgattttggattatctgtattcttcaaacctggtgagcagtttaatgagattgttggaagtccttattacatggcacccgaggtgctgcggcgaaactatggtcctgagatcgatgtgtggagcgctggagttatcctctatatcctactttgtggtgttccgccattttgggcagagactgagcaaggggtggctcaagcgatcattagatcagttattgactttaagagagatccatggccaagagtttctgacagcgccaaagaccttgtgagaaagatgcttgaacctgatcccaaaaaacggcttactgctgcacaagttctcgaacatacttggatactgaatgcaaagaaggctccaaatgtctctcttggggagactgtgaaagcaagactaaagcagttttctgttatgaacaagctcaagaaacgagctctacgagtgatagctgaacatttgtcagtggaggaagcagcagggataaaggaagcatttgaaatgatggacgtaaacaagagaggcaagataaatctcgaggagcttaaatatggacttcaaaaagctggacaacagatagctgatactgatcttcaaattcttatggaagctactgatgttgatggggatgggacactgaactatagcgagtttgttgctgtttcagtccaccttaagaagatggcgaatgatgaacacttgcataaagcttttaacttctttgatcagaaccagagtggttacatagagattgacgaacttcgtgaagccttgaatgatgaattggataatactagcagtgaggaagtaatcgcagccatcatgcaagatgttgataccgacaaggatggacgaataagctatgaagagtttgttgcgatgatgaaagctgggacagattggagaaaagcgtcaagacagtattctcgggaaagattcaacagtttaagcctcaagttaatgagagatggttcattgcaattagaaggcgagacctaagaaagcaagagacaaaagtttgaatctttttgaaaaagcagcagcagaagaagaagaagaaagaagcgtcagcattgtcaaaaagaaataactattatgttctataagcatttaacacggtaatgatagaaagattggtcgtggtcgtaggttttgtttagggctttcaatttgtttgaaaagttcttcaatggacagcgatgtgattgatgatgatgtcgaacaagtttctgagattccaaagatacgagttttgtgaaaaaaaaaaaaaaaaaagnnnnnnnnnnnnnnnnnnnnnnnnnnnnnnnnnnnnnnnnnnnnnnnnnnnnnnnnnnnnnnnnnnnnnnnnnnnnnnttc

SEQ ID NO: 85109 - DNA, 493 bp, Arabidopsis thaliana columbia
agttttacagagggtgccctaccggaggagctgcgataatgagagaaggaccgaatctattgaaactggcgaggaaagaacagtgtttggctttaggtacgaggttgaggtcaaagtacaagatcacttaccagttttacagagtgttccctaacggagaggttcaatatcttcacccgaaagatggagtttatccagagaaagcgaatccaggaagagaaggtgttggactaaacatgagatccatcggtaaaaatgttagtcccattgaggttaaattcactgggaaacaatcttatgatttgtaagattttaattcgtattttatataataatgctagacaaacaaaacaaatttaaaaagggatcacactacatgtaaaatcttgcggatgttataacaactctttgaacttttcaagcaaaaaaaaaaaaaaaaaaagggcggccgctctagaggatccaagcttacgtacgcgtgcatgcgacgtca

SEQ ID NO: 85110 - DNA, 589 bp, Arabidopsis thaliana columbia
  unsure (1)..(589): unsure at all n locations
gctgctacgcctgcaggtaccggtccggatttcccgggtggacccactgcgtccgtacggctgcgagaagacgacagaaggggaagaaagaggaggaagaaatgaactagtctgaaacacaatgatgaaccacttttagcaacacacatcaaaaacgacgaaaacagagtaaaagaagaagaaaaaaacggaggaggaacagttagcgccgtccatggcgggtcttcagagatccaccatctctttccgtcgacagggctcttcgggtatagtctgggacgatcgtctcatcgccgagctaagccaacaagcggccaacgaccggaaaggcgagactctacaacaggacgaacaggccaagctgattacgtcggaagtacaggatcagacaaccaaacctatcgccggagaaggactcaaacctatcagaactgacggaggtatggagaggagtcgaatccaacggaggaggagccatccgccaccatcgaaacacagggagagtgtctccggcggtggacccgccgtcgccgagactgtcggcgtttgggtgcttctctgccttcggggaaggaacannccgggggaa

SEQ ID NO: 85111 - DNA, 1948 bp, Arabidopsis thaliana columbia
  unsure (1)..(1948): unsure at all n locations
tttttcccctttttccnctgtcacttatttcccctctntccttccgtcgattcttgcgtttgtgagtgatttagttgtttgatgaaatctcaggacttctcagattcgaattataaatgggaaattgttgtgcgagcccgggttcggagactgggagtaagaaggggaaaccaaagatcaaaagtaacccgttttatagtgaagcatacactacgaatggatctggaactgggttcaagctctctgttttgaaagatccaacaggacatgatatatctcttatgtatgatctggggcgtgaggttggtcgcggagagtttggtattacttacttgtgcactgatatcaaaacgggcgagaagtatgcgtgcaagtctatatcaaagaagaagcttagaacagctgtggatatagaggatgttaggagggaagttgagataatgaaacatatgcctagacacccaaatatcgtgtcgctgaaggatgcctttgaggatgatgatgcagtgcatatagttatggagttgtgtgaaggaggtgagctgtttgatcggattgttgctagaggtcattatactgagcgagctgctgctgcagtgatgaagactattcttgaagttgttcagatatgccataagcatggagtgatgcatcgggatctaaagcctgagaactttctctttgcaaataaaaaagagacatcagcccttaaagccatagattttggattatcagtcttcttcaagcctggtgagggattcaacgagattgttggaagtccttattacatggcaccagaggtacttaggcgaaattacggacctgaggttgatatctggagtgctggagttatcctttatatcctgctctgtggtgtcccaccattttgggccgagactgagcaaggggtggctcaggcgatcattaggtcagttatcgactttaagagggatccatggccgagagtttctgagactgccaaagaccttgtgaggaagatgctcgaacctgaccccaaaaaacggctttctgctgcacaagtactcgaacattcttggatacaaaatgcgaagaaggctccaaatgtttcactcggcgagacggtgaaagcaagactcaaacagttttctgttatgaacaagctcaagaaaagagcgctacgggtgatagccgaacacttatcagtggaggaagtagctggcatcaaggaagcatttgagatgatggacagtaaaaagacgggaaagataaacctcgaggagcttaaatttggacttcataaactcggacagcagcagatacctgatactgatctacagattctgatggaagctgctgatgttgatggggatgggactttaaattatggggagtttgtggctgtctctgtgcatcttaagaaaatggcgaacgacgaacacttgcataaggcttttagcttttttgaccagaatcagagcgattacatagagattgaggagctgcgtgaggctttaaatgatgaggtggatactaacagtgaagaagttgttgcagctattatgcaagatgttgacacagacaaggacggacgaataagctatgaagagtttgcggcgatgatgaaagctggaacagattggaggaaagcgtcgaggcagtattcccgggaaagattcaacagtttgagcctcaagttaatgagagaaggttcattgcaattagaaggcgaaaattaagaaaggttctttgtttctgtatctcttaaagaagtaaaaagaaaaaggaaaaaacagtattctttgaaaattgtttatctttttttttcctcaataattgtagatcagggtttcaaatgttttagttacttgaatagccagccatgtacgatatgaagcagatgttcttaaattttctgactctttattttcatgttgtctggatccttaatactatttgttggcaaaca

SEQ ID NO: 85112 - DNA, 697 bp, Arabidopsis thaliana columbia
  unsure (1)..(697): unsure at all n locations
gttgagaccaatgggttttttgcaggttattaattcttgggcactaattcctcttcatgtaccagagataagcccaaccattggtccaccgtcccggaaaagcgaaacttcttcaccaggacgaacagtccaagctgattcgttcgaaggtcaaggttcagccaaccaaacctatcgccgaagaaggactcaaacctatcagaactgacgnaggtatggagaggagtcgatccaacggaggaggagccatccgccaccatcgaaacacagggagagtgtctccggcggtggacccgccgtcgccgagactgtcggcgtttgggtgctgctctgccttcgggaagaaacagccggggaagaaggttaatcagaggaaaaggccagccaagcgtagatccagataggcatgaactaaagtctaaagtaaagaagaagaacccccccaaatgatgagaaaacaaaccaaaacaaaaagagagtatatatccttagactgcttcttatgaatctttttctttctgtttttgtttgtgtttttttgtttgtgctttaatgttaaaactgtttaaactcagagactatatatatgtttatatttgtttaaaaaaaaaaaaaaaaagnnnnnnnnnnnnnnnnnnnnnnnnnnnnnnnnnnnnnnnnnnnnnnnnnnnnnnnnnnnnnnnnnnnacacgaattc

SEQ ID NO: 85113 - DNA, 685 bp, Arabidopsis thaliana columbia
  unsure (1)..(685): unsure at all n locations
acgtcgcatgaccgcgtacgtcatttactccacagagaaagattcagagaaaacagaagaaactatggcaactcaagccgccggaatcttcagccccgccataacaaccactacttccgccgtcaagaaactccacctcttctcatcaagccaccgtcccaagtctctctccttcaccaaaaccgccatccgcgccgagaaaacagagtcctcctctgctgccccagccgtgaaagaagctccagttggattcactcccccgcagctagacccaaacacaccatcaccaatcttcgccggaagcacaggaggtctcctccgtaaagcacaagtagaggaattttacgtgatcacatggaactcaccgaaagaacaaatctttgagatgccaacaggaggagctgcgataatgagagaaggaccgaatctattgaaactggcgaggaaagaacagtgtttggctttaggtacgaggttgaggtcaaagtacaagatcacttaccagttttacagagtgttccctaacggagaggttcaatatcttcacccgaaagatggggtttatccagagaaagcgaatccaggaagagaaggtgttggactaaacatgggtccatgggaaatgtngnccttggggtaatcctgggaaanttgnttgaagttanngnttntaaatnngccnggc

SEQ ID NO: 85114 - DNA, 1014 bp, Arabidopsis thaliana columbia
  unsure (1)..(1014): unsure at all n locations
gatgaaccacttttagcaacacacatcaaaaacgacgaaaacagagtaaaagaagaagaaaaaaaacggaggaggaacagttagcgccgtccatggcgggtcttcagagatccaccatctctttccgtcgacccacgcgtccgaatttgctcattagagaacagagaaaaaaaaaaacaatggcaactcaagccgccgggatcttcaactccgccataacaaccgccgcaacctccggcgtcaagaaactccactttttctcaacaacccaccgtcccaaatccctctccttcaccaaaaccgcaatccgcgccgagaaaacagattcctccgccgccgctgctgcagcccccgccacgaaagaagctcccgtgggattcacgccaccgcagctagacccaaacacaccgtctccgatcttcgctggaagcaccggtggtcttctacgtaaagcgcaagtggaagagttctacgttatcacgtggaactcaccgaaagaacagatctttgagatgccgacaggaggagcagcgatcatgagagaaggtccgaatcttctgaagctagcgaggaaagagcagtgtttagctttggggacaaggcttagatccaagtacaagatcacttaccagttttacagagtgtttcctaacggtgaggttcaatatcttcatcctaaagatggtgtttatccagagaaggcgaatccaggaagagaaggtgttggtctcaacatgagatctattgggaaaaatgttagtcccattgaagttaagtttactggcaaacaaagttatgatttgtaagatctgtaaactaaaaaaaccaaaaactatgtgcatgtggtgatgattatgactatgtttcatgttaatttttaatggattttgttttgataaaaaaaaaaaaaaaaaggnnnnnnnnnnnnnnnnnnnnnnnnnnnnnnnnnnnnnnnnnnnnnnnnnnnnnnnnnnnnnnnnnnnnnnnnnntataatcgnnnnnnnnnnnnnnng

SEQ ID NO: 85115 - DNA, 579 bp, Arabidopsis thaliana columbia
  unsure (1)..(579): unsure at all n locations
ccattgcttagtgttggttcccaagtcccaacctgcttcaatttaggtcgcaaacgatctcaattattcacaatccaatcttttcttcaatcgatcttcgtttctgatcaagctaataataagctaggaagagagtttagtgaagtagtgaagatgcagaatcagattgatatggtgaaggatgaagcggaagtagctgcatcgatttcagcaattaagggtgaagaatggggaaattgttcatcagtggaagatcaaccatcttttcaagaagaagaagctgctaaagttccttatgttggtgataaggaacctctgtctagtttagctgcagagtatcaatcagggagtcccattttgctggagaagattaagatactggacagtcaatatatcgggatccggcgaacaagaggagatgggaattgcttcttcccgaagtttttatgtctcttaccttgagcatatatttgggtcccaagntcgtnctnaaggccggncgatcaaggcaatttttngaatttggnagcccttcaaaccttnggtntccagntttccatttnggctttttcngtggnc

SEQ ID NO: 85116 - DNA, 483 bp, Arabidopsis thaliana columbia
  unsure (1)..(483): unsure at all n locations
gaaaaccataagatgggttttagagcactgcctcttcaacacagcagtgggttcatctccacgaccaaagtatccatctcaagaacctcgcccaggattttccggaaccctagatgggtcgttgtctcagcaaagcaagagaaagatgaggataagaagaagaatgaagaggagacttcgttgtttactcaattaacggatgccttggacttctcacaagttcgatcggagaaagacgctgagcttctctacgaggctcgagaagccaccaaatctggtcgcaagatgacccaagaaccagtatggggcatttagggggaaaaactcgggnggnncatncaagggccttttttttaaatccctacggttggnaggtgggatggggcaaatattgtgggaggnaggggttgggtnggccaaaacnatntatggtnttncaaaaaagggcnncaanggggttnggnaatgccaggtggccangtt

SEQ ID NO: 85117 - DNA, 583 bp, Arabidopsis thaliana columbia
  unsure (1)..(583): unsure at all n locations
gtcgtctctcgaccaaaccacaaaaaccagaacaaaaataactaaaaaacaatcagatctgagatcgaacaaaacaacatgaacacgttaatcccatcggagaaaagatggatcatcaccggcgttttactagccggtttagttggcggtgctttgcttttcacaagcttcatacgagccgctgacgaaacgctcttcctctgttccacagcaagcgccaaaagcagagcggtggctgcggcagctgattacgaagcgactccgattcagcttcaagcgatcgtccactacgcgacatctaacgttgtcccacaacagaatcttgctgagatctcgatctctttcaacatcttgaaaaagctagctccggctaactttctcgtgttcggtctcggtcgtgactcgctcatgtgggcttctttaaatccacgtggcaaaaccttgttcttggaagaagatcttgaatgggttcagaaagtggccaaagctttccctttttaacgtgggataagggcgttaaaggcggggttttacagccctgggtggtcgtacgntggaaaaaagggcctaactttttcgggga

SEQ ID NO: 85118 - DNA, 403 bp, Arabidopsis thaliana columbia
aaatatcatgatggctgttactcgaagacggacaactttatccggaaatgatcaaggagacggaaaagcaatttggagtatcgatagacacggagcgagagtctagggcttatatgatgggtccagaccatgggatccatcccttgccacatggaggagccacaggcctgtagttggagttgcgagaggttgacataaagccggttgagtccgttccaagagtcttcgtttaagttatacttaaatagacaacttaagaagaataaataaataagcgatcgagcttttcttttgtatagccctccccgcatcatgtgtataagatgtaaaatacacttggagtagtatattatggtgtcgtctagtggttataaatattacgtcttcatgactccagttcatt

SEQ ID NO: 85119 - DNA, 384 bp, Arabidopsis thaliana columbia
cggtcgcgtgggcggacgcgtgggttgtgtttgggaaatcaaaattcagacgatggcttcgattccgcagattatcctttgtaacttctccatacacgacggtttcaacaaggaacccagtaacagattacacgctaaaagacggagcttggctccttctatgctccaaaccaagttggggttgagagcttgcttgattgagcatagacagagacagcgagtgatgggtctgggagatattgggatgctagctagtgagaaatctcttaaccgtaaaagacgggtggttagggttaggggtttgaagtttaatggtggagataacaacggaaatgggaggattctcggaaaccttgctttggccattggcttgacttatctctc

SEQ ID NO: 85120 - DNA, 491 bp, Arabidopsis thaliana columbia
cggtcgcgtgggcggacgcgtgggcggacgcgtgggcgatcggatagcttcggcgatggcgttatcacgactttcttcacgatccaacactttcctaaagccggcgattaccgccttgccctcctccatccgccgtcatgtttccacagactcatcaccgatcacaatcgaaaccgccgtccctttcacatcgcatctatgtgaatcaccgtcacgctccgtcgagacttcatcggaggagatcttagcctttttccgtgacatggctcggatgaggaggatggagatcgcagcagattctctttacaaggcgaagctgatccgtgggttctgtcatttgtacgatggtcaagaggctttagcggtgggaatggaagcggcgattaccaaaaaagatgcgattatcacatcgtatcgtgatcactgtactttcattggtcgtggtgggaagcttgttgatgctttctctgagcttatggggagaaaaactg

SEQ ID NO: 85121 - DNA, 519 bp, Arabidopsis thaliana columbia
  unsure (1)..(519): unsure at all n locations
aaagattcgatttttgactgcaaaaaagagaatttctaaaagcaaatcggagagcttcggcgatggcgttatcacgactttcttcacgatccaacactttcctaaagccggcgattaccgccttgccctcctccatccgccgtcatgtttccacagactcatcaccgatcacaatcgaaaccgccgtccctttcacatcgcatctatgtgaatcaccgtcacgctccgtcgagacttcatcggaggagatcttagcctttttccgtgacatggctcggatgaggaggatggagatcgcagcagattctctttacaaggcgaagctgatccgtgggttctgtcatttgtacgatggtcaagaggctttagcggtgggaatggaagcggcgattaccaaaaaagatgcgattatcacatcattggaatcggggatccanttgaacttttcattgggccctggttgggaaancttttttnatntttnnnttnagctttttggggggaaaacttggtttgttc

SEQ ID NO: 85122 - DNA, 1561 bp, Arabidopsis thaliana columbia
ccacgcgtccgctctcagttcctacgcgaagttttcaacagattcgccggagaatcttcgaatcaacggcggagaaatggctctatcacgcctctcatcacgatccaacatcatcactcgtcccttctccgccgccttcagccgattaatctcaacggacacaactccgatcacaatcgagacttcgcttcctttcacagctcacttatgtgatccaccgtcacgctccgtcgaatcatcgagtcaagagcttctcgatttcttcagaaccatggcgttgatgcgacgtatggaaatcgcagccgattcgctttacaaagcgaagctaatccgagggttttgtcatctctacgacggccaagaagctgtagctataggcatggaagctgcgattacaaagaaagacgcgattattactgcttatcgtgatcactgtattttcttaggtcgtggtggttcgcttcatgaggttttctcagagcttatgggaagacaagctggttgttctaaagggaaaggtggatctatgcacttctataagaaggaatcgtcgttttacggtggtcatgggattgttggtgctcaggttccattaggttgtggtattgcttttgctcagaagtataataaggaagaggctgtcacatttgctttgtatggtgatggtgctgcgaatcagggacagttgtttgaagctttgaatatttctgctctttgggatttgcctgcaattttggtctgcgagaacaatcactatggaatgggaactgctgaatggagagccgctaagagtccatcttactacaagcgtggtgattatgttcctggactcaaggtagatggtatggatgcatttgctgtcaaacaagcttgcaaatttgctaagcagcatgcgttggagaaggggccaataattcttgagatggacacatacaggtaccacggtcactccatgtctgatcctgggagcacataccgtacccgagatgagatatctggtgtgaggcaggaacgggatccaattgagagaataaagaagctggtactatctcatgacctagcaaccgagaaagagcttaaggatatggagaaggaaattagaaaagaagtagatgacgccattgccaaagctaaggattgcccaatgccagagccttctgagctctttaccaatgtgtatgtgaagggatttggcaccgagtcatttggacctgacagaaaagaagtcaaagcttcccttccatgatcatggagctcttgttcgttaaactgccacgtgtcatgagaaagttggctgatagagaaatctatgaatatgaataaagatctgattgtatactctctctctccccccccttctgaactttaatctctctgtatctttgtttacaaacataaggagaaacaatgttattcttgtgaagctttagtagtctcgtgtttaatattcaagcaatcgagttgagatctcaaaaaaaaaaaaaaaagggcggccgctctagaggatccaagcttacgtacgcgtgcatgcgacgtcatagctcgtgttgtgtgaaaggga

SEQ ID NO: 85123 - DNA, 409 bp, Arabidopsis thaliana columbia
  unsure (1)..(409): unsure at all n locations
tgttaaaccggcttcnccccgccatcctcctcaggattgcaaattttgcncntttaaggaggaaaggccccaaatgccgggctcttgatataatcccgggaggattcagcaactctctgctttgacactgatgggggctccgctggttgatatggagatcagaggtgtcccctgctctgcgcttcttgggcgatatcatttggaaataagatcattacatattatcaccacaaggatgaagaacaagcaggttcacttgtatgagatagtgttggttaatacattacatagtttttggtatagatgttgatgtttgtctttgatgggtttggtctttggctaaaaatgaatatcgacgagtttttcaaactgttaacagattcagtatttgctacattttggtgggtgt

SEQ ID NO: 85124 - DNA, 565 bp, Arabidopsis thaliana columbia
  unsure (1)..(565): unsure at all n locations
tttgcatcggtgcagcgagaggattacattatctacacaccggtgcatcgcagagcattatacaccgtgatgttaaaaccacgaatatcttactcgacgagaatctagtcgccaaagttgcagactttggactatccaaaaccggcccttcgctcgatcaaacacacgtgagcacggcggttaaaggaagctttggttatctagacccggaatacttcaggagacagcagttaacagagaaatcagacgtttattcgtttggtgttgtactaatggaagtactctgttgtagaccggctttaaacccggtattacctagagaacaagtgaacatagcggaatgggcaatggcgtggcagaaaaagggtctgctagatcaaatcatggacagtaacttaaccgggaaggtgcaaccctgcctcgttgaaggaatttggagaaaccgcagaggaatgtttagcggaatacgggtgtggaccggccttcttatggggagatcnatttgntnggaattttggaatacggggttacanncttganggaacatcttcgggctttnattgga

SEQ ID NO: 85125 - DNA, 604 bp, Arabidopsis thaliana columbia
  unsure (1)..(604): unsure at all n locations
gagttgattataaaataactcaagagagatcacagagagatatggcggagggtaaacccgacgagcagctctttcagcttctttcgggtcttcttcaacaggtagaatcattgacaaatacagaagaggttgagctacgttctaagattgaagctcttggtttagaagtcactaaagtgccatcaaagtctgctcaacacctcaatgaggtggagatagctaaggaattggacaagttatccagcaaagttaagatgatgggggatgagatgatatcatcagctatagcttctgatccacaggttcagacgcttcttagcggcacagctgatgtttggatgccggttatcactgccggcgccgaagagagactcaacttcacagcctctcntgctgatgatgatgacctttctaacaaggagactactaccgacaataccagcagctcttaatcccattttctttttgataaactcatgtcgaagttttctattttgcagtcttgtttcttttatgtatatcaaaaccaagataagctttaattcatgagtgatattgatgtttgatttttacgcaaactgaatacaactgtttatttattaaa

SEQ ID NO: 85126 - DNA, 645 bp, Arabidopsis thaliana columbia
gttattgacttgcttactgctgaggcatggttttctgaagataaacagctaaaagagaagattgctaaactaagcatccaaaccggcgtactatccgagtatactcgaatgatccaattagagaacacagaagaattgaaacccagcgaaactggcggaaagaagaagacaacaagcaacggcgagaaacagaagatgatatcaagaacgatcccgctacaaagccttgggataggatttggggataaaacagccaccagagagaatgttccgccaggatttggcgagcagaaagctcctgatgctgctgagaagttcgtcaaggctgcttcgagctgttgtgtctccttgtgcaacaaatgttgctgcatgtgttgtgtccaatgctgctctaagctcaatgatcaatgtgtccttgtcttcacacagctcttcacagcgattgcttgcatcgcctgctttgaatgttgctcaactgtttgctgttctggagacgatgggtagttagttaaattataaaaaaaaatcggttttgaattcgagtgtaaagctttaaaagtttcaaagtaagtttgtacattttacatacacactgcatgtaatttctgtacggcctgatcaaatataaaagctgtgggttttctg

SEQ ID NO: 85127 - DNA, 528 bp, Arabidopsis thaliana columbia
cccacgcgtccgcccacgcgtccgcccacgcgtccgcccacgcgtccgcccacgcgtccgcccacgcgtccggtctgaaacagtgaggggattcctaggtttcagagcttagtaatgtctccactcaagtacttgtgtgtgagaatggtactcttgttgttgctctattccagtctcttcctattctcttcttcttctttctttgcctcatcagttgatgatcatgagctacaacgaatagatcctcatttccgagtgagaagattgttggtgaaagatctggattcaactggtgatgatgatgaaaccaatcttcctcctcctcctaagaagaagaagcttcttactgattctgtttcatcatcatcatcatcatctgttactaataataatcaaaccaatctccttaaacccatctcttcttcttcttccaccaataaccatactaaactctccaataccaccaccatttttacgtctcacatacttaactccacaaaatcttcttctaacacatccaataccatc

SEQ ID NO: 85128 - DNA, 622 bp, Arabidopsis thaliana columbia
gattagattatccgaattttattctccatacagacaatcaattattcgaatcttgatttttttggtccaagtataataaaggtaacggcacatcagaactctatttttttcccaaacacctattgcccaaaaagaaagtaaaccactgtgatacaaattctataaagataaaaaaagtttatgctcaattaaataacgtaaaggaaactatattgacaaataaagacaacaacgacggaaataaacaactaaaaaccactttctttgatttcacacaattttagtgagtcaaaacgctgtgctgaagtagctactcaccacattctcacacagaatttggagaaccttagcattacttggcttcacacatcttggcatcttaaactgtccagccgatgaaccaagcccgagaaaatgttcttgaatcttccggaaagttccttttgcgacaactctcagctccaaggctccaatagtcttgcatttccgggaactaacgtaacccgcatcgatgaatgctcggtctaaacagttgcagcaatcttgaagaacgtcttcgtttgtttctcctgaaatctcccagaagatagcgtaatgtcctggatctgtcgagacatcgatg

SEQ ID NO: 85129 - DNA, 1012 bp, Arabidopsis thaliana columbia
  unsure (1)..(1012): unsure at all n locations
nnnnnnnnnnnnnnnnnnnnnnnnnnnnnnnnnnnnnnnnnnnnnnnnnnnnnnnnnnnnnnnnnattgttttgcctttcctaagatcatcgagagagaagaaaagggaaaacaaaggatcttccatgggcgatcgctgagaagatccgcaagaacaaaaacatcaaattccttgaaatcaggaatcttattcgatagtctatttgagcccttgatctggttttttatttggtgaaagttttgaaatggtgctggtattggcattgggggatctccatgtaccccatagagcggctgatctacctcctaagttcaaatcaatgcttgttcctgggaagattcaacacatcatctgcactggaaatctctgcatcaaagaaatccatgactacttgaagactatctgccctgatttgcatatagttcgaggggagtttgacgaagatgcgcgataccctgagaataaaaccttgactattgggcaattcaagctgggattgtgtcatggccaccaggtgatcccatggggtgatctagactcactcgccatgcttcagagacaactgggcgtcgacattctcgtaacaggccatacccaccagttcacagcgtacaaacacgagggaggagtggtgataaacccgggctctgcaaccggagcttacagcagcataaaccaagacgttaacccaagctttgtccttatggacatcgatggtttccgagctgtagtctatgtctatgagctaatcgatggagaagttaaagtcgacaagatcgagttcaagaagccccctactaccagctctggtccgtagttccttaaaaaaaaacttaaaccgttttatgttttcgtctgaaatcactcctaaacatttagaactttcttgtgaaaaataatatttttaacaatttgcaaaacgaaccattgagaataaacaaaaaaaaaaacaaaagggcgcgccgctctagaggatccaagcttacgtacgcgtgcatgcggcgtcatagt

SEQ ID NO: 85130 - DNA, 359 bp, Arabidopsis thaliana columbia
  unsure (1)..(359): unsure at all n locations
ttttttttttttttttaaaaaaaaaggtccagtcccaattgggcttaggcccggaattacaatcgtccacagttacaaaacaggaaaattccggtcaccggaaaacgagaaccagaggtggttttgggcagtggaacgggaggcagcaaatagatctattagctaccgtcgtttacacggcccactactctgcaacacacccaccggaacgagatcattgggccgaagtatacgagtcctgccgcaattctcttaccaatgagctggccggacctggaacaaaccttaacgggaaaaaacccagtttccgaaactccgccacccgnattttgggtngaagtccccaaacctcgcaaaac

SEQ ID NO: 85131 - DNA, 887 bp, Arabidopsis thaliana columbia
cttcttcattcaccatgggaagatctccttgttgtgaaaaagctcacacaaacaaaggagcttggactaaagaagaagatcaacgtctcgtagattatatccgtaatcacggtgaaggttgttggcgttctcttcctaaatccgctggattgttgcgttgtggtaaaagttgtagattgagatggattaattaccttcgtcctgatcttaaacgtggtaattttactgatgatgaagatcaaatcatcatcaaactccatagcttactcggtaacaaatggtcattgatagctggaagattaccaggaagaacagataacgaaataaagaattattggaacactcattttaagaggaagcttcttagtcacggtattgatccacaaactcatcgtcagattaacgaatccaaaacggtgtcgtctcaagttgttgttcctattcaaaacgatgccgttgagtattctttttccaatttagccgttaaaccgaagacggaaaattcctccgataacggagcttcgactagcggcacgacgacggacgaggatctccggcagaatggggagtgttattatagtgataattcaggacatataaagctgaatttggatttaactcttgggtttggatcctggtcgggtcggatagtcggagtcgggtcatcggctgattctaaaccgtggtgcgacccggtgatggaggcgcgtttgtcactgttgtaataatttgtcaaaaaaatcccaaaaaatgggttttgttacttcattttttttttgcttgagtccttttggataaatatagaaattctttacttcaaaaaaaaaaaaaaagggcggccgctctagaggatccaagcttacgtacgcgtgcatgcgacgtcatag

SEQ ID NO: 85132 - DNA, 541 bp, Arabidopsis thaliana columbia
  unsure (1)..(541): unsure at all n locations
agcttttctccttcacaaaaaaaaaatgaagatttctctcttcctcctctctatcctcattctcttacccatctccctacaagatcctactcctgaagtcaagaaaccaactcgtgcacacgcagagctcacgaatcatggattcccaattggactcctacctttatctgtcaaagattacttcctcaaccaaacctccggcgacttctctcttttcctcaacggagcatgcaaaatcacgcttccacctgataactacatcgctacttattctaacaaagtaacgggtcggatctctcagggtaagatcgcggagctccaagggattcgggttcgggcgtttttcaagtcgtggtctattactgggattcgatcttctggagataaatcttcgtctttaaggttgcttgggataaccggctaaaaancccttcggangattttcgattgagggntttnattntaaaggggaacggtcttnttctngnttcaaattnnattaaagnaagcttttaagnaaggntcgcaagtnaggattgta

SEQ ID NO: 85133 - DNA, 537 bp, Arabidopsis thaliana columbia
ctttactctgttcttaactcttacgattctcgtcgtcttcatcatctcttcacctccggtccaagccggcttcgcaacgacctcggtggtgtagcatgggctacgactggagacaatggttcaggctgccacggttcaatagcagagtgtatcggggcggaggaagaagaaatggactcagagatcaatagaagaatattggcgacccacaaaatacataagctatcagtctttgaaacggaacagtgtgccttgttcaagaagaggtgcgtcttattacaattgtcagaacggagctcaggctaatccttatagtcgtggttgcagcaaaattgctcgttgcaggagttagacctacaaacaaggaagctatcttcttgatcttgacttatgttttctttgatccatcaagcgttttcattttaattaaatctttaaatattcatcatgtctctgcacaatagtaaagacctatgttttgatcaaattgggttgatttgtaatattttatgtgaataatcatggtcttaatgatca

SEQ ID NO: 85134 - DNA, 451 bp, Arabidopsis thaliana columbia
  unsure (1)..(451): unsure at all n locations
cagctctaaaaaccctaaccgtttcgattcacactctaacctttcgataatttcccagaagatgttggagcttcgtttagttcaaggttctctactgaagaaggttctagaagcggtcaaagatctggtgaacgatgcgaacttcgactgttcgaccacagggttctcgcttcaagctatggattcgagccatgtcgcgttggtgtctcttttgcttagatctgaaggtttcgagcactatagatgcgataggaacctctctatgggaatgaatcttggtaatatgtctaagatgctgaaatgtgctggaaatgatgatatcatcaccatcaaaagctnatgattggtagccggcactgttaactttccatggtttgaggaggcccacacaacggcaaggatttgcagggtttttgagattgaagctcatggatatccgacagttgaggca

SEQ ID NO: 85135 - DNA, 632 bp, Arabidopsis thaliana columbia
  unsure (1)..(632): unsure at all n locations
tgttgatgttgaatactgtccacctgtttcatcagatggtgcccatttccctccagaagctgctaaagccaaggaggccgcacaaagctctcctagccctcagaacacacttgagtatcatgaaattgtggaagaggaaatgatccgcggtctgcagaggttggggtggaagaaagttgatgtcagcttccactccaccttctggccttacttagctcataacaacattcacgtgaaaagtgaaagactttacaaaagcaggagctggagttattgcacacgttgcagatagtataaaacagcaagagtcttccacgtttattaccgccagctttattaaatcgtggagcattttcggagtgtttcgaccccgtttaatgctgagtgtgctacgacatttgaaccattcctgtgttttgcttttaccatacagtttgggagatcggtgcagatcaagaatgttcgcatctttgcttcttctattttttttcttggcgaaatcagaagaagtacaatccaattcatctgtacatgattttcttgtattagcttgttgatgatacaacacttgaaagatgttattatagattaaggtttcttaaagagnaaaggttatatatgttcaaaaaaaa

SEQ ID NO: 85136 - DNA, 650 bp, Arabidopsis thaliana columbia
  unsure (1)..(650): unsure at all n locations
nnnnnnnnnnnnnnnnnnnnnnnnnnnnnnnnnnnnnnnnnnnnnnnnnnnnnnnnnnnnnnnnnnnnnnnnnnnnnnnnnnnnnnnnncggccgcggaatatccctgtttcacccttcttcttcttcttcttcttcttcttcctcgtgttttttttccataacattccctctgaatcttcgttttttattggaaagaaacaatctaatccaagttcaagggttttctcatcttcagtggctgaagttatgagctttacaagatgggaagtgttctttggtctctctgttttagccttgacaatgcctttctcagctggagttactaatctacgagatgtttcggcgattaataacttgtatatcactttgggagcaccatctctacatcattggcttgcttttggaggagacccttgtggagaaaagtggcaaggtgtggtgtgtgactcctcaaacatcacagaaataaggatacctggcatgaaggtaggtggaggcttaagtgatactctggctgatttttcatctatccaagtcatggacttcagtagcaatcatatttcagggacaattccgcaggctttgccttctttcattcggaaactatctttctcaagcaatcgctttactgggaacattccctttaca

SEQ ID NO: 85137 - DNA, 606 bp, Arabidopsis thaliana columbia
  unsure (1)..(606): unsure at all n locations
cacacgcgtccggagaaaagaagttcacgcctaattacgactaatttttaaatccagaggagaccccattcattgattgattgaataaaataattcgtaacgaagaagcaatcattatcattctctcgatttctcatactagcgataatagatcgacgctgttgatcgcatgtggtagttcctttttggatcagtggtttttgaaatggagaaagtttcgtcgccgtcttcctctttttcacggaggtctgcttatcttgaagctcttacacaagagattaagaagaagcttacacgggctgttgtctctccagcacaaacacgcaacttgttacaagacttatttgctgatatagctctcgaagtagacgatcgagccaaagatgtgatccttagcaaagaagaggatttgattacttctgatgaagcagatgctgatggtccgttatgcttttccgatgtccttgctgattactatgtgaaagtgtctgataaggggggaaggctattcttgaatttgatggtgcagctttggagnccagtcccatgcatcacatatatnctctctactntnccataaacggctgtttgngnttgancntttgc

SEQ ID NO: 85138 - DNA, 1030 bp, Arabidopsis thaliana columbia
acgactcacttttgggaaagctggcacgcctgcaggtaccggtccggaattcccgggtcgacccacgcgtgcgtacggctgcgagaaacgacagaagggatcttgaagctcttacacaagagattaagaagaagcttacacgggctgttgtctctccagcacaaacacgcaacttgttacaagacttatttgctgatatagctctcgaagtagacgatcgagccaaagatgtgatccttagcaaagaagaggatttgattacttctgatgaagcagatgctgatggtccgttatgctttttcgatgtccttgctgattactatgtgaaagtgtctgagagggggaaggatatacttgatttgatggtgcagctgtggagccagtcctttgcatcacatatattctctctactggtccataaatggctgtttggggttgagctcgacaatcaagaaatactcctgcgatattcttcggctctggtgcagggagcaacaaatgtgttctggatagacatccagacaaatacgaggcgcttccaaagtctctttcggtatctcctggaggaagttgctttggagcagatacgattgaaaaaaattcccattcaggctcagagggaactgtatctcttactctctaggttcattttcttttacaattcagtggatgaactcgatagcttcttgaggaacttcccagagtttccaaatgctttcttgattggaggacctggagatttccttgttatcgaactaactgatcagctgcaaaaactggaaggtggaaccactgcttgctacattatcttttctcagatgaagcattcttccaagggattggacctgcggatcgacttcctttgcacccaaggttaaaaggcgtggcttttttcagtttttcccccccctggaagtccaatgtacccgacaagagccgtccgtcatgcagcctgcgatgctttggattccctctttcctgttgggcgttacccgaggcatctcattagtctatttttcaggctgctata

SEQ ID NO: 85139 - DNA, 243 bp, Arabidopsis thaliana columbia
gttgattacagtccatatgttcctcaagtggaaaaatgcagcggacgtcctcgagaagcacactcagttaatatgtctgtagtagcttgttgttttgtggggttcttgtcttgttgataaaaacggcagtaccgaagatgcaaaattaagtttaagatgctatgtatgtaccttggaaaataacgggtgataagcttttctttcttgttttagaagtaaaaataaaaataaatctatattctc

SEQ ID NO: 85140 - DNA, 420 bp, Arabidopsis thaliana columbia
cagatacaggcaaaggaagctctgtcgctggctgcaacgatagctgtggctgcccttctccctgtcccggtgggaattcctgcaggtgcaggatgagagaagcatctgctggggagcaagggcacatggtgtgcccgtgtggagagcactgcggatgcaacccctgcaactgccccaagacccaaacccaaacctccgacaagggctgcacctgtggtgagggttgcacatgcgcctcttgcgacacttagacatccttatctctgtctgtaccacactttgtataatagtactagctagacagatctgaaaaataaatctgtttattaggtccaggtacaagaaaacatatgtcgtcgtatgctctgctctcgtcttcatgaatcaacaagaatctgaaaatcctgaaggtcttggact

SEQ ID NO: 85141 - DNA, 430 bp, Arabidopsis thaliana columbia
gcaagcagcatggcgacggtacataaagaggaagaaattggagcaacttagtaaagaagaggaagaagaagaagcggcagcagcatcagttatagcaggaggaagtccttatagcataagagcaacgttcttggcttcaaagtttgcggcaaatgcacttcgtagcgttcacaagaaccgggccgcgaaatcaacattgttgttgtcatctactaaagaattggtgaaatttcagaaacctccagaaccagatttctctgctgaagatcactgatccaatatcgcatacgcaagaattctttttctttttaacttgtacacaatctctaagaatgctccaaatttttttgttgttgtttaaacacttactgtaatataaatgattatttgtgatcgttcttaatcttgttattacatagaaatgtttttt

SEQ ID NO: 85142 - DNA, 555 bp, Arabidopsis thaliana columbia
ctgatctaacaatggcgacgaacaacatcgtacgtttgatcgctccaagccgatccgactcctctagattcctcgagccagtgtcacggtttctaagctccggtacacctcctccgccgcaagctccatctccgaatcaggatctgaaccgggacgtgaagccagatcagaatcttcaacagaatctgcagatgcagaaggaagaagaagaggaaggagaaggtggtggaggtggagagttttgagaacgaagatactggtgagattggagggactagaggtcctgaaccgactcggtacggcgattgggaacaaacgtggtcgatgctctgatttctgagaggattcatgtatccctgtgttttagcttgttcttatatatttctgggaaaaatggaaataaattcgttttatgtgtttatgtatttccacaataatggagaaaatggaagaaaatgtagtagaacttcaaattcgttgcctttatttggatcatcattctctggtgatcttgttattccagtaatagttaataagttcttcctcaggtgggtt

SEQ ID NO: 85143 - DNA, 518 bp, Arabidopsis thaliana columbia
  unsure (1)..(518): unsure at all n locations
cccncacattgcngttcaacagctgnagttttaaaggcatgcccgttgttttncaagatgatggtccnacnatggcancctggncaaaggctgatggtccccaacatccctgtcctcccctggtggaaccaaaagcttcgatccnatcgcttgtgnttgtggcccgtncagtagtggaactgtaccaaatccctgaagaagcacgcatcaatccccatttaaaccttgagaaaccggcgacacctgaaccggtgatctcgacccatgaaatctgatgagaagatcgagggtgatagttccaaggatgagttgtgatgatcggaacagagtgtgtaacaaggctatagatgatgactcttctataaatgatagaaaatgttttgccctttgtttttttccattgttgtatgctatgaaatgaataattaaagaagttttggtttctcaagtttttggatgtaactggaggtttgatccacacattgagtgttgatttaatgcgacttgtggttcataaa

SEQ ID NO: 85144 - DNA, 411 bp, Arabidopsis thaliana columbia
aatggaagcaatgattttattatgccatgtgttattagaaggttgtttcctacgaagatctggttaaagaaaagacgcaaaccgattcatataacctttattctagtacactatcgaagggtttttatgaacttggtttagatctaattttattgggaatcctaagcttaatgatgactcagtcaacatcggagggtagatactctacatggcaactgcatgttgacaatgtcctgtcttgggaagtgtctccacatttgggggagtcccctggaattaggaggagaagtggctaccccgggttttccggaagacaaggtaaagctatggcggcctaaatagagagcaatgcctgcgaccccaagattccacagaagacgacgaggataagcttcatatgactgtggataa

SEQ ID NO: 85145 - DNA, 559 bp, Arabidopsis thaliana columbia
  unsure (1)..(559): unsure at all n locations
aaaagaagtttcaaagaagaagtgaaaatggaaaccactgcttataacacaacatcacgaattggaatctggtcatcggctatttctccacctctacaaacatgtggttctttcaggtgccaattaccaacacgaagaggtgttattgtagctgatcttcgaaactcaaacttccgatggtaagctagcaatcaacggcgagaatcgccttctctatctgattttagattatgaataaatattaaatctgagtattaacttcttgctcaaggaggaaagcaacgacaacaagcagaggaaatgttgcagcagaggcagttaaaattcctacgtcagtaccagtaagagtggcgcgtgacgctagctcaagcaggataccgctatctcgacgtgaggacaccagacgaattcagcatcggacatccgactagagccatcaacgtacctnacatntacagagtcggatcaggaatngttaagaacccgattttttctaaagaaaaggtctcgtnccaactttaagggaacaacgggttnaaatantaaatngggttcttna

SEQ ID NO: 85146 - DNA, 501 bp, Arabidopsis thaliana columbia
  unsure (1)..(501): unsure at all n locations
aaagcattctaaaagaagtttcaaagaagaagtgaaaatggaaaccactgcttttaacacaacatcacgaattggaaactggtcatcggctatttctccacctctacaaacatgtggttctttcaagtgccaattaccaacacgaagaggtgttattgtagctgatcttcgaaactcaaacttccgatggaggaaagcaacgacaacaagcagaggaaatgttgcagcagaggcagttaaaattcctacgtcagtaccagtaagagtggcgcgtgacttagctcaagcaggataccgctatctcgacggtgaggacacccagacggatttcagcatcggcccatccgncttggaggccttcaacggtccctttacatcgtccagggtcgggttcagggattggtttaacacccctgtttttttgacggacggtttgtnccccttttgggggcccgggtggaatcattatggggtttgngggggaaaattttttttngcccc

SEQ ID NO: 85147 - DNA, 711 bp, Arabidopsis thaliana columbia
  unsure (1)..(711): unsure at all n locations
cggaaatttggggaaaaacttggtgtccatcgcgggtatattttcttcccaacctttcttacaaaacaatgttgggttcctttccaagttgccattttccccacccggaaaaaggtggttatggaagctgttcttcgaaactcaaccttccaatgaagaaaagcaacgacaacaagcagagaaaatgtgcagcagagcaggttaaaattcctacgtcagtaccagtaagagtggcgcgtgagctagctcaagcaggataccgctatctcgacgtgaggacaccagacgaattcagcatcggacatccgactagagccatcaacgtaccttacatgtacagagtcggatcaggaatggttaaagaacccgagttttctaagacaggtctcgtcccacttcaggaaacacgatgaaatcataatcggttgtgagagcggtcaaatgtcatttatggcctcaactgatcttcgccctgctggcttcacggcgatcacagacattgctggaggatacgtcgcttggacagagaatgagctgccggtagaagagtgaaaacaatcatagccggcccccctcctggaaatatcaataaattctgtagatgttttccacgccaggatccattctcctttganaggaaaaaaaaaaaaaaaaaaaaaagggcggccgctttaaaggattccagcttaaggaagggtgcaagcgacgtta

SEQ ID NO: 85148 - DNA, 636 bp, Arabidopsis thaliana columbia
  unsure (1)..(636): unsure at all n locations
gacataaaacttgctgacgtgacacccatacctttgtgtctgtatgtattatataaacgctatagaactaagagaagaagtatctaagtagcatcaaagcattctaaaagaagtttcaaagaagaagtgaaaatggaaaccactgcttttaacacaacatcacgaattggaaactggtcatcggctatttctccacctctacaaacatgtggttctttcaagtgccaattaccaacacgaagaggtgttattgtagctgatcttcgaaactcaaacttccgatggaggaaagcaacgtcaacaagcagaggaaatgttgcagcagaggcagttaaaattcctacgtcagtaccagtaagagtggcgcgtgacttagctcaagcaggataccgctatctcgacgtgaggacaccagacggatttcagcatccggacatccggcttgggggccatcaacggtaccttacatgtacagagtcggtccagggtggttaagccccggttttttaggcagggtcgtcctcttagggacacggtgaatcataatcggttttngngcggnaaatgcatttntggctaactgnntnttantgtggttacggggnaaggattctgggacgcgttgcaggatagtct

SEQ ID NO: 85149 - DNA, 872 bp, Arabidopsis thaliana columbia
  unsure (1)..(872): unsure at all n locations
nnnnnnnnnnnnnnnnnnnnnnnnnnnnnnnnnncgcagtaaccggtaccggaattcccccgggtcgacccacgccgcctcaaagcattctaaaagaagtttcaaagaagaagtgaaaatggaaaccactgcttttaacacaacatcacgaattggaaactggtcatcggctatttctccacctctacaaacatgtggatctttcaagtgccaattaccaacacgaagaggtgttattgtagctgatcttcgaaactcaaacttccgatggaggaaagcaacgacaacaagcagaggaaatgttgcagcagaggcagttaaaattcctacgtcagtaccagtaagagtggcgcgtgacttagctcaagcaggataccgctatctcgacgtgaggacaccagacgaattcagcatcggacatccgactagagccatcaacgtaccttacatgtacagagtcggatcaggaatggttaagaacccgagttttctaagacaggtcttcgtcccacttcaggaaacacgatgaaatcataatcggttgtgagagcggtcaaatgtcatttatggcctcaactgatcttctcactgctggcttcacggcgatcacagacattgctggaggatacgtcgcttggacagagaatgagctgccggtagaagagtgaaaacaatcatagccatatcacctcctgtaattatcaataaattctgtagatgttctcaacgcaagtatcaatcatcattattattctcttaaaacatagtttaactgtcaaaaaatctagaggatccaagcttacgtacgcgtgcnnnnnnnnnnnnnnnnnnnnnnnnnnnnnnnnnnttgcagcttcaaccttttctttttc

SEQ ID NO: 85150 - DNA, 530 bp, Arabidopsis thaliana columbia
  unsure (1)..(530): unsure at all n locations
gatgtagcttttcacattggaccaaaacaagggccggaaaccccgctagctttgttgatagaaagttagcttcccgtgcttgactagtagggctaatgaacgacccttaactatggaatgttacgcctttcctcggttantcacaacgtaatcaactccattggttatttcccccgggggaacacctatagccccaatagactgatttagtaggtatgatgtattactaggagtctctaagttcctggtttggttgtccctgtccgggctaagcggagtttagctttggccgttaataagagcttccctccattccttcagtccagtcacgcttttcttttcggcttttgcttcagtctcttcttttcgtcctttcaggtggcatttcgcttagtcttgtcattccttccgtcatgctactgtcatgtgctanaaattgatcctcccgtctagtgtttcctctctcatgttaaacagaccgctcctttaanccaatgaataggcggcgagggtaaaaaaaaaaaaaaaaa

SEQ ID NO: 85151 - DNA, 625 bp, Arabidopsis thaliana columbia
  unsure (1)..(625): unsure at all n locations
gtaaggaccgggataagctgaagtggaactttcttaggacagacaagtccatatgattcttcaagatcaacatcttctacctccattccttccggaagcttccaatcaaatcggtaaagaagattgataagagtcaagtgtaccaaagccatacccatccctataccagggcacattctccttccgctaccaaacggnaaaaactcaaagttcaaacccttataatcaatctggttatccataaacctctcggggatgaaagcttctggatctttccaaacgtttggattcctatgaatagcccatatgttgacatggatccatgttttctttggaatgtcataacctccaatctttacatcttttgaagcctctcttggaattagaagtggaacgagcggtaataccctaaacgtttctttaactaccattttcagatattcgagtcgttctatatcttcctcaatgatatcgtctttgttttttataacttctctcacctcggcttgcgctttcttcataactcttgggtttgaaatcaaatatgtcatcacccatgtcataacttgtgcagaagtgtctattccagcgttaagaatattgaaaagaattcctttggtgttgt

SEQ ID NO: 85152 - DNA, 449 bp, Arabidopsis thaliana columbia
  unsure (1)..(449): unsure at all n locations
gcgtaacaatgaatctctttgnaactctctcttccctgtcaagggtccctcagttcccttagcacagtatcttcgttacgttgaccagtactgggataatctcaatgctcttggtcgagccgacggaagcagactccgtctattgacgtacgacattgtcctgatgctggctcggtttgcaacaggagcttcttttagcgcggattgccgaggtggaggaagagatagcaattcccgtttcttgcctttcatgttccaaatggcccgtcatcttctcgaccaaggaggccccgtgcaacgcacaaacatggctagatctgtttcatcgtacatttcatcatcatcgacatctacagcaacagcgccatcctcggactcgcgacctttaactcctggatcccagctatcatcaactggaacagaggaaacggttcagttcatgatggtaa

SEQ ID NO: 85153 - DNA, 595 bp, Arabidopsis thaliana columbia
  unsure (1)..(595): unsure at all n locations
gcccaaaccccctgccatttcnaggtgnaaaccccngggttggnaaaaaanagananccccggggggggagggattnccngcctttnttgggaaaatcccgccntttaccttccactgcctcccaaaagcactcttcttggtgagaagagtcagaagtatcagaaacacccaggagcaagagtggagagcgcatatgcatcatctgctcacagaagtgcagacgaacagatcccatcaagcacaagctttgtgaagctgtcggatatgagcgaagaagagtggacgattttcctggagaaatatcaagagctgctttatccagccattgaaaagcgcaagtcgataactttaggacagaagcagaggcagaggctggggacttcttgtcagttttgagaagactgaagaagaagaagaagaataaaaggatcgtgtaaagtcgtgtttctaagggctttgcttagactggattgttggaaacgcgtaaaggtgaagatatgagtggaatggatttagtgtaaatattcgttggttactctcagcttttagtatggaggagtctcgagagatgaagagaaattagtcatttgtttc

SEQ ID NO: 85154 - DNA, 464 bp, Arabidopsis thaliana columbia
attttgtttttgtaagatcaatcagtttttatgaagagaaaatggagataacaatatcccaattgtgctctcgagttaagttttcatcatcatcatcatcatcatcacttttctgtttctatggaaacagtaatagaaacaacctaaatggagctgtttcagtaaactgcttgagagagaatgagcagatcagtaatattagcttcattgcgaagaaaccaagaagtcatgcaccggtggtgagaacaacacgcgcctccttggatgagaatcaatccccaacttccggaggagaacggtggcttctcaaaccagttggcgatggagacacaagacacattggttacaaagtggcaatgcctgctccttttgagatctcctctggccaagttaccatcggacggctaccggaaaaggctgacgtcgtgattcctgttgccaccgtgtcaggagtccatgcgaca

SEQ ID NO: 85155 - DNA, 396 bp, Arabidopsis thaliana columbia
  unsure (1)..(396): unsure at all n locations
aaaaaccccacaaacaaatctgtaatattcacatattacaaaccaataaaaaaaataacaaaccaataaaaaaccttttatagacactgattgtgtttttcttgtttcttcacttatgtaggtgatgaaggctttgttgtgtgagaagatttgccagtgagtactttcttgaccttagaaattgaatgctttacctttgaaccaacaccagagagaatgccgtgagatttcttatgagtcttgacaatgcttactgtatctttagcttcaaccatcactattggatctgggcttgttttatcatctttatgttcatgatctncatcatcattctcatcttcctctgttttaggctctttttggatgtggtcagatagtgatttccttgccggttct

SEQ ID NO: 85156 - DNA, 610 bp, Arabidopsis thaliana columbia
  unsure (1)..(610): unsure at all n locations
aaaaagngggnaaatcttagnccgggttaaacccnccnanaatntncatttccaggnannntttcccctggaattantanccctccaggnccaattttatttctncnngggtccccattaaaaattgggnacccttcttcttnagatgtttcccacaccttgnaggctnctgcctncaacggctacagaccagttttgcgatnccgttttggtggttcataatgccctggtccgatcttcattgcaaccttttcatctattatagccgcatacacatctctctcactcttgtctatattcccctcactccgacagtggagtttctgtctgttcctgagagagagaagtgcagcaatctcggaatgataatccgagaagatatggtcgaagaagaccgctggtgttcctggatgagttaggatgtaagcatatccttgcatttccttcccctccggaaatctccaatgaccctgtgtagagccagtgtcatgattctcgatgaatgttacagcacgagaaggccaccaaccaactacacctggaggcttcccttttgggtctgagagtctccaatattcacatttttgaagcgccgtatgaagaattcctg

SEQ ID NO: 85157 - DNA, 537 bp, Arabidopsis thaliana columbia
  unsure (1)..(537): unsure at all n locations
tttttttttttttttttttccacaagaacaatcattctccgcttaaaacacaantccagatacaagagtactngttttttcatttcaacgccttaaaacagggtcaactatgcatgatgcggaactaaagatgttttaaaagatctacaagacgtgtccctatggctagggtacattacacaagagatgcatcattcatctacacaaacaacacgcactcttgatctggtctcagttcacttcccctcttctcttcaggtactcttgcatgcaactggggtgggtttcaaatataaagggcatcccccgtctctcaactagacaatcggatttgaggattaaactctgtccaggatctacttccttctcatttacttgngattgaatacttccccaggntttttatatgancgnacccgtcatcaaccagccgtatgatcgcctgtcggcgngatattttnntnncccgntttnttttcccaatnaatgtccacaggggggnntntgntgacttcccaccaaaacntangggttttt

SEQ ID NO: 85158 - DNA, 483 bp, Arabidopsis thaliana columbia
  unsure (1)..(483): unsure at all n locations
atgtatgttatatgaaatttagttgtcggaaagagaaaaacaaaaccacctgctacaaacatgtgtgtatatgtatgttaaactacaccacattaatgtcgcattgatacgattcacaacatgacatttgtctaatgaccatagcctgggatctaataacaagaaaacagattaagatggggggagtgaataattaggaatgtgaggaaatgggggagaagaagaggaaggccaaagctgagcgaatttgacctgggagatgctttctactagtccgacgggtgttatctttccgcccaccgtcaccttctggggcgctaaatcaatagtgtatgacgccaccccccccattggggagatatgctttccaacctttccttcacatcccttgcaatggatgatnccncaaacacacctggcacagtggtggaccgcgtgaacattggcnngagagngaagtgtgagagcggagtgtgggcgaga

SEQ ID NO: 85159 - DNA, 665 bp, Arabidopsis thaliana columbia
gatagaagcatcaagagccgggaagtggagtcttctagagcatgccttcgatgcagggcttgaagatggagaaatcccgcacccattgttcttcactgaactgttgtgtcatgccacagctaaaggcgatttccaaagagctatcacactgattaacactgtggctctcgcatctttccagattagtgaagaagaatggactgatctttttgaggagcatcaagactggcttactcaagataatcttcataagctctcggatcatctcattgagtgtgattatgtaagtgaaccaacggtctcaaacctctcaaagtcattgaaatctcgatgtgggtcttcttcttcttcagcacaaccattgttagccgtagatgtaacaactcaaagtcagggcgaaaaaccggaggaagatttgcttctgcaagatacaacaatggaagatgataatagtgctaatggtgaagcttgggaatttacagagactgaactcgaaacgttgggtctagaagaactcgagattgatgatgatgaagaatctagcgactctgattcactttcagtttatgacattctgaaagaatgggaagagagtagtaagaaagaatgaaaatgcttgtaaatttcctcaaaatctttagtagaacaaaatctcaatttttttg

SEQ ID NO: 85160 - DNA, 589 bp, Arabidopsis thaliana columbia
taaatgtattatgtcaaatcccaaagctaagaatctcaaacctgaagagcttcagaaacttttggtgcaagaagttactgctctgacccaggtagggaaggtagtggatatatggcatgctgggaaaatgttctacacactgtccacttggggacttgcatttggagggttataccaagctcgtggtgtgctgaagatagctgctaaagggtgttcatgcgaccagcaaggttgttcttagggctctttgaaagttataagaggtctatctaatgcgatgaaagtgggaatgatgatcttcaactatctttgggtttgtctttctgtgcgagactctgtttttaaattaatagcattgcgggtgtaaatagtgtaaatagggtttgatcaatgttgtatttcatattgatttcaaattcgacatttgttctttgattctcgtttataaacgcagacaatttgtgaatatcgaacaatgtttgcagttaaaaaaaaaaaaaaaaaaaaaaaacccaagcggccgctctagaggatccaagcttacgtacgcgtgcatgcgacgtcaagtaaattctatagtgtgcctaaa

SEQ ID NO: 85161 - DNA, 1120 bp, Arabidopsis thaliana columbia
  unsure (1)..(1120): unsure at all n locations
atacgactcactttanggaaagctcgtgcgcctgcaggtaccggtccggaattcccgggtcgacccacgggtgcggcacgcgtacgtacgggtagatttgcgagaaggcgacagaagggggaagaagaagaagaagatcaaaaccatgacgagtcaccacgcgatcgaagtgacgaagacggtgctggaagtagccgacgtagcatggaccgcggtggaaacttaccatcaccaccaccaccaccaagacgaaaatcacgagtcaacgaatccaatttctgatccacgagatcgtgaattagaagctcttcgtcaagagaatcgtcgtctcaggactttgcttgaatcgaatcttaaactctttgagactctcgctgaatctgctgcgttctctcatgattgccctagcgacctctatgctaggcttgtaacgatggttacttcaagagatttcttggctagattagagaatctaagacaagctttatctaatggaactcagaatcaatttccattcaaggaaccaacagaagatgatgtgaagactgttgaagttcttatagagatggatcatcaagagccaagttggtgggttttagttactgatgatatagttcctagtaatgtcgaggaacaaagcgcgatcgataacgaacattacattgttgtgaatgaagaacatgtgattgatgctgttgctcactttttggctaaatgtattatgtcaaatcccaaagctaagaatctcaaacctgaagagcttcagaaacttttggtgcaagaagttactgctctgagcaaggtagggaaggtagtggatatatggcatgctgggaaaatgttctacacactgtccacttggggacttgcatttggaggggttataccaagctcgtggtgtgctgaagatagctgctaagggtgtccatgcgaccagcaaggttgtccttagggctctttgaaagttataagaggcctacctaatccgatgaaagtggggatgatgacttccaccacctttggggttgccttnctgngcgaaccccggttttaaaaaaaccatccgggggaaaaggaaaanggggtnccangtgnttccaatggccaaccccatgncttt

SEQ ID NO: 85162 - DNA, 1329 bp, Arabidopsis thaliana columbia
caaattcagcacttctcatgaaaacaatcttcctcgtactcatttttgtctcttttgcaatctctccagcaacttcaactgcgccggaagaatgtggaagcgagtcagcgaacccgtgcgtcaacaaagctaaagctttgcctctcaaagtcatagcaatcttcgtaatcctcattgcaagcatgattggtgttggagctcctctctttagccgtaacgtttcgttcctccaaccagacggaaacatcttcactatcattaagtgtttcgcctccgggatcatccttggaaccggttttatgcacgttttacctgattctttcgaaatgttgtcatctatatgtcttgaagagaacccgtggcataaatttcctttctccggatttctcgctatgttatcgggtctaatcactctagccattgactccatggccacgagcctatacaccagcaagaacgcagttggtatcatgccccatggtcatggtcatggtcacggccccgcaaatgatgttaccttaccaataaaagaagatgattcgtcaaatgcacagctcttgcgataccgagtcattgccatggtcttggaacttgggatcatagttcactcggtggtcattggattatctctaggagcaactagtgacacttgcaccattaaaggacttatagcagctctttgcttccatcaaatgttcgaaggcatgggtcttggcggttgtatcctccaggctgagtatacaaatatgaagaaatttgttatggcgttctttttcgcggtaacaacaccattcggaatagcgttagggatcgctctatcaactgtttaccaagataatagcccaaaagctttgatcacggttggacttctaaatgcatgctccgctggattgctcatttacatggcactcgtggatcttctagctgcggagttcatgggacctaagcttcaaggtagcatcaaaatgcagttcaagtgtttaatcgcggctcttctcgggtgcggtggaatgtcgattatcgccaaatgggcttaactaatactccagatattgcggaattgaaatcatgtggatttcattatcgaactaaaaccgttttaggtttacgtctcgattctctatcggttttttatcttctcttacaaaagatttgcgtggatctatcacattttaaggaacatgtcttttggtagatatgtaaatgtgataggccccacgattcatagttttcttttgtatcttcctttattttgtcaaggcagtatagttcatatcgtgtaatgtttttgcatctcatataaataaataaaacttttgctgctttttc

SEQ ID NO: 85163 - DNA, 425 bp, Arabidopsis thaliana columbia
aatccctaaatttcgaaatctcactctctctcattttcgactttagaaatggcgaccaacgcagatccagctccgacgaagaaaccaaggaacagtagaaaggcgttgaagcagaagaatgagctcgtggagacgccaccatcgcctgtctccgtcaaggggaagtcagcgaagtctttcgagcaagatctgatggagatgcagacaatgttggagaagatgaagatcgagaaggataagacggaggagttacttaaggagaaggatgagattctgagaaagaaggaggaggagctagagaccagagacgctgagcaggagaagctcaaggtggagctgaagaagcttcagaagatgaaggaattcaaacctaacatgacttttgcttgcggtcagtcatctctcacacaggctgggccaggaaa

SEQ ID NO: 85164 - DNA, 350 bp, Arabidopsis thaliana columbia
agagtttgctccacttttacctttgaaattttgtttcctttttaatttttgcgaaatttcaggagtgtttctggttaatgtgagaaagtagattcgcaagaaaccaaaattaaaaaagtgagcgattcgtgttcgattgattttgtggatgatccattatctttctccaatatttttgatttgagcgagagttttgcttcattcggaatcttaagatgtcaggtcccgttgatcgattcgcaataccatgttttgagggaatattgagcagtgatgagaaaaaggaaagaaagtctgattttgagaactcagaagatgagaggagaacaagaatcggttctttgaagaag

SEQ ID NO: 85165 - DNA, 370 bp, Arabidopsis thaliana columbia
aattcggcacgagtataaattatcaggagacacttttgttgagattggcttagttatttaatacaaggaagcaatataaggactacaaaagaccaatacatcatcaagactaaccttattttcatctccaaatatagattcttttccatctttcctcttagcatatgacaatcccaatcttgatttagccaccctcaaatcaccaatccccgagttcgtatccggacccgcaaatccgcccatcacgggagctaaaggcggtccgataagaagcccgtcagctccaatttgaggccctccgcgagcatattcaaatagtgctgctccacttcctccaatccttaaggaaggacgattgggtcatcacaat

SEQ ID NO: 85166 - DNA, 778 bp, Arabidopsis thaliana columbia
  unsure (1)..(778): unsure at all n locations
atgatcttnnnnnnnnnnnnnnnnnnnnnnnnnnnnnnnnnnnnnnnnnnnnnnnnnnnnnnnnnnnnnnnnnagaactcttgactgtctctctgcggcgaaaaagagagcgaagcttgaaatctccgattaagccatgaatgctcccgaacgatatgagcgattcgtcgtccctgaaggcaccaagaaggtttcttatgatagggatacgaagatcatcaatgctgcttccttcacggttgagagagaagaccatacgattggaaacattgtccgcatgcaacttcatcgcgacgagaatgtcttgtttgctggataccaacttcctcatcctcttaagtacaaaatcatagtgaggattcacacaacaagccagtcttccccaatgcaagcatacaaccaggccatcaatgacttggacaaggagctcgactacttgaagaaccagtttgaggcagaggtggccaagttttcgaatcagttttaaggaacttggagttctccatcagcacatcggggaaaacgttttacattgtcttttgctaagcaccaatcaagactaataatgagcttgggaaattttccctagttatgctttgtataaatcaaaaacaaatcggcctgtaacttcttttaactctatgtttcaacaccatttcaggatgctatgaagtaatgcttagattaaaaaaaaaaaaaaaaggnnnnnnnnnnnnnnnnnnnnnnnnnnnnnnnnnnnnnnnnnnnnnnnnnnnnnnnnnnnnnnnnnnnnnnnnnn

SEQ ID NO: 85167 - DNA, 369 bp, Arabidopsis thaliana columbia
  unsure (1)..(369): unsure at all n locations
nnnnnnnnnnnnnnnnnnnnnnnnnaggttggaaacagtatgactctgtctttaagattcagtttcacgatagtaataataaaattacataaacaaagacaacaaggtaacaacatcaaatggtctttaatggcaacaagatgacactattattcccaagtttacgaatcacaaccaaaagggaaccaaacacttaatcacttggtaagccaaggatattcgtcaggcgatgaaggaagcctcgctgttaaaacctcaacaccagtctccgttaccaatagggtatgctcaaactgagcgctgcgttttccatctgcggtaactgcagtccatccatcaggccatgttcgatccctccacccccctgcg

SEQ ID NO: 85168 - DNA, 823 bp, Arabidopsis thaliana columbia
  unsure (1)..(823): unsure at all n locations
gggtaaccccacgcgtccgcaaaaacttttgagagagagagtttgtttttttggtaaagtccgatcgtgatctcatatgcatgttctatcctcgccgtccggtttatccggctcctgtccagcatcgactagcttctaaagtagtgttggctggcttatgtctggcgatttgccgtcttgtttacggtgtcttcggccagttttgggtttgttaagtttttttgtttcaataatctcattagatctgagttggtgatgatgttttaggtgttgtgtcacttaaagaatggatttctccgacttgtttcttttgagcttttggtttgcagaaatctttccagagacataaggaaagaagaatctttcgaagcatattatgattgccttaaagctgttagtttctttttggagtttcgattagcttagcaacggtgacaaacaaaggattcaacgaccgattatatttcggcgataatcttctcaccgaaatcgatgctcaacggcgaaggttgatgtcggaaatctttcgattactcatccagcatgtgtcgtggttgtatccagttgctgacacgtgggcttaggtggagtacaaacaaattttcttatgcagtatgcggttatccgataggctcttgttgggcctcaaatatttctgtaaacttttcgtggggcttttagtgtagcccgtgtatgatcgggttacgtttaatacaatactacacttgagaaaaaaaaaaaaaaaaaagnnnnnnnnnnnnnnnnnnnnnnnnnnnnnnnnnnnnnnnnnnnnnnnnnnnnnnnnnnnnnnnnnnnnnnggaa

SEQ ID NO: 85169 - DNA, 357 bp, Arabidopsis thaliana columbia
ggcacgagcttgctgttgaggttggagaaagaagaagctgttctttggaaatgacaagctcactagaaaccatatcaaagcgatattgatggtaactaatcatatattcacaatcaaatctgtaagaaaaatttaaacaattgatgtttatatgttgttacaggatgttcttctagcaggaatggatacttctgcaataaccatgacatgggcaatggcagaactcgcaaagaatccacgagtgatgaaaaagctccaatccgaaatcagaagtcaaatcaagaacaaagaagaatcagctttgatgacactgataagcttgagtacctcaaaatggttatcaaagaaacatggagg

SEQ ID NO: 85170 - DNA, 313 bp, Arabidopsis thaliana columbia
  unsure (1)..(313): unsure at all n locations
ggcacgagaaataaccaaatgcaatagtatgttgtattgtaccatcaaccattgttttcgagtttttcctttctttgttttctttttgctttctgaaaagttatatataaattttttattctgcttcttctctttttaatggagaacattttcatttccatttcttctgatatgcaattatcttaacggataaaagggataataattgtttttatttggccctttctcttggagcttttncccatccatctgttagacgtacttgaggtttaatttatttcttataacatttttctccttgctaaaaaaaaaa

SEQ ID NO: 85171 - DNA, 367 bp, Arabidopsis thaliana columbia
cccacgcgtccggtgacttttgtggtgggattatttcaatttatcagtttagcctacctatgttctgttgagtggaattattggttctcagatctcaattaatttgagaactcttatcagaaactattccaagataacaaggtgttttttttctctatctcacagcctcattggtatagacctttttgtgttttggcagtattgttttgggagaaaccaactggattttaacgaaatattgttaaaccaaaggtttgttttcttggagattgagcttagctttgtttggatcattcggccacttgtgtgagagtttgattgatggttagtcatttttatatcatcatcatgctttgatagttgagag

SEQ ID NO: 85172 - DNA, 403 bp, Arabidopsis thaliana columbia
  unsure (1)..(403): unsure at all n locations
tttttttttttttttttttaaagagcaatatgtgtgtgctttggcattaataacacaacaaaacagagtgtctcaatgtttacaacaacgacaattttctaaattacaatcaatcacaatttttaataacaagagacacattgccaaaaataaaacacataaagctcttccttgttcccgaaatcaatctttatcgatcgccgatctcacaaactgatcacactgtgtaactccttcagacaaaacatcagccaaaacgccgacaatatcaaatgcttcttgtagatcagttgcagagttgatttcgtcgagccacgagatcaattccttggngaaaccaatcatttctttcacattcagcagcttctctttcattacaatctcccatggctcaagctctact

SEQ ID NO: 85173 - DNA, 2338 bp, Arabidopsis thaliana columbia
  unsure (1)..(2338): unsure at all n locations
tgagatttctccatttccgtagcttctggtctcttttctttgtttcattgatcaaaagcaaatcacttcttcttcttcttcttctcgatttcttactgttttcttatccaacgaaatctggaattaaaaatggaatctttatcgaatccaagctgattttgtttctttcattgaatcatctctctaaagtggaattttgtaaagagaagatctgaagttgtgtagaggagcttagtgatggagacaaattcgtctggagaagatctggttattaagactcggaagccatatacgataacaaagcaacgtgaaaggtggactgaggaagaacataatagattcattgaagctttgaggctttatggtagagcatggcagaagattgaagaacatgtagcaacaaaaactgctgtccagataagaagtcacgctcagaaatttttctccaaggtagagaaagaggctgaagctaaaggtgtagctatgggtcaagcgctagacatagctattcctcctccacggcctaagcgtaaaccaaacaatccttatcctcgaaagacgggaagtggaacgatccttatgtcaaaaacgggtgtgaatgatggaaaagagtcccttggatcagaaaaagtgtcgcatcctgagatggccaatgaagatcgacaacaatcaaagcctgaagagaaaactctgcaggaagacaactgttcagattgtttcactcatcagtatctctctgctgcatcctccatgaataaaagttgtatagagacatcaaacgcaagcactttccgcgagttcttgccttcacgggaagagggaagtcagaataacagggtaagaaaggagtcaaactcagatttgaatgcaaaatctctggaaaacggtaatgagcaaggacctcagacttatccgatgcatatccctgtgctagtgccattggggagctcaataacaagttctctatcacatcctccttcagagccagatagtcatccccacacagttgcaggagattatcagtcgtttcctaatcatataatgtcaacccttttacaaacaccggctctttatactgccgcaactttcgcctcatcattttggcctcccgattctagtggtggctcacctgttccagggaactcacctccgaatctggctgccatggccgcagccactgttgcagctgctagtgcttggtgggctgccaatggattattacctttatgtgctcctcttagttcaggtggtttcactagtcatcctccatctacttttggaccatcatgtgatgtagagtacacaaaagcaagcactttacaacatggttctgtgcagagccgagagcaagaacactccgaggcatcaaaggctcgatcttcactggactcagaggatgttgaaaataagagtaaaccagtttgtcatgagcagccttctgcaacacctgagagtgatgcaaagggttcagatggagcaggagacagaaaacaagttgaccggtcctcgtgtggctcaaacactccgtcgagtagtgatgatgttgaggcggatgcatcagaaaggcaagaggatggcaccaatggtgaggtgaaagaaacgaatgaagacactaataaacctcaaacttcagagtccaatgcacgccgcagtagaatcagctccaatataaccgatccatggaagtctgtgtctgacgagggtcgaattgccttccaagctctcttctccagagaggtattgccgcaaagttttacatatcgagaagaacacagagaggaagaacaacaacaacaagaacaaagatatccaatggcacttgatcttaacttcacagctcagttaacaccagttgatgatcaagaggagaagagaaacacaggatttcttggaatcggattagatgcttcaaagctaatgagtagaggaagaacaggttttaaaccatacaaaagatgttccatggaagccaaagaaagtagaatcctcaacaacaatcctatcattcatgtggaacagaaagatcccaaacggatgcggttggaaactcaagcttccacatgagactctattttcatctgatctgttgtttgtactctgtttttaagttttcaagaccactgctacattttctttttcttttgaggcctttgtatttgtttccttgtccatagtcttcctgtaacatttgactctgtattattcaacaaatcataaactgtttaatctttttttttccaaaaaaaaaaaaaaaaaaaaaagnnnnnnnnnnnnnnnnnnnnnnnnnnnnnnnnnnnnnnnnnnnnnnnnnnnnnnnnnnnnnnnnnnnnnnnnnnnc

SEQ ID NO: 85174 - DNA, 493 bp, Arabidopsis thaliana columbia
  unsure (1)..(493): unsure at all n locations
aacgttcattaaacacaaagaagaagaagaagaagaagaagatggatgatttggcattatgtgaagcaaacaatgttgctctaacccccatgacgttcttgaagagagcttcagagtgttatccaaatcgaacttcaataatctacggaaaaactcgtttcacttggcctcagacctatgaccgttgttgtcgtctagccgcttctctaatctctcttaacatctccaagaacgatgtggtatcagttatggctccaaacacacccgccttgtatgaaatgcactttgccgttcccatggctggagctgtacttaaccctatcaacactcgtctagacgcaacatccattgccgcaatcctccgccacgccaagcccaagatcttattcctagaccgcagttttgaggccttggctagagaaagcctccatttattatcatctgaagactcaaacctaaacttgccggtcatatntatccacgagaaccattt

SEQ ID NO: 85175 - DNA, 626 bp, Arabidopsis thaliana columbia
ctcacgcgtccgcttctctcaagaacaaaaaagaaagaaagccctcacattgctttgtccaaagagagtcttagaatctcaaacctatctcttagggagaaaccctgattctatattcttacttgctttcctttaagtttctgtctcgtccagagggacaaagccccccaattccagtcaatttcctttgtttttgatggattgagtttctttctgttggagaaagaaaaagaaaagagctacacatacacttgcagagaagaagcaacaatgagagaagagaaatccaagactaataagctggcatggtccaagaagatggtaaggaaatggttcaatatcaaaagcaaaacagaggagtttcaagcagatgatccttcttctgctggaattgaagtagagcatagaagtagcttttcagctgagaaagcaccttccacaatcaagaataccaaaactgagaaactcagtaagaactgggagcagcaagctcggcaaaggagaatgaattatgagaatcctaggatcattgatgtccaaaactacagcatctttgtggctacatggaacgtagctggacgctctcctccttcaaacttaaaccttgatgagtggcttcattcatc

SEQ ID NO: 85176 - DNA, 473 bp, Arabidopsis thaliana columbia
  unsure (1)..(473): unsure at all n locations
cgttaatccacatcctgatgcttttgtcatcaacataggtgaccagttacaggcattaagtaatggagtatacaaaagtgtttggcatcgcgctgtaacaaacacagaaaatccgagactatcggtcgcatcgtttctgtgcccagctgactgtgctgtcatgagcccggccaagcccttgtgggaagctgaggacgatgaaacgaaaccagtctacaaagatttcacttatgcagagtattacaagaagttttggagtaggaatctggaccaagaacattgcctcgagaattttctaaacaactaagatacatatatctttggcctttgtgtttgtctagtaggcatatatatacaagtcaatgtaacagcattgatgttcgattctacattcctaccaacattttgttctagacgtatgataatngtaggaatcatgatcatatgtcttgataataacnatcatggncata

SEQ ID NO: 85177 - DNA, 479 bp, Arabidopsis thaliana columbia
acgcgtccaaaaaaactctaaagaatcagagagcgattttttttcttcttcctgggtctctctctggtggtgacgatcgaagagagttcacggattcgtacaaggattaaattaattattctggtaaattaatcgaagcgtaaggaattggggagagtgatttttctgggttcgaatttggtggttgattcaaaaaaagaaaagggttttgagatttgggttattttgatttcgaattttggttatgggtttaggcaataagggtaacaaattcaatttcggcgataatgatctcgccgacgaagctagtggtgccgatggcgacgaaggtgatggttttggttcggttgcgtgttcgatttgtctcgagacggttgttaaaaacggcgatcgagcatgggctaatcttcaatgtgaccatcagttccatctagattgtattggttcggctttcaatgcaatgggagtgatgcaatttc

SEQ ID NO: 85178 - DNA, 398 bp, Arabidopsis thaliana columbia
  unsure (1)..(398): unsure at all n locations
ggaaaggaaagtcaaaacttgaaggactttcttttattcattctctttcgnntttactcatttaattctcaaagaaagtgtataacgaagaaaaccacaagtcacaaagtactgactagtacaaggaatcaaaagagaggctttttcccattgttcattcccaacaaatgttcaataatttgtcttccagcatcacgaagacccgaatgcataaactcattcgttacccaaagtctgatacccgagatatgagaagctgtttccgtcaccagcttgaagtttacagtacatatcgtcgtaggaaaccgctgcagcaacaggcaccttggtgattctgcaagctaggaacatcatataatgggggccaatcctctttcttggccaaaagatcggcggca

SEQ ID NO: 85179 - DNA, 505 bp, Arabidopsis thaliana columbia
  unsure (1)..(505): unsure at all n locations
caaaacatcaagccaacttctgtgctcgacttaaggaggaaatggtgtgtcctttgcgagtgattatcgtgaaccgaggaccagatactgagctattagtagccaaccctgtggaactatccggaaaaggaagaccacgagttttctacgatgtcacacttgcgttgaaatcactaggaatctgcatcttctccgctgagattgggagacattcgactttagatcgacaatgggaagtttatagatttcttttggatgagagtcgtgaattcccattggctagcctccgtgcgagaaatcaagtagtagatagagtcacaaagacacttatgggttggtgaagcggatgagagtgagctttcatgaacgttatgctacactcaaggggacaaagaaacaaagtcttcttcgcttgcggcttcgggccggtgaaaaagtgttcaaaggggtttttattcttttntttnggccnananngttaaantttngaatttaaaaggtttnt

SEQ ID NO: 85180 - DNA, 939 bp, Arabidopsis thaliana columbia
cgactcacatttgggagggctgacacgcctgcaggtaccggtccggaattcccgggtttgacccacgcgtccgctgggcttgaatcatgaagcaaatacttgataggtaaagtctctatccagattaagcttgttgagggtgattcagcaggaacagtcactgctctctacatgtcttcagatggtccgaaccacaacgaattcgattgtgagttcttagtgttctttaccggcgagccttacatagtccagaccaatatctacgtgaacggagttggaaacagagaacaaagactcatcctttggttctatcccaccactgagtttcacacttactcaatcctatggagtaaacgcagagttgtattcatggtatacgaaacaccgattcgagttcagaagaatcttgaagagaaaggtatcccatttgctaaagatcaagcagtgggtgtttacagctccatttggaatgcacgatgattgggccacccacggaggtcttgttacacctgattggagtcgagctccgttcgttgcttctttccaagaattccaaatcgatgcatgtgagattccaacacgtactgatctaagcgagtgtaatggcgaccagcagttttggtgggatgacccaactgtctcttagattagccttcatcagaatcatcagcttatttgggttccagctcatcatataatttatcattattgttttgaggcgaataggtgtcccgttactcaaattgagggcccacatcatcgtcatttgtagtttaaagattagtcaagaatataaatggatccacagaacacatgtggttactctttcatgattctgttttaatgtataaatcatccatcttctattgatttcggtggcagaaaaaggaaaaacacaaacaaaggacggccgctctagaggatccaagcttacgtacg

SEQ ID NO: 85181 - DNA, 1205 bp, Arabidopsis thaliana columbia
  unsure (1)..(1205): unsure at all n locations
tacgactcactctagggaaagccggtacgcctgcaggtaccggtccggaattcccgggtcgacccacgcgtccgctcgagactgtagagtgaagtttgatttatttagagagataagttaaaaaaaaaatggtcggtatggatttgttcaaatgtgtaatgatgataatggtgttggttgtctcttgtggtgaagctgtttctggagctaagttcgatgagctttatcggtcaagctgggctatggatcattgtgtcaacgaaggcgaagtcacaaaactcaagcttgacaattactctggagctgggtttgaatcaagaagcaaatacttgtttggtaaagtctctatccagattaagcttgttgagggtgattcagcaggaacagtcactgctttctacatgtcttcagatggtccgaaccacaacgaattcgattttgagttcttagggaacactaccggcgagccttacatagtccagaccaatatctacgtgaacggagttggaaacagagaacaaagactcaacctttggttcgatcccaccactgagtttcacacttactcaatcctctggagtaaacgcagtgttgtattcatggtagacgaaacaccgattcgagttcagaagaatcttgaagagaaaggtatcccatttgctaaagatcaagcaatgggtgtttacagctccatttggaatgcagatgattgggctacacaaggaggtcttgttaaaactgattggagtcacgctcctttcgttgcttcttacaaagaattccaaatcgatgcatgtgagattccaacaactactgatctaagcaagtgtaatggagaccagaagttttggtgggatgaaccaactgtctctgagcttagccttcatcagaatcatcagcttatttgggttcgagctaatcatatgatttatgattattgttttgatgctactaggtttcctgttactcctcttgagtgccaacatcatcgtcatttgtagtttagagattagtcaagaataaaaatggatcaagagaacacatgtggttactctttgatgattctgttttaatgtataaataatcaatcttctattgattttggtggagtttttaaaaaaaaacacaaagggcgaccgctctagaggatccaagcttacgtacgcgtgcgatgccacgtcataactcttnnnnnnnnnnnnnnn

SEQ ID NO: 85182 - DNA, 1078 bp, Arabidopsis thaliana columbia
tgcttagcagcgacagagctcgacgattcagtaaaaccctagtagaataatggtgaagctcacggctgatttgatctggaaaagtcctcacttcttcaatgctatcaaggagcgagaattggatctacgaggtaacaagattcctgtaatcgaaaacttgggtgctactgaggaccagttcgataccattgatctgtctgataacgagatagttaagctagaaaacttcccatacctcaaccgtttaggaactttactcatcaataacaatcgtatcacccggataaatcctaaccttggagaattcctaccgaagcttcactctttggttcttacaaataacaggcttgtgaatttggttgagattcatccccttgcctccattcccaagctgcagtaccttagtttgttggataataatatcaccaaaaagccaaattatcgcctttatgtgattcacaagctaaaatcacttcgagtactggatttcattaaaatcaaagccaaggagagagctgaagctgcatctttgttttcatccaaagaagcagaagaggaagttaaaaaggtttctcgggaggaggttaaaaaagtgtcagaaactgcagaaaatccagagactccgaaagtggtggcgccaacagcggagcaaatattagctatcaaggctgcaattatcaattctcagacgatagaagaaattgccagactcgaacaggctttgaagtttggacaggttcctgctggcctgataattcctgatccggccacaaatgactctgctcccatggaggaatagaaagcgtgactgttgcccctccaatcgttgtagctactgctccagaatgctcacagcaattgttttctctggcaatcctgtacggtttctgtcacttccttaggaactcatgcgcaacagttggaaccgtgaaactatttactgctcgaggcatctgttttgaacccttaaaaagaatgccaaagaggattgtagtctttttaagtctctgcattggcatggagagcgagggtgcacacagaatttgcttatgctcttttcgcattagaatttcttctt

SEQ ID NO: 85183 - DNA, 518 bp, Arabidopsis thaliana columbia
  unsure (1)..(518): unsure at all n locations
ttttttttttaacaattccagccaattctcatttcacatgatcaaccaattcttaaagtgacttaatacaattcattactcctgaaatgaacacagaaacaaaacaaaaccgatgggatttggctacatctaacaatcactaaacactgagatctagtagttttcacctacaggtctagaaggaaagaggcgcataagaaaagtgataaacgaccagagacacattacagctagaaactgcaaagtcacaaccaaaccaactagtgcaactcctcgctctgttatttcagcagtcgttgccgcatctttcatcataaacatcagcctctgaacaaaagtcgctgctcttgtcacctgatacagcctatacacctcaaagactattgggacaatggggccacagggatgagccacgtctttcaagccgngctcgaaactcttggactggacagccaccaagaagggggcctgnaatcaaggatctttccagggtggcaagctgnaacagaatcggggct

SEQ ID NO: 85184 - DNA, 332 bp, Arabidopsis thaliana columbia
  unsure (1)..(332): unsure at all n locations
ttttttttttgcgttaaaacattttatttaaaaagaagaaactctttattttttagtcctagtctagattaaacatcaaaggaagatcgcgatgtttttatatattgccatgtgatgacattatttttaggatctagaaacttcgttggcacaaagtataagctcgtttttcttgttgacaagtgagtccgggagcttcttccatgtcaatatcgtcaaccttcatgccttctggtaacttccaatccaaatgatacaaagattagtcaaaccaaactcgaccattgttgtccccatataaactgcaggacacattctccggncgcctccaa

SEQ ID NO: 85185 - DNA, 888 bp, Arabidopsis thaliana columbia
  unsure (1)..(888): unsure at all n locations
agaatggtttccaacagcttttggaggattggcaagaaactgaaacatttactactgcacttgagaaaatcgagttttgggtattctctagaatagtggagtctgtttggtggcaggtctttactcctcatatgcaatcacctgaagacgactcatcagcaagtaaatcaaatgggaaactgatgggaccttccttgggtgatcagaaccaaggaaccttttcgataagcctatggaaaaatgctttccgagatgctctgaacggatttgtcctatgcgagganggngacacgaatgcggttgcttacctgtattggctagaatggttatggacaagtgtatcggtagattcgatgtagccatgtttaatgctattctccgcgaatcagaacatcagattccaactgatcctgtctctgatcctattcttgattccaaagttctgcctattcctgctggagacttaagctttggatcaggggcacaacttaaaaacgcgattggcaattggtctagatgcctcactgaaatgtttggcatgaactctgatgattcttcagcgaaagaaaaacgaaacagtgaagatgatcatgtagaaagtaaagcctttgttttactaaatgaacttagtgatcttcttatgctcccaaaagaccatgctgatggnaatatccattagggnagaggtatgcccatcaatccaggcttccacccatcaaaagnatacccctggnaattcaccccggatgngtctggccagtnaaganccggngntggcccagaagagnttatgctgcagngaccattggnggnaggnaccntccgaagaagntcccctatngggttntccggtntnaaagncccatggccangggatccagaaagggc

SEQ ID NO: 85186 - DNA, 508 bp, Arabidopsis thaliana columbia
  unsure (1)..(508): unsure at all n locations
ctctctcctctatccactctnagccggaaaatttttccttgattcacttcgcgccagaaagaaccatgccggcgaaacaaaggaccccgaaggtcaacagaaaccctgatctgatcaggggtgttggtaaatactcgagatcccagatgtaccataaganaggtttgtgggctatcaaggccaaaaatggaggcgttttcccacgtcacgacgctaaatctaaggttgatgctccggtggagaagccaccgaagttctatccagctgaagatgttaagaaacctctccccaacaggcgcacggccaaaaccaaccaagctcagagctagcattacttccagggttacagtctgtttgattattcctttgcttggtagggttcaagggggaaagcagggtttgttttcccttaaggaaggntttccntctggggttcctttcttcgtnacctgggcccattcaaggtcaatggggggtccnttttangnggggttnaccaggccctttt

SEQ ID NO: 85187 - DNA, 490 bp, Arabidopsis thaliana columbia
gaccacgcgtccgaaagtctcttcttgattatcgtccagggattgcaacagagagaaagtaacgatgccggcgaaacagaggacagctaaggtcaacaggaatcctgatctgatcaggggagttggtaaatactcaaggtctcagatgtaccataagagaggtttgtgggcaatcaaggccaaaaatggaggcgttttcccccgccacgacgctaaatctaaggttgatgctccggtggagaagccaccgaagttctatccagctgaagacgtgaagaaacctcttcccaacaggcgcacggcaaaaccagccaagctcagagctagcatcactccagggacagtgcttatcatccttgctggtagatttaagggcaagagaagtgtctttcttaagcagctttgcctccggtttgcttcttgtgactggaccattcaagatcaatggtgttcctctgagacgtgttaaccaggcctatgtcattggtac

SEQ ID NO: 85188 - DNA, 1042 bp, Arabidopsis thaliana columbia
aggtctctacgactcactatagggaaagctggcacgcctgcaggtaccggtccggaattcccgggtcgacccacgcgtccggagccggaaaatttttccttgattcattacgacagagagaaccatgccggcgaaacagaggaccccgaaggtcaacagaaaccctgatctgatcaggggtgttggtaaatactcgagatcccagatgtaccataagagaggtttgtgggctatcaaggccaaaaatggaggcgttttcccacgtcacgacgctaaatctaaggttgatgctccggtggagaagccaccgaagttctatccagctgaagatgttaagaaacctctccccaacaggcgcacggcaaaaccaaccaagctcagagctagcattactccaggtacagtgttgattatccttgctggtaggttcaagggaaagagagttgtcttccttaagcagcttgcctctggtttgcttcttgtgactggaccattcaagatcaatggtgttcctttgagacgtgttaaccaggcctatgtgattggcacttccacaaaggttgacatttctggagtcaccctcgataaattcgatgataagtactttggcaaggttgctgagaagaaaaagaagaagccagaaggagagttctttgaggctgagaaagaggagaagaaggagatcccacaggtgaagaaagatgaccagaaagctgtggatgcagctttgatcaaagccattgaagcagttccagagttgaagacttaccttggcgcaaggttttcattgaaacaaggaatgaagccccatgagcttgttttctagatttcattactttttttctgaggtctctagagtatctgtctcctgaagtgttttaccttctaaatggttgttttgttcttgttcactgaacacatacaatttttggcttatacattctctgttcttacgtaaaaaaaaaaaaaagggcggccgctctagaggatccaagcttacgtacgcgtgcaggcgacgtcataactcttctatagttgttcc

SEQ ID NO: 85189 - DNA, 1031 bp, Arabidopsis thaliana columbia
  unsure (1)..(1031): unsure at all n locations
cccacgcgtccgggaaaatttttccttgattcattacgacagagagaaccatgccggcgaaacagaggaccccgaaggtcaacagaaaccctgatctgatcaggggtgttggtaaatactcgagatcccagatgtaccataagagaggtttgtgggctatcaaggccaaaaatggaggcgttttcccacgtcacgacgctaaatctaaggttgatgctccggtggagaagccaccgaagttctatccagctgaagatgttaagaaacctctccccaacaggcgcacggcaaaaccaaccaagctcagagctagcattaccccagggccagtgttgattatccttgccaccccttcctggtaattttagggccaaggggttttccttccttaaggagcttgcctccggtttgcttcttgtgactggaccattcaagatcaatggtgttcctctgagacgtgttaaccaggcctatgtcattggtacttccacaaaggttgacatttctggagttaccctcgacaaattcgatgataagtacttcggcaaggttgctgagaagaaaaagaagaagactgaaggagagttcttcgaggctgagaaagaggagaagaaagagattccacagggaaagaaagatgaccagaaagccgtggacgcagctttgatcaaagctattgaagcagttccagagttgaagacttacctcggagcaaggttttcattgaaacaaggaatgaagccccatgagcttgttttctagatttcattactttttttctgaggtttctagtgtatctgtctcctgaagttttacactccaactggttggttctgttctcgtccactgaccagagacataaaatcttggctgctgctatctggatttctgtcttatatggataatttatcaatcctgtttttgaaggagaacttttccccggctttnnnnnaaaattaaataaaaccccccaccccannaagggcgcccgctctagaggatccaagcttacgtacgcgtggatgcgacgt

SEQ ID NO: 85190 - DNA, 860 bp, Arabidopsis thaliana columbia
atcggctcaatactgaaagttttttctatatataaatataaaaggtaaaatgccagggatcacactaggagacacggtgccgaacctagaagtggagacgacacatgacaagttcacacttcatgactacttcgccaattcttggaccgtcctcttctctcatcccggggatttcacacccgtgtgcaccacggagcttggtgcgatggccaaatacgctcatgagttcgataagagaggcgtgaagctccttggtctgtcttgtgacgatgtacagtcacacaaagactggatcaaagatattgaagcctttaatcacggaagcaaggtgaattacccgataatcgctgaccccaacaaagagatcattcctcagcttaacatgattgatccaattgagaacggaccgtctcgtgcccttcatattgttggtcctgacagtaagataaaattgagcttcttgtatccgtcgaccgcgggacgtaacatggacgaagtattgagggctttagactcgttgttgatggcgtccaagcacaataacaagatcgccactccggttaactggaagccagatcaaccggttgtgatttcgcctgctgtgtcggacgaggaagccaaaaagatgttcccacagggtttcaagaccgccgatcttccgtcaaagaaaggctatctgcgtcacacagaggtctcttgaaaagataataacaaaagcctactatataacgtacatgcaagtattgtatgatattaatgtttttacgtacgtgcaaacaaaaataattacgtttgtaacgtatggtgatgatgtggtgcactaggtgtaggccttgtattaataaaaagaagtttgttct

SEQ ID NO: 85191 - DNA, 1139 bp, Arabidopsis thaliana columbia
ccacgcgtccgcacatctcctcattctgtattttgacaaaaaaaaaacaccctttgttttttctctcctttgcatgttgtgattgtttttgcttcacaacatgggagttttagtaatctcgcttctcgtggttcatctcctagctttttccgtctgcgttcagggcggctaccgtcgtggcggacaccatcccggcggtcacatgggaccttggatcaacgctcatgccactttttacggcggcggtgatgcttccggcactatgggtggagcatgcgggtacggcaatctgtatagccaaggttatggactggagacggcagcgctgagcacagcgttattcgaccaaggacttagttgtggcgcatgttttgagctgatgtgtgtcaacgatcctcaatggtgcataaaaggccgatccattgtggtcactgccactaacttttgtcctcctggtggtgcatgcgaccctcccaaccaccatttcgatctttctcagccgatctacgagaaaattgctctctacaaatccggtatcattcccgttatgtatagaagggttcggtgcaagagaagtggtgggataaggttcacgatcaacggccactcatactttaacttggtgttggtcacaaacgtgggtggagccggggacgtacactcggtctcaatgaaagggtcgaggacaaaatggcaattaatgtcgagaaattgggggcaaaattggcaaagcaactcttatctcaatggtcaaagtctgtcgtttgttgttaccacaagtgatcgtcgaagtgtcgtctcttttaatgttgcaccacccacttggtcctttggccagacctacaccggagggcagtttcggtattaattatatataatcggttcggtttgttattgtgctttttttttttttttcggttccaagttggggactcttttttggtaaccaattgagattgggactgatagtgatatgtagcgaatatatgtgtgggaacgagaaaaagagaagttttattaattctcgttttataatataagaaaatgaaagtgatgttatgtaaaaaaaaaaaaaaaaaaaaaaagggcggccgctctagaggatccaagcttacgtacgcgtgcatgcgacgtcatag

SEQ ID NO: 85192 - DNA, 383 bp, Arabidopsis thaliana columbia
cgggtatatccaccattgatgtcatgaactctatcgccagaggacagaagattcccctcttttctgccgcaggtcttccccacaatgaaattgctgctcagatttgccgtcaggctggtttggttaagcgtttagagaagtcagataatcttctcgagcatcaggaggatgataacttcgccattgtgttcgcagcaatgggtgtgaacatggagactgcacaattttttaaacgtgatttcgaggagaatggatccatggagagagtgactcttttccttaacttggcaaacgaccccactattgagcgtatcatcactcctcgtatcgcacttacaactgctgagtacttggcatatgaatgtggcaagcatgtccttgtc

SEQ ID NO: 85193 - DNA, 1583 bp, Arabidopsis thaliana columbia
  unsure (1)..(1583): unsure at all n locations
nnnnnnnnnnnnnnnnnnnnnnnnnnnnnnnnnnnnnnnnnnnnnnnnnnnnnnnnnnnnnnnnnnnnnnnnnnnnnnnnnnnnnnnnnnnnnnnnnncggccgcagtgagagaacctatcctgaagagatgattcagacgggtatattcaccattgatggcatgaactttatcggcagaagacagaagattccccttttttctggcggaaggctttcccaccatgaaattggtggttaaaattggcggcaaggtgggttgggtaaaccgttaaaggaggcaaaatattcttttgaggcttaaggaggaggataccttggccttggggtccgaagaatggggggggaccatgaaaacggcccattttttaaaacgggaattcgagggagaatggatcgatggagagagtgactcttttccttaacttggcaaacgaccccactattgagcgtatcatcactcctcgtatcgcacttacaactgctgagtacttggcatatgaatgtggcaagcatgtccttgtcattctcacagacatgagttcctacgccgatgctcttcgtgaggtctctgctgcccgtgaagaagtgcctggaagggttggttacccaggttacatgtacaccgacttggctaccatatacgagagagcagggcgaattgaagggaggaaaggttccatcactcaaattcccattttaaccatgccaaacgatgatatcacgcatcccacaccagatctgacaggatacattacagaggggcaaatctatattgaccgacaacttcacaatagacagatctaccctccgatcaatgtcttgccatctctgtctcgtctcatgaagagtgccattggtgagggtatgactcgcagggaccactctgatgtttctaatcaattgtatgccaattacgctattggaaaggacgtgcaggccatgaaagccgtggttggagaagaagctctttcttccgaggatctgctatatcttgagttcttggataagttcgagaggaagtttgtggctcagggagcttatgatacccgaaacatcttccagtcactcgacctggcatggactctcctcagaatcttcccccgtgagttacttcaccgtatacccgcgaaaacccttgatcagttttacagtcgcgataccaccaactgaagaacatagtttctactgccttggtgtgatgatatgtccaaatgcatctttattttttacttctgcggttggatcacacctctgagtcgtccgtcccaataaatggtgtttgttcccaatcgctagaccctttattattgtcttcgaaactgagcaagccaggttgattattctttttgtaagagaaattgaaattcttgtataatttatgagattttgcatcttttttttggggtaccaaattactggttcagaacaacatacatttgtttgtcttattactgtcacgaatgtcaatgcagcttcttcttctttttttataacaaaaaacccaaaaaaggacggccgctctagaggatccaagcttacgtacgcgtgcatgcgacgtcaaagctcttctataagtcacct

SEQ ID NO: 85194 - DNA, 543 bp, Arabidopsis thaliana columbia
  unsure (1)..(543): unsure at all n locations
nnnnnnnnnnnnnnnnnnnnnnnnnnnnnnnnnnnnnnnnnnnnnnnnnnncccacgcgtccgcccacgcgtccgcccacgcgtccgctctctcctccgtcaccgagggagagcaaccatgccaatctcaattccccttaacgccactctacaatactcgtctccttcttcttcttcttcttcttcttctctcgtaccttcttcccctcttttctctccgattccttcaaccactgtttcccttaccggaattcgccagcgatgcctcaggatggtcacttcttgcgtctccaacgctcagaaatccgtcctgaatggtgccaccgattccgtctctgtcgtcgggcgggagcagattcgtcttggtcttcctagcaaaggacgcatggccgccgattcgctggatcttctcaaggattgccaattgtttgtcaaacaagtcaatccacgacaatatgttgctcaaattcctcagttaccaaatactgaagtttggtttcaacgaccaaaagacattgtcagaaagttgctatcacgagatct

SEQ ID NO: 85195 - DNA, 558 bp, Arabidopsis thaliana columbia
  unsure (1)..(558): unsure at all n locations
ctaacccaaaantnaggntttncaaaaagggncccaaaaaatnaatacataggttaagaaacagccncaagnggtttnctttttaccaattttncacttgccgnttcttttcttcaccatctccttatacttagtgatggaatcaattctctgtaacttcaactgatgcttgaatcgattgataaagtcatcagnttttgcatctacttcttcatcagcttcttccaccgtcgtaactctcggcactttcaccgtcgcaggacggcgagcctccacggagatttcatcttcttgaaagtgagagaacggagatttggtactagcagattttttcatcttctttggaagcttcggaggtctaattccagcagctggttcagtgtcagattttgtcctagcgacatggtttagattaagtttactataaacctcttcaagactctgttcttcttcttcttcttcttcttttacttcttgttcttgtacttgtacttgttcttgttttgtctctacggtcaccgacggtggtgaagcttcgattatattggtgggttcttg

SEQ ID NO: 85196 - DNA, 581 bp, Arabidopsis thaliana columbia
  unsure (1)..(581): unsure at all n locations
gccgcctgacaataaagggcaaccctaaaacgttctncctaggnggcctttagaacaggtaaaaatggtgcctcccgaaagacaacccaggtcaaaaacaggacctactacctcagggaaaactttcaacagctttgcacctcataggcattgcacctggacctttacacaaggtcccatcaccatggttcccggtgctacacagcgtgttcagaaggggtgcccatggtttccacttggccgtaatacagcaattcgaattctgctgctggttttccccagaccattgaacagcattcattatcccatcccagatnacatgcacaacctcagtctctggcagctttgcatctttcacctgttgcttcaccatttcagtcacttcatctacgtttatttcctctgtcacttggctcgtaaggaccgctttgatttccttcagcttcacctcaaatattttcctttcattgtactctaccagagctgtcaatcctgccttagtgaaatgctcggcaaaactttctgtagtccgctttgtgggtggcaggaactccaagagtttgtcatccatcttgccacgc

SEQ ID NO: 85197 - DNA, 1125 bp, Arabidopsis thaliana columbia
ttgcacctacccgtctttaatttccgggtcgacccacgcgtccgcaataaactcttcttctgcctcctctgcccatttctcccaatctctctctattttctcagtctctctctcagataatggcaatgttgggcttggttttatctgttcttactacaattcttgcattgtctgaagcaagaatcccaggagtttacaatggtggtggttgggaaactgctcacgccactttctacggtggctctgatgcttctggaacaatgggaggagcttgtggttatggtaacttatacagccaaggctatggtgtgaacacggcggctttaagcacggctctgttcaacaatggttttagctgtggtgcttgttttgagctcaaatgtgctagtgatccaaaatggtgccattctggtagtccttcaatcttcatcactgcgactaatttctgtcctccgaactttgctcagcctagtgacaatggtggttggtgtaaccctcctagacctcactttgatcttgctatgcctatgtttctcaagatcgctgagtatcgtgccggaatcgtccccgtctctttccgccgagtgccatgccggaagagaggaggaataaggttcacaatcaacggtttccgttattttaacttggttctagtcactaacgtcgctggcgccggaaacatagtgcggctaggtgtgaaaggaacacatacttcgtggatgaccatgagtcgtaactggggacaaaactggcaatctaactcagttttggttggtcagtcactttcttttagagtcacaagcagtgaccgtagaagctcgacgtcgtggaacattgctccggcgaattggaagtttggtcagactttcatgggaaagaacttcagagtctgagggcattatcggaaactcatctatcaatattagtattttcattattactattaaaatttccagccgaaggcattagtaatttgagaaattttaatatatatatttatgttttttaagagaccaaaaaaaaaaaaaaagttcttacctcgggcggccgctctagaggatccaagcttacgtacgcgtgcatgcgacgtcatagtcgtattgaatatagacctttcaacctttt

SEQ ID NO: 85198 - DNA, 785 bp, Arabidopsis thaliana columbia
  unsure (1)..(785): unsure at all n locations
nnnnnnnnnnnnnnnnnnnnnnnnnnnncgttggggaagactatttgttcacagtgagctaccactatgcctttaagccttttccgcccgtccgcttgtttccgacttttagaaggaaggacaacattcgaagaacaaccacagtttctacgtttagcaactcattatttttaggcgccatcaagaatgggaaagactcctggtaaatggatcaagactttgcttctcgggaagaagtcgcctaagtcgaattcggataaccgaagccagaaactgaaatctgctaagaaagaagagctggtggaatcggtgacagaagatttgtcaaacttaacagttgatcctccggtggtttcatcacaaccagttccagcttctactgctcaaaatgtggtttctccaatcaatggtgatgagtccaaggataatctcgagtcaaggaatgacttgggagaagtcgagcttgaacaagctgcaattaaggttcaagctaccttcagagctcatcaggcacgtagagcatttccaactcttaaaggtatcatcaggctgcaggcagttatccgtggtcacttggtgagaagacaagccattgctacatattcatgtatatggggaattgtgaagtttcaggctcttgttcgtggccagagagctagatcttcagatattgcgattcagcttcagaaaaaacatatggaagcaagtgattcagaaagttttgcatcagacacgtgttgttggatgggtaatcccacaaagttcgtctttgttgataagcttct

SEQ ID NO: 85199 - DNA, 534 bp, Arabidopsis thaliana columbia
  unsure (1)..(534): unsure at all n locations
caacttcttgtggtattcctgatttccgaggccccaaaggaatttggacgttacagcgcgagggcaaagatttacctaaagcatctctgccatttcaccgtgcaatgccgagtatgccccatatggctttggttgaattagaaagagctggcattttaaaatttgttatcagtcagaatgtggatggcttacatcttcgatctggaataccaagagagaagctttctgaactgcatggagactcttttatggagatgtgcccatcatgtggagcagagtacctgcgtgatttcgaggtggaaactattggcattaaaaggagacatcaagaaagtgttctgttgaaaagtgtcggagctaaacttaaagataccggtcttgggtttggggggatgcttttcctccaaaagaaattgatcccttcgggggaggacctcaaaaaaggctnntccttggtnncctgttttgggtnccngttttcaggtaaccccntcttncaattttccntnaaagtnnnaaaaggtggggcaaacc

SEQ ID NO: 85200 - DNA, 571 bp, Arabidopsis thaliana columbia
  unsure (1)..(571): unsure at all n locations
ccnctttgaaaaaantnttttgggtgaanaanttggngggtcgacatccnatgntgaggcaaagctaaacctcttgcagcncctaaaccaatcctaaaccgaggcggccaatcctattcacccctatttgaatccaacaaccgagtgaagtgccccattagacatatacttgtaaacaaggaacttctcttcttccacaacggagaaaccaagaagcggtgctaagttaggatgacgaagctcccatagctgattcatctcataccgaaactccctttccccgagcttacacgtactcaaatgcttcaccgcaagcgctgaaccatccgggagaagcgccttataggtagtcccagtcctagtggaaacaataatgttctctgagttgaagttattagttgcagccatnaaatccccaagtttaactttaaccaaaggcttctgaaacaaagacacttgagtaagcttatgactacgaagtctctgcgctaaaccgctaactcctacttcggttaaaccgcttcttcgtctccttgtccacttcaaatgataataccaccaaattcccaaa

SEQ ID NO: 85201 - DNA, 461 bp, Arabidopsis thaliana columbia
  unsure (1)..(461): unsure at all n locations
ttnngnatccgnaaaccttnaaaganttgggcntaaggnttgatannccaccgtcttgtcaagatncaccccaatttgcagtgctgggtgaatctctcaaatacaatcagctaaaagctctctacacttgtcatcaccaaggaaagtcacccatctaggtgtctcaggagaatcagaaccctcacatttcacaccactctctaccttaccagagttaaatccaaggacaagattcttagcaaagctaccaacaacaactgaaacaaaaccagttccagcctctgagaaaaccttatcaatcactctatcaacaacactcgagtctgatgatttctcaattcctgaatcaccaatagacgattcggatttgtacccacgaaaggcaccaatagtcacagcctgagaaaccctagaaagcgaatccgtaaactcattcgaagttgtgatcttcgcgatctgct

SEQ ID NO: 85202 - DNA, 560 bp, Arabidopsis thaliana columbia
  unsure (1)..(560): unsure at all n locations
cacacacacatgttcttcgttgctgcttcgttgggttaaaaacttttcttttgtttcttgctttttgcaaagtcaaagataacaaataaataagaaaaatggagaatctaccacctggttatcgtcccaatgttggtgtttgtctaatcaactcggataatctggtatttgtagcttctagattgaatgttccaggagcatggcagatgccacagggaggcattgaagatggggaggatccaaagtcagcagccatgagagagttacaagaagaaactggtgttgtttcagctgaaatcgtctctgaggtcccaaattggttgacatatgattttccaccagcagtaaaagcaaaagttaaccgtctttggggcggtgaatggcatggtcaagctcagaaatggtatttagtgagactgaggaacgatgaggacgagaaagagatcaatcnaagcgaacaacgaagcggattcagagtttgcggagtggnaatagggcgaacagnaagaagtgggtngaaccaagcagtgggnttaacaaaaaggccaacctatgaagaa
